United States Patent Application Publication US 2016/0281171 A1 - sequence listing, part 4

SEQ ID NO: 71836 - DNA, 66 bp, Homo sapiens
ctctactcccaggttccctttatatgttaagatataatggctttgaggggggaaaaaataaaccta

SEQ ID NO: 71837 - DNA, 64 bp, Homo sapiens
aggttccctttatatgttaagatataatggctttgaggggggaaaaaataaacctaggggagag

SEQ ID NO: 71838 - DNA, 66 bp, Homo sapiens
tatgttaagatataatggctttgaggggggaaaaaataaacctaggggagaggggagtttcctgta

SEQ ID NO: 71839 - DNA, 65 bp, Homo sapiens
atataatggctttgaggggggaaaaaataaacctaggggagaggggagtttcctgtagtgctgtt

SEQ ID NO: 71840 - DNA, 67 bp, Homo sapiens
aaaaataaacctaggggagaggggagtttcctgtagtgctgtttcattagaggatttcagtaaatta

SEQ ID NO: 71841 - DNA, 72 bp, Homo sapiens
gggagtttcctgtagtgctgtttcattagaggatttcagtaaattaaattccacagctaattcaataaataa

SEQ ID NO: 71842 - DNA, 74 bp, Homo sapiens
ttcctgtagtgctgtttcattagaggatttcagtaaattaaattccacagctaattcaataaataatggtacat

SEQ ID NO: 71843 - DNA, 72 bp, Homo sapiens
gctgtttcattagaggatttcagtaaattaaattccacagctaattcaataaataatggtacatttaagtgt

SEQ ID NO: 71844 - DNA, 72 bp, Homo sapiens
tagaggatttcagtaaattaaattccacagctaattcaataaataatggtacatttaagtgttctgatttta

SEQ ID NO: 71845 - DNA, 71 bp, Homo sapiens
cagtaaattaaattccacagctaattcaataaataatggtacatttaagtgttctgattttaataatatat

SEQ ID NO: 71846 - DNA, 76 bp, Homo sapiens
tccacagctaattcaataaataatggtacatttaagtgttctgattttaataatatatttcacatttatccacaca

SEQ ID NO: 71847 - DNA, 75 bp, Homo sapiens
taatggtacatttaagtgttctgattttaataatatatttcacatttatccacacagtaacaatgtaatatgtta

SEQ ID NO: 71848 - DNA, 74 bp, Homo sapiens
acatttaagtgttctgattttaataatatatttcacatttatccacacagtaacaatgtaatatgttaatgtaa

SEQ ID NO: 71849 - DNA, 74 bp, Homo sapiens
atatatttcacatttatccacacagtaacaatgtaatatgttaatgtaaataaaattggttttgatactcagaa

SEQ ID NO: 71850 - DNA, 74 bp, Homo sapiens
ttcacatttatccacacagtaacaatgtaatatgttaatgtaaataaaattggttttgatactcagaaataaca

SEQ ID NO: 71851 - DNA, 71 bp, Homo sapiens
atccacacagtaacaatgtaatatgttaatgtaaataaaattggttttgatactcagaaataacaagaatt

SEQ ID NO: 71852 - DNA, 68 bp, Homo sapiens
taacaatgtaatatgttaatgtaaataaaattggttttgatactcagaaataacaagaatttaatttt

SEQ ID NO: 71853 - DNA, 65 bp, Homo sapiens
tttgtttacagtcctgggaaaagtaagaattatttgccaaaataagaggaaagaaaaccttagta

SEQ ID NO: 71854 - DNA, 67 bp, Homo sapiens
cagtcctgggaaaagtaagaattatttgccaaaataagaggaaagaaaaccttagtattattaatga

SEQ ID NO: 71855 - DNA, 67 bp, Homo sapiens
gtaagaattatttgccaaaataagaggaaagaaaaccttagtattattaatgagtttaccatagaat

SEQ ID NO: 71856 - DNA, 67 bp, Homo sapiens
atttgccaaaataagaggaaagaaaaccttagtattattaatgagtttaccatagaattgttggaaa

SEQ ID NO: 71857 - DNA, 69 bp, Homo sapiens
taagaggaaagaaaaccttagtattattaatgagtttaccatagaattgttggaaatactgaagacagg

SEQ ID NO: 71858 - DNA, 70 bp, Homo sapiens
ggaaagaaaaccttagtattattaatgagtttaccatagaattgttggaaatactgaagacaggtgcaat

SEQ ID NO: 71859 - DNA, 69 bp, Homo sapiens
catagaattgttggaaatactgaagacaggtgcaatttactaaacttttgtttttaaactattgtagag

SEQ ID NO: 71860 - DNA, 72 bp, Homo sapiens
tggaaatactgaagacaggtgcaatttactaaacttttgtttttaaactattgtagaggctgcattagaaga

SEQ ID NO: 71861 - DNA, 71 bp, Homo sapiens
tactgaagacaggtgcaatttactaaacttttgtttttaaactattgtagaggctgcattagaagaaaatg

SEQ ID NO: 71862 - DNA, 69 bp, Homo sapiens
caggtgcaatttactaaacttttgtttttaaactattgtagaggctgcattagaagaaaatgtttataa

SEQ ID NO: 71863 - DNA, 72 bp, Homo sapiens
aaacttttgtttttaaactattgtagaggctgcattagaagaaaatgtttataatgacagagcaactatgac

SEQ ID NO: 71864 - DNA, 74 bp, Homo sapiens
gtttttaaactattgtagaggctgcattagaagaaaatgtttataatgacagagcaactatgactatataaaaa

SEQ ID NO: 71865 - DNA, 78 bp, Homo sapiens
ctattgtagaggctgcattagaagaaaatgtttataatgacagagcaactatgactatataaaaaagctgaaattaga

SEQ ID NO: 71866 - DNA, 77 bp, Homo sapiens
gaggctgcattagaagaaaatgtttataatgacagagcaactatgactatataaaaaagctgaaattagaactgtgt

SEQ ID NO: 71867 - DNA, 76 bp, Homo sapiens
gaaaatgtttataatgacagagcaactatgactatataaaaaagctgaaattagaactgtgtttagaaatagatca

SEQ ID NO: 71868 - DNA, 75 bp, Homo sapiens
ataatgacagagcaactatgactatataaaaaagctgaaattagaactgtgtttagaaatagatcagtaacccag

SEQ ID NO: 71869 - DNA, 76 bp, Homo sapiens
gacagagcaactatgactatataaaaaagctgaaattagaactgtgtttagaaatagatcagtaacccagtgccaa

SEQ ID NO: 71870 - DNA, 75 bp, Homo sapiens
ctatgactatataaaaaagctgaaattagaactgtgtttagaaatagatcagtaacccagtgccaaggatgccaa

SEQ ID NO: 71871 - DNA, 75 bp, Homo sapiens
aaaaagctgaaattagaactgtgtttagaaatagatcagtaacccagtgccaaggatgccaagctgccaccatgg

SEQ ID NO: 71872 - DNA, 77 bp, Homo sapiens
aaattagaactgtgtttagaaatagatcagtaacccagtgccaaggatgccaagctgccaccatggtcttggctctc

SEQ ID NO: 71873 - DNA, 77 bp, Homo sapiens
actgtgtttagaaatagatcagtaacccagtgccaaggatgccaagctgccaccatggtcttggctctcccacaacc

SEQ ID NO: 71874 - DNA, 77 bp, Homo sapiens
aaatagatcagtaacccagtgccaaggatgccaagctgccaccatggtcttggctctcccacaacccagtgtttctg

SEQ ID NO: 71875 - DNA, 71 bp, Homo sapiens
aagctgccaccatggtcttggctctcccacaacccagtgtttctggggtaagtttcacagtttctaggccc

SEQ ID NO: 71876 - DNA, 73 bp, Homo sapiens
ttggctctcccacaacccagtgtttctggggtaagtttcacagtttctaggccctggaatagcaggcagtgta

SEQ ID NO: 71877 - DNA, 71 bp, Homo sapiens
acccagtgtttctggggtaagtttcacagtttctaggccctggaatagcaggcagtgtaagcctttgataa

SEQ ID NO: 71878 - DNA, 70 bp, Homo sapiens
tttctggggtaagtttcacagtttctaggccctggaatagcaggcagtgtaagcctttgataactttagt

SEQ ID NO: 71879 - DNA, 72 bp, Homo sapiens
tttcacagtttctaggccctggaatagcaggcagtgtaagcctttgataactttagttcgatgtttttcttg

SEQ ID NO: 71880 - DNA, 69 bp, Homo sapiens
agtttctaggccctggaatagcaggcagtgtaagcctttgataactttagttcgatgtttttcttgttt

SEQ ID NO: 71881 - DNA, 74 bp, Homo sapiens
tgtttttgtttgttggtttggtgcatatgatagtgggtgttatgctattttgctcttcccatcaaaataaagaa

SEQ ID NO: 71882 - DNA, 74 bp, Homo sapiens
gtttgttggtttggtgcatatgatagtgggtgttatgctattttgctcttcccatcaaaataaagaaacttcca

SEQ ID NO: 71883 - DNA, 74 bp, Homo sapiens
gtttggtgcatatgatagtgggtgttatgctattttgctcttcccatcaaaataaagaaacttccagaggttta

SEQ ID NO: 71884 - DNA, 70 bp, Homo sapiens
gatagtgggtgttatgctattttgctcttcccatcaaaataaagaaacttccagaggtttactgttaaaa

SEQ ID NO: 71885 - DNA, 69 bp, Homo sapiens
tgctcttcccatcaaaataaagaaacttccagaggtttactgttaaaaatactgatatttccataaacg

SEQ ID NO: 71886 - DNA, 64 bp, Homo sapiens
agaaacttccagaggtttactgttaaaaatactgatatttccataaacgggtttaccaagggtg

SEQ ID NO: 71887 - DNA, 65 bp, Homo sapiens
cttccagaggtttactgttaaaaatactgatatttccataaacgggtttaccaagggtgtagtat

SEQ ID NO: 71888 - DNA, 69 bp, Homo sapiens
tgttaaaaatactgatatttccataaacgggtttaccaagggtgtagtatttcataccgcctgaaatga

SEQ ID NO: 71889 - DNA, 72 bp, Homo sapiens
aaatactgatatttccataaacgggtttaccaagggtgtagtatttcataccgcctgaaatgatcagcattg

SEQ ID NO: 71890 - DNA, 74 bp, Homo sapiens
tatttccataaacgggtttaccaagggtgtagtatttcataccgcctgaaatgatcagcattggcacaaatcaa

SEQ ID NO: 71891 - DNA, 73 bp, Homo sapiens
aacgggtttaccaagggtgtagtatttcataccgcctgaaatgatcagcattggcacaaatcaaaattcagcc

SEQ ID NO: 71892 - DNA, 77 bp, Homo sapiens
aagggtgtagtatttcataccgcctgaaatgatcagcattggcacaaatcaaaattcagccgcctttgaaatgcaaa

SEQ ID NO: 71893 - DNA, 76 bp, Homo sapiens
agtatttcataccgcctgaaatgatcagcattggcacaaatcaaaattcagccgcctttgaaatgcaaaaatacct

SEQ ID NO: 71894 - DNA, 77 bp, Homo sapiens
ctgaaatgatcagcattggcacaaatcaaaattcagccgcctttgaaatgcaaaaatacctttgactagtaagtaca

SEQ ID NO: 71895 - DNA, 77 bp, Homo sapiens
atgatcagcattggcacaaatcaaaattcagccgcctttgaaatgcaaaaatacctttgactagtaagtacatccta

SEQ ID NO: 71896 - DNA, 71 bp, Homo sapiens
acaaatcaaaattcagccgcctttgaaatgcaaaaatacctttgactagtaagtacatcctaggagtttga

SEQ ID NO: 71897 - DNA, 64 bp, Homo sapiens
gcaaaaatacctttgactagtaagtacatcctaggagtttgaaaacttaactaaggtttaaaat

SEQ ID NO: 71898 - DNA, 63 bp, Homo sapiens
cctttgactagtaagtacatcctaggagtttgaaaacttaactaaggtttaaaatttaccttg

SEQ ID NO: 71899 - DNA, 62 bp, Homo sapiens
ctagtaagtacatcctaggagtttgaaaacttaactaaggtttaaaatttaccttgtttaaa

SEQ ID NO: 71900 - DNA, 63 bp, Homo sapiens
catcctaggagtttgaaaacttaactaaggtttaaaatttaccttgtttaaagaacttctgac

SEQ ID NO: 71901 - DNA, 62 bp, Homo sapiens
gtttgaaaacttaactaaggtttaaaatttaccttgtttaaagaacttctgacttttgagga

SEQ ID NO: 71902 - DNA, 64 bp, Homo sapiens
taaggtttaaaatttaccttgtttaaagaacttctgacttttgaggaaaatctagctttccaag

SEQ ID NO: 71903 - DNA, 65 bp, Homo sapiens
aatttaccttgtttaaagaacttctgacttttgaggaaaatctagctttccaagtaactaaaatg

SEQ ID NO: 71904 - DNA, 69 bp, Homo sapiens
accttgtttaaagaacttctgacttttgaggaaaatctagctttccaagtaactaaaatgtacatgaga

SEQ ID NO: 71905 - DNA, 72 bp, Homo sapiens
ttttgaggaaaatctagctttccaagtaactaaaatgtacatgagataaacctctcaccactatgtgtccct

SEQ ID NO: 71906 - DNA, 73 bp, Homo sapiens
ttccaagtaactaaaatgtacatgagataaacctctcaccactatgtgtcccttgagaaatgcaacacttttt

SEQ ID NO: 71907 - DNA, 74 bp, Homo sapiens
aactaaaatgtacatgagataaacctctcaccactatgtgtcccttgagaaatgcaacacttttttagtcttca

SEQ ID NO: 71908 - DNA, 76 bp, Homo sapiens
atgagataaacctctcaccactatgtgtcccttgagaaatgcaacacttttttagtcttcatacttgtaatctata

SEQ ID NO: 71909 - DNA, 73 bp, Homo sapiens
aacctctcaccactatgtgtcccttgagaaatgcaacacttttttagtcttcatacttgtaatctataaaaga

SEQ ID NO: 71910 - DNA, 73 bp, Homo sapiens
ccactatgtgtcccttgagaaatgcaacacttttttagtcttcatacttgtaatctataaaagaaattctgaa

SEQ ID NO: 71911 - DNA, 71 bp, Homo sapiens
ccttgagaaatgcaacacttttttagtcttcatacttgtaatctataaaagaaattctgaagtttagacca

SEQ ID NO: 71912 - DNA, 71 bp, Homo sapiens
tgcaacacttttttagtcttcatacttgtaatctataaaagaaattctgaagtttagaccaagttgcccat

SEQ ID NO: 71913 - DNA, 74 bp, Homo sapiens
tagtcttcatacttgtaatctataaaagaaattctgaagtttagaccaagttgcccatttctgcgtaattgaca

SEQ ID NO: 71914 - DNA, 72 bp, Homo sapiens
tacttgtaatctataaaagaaattctgaagtttagaccaagttgcccatttctgcgtaattgacataagttc

SEQ ID NO: 71915 - DNA, 70 bp, Homo sapiens
ctataaaagaaattctgaagtttagaccaagttgcccatttctgcgtaattgacataagttctgttaaaa

SEQ ID NO: 71916 - DNA, 70 bp, Homo sapiens
aagaaattctgaagtttagaccaagttgcccatttctgcgtaattgacataagttctgttaaaaatatta

SEQ ID NO: 71917 - DNA, 69 bp, Homo sapiens
gtttagaccaagttgcccatttctgcgtaattgacataagttctgttaaaaatattataagtaattcgt

SEQ ID NO: 71918 - DNA, 69 bp, Homo sapiens
tctgcgtaattgacataagttctgttaaaaatattataagtaattcgtttcggtttgtagatgtttccc

SEQ ID NO: 71919 - DNA, 67 bp, Homo sapiens
gacataagttctgttaaaaatattataagtaattcgtttcggtttgtagatgtttcccctgacttgt

SEQ ID NO: 71920 - DNA, 66 bp, Homo sapiens
ctgttaaaaatattataagtaattcgtttcggtttgtagatgtttcccctgacttgttaaagagga

SEQ ID NO: 71921 - DNA, 66 bp, Homo sapiens
tattataagtaattcgtttcggtttgtagatgtttcccctgacttgttaaagaggaaaccaggaac

SEQ ID NO: 71922 - DNA, 68 bp, Homo sapiens
taagtaattcgtttcggtttgtagatgtttcccctgacttgttaaagaggaaaccaggaactcagtca

SEQ ID NO: 71923 - DNA, 71 bp, Homo sapiens
gtagatgtttcccctgacttgttaaagaggaaaccaggaactcagtcatgtttttgtcctggataatctac

SEQ ID NO: 71924 - DNA, 74 bp, Homo sapiens
tgacttgttaaagaggaaaccaggaactcagtcatgtttttgtcctggataatctacctgttatgccagtactc

SEQ ID NO: 71925 - DNA, 73 bp, Homo sapiens
ttaaagaggaaaccaggaactcagtcatgtttttgtcctggataatctacctgttatgccagtactcccatcc

SEQ ID NO: 71926 - DNA, 75 bp, Homo sapiens
aggaactcagtcatgtttttgtcctggataatctacctgttatgccagtactcccatccgaggggcatgccctta

SEQ ID NO: 71927 - DNA, 77 bp, Homo sapiens
tcatgtttttgtcctggataatctacctgttatgccagtactcccatccgaggggcatgcccttagttgcccagatg

SEQ ID NO: 71928 - DNA, 76 bp, Homo sapiens
tttttgtcctggataatctacctgttatgccagtactcccatccgaggggcatgcccttagttgcccagatggaga

SEQ ID NO: 71929 - DNA, 79 bp, Homo sapiens
taatctacctgttatgccagtactcccatccgaggggcatgcccttagttgcccagatggagatgcagttcagtagatt

SEQ ID NO: 71930 - DNA, 79 bp, Homo sapiens
tgttatgccagtactcccatccgaggggcatgcccttagttgcccagatggagatgcagttcagtagatttggggcaaa

SEQ ID NO: 71931 - DNA, 77 bp, Homo sapiens
agtactcccatccgaggggcatgcccttagttgcccagatggagatgcagttcagtagatttggggcaaagtggcta

SEQ ID NO: 71932 - DNA, 81 bp, Homo sapiens
atgcccttagttgcccagatggagatgcagttcagtagatttggggcaaagtggctacagctctgtcttccattcactcaa

SEQ ID NO: 71933 - DNA, 84 bp, Homo sapiens
ccagatggagatgcagttcagtagatttggggcaaagtggctacagctctgtcttccattcactcaacacctgttcatgactga

SEQ ID NO: 71934 - DNA, 82 bp, Homo sapiens
agatgcagttcagtagatttggggcaaagtggctacagctctgtcttccattcactcaacacctgttcatgactgagccagg

SEQ ID NO: 71935 - DNA, 81 bp, Homo sapiens
gttcagtagatttggggcaaagtggctacagctctgtcttccattcactcaacacctgttcatgactgagccaggtgccca

SEQ ID NO: 71936 - DNA, 82 bp, Homo sapiens
ggcaaagtggctacagctctgtcttccattcactcaacacctgttcatgactgagccaggtgcccaggacacatcctaaaca

SEQ ID NO: 71937 - DNA, 83 bp, Homo sapiens
ctacagctctgtcttccattcactcaacacctgttcatgactgagccaggtgcccaggacacatcctaaacagtcagcttcta

SEQ ID NO: 71938 - DNA, 80 bp, Homo sapiens
attcactcaacacctgttcatgactgagccaggtgcccaggacacatcctaaacagtcagcttctatcctgtgtcctagt

SEQ ID NO: 71939 - DNA, 81 bp, Homo sapiens
atgactgagccaggtgcccaggacacatcctaaacagtcagcttctatcctgtgtcctagttggggagacagagtgccagc

SEQ ID NO: 71940 - DNA, 78 bp, Homo sapiens
aggtgcccaggacacatcctaaacagtcagcttctatcctgtgtcctagttggggagacagagtgccagccagcaacc

SEQ ID NO: 71941 - DNA, 75 bp, Homo sapiens
acatcctaaacagtcagcttctatcctgtgtcctagttggggagacagagtgccagccagcaaccctcccaggtt

SEQ ID NO: 71942 - DNA, 75 bp, Homo sapiens
ctaaacagtcagcttctatcctgtgtcctagttggggagacagagtgccagccagcaaccctcccaggtttgtag

SEQ ID NO: 71943 - DNA, 72 bp, Homo sapiens
agcttctatcctgtgtcctagttggggagacagagtgccagccagcaaccctcccaggtttgtaggttttag

SEQ ID NO: 71944 - DNA, 68 bp, Homo sapiens
tcctagttggggagacagagtgccagccagcaaccctcccaggtttgtaggttttaggggttttcagt

SEQ ID NO: 71945 - DNA, 67 bp, Homo sapiens
gggagacagagtgccagccagcaaccctcccaggtttgtaggttttaggggttttcagttttgtttg

SEQ ID NO: 71946 - DNA, 63 bp, Homo sapiens
agtgccagccagcaaccctcccaggtttgtaggttttaggggttttcagttttgtttgggttt

SEQ ID NO: 71947 - DNA, 59 bp, Homo sapiens
agcaaccctcccaggtttgtaggttttaggggttttcagttttgtttgggttttttgtt

SEQ ID NO: 71948 - DNA, 77 bp, Homo sapiens
tgtttttgtttctacatccttccccgactcccaggcataatgaggcatgtcttactcaatgttatgcaatggattta

SEQ ID NO: 71949 - DNA, 77 bp, Homo sapiens
cttccccgactcccaggcataatgaggcatgtcttactcaatgttatgcaatggatttaggcaaaaattcattctta

SEQ ID NO: 71950 - DNA, 81 bp, Homo sapiens
ccaggcataatgaggcatgtcttactcaatgttatgcaatggatttaggcaaaaattcattcttagtgtcagccacacaat

SEQ ID NO: 71951 - DNA, 77 bp, Homo sapiens
aatgaggcatgtcttactcaatgttatgcaatggatttaggcaaaaattcattcttagtgtcagccacacaattttt

SEQ ID NO: 71952 - DNA, 75 bp, Homo sapiens
catgtcttactcaatgttatgcaatggatttaggcaaaaattcattcttagtgtcagccacacaattttttttaa

SEQ ID NO: 71953 - DNA, 75 bp, Homo sapiens
gttatgcaatggatttaggcaaaaattcattcttagtgtcagccacacaattttttttaatgcagtatattcacc

SEQ ID NO: 71954 - DNA, 75 bp, Homo sapiens
gcaatggatttaggcaaaaattcattcttagtgtcagccacacaattttttttaatgcagtatattcacctgtaa

SEQ ID NO: 71955 - DNA, 73 bp, Homo sapiens
ggcaaaaattcattcttagtgtcagccacacaattttttttaatgcagtatattcacctgtaaatagtttgtg

SEQ ID NO: 71956 - DNA, 73 bp, Homo sapiens
cattcttagtgtcagccacacaattttttttaatgcagtatattcacctgtaaatagtttgtgtaaaatttga

SEQ ID NO: 71957 - DNA, 71 bp, Homo sapiens
gtgtcagccacacaattttttttaatgcagtatattcacctgtaaatagtttgtgtaaaatttgacaaaaa

SEQ ID NO: 71958 - DNA, 67 bp, Homo sapiens
caattttttttaatgcagtatattcacctgtaaatagtttgtgtaaaatttgacaaaaaaagtatat

SEQ ID NO: 71959 - DNA, 70 bp, Homo sapiens
tttaatgcagtatattcacctgtaaatagtttgtgtaaaatttgacaaaaaaagtatatttactatactg

SEQ ID NO: 71960 - DNA, 73 bp, Homo sapiens
tcacctgtaaatagtttgtgtaaaatttgacaaaaaaagtatatttactatactgtaaatatatgtgatgata

SEQ ID NO: 71961 - DNA, 73 bp, Homo sapiens
tgtaaatagtttgtgtaaaatttgacaaaaaaagtatatttactatactgtaaatatatgtgatgatatattg

SEQ ID NO: 71962 - DNA, 73 bp, Homo sapiens
caaaaaaagtatatttactatactgtaaatatatgtgatgatatattgtattattttgcttttttgtaaagca

SEQ ID NO: 71963 - DNA, 78 bp, Homo sapiens
atatttactatactgtaaatatatgtgatgatatattgtattattttgcttttttgtaaagcagttagttgctgcaca

SEQ ID NO: 71964 - DNA, 80 bp, Homo sapiens
tactgtaaatatatgtgatgatatattgtattattttgcttttttgtaaagcagttagttgctgcacatggataacaaca

SEQ ID NO: 71965 - DNA, 77 bp, Homo sapiens
aaatatatgtgatgatatattgtattattttgcttttttgtaaagcagttagttgctgcacatggataacaacaaaa

SEQ ID NO: 71966 - DNA, 74 bp, Homo sapiens
gcagttagttgctgcacatggataacaacaaaaatttgattattctcgtgttagtattgttaacttctttttgc

SEQ ID NO: 71967 - DNA, 73 bp, Homo sapiens
catggataacaacaaaaatttgattattctcgtgttagtattgttaacttctttttgcgactgcgttacatca

SEQ ID NO: 71968 - DNA, 70 bp, Homo sapiens
caaaaatttgattattctcgtgttagtattgttaacttctttttgcgactgcgttacatcatttaaagaa

SEQ ID NO: 71969 - DNA, 74 bp, Homo sapiens
ttgattattctcgtgttagtattgttaacttctttttgcgactgcgttacatcatttaaagaaaatgctgtgta

SEQ ID NO: 71970 - DNA, 72 bp, Homo sapiens
tcgtgttagtattgttaacttctttttgcgactgcgttacatcatttaaagaaaatgctgtgtattgtaaac

SEQ ID NO: 71971 - DNA, 71 bp, Homo sapiens
gttaacttctttttgcgactgcgttacatcatttaaagaaaatgctgtgtattgtaaacttaaattgtata

SEQ ID NO: 71972 - DNA, 75 bp, Homo sapiens
ttgcgactgcgttacatcatttaaagaaaatgctgtgtattgtaaacttaaattgtatatgataacttactgtcc

SEQ ID NO: 71973 - DNA, 73 bp, Homo sapiens
ctgcgttacatcatttaaagaaaatgctgtgtattgtaaacttaaattgtatatgataacttactgtcctttc

SEQ ID NO: 71974 - DNA, 71 bp, Homo sapiens
ttaaagaaaatgctgtgtattgtaaacttaaattgtatatgataacttactgtcctttccatccgggccta

SEQ ID NO: 71975 - DNA, 72 bp, Homo sapiens
atgctgtgtattgtaaacttaaattgtatatgataacttactgtcctttccatccgggcctaaactttggca

SEQ ID NO: 71976 - DNA, 68 bp, Homo sapiens
attgtaaacttaaattgtatatgataacttactgtcctttccatccgggcctaaactttggcagttcc

SEQ ID NO: 71977 - DNA, 70 bp, Homo sapiens
ttaaattgtatatgataacttactgtcctttccatccgggcctaaactttggcagttcctttgtctacaa

SEQ ID NO: 71978 - DNA, 68 bp, Homo sapiens
tactgtcctttccatccgggcctaaactttggcagttcctttgtctacaaccttgttaatactgtaaa

SEQ ID NO: 71979 - DNA, 68 bp, Homo sapiens
tttccatccgggcctaaactttggcagttcctttgtctacaaccttgttaatactgtaaacagttgta

SEQ ID NO: 71980 - DNA, 69 bp, Homo sapiens
taaactttggcagttcctttgtctacaaccttgttaatactgtaaacagttgtacgccagcaggaaaaa

SEQ ID NO: 71981 - DNA, 71 bp, Homo sapiens
tttgtctacaaccttgttaatactgtaaacagttgtacgccagcaggaaaaatactgcccaacagacaaaa

SEQ ID NO: 71982 - DNA, 73 bp, Homo sapiens
accttgttaatactgtaaacagttgtacgccagcaggaaaaatactgcccaacagacaaaatcgatcattgta

SEQ ID NO: 71983 - DNA, 72 bp, Homo sapiens
atactgtaaacagttgtacgccagcaggaaaaatactgcccaacagacaaaatcgatcattgtaggggaaaa

SEQ ID NO: 71984 - DNA, 74 bp, Homo sapiens
ttgtacgccagcaggaaaaatactgcccaacagacaaaatcgatcattgtaggggaaaatcatagaaatccatt

SEQ ID NO: 71985 - DNA, 74 bp, Homo sapiens
caggaaaaatactgcccaacagacaaaatcgatcattgtaggggaaaatcatagaaatccatttcagatcttta

SEQ ID NO: 71986 - DNA, 74 bp, Homo sapiens
aatactgcccaacagacaaaatcgatcattgtaggggaaaatcatagaaatccatttcagatctttattgttcc

SEQ ID NO: 71987 - DNA, 73 bp, Homo sapiens
aacagacaaaatcgatcattgtaggggaaaatcatagaaatccatttcagatctttattgttcctcaccccat

SEQ ID NO: 71988 - DNA, 72 bp, Homo sapiens
aatcgatcattgtaggggaaaatcatagaaatccatttcagatctttattgttcctcaccccattttcctcc

SEQ ID NO: 71989 - DNA, 72 bp, Homo sapiens
gggaaaatcatagaaatccatttcagatctttattgttcctcaccccattttcctccttgtgtatgtacttc

SEQ ID NO: 71990 - DNA, 72 bp, Homo sapiens
aatcatagaaatccatttcagatctttattgttcctcaccccattttcctccttgtgtatgtacttccccca

SEQ ID NO: 71991 - DNA, 66 bp, Homo sapiens
atttcagatctttattgttcctcaccccattttcctccttgtgtatgtacttcccccacccccctt

SEQ ID NO: 71992 - DNA, 63 bp, Homo sapiens
atctttattgttcctcaccccattttcctccttgtgtatgtacttcccccacccccctttttt

SEQ ID NO: 71993 - DNA, 62 bp, Homo sapiens
gttcctcaccccattttcctccttgtgtatgtacttcccccacccccctttttttaagtaaa

SEQ ID NO: 71994 - DNA, 69 bp, Homo sapiens
tgtatgtacttcccccacccccctttttttaagtaaaatgtaaattcaatctgctctaagatatgagga

SEQ ID NO: 71995 - DNA, 70 bp, Homo sapiens
ccctttttttaagtaaaatgtaaattcaatctgctctaagatatgaggagttatttaatttcttcagatg

SEQ ID NO: 71996 - DNA, 74 bp, Homo sapiens
aggcatcttgggaatttaccttcattactaattctcccttgtctaccagtagcacttcttaacctgctcactgc

SEQ ID NO: 71997 - DNA, 75 bp, Homo sapiens
aatttaccttcattactaattctcccttgtctaccagtagcacttcttaacctgctcactgcccatcagaacagc

SEQ ID NO: 71998 - DNA, 78 bp, Homo sapiens
cttcattactaattctcccttgtctaccagtagcacttcttaacctgctcactgcccatcagaacagcctctgacaaa

SEQ ID NO: 71999 - DNA, 81 bp, Homo sapiens
taattctcccttgtctaccagtagcacttcttaacctgctcactgcccatcagaacagcctctgacaaagctgcatccaaa

SEQ ID NO: 72000 - DNA, 80 bp, Homo sapiens
ttgtctaccagtagcacttcttaacctgctcactgcccatcagaacagcctctgacaaagctgcatccaaattctttaaa

SEQ ID NO: 72001 - DNA, 80 bp, Homo sapiens
tagcacttcttaacctgctcactgcccatcagaacagcctctgacaaagctgcatccaaattctttaaagggcaattcat

SEQ ID NO: 72002 - DNA, 79 bp, Homo sapiens
ttaacctgctcactgcccatcagaacagcctctgacaaagctgcatccaaattctttaaagggcaattcattgccccaa

SEQ ID NO: 72003 - DNA, 77 bp, Homo sapiens
cccatcagaacagcctctgacaaagctgcatccaaattctttaaagggcaattcattgccccaagtaatctgccaaa

SEQ ID NO: 72004 - DNA, 75 bp, Homo sapiens
acagcctctgacaaagctgcatccaaattctttaaagggcaattcattgccccaagtaatctgccaaacctgtct

SEQ ID NO: 72005 - DNA, 74 bp, Homo sapiens
acaaagctgcatccaaattctttaaagggcaattcattgccccaagtaatctgccaaacctgtcttcatttgga

SEQ ID NO: 72006 - DNA, 72 bp, Homo sapiens
tccaaattctttaaagggcaattcattgccccaagtaatctgccaaacctgtcttcatttggaaatcagtct

SEQ ID NO: 72007 - DNA, 73 bp, Homo sapiens
attctttaaagggcaattcattgccccaagtaatctgccaaacctgtcttcatttggaaatcagtcttcatat

SEQ ID NO: 72008 - DNA, 76 bp, Homo sapiens
attcattgccccaagtaatctgccaaacctgtcttcatttggaaatcagtcttcatattcaggtgagttccactta

SEQ ID NO: 72009 - DNA, 73 bp, Homo sapiens
ccaagtaatctgccaaacctgtcttcatttggaaatcagtcttcatattcaggtgagttccacttaagaccct

SEQ ID NO: 72010 - DNA, 74 bp, Homo sapiens
taatctgccaaacctgtcttcatttggaaatcagtcttcatattcaggtgagttccacttaagacccttttagc

SEQ ID NO: 72011 - DNA, 72 bp, Homo sapiens
cagttctttaaaagaaattagttttgctttataaaagtcactatgttgtcctcagttttctctcattgctgc

SEQ ID NO: 72012 - DNA, 72 bp, Homo sapiens
aagaaattagttttgctttataaaagtcactatgttgtcctcagttttctctcattgctgcttatttttctc

SEQ ID NO: 72013 - DNA, 76 bp, Homo sapiens
attagttttgctttataaaagtcactatgttgtcctcagttttctctcattgctgcttatttttctccacacagca

SEQ ID NO: 72014 - DNA, 81 bp, Homo sapiens
ctttataaaagtcactatgttgtcctcagttttctctcattgctgcttatttttctccacacagcactgctcagcacgcag

SEQ ID NO: 72015 - DNA, 85 bp, Homo sapiens
actatgttgtcctcagttttctctcattgctgcttatttttctccacacagcactgctcagcacgcaggcatgtgaggaagctgg

SEQ ID NO: 72016 - DNA, 85 bp, Homo sapiens
tcagttttctctcattgctgcttatttttctccacacagcactgctcagcacgcaggcatgtgaggaagctgggcttaaaggaga

SEQ ID NO: 72017 - DNA, 85 bp, Homo sapiens
tttctctcattgctgcttatttttctccacacagcactgctcagcacgcaggcatgtgaggaagctgggcttaaaggagactcca

SEQ ID NO: 72018 - DNA, 83 bp, Homo sapiens
cttatttttctccacacagcactgctcagcacgcaggcatgtgaggaagctgggcttaaaggagactccagcaaatggagaga

SEQ ID NO: 72019 - DNA, 85 bp, Homo sapiens
ttttctccacacagcactgctcagcacgcaggcatgtgaggaagctgggcttaaaggagactccagcaaatggagagacagacca

SEQ ID NO: 72020 - DNA, 81 bp, Homo sapiens
actgctcagcacgcaggcatgtgaggaagctgggcttaaaggagactccagcaaatggagagacagaccacagtcctgggt

SEQ ID NO: 72021 - DNA, 77 bp, Homo sapiens
acgcaggcatgtgaggaagctgggcttaaaggagactccagcaaatggagagacagaccacagtcctgggttggaaa

SEQ ID NO: 72022 - DNA, 77 bp, Homo sapiens
atgtgaggaagctgggcttaaaggagactccagcaaatggagagacagaccacagtcctgggttggaaagctgaata

SEQ ID NO: 72023 - DNA, 71 bp, Homo sapiens
aatcagagcgccgggcgggggaagtgggcggagcgaggccagggtagggtgagcggcctccgaagcggagc

SEQ ID NO: 72024 - DNA, 68 bp, Homo sapiens
agcgccgggcgggggaagtgggcggagcgaggccagggtagggtgagcggcctccgaagcggagcggg

SEQ ID NO: 72025 - DNA, 71 bp, Homo sapiens
aagtgggcggagcgaggccagggtagggtgagcggcctccgaagcggagcggggctctgaggagacacttt

SEQ ID NO: 72026 - DNA, 70 bp, Homo sapiens
ggcggagcgaggccagggtagggtgagcggcctccgaagcggagcggggctctgaggagacacttttttt

SEQ ID NO: 72027 - DNA, 67 bp, Homo sapiens
agggtagggtgagcggcctccgaagcggagcggggctctgaggagacactttttttttcctccctcc

SEQ ID NO: 72028 - DNA, 67 bp, Homo sapiens
cttcccctctcctcccctctctcctccttcccccctcggtccgccggagcctgctggggcgagcggt

SEQ ID NO: 72029 - DNA, 71 bp, Homo sapiens
tctcctcccctctctcctccttcccccctcggtccgccggagcctgctggggcgagcggttggtattgcag

SEQ ID NO: 72030 - DNA, 72 bp, Homo sapiens
ctcctccttcccccctcggtccgccggagcctgctggggcgagcggttggtattgcaggcgcttgctctccg

SEQ ID NO: 72031 - DNA, 71 bp, Homo sapiens
ccccctcggtccgccggagcctgctggggcgagcggttggtattgcaggcgcttgctctccggggccgccc

SEQ ID NO: 72032 - DNA, 74 bp, Homo sapiens
tccgccggagcctgctggggcgagcggttggtattgcaggcgcttgctctccggggccgcccggcgggtagctg

SEQ ID NO: 72033 - DNA, 73 bp, Homo sapiens
ggagcctgctggggcgagcggttggtattgcaggcgcttgctctccggggccgcccggcgggtagctggcggg

SEQ ID NO: 72034 - DNA, 70 bp, Homo sapiens
gggcgagcggttggtattgcaggcgcttgctctccggggccgcccggcgggtagctggcggggggaggag

SEQ ID NO: 72035 - DNA, 72 bp, Homo sapiens
gtattgcaggcgcttgctctccggggccgcccggcgggtagctggcggggggaggaggcaggaaccgcgatg

SEQ ID NO: 72036 - DNA, 72 bp, Homo sapiens
gcttgctctccggggccgcccggcgggtagctggcggggggaggaggcaggaaccgcgatggcgcctcagaa

SEQ ID NO: 72037 - DNA, 71 bp, Homo sapiens
tctccggggccgcccggcgggtagctggcggggggaggaggcaggaaccgcgatggcgcctcagaagcacg

SEQ ID NO: 72038 - DNA, 70 bp, Homo sapiens
ccgcccggcgggtagctggcggggggaggaggcaggaaccgcgatggcgcctcagaagcacggcggtggg

SEQ ID NO: 72039 - DNA, 70 bp, Homo sapiens
ggtagctggcggggggaggaggcaggaaccgcgatggcgcctcagaagcacggcggtgggggagggggcg

SEQ ID NO: 72040 - DNA, 72 bp, Homo sapiens
gaggaggcaggaaccgcgatggcgcctcagaagcacggcggtgggggagggggcggctcggggcccagcgcg

SEQ ID NO: 72041 - DNA, 69 bp, Homo sapiens
aggaaccgcgatggcgcctcagaagcacggcggtgggggagggggcggctcggggcccagcgcggggtc

SEQ ID NO: 72042 - DNA, 67 bp, Homo sapiens
atggcgcctcagaagcacggcggtgggggagggggcggctcggggcccagcgcggggtccgggggag

SEQ ID NO: 72043 - DNA, 67 bp, Homo sapiens
tcagaagcacggcggtgggggagggggcggctcggggcccagcgcggggtccgggggaggcggcttc

SEQ ID NO: 72044 - DNA, 62 bp, Homo sapiens
cggcggtgggggagggggcggctcggggcccagcgcggggtccgggggaggcggcttcgggg

SEQ ID NO: 72045 - DNA, 64 bp, Homo sapiens
gggcggctcggggcccagcgcggggtccgggggaggcggcttcgggggttcggcggcggtggcg

SEQ ID NO: 72046 - DNA, 65 bp, Homo sapiens
gggcccagcgcggggtccgggggaggcggcttcgggggttcggcggcggtggcggcggcgacggc

SEQ ID NO: 72047 - DNA, 64 bp, Homo sapiens
agcgcggggtccgggggaggcggcttcgggggttcggcggcggtggcggcggcgacggcttcgg

SEQ ID NO: 72048 - DNA, 67 bp, Homo sapiens
gggaggcggcttcgggggttcggcggcggtggcggcggcgacggcttcgggcggcaaatccggcggc

SEQ ID NO: 72049 - DNA, 69 bp, Homo sapiens
ttcgggggttcggcggcggtggcggcggcgacggcttcgggcggcaaatccggcggcgggagctgtgga

SEQ ID NO: 72050 - DNA, 68 bp, Homo sapiens
gggttcggcggcggtggcggcggcgacggcttcgggcggcaaatccggcggcgggagctgtggagggg

SEQ ID NO: 72051 - DNA, 70 bp, Homo sapiens
ggtggcggcggcgacggcttcgggcggcaaatccggcggcgggagctgtggagggggtggcagttactcg

SEQ ID NO: 72052 - DNA, 69 bp, Homo sapiens
acggcttcgggcggcaaatccggcggcgggagctgtggagggggtggcagttactcggcctcctcctcc

SEQ ID NO: 72053 - DNA, 72 bp, Homo sapiens
ctcctcctccgcggcggcagcggcgggggctgcggtgttaccggtgaagaagccgaaaatggagcacgtcca

SEQ ID NO: 72054 - DNA, 74 bp, Homo sapiens
gcggcggcagcggcgggggctgcggtgttaccggtgaagaagccgaaaatggagcacgtccaggctgaccacga

SEQ ID NO: 72055 - DNA, 71 bp, Homo sapiens
cggcgggggctgcggtgttaccggtgaagaagccgaaaatggagcacgtccaggctgaccacgagcttttc

SEQ ID NO: 72056 - DNA, 72 bp, Homo sapiens
tgcggtgttaccggtgaagaagccgaaaatggagcacgtccaggctgaccacgagcttttcctccaggcctt

SEQ ID NO: 72057 - DNA, 76 bp, Homo sapiens
aagaagccgaaaatggagcacgtccaggctgaccacgagcttttcctccaggcctttgagagtgagtgtgtgcgag

SEQ ID NO: 72058 - DNA, 76 bp, Homo sapiens
aaaatggagcacgtccaggctgaccacgagcttttcctccaggcctttgagagtgagtgtgtgcgaggctttgagg

SEQ ID NO: 72059 - DNA, 70 bp, Homo sapiens
aacatggtctcggttgatatttttctgacaagtaagtttagatcatgtttggattttgtttcctattacc

SEQ ID NO: 72060 - DNA, 71 bp, Homo sapiens
ggtctcggttgatatttttctgacaagtaagtttagatcatgtttggattttgtttcctattacctagagc

SEQ ID NO: 72061 - DNA, 74 bp, Homo sapiens
ttttctgacaagtaagtttagatcatgtttggattttgtttcctattacctagagccaacacagatctatagat

SEQ ID NO: 72062 - DNA, 74 bp, Homo sapiens
caagtaagtttagatcatgtttggattttgtttcctattacctagagccaacacagatctatagatttcttcga

SEQ ID NO: 72063 - DNA, 74 bp, Homo sapiens
tttagatcatgtttggattttgtttcctattacctagagccaacacagatctatagatttcttcgaactcggaa

SEQ ID NO: 72064 - DNA, 76 bp, Homo sapiens
ttggattttgtttcctattacctagagccaacacagatctatagatttcttcgaactcggaatctcatagcagtaa

SEQ ID NO: 72065 - DNA, 77 bp, Homo sapiens
ttcctattacctagagccaacacagatctatagatttcttcgaactcggaatctcatagcagtaagtagtcaacaaa

SEQ ID NO: 72066 - DNA, 79 bp, Homo sapiens
ttacctagagccaacacagatctatagatttcttcgaactcggaatctcatagcagtaagtagtcaacaaaattcatca

SEQ ID NO: 72067 - DNA, 77 bp, Homo sapiens
ccaacacagatctatagatttcttcgaactcggaatctcatagcagtaagtagtcaacaaaattcatcaatattatt

SEQ ID NO: 72068 - DNA, 77 bp, Homo sapiens
ctatagatttcttcgaactcggaatctcatagcagtaagtagtcaacaaaattcatcaatattatttctctcttata

SEQ ID NO: 72069 - DNA, 79 bp, Homo sapiens
cttcgaactcggaatctcatagcagtaagtagtcaacaaaattcatcaatattatttctctcttataactgcatctgta

SEQ ID NO: 72070 - DNA, 78 bp, Homo sapiens
cggaatctcatagcagtaagtagtcaacaaaattcatcaatattatttctctcttataactgcatctgtattcaattt

SEQ ID NO: 72071 - DNA, 76 bp, Homo sapiens
tagcagtaagtagtcaacaaaattcatcaatattatttctctcttataactgcatctgtattcaattttaacattt

SEQ ID NO: 72072 - DNA, 73 bp, Homo sapiens
gtcaacaaaattcatcaatattatttctctcttataactgcatctgtattcaattttaacatttttaaaactc

SEQ ID NO: 72073 - DNA, 74 bp, Homo sapiens
tcatcaatattatttctctcttataactgcatctgtattcaattttaacatttttaaaactctttttgtagcca

SEQ ID NO: 72074 - DNA, 71 bp, Homo sapiens
caatattatttctctcttataactgcatctgtattcaattttaacatttttaaaactctttttgtagccaa

SEQ ID NO: 72075 - DNA, 70 bp, Homo sapiens
attatttctctcttataactgcatctgtattcaattttaacatttttaaaactctttttgtagccaatat

SEQ ID NO: 72076 - DNA, 72 bp, Homo sapiens
ctctcttataactgcatctgtattcaattttaacatttttaaaactctttttgtagccaatatttttgcaca

SEQ ID NO: 72077 - DNA, 71 bp, Homo sapiens
ctgcatctgtattcaattttaacatttttaaaactctttttgtagccaatatttttgcacagaactcttac

SEQ ID NO: 72078 - DNA, 69 bp, Homo sapiens
ttcaattttaacatttttaaaactctttttgtagccaatatttttgcacagaactcttacttacatgtc

SEQ ID NO: 72079 - DNA, 71 bp, Homo sapiens
acatttttaaaactctttttgtagccaatatttttgcacagaactcttacttacatgtctcatcgaaactc

SEQ ID NO: 72080 - DNA, 75 bp, Homo sapiens
aactctttttgtagccaatatttttgcacagaactcttacttacatgtctcatcgaaactccagaacaaacatca

SEQ ID NO: 72081 - DNA, 75 bp, Homo sapiens
tttgtagccaatatttttgcacagaactcttacttacatgtctcatcgaaactccagaacaaacatcaaaaggta

SEQ ID NO: 72082 - DNA, 75 bp, Homo sapiens
tttttgcacagaactcttacttacatgtctcatcgaaactccagaacaaacatcaaaaggtacattttatgaatc

SEQ ID NO: 72083 - DNA, 75 bp, Homo sapiens
gcacagaactcttacttacatgtctcatcgaaactccagaacaaacatcaaaaggtacattttatgaatcttatt

SEQ ID NO: 72084 - DNA, 76 bp, Homo sapiens
cttacatgtctcatcgaaactccagaacaaacatcaaaaggtacattttatgaatcttatttcaagctgatcaaac

SEQ ID NO: 72085 - DNA, 75 bp, Homo sapiens
ctcatcgaaactccagaacaaacatcaaaaggtacattttatgaatcttatttcaagctgatcaaaccatgttag

SEQ ID NO: 72086 - DNA, 71 bp, Homo sapiens
aaactccagaacaaacatcaaaaggtacattttatgaatcttatttcaagctgatcaaaccatgttagttt

SEQ ID NO: 72087 - DNA, 67 bp, Homo sapiens
aagtataatttgtttctttttcccagttgagaagtgattattttgtttatctgtttcttccaggaaa

SEQ ID NO: 72088 - DNA, 66 bp, Homo sapiens
gtttctttttcccagttgagaagtgattattttgtttatctgtttcttccaggaaaacatttaaag

SEQ ID NO: 72089 - DNA, 74 bp, Homo sapiens
tcccagttgagaagtgattattttgtttatctgtttcttccaggaaaacatttaaagttgatgatatgttatca

SEQ ID NO: 72090 - DNA, 72 bp, Homo sapiens
gaagtgattattttgtttatctgtttcttccaggaaaacatttaaagttgatgatatgttatcaaaagtaga

SEQ ID NO: 72091 - DNA, 71 bp, Homo sapiens
tttgtttatctgtttcttccaggaaaacatttaaagttgatgatatgttatcaaaagtagagaaaatgaaa

SEQ ID NO: 72092 - DNA, 73 bp, Homo sapiens
ctgtttcttccaggaaaacatttaaagttgatgatatgttatcaaaagtagagaaaatgaaaggagagcaaga

SEQ ID NO: 72093 - DNA, 74 bp, Homo sapiens
ccaggaaaacatttaaagttgatgatatgttatcaaaagtagagaaaatgaaaggagagcaagaatctcatagg

SEQ ID NO: 72094 - DNA, 78 bp, Homo sapiens
ttaaagttgatgatatgttatcaaaagtagagaaaatgaaaggagagcaagaatctcataggtaagataatctatcag

SEQ ID NO: 72095 - DNA, 79 bp, Homo sapiens
gttgatgatatgttatcaaaagtagagaaaatgaaaggagagcaagaatctcataggtaagataatctatcagtttaca

SEQ ID NO: 72096 - DNA, 77 bp, Homo sapiens
tgttatcaaaagtagagaaaatgaaaggagagcaagaatctcataggtaagataatctatcagtttacattaagtga

SEQ ID NO: 72097 - DNA, 76 bp, Homo sapiens
gagaaaatgaaaggagagcaagaatctcataggtaagataatctatcagtttacattaagtgatatactttaggaa

SEQ ID NO: 72098 - DNA, 75 bp, Homo sapiens
gaaaggagagcaagaatctcataggtaagataatctatcagtttacattaagtgatatactttaggaaagaggaa

SEQ ID NO: 72099 - DNA, 67 bp, Homo sapiens
tgttatattttaaagtctaggttattttactacagagcattacaatgataaaatatttccttttttt

SEQ ID NO: 72100 - DNA, 70 bp, Homo sapiens
tttttttttagcttgtcagctcatttgcagcttacgtttactggtttcttccacaaaaatggtatgtatt

SEQ ID NO: 72101 - DNA, 71 bp, Homo sapiens
ttttagcttgtcagctcatttgcagcttacgtttactggtttcttccacaaaaatggtatgtatttaaaag

SEQ ID NO: 72102 - DNA, 69 bp, Homo sapiens
cagctcatttgcagcttacgtttactggtttcttccacaaaaatggtatgtatttaaaagtaaataaag

SEQ ID NO: 72103 - DNA, 67 bp, Homo sapiens
gcagcttacgtttactggtttcttccacaaaaatggtatgtatttaaaagtaaataaagtggcattt

SEQ ID NO: 72104 - DNA, 68 bp, Homo sapiens
ctggtttcttccacaaaaatggtatgtatttaaaagtaaataaagtggcattttaatagcaagatacc

SEQ ID NO: 72105 - DNA, 70 bp, Homo sapiens
ccacaaaaatggtatgtatttaaaagtaaataaagtggcattttaatagcaagatacctttgtgaatgta

SEQ ID NO: 72106 - DNA, 71 bp, Homo sapiens
tattttaaaatactgattttctatttagataagccatcaccaaactcagaaaatgaacaaaattctgttac

SEQ ID NO: 72107 - DNA, 72 bp, Homo sapiens
tactgattttctatttagataagccatcaccaaactcagaaaatgaacaaaattctgttaccctggaagtcc

SEQ ID NO: 72108 - DNA, 71 bp, Homo sapiens
attttctatttagataagccatcaccaaactcagaaaatgaacaaaattctgttaccctggaagtcctgct

SEQ ID NO: 72109 - DNA, 74 bp, Homo sapiens
tagataagccatcaccaaactcagaaaatgaacaaaattctgttaccctggaagtcctgcttgtgaaagtttgc

SEQ ID NO: 72110 - DNA, 69 bp, Homo sapiens
accaaactcagaaaatgaacaaaattctgttaccctggaagtcctgcttgtgaaagtttgccacaaaaa

SEQ ID NO: 72111 - DNA, 66 bp, Homo sapiens
aaaatgaacaaaattctgttaccctggaagtcctgcttgtgaaagtttgccacaaaaaaagaaagg

SEQ ID NO: 72112 - DNA, 68 bp, Homo sapiens
aattctgttaccctggaagtcctgcttgtgaaagtttgccacaaaaaaagaaaggtaatgtcaacaaa

SEQ ID NO: 72113 - DNA, 70 bp, Homo sapiens
tgttaccctggaagtcctgcttgtgaaagtttgccacaaaaaaagaaaggtaatgtcaacaaaatgatat

SEQ ID NO: 72114 - DNA, 71 bp, Homo sapiens
gaagtcctgcttgtgaaagtttgccacaaaaaaagaaaggtaatgtcaacaaaatgatattggtagattaa

SEQ ID NO: 72115 - DNA, 70 bp, Homo sapiens
ttgtgaaagtttgccacaaaaaaagaaaggtaatgtcaacaaaatgatattggtagattaaatggaataa

SEQ ID NO: 72116 - DNA, 72 bp, Homo sapiens
tgcttatatacaaataaatataaattaataatgtttacctttgcaggatgtaagttgtccaataaggcaagt

SEQ ID NO: 72117 - DNA, 70 bp, Homo sapiens
taaattaataatgtttacctttgcaggatgtaagttgtccaataaggcaagttcccacaggtaaaaagca

SEQ ID NO: 72118 - DNA, 73 bp, Homo sapiens
tacctttgcaggatgtaagttgtccaataaggcaagttcccacaggtaaaaagcaggtgcctttgaatcctga

SEQ ID NO: 72119 - DNA, 72 bp, Homo sapiens
taagttgtccaataaggcaagttcccacaggtaaaaagcaggtgcctttgaatcctgacctcaatcaaacaa

SEQ ID NO: 72120 - DNA, 71 bp, Homo sapiens
tgtccaataaggcaagttcccacaggtaaaaagcaggtgcctttgaatcctgacctcaatcaaacaaaacc

SEQ ID NO: 72121 - DNA, 66 bp, Homo sapiens
aagttcccacaggtaaaaagcaggtgcctttgaatcctgacctcaatcaaacaaaacccggaaatt

SEQ ID NO: 72122 - DNA, 66 bp, Homo sapiens
acaggtaaaaagcaggtgcctttgaatcctgacctcaatcaaacaaaacccggaaatttcccgtcc

SEQ ID NO: 72123 - DNA, 68 bp, Homo sapiens
aagcaggtgcctttgaatcctgacctcaatcaaacaaaacccggaaatttcccgtcccttgcagtttc

SEQ ID NO: 72124 - DNA, 68 bp, Homo sapiens
aatcctgacctcaatcaaacaaaacccggaaatttcccgtcccttgcagtttccagtaatgaatttga

SEQ ID NO: 72125 - DNA, 67 bp, Homo sapiens
tcaatcaaacaaaacccggaaatttcccgtcccttgcagtttccagtaatgaatttgaacctagtaa

SEQ ID NO: 72126 - DNA, 65 bp, Homo sapiens
aaacaaaacccggaaatttcccgtcccttgcagtttccagtaatgaatttgaacctagtaacagc

SEQ ID NO: 72127 - DNA, 70 bp, Homo sapiens
aaatttcccgtcccttgcagtttccagtaatgaatttgaacctagtaacagccatatggtgaagtcttac

SEQ ID NO: 72128 - DNA, 75 bp, Homo sapiens
tcccttgcagtttccagtaatgaatttgaacctagtaacagccatatggtgaagtcttactcgttgctatttaga

SEQ ID NO: 72129 - DNA, 74 bp, Homo sapiens
agtttccagtaatgaatttgaacctagtaacagccatatggtgaagtcttactcgttgctatttagagtgactc

SEQ ID NO: 72130 - DNA, 75 bp, Homo sapiens
atgaatttgaacctagtaacagccatatggtgaagtcttactcgttgctatttagagtgactcgtccaggaagaa

SEQ ID NO: 72131 - DNA, 73 bp, Homo sapiens
aacctagtaacagccatatggtgaagtcttactcgttgctatttagagtgactcgtccaggaagaagagagtt

SEQ ID NO: 72132 - DNA, 75 bp, Homo sapiens
ccatatggtgaagtcttactcgttgctatttagagtgactcgtccaggaagaagagagtttaatggaatgattaa

SEQ ID NO: 72133 - DNA, 73 bp, Homo sapiens
aagtcttactcgttgctatttagagtgactcgtccaggaagaagagagtttaatggaatgattaatggagaaa

SEQ ID NO: 72134 - DNA, 74 bp, Homo sapiens
tcgttgctatttagagtgactcgtccaggaagaagagagtttaatggaatgattaatggagaaaccaatgaaaa

SEQ ID NO: 72135 - DNA, 73 bp, Homo sapiens
ctatttagagtgactcgtccaggaagaagagagtttaatggaatgattaatggagaaaccaatgaaaatattg

SEQ ID NO: 72136 - DNA, 70 bp, Homo sapiens
gactcgtccaggaagaagagagtttaatggaatgattaatggagaaaccaatgaaaatattggtaatttt

SEQ ID NO: 72137 - DNA, 66 bp, Homo sapiens
aggaagaagagagtttaatggaatgattaatggagaaaccaatgaaaatattggtaattttttttt

SEQ ID NO: 72138 - DNA, 76 bp, Homo sapiens
cacatttttgttctaatatttgatttatgagaaatgtttgttaaatttagatgtcaatgaagagcttccagccaga

SEQ ID NO: 72139 - DNA, 75 bp, Homo sapiens
tctaatatttgatttatgagaaatgtttgttaaatttagatgtcaatgaagagcttccagccagaagaaaacgaa

SEQ ID NO: 72140 - DNA, 76 bp, Homo sapiens
tgatttatgagaaatgtttgttaaatttagatgtcaatgaagagcttccagccagaagaaaacgaaatcgtgagga

SEQ ID NO: 72141 - DNA, 74 bp, Homo sapiens
atgagaaatgtttgttaaatttagatgtcaatgaagagcttccagccagaagaaaacgaaatcgtgaggatggg

SEQ ID NO: 72142 - DNA, 73 bp, Homo sapiens
tgttaaatttagatgtcaatgaagagcttccagccagaagaaaacgaaatcgtgaggatggggaaaagacatt

SEQ ID NO: 72143 - DNA, 76 bp, Homo sapiens
ttagatgtcaatgaagagcttccagccagaagaaaacgaaatcgtgaggatggggaaaagacatttgttgcacaaa

SEQ ID NO: 72144 - DNA, 73 bp, Homo sapiens
aagagcttccagccagaagaaaacgaaatcgtgaggatggggaaaagacatttgttgcacaaatgacagtatt

SEQ ID NO: 72145 - DNA, 72 bp, Homo sapiens
agccagaagaaaacgaaatcgtgaggatggggaaaagacatttgttgcacaaatgacagtatttgataaaaa

SEQ ID NO: 72146 - DNA, 71 bp, Homo sapiens
agaaaacgaaatcgtgaggatggggaaaagacatttgttgcacaaatgacagtatttgataaaaacaggta

SEQ ID NO: 72147 - DNA, 75 bp, Homo sapiens
atcgtgaggatggggaaaagacatttgttgcacaaatgacagtatttgataaaaacaggtaatgttgatgaacaa

SEQ ID NO: 72148 - DNA, 75 bp, Homo sapiens
aaaagacatttgttgcacaaatgacagtatttgataaaaacaggtaatgttgatgaacaagtgaggctcccacaa

SEQ ID NO: 72149 - DNA, 71 bp, Homo sapiens
ttatagtaataacacaggttactttaaagtatatgtgtttgtctaacaggcgcttacagcttttagatggg

SEQ ID NO: 72150 - DNA, 72 bp, Homo sapiens
ataacacaggttactttaaagtatatgtgtttgtctaacaggcgcttacagcttttagatggggaatatgaa

SEQ ID NO: 72151 - DNA, 76 bp, Homo sapiens
tttaaagtatatgtgtttgtctaacaggcgcttacagcttttagatggggaatatgaagtagccatgcaggaaatg

SEQ ID NO: 72152 - DNA, 78 bp, Homo sapiens
atatgtgtttgtctaacaggcgcttacagcttttagatggggaatatgaagtagccatgcaggaaatggaagaatgtc

SEQ ID NO: 72153 - DNA, 78 bp, Homo sapiens
taacaggcgcttacagcttttagatggggaatatgaagtagccatgcaggaaatggaagaatgtccaataagcaagaa

SEQ ID NO: 72154 - DNA, 77 bp, Homo sapiens
cttacagcttttagatggggaatatgaagtagccatgcaggaaatggaagaatgtccaataagcaagaaaagagcaa

SEQ ID NO: 72155 - DNA, 78 bp, Homo sapiens
ttttagatggggaatatgaagtagccatgcaggaaatggaagaatgtccaataagcaagaaaagagcaacatgggaga

SEQ ID NO: 72156 - DNA, 79 bp, Homo sapiens
aatatgaagtagccatgcaggaaatggaagaatgtccaataagcaagaaaagagcaacatgggagactattcttgatgg

SEQ ID NO: 72157 - DNA, 77 bp, Homo sapiens
aagtagccatgcaggaaatggaagaatgtccaataagcaagaaaagagcaacatgggagactattcttgatgggaag

SEQ ID NO: 72158 - DNA, 74 bp, Homo sapiens
aaatggaagaatgtccaataagcaagaaaagagcaacatgggagactattcttgatgggaaggtatggactact

SEQ ID NO: 72159 - DNA, 74 bp, Homo sapiens
aagaatgtccaataagcaagaaaagagcaacatgggagactattcttgatgggaaggtatggactacttagaag

SEQ ID NO: 72160 - DNA, 75 bp, Homo sapiens
agcaagaaaagagcaacatgggagactattcttgatgggaaggtatggactacttagaaggttgagcacgttata

SEQ ID NO: 72161 - DNA, 72 bp, Homo sapiens
ttattttttagaggctgcctccattcgaaacattttctcagggacctacgttgcagttcactcttcgttgga

SEQ ID NO: 72162 - DNA, 75 bp, Homo sapiens
tttagaggctgcctccattcgaaacattttctcagggacctacgttgcagttcactcttcgttggacaggagaga

SEQ ID NO: 72163 - DNA, 75 bp, Homo sapiens
tccattcgaaacattttctcagggacctacgttgcagttcactcttcgttggacaggagagaccaatgataaatc

SEQ ID NO: 72164 - DNA, 75 bp, Homo sapiens
cattttctcagggacctacgttgcagttcactcttcgttggacaggagagaccaatgataaatctacggctccta

SEQ ID NO: 72165 - DNA, 74 bp, Homo sapiens
agggacctacgttgcagttcactcttcgttggacaggagagaccaatgataaatctacggctcctattgccaaa

SEQ ID NO: 72166 - DNA, 78 bp, Homo sapiens
ttgcagttcactcttcgttggacaggagagaccaatgataaatctacggctcctattgccaaacctcttgccactaga

SEQ ID NO: 72167 - DNA, 75 bp, Homo sapiens
ttcactcttcgttggacaggagagaccaatgataaatctacggctcctattgccaaacctcttgccactagaaat

SEQ ID NO: 72168 - DNA, 78 bp, Homo sapiens
ttggacaggagagaccaatgataaatctacggctcctattgccaaacctcttgccactagaaattcagagagtctcca

SEQ ID NO: 72169 - DNA, 76 bp, Homo sapiens
agaccaatgataaatctacggctcctattgccaaacctcttgccactagaaattcagagagtctccatcaggaaaa

SEQ ID NO: 72170 - DNA, 75 bp, Homo sapiens
ataaatctacggctcctattgccaaacctcttgccactagaaattcagagagtctccatcaggaaaacaagcctg

SEQ ID NO: 72171 - DNA, 74 bp, Homo sapiens
tcctattgccaaacctcttgccactagaaattcagagagtctccatcaggaaaacaagcctggttcagttaaac

SEQ ID NO: 72172 - DNA, 72 bp, Homo sapiens
aaacctcttgccactagaaattcagagagtctccatcaggaaaacaagcctggttcagttaaacctactcaa

SEQ ID NO: 72173 - DNA, 72 bp, Homo sapiens
ccactagaaattcagagagtctccatcaggaaaacaagcctggttcagttaaacctactcaaactattggta

SEQ ID NO: 72174 - DNA, 70 bp, Homo sapiens
aaattcagagagtctccatcaggaaaacaagcctggttcagttaaacctactcaaactattggtaagaaa

SEQ ID NO: 72175 - DNA, 72 bp, Homo sapiens
tctccatcaggaaaacaagcctggttcagttaaacctactcaaactattggtaagaaaacattgcaatcaaa

SEQ ID NO: 72176 - DNA, 69 bp, Homo sapiens
caggaaaacaagcctggttcagttaaacctactcaaactattggtaagaaaacattgcaatcaaaataa

SEQ ID NO: 72177 - DNA, 75 bp, Homo sapiens
tgcttttcaaaagcaatgtttttattgaatataaaagtgtatgttttcagctgttaaagaatcattgactacaga

SEQ ID NO: 72178 - DNA, 75 bp, Homo sapiens
aagcaatgtttttattgaatataaaagtgtatgttttcagctgttaaagaatcattgactacagatctacaaaca

SEQ ID NO: 72179 - DNA, 73 bp, Homo sapiens
gtttttattgaatataaaagtgtatgttttcagctgttaaagaatcattgactacagatctacaaacaagaaa

SEQ ID NO: 72180 - DNA, 73 bp, Homo sapiens
gaatataaaagtgtatgttttcagctgttaaagaatcattgactacagatctacaaacaagaaaagaaaagga

SEQ ID NO: 72181 - DNA, 75 bp, Homo sapiens
gtgtatgttttcagctgttaaagaatcattgactacagatctacaaacaagaaaagaaaaggatactccaaatga

SEQ ID NO: 72182 - DNA, 73 bp, Homo sapiens
cagctgttaaagaatcattgactacagatctacaaacaagaaaagaaaaggatactccaaatgaaaaccgaca

SEQ ID NO: 72183 - DNA, 69 bp, Homo sapiens
aagaatcattgactacagatctacaaacaagaaaagaaaaggatactccaaatgaaaaccgacaaaaat

SEQ ID NO: 72184 - DNA, 69 bp, Homo sapiens
tgactacagatctacaaacaagaaaagaaaaggatactccaaatgaaaaccgacaaaaattaagaatat

SEQ ID NO: 72185 - DNA, 66 bp, Homo sapiens
agaaaagaaaaggatactccaaatgaaaaccgacaaaaattaagaatattttatcaggtaaacata

SEQ ID NO: 72186 - DNA, 68 bp, Homo sapiens
aggatactccaaatgaaaaccgacaaaaattaagaatattttatcaggtaaacatagctgacccttct

SEQ ID NO: 72187 - DNA, 67 bp, Homo sapiens
ctccaaatgaaaaccgacaaaaattaagaatattttatcaggtaaacatagctgacccttcttaaag

SEQ ID NO: 72188 - DNA, 69 bp, Homo sapiens
tttttttttaattgtttttagtttctctataacaacaatacaaggcaacaaactgaagcaagagatgac

SEQ ID NO: 72189 - DNA, 74 bp, Homo sapiens
ttaattgtttttagtttctctataacaacaatacaaggcaacaaactgaagcaagagatgacctgcattgccct

SEQ ID NO: 72190 - DNA, 78 bp, Homo sapiens
ttagtttctctataacaacaatacaaggcaacaaactgaagcaagagatgacctgcattgcccttggtgtactctgaa

SEQ ID NO: 72191 - DNA, 78 bp, Homo sapiens
taacaacaatacaaggcaacaaactgaagcaagagatgacctgcattgcccttggtgtactctgaactgccgcaaact

SEQ ID NO: 72192 - DNA, 77 bp, Homo sapiens
tacaaggcaacaaactgaagcaagagatgacctgcattgcccttggtgtactctgaactgccgcaaactttatagtt

SEQ ID NO: 72193 - DNA, 76 bp, Homo sapiens
aacaaactgaagcaagagatgacctgcattgcccttggtgtactctgaactgccgcaaactttatagtttactcaa

SEQ ID NO: 72194 - DNA, 77 bp, Homo sapiens
aagcaagagatgacctgcattgcccttggtgtactctgaactgccgcaaactttatagtttactcaagcatcttaaa

SEQ ID NO: 72195 - DNA, 79 bp, Homo sapiens
tgcattgcccttggtgtactctgaactgccgcaaactttatagtttactcaagcatcttaaactctgccatagcagatt

SEQ ID NO: 72196 - DNA, 78 bp, Homo sapiens
ttggtgtactctgaactgccgcaaactttatagtttactcaagcatcttaaactctgccatagcagatttatcttcaa

SEQ ID NO: 72197 - DNA, 78 bp, Homo sapiens
tactctgaactgccgcaaactttatagtttactcaagcatcttaaactctgccatagcagatttatcttcaactatgt

SEQ ID NO: 72198 - DNA, 76 bp, Homo sapiens
ccgcaaactttatagtttactcaagcatcttaaactctgccatagcagatttatcttcaactatgttgtgagtaat

SEQ ID NO: 72199 - DNA, 77 bp, Homo sapiens
ctttatagtttactcaagcatcttaaactctgccatagcagatttatcttcaactatgttgtgagtaatttttcata

SEQ ID NO: 72200 - DNA, 78 bp, Homo sapiens
ctcaagcatcttaaactctgccatagcagatttatcttcaactatgttgtgagtaatttttcatattttctcaatttg

SEQ ID NO: 72201 - DNA, 75 bp, Homo sapiens
cttaaactctgccatagcagatttatcttcaactatgttgtgagtaatttttcatattttctcaatttgtgttaa

SEQ ID NO: 72202 - DNA, 78 bp, Homo sapiens
ttttttacatttttgttgcagtatcatccaaaaggtgctaggatagatgtttctatcaatgagtgttatgatggctcc

SEQ ID NO: 72203 - DNA, 81 bp, Homo sapiens
atttttgttgcagtatcatccaaaaggtgctaggatagatgtttctatcaatgagtgttatgatggctcctatgcaggaaa

SEQ ID NO: 72204 - DNA, 82 bp, Homo sapiens
agtatcatccaaaaggtgctaggatagatgtttctatcaatgagtgttatgatggctcctatgcaggaaatcctcaggatat

SEQ ID NO: 72205 - DNA, 82 bp, Homo sapiens
aaaaggtgctaggatagatgtttctatcaatgagtgttatgatggctcctatgcaggaaatcctcaggatattcatcgccaa

SEQ ID NO: 72206 - DNA, 82 bp, Homo sapiens
ctaggatagatgtttctatcaatgagtgttatgatggctcctatgcaggaaatcctcaggatattcatcgccaacctggatt

SEQ ID NO: 72207 - DNA, 81 bp, Homo sapiens
atgtttctatcaatgagtgttatgatggctcctatgcaggaaatcctcaggatattcatcgccaacctggatttgctttta

SEQ ID NO: 72208 - DNA, 79 bp, Homo sapiens
aatgagtgttatgatggctcctatgcaggaaatcctcaggatattcatcgccaacctggatttgcttttagtcgcaacg

SEQ ID NO: 72209 - DNA, 76 bp, Homo sapiens
atggctcctatgcaggaaatcctcaggatattcatcgccaacctggatttgcttttagtcgcaacggaccagttaa

SEQ ID NO: 72210 - DNA, 76 bp, Homo sapiens
tatgcaggaaatcctcaggatattcatcgccaacctggatttgcttttagtcgcaacggaccagttaagagaacac

SEQ ID NO: 72211 - DNA, 74 bp, Homo sapiens
aaatcctcaggatattcatcgccaacctggatttgcttttagtcgcaacggaccagttaagagaacacctatca

SEQ ID NO: 72212 - DNA, 75 bp, Homo sapiens
atattcatcgccaacctggatttgcttttagtcgcaacggaccagttaagagaacacctatcacacatattcttg

SEQ ID NO: 72213 - DNA, 74 bp, Homo sapiens
aacctggatttgcttttagtcgcaacggaccagttaagagaacacctatcacacatattcttgtgtgcaggtag

SEQ ID NO: 72214 - DNA, 73 bp, Homo sapiens
atttgcttttagtcgcaacggaccagttaagagaacacctatcacacatattcttgtgtgcaggtaggtaaaa

SEQ ID NO: 72215 - DNA, 75 bp, Homo sapiens
tagtcgcaacggaccagttaagagaacacctatcacacatattcttgtgtgcaggtaggtaaaaagggcatataa

SEQ ID NO: 72216 - DNA, 71 bp, Homo sapiens
accagttaagagaacacctatcacacatattcttgtgtgcaggtaggtaaaaagggcatataagaaaagtt

SEQ ID NO: 72217 - DNA, 76 bp, Homo sapiens
gtatacatgtagaggccataaatcaacatttatttcttttcattaggccaaaacgaacaaaagcaagcatgtctga

SEQ ID NO: 72218 - DNA, 73 bp, Homo sapiens
gtagaggccataaatcaacatttatttcttttcattaggccaaaacgaacaaaagcaagcatgtctgaatttc

SEQ ID NO: 72219 - DNA, 73 bp, Homo sapiens
ccataaatcaacatttatttcttttcattaggccaaaacgaacaaaagcaagcatgtctgaatttcttgaatc

SEQ ID NO: 72220 - DNA, 73 bp, Homo sapiens
acatttatttcttttcattaggccaaaacgaacaaaagcaagcatgtctgaatttcttgaatctgaagatggg

SEQ ID NO: 72221 - DNA, 74 bp, Homo sapiens
cttttcattaggccaaaacgaacaaaagcaagcatgtctgaatttcttgaatctgaagatggggaagtagaaca

SEQ ID NO: 72222 - DNA, 76 bp, Homo sapiens
aaacgaacaaaagcaagcatgtctgaatttcttgaatctgaagatggggaagtagaacagcaaagaacatatagta

SEQ ID NO: 72223 - DNA, 78 bp, Homo sapiens
aaaagcaagcatgtctgaatttcttgaatctgaagatggggaagtagaacagcaaagaacatatagtagtggccacaa

SEQ ID NO: 72224 - DNA, 78 bp, Homo sapiens
tgtctgaatttcttgaatctgaagatggggaagtagaacagcaaagaacatatagtagtggccacaatcgtctgtatt

SEQ ID NO: 72225 - DNA, 77 bp, Homo sapiens
atttcttgaatctgaagatggggaagtagaacagcaaagaacatatagtagtggccacaatcgtctgtatttccata

SEQ ID NO: 72226 - DNA, 77 bp, Homo sapiens
aagatggggaagtagaacagcaaagaacatatagtagtggccacaatcgtctgtatttccatagtgatacctgctta

SEQ ID NO: 72227 - DNA, 76 bp, Homo sapiens
aagtagaacagcaaagaacatatagtagtggccacaatcgtctgtatttccatagtgatacctgcttacctctccg

SEQ ID NO: 72228 - DNA, 76 bp, Homo sapiens
caaagaacatatagtagtggccacaatcgtctgtatttccatagtgatacctgcttacctctccgtccacaagaaa

SEQ ID NO: 72229 - DNA, 76 bp, Homo sapiens
aacatatagtagtggccacaatcgtctgtatttccatagtgatacctgcttacctctccgtccacaagaaatggaa

SEQ ID NO: 72230 - DNA, 78 bp, Homo sapiens
ccacaatcgtctgtatttccatagtgatacctgcttacctctccgtccacaagaaatggaagtagatagtgaagatga

SEQ ID NO: 72231 - DNA, 76 bp, Homo sapiens
atcgtctgtatttccatagtgatacctgcttacctctccgtccacaagaaatggaagtagatagtgaagatgaaaa

SEQ ID NO: 72232 - DNA, 76 bp, Homo sapiens
tttccatagtgatacctgcttacctctccgtccacaagaaatggaagtagatagtgaagatgaaaaggatcctgaa

SEQ ID NO: 72233 - DNA, 75 bp, Homo sapiens
ctgcttacctctccgtccacaagaaatggaagtagatagtgaagatgaaaaggatcctgaatggctaagagaaaa

SEQ ID NO: 72234 - DNA, 74 bp, Homo sapiens
tctccgtccacaagaaatggaagtagatagtgaagatgaaaaggatcctgaatggctaagagaaaaaaccatta

SEQ ID NO: 72235 - DNA, 74 bp, Homo sapiens
tccacaagaaatggaagtagatagtgaagatgaaaaggatcctgaatggctaagagaaaaaaccattacagtaa

SEQ ID NO: 72236 - DNA, 73 bp, Homo sapiens
atggaagtagatagtgaagatgaaaaggatcctgaatggctaagagaaaaaaccattacagtaattattatta

SEQ ID NO: 72237 - DNA, 73 bp, Homo sapiens
gtgaagatgaaaaggatcctgaatggctaagagaaaaaaccattacagtaattattattatctttattggcaa

SEQ ID NO: 72238 - DNA, 72 bp, Homo sapiens
aaggatcctgaatggctaagagaaaaaaccattacagtaattattattatctttattggcaattatcttgga

SEQ ID NO: 72239 - DNA, 74 bp, Homo sapiens
tctttctttttcccagcaaattgaagagttttctgatgttaatgaaggagagaaagaagtgatgaaactctgga

SEQ ID NO: 72240 - DNA, 75 bp, Homo sapiens
tttttcccagcaaattgaagagttttctgatgttaatgaaggagagaaagaagtgatgaaactctggaatctcca

SEQ ID NO: 72241 - DNA, 79 bp, Homo sapiens
aaattgaagagttttctgatgttaatgaaggagagaaagaagtgatgaaactctggaatctccatgtcatgaagcatgg

SEQ ID NO: 72242 - DNA, 78 bp, Homo sapiens
ttttctgatgttaatgaaggagagaaagaagtgatgaaactctggaatctccatgtcatgaagcatgggtagggtatt

SEQ ID NO: 72243 - DNA, 77 bp, Homo sapiens
ttaatgaaggagagaaagaagtgatgaaactctggaatctccatgtcatgaagcatgggtagggtatttctaaatta

SEQ ID NO: 72244 - DNA, 75 bp, Homo sapiens
gagagaaagaagtgatgaaactctggaatctccatgtcatgaagcatgggtagggtatttctaaattaatttaaa

SEQ ID NO: 72245 - DNA, 74 bp, Homo sapiens
gaagtgatgaaactctggaatctccatgtcatgaagcatgggtagggtatttctaaattaatttaaatatttta

SEQ ID NO: 72246 - DNA, 77 bp, Homo sapiens
caaaaatgctttgtattgctattcatattctgtttttattaaataggtttattgctgacaatcaaatgaatcatgcc

SEQ ID NO: 72247 - DNA, 80 bp, Homo sapiens
gctttgtattgctattcatattctgtttttattaaataggtttattgctgacaatcaaatgaatcatgcctgtatgctgt

SEQ ID NO: 72248 - DNA, 80 bp, Homo sapiens
ttgctattcatattctgtttttattaaataggtttattgctgacaatcaaatgaatcatgcctgtatgctgtttgtagaa

SEQ ID NO: 72249 - DNA, 78 bp, Homo sapiens
tgtttttattaaataggtttattgctgacaatcaaatgaatcatgcctgtatgctgtttgtagaaaattatggacaga

SEQ ID NO: 72250 - DNA, 77 bp, Homo sapiens
attaaataggtttattgctgacaatcaaatgaatcatgcctgtatgctgtttgtagaaaattatggacagaaaataa

SEQ ID NO: 72251 - DNA, 78 bp, Homo sapiens
ggtttattgctgacaatcaaatgaatcatgcctgtatgctgtttgtagaaaattatggacagaaaataattaagaaga

SEQ ID NO: 72252 - DNA, 78 bp, Homo sapiens
gacaatcaaatgaatcatgcctgtatgctgtttgtagaaaattatggacagaaaataattaagaagaatttatgtcga

SEQ ID NO: 72253 - DNA, 75 bp, Homo sapiens
cctgtatgctgtttgtagaaaattatggacagaaaataattaagaagaatttatgtcgaaacttcatgcttcatc

SEQ ID NO: 72254 - DNA, 79 bp, Homo sapiens
gtagaaaattatggacagaaaataattaagaagaatttatgtcgaaacttcatgcttcatctagtcagcatgcatgact

SEQ ID NO: 72255 - DNA, 79 bp, Homo sapiens
atggacagaaaataattaagaagaatttatgtcgaaacttcatgcttcatctagtcagcatgcatgactttaatcttat

SEQ ID NO: 72256 - DNA, 82 bp, Homo sapiens
ataattaagaagaatttatgtcgaaacttcatgcttcatctagtcagcatgcatgactttaatcttattagcataatgtcaa

SEQ ID NO: 72257 - DNA, 84 bp, Homo sapiens
gaagaatttatgtcgaaacttcatgcttcatctagtcagcatgcatgactttaatcttattagcataatgtcaatagataaagc

SEQ ID NO: 72258 - DNA, 85 bp, Homo sapiens
ttatgtcgaaacttcatgcttcatctagtcagcatgcatgactttaatcttattagcataatgtcaatagataaagctgttacca

SEQ ID NO: 72259 - DNA, 81 bp, Homo sapiens
agcatgcatgactttaatcttattagcataatgtcaatagataaagctgttaccaagctccgtgaaatgcagcaaaaatta

SEQ ID NO: 72260 - DNA, 75 bp, Homo sapiens
taatcttattagcataatgtcaatagataaagctgttaccaagctccgtgaaatgcagcaaaaattagaaaaggg

SEQ ID NO: 72261 - DNA, 75 bp, Homo sapiens
tattagcataatgtcaatagataaagctgttaccaagctccgtgaaatgcagcaaaaattagaaaagggggaatc

SEQ ID NO: 72262 - DNA, 73 bp, Homo sapiens
atgtcaatagataaagctgttaccaagctccgtgaaatgcagcaaaaattagaaaagggggaatctgcttccc

SEQ ID NO: 72263 - DNA, 71 bp, Homo sapiens
ataaagctgttaccaagctccgtgaaatgcagcaaaaattagaaaagggggaatctgcttcccctgcaaac

SEQ ID NO: 72264 - DNA, 71 bp, Homo sapiens
taccaagctccgtgaaatgcagcaaaaattagaaaagggggaatctgcttcccctgcaaacgaagaaataa

SEQ ID NO: 72265 - DNA, 69 bp, Homo sapiens
aatgcagcaaaaattagaaaagggggaatctgcttcccctgcaaacgaagaaataactgaagaacaaaa

SEQ ID NO: 72266 - DNA, 66 bp, Homo sapiens
aaaaattagaaaagggggaatctgcttcccctgcaaacgaagaaataactgaagaacaaaatggga

SEQ ID NO: 72267 - DNA, 70 bp, Homo sapiens
aagggggaatctgcttcccctgcaaacgaagaaataactgaagaacaaaatgggacagcaaatggattta

SEQ ID NO: 72268 - DNA, 70 bp, Homo sapiens
ccctgcaaacgaagaaataactgaagaacaaaatgggacagcaaatggatttagtgaaattaactcaaaa

SEQ ID NO: 72269 - DNA, 70 bp, Homo sapiens
cgaagaaataactgaagaacaaaatgggacagcaaatggatttagtgaaattaactcaaaagagaaagct

SEQ ID NO: 72270 - DNA, 71 bp, Homo sapiens
agaacaaaatgggacagcaaatggatttagtgaaattaactcaaaagagaaagctttggaaacagatagtg

SEQ ID NO: 72271 - DNA, 72 bp, Homo sapiens
aaaatgggacagcaaatggatttagtgaaattaactcaaaagagaaagctttggaaacagatagtgtctcag

SEQ ID NO: 72272 - DNA, 71 bp, Homo sapiens
agcaaatggatttagtgaaattaactcaaaagagaaagctttggaaacagatagtgtctcaggggtttcaa

SEQ ID NO: 72273 - DNA, 71 bp, Homo sapiens
tttagtgaaattaactcaaaagagaaagctttggaaacagatagtgtctcaggggtttcaaaacagagcaa

SEQ ID NO: 72274 - DNA, 69 bp, Homo sapiens
agagaaagctttggaaacagatagtgtctcaggggtttcaaaacagagcaaaaaacaaaaactctgaaa

SEQ ID NO: 72275 - DNA, 69 bp, Homo sapiens
ttggaaacagatagtgtctcaggggtttcaaaacagagcaaaaaacaaaaactctgaaaagctctaacc

SEQ ID NO: 72276 - DNA, 69 bp, Homo sapiens
atagtgtctcaggggtttcaaaacagagcaaaaaacaaaaactctgaaaagctctaaccccatgttatg

SEQ ID NO: 72277 - DNA, 69 bp, Homo sapiens
ggtttcaaaacagagcaaaaaacaaaaactctgaaaagctctaaccccatgttatggacaaacactgaa

SEQ ID NO: 72278 - DNA, 69 bp, Homo sapiens
aacagagcaaaaaacaaaaactctgaaaagctctaaccccatgttatggacaaacactgaaattacatt

SEQ ID NO: 72279 - DNA, 70 bp, Homo sapiens
caaaaactctgaaaagctctaaccccatgttatggacaaacactgaaattacattttagggaattcatcc

SEQ ID NO: 72280 - DNA, 71 bp, Homo sapiens
ctgaaaagctctaaccccatgttatggacaaacactgaaattacattttagggaattcatcctctaagaat

SEQ ID NO: 72281 - DNA, 71 bp, Homo sapiens
gctctaaccccatgttatggacaaacactgaaattacattttagggaattcatcctctaagaattatgttt

SEQ ID NO: 72282 - DNA, 70 bp, Homo sapiens
catgttatggacaaacactgaaattacattttagggaattcatcctctaagaattatgtttttgttttta

SEQ ID NO: 72283 - DNA, 72 bp, Homo sapiens
atgtttttgtttttaatcatatgttccaaacaggcactgttagatgaagtaaatgatttcaacaaggatatt

SEQ ID NO: 72284 - DNA, 75 bp, Homo sapiens
ttttaatcatatgttccaaacaggcactgttagatgaagtaaatgatttcaacaaggatatttgtatcagggttc

SEQ ID NO: 72285 - DNA, 75 bp, Homo sapiens
tatgttccaaacaggcactgttagatgaagtaaatgatttcaacaaggatatttgtatcagggttctacttcact

SEQ ID NO: 72286 - DNA, 75 bp, Homo sapiens
ccaaacaggcactgttagatgaagtaaatgatttcaacaaggatatttgtatcagggttctacttcacttcatta

SEQ ID NO: 72287 - DNA, 79 bp, Homo sapiens
actgttagatgaagtaaatgatttcaacaaggatatttgtatcagggttctacttcacttcattatgcagcattacatg

SEQ ID NO: 72288 - DNA, 81 bp, Homo sapiens
caacaaggatatttgtatcagggttctacttcacttcattatgcagcattacatgtatatcacttttattgatgtcattaa

SEQ ID NO: 72289 - DNA, 80 bp, Homo sapiens
ggatatttgtatcagggttctacttcacttcattatgcagcattacatgtatatcacttttattgatgtcattaaaacat

SEQ ID NO: 72290 - DNA, 82 bp, Homo sapiens
cattatgcagcattacatgtatatcacttttattgatgtcattaaaacattctgtactttaagcatgaaaagcaatatttca

SEQ ID NO: 72291 - DNA, 77 bp, Homo sapiens
cattacatgtatatcacttttattgatgtcattaaaacattctgtactttaagcatgaaaagcaatatttcaaagta

SEQ ID NO: 72292 - DNA, 73 bp, Homo sapiens
atatcacttttattgatgtcattaaaacattctgtactttaagcatgaaaagcaatatttcaaagtattttta

SEQ ID NO: 72293 - DNA, 73 bp, Homo sapiens
aacattctgtactttaagcatgaaaagcaatatttcaaagtatttttaaactcaacaaatgtcatcaaatatg

SEQ ID NO: 72294 - DNA, 74 bp, Homo sapiens
tctgtactttaagcatgaaaagcaatatttcaaagtatttttaaactcaacaaatgtcatcaaatatgttgaat

SEQ ID NO: 72295 - DNA, 76 bp, Homo sapiens
gcatgaaaagcaatatttcaaagtatttttaaactcaacaaatgtcatcaaatatgttgaattgatctagaaatta

SEQ ID NO: 72296 - DNA, 75 bp, Homo sapiens
agcaatatttcaaagtatttttaaactcaacaaatgtcatcaaatatgttgaattgatctagaaattatttcata

SEQ ID NO: 72297 - DNA, 76 bp, Homo sapiens
caaagtatttttaaactcaacaaatgtcatcaaatatgttgaattgatctagaaattatttcatatataaatcaga

SEQ ID NO: 72298 - DNA, 78 bp, Homo sapiens
tgtcatcaaatatgttgaattgatctagaaattatttcatatataaatcagaatttttttgcatttatgaacggctgt

SEQ ID NO: 72299 - DNA, 72 bp, Homo sapiens
gaattgatctagaaattatttcatatataaatcagaatttttttgcatttatgaacggctgtttttctactt

SEQ ID NO: 72300 - DNA, 73 bp, Homo sapiens
ttatttcatatataaatcagaatttttttgcatttatgaacggctgtttttctactttgtaattgtgagacat

SEQ ID NO: 72301 - DNA, 71 bp, Homo sapiens
tataaatcagaatttttttgcatttatgaacggctgtttttctactttgtaattgtgagacattttcttgg

SEQ ID NO: 72302 - DNA, 70 bp, Homo sapiens
tttgcatttatgaacggctgtttttctactttgtaattgtgagacattttcttggggagggaaaattgga

SEQ ID NO: 72303 - DNA, 68 bp, Homo sapiens
atgaacggctgtttttctactttgtaattgtgagacattttcttggggagggaaaattggaatggttc

SEQ ID NO: 72304 - DNA, 65 bp, Homo sapiens
aattgtgagacattttcttggggagggaaaattggaatggttcccttttttagaaattgaagtgg

SEQ ID NO: 72305 - DNA, 68 bp, Homo sapiens
cattttcttggggagggaaaattggaatggttcccttttttagaaattgaagtggtcttcatatgtca

SEQ ID NO: 72306 - DNA, 68 bp, Homo sapiens
gggagggaaaattggaatggttcccttttttagaaattgaagtggtcttcatatgtcaactacagaaa

SEQ ID NO: 72307 - DNA, 68 bp, Homo sapiens
ggaaaattggaatggttcccttttttagaaattgaagtggtcttcatatgtcaactacagaaaaggaa

SEQ ID NO: 72308 - DNA, 67 bp, Homo sapiens
aatggttcccttttttagaaattgaagtggtcttcatatgtcaactacagaaaaggaaaaaaataga

SEQ ID NO: 72309 - DNA, 69 bp, Homo sapiens
gaaaaggaaaaaaatagaaattgaaggatttttatgaaattatattgcattactatttgcagtcaaact

SEQ ID NO: 72310 - DNA, 71 bp, Homo sapiens
aaaatagaaattgaaggatttttatgaaattatattgcattactatttgcagtcaaactttgatccttgtt

SEQ ID NO: 72311 - DNA, 71 bp, Homo sapiens
aaatagaaattgaaggatttttatgaaattatattgcattactatttgcagtcaaactttgatccttgttt

SEQ ID NO: 72312 - DNA, 74 bp, Homo sapiens
tgaaggatttttatgaaattatattgcattactatttgcagtcaaactttgatccttgtttttgaaatcatttg

SEQ ID NO: 72313 - DNA, 75 bp, Homo sapiens
ttatgaaattatattgcattactatttgcagtcaaactttgatccttgtttttgaaatcatttgtcaattcggaa

SEQ ID NO: 72314 - DNA, 74 bp, Homo sapiens
tatattgcattactatttgcagtcaaactttgatccttgtttttgaaatcatttgtcaattcggaatgaaaaat

SEQ ID NO: 72315 - DNA, 71 bp, Homo sapiens
ttgcagtcaaactttgatccttgtttttgaaatcatttgtcaattcggaatgaaaaattataatgtaattt

SEQ ID NO: 72316 - DNA, 70 bp, Homo sapiens
actttgatccttgtttttgaaatcatttgtcaattcggaatgaaaaattataatgtaattttacattaca

SEQ ID NO: 72317 - DNA, 70 bp, Homo sapiens
tttgaaatcatttgtcaattcggaatgaaaaattataatgtaattttacattacataagttccttttaca

SEQ ID NO: 72318 - DNA, 69 bp, Homo sapiens
atcatttgtcaattcggaatgaaaaattataatgtaattttacattacataagttccttttacaattaa

SEQ ID NO: 72319 - DNA, 70 bp, Homo sapiens
aattataatgtaattttacattacataagttccttttacaattaaaaaatagcacttcttcatcttatgc

SEQ ID NO: 72320 - DNA, 71 bp, Homo sapiens
gtaattttacattacataagttccttttacaattaaaaaatagcacttcttcatcttatgcctgtttgaga

SEQ ID NO: 72321 - DNA, 71 bp, Homo sapiens
agttccttttacaattaaaaaatagcacttcttcatcttatgcctgtttgagaagatattaaattttcaca

SEQ ID NO: 72322 - DNA, 76 bp, Homo sapiens
attaaaaaatagcacttcttcatcttatgcctgtttgagaagatattaaattttcacattgttgacagtgaaatgc

SEQ ID NO: 72323 - DNA, 79 bp, Homo sapiens
tagcacttcttcatcttatgcctgtttgagaagatattaaattttcacattgttgacagtgaaatgctatgttggttta

SEQ ID NO: 72324 - DNA, 79 bp, Homo sapiens
gcacttcttcatcttatgcctgtttgagaagatattaaattttcacattgttgacagtgaaatgctatgttggtttata

SEQ ID NO: 72325 - DNA, 77 bp, Homo sapiens
cttcatcttatgcctgtttgagaagatattaaattttcacattgttgacagtgaaatgctatgttggtttataagat

SEQ ID NO: 72326 - DNA, 77 bp, Homo sapiens
tgcctgtttgagaagatattaaattttcacattgttgacagtgaaatgctatgttggtttataagattacagaccat

SEQ ID NO: 72327 - DNA, 76 bp, Homo sapiens
tgtttgagaagatattaaattttcacattgttgacagtgaaatgctatgttggtttataagattacagaccatttg

SEQ ID NO: 72328 - DNA, 75 bp, Homo sapiens
agatattaaattttcacattgttgacagtgaaatgctatgttggtttataagattacagaccatttgttttcatg

SEQ ID NO: 72329 - DNA, 76 bp, Homo sapiens
ttaaattttcacattgttgacagtgaaatgctatgttggtttataagattacagaccatttgttttcatgtggata

SEQ ID NO: 72330 - DNA, 75 bp, Homo sapiens
ttttcacattgttgacagtgaaatgctatgttggtttataagattacagaccatttgttttcatgtggataattt

SEQ ID NO: 72331 - DNA, 80 bp, Homo sapiens
tgttgacagtgaaatgctatgttggtttataagattacagaccatttgttttcatgtggataattttagtgcattgctca

SEQ ID NO: 72332 - DNA, 77 bp, Homo sapiens
acagtgaaatgctatgttggtttataagattacagaccatttgttttcatgtggataattttagtgcattgctcacc

SEQ ID NO: 72333 - DNA, 75 bp, Homo sapiens
aatgctatgttggtttataagattacagaccatttgttttcatgtggataattttagtgcattgctcacccggta

SEQ ID NO: 72334 - DNA, 71 bp, Homo sapiens
ggtttataagattacagaccatttgttttcatgtggataattttagtgcattgctcacccggtatgttttt

SEQ ID NO: 72335 - DNA, 69 bp, Homo sapiens
ttttcttttttaattagataatcacacggaaaattaagctgttcatatctttaaattaggattgcaaac

SEQ ID NO: 72336 - DNA, 71 bp, Homo sapiens
taattagataatcacacggaaaattaagctgttcatatctttaaattaggattgcaaaccaaggaaagaac

SEQ ID NO: 72337 - DNA, 73 bp, Homo sapiens
taatcacacggaaaattaagctgttcatatctttaaattaggattgcaaaccaaggaaagaacgcatttgaga

SEQ ID NO: 72338 - DNA, 69 bp, Homo sapiens
acggaaaattaagctgttcatatctttaaattaggattgcaaaccaaggaaagaacgcatttgagattt

SEQ ID NO: 72339 - DNA, 73 bp, Homo sapiens
aagctgttcatatctttaaattaggattgcaaaccaaggaaagaacgcatttgagattttaagatgtcactta

SEQ ID NO: 72340 - DNA, 70 bp, Homo sapiens
ttaaattaggattgcaaaccaaggaaagaacgcatttgagattttaagatgtcacttataaggggagaag

SEQ ID NO: 72341 - DNA, 71 bp, Homo sapiens
gattgcaaaccaaggaaagaacgcatttgagattttaagatgtcacttataaggggagaagtgttcttaaa

SEQ ID NO: 72342 - DNA, 69 bp, Homo sapiens
accaaggaaagaacgcatttgagattttaagatgtcacttataaggggagaagtgttcttaaaaagtca

SEQ ID NO: 72343 - DNA, 69 bp, Homo sapiens
gaacgcatttgagattttaagatgtcacttataaggggagaagtgttcttaaaaagtcaaccagaaaac

SEQ ID NO: 72344 - DNA, 69 bp, Homo sapiens
gagattttaagatgtcacttataaggggagaagtgttcttaaaaagtcaaccagaaaactgttatgcct

SEQ ID NO: 72345 - DNA, 73 bp, Homo sapiens
aagtcaaccagaaaactgttatgccttttatttgtttgcaaggatgtctttgtaatgtgtttcatgaatagaa

SEQ ID NO: 72346 - DNA, 75 bp, Homo sapiens
ccagaaaactgttatgccttttatttgtttgcaaggatgtctttgtaatgtgtttcatgaatagaatatccaata

SEQ ID NO: 72347 - DNA, 82 bp, Homo sapiens
tttgtttgcaaggatgtctttgtaatgtgtttcatgaatagaatatccaatagagataagctgacttgaatcattttgagca

SEQ ID NO: 72348 - DNA, 82 bp, Homo sapiens
tgtaatgtgtttcatgaatagaatatccaatagagataagctgacttgaatcattttgagcaattttgccctgtgttatatg

SEQ ID NO: 72349 - DNA, 80 bp, Homo sapiens
gtgtttcatgaatagaatatccaatagagataagctgacttgaatcattttgagcaattttgccctgtgttatatgtgtt

SEQ ID NO: 72350 - DNA, 81 bp, Homo sapiens
tagaatatccaatagagataagctgacttgaatcattttgagcaattttgccctgtgttatatgtgtttcacgcacatatt

SEQ ID NO: 72351 - DNA, 81 bp, Homo sapiens
aatagagataagctgacttgaatcattttgagcaattttgccctgtgttatatgtgtttcacgcacatatttgcagttgga

SEQ ID NO: 72352 - DNA, 77 bp, Homo sapiens
aatcattttgagcaattttgccctgtgttatatgtgtttcacgcacatatttgcagttggattttctccaacagaaa

SEQ ID NO: 72353 - DNA, 77 bp, Homo sapiens
caattttgccctgtgttatatgtgtttcacgcacatatttgcagttggattttctccaacagaaagtggattcacta

SEQ ID NO: 72354 - DNA, 79 bp, Homo sapiens
ctgtgttatatgtgtttcacgcacatatttgcagttggattttctccaacagaaagtggattcactactggcacattaa

SEQ ID NO: 72355 - DNA, 80 bp, Homo sapiens
ttatatgtgtttcacgcacatatttgcagttggattttctccaacagaaagtggattcactactggcacattaacaagca

SEQ ID NO: 72356 - DNA, 76 bp, Homo sapiens
gcacatatttgcagttggattttctccaacagaaagtggattcactactggcacattaacaagcaccaataggttt

SEQ ID NO: 72357 - DNA, 71 bp, Homo sapiens
attttctccaacagaaagtggattcactactggcacattaacaagcaccaataggtttttattccaactcc

SEQ ID NO: 72358 - DNA, 74 bp, Homo sapiens
agaaagtggattcactactggcacattaacaagcaccaataggtttttattccaactccgagcactgtggttga

SEQ ID NO: 72359 - DNA, 75 bp, Homo sapiens
attcactactggcacattaacaagcaccaataggtttttattccaactccgagcactgtggttgagtaacatcac

SEQ ID NO: 72360 - DNA, 71 bp, Homo sapiens
ttaacaagcaccaataggtttttattccaactccgagcactgtggttgagtaacatcacctcaatttttta

SEQ ID NO: 72361 - DNA, 70 bp, Homo sapiens
ccaataggtttttattccaactccgagcactgtggttgagtaacatcacctcaattttttattatcctta

SEQ ID NO: 72362 - DNA, 75 bp, Homo sapiens
tattccaactccgagcactgtggttgagtaacatcacctcaattttttattatccttaaagatattgcattttca

SEQ ID NO: 72363 - DNA, 74 bp, Homo sapiens
ctccgagcactgtggttgagtaacatcacctcaattttttattatccttaaagatattgcattttcatattctt

SEQ ID NO: 72364 - DNA, 76 bp, Homo sapiens
catcacctcaattttttattatccttaaagatattgcattttcatattctttatttataaaggatcaatgctgctg

SEQ ID NO: 72365 - DNA, 74 bp, Homo sapiens
tttttattatccttaaagatattgcattttcatattctttatttataaaggatcaatgctgctgtaaatacagg

SEQ ID NO: 72366 - DNA, 74 bp, Homo sapiens
attatccttaaagatattgcattttcatattctttatttataaaggatcaatgctgctgtaaatacaggtattt

SEQ ID NO: 72367 - DNA, 73 bp, Homo sapiens
aagatattgcattttcatattctttatttataaaggatcaatgctgctgtaaatacaggtatttttaatttta

SEQ ID NO: 72368 - DNA, 74 bp, Homo sapiens
accaccatcagatgcagttccctattttgtttaatgaagggatatataagctttctaatggtgtcttcagaaat

SEQ ID NO: 72369 - DNA, 69 bp, Homo sapiens
agttccctattttgtttaatgaagggatatataagctttctaatggtgtcttcagaaatttataaaatg

SEQ ID NO: 72370 - DNA, 72 bp, Homo sapiens
gaagggatatataagctttctaatggtgtcttcagaaatttataaaatgtaaatactgatttgactggtctt

SEQ ID NO: 72371 - DNA, 72 bp, Homo sapiens
ataagctttctaatggtgtcttcagaaatttataaaatgtaaatactgatttgactggtctttaagatgtgt

SEQ ID NO: 72372 - DNA, 73 bp, Homo sapiens
ggtgtcttcagaaatttataaaatgtaaatactgatttgactggtctttaagatgtgtttaactgtgaggcta

SEQ ID NO: 72373 - DNA, 71 bp, Homo sapiens
gaaatttataaaatgtaaatactgatttgactggtctttaagatgtgtttaactgtgaggctatttaacga

SEQ ID NO: 72374 - DNA, 75 bp, Homo sapiens
aatgtaaatactgatttgactggtctttaagatgtgtttaactgtgaggctatttaacgaatagtgtggatgtga

SEQ ID NO: 72375 - DNA, 76 bp, Homo sapiens
aatactgatttgactggtctttaagatgtgtttaactgtgaggctatttaacgaatagtgtggatgtgatttgtca

SEQ ID NO: 72376 - DNA, 75 bp, Homo sapiens
tggtctttaagatgtgtttaactgtgaggctatttaacgaatagtgtggatgtgatttgtcatccagtattaagt

SEQ ID NO: 72377 - DNA, 76 bp, Homo sapiens
agatgtgtttaactgtgaggctatttaacgaatagtgtggatgtgatttgtcatccagtattaagttcttagtcat

SEQ ID NO: 72378 - DNA, 75 bp, Homo sapiens
gtttaactgtgaggctatttaacgaatagtgtggatgtgatttgtcatccagtattaagttcttagtcattgatt

SEQ ID NO: 72379 - DNA, 75 bp, Homo sapiens
gaggctatttaacgaatagtgtggatgtgatttgtcatccagtattaagttcttagtcattgatttttgtgttta

SEQ ID NO: 72380 - DNA, 71 bp, Homo sapiens
aacgaatagtgtggatgtgatttgtcatccagtattaagttcttagtcattgatttttgtgtttaaaaaaa

SEQ ID NO: 72381 - DNA, 70 bp, Homo sapiens
gtggatgtgatttgtcatccagtattaagttcttagtcattgatttttgtgtttaaaaaaaaataggaaa

SEQ ID NO: 72382 - DNA, 69 bp, Homo sapiens
tttgtgtttaaaaaaaaataggaaagagggaaactgcagctttcattacagattccttgattggtaagc

SEQ ID NO: 72383 - DNA, 73 bp, Homo sapiens
aaaaaaaataggaaagagggaaactgcagctttcattacagattccttgattggtaagctctccaaatgatga

SEQ ID NO: 72384 - DNA, 76 bp, Homo sapiens
taggaaagagggaaactgcagctttcattacagattccttgattggtaagctctccaaatgatgagttctagtaaa

SEQ ID NO: 72385 - DNA, 76 bp, Homo sapiens
ggaaactgcagctttcattacagattccttgattggtaagctctccaaatgatgagttctagtaaactctgatttt

SEQ ID NO: 72386 - DNA, 77 bp, Homo sapiens
tttcattacagattccttgattggtaagctctccaaatgatgagttctagtaaactctgatttttgcctctggatag

SEQ ID NO: 72387 - DNA, 78 bp, Homo sapiens
ttacagattccttgattggtaagctctccaaatgatgagttctagtaaactctgatttttgcctctggatagtagatc

SEQ ID NO: 72388 - DNA, 77 bp, Homo sapiens
attggtaagctctccaaatgatgagttctagtaaactctgatttttgcctctggatagtagatctcgagcgtttatc

SEQ ID NO: 72389 - DNA, 77 bp, Homo sapiens
tctccaaatgatgagttctagtaaactctgatttttgcctctggatagtagatctcgagcgtttatctcgggcttta

SEQ ID NO: 72390 - DNA, 74 bp, Homo sapiens
aatgatgagttctagtaaactctgatttttgcctctggatagtagatctcgagcgtttatctcgggctttaatt

SEQ ID NO: 72391 - DNA, 75 bp, Homo sapiens
tctagtaaactctgatttttgcctctggatagtagatctcgagcgtttatctcgggctttaatttgctaaagctg

SEQ ID NO: 72392 - DNA, 76 bp, Homo sapiens
tttttgcctctggatagtagatctcgagcgtttatctcgggctttaatttgctaaagctgtgcacatatgtaaaaa

SEQ ID NO: 72393 - DNA, 74 bp, Homo sapiens
cctctggatagtagatctcgagcgtttatctcgggctttaatttgctaaagctgtgcacatatgtaaaaaaaaa

SEQ ID NO: 72394 - DNA, 76 bp, Homo sapiens
gattattttaggggagatgtaggtgtagaattattgcttatgtcatttcttaagcagttatgctcttaatgcttaa

SEQ ID NO: 72395 - DNA, 78 bp, Homo sapiens
ggagatgtaggtgtagaattattgcttatgtcatttcttaagcagttatgctcttaatgcttaaaagaaggctagcat

SEQ ID NO: 72396 - DNA, 76 bp, Homo sapiens
attgcttatgtcatttcttaagcagttatgctcttaatgcttaaaagaaggctagcattgtttgcacaaaaagttg

SEQ ID NO: 72397 - DNA, 76 bp, Homo sapiens
atgtcatttcttaagcagttatgctcttaatgcttaaaagaaggctagcattgtttgcacaaaaagttggtgattc

SEQ ID NO: 72398 - DNA, 74 bp, Homo sapiens
tcttaagcagttatgctcttaatgcttaaaagaaggctagcattgtttgcacaaaaagttggtgattcccaccc

SEQ ID NO: 72399 - DNA, 71 bp, Homo sapiens
ctcttaatgcttaaaagaaggctagcattgtttgcacaaaaagttggtgattcccaccccaaatagtaata

SEQ ID NO: 72400 - DNA, 69 bp, Homo sapiens
aatgcttaaaagaaggctagcattgtttgcacaaaaagttggtgattcccaccccaaatagtaataaaa

SEQ ID NO: 72401 - DNA, 71 bp, Homo sapiens
gctagcattgtttgcacaaaaagttggtgattcccaccccaaatagtaataaaattacttctgttgagtaa

SEQ ID NO: 72402 - DNA, 68 bp, Homo sapiens
cattgtttgcacaaaaagttggtgattcccaccccaaatagtaataaaattacttctgttgagtaaac

SEQ ID NO: 72403 - DNA, 67 bp, Homo sapiens
aagttggtgattcccaccccaaatagtaataaaattacttctgttgagtaaactttttatgtcatcg

SEQ ID NO: 72404 - DNA, 69 bp, Homo sapiens
gattcccaccccaaatagtaataaaattacttctgttgagtaaactttttatgtcatcgtaaaagctga

SEQ ID NO: 72405 - DNA, 66 bp, Homo sapiens
aaaattacttctgttgagtaaactttttatgtcatcgtaaaagctgaaaaaatccctttgtttcta

SEQ ID NO: 72406 - DNA, 67 bp, Homo sapiens
acttctgttgagtaaactttttatgtcatcgtaaaagctgaaaaaatccctttgtttctatttataa

SEQ ID NO: 72407 - DNA, 65 bp, Homo sapiens
gtaaactttttatgtcatcgtaaaagctgaaaaaatccctttgtttctatttataaaaaaagtgc

SEQ ID NO: 72408 - DNA, 67 bp, Homo sapiens
gtcatcgtaaaagctgaaaaaatccctttgtttctatttataaaaaaagtgcttttctatatgtacc

SEQ ID NO: 72409 - DNA, 67 bp, Homo sapiens
aagctgaaaaaatccctttgtttctatttataaaaaaagtgcttttctatatgtacccttgataaca

SEQ ID NO: 72410 - DNA, 68 bp, Homo sapiens
aatccctttgtttctatttataaaaaaagtgcttttctatatgtacccttgataacagattttgaaga

SEQ ID NO: 72411 - DNA, 70 bp, Homo sapiens
tttctatttataaaaaaagtgcttttctatatgtacccttgataacagattttgaagaaatcctgtaaga

SEQ ID NO: 72412 - DNA, 72 bp, Homo sapiens
taaaaaaagtgcttttctatatgtacccttgataacagattttgaagaaatcctgtaagatgataaagcatt

SEQ ID NO: 72413 - DNA, 76 bp, Homo sapiens
gtgcttttctatatgtacccttgataacagattttgaagaaatcctgtaagatgataaagcatttgaatggtacag

SEQ ID NO: 72414 - DNA, 77 bp, Homo sapiens
ctatatgtacccttgataacagattttgaagaaatcctgtaagatgataaagcatttgaatggtacagtagatgtaa

SEQ ID NO: 72415 - DNA, 73 bp, Homo sapiens
cccttgataacagattttgaagaaatcctgtaagatgataaagcatttgaatggtacagtagatgtaaaaaaa

SEQ ID NO: 72416 - DNA, 71 bp, Homo sapiens
agaaatcctgtaagatgataaagcatttgaatggtacagtagatgtaaaaaaaattcagtttaaaagaaca

SEQ ID NO: 72417 - DNA, 70 bp, Homo sapiens
gatgataaagcatttgaatggtacagtagatgtaaaaaaaattcagtttaaaagaacatttgtttttaca

SEQ ID NO: 72418 - DNA, 68 bp, Homo sapiens
gcatttgaatggtacagtagatgtaaaaaaaattcagtttaaaagaacatttgtttttacattaaatg

SEQ ID NO: 72419 - DNA, 66 bp, Homo sapiens
tgtaaaaaaaattcagtttaaaagaacatttgtttttacattaaatgtttatttgaaatcaaatga

SEQ ID NO: 72420 - DNA, 68 bp, Homo sapiens
tcagtttaaaagaacatttgtttttacattaaatgtttatttgaaatcaaatgattttgtacataaag

SEQ ID NO: 72421 - DNA, 70 bp, Homo sapiens
agaacatttgtttttacattaaatgtttatttgaaatcaaatgattttgtacataaagttcaataatata

SEQ ID NO: 72422 - DNA, 68 bp, Homo sapiens
atttgaaatcaaatgattttgtacataaagttcaataatataaaagctgtattctgttttggggtttt

SEQ ID NO: 72423 - DNA, 71 bp, Homo sapiens
agagccttctagttggcgagtgggctttaggacccaacgggaacccgtgcctcttgcagcagcctaaccca

SEQ ID NO: 72424 - DNA, 72 bp, Homo sapiens
cttctagttggcgagtgggctttaggacccaacgggaacccgtgcctcttgcagcagcctaacccagaagca

SEQ ID NO: 72425 - DNA, 69 bp, Homo sapiens
agtgggctttaggacccaacgggaacccgtgcctcttgcagcagcctaacccagaagcaggggggaatc

SEQ ID NO: 72426 - DNA, 71 bp, Homo sapiens
tttaggacccaacgggaacccgtgcctcttgcagcagcctaacccagaagcaggggggaatcctgaatcga

SEQ ID NO: 72427 - DNA, 73 bp, Homo sapiens
aacgggaacccgtgcctcttgcagcagcctaacccagaagcaggggggaatcctgaatcgagctgagagggct

SEQ ID NO: 72428 - DNA, 74 bp, Homo sapiens
ctcttgcagcagcctaacccagaagcaggggggaatcctgaatcgagctgagagggcttccccggttctcctgg

SEQ ID NO: 72429 - DNA, 69 bp, Homo sapiens
agcctaacccagaagcaggggggaatcctgaatcgagctgagagggcttccccggttctcctgggaacc

SEQ ID NO: 72430 - DNA, 69 bp, Homo sapiens
aacccagaagcaggggggaatcctgaatcgagctgagagggcttccccggttctcctgggaaccccatc

SEQ ID NO: 72431 - DNA, 73 bp, Homo sapiens
gggaatcctgaatcgagctgagagggcttccccggttctcctgggaaccccatcggccccctgccagcacaca

SEQ ID NO: 72432 - DNA, 76 bp, Homo sapiens
tcctgaatcgagctgagagggcttccccggttctcctgggaaccccatcggccccctgccagcacacacctgagca

SEQ ID NO: 72433 - DNA, 73 bp, Homo sapiens
agctgagagggcttccccggttctcctgggaaccccatcggccccctgccagcacacacctgagcaggtagga

SEQ ID NO: 72434 - DNA, 73 bp, Homo sapiens
ttccccggttctcctgggaaccccatcggccccctgccagcacacacctgagcaggtaggaccatgcacaccc

SEQ ID NO: 72435 - DNA, 73 bp, Homo sapiens
ctgggaaccccatcggccccctgccagcacacacctgagcaggtaggaccatgcacaccccttcccaattctt

SEQ ID NO: 72436 - DNA, 67 bp, Homo sapiens
ggtcggtgggcgggcaggggcgggcctgagggacagggcctccccctacctctgctccgtaccctcc

SEQ ID NO: 72437 - DNA, 67 bp, Homo sapiens
aggggcgggcctgagggacagggcctccccctacctctgctccgtaccctccgccccttcagtctgg

SEQ ID NO: 72438 - DNA, 68 bp, Homo sapiens
ctgagggacagggcctccccctacctctgctccgtaccctccgccccttcagtctggggctccgggta

SEQ ID NO: 72439 - DNA, 64 bp, Homo sapiens
agggcctccccctacctctgctccgtaccctccgccccttcagtctggggctccgggtaaagtt

SEQ ID NO: 72440 - DNA, 70 bp, Homo sapiens
ctacctctgctccgtaccctccgccccttcagtctggggctccgggtaaagtttcagcctccgcacgtga

SEQ ID NO: 72441 - DNA, 70 bp, Homo sapiens
ctccgtaccctccgccccttcagtctggggctccgggtaaagtttcagcctccgcacgtgactcgctatg

SEQ ID NO: 72442 - DNA, 74 bp, Homo sapiens
cctccgccccttcagtctggggctccgggtaaagtttcagcctccgcacgtgactcgctatggccgctgccatc

SEQ ID NO: 72443 - DNA, 75 bp, Homo sapiens
cttcagtctggggctccgggtaaagtttcagcctccgcacgtgactcgctatggccgctgccatcgccccgcgcc

SEQ ID NO: 72444 - DNA, 75 bp, Homo sapiens
gggctccgggtaaagtttcagcctccgcacgtgactcgctatggccgctgccatcgccccgcgcccctgagccgc

SEQ ID NO: 72445 - DNA, 76 bp, Homo sapiens
taaagtttcagcctccgcacgtgactcgctatggccgctgccatcgccccgcgcccctgagccgcggccccctgga

SEQ ID NO: 72446 - DNA, 76 bp, Homo sapiens
agcctccgcacgtgactcgctatggccgctgccatcgccccgcgcccctgagccgcggccccctggacggctcctc

SEQ ID NO: 72447 - DNA, 74 bp, Homo sapiens
cgtgactcgctatggccgctgccatcgccccgcgcccctgagccgcggccccctggacggctcctctcccggga

SEQ ID NO: 72448 - DNA, 72 bp, Homo sapiens
tatggccgctgccatcgccccgcgcccctgagccgcggccccctggacggctcctctcccgggaccccgcac

SEQ ID NO: 72449 - DNA, 70 bp, Homo sapiens
atcgccccgcgcccctgagccgcggccccctggacggctcctctcccgggaccccgcaccctgatgccga

SEQ ID NO: 72450 - DNA, 73 bp, Homo sapiens
ccctgagccgcggccccctggacggctcctctcccgggaccccgcaccctgatgccgagcagcaccagggcgc

SEQ ID NO: 72451 - DNA, 70 bp, Homo sapiens
cggccccctggacggctcctctcccgggaccccgcaccctgatgccgagcagcaccagggcgccgggtta

SEQ ID NO: 72452 - DNA, 74 bp, Homo sapiens
tggacggctcctctcccgggaccccgcaccctgatgccgagcagcaccagggcgccgggttagggcagacgctg

SEQ ID NO: 72453 - DNA, 78 bp, Homo sapiens
tcctctcccgggaccccgcaccctgatgccgagcagcaccagggcgccgggttagggcagacgctgtgctcgctggca

SEQ ID NO: 72454 - DNA, 75 bp, Homo sapiens
cccgcaccctgatgccgagcagcaccagggcgccgggttagggcagacgctgtgctcgctggcaccccgaacggg

SEQ ID NO: 72455 - DNA, 75 bp, Homo sapiens
accctgatgccgagcagcaccagggcgccgggttagggcagacgctgtgctcgctggcaccccgaacgggttgct

SEQ ID NO: 72456 - DNA, 73 bp, Homo sapiens
agcaccagggcgccgggttagggcagacgctgtgctcgctggcaccccgaacgggttgcttcccccgctgcga

SEQ ID NO: 72457 - DNA, 71 bp, Homo sapiens
cgccgggttagggcagacgctgtgctcgctggcaccccgaacgggttgcttcccccgctgcgaggtaattc

SEQ ID NO: 72458 - DNA, 71 bp, Homo sapiens
ggttagggcagacgctgtgctcgctggcaccccgaacgggttgcttcccccgctgcgaggtaattcctccc

SEQ ID NO: 72459 - DNA, 69 bp, Homo sapiens
ctgtgctcgctggcaccccgaacgggttgcttcccccgctgcgaggtaattcctcccctggggattttg

SEQ ID NO: 72460 - DNA, 67 bp, Homo sapiens
tcgctggcaccccgaacgggttgcttcccccgctgcgaggtaattcctcccctggggattttgggga

SEQ ID NO: 72461 - DNA, 81 bp, Homo sapiens
tgtgtgcctgttcttcagtgcccactcacctgtctttcttttttctgcagcatcacaggacatggccccctcagccaccta

SEQ ID NO: 72462 - DNA, 79 bp, Homo sapiens
ttcttcagtgcccactcacctgtctttcttttttctgcagcatcacaggacatggccccctcagccacctagctggggc

SEQ ID NO: 72463 - DNA, 79 bp, Homo sapiens
ttttctgcagcatcacaggacatggccccctcagccacctagctggggcccatctaggagtggcatcttttttggtgcc

SEQ ID NO: 72464 - DNA, 76 bp, Homo sapiens
atcacaggacatggccccctcagccacctagctggggcccatctaggagtggcatcttttttggtgccctgaaggc

SEQ ID NO: 72465 - DNA, 76 bp, Homo sapiens
atggccccctcagccacctagctggggcccatctaggagtggcatcttttttggtgccctgaaggccagctctgga

SEQ ID NO: 72466 - DNA, 74 bp, Homo sapiens
cacctagctggggcccatctaggagtggcatcttttttggtgccctgaaggccagctctggaccttcccaggaa

SEQ ID NO: 72467 - DNA, 74 bp, Homo sapiens
gggcccatctaggagtggcatcttttttggtgccctgaaggccagctctggaccttcccaggaaaagtgccagc

SEQ ID NO: 72468 - DNA, 76 bp, Homo sapiens
atctaggagtggcatcttttttggtgccctgaaggccagctctggaccttcccaggaaaagtgccagctcacagaa

SEQ ID NO: 72469 - DNA, 75 bp, Homo sapiens
tcttttttggtgccctgaaggccagctctggaccttcccaggaaaagtgccagctcacagaactgcttgaccaaa

SEQ ID NO: 72470 - DNA, 75 bp, Homo sapiens
tttggtgccctgaaggccagctctggaccttcccaggaaaagtgccagctcacagaactgcttgaccaaaggacc

SEQ ID NO: 72471 - DNA, 76 bp, Homo sapiens
aaggccagctctggaccttcccaggaaaagtgccagctcacagaactgcttgaccaaaggaccggctcttgagaca

SEQ ID NO: 72472 - DNA, 74 bp, Homo sapiens
tggaccttcccaggaaaagtgccagctcacagaactgcttgaccaaaggaccggctcttgagacatcccccaac

SEQ ID NO: 72473 - DNA, 74 bp, Homo sapiens
tcccaggaaaagtgccagctcacagaactgcttgaccaaaggaccggctcttgagacatcccccaacccacctg

SEQ ID NO: 72474 - DNA, 75 bp, Homo sapiens
agtgccagctcacagaactgcttgaccaaaggaccggctcttgagacatcccccaacccacctggcccccagcta

SEQ ID NO: 72475 - DNA, 69 bp, Homo sapiens
cttgaccaaaggaccggctcttgagacatcccccaacccacctggcccccagctagggtgggggctcca

SEQ ID NO: 72476 - DNA, 71 bp, Homo sapiens
accggctcttgagacatcccccaacccacctggcccccagctagggtgggggctccaggagactgagatta

SEQ ID NO: 72477 - DNA, 70 bp, Homo sapiens
acatcccccaacccacctggcccccagctagggtgggggctccaggagactgagattagcctgccctctt

SEQ ID NO: 72478 - DNA, 76 bp, Homo sapiens
cctggcccccagctagggtgggggctccaggagactgagattagcctgccctctttggacagcagctccaggacag

SEQ ID NO: 72479 - DNA, 77 bp, Homo sapiens
tagggtgggggctccaggagactgagattagcctgccctctttggacagcagctccaggacagggcgggtgggctga

SEQ ID NO: 72480 - DNA, 76 bp, Homo sapiens
tccaggagactgagattagcctgccctctttggacagcagctccaggacagggcgggtgggctgaccacccaaacc

SEQ ID NO: 72481 - DNA, 75 bp, Homo sapiens
agactgagattagcctgccctctttggacagcagctccaggacagggcgggtgggctgaccacccaaaccccatc

SEQ ID NO: 72482 - DNA, 74 bp, Homo sapiens
ttagcctgccctctttggacagcagctccaggacagggcgggtgggctgaccacccaaaccccatctgggccca

SEQ ID NO: 72483 - DNA, 74 bp, Homo sapiens
ctctttggacagcagctccaggacagggcgggtgggctgaccacccaaaccccatctgggcccaggccccatgc

SEQ ID NO: 72484 - DNA, 70 bp, Homo sapiens
agctccaggacagggcgggtgggctgaccacccaaaccccatctgggcccaggccccatgccccgaggag

SEQ ID NO: 72485 - DNA, 71 bp, Homo sapiens
tgggctgaccacccaaaccccatctgggcccaggccccatgccccgaggaggggtggtctgaagcccacca

SEQ ID NO: 72486 - DNA, 69 bp, Homo sapiens
ccacccaaaccccatctgggcccaggccccatgccccgaggaggggtggtctgaagcccaccagagccc

SEQ ID NO: 72487 - DNA, 74 bp, Homo sapiens
atctgggcccaggccccatgccccgaggaggggtggtctgaagcccaccagagccccctgccagactgtctgcc

SEQ ID NO: 72488 - DNA, 74 bp, Homo sapiens
aggccccatgccccgaggaggggtggtctgaagcccaccagagccccctgccagactgtctgcctcccttctga

SEQ ID NO: 72489 - DNA, 75 bp, Homo sapiens
ccgaggaggggtggtctgaagcccaccagagccccctgccagactgtctgcctcccttctgactgtggccgcttg

SEQ ID NO: 72490 - DNA, 83 bp, Homo sapiens
gtggtctgaagcccaccagagccccctgccagactgtctgcctcccttctgactgtggccgcttggcatggccagcaacagca

SEQ ID NO: 72491 - DNA, 83 bp, Homo sapiens
ctgaagcccaccagagccccctgccagactgtctgcctcccttctgactgtggccgcttggcatggccagcaacagcagctcc

SEQ ID NO: 72492 - DNA, 82 bp, Homo sapiens
agccccctgccagactgtctgcctcccttctgactgtggccgcttggcatggccagcaacagcagctcctgcccgacacctg

SEQ ID NO: 72493 - DNA, 81 bp, Homo sapiens
agactgtctgcctcccttctgactgtggccgcttggcatggccagcaacagcagctcctgcccgacacctgggggcgggca

SEQ ID NO: 72494 - DNA, 79 bp, Homo sapiens
cctcccttctgactgtggccgcttggcatggccagcaacagcagctcctgcccgacacctgggggcgggcacctcaatg

SEQ ID NO: 72495 - DNA, 79 bp, Homo sapiens
ttctgactgtggccgcttggcatggccagcaacagcagctcctgcccgacacctgggggcgggcacctcaatgggtacc

SEQ ID NO: 72496 - DNA, 76 bp, Homo sapiens
gcttggcatggccagcaacagcagctcctgcccgacacctgggggcgggcacctcaatgggtacccggtgcctccc

SEQ ID NO: 72497 - DNA, 74 bp, Homo sapiens
atggccagcaacagcagctcctgcccgacacctgggggcgggcacctcaatgggtacccggtgcctccctacgc

SEQ ID NO: 72498 - DNA, 70 bp, Homo sapiens
agcagctcctgcccgacacctgggggcgggcacctcaatgggtacccggtgcctccctacgccttcttct

SEQ ID NO: 72499 - DNA, 68 bp, Homo sapiens
tcctgcccgacacctgggggcgggcacctcaatgggtacccggtgcctccctacgccttcttcttccc

SEQ ID NO: 72500 - DNA, 67 bp, Homo sapiens
gggggcgggcacctcaatgggtacccggtgcctccctacgccttcttcttcccccctatgctgggtg

SEQ ID NO: 72501 - DNA, 69 bp, Homo sapiens
cgggcacctcaatgggtacccggtgcctccctacgccttcttcttcccccctatgctgggtggactctc

SEQ ID NO: 72502 - DNA, 67 bp, Homo sapiens
aatgggtacccggtgcctccctacgccttcttcttcccccctatgctgggtggactctccccgccag

SEQ ID NO: 72503 - DNA, 75 bp, Homo sapiens
ctacgccttcttcttcccccctatgctgggtggactctccccgccaggcgctctgaccactctccagcaccagct

SEQ ID NO: 72504 - DNA, 82 bp, Homo sapiens
ctatgctgggtggactctccccgccaggcgctctgaccactctccagcaccagcttccagttagtggatatagcacaccatc

SEQ ID NO: 72505 - DNA, 80 bp, Homo sapiens
actctccccgccaggcgctctgaccactctccagcaccagcttccagttagtggatatagcacaccatccccagccagta

SEQ ID NO: 72506 - DNA, 80 bp, Homo sapiens
aggcgctctgaccactctccagcaccagcttccagttagtggatatagcacaccatccccagccagtaagtctgggtgtg

SEQ ID NO: 72507 - DNA, 78 bp, Homo sapiens
ctctgaccactctccagcaccagcttccagttagtggatatagcacaccatccccagccagtaagtctgggtgtgggg

SEQ ID NO: 72508 - DNA, 77 bp, Homo sapiens
tctccagcaccagcttccagttagtggatatagcacaccatccccagccagtaagtctgggtgtgggggctggggtg

SEQ ID NO: 72509 - DNA, 72 bp, Homo sapiens
agcttccagttagtggatatagcacaccatccccagccagtaagtctgggtgtgggggctggggtgggaagg

SEQ ID NO: 72510 - DNA, 73 bp, Homo sapiens
ttagtggatatagcacaccatccccagccagtaagtctgggtgtgggggctggggtgggaagggactgtggag

SEQ ID NO: 72511 - DNA, 73 bp, Homo sapiens
tagcacaccatccccagccagtaagtctgggtgtgggggctggggtgggaagggactgtggagggtggcaggc

SEQ ID NO: 72512 - DNA, 72 bp, Homo sapiens
cccagccagtaagtctgggtgtgggggctggggtgggaagggactgtggagggtggcaggcctcagagcttg

SEQ ID NO: 72513 - DNA, 77 bp, Homo sapiens
ggggctggggtgggaagggactgtggagggtggcaggcctcagagcttgggctctgggcacgtctgttctgctgtga

SEQ ID NO: 72514 - DNA, 79 bp, Homo sapiens
tgggaagggactgtggagggtggcaggcctcagagcttgggctctgggcacgtctgttctgctgtgagtggaaggcacg

SEQ ID NO: 72515 - DNA, 81 bp, Homo sapiens
actgtggagggtggcaggcctcagagcttgggctctgggcacgtctgttctgctgtgagtggaaggcacggtgagcgacaa

SEQ ID NO: 72516 - DNA, 82 bp, Homo sapiens
gtggcaggcctcagagcttgggctctgggcacgtctgttctgctgtgagtggaaggcacggtgagcgacaaggtcttctcca

SEQ ID NO: 72517 - DNA, 79 bp, Homo sapiens
cctcagagcttgggctctgggcacgtctgttctgctgtgagtggaaggcacggtgagcgacaaggtcttctccagttgg

SEQ ID NO: 72518 - DNA, 79 bp, Homo sapiens
gctctgggcacgtctgttctgctgtgagtggaaggcacggtgagcgacaaggtcttctccagttggggtgaccatcatt

SEQ ID NO: 72519 - DNA, 77 bp, Homo sapiens
acgtctgttctgctgtgagtggaaggcacggtgagcgacaaggtcttctccagttggggtgaccatcatttgaggtc

SEQ ID NO: 72520 - DNA, 77 bp, Homo sapiens
tgctgtgagtggaaggcacggtgagcgacaaggtcttctccagttggggtgaccatcatttgaggtcttaaaaatga

SEQ ID NO: 72521 - DNA, 72 bp, Homo sapiens
agtggaaggcacggtgagcgacaaggtcttctccagttggggtgaccatcatttgaggtcttaaaaatgaaa

SEQ ID NO: 72522 - DNA, 74 bp, Homo sapiens
gtgagcgacaaggtcttctccagttggggtgaccatcatttgaggtcttaaaaatgaaagccctatggcctata

SEQ ID NO: 72523 - DNA, 74 bp, Homo sapiens
agttggggtgaccatcatttgaggtcttaaaaatgaaagccctatggcctataggctgatcatggtggttgtgt

SEQ ID NO: 72524 - DNA, 74 bp, Homo sapiens
accatcatttgaggtcttaaaaatgaaagccctatggcctataggctgatcatggtggttgtgtttgaagttgg

SEQ ID NO: 72525 - DNA, 71 bp, Homo sapiens
atttgaggtcttaaaaatgaaagccctatggcctataggctgatcatggtggttgtgtttgaagttggggg

SEQ ID NO: 72526 - DNA, 73 bp, Homo sapiens
aaagccctatggcctataggctgatcatggtggttgtgtttgaagttgggggtggcagagggggagatgaaac

SEQ ID NO: 72527 - DNA, 79 bp, Homo sapiens
ctataggctgatcatggtggttgtgtttgaagttgggggtggcagagggggagatgaaaccatgctgttctggcctgca

SEQ ID NO: 72528 - DNA, 78 bp, Homo sapiens
ctgatcatggtggttgtgtttgaagttgggggtggcagagggggagatgaaaccatgctgttctggcctgcagtggcc

SEQ ID NO: 72529 - DNA, 76 bp, Homo sapiens
tggttgtgtttgaagttgggggtggcagagggggagatgaaaccatgctgttctggcctgcagtggccctcgcacc

SEQ ID NO: 72530 - DNA, 76 bp, Homo sapiens
aagttgggggtggcagagggggagatgaaaccatgctgttctggcctgcagtggccctcgcacccctcttctgtgc

SEQ ID NO: 72531 - DNA, 80 bp, Homo sapiens
ggtggcagagggggagatgaaaccatgctgttctggcctgcagtggccctcgcacccctcttctgtgctctgctgttggg

SEQ ID NO: 72532 - DNA, 80 bp, Homo sapiens
agatgaaaccatgctgttctggcctgcagtggccctcgcacccctcttctgtgctctgctgttggggccttataaatagc

SEQ ID NO: 72533 - DNA, 79 bp, Homo sapiens
aaccatgctgttctggcctgcagtggccctcgcacccctcttctgtgctctgctgttggggccttataaatagctccaa

SEQ ID NO: 72534 - DNA, 79 bp, Homo sapiens
ttctggcctgcagtggccctcgcacccctcttctgtgctctgctgttggggccttataaatagctccaaggactggaca

SEQ ID NO: 72535 - DNA, 75 bp, Homo sapiens
agtggccctcgcacccctcttctgtgctctgctgttggggccttataaatagctccaaggactggacacacaggt

SEQ ID NO: 72536 - DNA, 74 bp, Homo sapiens
ccctcttctgtgctctgctgttggggccttataaatagctccaaggactggacacacaggttggaggtgggtaa

SEQ ID NO: 72537 - DNA, 74 bp, Homo sapiens
ttctgtgctctgctgttggggccttataaatagctccaaggactggacacacaggttggaggtgggtaaacaaa

SEQ ID NO: 72538 - DNA, 70 bp, Homo sapiens
ttggggccttataaatagctccaaggactggacacacaggttggaggtgggtaaacaaacctcttgacat

SEQ ID NO: 72539 - DNA, 72 bp, Homo sapiens
ttataaatagctccaaggactggacacacaggttggaggtgggtaaacaaacctcttgacatttgatggaaa

SEQ ID NO: 72540 - DNA, 76 bp, Homo sapiens
tagctccaaggactggacacacaggttggaggtgggtaaacaaacctcttgacatttgatggaaatggcagctcta

SEQ ID NO: 72541 - DNA, 78 bp, Homo sapiens
ttggaggtgggtaaacaaacctcttgacatttgatggaaatggcagctctacctagagtgagagcagcacaccaccta

SEQ ID NO: 72542 - DNA, 77 bp, Homo sapiens
gtgggtaaacaaacctcttgacatttgatggaaatggcagctctacctagagtgagagcagcacaccacctacgccc

SEQ ID NO: 72543 - DNA, 76 bp, Homo sapiens
aaacctcttgacatttgatggaaatggcagctctacctagagtgagagcagcacaccacctacgccccacccccac

SEQ ID NO: 72544 - DNA, 80 bp, Homo sapiens
acatttgatggaaatggcagctctacctagagtgagagcagcacaccacctacgccccacccccactcagtgcctctgag

SEQ ID NO: 72545 - DNA, 76 bp, Homo sapiens
aaatggcagctctacctagagtgagagcagcacaccacctacgccccacccccactcagtgcctctgagggaaagg

SEQ ID NO: 72546 - DNA, 76 bp, Homo sapiens
agtgagagcagcacaccacctacgccccacccccactcagtgcctctgagggaaagggcttgaaggagcagaccga

SEQ ID NO: 72547 - DNA, 72 bp, Homo sapiens
agcacaccacctacgccccacccccactcagtgcctctgagggaaagggcttgaaggagcagaccgaggaag

SEQ ID NO: 72548 - DNA, 73 bp, Homo sapiens
ctacgccccacccccactcagtgcctctgagggaaagggcttgaaggagcagaccgaggaaggctggctggaa

SEQ ID NO: 72549 - DNA, 73 bp, Homo sapiens
cccactcagtgcctctgagggaaagggcttgaaggagcagaccgaggaaggctggctggaaccccacctctcc

SEQ ID NO: 72550 - DNA, 74 bp, Homo sapiens
tctgagggaaagggcttgaaggagcagaccgaggaaggctggctggaaccccacctctccccctgccagctcca

SEQ ID NO: 72551 - DNA, 71 bp, Homo sapiens
gggaaagggcttgaaggagcagaccgaggaaggctggctggaaccccacctctccccctgccagctccacc

SEQ ID NO: 72552 - DNA, 74 bp, Homo sapiens
ttgaaggagcagaccgaggaaggctggctggaaccccacctctccccctgccagctccacccccggccatgcta

SEQ ID NO: 72553 - DNA, 73 bp, Homo sapiens
agaccgaggaaggctggctggaaccccacctctccccctgccagctccacccccggccatgctaggatgtgct

SEQ ID NO: 72554 - DNA, 73 bp, Homo sapiens
aggctggctggaaccccacctctccccctgccagctccacccccggccatgctaggatgtgcttccctttgtg

SEQ ID NO: 72555 - DNA, 71 bp, Homo sapiens
ttccctttgtggggaggatgagagggaggggcccacggtctagctgggtggatagggtgagtgtcccagga

SEQ ID NO: 72556 - DNA, 72 bp, Homo sapiens
gaggatgagagggaggggcccacggtctagctgggtggatagggtgagtgtcccaggaggggacacttggcc

SEQ ID NO: 72557 - DNA, 70 bp, Homo sapiens
agggaggggcccacggtctagctgggtggatagggtgagtgtcccaggaggggacacttggcctggactc

SEQ ID NO: 72558 - DNA, 78 bp, Homo sapiens
tagctgggtggatagggtgagtgtcccaggaggggacacttggcctggactctggcctcggacgcatgcatggtcttg

SEQ ID NO: 72559 - DNA, 77 bp, Homo sapiens
atagggtgagtgtcccaggaggggacacttggcctggactctggcctcggacgcatgcatggtcttggcagggcctg

SEQ ID NO: 72560 - DNA, 76 bp, Homo sapiens
agtgtcccaggaggggacacttggcctggactctggcctcggacgcatgcatggtcttggcagggcctgtgttttc

SEQ ID NO: 72561 - DNA, 80 bp, Homo sapiens
ttggcctggactctggcctcggacgcatgcatggtcttggcagggcctgtgttttccttgcctccaccctctgccatgga

SEQ ID NO: 72562 - DNA, 79 bp, Homo sapiens
tctggcctcggacgcatgcatggtcttggcagggcctgtgttttccttgcctccaccctctgccatggaggtcacttgt

SEQ ID NO: 72563 - DNA, 78 bp, Homo sapiens
cggacgcatgcatggtcttggcagggcctgtgttttccttgcctccaccctctgccatggaggtcacttgttggctgg

SEQ ID NO: 72564 - DNA, 74 bp, Homo sapiens
atggtcttggcagggcctgtgttttccttgcctccaccctctgccatggaggtcacttgttggctgggcagggg

SEQ ID NO: 72565 - DNA, 74 bp, Homo sapiens
gcctgtgttttccttgcctccaccctctgccatggaggtcacttgttggctgggcaggggtctcagtacccttc

SEQ ID NO: 72566 - DNA, 73 bp, Homo sapiens
tgttttccttgcctccaccctctgccatggaggtcacttgttggctgggcaggggtctcagtacccttcgccg

SEQ ID NO: 72567 - DNA, 76 bp, Homo sapiens
tctgccatggaggtcacttgttggctgggcaggggtctcagtacccttcgccggctggccgagccaggtagtggga

SEQ ID NO: 72568 - DNA, 72 bp, Homo sapiens
aggtcacttgttggctgggcaggggtctcagtacccttcgccggctggccgagccaggtagtgggaggtggc

SEQ ID NO: 72569 - DNA, 76 bp, Homo sapiens
ttggctgggcaggggtctcagtacccttcgccggctggccgagccaggtagtgggaggtggcggcagctctggcca

SEQ ID NO: 72570 - DNA, 80 bp, Homo sapiens
tggccgagccaggtagtgggaggtggcggcagctctggccagctggcagagtccagggctggggcctgccaggccgctta

SEQ ID NO: 72571 - DNA, 77 bp, Homo sapiens
aggtagtgggaggtggcggcagctctggccagctggcagagtccagggctggggcctgccaggccgcttacagtaac

SEQ ID NO: 72572 - DNA, 79 bp, Homo sapiens
tgggaggtggcggcagctctggccagctggcagagtccagggctggggcctgccaggccgcttacagtaactctggccc

SEQ ID NO: 72573 - DNA, 73 bp, Homo sapiens
gggctggggcctgccaggccgcttacagtaactctggcccccagggcccagctgggcgccaggccagggctgg

SEQ ID NO: 72574 - DNA, 69 bp, Homo sapiens
cttacagtaactctggcccccagggcccagctgggcgccaggccagggctggggggaggagggagccgg

SEQ ID NO: 72575 - DNA, 69 bp, Homo sapiens
actctggcccccagggcccagctgggcgccaggccagggctggggggaggagggagccggggcctggcc

SEQ ID NO: 72576 - DNA, 69 bp, Homo sapiens
agggcccagctgggcgccaggccagggctggggggaggagggagccggggcctggcctgggacgggaga

SEQ ID NO: 72577 - DNA, 72 bp, Homo sapiens
gcgccaggccagggctggggggaggagggagccggggcctggcctgggacgggagagggtggaagcagcaga

SEQ ID NO: 72578 - DNA, 70 bp, Homo sapiens
agggctggggggaggagggagccggggcctggcctgggacgggagagggtggaagcagcagaatgggcca

SEQ ID NO: 72579 - DNA, 75 bp, Homo sapiens
gggaggagggagccggggcctggcctgggacgggagagggtggaagcagcagaatgggccatgggctgctggctg

SEQ ID NO: 72580 - DNA, 77 bp, Homo sapiens
agccggggcctggcctgggacgggagagggtggaagcagcagaatgggccatgggctgctggctggccggctggtca

SEQ ID NO: 72581 - DNA, 82 bp, Homo sapiens
tggcctgggacgggagagggtggaagcagcagaatgggccatgggctgctggctggccggctggtcagctgctgacctggga

SEQ ID NO: 72582 - DNA, 81 bp, Homo sapiens
gtggaagcagcagaatgggccatgggctgctggctggccggctggtcagctgctgacctgggaaacgtgtccccacctctc

SEQ ID NO: 72583 - DNA, 80 bp, Homo sapiens
agcagaatgggccatgggctgctggctggccggctggtcagctgctgacctgggaaacgtgtccccacctctcctggcca

SEQ ID NO: 72584 - DNA, 81 bp, Homo sapiens
atgggctgctggctggccggctggtcagctgctgacctgggaaacgtgtccccacctctcctggccagcagggactgcaca

SEQ ID NO: 72585 - DNA, 79 bp, Homo sapiens
ctggtcagctgctgacctgggaaacgtgtccccacctctcctggccagcagggactgcacaccttgccctgtgcaccca

SEQ ID NO: 72586 - DNA, 75 bp, Homo sapiens
ctgggaaacgtgtccccacctctcctggccagcagggactgcacaccttgccctgtgcacccaccacccctctca

SEQ ID NO: 72587 - DNA, 83 bp, Homo sapiens
tctcctggccagcagggactgcacaccttgccctgtgcacccaccacccctctcacggctgctggcaagctgcctggcaccac

SEQ ID NO: 72588 - DNA, 82 bp, Homo sapiens
agcagggactgcacaccttgccctgtgcacccaccacccctctcacggctgctggcaagctgcctggcaccactgccctatg

SEQ ID NO: 72589 - DNA, 81 bp, Homo sapiens
acaccttgccctgtgcacccaccacccctctcacggctgctggcaagctgcctggcaccactgccctatgtgcctggctgg

SEQ ID NO: 72590 - DNA, 82 bp, Homo sapiens
ccctgtgcacccaccacccctctcacggctgctggcaagctgcctggcaccactgccctatgtgcctggctgggctgggtca

SEQ ID NO: 72591 - DNA, 81 bp, Homo sapiens
acccctctcacggctgctggcaagctgcctggcaccactgccctatgtgcctggctgggctgggtcagtgcccccttctca

SEQ ID NO: 72592 - DNA, 83 bp, Homo sapiens
tctcacggctgctggcaagctgcctggcaccactgccctatgtgcctggctgggctgggtcagtgcccccttctcagtgtggg

SEQ ID NO: 72593 - DNA, 82 bp, Homo sapiens
caagctgcctggcaccactgccctatgtgcctggctgggctgggtcagtgcccccttctcagtgtgggggcagcgctctctc

SEQ ID NO: 72594 - DNA, 78 bp, Homo sapiens
ggcaccactgccctatgtgcctggctgggctgggtcagtgcccccttctcagtgtgggggcagcgctctctccccgga

SEQ ID NO: 72595 - DNA, 77 bp, Homo sapiens
actgccctatgtgcctggctgggctgggtcagtgcccccttctcagtgtgggggcagcgctctctccccggagccag

SEQ ID NO: 72596 - DNA, 75 bp, Homo sapiens
ctggctgggctgggtcagtgcccccttctcagtgtgggggcagcgctctctccccggagccagggagtctctttg

SEQ ID NO: 72597 - DNA, 73 bp, Homo sapiens
agtgcccccttctcagtgtgggggcagcgctctctccccggagccagggagtctctttgtccctggggcaggc

SEQ ID NO: 72598 - DNA, 75 bp, Homo sapiens
ttctcagtgtgggggcagcgctctctccccggagccagggagtctctttgtccctggggcaggccctggctgggc

SEQ ID NO: 72599 - DNA, 76 bp, Homo sapiens
cagcgctctctccccggagccagggagtctctttgtccctggggcaggccctggctgggcgcctcactgcccgcac

SEQ ID NO: 72600 - DNA, 76 bp, Homo sapiens
agccagggagtctctttgtccctggggcaggccctggctgggcgcctcactgcccgcactggctgggtgcccacca

SEQ ID NO: 72601 - DNA, 76 bp, Homo sapiens
gtgcccaccaccaccactgcttcctggatcgcctcctctggcttagctgtggccccctccctcccaggctccacca

SEQ ID NO: 72602 - DNA, 75 bp, Homo sapiens
accaccactgcttcctggatcgcctcctctggcttagctgtggccccctccctcccaggctccaccagccaccag

SEQ ID NO: 72603 - DNA, 77 bp, Homo sapiens
tcctggatcgcctcctctggcttagctgtggccccctccctcccaggctccaccagccaccaggagcagggactcta

SEQ ID NO: 72604 - DNA, 76 bp, Homo sapiens
ctcctctggcttagctgtggccccctccctcccaggctccaccagccaccaggagcagggactctatgtctgtgtt

SEQ ID NO: 72605 - DNA, 76 bp, Homo sapiens
tctggcttagctgtggccccctccctcccaggctccaccagccaccaggagcagggactctatgtctgtgtttctt

SEQ ID NO: 72606 - DNA, 75 bp, Homo sapiens
ttagctgtggccccctccctcccaggctccaccagccaccaggagcagggactctatgtctgtgtttctttgtgt

SEQ ID NO: 72607 - DNA, 74 bp, Homo sapiens
tgtggccccctccctcccaggctccaccagccaccaggagcagggactctatgtctgtgtttctttgtgttccc

SEQ ID NO: 72608 - DNA, 73 bp, Homo sapiens
tccctcccaggctccaccagccaccaggagcagggactctatgtctgtgtttctttgtgttccccgcccttta

SEQ ID NO: 72609 - DNA, 74 bp, Homo sapiens
tccaccagccaccaggagcagggactctatgtctgtgtttctttgtgttccccgccctttatgccctggggcca

SEQ ID NO: 72610 - DNA, 72 bp, Homo sapiens
accagccaccaggagcagggactctatgtctgtgtttctttgtgttccccgccctttatgccctggggccag

SEQ ID NO: 72611 - DNA, 72 bp, Homo sapiens
aggagcagggactctatgtctgtgtttctttgtgttccccgccctttatgccctggggccagggggcaggca

SEQ ID NO: 72612 - DNA, 73 bp, Homo sapiens
tatgtctgtgtttctttgtgttccccgccctttatgccctggggccagggggcaggcaggtgctgcctcagtt

SEQ ID NO: 72613 - DNA, 72 bp, Homo sapiens
tgtgtttctttgtgttccccgccctttatgccctggggccagggggcaggcaggtgctgcctcagtttctcc

SEQ ID NO: 72614 - DNA, 74 bp, Homo sapiens
tttatgccctggggccagggggcaggcaggtgctgcctcagtttctcctgccaccccttatcaaaccttcatct

SEQ ID NO: 72615 - DNA, 80 bp, Homo sapiens
gcaggcaggtgctgcctcagtttctcctgccaccccttatcaaaccttcatcttctgtttctgctgtctcttctctccac

SEQ ID NO: 72616 - DNA, 80 bp, Homo sapiens
tgctgcctcagtttctcctgccaccccttatcaaaccttcatcttctgtttctgctgtctcttctctccacctcatatag

SEQ ID NO: 72617 - DNA, 76 bp, Homo sapiens
agtttctcctgccaccccttatcaaaccttcatcttctgtttctgctgtctcttctctccacctcatataggagta

SEQ ID NO: 72618 - DNA, 78 bp, Homo sapiens
ccaccccttatcaaaccttcatcttctgtttctgctgtctcttctctccacctcatataggagtatgggatggatgga

SEQ ID NO: 72619 - DNA, 79 bp, Homo sapiens
cttatcaaaccttcatcttctgtttctgctgtctcttctctccacctcatataggagtatgggatggatggagtctggg

SEQ ID NO: 72620 - DNA, 81 bp, Homo sapiens
atcttctgtttctgctgtctcttctctccacctcatataggagtatgggatggatggagtctggggactctgattctggtc

SEQ ID NO: 72621 - DNA, 82 bp, Homo sapiens
ttctgctgtctcttctctccacctcatataggagtatgggatggatggagtctggggactctgattctggtctggtcctata

SEQ ID NO: 72622 - DNA, 80 bp, Homo sapiens
ttctctccacctcatataggagtatgggatggatggagtctggggactctgattctggtctggtcctatagtctgtgtta

SEQ ID NO: 72623 - DNA, 79 bp, Homo sapiens
acctcatataggagtatgggatggatggagtctggggactctgattctggtctggtcctatagtctgtgttagtgatgg

SEQ ID NO: 72624 - DNA, 78 bp, Homo sapiens
ataggagtatgggatggatggagtctggggactctgattctggtctggtcctatagtctgtgttagtgatggggagag

SEQ ID NO: 72625 - DNA, 78 bp, Homo sapiens
atggatggagtctggggactctgattctggtctggtcctatagtctgtgttagtgatggggagaggccagcctctggg

SEQ ID NO: 72626 - DNA, 75 bp, Homo sapiens
agtctggggactctgattctggtctggtcctatagtctgtgttagtgatggggagaggccagcctctggggtttg

SEQ ID NO: 72627 - DNA, 75 bp, Homo sapiens
actctgattctggtctggtcctatagtctgtgttagtgatggggagaggccagcctctggggtttggggctacta

SEQ ID NO: 72628 - DNA, 75 bp, Homo sapiens
gtctggtcctatagtctgtgttagtgatggggagaggccagcctctggggtttggggctactagggaatgcattg

SEQ ID NO: 72629 - DNA, 75 bp, Homo sapiens
tatagtctgtgttagtgatggggagaggccagcctctggggtttggggctactagggaatgcattggtgtatctt

SEQ ID NO: 72630 - DNA, 74 bp, Homo sapiens
ttagtgatggggagaggccagcctctggggtttggggctactagggaatgcattggtgtatctttgtagaatat

SEQ ID NO: 72631 - DNA, 75 bp, Homo sapiens
agaggccagcctctggggtttggggctactagggaatgcattggtgtatctttgtagaatattcactgcatttaa

SEQ ID NO: 72632 - DNA, 75 bp, Homo sapiens
tttggggctactagggaatgcattggtgtatctttgtagaatattcactgcatttaaagggactgtgatttacat

SEQ ID NO: 72633 - DNA, 77 bp, Homo sapiens
tactagggaatgcattggtgtatctttgtagaatattcactgcatttaaagggactgtgatttacattctggacttg

SEQ ID NO: 72634 - DNA, 77 bp, Homo sapiens
ttggtgtatctttgtagaatattcactgcatttaaagggactgtgatttacattctggacttggatcactggaacta

SEQ ID NO: 72635 - DNA, 77 bp, Homo sapiens
tatctttgtagaatattcactgcatttaaagggactgtgatttacattctggacttggatcactggaactagaagac

SEQ ID NO: 72636 - DNA, 77 bp, Homo sapiens
aatattcactgcatttaaagggactgtgatttacattctggacttggatcactggaactagaagactgtctgcttcc

SEQ ID NO: 72637 - DNA, 75 bp, Homo sapiens
atttaaagggactgtgatttacattctggacttggatcactggaactagaagactgtctgcttcctgacagggta

SEQ ID NO: 72638 - DNA, 74 bp, Homo sapiens
tgtgatttacattctggacttggatcactggaactagaagactgtctgcttcctgacagggtagggttttattt

SEQ ID NO: 72639 - DNA, 72 bp, Homo sapiens
tttacattctggacttggatcactggaactagaagactgtctgcttcctgacagggtagggttttattttta

SEQ ID NO: 72640 - DNA, 76 bp, Homo sapiens
tgctggagatatgggcatgtaccactgcacccagctcagggtaggatttttgacgggggaggagttagggacctgc

SEQ ID NO: 72641 - DNA, 73 bp, Homo sapiens
gcatgtaccactgcacccagctcagggtaggatttttgacgggggaggagttagggacctgcgacctggtgcc

SEQ ID NO: 72642 - DNA, 72 bp, Homo sapiens
tgcacccagctcagggtaggatttttgacgggggaggagttagggacctgcgacctggtgcctgtggacaac

SEQ ID NO: 72643 - DNA, 70 bp, Homo sapiens
tcagggtaggatttttgacgggggaggagttagggacctgcgacctggtgcctgtggacaacttgtccta

SEQ ID NO: 72644 - DNA, 69 bp, Homo sapiens
taggatttttgacgggggaggagttagggacctgcgacctggtgcctgtggacaacttgtcctaaccca

SEQ ID NO: 72645 - DNA, 73 bp, Homo sapiens
gggaggagttagggacctgcgacctggtgcctgtggacaacttgtcctaacccaggtgatggcaacagagttc

SEQ ID NO: 72646 - DNA, 74 bp, Homo sapiens
agttagggacctgcgacctggtgcctgtggacaacttgtcctaacccaggtgatggcaacagagttcccagaca

SEQ ID NO: 72647 - DNA, 79 bp, Homo sapiens
ctgcgacctggtgcctgtggacaacttgtcctaacccaggtgatggcaacagagttcccagacactctgtccatctgga

SEQ ID NO: 72648 - DNA, 79 bp, Homo sapiens
ctgtggacaacttgtcctaacccaggtgatggcaacagagttcccagacactctgtccatctggagcctgggctcattg

SEQ ID NO: 72649 - DNA, 77 bp, Homo sapiens
acaacttgtcctaacccaggtgatggcaacagagttcccagacactctgtccatctggagcctgggctcattggagg

SEQ ID NO: 72650 - DNA, 77 bp, Homo sapiens
ctaacccaggtgatggcaacagagttcccagacactctgtccatctggagcctgggctcattggagggttggaggtg

SEQ ID NO: 72651 - DNA, 76 bp, Homo sapiens
cccaggtgatggcaacagagttcccagacactctgtccatctggagcctgggctcattggagggttggaggtgggg

SEQ ID NO: 72652 - DNA, 77 bp, Homo sapiens
gtgatggcaacagagttcccagacactctgtccatctggagcctgggctcattggagggttggaggtgggggctggg

SEQ ID NO: 72653 - DNA, 74 bp, Homo sapiens
aacagagttcccagacactctgtccatctggagcctgggctcattggagggttggaggtgggggctggggcctg

SEQ ID NO: 72654 - DNA, 74 bp, Homo sapiens
agagttcccagacactctgtccatctggagcctgggctcattggagggttggaggtgggggctggggcctggcc

SEQ ID NO: 72655 - DNA, 75 bp, Homo sapiens
ttcccagacactctgtccatctggagcctgggctcattggagggttggaggtgggggctggggcctggccccatc

SEQ ID NO: 72656 - DNA, 75 bp, Homo sapiens
ctctgtccatctggagcctgggctcattggagggttggaggtgggggctggggcctggccccatccttgcccatc

SEQ ID NO: 72657 - DNA, 74 bp, Homo sapiens
atctggagcctgggctcattggagggttggaggtgggggctggggcctggccccatccttgcccatcctggcca

SEQ ID NO: 72658 - DNA, 74 bp, Homo sapiens
tggagcctgggctcattggagggttggaggtgggggctggggcctggccccatccttgcccatcctggccagag

SEQ ID NO: 72659 - DNA, 74 bp, Homo sapiens
tcattggagggttggaggtgggggctggggcctggccccatccttgcccatcctggccagagggagcaaatgct

SEQ ID NO: 72660 - DNA, 73 bp, Homo sapiens
ttggaggtgggggctggggcctggccccatccttgcccatcctggccagagggagcaaatgctttgccttccc

SEQ ID NO: 72661 - DNA, 74 bp, Homo sapiens
ggctggggcctggccccatccttgcccatcctggccagagggagcaaatgctttgccttcccctcccctcaatg

SEQ ID NO: 72662 - DNA, 76 bp, Homo sapiens
tggccccatccttgcccatcctggccagagggagcaaatgctttgccttcccctcccctcaatgttgcaagcttct

SEQ ID NO: 72663 - DNA, 74 bp, Homo sapiens
atcctggccagagggagcaaatgctttgccttcccctcccctcaatgttgcaagcttcttcctctttcttagag

SEQ ID NO: 72664 - DNA, 72 bp, Homo sapiens
agagggagcaaatgctttgccttcccctcccctcaatgttgcaagcttcttcctctttcttagaggtgggtg

SEQ ID NO: 72665 - DNA, 69 bp, Homo sapiens
aaatgctttgccttcccctcccctcaatgttgcaagcttcttcctctttcttagaggtgggtggggaag

SEQ ID NO: 72666 - DNA, 67 bp, Homo sapiens
ttcctctttcttagaggtgggtggggaaggcttcccatcctggtaaccttctccccaaatgtgggtg

SEQ ID NO: 72667 - DNA, 66 bp, Homo sapiens
aggtgggtggggaaggcttcccatcctggtaaccttctccccaaatgtgggtggggtgcccacatt

SEQ ID NO: 72668 - DNA, 70 bp, Homo sapiens
gggaaggcttcccatcctggtaaccttctccccaaatgtgggtggggtgcccacatttcaggcaagtgta

SEQ ID NO: 72669 - DNA, 71 bp, Homo sapiens
ttcccatcctggtaaccttctccccaaatgtgggtggggtgcccacatttcaggcaagtgtagccttcttc

SEQ ID NO: 72670 - DNA, 71 bp, Homo sapiens
taaccttctccccaaatgtgggtggggtgcccacatttcaggcaagtgtagccttcttcggctttctccac

SEQ ID NO: 72671 - DNA, 72 bp, Homo sapiens
gtgggtggggtgcccacatttcaggcaagtgtagccttcttcggctttctccacccaggttaggcaatgccc

SEQ ID NO: 72672 - DNA, 71 bp, Homo sapiens
cccacatttcaggcaagtgtagccttcttcggctttctccacccaggttaggcaatgcccccttcctgccc

SEQ ID NO: 72673 - DNA, 69 bp, Homo sapiens
cttcttcggctttctccacccaggttaggcaatgcccccttcctgccccctccctctgtgagccttttg

SEQ ID NO: 72674 - DNA, 67 bp, Homo sapiens
ctttctccacccaggttaggcaatgcccccttcctgccccctccctctgtgagccttttggtttccc

SEQ ID NO: 72675 - DNA, 67 bp, Homo sapiens
acccaggttaggcaatgcccccttcctgccccctccctctgtgagccttttggtttccctgcccctc

SEQ ID NO: 72676 - DNA, 67 bp, Homo sapiens
ttcctgccccctccctctgtgagccttttggtttccctgcccctcccctctccctagtaaacaacaa

SEQ ID NO: 72677 - DNA, 68 bp, Homo sapiens
tccctctgtgagccttttggtttccctgcccctcccctctccctagtaaacaacaacaacttctctcc

SEQ ID NO: 72678 - DNA, 67 bp, Homo sapiens
ttggtttccctgcccctcccctctccctagtaaacaacaacaacttctctccctgcccagaccctta

SEQ ID NO: 72679 - DNA, 73 bp, Homo sapiens
cctcccctctccctagtaaacaacaacaacttctctccctgcccagacccttagcttctgagcttctcactga

SEQ ID NO: 72680 - DNA, 73 bp, Homo sapiens
tccctagtaaacaacaacaacttctctccctgcccagacccttagcttctgagcttctcactgaccttcctct

SEQ ID NO: 72681 - DNA, 75 bp, Homo sapiens
taaacaacaacaacttctctccctgcccagacccttagcttctgagcttctcactgaccttcctcttctctggga

SEQ ID NO: 72682 - DNA, 75 bp, Homo sapiens
acaacttctctccctgcccagacccttagcttctgagcttctcactgaccttcctcttctctgggacaaggtgtg

SEQ ID NO: 72683 - DNA, 78 bp, Homo sapiens
tgcccagacccttagcttctgagcttctcactgaccttcctcttctctgggacaaggtgtggccatgggtctgaggga

SEQ ID NO: 72684 - DNA, 76 bp, Homo sapiens
acccttagcttctgagcttctcactgaccttcctcttctctgggacaaggtgtggccatgggtctgagggagcctg

SEQ ID NO: 72685 - DNA, 79 bp, Homo sapiens
ttctgagcttctcactgaccttcctcttctctgggacaaggtgtggccatgggtctgagggagcctggcatctccctcc

SEQ ID NO: 72686 - DNA, 79 bp, Homo sapiens
actgaccttcctcttctctgggacaaggtgtggccatgggtctgagggagcctggcatctccctccttctgcagagcca

SEQ ID NO: 72687 - DNA, 80 bp, Homo sapiens
ttcctcttctctgggacaaggtgtggccatgggtctgagggagcctggcatctccctccttctgcagagccagggctgcc

SEQ ID NO: 72688 - DNA, 81 bp, Homo sapiens
ctgggacaaggtgtggccatgggtctgagggagcctggcatctccctccttctgcagagccagggctgcctggtggacaga

SEQ ID NO: 72689 - DNA, 86 bp, Homo sapiens
tggccatgggtctgagggagcctggcatctccctccttctgcagagccagggctgcctggtggacagagctcctgagctctgagta

SEQ ID NO: 72690 - DNA, 86 bp, Homo sapiens
tctgagggagcctggcatctccctccttctgcagagccagggctgcctggtggacagagctcctgagctctgagtaggaaagcatg

SEQ ID NO: 72691 - DNA, 85 bp, Homo sapiens
tggcatctccctccttctgcagagccagggctgcctggtggacagagctcctgagctctgagtaggaaagcatggcagataaaat

SEQ ID NO: 72692 - DNA, 85 bp, Homo sapiens
tccctccttctgcagagccagggctgcctggtggacagagctcctgagctctgagtaggaaagcatggcagataaaattatcaca

SEQ ID NO: 72693 - DNA, 86 bp, Homo sapiens
agagccagggctgcctggtggacagagctcctgagctctgagtaggaaagcatggcagataaaattatcacatgcctggcctcaga

SEQ ID NO: 72694 - DNA, 86 bp, Homo sapiens
agggctgcctggtggacagagctcctgagctctgagtaggaaagcatggcagataaaattatcacatgcctggcctcagagatgga

SEQ ID NO: 72695 - DNA, 83 bp, Homo sapiens
agctcctgagctctgagtaggaaagcatggcagataaaattatcacatgcctggcctcagagatggaggcagtttagccttcc

SEQ ID NO: 72696 - DNA, 80 bp, Homo sapiens
aaagcatggcagataaaattatcacatgcctggcctcagagatggaggcagtttagccttccctgcttgcctggccttag

SEQ ID NO: 72697 - DNA, 83 bp, Homo sapiens
tatcacatgcctggcctcagagatggaggcagtttagccttccctgcttgcctggccttagggctggtgctgagggtgaggca

SEQ ID NO: 72698 - DNA, 78 bp, Homo sapiens
ctcagagatggaggcagtttagccttccctgcttgcctggccttagggctggtgctgagggtgaggcagttcccagga

SEQ ID NO: 72699 - DNA, 76 bp, Homo sapiens
agatggaggcagtttagccttccctgcttgcctggccttagggctggtgctgagggtgaggcagttcccaggagag

SEQ ID NO: 72700 - DNA, 75 bp, Homo sapiens
agtttagccttccctgcttgcctggccttagggctggtgctgagggtgaggcagttcccaggagaggtggcaatc

SEQ ID NO: 72701 - DNA, 81 bp, Homo sapiens
tgcttgcctggccttagggctggtgctgagggtgaggcagttcccaggagaggtggcaatccatggtcctccattcctgca

SEQ ID NO: 72702 - DNA, 78 bp, Homo sapiens
cctggccttagggctggtgctgagggtgaggcagttcccaggagaggtggcaatccatggtcctccattcctgcagga

SEQ ID NO: 72703 - DNA, 81 bp, Homo sapiens
ggctggtgctgagggtgaggcagttcccaggagaggtggcaatccatggtcctccattcctgcaggagcagtggtatgccc

SEQ ID NO: 72704 - DNA, 81 bp, Homo sapiens
gtgaggcagttcccaggagaggtggcaatccatggtcctccattcctgcaggagcagtggtatgccccagtctgcccatac

SEQ ID NO: 72705 - DNA, 77 bp, Homo sapiens
tcccaggagaggtggcaatccatggtcctccattcctgcaggagcagtggtatgccccagtctgcccataccctttt

SEQ ID NO: 72706 - DNA, 76 bp, Homo sapiens
aggtggcaatccatggtcctccattcctgcaggagcagtggtatgccccagtctgcccataccctttttgtaggaa

SEQ ID NO: 72707 - DNA, 76 bp, Homo sapiens
aatccatggtcctccattcctgcaggagcagtggtatgccccagtctgcccataccctttttgtaggaattcttgc

SEQ ID NO: 72708 - DNA, 79 bp, Homo sapiens
tccattcctgcaggagcagtggtatgccccagtctgcccataccctttttgtaggaattcttgctgatgaggcttccta

SEQ ID NO: 72709 - DNA, 75 bp, Homo sapiens
aggagcagtggtatgccccagtctgcccataccctttttgtaggaattcttgctgatgaggcttcctactcccat

SEQ ID NO: 72710 - DNA, 72 bp, Homo sapiens
agtctgcccataccctttttgtaggaattcttgctgatgaggcttcctactcccattccccatccaacaaag

SEQ ID NO: 72711 - DNA, 72 bp, Homo sapiens
tttgtaggaattcttgctgatgaggcttcctactcccattccccatccaacaaaggtgttgggtccctcctc

SEQ ID NO: 72712 - DNA, 66 bp, Homo sapiens
aggcttcctactcccattccccatccaacaaaggtgttgggtccctcctccccctcatccctttcc

SEQ ID NO: 72713 - DNA, 69 bp, Homo sapiens
tccaacaaaggtgttgggtccctcctccccctcatccctttccccaggtggggaggaggcagcacatta

SEQ ID NO: 72714 - DNA, 67 bp, Homo sapiens
aaaggtgttgggtccctcctccccctcatccctttccccaggtggggaggaggcagcacattaggtg

SEQ ID NO: 72715 - DNA, 71 bp, Homo sapiens
cctcctccccctcatccctttccccaggtggggaggaggcagcacattaggtggcctgggtgcgcccttca

SEQ ID NO: 72716 - DNA, 73 bp, Homo sapiens
cctcatccctttccccaggtggggaggaggcagcacattaggtggcctgggtgcgcccttcagagacctagta

SEQ ID NO: 72717 - DNA, 74 bp, Homo sapiens
tttccccaggtggggaggaggcagcacattaggtggcctgggtgcgcccttcagagacctagtagcctatggga

SEQ ID NO: 72718 - DNA, 74 bp, Homo sapiens
gggaggaggcagcacattaggtggcctgggtgcgcccttcagagacctagtagcctatgggaccaacagaaacc

SEQ ID NO: 72719 - DNA, 75 bp, Homo sapiens
aggcagcacattaggtggcctgggtgcgcccttcagagacctagtagcctatgggaccaacagaaaccctctcca

SEQ ID NO: 72720 - DNA, 72 bp, Homo sapiens
attaggtggcctgggtgcgcccttcagagacctagtagcctatgggaccaacagaaaccctctccaggtcac

SEQ ID NO: 72721 - DNA, 72 bp, Homo sapiens
ctgggtgcgcccttcagagacctagtagcctatgggaccaacagaaaccctctccaggtcactgtggggagg

SEQ ID NO: 72722 - DNA, 73 bp, Homo sapiens
ttcagagacctagtagcctatgggaccaacagaaaccctctccaggtcactgtggggagggctgtgtatttgt

SEQ ID NO: 72723 - DNA, 74 bp, Homo sapiens
cctagtagcctatgggaccaacagaaaccctctccaggtcactgtggggagggctgtgtatttgttctgctaca

SEQ ID NO: 72724 - DNA, 74 bp, Homo sapiens
tatgggaccaacagaaaccctctccaggtcactgtggggagggctgtgtatttgttctgctacagccagggtgg

SEQ ID NO: 72725 - DNA, 74 bp, Homo sapiens
aaaccctctccaggtcactgtggggagggctgtgtatttgttctgctacagccagggtgggagccctagagatg

SEQ ID NO: 72726 - DNA, 74 bp, Homo sapiens
actgtggggagggctgtgtatttgttctgctacagccagggtgggagccctagagatggtccggcgattctccc

SEQ ID NO: 72727 - DNA, 72 bp, Homo sapiens
tgtgtatttgttctgctacagccagggtgggagccctagagatggtccggcgattctccccgccccctaaac

SEQ ID NO: 72728 - DNA, 68 bp, Homo sapiens
atggtccggcgattctccccgccccctaaactggcccctggggcttggtctctgaagactggtgttta

SEQ ID NO: 72729 - DNA, 69 bp, Homo sapiens
gattctccccgccccctaaactggcccctggggcttggtctctgaagactggtgtttactgtggaggtc

SEQ ID NO: 72730 - DNA, 72 bp, Homo sapiens
cgccccctaaactggcccctggggcttggtctctgaagactggtgtttactgtggaggtctcagattctgtg

SEQ ID NO: 72731 - DNA, 75 bp, Homo sapiens
taaactggcccctggggcttggtctctgaagactggtgtttactgtggaggtctcagattctgtgtgcactacgg

SEQ ID NO: 72732 - DNA, 78 bp, Homo sapiens
gggcttggtctctgaagactggtgtttactgtggaggtctcagattctgtgtgcactacgggtcagggctgtgtgtgt

SEQ ID NO: 72733 - DNA, 78 bp, Homo sapiens
tggtctctgaagactggtgtttactgtggaggtctcagattctgtgtgcactacgggtcagggctgtgtgtgttttgg

SEQ ID NO: 72734 - DNA, 73 bp, Homo sapiens
ttactgtggaggtctcagattctgtgtgcactacgggtcagggctgtgtgtgttttgggggtggggtcacggt

SEQ ID NO: 72735 - DNA, 74 bp, Homo sapiens
tctcagattctgtgtgcactacgggtcagggctgtgtgtgttttgggggtggggtcacggttgggtgtgtgttg

SEQ ID NO: 72736 - DNA, 71 bp, Homo sapiens
tctgtgtgcactacgggtcagggctgtgtgtgttttgggggtggggtcacggttgggtgtgtgttgggaag

SEQ ID NO: 72737 - DNA, 68 bp, Homo sapiens
ggtcagggctgtgtgtgttttgggggtggggtcacggttgggtgtgtgttgggaaggggattaatgac

SEQ ID NO: 72738 - DNA, 68 bp, Homo sapiens
gtgtgtgttttgggggtggggtcacggttgggtgtgtgttgggaaggggattaatgacttgtgtgtat

SEQ ID NO: 72739 - DNA, 73 bp, Homo sapiens
ggtcacggttgggtgtgtgttgggaaggggattaatgacttgtgtgtattgggtgagagggttagagagctga

SEQ ID NO: 72740 - DNA, 73 bp, Homo sapiens
ttgggtgtgtgttgggaaggggattaatgacttgtgtgtattgggtgagagggttagagagctgagtgtgttt

SEQ ID NO: 72741 - DNA, 72 bp, Homo sapiens
tgggaaggggattaatgacttgtgtgtattgggtgagagggttagagagctgagtgtgttttgggggaatta

SEQ ID NO: 72742 - DNA, 74 bp, Homo sapiens
ttaatgacttgtgtgtattgggtgagagggttagagagctgagtgtgttttgggggaattaaatccagagctaa

SEQ ID NO: 72743 - DNA, 72 bp, Homo sapiens
acttgtgtgtattgggtgagagggttagagagctgagtgtgttttgggggaattaaatccagagctaaggag

SEQ ID NO: 72744 - DNA, 74 bp, Homo sapiens
tattgggtgagagggttagagagctgagtgtgttttgggggaattaaatccagagctaaggagggagagtcagc

SEQ ID NO: 72745 - DNA, 74 bp, Homo sapiens
agctgagtgtgttttgggggaattaaatccagagctaaggagggagagtcagcctgtctgtgtgttggtgttgg

SEQ ID NO: 72746 - DNA, 73 bp, Homo sapiens
tgttttgggggaattaaatccagagctaaggagggagagtcagcctgtctgtgtgttggtgttggggctggga

SEQ ID NO: 72747 - DNA, 74 bp, Homo sapiens
ttaaatccagagctaaggagggagagtcagcctgtctgtgtgttggtgttggggctgggagggggagtgactta

SEQ ID NO: 72748 - DNA, 75 bp, Homo sapiens
agagctaaggagggagagtcagcctgtctgtgtgttggtgttggggctgggagggggagtgacttagggcacaga

SEQ ID NO: 72749 - DNA, 73 bp, Homo sapiens
agagtcagcctgtctgtgtgttggtgttggggctgggagggggagtgacttagggcacagagtgtttaaagag

SEQ ID NO: 72750 - DNA, 72 bp, Homo sapiens
tgtctgtgtgttggtgttggggctgggagggggagtgacttagggcacagagtgtttaaagaggagtggtct

SEQ ID NO: 72751 - DNA, 68 bp, Homo sapiens
ttggtgttggggctgggagggggagtgacttagggcacagagtgtttaaagaggagtggtctttcgtt

SEQ ID NO: 72752 - DNA, 68 bp, Homo sapiens
ggctgggagggggagtgacttagggcacagagtgtttaaagaggagtggtctttcgtttgggttctta

SEQ ID NO: 72753 - DNA, 66 bp, Homo sapiens
gggagtgacttagggcacagagtgtttaaagaggagtggtctttcgtttgggttcttaacctttct

SEQ ID NO: 72754 - DNA, 67 bp, Homo sapiens
acttagggcacagagtgtttaaagaggagtggtctttcgtttgggttcttaacctttcttggctgga

SEQ ID NO: 72755 - DNA, 66 bp, Homo sapiens
agtgtttaaagaggagtggtctttcgtttgggttcttaacctttcttggctggaggggagaactga

SEQ ID NO: 72756 - DNA, 68 bp, Homo sapiens
taaagaggagtggtctttcgtttgggttcttaacctttcttggctggaggggagaactgatctgcctt

SEQ ID NO: 72757 - DNA, 66 bp, Homo sapiens
gtggtctttcgtttgggttcttaacctttcttggctggaggggagaactgatctgcctttttttgt

SEQ ID NO: 72758 - DNA, 73 bp, Homo sapiens
tgatctgcctttttttgttcaccctgggaattccatgggcaaaggggtctgactgggggctgtggagtaggca

SEQ ID NO: 72759 - DNA, 73 bp, Homo sapiens
tttttgttcaccctgggaattccatgggcaaaggggtctgactgggggctgtggagtaggcatttagtgctga

SEQ ID NO: 72760 - DNA, 71 bp, Homo sapiens
accctgggaattccatgggcaaaggggtctgactgggggctgtggagtaggcatttagtgctgagtttaaa

SEQ ID NO: 72761 - DNA, 72 bp, Homo sapiens
aattccatgggcaaaggggtctgactgggggctgtggagtaggcatttagtgctgagtttaaaacttggaca

SEQ ID NO: 72762 - DNA, 71 bp, Homo sapiens
aaaggggtctgactgggggctgtggagtaggcatttagtgctgagtttaaaacttggacactgggctgggc

SEQ ID NO: 72763 - DNA, 74 bp, Homo sapiens
aaaacaacaacaacttggacatttatgtcacatacaacttgctgataacctctctgagcatgtttcttttttgt

SEQ ID NO: 72764 - DNA, 79 bp, Homo sapiens
tgtgcctggccgtgacccagaccctttgtaggtgggagctggagagaatgggatgctaacatctatagagcacctactg

SEQ ID NO: 72765 - DNA, 78 bp, Homo sapiens
ctggccgtgacccagaccctttgtaggtgggagctggagagaatgggatgctaacatctatagagcacctactgtgtg

SEQ ID NO: 72766 - DNA, 77 bp, Homo sapiens
agaccctttgtaggtgggagctggagagaatgggatgctaacatctatagagcacctactgtgtgtcaggggctttg

SEQ ID NO: 72767 - DNA, 79 bp, Homo sapiens
tttgtaggtgggagctggagagaatgggatgctaacatctatagagcacctactgtgtgtcaggggctttgtctgtgtt

SEQ ID NO: 72768 - DNA, 80 bp, Homo sapiens
tgtaggtgggagctggagagaatgggatgctaacatctatagagcacctactgtgtgtcaggggctttgtctgtgtttta

SEQ ID NO: 72769 - DNA, 78 bp, Homo sapiens
gagctggagagaatgggatgctaacatctatagagcacctactgtgtgtcaggggctttgtctgtgttttacaaattt

SEQ ID NO: 72770 - DNA, 77 bp, Homo sapiens
tggagagaatgggatgctaacatctatagagcacctactgtgtgtcaggggctttgtctgtgttttacaaattttaa

SEQ ID NO: 72771 - DNA, 74 bp, Homo sapiens
aatgggatgctaacatctatagagcacctactgtgtgtcaggggctttgtctgtgttttacaaattttaatccc

SEQ ID NO: 72772 - DNA, 76 bp, Homo sapiens
atgctaacatctatagagcacctactgtgtgtcaggggctttgtctgtgttttacaaattttaatccctgcaatcc

SEQ ID NO: 72773 - DNA, 76 bp, Homo sapiens
taacatctatagagcacctactgtgtgtcaggggctttgtctgtgttttacaaattttaatccctgcaatcctgga

SEQ ID NO: 72774 - DNA, 75 bp, Homo sapiens
atctatagagcacctactgtgtgtcaggggctttgtctgtgttttacaaattttaatccctgcaatcctggaaga

SEQ ID NO: 72775 - DNA, 73 bp, Homo sapiens
gcacctactgtgtgtcaggggctttgtctgtgttttacaaattttaatccctgcaatcctggaagagggacat

SEQ ID NO: 72776 - DNA, 73 bp, Homo sapiens
tactgtgtgtcaggggctttgtctgtgttttacaaattttaatccctgcaatcctggaagagggacattatcc

SEQ ID NO: 72777 - DNA, 69 bp, Homo sapiens
aggggctttgtctgtgttttacaaattttaatccctgcaatcctggaagagggacattatccccactta

SEQ ID NO: 72778 - DNA, 73 bp, Homo sapiens
ttttacaaattttaatccctgcaatcctggaagagggacattatccccacttacacagaggacacagtgctgg

SEQ ID NO: 72779 - DNA, 73 bp, Homo sapiens
ttaatccctgcaatcctggaagagggacattatccccacttacacagaggacacagtgctgggggaggttaaa

SEQ ID NO: 72780 - DNA, 73 bp, Homo sapiens
aatcctggaagagggacattatccccacttacacagaggacacagtgctgggggaggttaaagtactgcagaa

SEQ ID NO: 72781 - DNA, 76 bp, Homo sapiens
aagagggacattatccccacttacacagaggacacagtgctgggggaggttaaagtactgcagaatcatgactgta

SEQ ID NO: 72782 - DNA, 76 bp, Homo sapiens
ttatccccacttacacagaggacacagtgctgggggaggttaaagtactgcagaatcatgactgtaggattgtaaa

SEQ ID NO: 72783 - DNA, 76 bp, Homo sapiens
acagtgctgggggaggttaaagtactgcagaatcatgactgtaggattgtaaagctgggctgttttccaccatcta

SEQ ID NO: 72784 - DNA, 77 bp, Homo sapiens
ggaggttaaagtactgcagaatcatgactgtaggattgtaaagctgggctgttttccaccatctacataggcagctt

SEQ ID NO: 72785 - DNA, 80 bp, Homo sapiens
aatcatgactgtaggattgtaaagctgggctgttttccaccatctacataggcagctttgagagtggattgtggggcaca

SEQ ID NO: 72786 - DNA, 77 bp, Homo sapiens
actgtaggattgtaaagctgggctgttttccaccatctacataggcagctttgagagtggattgtggggcacactct

SEQ ID NO: 72787 - DNA, 77 bp, Homo sapiens
ttgtaaagctgggctgttttccaccatctacataggcagctttgagagtggattgtggggcacactcttgggtgtgg

SEQ ID NO: 72788 - DNA, 76 bp, Homo sapiens
gggctgttttccaccatctacataggcagctttgagagtggattgtggggcacactcttgggtgtgggaagtgtgg

SEQ ID NO: 72789 - DNA, 74 bp, Homo sapiens
ccaccatctacataggcagctttgagagtggattgtggggcacactcttgggtgtgggaagtgtggggggtggg

SEQ ID NO: 72790 - DNA, 75 bp, Homo sapiens
ataggcagctttgagagtggattgtggggcacactcttgggtgtgggaagtgtggggggtggggcttagtgctga

SEQ ID NO: 72791 - DNA, 73 bp, Homo sapiens
tttgagagtggattgtggggcacactcttgggtgtgggaagtgtggggggtggggcttagtgctgactgaaac

SEQ ID NO: 72792 - DNA, 69 bp, Homo sapiens
attgtggggcacactcttgggtgtgggaagtgtggggggtggggcttagtgctgactgaaacccccttc

SEQ ID NO: 72793 - DNA, 68 bp, Homo sapiens
acactcttgggtgtgggaagtgtggggggtggggcttagtgctgactgaaacccccttccccactgta

SEQ ID NO: 72794 - DNA, 68 bp, Homo sapiens
gggggtggggcttagtgctgactgaaacccccttccccactgtagaggccctttctctgccttagaac

SEQ ID NO: 72795 - DNA, 68 bp, Homo sapiens
cttagtgctgactgaaacccccttccccactgtagaggccctttctctgccttagaacctacctttcc

SEQ ID NO: 72796 - DNA, 64 bp, Homo sapiens
actgaaacccccttccccactgtagaggccctttctctgccttagaacctacctttccccggta

SEQ ID NO: 72797 - DNA, 64 bp, Homo sapiens
ccttccccactgtagaggccctttctctgccttagaacctacctttccccggtagggggtgtag

SEQ ID NO: 72798 - DNA, 65 bp, Homo sapiens
tgtagaggccctttctctgccttagaacctacctttccccggtagggggtgtagggaaggcccaa

SEQ ID NO: 72799 - DNA, 62 bp, Homo sapiens
ccttagaacctacctttccccggtagggggtgtagggaaggcccaagccataccccctcctc

SEQ ID NO: 72800 - DNA, 62 bp, Homo sapiens
aacctacctttccccggtagggggtgtagggaaggcccaagccataccccctcctctctgtt

SEQ ID NO: 72801 - DNA, 70 bp, Homo sapiens
gggtgtagggaaggcccaagccataccccctcctctctgttttggatcctgaaggctggagagaaagaaa

SEQ ID NO: 72802 - DNA, 70 bp, Homo sapiens
aaggcccaagccataccccctcctctctgttttggatcctgaaggctggagagaaagaaagataaggggc

SEQ ID NO: 72803 - DNA, 72 bp, Homo sapiens
ataccccctcctctctgttttggatcctgaaggctggagagaaagaaagataaggggcctgggccagatctc

SEQ ID NO: 72804 - DNA, 76 bp, Homo sapiens
ttttggatcctgaaggctggagagaaagaaagataaggggcctgggccagatctccatcctgtcctggaagctgtg

SEQ ID NO: 72805 - DNA, 76 bp, Homo sapiens
aaggctggagagaaagaaagataaggggcctgggccagatctccatcctgtcctggaagctgtggatacaatctgt

SEQ ID NO: 72806 - DNA, 76 bp, Homo sapiens
aaagaaagataaggggcctgggccagatctccatcctgtcctggaagctgtggatacaatctgttcacaccatccc

SEQ ID NO: 72807 - DNA, 76 bp, Homo sapiens
agataaggggcctgggccagatctccatcctgtcctggaagctgtggatacaatctgttcacaccatccccacccc

SEQ ID NO: 72808 - DNA, 79 bp, Homo sapiens
ggccagatctccatcctgtcctggaagctgtggatacaatctgttcacaccatccccacccccaaatctgcccgctgta

SEQ ID NO: 72809 - DNA, 78 bp, Homo sapiens
atctccatcctgtcctggaagctgtggatacaatctgttcacaccatccccacccccaaatctgcccgctgtagccca

SEQ ID NO: 72810 - DNA, 77 bp, Homo sapiens
tggaagctgtggatacaatctgttcacaccatccccacccccaaatctgcccgctgtagcccacgggagtttgcaga

SEQ ID NO: 72811 - DNA, 76 bp, Homo sapiens
ctgtggatacaatctgttcacaccatccccacccccaaatctgcccgctgtagcccacgggagtttgcagaactca

SEQ ID NO: 72812 - DNA, 74 bp, Homo sapiens
aatctgttcacaccatccccacccccaaatctgcccgctgtagcccacgggagtttgcagaactcagcgggcac

SEQ ID NO: 72813 - DNA, 75 bp, Homo sapiens
tctgcccgctgtagcccacgggagtttgcagaactcagcgggcaccctccccccgatctccagacactgaaggaa

SEQ ID NO: 72814 - DNA, 72 bp, Homo sapiens
ccacgggagtttgcagaactcagcgggcaccctccccccgatctccagacactgaaggaacagaatgtaaaa

SEQ ID NO: 72815 - DNA, 75 bp, Homo sapiens
ttgcagaactcagcgggcaccctccccccgatctccagacactgaaggaacagaatgtaaaagccacagttctta

SEQ ID NO: 72816 - DNA, 69 bp, Homo sapiens
accctccccccgatctccagacactgaaggaacagaatgtaaaagccacagttcttattcttaatttgt

SEQ ID NO: 72817 - DNA, 74 bp, Homo sapiens
atctccagacactgaaggaacagaatgtaaaagccacagttcttattcttaatttgtttcaatttgtggatgga

SEQ ID NO: 72818 - DNA, 72 bp, Homo sapiens
actgaaggaacagaatgtaaaagccacagttcttattcttaatttgtttcaatttgtggatggaggcaaaga

SEQ ID NO: 72819 - DNA, 73 bp, Homo sapiens
acagaatgtaaaagccacagttcttattcttaatttgtttcaatttgtggatggaggcaaagaagttgcaagc

SEQ ID NO: 72820 - DNA, 74 bp, Homo sapiens
acagttcttattcttaatttgtttcaatttgtggatggaggcaaagaagttgcaagccatcaacagaggagccg

SEQ ID NO: 72821 - DNA, 75 bp, Homo sapiens
ttcttaatttgtttcaatttgtggatggaggcaaagaagttgcaagccatcaacagaggagccggggatgggagc

SEQ ID NO: 72822 - DNA, 73 bp, Homo sapiens
tttcaatttgtggatggaggcaaagaagttgcaagccatcaacagaggagccggggatgggagccccaaaagg

SEQ ID NO: 72823 - DNA, 76 bp, Homo sapiens
tggaggcaaagaagttgcaagccatcaacagaggagccggggatgggagccccaaaagggtggctgcatgtttgct

SEQ ID NO: 72824 - DNA, 74 bp, Homo sapiens
aaagaagttgcaagccatcaacagaggagccggggatgggagccccaaaagggtggctgcatgtttgcttcgtg

SEQ ID NO: 72825 - DNA, 76 bp, Homo sapiens
aagccatcaacagaggagccggggatgggagccccaaaagggtggctgcatgtttgcttcgtgtgcctagagactg

SEQ ID NO: 72826 - DNA, 73 bp, Homo sapiens
aacagaggagccggggatgggagccccaaaagggtggctgcatgtttgcttcgtgtgcctagagactggggaa

SEQ ID NO: 72827 - DNA, 74 bp, Homo sapiens
ggatgggagccccaaaagggtggctgcatgtttgcttcgtgtgcctagagactggggaatgcccgagggtctgg

SEQ ID NO: 72828 - DNA, 74 bp, Homo sapiens
agccccaaaagggtggctgcatgtttgcttcgtgtgcctagagactggggaatgcccgagggtctgggtgagcc

SEQ ID NO: 72829 - DNA, 75 bp, Homo sapiens
atgtttgcttcgtgtgcctagagactggggaatgcccgagggtctgggtgagccccagcagaaggcagaaaggag

SEQ ID NO: 72830 - DNA, 73 bp, Homo sapiens
tagagactggggaatgcccgagggtctgggtgagccccagcagaaggcagaaaggaggaggttgtgtccttcc

SEQ ID NO: 72831 - DNA, 75 bp, Homo sapiens
cccagcagaaggcagaaaggaggaggttgtgtccttcccttcttcctatcctctgccacttcctcgctgttgcag

SEQ ID NO: 72832 - DNA, 77 bp, Homo sapiens
aaggcagaaaggaggaggttgtgtccttcccttcttcctatcctctgccacttcctcgctgttgcagtctgtgcata

SEQ ID NO: 72833 - DNA, 79 bp, Homo sapiens
gttgtgtccttcccttcttcctatcctctgccacttcctcgctgttgcagtctgtgcatactgcctccttccctgcttc

SEQ ID NO: 72834 - DNA, 79 bp, Homo sapiens
tcccttcttcctatcctctgccacttcctcgctgttgcagtctgtgcatactgcctccttccctgcttcccactctttc

SEQ ID NO: 72835 - DNA, 80 bp, Homo sapiens
tatcctctgccacttcctcgctgttgcagtctgtgcatactgcctccttccctgcttcccactctttccctggacaatag

SEQ ID NO: 72836 - DNA, 77 bp, Homo sapiens
acttcctcgctgttgcagtctgtgcatactgcctccttccctgcttcccactctttccctggacaataggagggaca

SEQ ID NO: 72837 - DNA, 78 bp, Homo sapiens
tgttgcagtctgtgcatactgcctccttccctgcttcccactctttccctggacaataggagggacagcccaggcgga

SEQ ID NO: 72838 - DNA, 76 bp, Homo sapiens
tctgtgcatactgcctccttccctgcttcccactctttccctggacaataggagggacagcccaggcggagggaca

SEQ ID NO: 72839 - DNA, 73 bp, Homo sapiens
tccttccctgcttcccactctttccctggacaataggagggacagcccaggcggagggacagcccaggcagag

SEQ ID NO: 72840 - DNA, 73 bp, Homo sapiens
ccctgcttcccactctttccctggacaataggagggacagcccaggcggagggacagcccaggcagagggaca

SEQ ID NO: 72841 - DNA, 77 bp, Homo sapiens
tggacaataggagggacagcccaggcggagggacagcccaggcagagggacagcccaggtggagggagtgctgccta

SEQ ID NO: 72842 - DNA, 77 bp, Homo sapiens
gcggagggacagcccaggcagagggacagcccaggtggagggagtgctgcctagcaatgcctttcttggagtccgaa

SEQ ID NO: 72843 - DNA, 78 bp, Homo sapiens
agcccaggcagagggacagcccaggtggagggagtgctgcctagcaatgcctttcttggagtccgaaatgtagagtca

SEQ ID NO: 72844 - DNA, 76 bp, Homo sapiens
agagggacagcccaggtggagggagtgctgcctagcaatgcctttcttggagtccgaaatgtagagtcagacaaaa

SEQ ID NO: 72845 - DNA, 79 bp, Homo sapiens
ccaggtggagggagtgctgcctagcaatgcctttcttggagtccgaaatgtagagtcagacaaaagaacatgacatgga

SEQ ID NO: 72846 - DNA, 77 bp, Homo sapiens
ggagtgctgcctagcaatgcctttcttggagtccgaaatgtagagtcagacaaaagaacatgacatggagtttttaa

SEQ ID NO: 72847 - DNA, 74 bp, Homo sapiens
cctagcaatgcctttcttggagtccgaaatgtagagtcagacaaaagaacatgacatggagtttttaatgaaaa

SEQ ID NO: 72848 - DNA, 70 bp, Homo sapiens
agtccgaaatgtagagtcagacaaaagaacatgacatggagtttttaatgaaaatggggtccctcacctt

SEQ ID NO: 72849 - DNA, 71 bp, Homo sapiens
aaatgtagagtcagacaaaagaacatgacatggagtttttaatgaaaatggggtccctcaccttttatctc

SEQ ID NO: 72850 - DNA, 72 bp, Homo sapiens
aacatgacatggagtttttaatgaaaatggggtccctcaccttttatctcccagcaaggataatgcacaggt

SEQ ID NO: 72851 - DNA, 71 bp, Homo sapiens
tttttaatgaaaatggggtccctcaccttttatctcccagcaaggataatgcacaggttccctctggacaa

SEQ ID NO: 72852 - DNA, 73 bp, Homo sapiens
aatgaaaatggggtccctcaccttttatctcccagcaaggataatgcacaggttccctctggacaagatccca

SEQ ID NO: 72853 - DNA, 75 bp, Homo sapiens
ggtccctcaccttttatctcccagcaaggataatgcacaggttccctctggacaagatcccagcatagacgcggg

SEQ ID NO: 72854 - DNA, 76 bp, Homo sapiens
cttttatctcccagcaaggataatgcacaggttccctctggacaagatcccagcatagacgcggggagggaactca

SEQ ID NO: 72855 - DNA, 75 bp, Homo sapiens
ccagcaaggataatgcacaggttccctctggacaagatcccagcatagacgcggggagggaactcagggaaggaa

SEQ ID NO: 72856 - DNA, 70 bp, Homo sapiens
ttccctctggacaagatcccagcatagacgcggggagggaactcagggaaggaagcccgtcttcctttta

SEQ ID NO: 72857 - DNA, 67 bp, Homo sapiens
agcatagacgcggggagggaactcagggaaggaagcccgtcttccttttaggtgggtcagggccgag

SEQ ID NO: 72858 - DNA, 67 bp, Homo sapiens
ggagggaactcagggaaggaagcccgtcttccttttaggtgggtcagggccgaggtattgtgtctac

SEQ ID NO: 72859 - DNA, 68 bp, Homo sapiens
aaggaagcccgtcttccttttaggtgggtcagggccgaggtattgtgtctaccccatgccaagggatg

SEQ ID NO: 72860 - DNA, 71 bp, Homo sapiens
gtcttccttttaggtgggtcagggccgaggtattgtgtctaccccatgccaagggatgtgttgcttatggg

SEQ ID NO: 72861 - DNA, 76 bp, Homo sapiens
taggtgggtcagggccgaggtattgtgtctaccccatgccaagggatgtgttgcttatggggctgtaccagtgcag

SEQ ID NO: 72862 - DNA, 78 bp, Homo sapiens
cgaggtattgtgtctaccccatgccaagggatgtgttgcttatggggctgtaccagtgcaggcctgcctgccctttga

SEQ ID NO: 72863 - DNA, 78 bp, Homo sapiens
tattgtgtctaccccatgccaagggatgtgttgcttatggggctgtaccagtgcaggcctgcctgccctttgagggag

SEQ ID NO: 72864 - DNA, 78 bp, Homo sapiens
atgccaagggatgtgttgcttatggggctgtaccagtgcaggcctgcctgccctttgagggagtagtgtctgtgggaa

SEQ ID NO: 72865 - DNA, 76 bp, Homo sapiens
aagggatgtgttgcttatggggctgtaccagtgcaggcctgcctgccctttgagggagtagtgtctgtgggaagag

SEQ ID NO: 72866 - DNA, 75 bp, Homo sapiens
ttgcttatggggctgtaccagtgcaggcctgcctgccctttgagggagtagtgtctgtgggaagaggaagtggtt

SEQ ID NO: 72867 - DNA, 76 bp, Homo sapiens
taccagtgcaggcctgcctgccctttgagggagtagtgtctgtgggaagaggaagtggtttccatctctaagtcat

SEQ ID NO: 72868 - DNA, 72 bp, Homo sapiens
aggcctgcctgccctttgagggagtagtgtctgtgggaagaggaagtggtttccatctctaagtcattttgg

SEQ ID NO: 72869 - DNA, 71 bp, Homo sapiens
ccctttgagggagtagtgtctgtgggaagaggaagtggtttccatctctaagtcattttggggcagtgcct

SEQ ID NO: 72870 - DNA, 72 bp, Homo sapiens
agggagtagtgtctgtgggaagaggaagtggtttccatctctaagtcattttggggcagtgccttcttcctc

SEQ ID NO: 72871 - DNA, 73 bp, Homo sapiens
cctcctcctcctctgtggagttggggcacagcgagggattgggcctcccagggttgactggaggccactcaac

SEQ ID NO: 72872 - DNA, 73 bp, Homo sapiens
agttggggcacagcgagggattgggcctcccagggttgactggaggccactcaacctttggctgtcagaaata

SEQ ID NO: 72873 - DNA, 74 bp, Homo sapiens
acagcgagggattgggcctcccagggttgactggaggccactcaacctttggctgtcagaaatagaggtgctcc

SEQ ID NO: 72874 - DNA, 72 bp, Homo sapiens
ggattgggcctcccagggttgactggaggccactcaacctttggctgtcagaaatagaggtgctcccctccc

SEQ ID NO: 72875 - DNA, 73 bp, Homo sapiens
gaggccactcaacctttggctgtcagaaatagaggtgctcccctccccattttgacttctgggttgctggaaa

SEQ ID NO: 72876 - DNA, 70 bp, Homo sapiens
aacctttggctgtcagaaatagaggtgctcccctccccattttgacttctgggttgctggaaacctcaac

SEQ ID NO: 72877 - DNA, 74 bp, Homo sapiens
ttggctgtcagaaatagaggtgctcccctccccattttgacttctgggttgctggaaacctcaaccagcccaca

SEQ ID NO: 72878 - DNA, 70 bp, Homo sapiens
aaatagaggtgctcccctccccattttgacttctgggttgctggaaacctcaaccagcccacagaccaag

SEQ ID NO: 72879 - DNA, 71 bp, Homo sapiens
ccctccccattttgacttctgggttgctggaaacctcaaccagcccacagaccaagggccttccatgggca

SEQ ID NO: 72880 - DNA, 72 bp, Homo sapiens
tttgacttctgggttgctggaaacctcaaccagcccacagaccaagggccttccatgggcaggagtcttaaa

SEQ ID NO: 72881 - DNA, 72 bp, Homo sapiens
tgggttgctggaaacctcaaccagcccacagaccaagggccttccatgggcaggagtcttaaaggacagttc

SEQ ID NO: 72882 - DNA, 72 bp, Homo sapiens
gttgctggaaacctcaaccagcccacagaccaagggccttccatgggcaggagtcttaaaggacagttcttc

SEQ ID NO: 72883 - DNA, 71 bp, Homo sapiens
aaacctcaaccagcccacagaccaagggccttccatgggcaggagtcttaaaggacagttcttcctgtgtg

SEQ ID NO: 72884 - DNA, 71 bp, Homo sapiens
aaccagcccacagaccaagggccttccatgggcaggagtcttaaaggacagttcttcctgtgtggccttgg

SEQ ID NO: 72885 - DNA, 72 bp, Homo sapiens
agcccacagaccaagggccttccatgggcaggagtcttaaaggacagttcttcctgtgtggccttgggcagg

SEQ ID NO: 72886 - DNA, 71 bp, Homo sapiens
accaagggccttccatgggcaggagtcttaaaggacagttcttcctgtgtggccttgggcaggtcacccaa

SEQ ID NO: 72887 - DNA, 74 bp, Homo sapiens
cttccatgggcaggagtcttaaaggacagttcttcctgtgtggccttgggcaggtcacccaagctctctccaaa

SEQ ID NO: 72888 - DNA, 74 bp, Homo sapiens
atgggcaggagtcttaaaggacagttcttcctgtgtggccttgggcaggtcacccaagctctctccaaatctgt

SEQ ID NO: 72889 - DNA, 72 bp, Homo sapiens
aggagtcttaaaggacagttcttcctgtgtggccttgggcaggtcacccaagctctctccaaatctgtttcc

SEQ ID NO: 72890 - DNA, 73 bp, Homo sapiens
acagttcttcctgtgtggccttgggcaggtcacccaagctctctccaaatctgtttcctcctccttaaagcaa

SEQ ID NO: 72891 - DNA, 74 bp, Homo sapiens
ttcctgtgtggccttgggcaggtcacccaagctctctccaaatctgtttcctcctccttaaagcaagacttctg

SEQ ID NO: 72892 - DNA, 73 bp, Homo sapiens
ccttgggcaggtcacccaagctctctccaaatctgtttcctcctccttaaagcaagacttctggctgggcacg

SEQ ID NO: 72893 - DNA, 69 bp, Homo sapiens
aaataaaaaaatagagcaaaacttctaatctctccttggctgggcgagttgccgttaggccacggtcgc

SEQ ID NO: 72894 - DNA, 71 bp, Homo sapiens
aaaaatagagcaaaacttctaatctctccttggctgggcgagttgccgttaggccacggtcgcctgcttcc

SEQ ID NO: 72895 - DNA, 72 bp, Homo sapiens
aaaacttctaatctctccttggctgggcgagttgccgttaggccacggtcgcctgcttcctgctgaggccct

SEQ ID NO: 72896 - DNA, 76 bp, Homo sapiens
taatctctccttggctgggcgagttgccgttaggccacggtcgcctgcttcctgctgaggcccttggtgagtttca

SEQ ID NO: 72897 - DNA, 74 bp, Homo sapiens
ctgggcgagttgccgttaggccacggtcgcctgcttcctgctgaggcccttggtgagtttcacgtacccagcaa

SEQ ID NO: 72898 - DNA, 78 bp, Homo sapiens
taggccacggtcgcctgcttcctgctgaggcccttggtgagtttcacgtacccagcaaggctgtgatagtgaggggca

SEQ ID NO: 72899 - DNA, 78 bp, Homo sapiens
tgcttcctgctgaggcccttggtgagtttcacgtacccagcaaggctgtgatagtgaggggcagggtagagctgggta

SEQ ID NO: 72900 - DNA, 76 bp, Homo sapiens
tgaggcccttggtgagtttcacgtacccagcaaggctgtgatagtgaggggcagggtagagctgggtactgtcttg

SEQ ID NO: 72901 - DNA, 73 bp, Homo sapiens
cccttggtgagtttcacgtacccagcaaggctgtgatagtgaggggcagggtagagctgggtactgtcttggg

SEQ ID NO: 72902 - DNA, 76 bp, Homo sapiens
acgtacccagcaaggctgtgatagtgaggggcagggtagagctgggtactgtcttgggggatggtgccactctata

SEQ ID NO: 72903 - DNA, 78 bp, Homo sapiens
agcaaggctgtgatagtgaggggcagggtagagctgggtactgtcttgggggatggtgccactctatactgggagcca

SEQ ID NO: 72904 - DNA, 78 bp, Homo sapiens
ctgtgatagtgaggggcagggtagagctgggtactgtcttgggggatggtgccactctatactgggagccagtgtcca

SEQ ID NO: 72905 - DNA, 76 bp, Homo sapiens
gggcagggtagagctgggtactgtcttgggggatggtgccactctatactgggagccagtgtccacctggcactgg

SEQ ID NO: 72906 - DNA, 79 bp, Homo sapiens
tagagctgggtactgtcttgggggatggtgccactctatactgggagccagtgtccacctggcactgggcctcatgatt

SEQ ID NO: 72907 - DNA, 77 bp, Homo sapiens
gtactgtcttgggggatggtgccactctatactgggagccagtgtccacctggcactgggcctcatgatttcctgtt

SEQ ID NO: 72908 - DNA, 78 bp, Homo sapiens
atggtgccactctatactgggagccagtgtccacctggcactgggcctcatgatttcctgtttgttgtcccctccaga

SEQ ID NO: 72909 - DNA, 76 bp, Homo sapiens
ccactctatactgggagccagtgtccacctggcactgggcctcatgatttcctgtttgttgtcccctccagatggg

SEQ ID NO: 72910 - DNA, 73 bp, Homo sapiens
actgggagccagtgtccacctggcactgggcctcatgatttcctgtttgttgtcccctccagatggggttggg

SEQ ID NO: 72911 - DNA, 72 bp, Homo sapiens
agtgtccacctggcactgggcctcatgatttcctgtttgttgtcccctccagatggggttggggacaggagg

SEQ ID NO: 72912 - DNA, 70 bp, Homo sapiens
actgggcctcatgatttcctgtttgttgtcccctccagatggggttggggacaggagggggccctgcctg

SEQ ID NO: 72913 - DNA, 70 bp, Homo sapiens
atgatttcctgtttgttgtcccctccagatggggttggggacaggagggggccctgcctggcacaagtgg

SEQ ID NO: 72914 - DNA, 68 bp, Homo sapiens
tttgttgtcccctccagatggggttggggacaggagggggccctgcctggcacaagtgggggccagtt

SEQ ID NO: 72915 - DNA, 72 bp, Homo sapiens
gggttggggacaggagggggccctgcctggcacaagtgggggccagtttggcctgcacctgctgagggctta

SEQ ID NO: 72916 - DNA, 73 bp, Homo sapiens
caggagggggccctgcctggcacaagtgggggccagtttggcctgcacctgctgagggcttactaaacgcaaa

SEQ ID NO: 72917 - DNA, 74 bp, Homo sapiens
ccctgcctggcacaagtgggggccagtttggcctgcacctgctgagggcttactaaacgcaaagccctgagaag

SEQ ID NO: 72918 - DNA, 76 bp, Homo sapiens
cctggcacaagtgggggccagtttggcctgcacctgctgagggcttactaaacgcaaagccctgagaaggagctga

SEQ ID NO: 72919 - DNA, 78 bp, Homo sapiens
tttggcctgcacctgctgagggcttactaaacgcaaagccctgagaaggagctgagggagggataaggctgagcagga

SEQ ID NO: 72920 - DNA, 75 bp, Homo sapiens
acctgctgagggcttactaaacgcaaagccctgagaaggagctgagggagggataaggctgagcaggatggggcc

SEQ ID NO: 72921 - DNA, 77 bp, Homo sapiens
ttactaaacgcaaagccctgagaaggagctgagggagggataaggctgagcaggatggggccccaggcctgcagaca

SEQ ID NO: 72922 - DNA, 79 bp, Homo sapiens
cctgagaaggagctgagggagggataaggctgagcaggatggggccccaggcctgcagacagctgccgctggaggcccc

SEQ ID NO: 72923 - DNA, 78 bp, Homo sapiens
agctgagggagggataaggctgagcaggatggggccccaggcctgcagacagctgccgctggaggccccccagcccca

SEQ ID NO: 72924 - DNA, 80 bp, Homo sapiens
ataaggctgagcaggatggggccccaggcctgcagacagctgccgctggaggccccccagccccagctgcgggccagagc

SEQ ID NO: 72925 - DNA, 76 bp, Homo sapiens
aggatggggccccaggcctgcagacagctgccgctggaggccccccagccccagctgcgggccagagccttccttg

SEQ ID NO: 72926 - DNA, 75 bp, Homo sapiens
cccaggcctgcagacagctgccgctggaggccccccagccccagctgcgggccagagccttccttgtttcccact

SEQ ID NO: 72927 - DNA, 76 bp, Homo sapiens
cctgcagacagctgccgctggaggccccccagccccagctgcgggccagagccttccttgtttcccacttctccca

SEQ ID NO: 72928 - DNA, 73 bp, Homo sapiens
agctgccgctggaggccccccagccccagctgcgggccagagccttccttgtttcccacttctcccactgccc

SEQ ID NO: 72929 - DNA, 71 bp, Homo sapiens
ccccccagccccagctgcgggccagagccttccttgtttcccacttctcccactgccccaggacactgtgt

SEQ ID NO: 72930 - DNA, 77 bp, Homo sapiens
cccagctgcgggccagagccttccttgtttcccacttctcccactgccccaggacactgtgttctgctctgacctgc

SEQ ID NO: 72931 - DNA, 76 bp, Homo sapiens
gccagagccttccttgtttcccacttctcccactgccccaggacactgtgttctgctctgacctgccccatgacct

SEQ ID NO: 72932 - DNA, 77 bp, Homo sapiens
ttccttgtttcccacttctcccactgccccaggacactgtgttctgctctgacctgccccatgaccttgctgttgcc

SEQ ID NO: 72933 - DNA, 77 bp, Homo sapiens
tttcccacttctcccactgccccaggacactgtgttctgctctgacctgccccatgaccttgctgttgcccagaacg

SEQ ID NO: 72934 - DNA, 78 bp, Homo sapiens
ccactgccccaggacactgtgttctgctctgacctgccccatgaccttgctgttgcccagaacgggcctcttgcccta

SEQ ID NO: 72935 - DNA, 78 bp, Homo sapiens
aggacactgtgttctgctctgacctgccccatgaccttgctgttgcccagaacgggcctcttgccctagcttctcctc

SEQ ID NO: 72936 - DNA, 77 bp, Homo sapiens
tctgacctgccccatgaccttgctgttgcccagaacgggcctcttgccctagcttctcctctccagctccggaaatc

SEQ ID NO: 72937 - DNA, 75 bp, Homo sapiens
atgaccttgctgttgcccagaacgggcctcttgccctagcttctcctctccagctccggaaatcctatctatcct

SEQ ID NO: 72938 - DNA, 75 bp, Homo sapiens
tgttgcccagaacgggcctcttgccctagcttctcctctccagctccggaaatcctatctatccttcaaggaaca

SEQ ID NO: 72939 - DNA, 74 bp, Homo sapiens
agaacgggcctcttgccctagcttctcctctccagctccggaaatcctatctatccttcaaggaacatcttgaa

SEQ ID NO: 72940 - DNA, 77 bp, Homo sapiens
ttgccctagcttctcctctccagctccggaaatcctatctatccttcaaggaacatcttgaatgccgcctcttccca

SEQ ID NO: 72941 - DNA, 77 bp, Homo sapiens
ttctcctctccagctccggaaatcctatctatccttcaaggaacatcttgaatgccgcctcttcccagaaatcttca

SEQ ID NO: 72942 - DNA, 75 bp, Homo sapiens
aatcctatctatccttcaaggaacatcttgaatgccgcctcttcccagaaatcttcacagatgttcccccttgct

SEQ ID NO: 72943 - DNA, 77 bp, Homo sapiens
atctatccttcaaggaacatcttgaatgccgcctcttcccagaaatcttcacagatgttcccccttgcttgccacac

SEQ ID NO: 72944 - DNA, 76 bp, Homo sapiens
aacatcttgaatgccgcctcttcccagaaatcttcacagatgttcccccttgcttgccacactctgcctccctact

SEQ ID NO: 72945 - DNA, 76 bp, Homo sapiens
cttgaatgccgcctcttcccagaaatcttcacagatgttcccccttgcttgccacactctgcctccctacttagaa

SEQ ID NO: 72946 - DNA, 75 bp, Homo sapiens
ttcccagaaatcttcacagatgttcccccttgcttgccacactctgcctccctacttagaatgcctgtgggtcct

SEQ ID NO: 72947 - DNA, 74 bp, Homo sapiens
aatcttcacagatgttcccccttgcttgccacactctgcctccctacttagaatgcctgtgggtccttatttat

SEQ ID NO: 72948 - DNA, 71 bp, Homo sapiens
acagatgttcccccttgcttgccacactctgcctccctacttagaatgcctgtgggtccttatttattttt

SEQ ID NO: 72949 - DNA, 74 bp, Homo sapiens
cttgcttgccacactctgcctccctacttagaatgcctgtgggtccttatttattttttaacaacactcatctc

SEQ ID NO: 72950 - DNA, 72 bp, Homo sapiens
actctgcctccctacttagaatgcctgtgggtccttatttattttttaacaacactcatctcgctacccaga

SEQ ID NO: 72951 - DNA, 71 bp, Homo sapiens
tccctacttagaatgcctgtgggtccttatttattttttaacaacactcatctcgctacccagaagttgct

SEQ ID NO: 72952 - DNA, 74 bp, Homo sapiens
ttattttttaacaacactcatctcgctacccagaagttgcttctcccctgttcctgccatgagctgtaaccatt

SEQ ID NO: 72953 - DNA, 77 bp, Homo sapiens
ttaacaacactcatctcgctacccagaagttgcttctcccctgttcctgccatgagctgtaaccatttgggacatct

SEQ ID NO: 72954 - DNA, 76 bp, Homo sapiens
atctcgctacccagaagttgcttctcccctgttcctgccatgagctgtaaccatttgggacatcttttcctgacca

SEQ ID NO: 72955 - DNA, 76 bp, Homo sapiens
ttctcccctgttcctgccatgagctgtaaccatttgggacatcttttcctgaccacaaggtctttgatggcaggga

SEQ ID NO: 72956 - DNA, 79 bp, Homo sapiens
ctgttcctgccatgagctgtaaccatttgggacatcttttcctgaccacaaggtctttgatggcagggacagagtctca

SEQ ID NO: 72957 - DNA, 74 bp, Homo sapiens
agctgtaaccatttgggacatcttttcctgaccacaaggtctttgatggcagggacagagtctcaggtccctta

SEQ ID NO: 72958 - DNA, 83 bp, Homo sapiens
accacaaggtctttgatggcagggacagagtctcaggtcccttagcgccttgcagctgtgagcgcagagccttgctccatcat

SEQ ID NO: 72959 - DNA, 83 bp, Homo sapiens
aggtctttgatggcagggacagagtctcaggtcccttagcgccttgcagctgtgagcgcagagccttgctccatcatttgaaa

SEQ ID NO: 72960 - DNA, 83 bp, Homo sapiens
gggacagagtctcaggtcccttagcgccttgcagctgtgagcgcagagccttgctccatcatttgaaagatcccgaaggcatg

SEQ ID NO: 72961 - DNA, 84 bp, Homo sapiens
agagtctcaggtcccttagcgccttgcagctgtgagcgcagagccttgctccatcatttgaaagatcccgaaggcatggaagca

SEQ ID NO: 72962 - DNA, 87 bp, Homo sapiens
ttgcagctgtgagcgcagagccttgctccatcatttgaaagatcccgaaggcatggaagcactctgtcctcttcgccattagtctca

SEQ ID NO: 72963 - DNA, 83 bp, Homo sapiens
agcgcagagccttgctccatcatttgaaagatcccgaaggcatggaagcactctgtcctcttcgccattagtctcatccactg

SEQ ID NO: 72964 - DNA, 81 bp, Homo sapiens
cttgctccatcatttgaaagatcccgaaggcatggaagcactctgtcctcttcgccattagtctcatccactgtcaagatt

SEQ ID NO: 72965 - DNA, 79 bp, Homo sapiens
aaagatcccgaaggcatggaagcactctgtcctcttcgccattagtctcatccactgtcaagatttgcatacctgcccc

SEQ ID NO: 72966 - DNA, 82 bp, Homo sapiens
agcactctgtcctcttcgccattagtctcatccactgtcaagatttgcatacctgcccccagaccccagcattccatctgta

SEQ ID NO: 72967 - DNA, 82 bp, Homo sapiens
ttcgccattagtctcatccactgtcaagatttgcatacctgcccccagaccccagcattccatctgtagccctgactgcact

SEQ ID NO: 72968 - DNA, 79 bp, Homo sapiens
agatttgcatacctgcccccagaccccagcattccatctgtagccctgactgcacttcagggccccacatccacctgtc

SEQ ID NO: 72969 - DNA, 79 bp, Homo sapiens
cccccagaccccagcattccatctgtagccctgactgcacttcagggccccacatccacctgtccagcagcccagtgga

SEQ ID NO: 72970 - DNA, 82 bp, Homo sapiens
attccatctgtagccctgactgcacttcagggccccacatccacctgtccagcagcccagtggacttctctgctttgcagtc

SEQ ID NO: 72971 - DNA, 83 bp, Homo sapiens
ctgactgcacttcagggccccacatccacctgtccagcagcccagtggacttctctgctttgcagtctcaggaacttcactga

SEQ ID NO: 72972 - DNA, 81 bp, Homo sapiens
ttcagggccccacatccacctgtccagcagcccagtggacttctctgctttgcagtctcaggaacttcactgatgcgtaag

SEQ ID NO: 72973 - DNA, 81 bp, Homo sapiens
acctgtccagcagcccagtggacttctctgctttgcagtctcaggaacttcactgatgcgtaagtcacacacaagtctctt

SEQ ID NO: 72974 - DNA, 79 bp, Homo sapiens
cccagtggacttctctgctttgcagtctcaggaacttcactgatgcgtaagtcacacacaagtctctttgctacctctt

SEQ ID NO: 72975 - DNA, 79 bp, Homo sapiens
acttctctgctttgcagtctcaggaacttcactgatgcgtaagtcacacacaagtctctttgctacctcttttcccata

SEQ ID NO: 72976 - DNA, 76 bp, Homo sapiens
tttgcagtctcaggaacttcactgatgcgtaagtcacacacaagtctctttgctacctcttttcccatacccctta

SEQ ID NO: 72977 - DNA, 73 bp, Homo sapiens
tctcaggaacttcactgatgcgtaagtcacacacaagtctctttgctacctcttttcccataccccttacccc

SEQ ID NO: 72978 - DNA, 70 bp, Homo sapiens
ttcactgatgcgtaagtcacacacaagtctctttgctacctcttttcccataccccttacccccaccccc

SEQ ID NO: 72979 - DNA, 66 bp, Homo sapiens
taagtcacacacaagtctctttgctacctcttttcccataccccttacccccacccccccacgtta

SEQ ID NO: 72980 - DNA, 64 bp, Homo sapiens
acacaagtctctttgctacctcttttcccataccccttacccccacccccccacgttatttgta

SEQ ID NO: 72981 - DNA, 61 bp, Homo sapiens
tttgctacctcttttcccataccccttacccccacccccccacgttatttgtacctttaaa

SEQ ID NO: 72982 - DNA, 60 bp, Homo sapiens
tcttttcccataccccttacccccacccccccacgttatttgtacctttaaaatgtttat

SEQ ID NO: 72983 - DNA, 68 bp, Homo sapiens
acccccccacgttatttgtacctttaaaatgtttattgaatccaccttcctctgtccatcagcacttc

SEQ ID NO: 72984 - DNA, 70 bp, Homo sapiens
acgttatttgtacctttaaaatgtttattgaatccaccttcctctgtccatcagcacttccagtttccta

SEQ ID NO: 72985 - DNA, 71 bp, Homo sapiens
ctttaaaatgtttattgaatccaccttcctctgtccatcagcacttccagtttcctaggccaagccaccct

SEQ ID NO: 72986 - DNA, 76 bp, Homo sapiens
aatgtttattgaatccaccttcctctgtccatcagcacttccagtttcctaggccaagccacccttgtctgatgcc

SEQ ID NO: 72987 - DNA, 80 bp, Homo sapiens
aatccaccttcctctgtccatcagcacttccagtttcctaggccaagccacccttgtctgatgcctggactgctgcagta

SEQ ID NO: 72988 - DNA, 80 bp, Homo sapiens
ttcctctgtccatcagcacttccagtttcctaggccaagccacccttgtctgatgcctggactgctgcagtagcttttac

SEQ ID NO: 72989 - DNA, 77 bp, Homo sapiens
agcacttccagtttcctaggccaagccacccttgtctgatgcctggactgctgcagtagcttttacctggtctctct

SEQ ID NO: 72990 - DNA, 78 bp, Homo sapiens
tttcctaggccaagccacccttgtctgatgcctggactgctgcagtagcttttacctggtctctcttgccctcctata

SEQ ID NO: 72991 - DNA, 81 bp, Homo sapiens
ttgtctgatgcctggactgctgcagtagcttttacctggtctctcttgccctcctataatccattcttcacacaactactg

SEQ ID NO: 72992 - DNA, 78 bp, Homo sapiens
atgcctggactgctgcagtagcttttacctggtctctcttgccctcctataatccattcttcacacaactactggaaa

SEQ ID NO: 72993 - DNA, 75 bp, Homo sapiens
tgcagtagcttttacctggtctctcttgccctcctataatccattcttcacacaactactggaaagatcttttta

SEQ ID NO: 72994 - DNA, 73 bp, Homo sapiens
ttttacctggtctctcttgccctcctataatccattcttcacacaactactggaaagatctttttacactgta

SEQ ID NO: 72995 - DNA, 75 bp, Homo sapiens
ctctcttgccctcctataatccattcttcacacaactactggaaagatctttttacactgtaaatctgatctttc

SEQ ID NO: 72996 - DNA, 72 bp, Homo sapiens
tccattcttcacacaactactggaaagatctttttacactgtaaatctgatctttcctttgcttggaacctt

SEQ ID NO: 72997 - DNA, 72 bp, Homo sapiens
cttcacacaactactggaaagatctttttacactgtaaatctgatctttcctttgcttggaacctttctatg

SEQ ID NO: 72998 - DNA, 71 bp, Homo sapiens
ctttttacactgtaaatctgatctttcctttgcttggaacctttctatggcttttccttgcatttaggata

SEQ ID NO: 72999 - DNA, 68 bp, Homo sapiens
atctttcctttgcttggaacctttctatggcttttccttgcatttaggataaaatccaaaagccttac

SEQ ID NO: 73000 - DNA, 71 bp, Homo sapiens
ttgcttggaacctttctatggcttttccttgcatttaggataaaatccaaaagccttactgaggcctataa

SEQ ID NO: 73001 - DNA, 68 bp, Homo sapiens
aacctttctatggcttttccttgcatttaggataaaatccaaaagccttactgaggcctataagcccc

SEQ ID NO: 73002 - DNA, 70 bp, Homo sapiens
cttttccttgcatttaggataaaatccaaaagccttactgaggcctataagcccccctggtctggcctga

SEQ ID NO: 73003 - DNA, 71 bp, Homo sapiens
tttaggataaaatccaaaagccttactgaggcctataagcccccctggtctggcctgagcccacctctcta

SEQ ID NO: 73004 - DNA, 71 bp, Homo sapiens
ataaaatccaaaagccttactgaggcctataagcccccctggtctggcctgagcccacctctctagcctgg

SEQ ID NO: 73005 - DNA, 71 bp, Homo sapiens
ccttactgaggcctataagcccccctggtctggcctgagcccacctctctagcctggtcttgtgtaccttt

SEQ ID NO: 73006 - DNA, 69 bp, Homo sapiens
aggcctataagcccccctggtctggcctgagcccacctctctagcctggtcttgtgtaccttttccttt

SEQ ID NO: 73007 - DNA, 70 bp, Homo sapiens
ccccctggtctggcctgagcccacctctctagcctggtcttgtgtaccttttccttttgaattttgtgcc

SEQ ID NO: 73008 - DNA, 74 bp, Homo sapiens
gtctggcctgagcccacctctctagcctggtcttgtgtaccttttccttttgaattttgtgccccatgattcta

SEQ ID NO: 73009 - DNA, 73 bp, Homo sapiens
tagcctggtcttgtgtaccttttccttttgaattttgtgccccatgattctagccttctgccagttccttcaa

SEQ ID NO: 73010 - DNA, 75 bp, Homo sapiens
ttgtgtaccttttccttttgaattttgtgccccatgattctagccttctgccagttccttcaatgaactcatcaa

SEQ ID NO: 73011 - DNA, 76 bp, Homo sapiens
ttttccttttgaattttgtgccccatgattctagccttctgccagttccttcaatgaactcatcaactgctgtaac

SEQ ID NO: 73012 - DNA, 77 bp, Homo sapiens
tttgaattttgtgccccatgattctagccttctgccagttccttcaatgaactcatcaactgctgtaaccccagggc

SEQ ID NO: 73013 - DNA, 79 bp, Homo sapiens
ccatgattctagccttctgccagttccttcaatgaactcatcaactgctgtaaccccagggcctttgcacagactcgcc

SEQ ID NO: 73014 - DNA, 76 bp, Homo sapiens
tagccttctgccagttccttcaatgaactcatcaactgctgtaaccccagggcctttgcacagactcgccctttaa

SEQ ID NO: 73015 - DNA, 74 bp, Homo sapiens
cagttccttcaatgaactcatcaactgctgtaaccccagggcctttgcacagactcgccctttaactggaacta

SEQ ID NO: 73016 - DNA, 72 bp, Homo sapiens
aatgaactcatcaactgctgtaaccccagggcctttgcacagactcgccctttaactggaactacactcctt

SEQ ID NO: 73017 - DNA, 71 bp, Homo sapiens
atcaactgctgtaaccccagggcctttgcacagactcgccctttaactggaactacactcctttctactct

SEQ ID NO: 73018 - DNA, 71 bp, Homo sapiens
gcctttgcacagactcgccctttaactggaactacactcctttctactctttgcctgattaacttacaaac

SEQ ID NO: 73019 - DNA, 68 bp, Homo sapiens
agactcgccctttaactggaactacactcctttctactctttgcctgattaacttacaaactttctct

SEQ ID NO: 73020 - DNA, 69 bp, Homo sapiens
tttaactggaactacactcctttctactctttgcctgattaacttacaaactttctcttatggtaggtc

SEQ ID NO: 73021 - DNA, 70 bp, Homo sapiens
tggaactacactcctttctactctttgcctgattaacttacaaactttctcttatggtaggtctgtttta

SEQ ID NO: 73022 - DNA, 69 bp, Homo sapiens
ctcctttctactctttgcctgattaacttacaaactttctcttatggtaggtctgttttatttgagttc

SEQ ID NO: 73023 - DNA, 68 bp, Homo sapiens
ctctttgcctgattaacttacaaactttctcttatggtaggtctgttttatttgagttcttccctaat

SEQ ID NO: 73024 - DNA, 65 bp, Homo sapiens
taacttacaaactttctcttatggtaggtctgttttatttgagttcttccctaatttagttaaac

SEQ ID NO: 73025 - DNA, 64 bp, Homo sapiens
ctttctcttatggtaggtctgttttatttgagttcttccctaatttagttaaacctaaattagg

SEQ ID NO: 73026 - DNA, 65 bp, Homo sapiens
tggtaggtctgttttatttgagttcttccctaatttagttaaacctaaattaggtacctatgtta

SEQ ID NO: 73027 - DNA, 64 bp, Homo sapiens
ggtctgttttatttgagttcttccctaatttagttaaacctaaattaggtacctatgttaattc

SEQ ID NO: 73028 - DNA, 69 bp, Homo sapiens
gagttcttccctaatttagttaaacctaaattaggtacctatgttaattcttcagagcataatagcatt

SEQ ID NO: 73029 - DNA, 77 bp, Homo sapiens
gttaaacctaaattaggtacctatgttaattcttcagagcataatagcatttatctcagtttgcaattgtgtgtgca

SEQ ID NO: 73030 - DNA, 82 bp, Homo sapiens
attaggtacctatgttaattcttcagagcataatagcatttatctcagtttgcaattgtgtgtgcatacagtgattatttgc

SEQ ID NO: 73031 - DNA, 84 bp, Homo sapiens
ctatgttaattcttcagagcataatagcatttatctcagtttgcaattgtgtgtgcatacagtgattatttgcttaatggctgt

SEQ ID NO: 73032 - DNA, 85 bp, Homo sapiens
ttcttcagagcataatagcatttatctcagtttgcaattgtgtgtgcatacagtgattatttgcttaatggctgttgctccctaa

SEQ ID NO: 73033 - DNA, 82 bp, Homo sapiens
taatagcatttatctcagtttgcaattgtgtgtgcatacagtgattatttgcttaatggctgttgctccctaaggtctacaa

SEQ ID NO: 73034 - DNA, 80 bp, Homo sapiens
atttatctcagtttgcaattgtgtgtgcatacagtgattatttgcttaatggctgttgctccctaaggtctacaagggca

SEQ ID NO: 73035 - DNA, 77 bp, Homo sapiens
gtttgcaattgtgtgtgcatacagtgattatttgcttaatggctgttgctccctaaggtctacaagggcaggttccc

SEQ ID NO: 73036 - DNA, 77 bp, Homo sapiens
tgcatacagtgattatttgcttaatggctgttgctccctaaggtctacaagggcaggttccccagggtgtccacata

SEQ ID NO: 73037 - DNA, 73 bp, Homo sapiens
agtgattatttgcttaatggctgttgctccctaaggtctacaagggcaggttccccagggtgtccacatagaa

SEQ ID NO: 73038 - DNA, 73 bp, Homo sapiens
ttaatggctgttgctccctaaggtctacaagggcaggttccccagggtgtccacatagaaggtgctcagaaaa

SEQ ID NO: 73039 - DNA, 70 bp, Homo sapiens
cctaaggtctacaagggcaggttccccagggtgtccacatagaaggtgctcagaaaaataccttgaattg

SEQ ID NO: 73040 - DNA, 72 bp, Homo sapiens
cccagggtgtccacatagaaggtgctcagaaaaataccttgaattggcctagcttggtaagaacatgggctt

SEQ ID NO: 73041 - DNA, 77 bp, Homo sapiens
tgtccacatagaaggtgctcagaaaaataccttgaattggcctagcttggtaagaacatgggctttggcagcaggaa

SEQ ID NO: 73042 - DNA, 74 bp, Homo sapiens
aggtgctcagaaaaataccttgaattggcctagcttggtaagaacatgggctttggcagcaggaagttcaaata

SEQ ID NO: 73043 - DNA, 73 bp, Homo sapiens
aaaaataccttgaattggcctagcttggtaagaacatgggctttggcagcaggaagttcaaatacctgctcta

SEQ ID NO: 73044 - DNA, 75 bp, Homo sapiens
ttgaattggcctagcttggtaagaacatgggctttggcagcaggaagttcaaatacctgctctactctttattat

SEQ ID NO: 73045 - DNA, 76 bp, Homo sapiens
ggtaagaacatgggctttggcagcaggaagttcaaatacctgctctactctttattattagtaatgtgatcttgga

SEQ ID NO: 73046 - DNA, 75 bp, Homo sapiens
aaatacctgctctactctttattattagtaatgtgatcttggacaacccacatagccttgctgagacctgtttta

SEQ ID NO: 73047 - DNA, 74 bp, Homo sapiens
ctctactctttattattagtaatgtgatcttggacaacccacatagccttgctgagacctgttttatttgtaaa

SEQ ID NO: 73048 - DNA, 75 bp, Homo sapiens
ttattattagtaatgtgatcttggacaacccacatagccttgctgagacctgttttatttgtaaaacatctcttg

SEQ ID NO: 73049 - DNA, 78 bp, Homo sapiens
gtaatgtgatcttggacaacccacatagccttgctgagacctgttttatttgtaaaacatctcttggagttgctgtga

SEQ ID NO: 73050 - DNA, 75 bp, Homo sapiens
ttggacaacccacatagccttgctgagacctgttttatttgtaaaacatctcttggagttgctgtgaggataaaa

SEQ ID NO: 73051 - DNA, 77 bp, Homo sapiens
atagccttgctgagacctgttttatttgtaaaacatctcttggagttgctgtgaggataaaatgacaacatatataa

SEQ ID NO: 73052 - DNA, 77 bp, Homo sapiens
ttatttgtaaaacatctcttggagttgctgtgaggataaaatgacaacatatataaagagccaggcttcttctagaa

SEQ ID NO: 73053 - DNA, 78 bp, Homo sapiens
taaaacatctcttggagttgctgtgaggataaaatgacaacatatataaagagccaggcttcttctagaagaatgtcc

SEQ ID NO: 73054 - DNA, 79 bp, Homo sapiens
tgaggataaaatgacaacatatataaagagccaggcttcttctagaagaatgtccttgggtagcatgtacatttccatc

SEQ ID NO: 73055 - DNA, 74 bp, Homo sapiens
aacatatataaagagccaggcttcttctagaagaatgtccttgggtagcatgtacatttccatccttcctttta

SEQ ID NO: 73056 - DNA, 73 bp, Homo sapiens
aagagccaggcttcttctagaagaatgtccttgggtagcatgtacatttccatccttccttttagagagtggg

SEQ ID NO: 73057 - DNA, 73 bp, Homo sapiens
tcttctagaagaatgtccttgggtagcatgtacatttccatccttccttttagagagtgggggtaataggata

SEQ ID NO: 73058 - DNA, 69 bp, Homo sapiens
aagaatgtccttgggtagcatgtacatttccatccttccttttagagagtgggggtaataggatacccc

SEQ ID NO: 73059 - DNA, 69 bp, Homo sapiens
ttgggtagcatgtacatttccatccttccttttagagagtgggggtaataggataccccctcctccagg

SEQ ID NO: 73060 - DNA, 67 bp, Homo sapiens
tgtacatttccatccttccttttagagagtgggggtaataggataccccctcctccaggggtatccc

SEQ ID NO: 73061 - DNA, 65 bp, Homo sapiens
atccttccttttagagagtgggggtaataggataccccctcctccaggggtatcccctctttcta

SEQ ID NO: 73062 - DNA, 66 bp, Homo sapiens
taataggataccccctcctccaggggtatcccctctttctagggacctacccaagctaggcctttc

SEQ ID NO: 73063 - DNA, 70 bp, Homo sapiens
tcctccaggggtatcccctctttctagggacctacccaagctaggcctttcttccagtgaaacgtgcatc

SEQ ID NO: 73064 - DNA, 69 bp, Homo sapiens
ccctctttctagggacctacccaagctaggcctttcttccagtgaaacgtgcatcccgagggcttctag

SEQ ID NO: 73065 - DNA, 72 bp, Homo sapiens
ttctagggacctacccaagctaggcctttcttccagtgaaacgtgcatcccgagggcttctaggatgaagta

SEQ ID NO: 73066 - DNA, 73 bp, Homo sapiens
ctacccaagctaggcctttcttccagtgaaacgtgcatcccgagggcttctaggatgaagtagtccactggaa

SEQ ID NO: 73067 - DNA, 74 bp, Homo sapiens
cttccagtgaaacgtgcatcccgagggcttctaggatgaagtagtccactggaaggcaccagctcttcctttta

SEQ ID NO: 73068 - DNA, 76 bp, Homo sapiens
aacgtgcatcccgagggcttctaggatgaagtagtccactggaaggcaccagctcttccttttatctctccagagc

SEQ ID NO: 73069 - DNA, 76 bp, Homo sapiens
atgaagtagtccactggaaggcaccagctcttccttttatctctccagagctggacagtgcaccaggggccggtac

SEQ ID NO: 73070 - DNA, 76 bp, Homo sapiens
tagtccactggaaggcaccagctcttccttttatctctccagagctggacagtgcaccaggggccggtactggttc

SEQ ID NO: 73071 - DNA, 74 bp, Homo sapiens
aaggcaccagctcttccttttatctctccagagctggacagtgcaccaggggccggtactggttccccagctag

SEQ ID NO: 73072 - DNA, 73 bp, Homo sapiens
ttccttttatctctccagagctggacagtgcaccaggggccggtactggttccccagctaggagacaccttgg

SEQ ID NO: 73073 - DNA, 73 bp, Homo sapiens
tttatctctccagagctggacagtgcaccaggggccggtactggttccccagctaggagacaccttgggcggg

SEQ ID NO: 73074 - DNA, 73 bp, Homo sapiens
agagctggacagtgcaccaggggccggtactggttccccagctaggagacaccttgggcggggctttgctcgc

SEQ ID NO: 73075 - DNA, 71 bp, Homo sapiens
agtgcaccaggggccggtactggttccccagctaggagacaccttgggcggggctttgctcgccggaagca

SEQ ID NO: 73076 - DNA, 71 bp, Homo sapiens
ccggtactggttccccagctaggagacaccttgggcggggctttgctcgccggaagcacgcagagcgtggg

SEQ ID NO: 73077 - DNA, 72 bp, Homo sapiens
ctggttccccagctaggagacaccttgggcggggctttgctcgccggaagcacgcagagcgtggggaggagg

SEQ ID NO: 73078 - DNA, 73 bp, Homo sapiens
agctaggagacaccttgggcggggctttgctcgccggaagcacgcagagcgtggggaggagggccccctctgc

SEQ ID NO: 73079 - DNA, 74 bp, Homo sapiens
ttgggcggggctttgctcgccggaagcacgcagagcgtggggaggagggccccctctgcctgtgtttgtgccaa

SEQ ID NO: 73080 - DNA, 76 bp, Homo sapiens
ccggaagcacgcagagcgtggggaggagggccccctctgcctgtgtttgtgccaacagcacccgcgctgccgcgtc

SEQ ID NO: 73081 - DNA, 74 bp, Homo sapiens
acgcagagcgtggggaggagggccccctctgcctgtgtttgtgccaacagcacccgcgctgccgcgtcgggttc

SEQ ID NO: 73082 - DNA, 79 bp, Homo sapiens
ccctctgcctgtgtttgtgccaacagcacccgcgctgccgcgtcgggttccggcggccggagtcacacatgatgtcaca

SEQ ID NO: 73083 - DNA, 82 bp, Homo sapiens
tgtgtttgtgccaacagcacccgcgctgccgcgtcgggttccggcggccggagtcacacatgatgtcacagacaatgacaca

SEQ ID NO: 73084 - DNA, 79 bp, Homo sapiens
caacagcacccgcgctgccgcgtcgggttccggcggccggagtcacacatgatgtcacagacaatgacacaagccggtg

SEQ ID NO: 73085 - DNA, 79 bp, Homo sapiens
cgtcgggttccggcggccggagtcacacatgatgtcacagacaatgacacaagccggtgtctcattccgacacagcgtc

SEQ ID NO: 73086 - DNA, 84 bp, Homo sapiens
ttccggcggccggagtcacacatgatgtcacagacaatgacacaagccggtgtctcattccgacacagcgtccgagctgcacaa

SEQ ID NO: 73087 - DNA, 84 bp, Homo sapiens
agtcacacatgatgtcacagacaatgacacaagccggtgtctcattccgacacagcgtccgagctgcacaatgtcacacccggg

SEQ ID NO: 73088 - DNA, 83 bp, Homo sapiens
atgatgtcacagacaatgacacaagccggtgtctcattccgacacagcgtccgagctgcacaatgtcacacccgggtgccaaa

SEQ ID NO: 73089 - DNA, 79 bp, Homo sapiens
agacaatgacacaagccggtgtctcattccgacacagcgtccgagctgcacaatgtcacacccgggtgccaaacacttg

SEQ ID NO: 73090 - DNA, 76 bp, Homo sapiens
acacaagccggtgtctcattccgacacagcgtccgagctgcacaatgtcacacccgggtgccaaacacttggcccc

SEQ ID NO: 73091 - DNA, 76 bp, Homo sapiens
ggtgtctcattccgacacagcgtccgagctgcacaatgtcacacccgggtgccaaacacttggccccgcgcgaccc

SEQ ID NO: 73092 - DNA, 74 bp, Homo sapiens
tccgacacagcgtccgagctgcacaatgtcacacccgggtgccaaacacttggccccgcgcgacccggccctac

SEQ ID NO: 73093 - DNA, 73 bp, Homo sapiens
cgtccgagctgcacaatgtcacacccgggtgccaaacacttggccccgcgcgacccggccctacgcctcctgc

SEQ ID NO: 73094 - DNA, 71 bp, Homo sapiens
acaatgtcacacccgggtgccaaacacttggccccgcgcgacccggccctacgcctcctgccgccgctctc

SEQ ID NO: 73095 - DNA, 67 bp, Homo sapiens
ccgcgcgacccggccctacgcctcctgccgccgctctccgcgtctccgggggaggtggcccggttcg

SEQ ID NO: 73096 - DNA, 68 bp, Homo sapiens
ctacgcctcctgccgccgctctccgcgtctccgggggaggtggcccggttcggccgggcagggggctg

SEQ ID NO: 73097 - DNA, 69 bp, Homo sapiens
tgccgccgctctccgcgtctccgggggaggtggcccggttcggccgggcagggggctggcgggcgagcc

SEQ ID NO: 73098 - DNA, 67 bp, Homo sapiens
ggaggtggcccggttcggccgggcagggggctggcgggcgagccccgcgggcgggctggcgagcggg

SEQ ID NO: 73099 - DNA, 71 bp, Homo sapiens
tggcccggttcggccgggcagggggctggcgggcgagccccgcgggcgggctggcgagcgggtgatgtcac

SEQ ID NO: 73100 - DNA, 72 bp, Homo sapiens
gggcagggggctggcgggcgagccccgcgggcgggctggcgagcgggtgatgtcacgggcagcggtgggtgg

SEQ ID NO: 73101 - DNA, 73 bp, Homo sapiens
agccccgcgggcgggctggcgagcgggtgatgtcacgggcagcggtgggtgggtcactcggaggtgaggcgcc

SEQ ID NO: 73102 - DNA, 77 bp, Homo sapiens
gcgggctggcgagcgggtgatgtcacgggcagcggtgggtgggtcactcggaggtgaggcgccgccaggcgagttca

SEQ ID NO: 73103 - DNA, 78 bp, Homo sapiens
gagcgggtgatgtcacgggcagcggtgggtgggtcactcggaggtgaggcgccgccaggcgagttcagcgagagttca

SEQ ID NO: 73104 - DNA, 82 bp, Homo sapiens
tgatgtcacgggcagcggtgggtgggtcactcggaggtgaggcgccgccaggcgagttcagcgagagttcagccgcattgca

SEQ ID NO: 73105 - DNA, 78 bp, Homo sapiens
agcggtgggtgggtcactcggaggtgaggcgccgccaggcgagttcagcgagagttcagccgcattgcattaggcaaa

SEQ ID NO: 73106 - DNA, 80 bp, Homo sapiens
tgggtgggtcactcggaggtgaggcgccgccaggcgagttcagcgagagttcagccgcattgcattaggcaaatgaggcc

SEQ ID NO: 73107 - DNA, 78 bp, Homo sapiens
actcggaggtgaggcgccgccaggcgagttcagcgagagttcagccgcattgcattaggcaaatgaggcccggcctgg

SEQ ID NO: 73108 - DNA, 76 bp, Homo sapiens
aggcgccgccaggcgagttcagcgagagttcagccgcattgcattaggcaaatgaggcccggcctgggtgggggtg

SEQ ID NO: 73109 - DNA, 75 bp, Homo sapiens
aggcgagttcagcgagagttcagccgcattgcattaggcaaatgaggcccggcctgggtgggggtgtgtgttaag

SEQ ID NO: 73110 - DNA, 72 bp, Homo sapiens
agagttcagccgcattgcattaggcaaatgaggcccggcctgggtgggggtgtgtgttaaggggaggacacc

SEQ ID NO: 73111 - DNA, 72 bp, Homo sapiens
tcagccgcattgcattaggcaaatgaggcccggcctgggtgggggtgtgtgttaaggggaggacaccgggac

SEQ ID NO: 73112 - DNA, 65 bp, Homo sapiens
attaggcaaatgaggcccggcctgggtgggggtgtgtgttaaggggaggacaccgggaccacccc

SEQ ID NO: 73113 - DNA, 63 bp, Homo sapiens
aaatgaggcccggcctgggtgggggtgtgtgttaaggggaggacaccgggaccacccccctct

SEQ ID NO: 73114 - DNA, 62 bp, Homo sapiens
cggcctgggtgggggtgtgtgttaaggggaggacaccgggaccacccccctcttccccgccc

SEQ ID NO: 73115 - DNA, 64 bp, Homo sapiens
gggtgtgtgttaaggggaggacaccgggaccacccccctcttccccgccccaccacctcctcca

SEQ ID NO: 73116 - DNA, 63 bp, Homo sapiens
ttaaggggaggacaccgggaccacccccctcttccccgccccaccacctcctccaccacggct

SEQ ID NO: 73117 - DNA, 65 bp, Homo sapiens
accgggaccacccccctcttccccgccccaccacctcctccaccacggcttcgctcggccaggga

SEQ ID NO: 73118 - DNA, 66 bp, Homo sapiens
ccccctcttccccgccccaccacctcctccaccacggcttcgctcggccagggactgaccaaacct

SEQ ID NO: 73119 - DNA, 68 bp, Homo sapiens
cccgccccaccacctcctccaccacggcttcgctcggccagggactgaccaaaccttgggggagcctg

SEQ ID NO: 73120 - DNA, 69 bp, Homo sapiens
cacctcctccaccacggcttcgctcggccagggactgaccaaaccttgggggagcctgggagccggaac

SEQ ID NO: 73121 - DNA, 68 bp, Homo sapiens
accacggcttcgctcggccagggactgaccaaaccttgggggagcctgggagccggaactggtacaag

SEQ ID NO: 73122 - DNA, 68 bp, Homo sapiens
cttcgctcggccagggactgaccaaaccttgggggagcctgggagccggaactggtacaagggaggac

SEQ ID NO: 73123 - DNA, 66 bp, Homo sapiens
ccagggactgaccaaaccttgggggagcctgggagccggaactggtacaagggaggacgcccgccc

SEQ ID NO: 73124 - DNA, 69 bp, Homo sapiens
ggagcctgggagccggaactggtacaagggaggacgcccgcccctcttccgtccttgtcccctcgcagc

SEQ ID NO: 73125 - DNA, 67 bp, Homo sapiens
ctgggagccggaactggtacaagggaggacgcccgcccctcttccgtccttgtcccctcgcagcccc

SEQ ID NO: 73126 - DNA, 66 bp, Homo sapiens
aactggtacaagggaggacgcccgcccctcttccgtccttgtcccctcgcagccccctcctctccc

SEQ ID NO: 73127 - DNA, 67 bp, Homo sapiens
aagggaggacgcccgcccctcttccgtccttgtcccctcgcagccccctcctctccctgtactcggc

SEQ ID NO: 73128 - DNA, 70 bp, Homo sapiens
cccctcttccgtccttgtcccctcgcagccccctcctctccctgtactcggcgtccctctgtactctgtg

SEQ ID NO: 73129 - DNA, 75 bp, Homo sapiens
gtccttgtcccctcgcagccccctcctctccctgtactcggcgtccctctgtactctgtgtactcctcatctgga

SEQ ID NO: 73130 - DNA, 74 bp, Homo sapiens
ccctcgcagccccctcctctccctgtactcggcgtccctctgtactctgtgtactcctcatctggagcctttcc

SEQ ID NO: 73131 - DNA, 73 bp, Homo sapiens
ccctcctctccctgtactcggcgtccctctgtactctgtgtactcctcatctggagcctttcccccttcctgc

SEQ ID NO: 73132 - DNA, 75 bp, Homo sapiens
ctctccctgtactcggcgtccctctgtactctgtgtactcctcatctggagcctttcccccttcctgcttctctc

SEQ ID NO: 73133 - DNA, 72 bp, Homo sapiens
ctgtgtactcctcatctggagcctttcccccttcctgcttctctcctctcctcccccttcccaggctgcccc

SEQ ID NO: 73134 - DNA, 71 bp, Homo sapiens
cctttcccccttcctgcttctctcctctcctcccccttcccaggctgcccccacttgcctgtccacatgcc

SEQ ID NO: 73135 - DNA, 72 bp, Homo sapiens
ctctcctcccccttcccaggctgcccccacttgcctgtccacatgccgcctctccctctcggttccctgcgt

SEQ ID NO: 73136 - DNA, 75 bp, Homo sapiens
ccttcccaggctgcccccacttgcctgtccacatgccgcctctccctctcggttccctgcgtttctcccgctgca

SEQ ID NO: 73137 - DNA, 75 bp, Homo sapiens
aggctgcccccacttgcctgtccacatgccgcctctccctctcggttccctgcgtttctcccgctgcagccggac

SEQ ID NO: 73138 - DNA, 74 bp, Homo sapiens
acttgcctgtccacatgccgcctctccctctcggttccctgcgtttctcccgctgcagccggacgcgccgggaa

SEQ ID NO: 73139 - DNA, 73 bp, Homo sapiens
tccacatgccgcctctccctctcggttccctgcgtttctcccgctgcagccggacgcgccgggaatgggttaa

SEQ ID NO: 73140 - DNA, 71 bp, Homo sapiens
tctcggttccctgcgtttctcccgctgcagccggacgcgccgggaatgggttaagccaggggcggtgcctg

SEQ ID NO: 73141 - DNA, 70 bp, Homo sapiens
cctgcgtttctcccgctgcagccggacgcgccgggaatgggttaagccaggggcggtgcctggacggggc

SEQ ID NO: 73142 - DNA, 64 bp, Homo sapiens
ccggacgcgccgggaatgggttaagccaggggcggtgcctggacggggcggggcggtggaaagg

SEQ ID NO: 73143 - DNA, 64 bp, Homo sapiens
aatgggttaagccaggggcggtgcctggacggggcggggcggtggaaagggggtggtgcccgga

SEQ ID NO: 73144 - DNA, 67 bp, Homo sapiens
ggtgcctggacggggcggggcggtggaaagggggtggtgcccggaggggagggggcgcgcagagctg

SEQ ID NO: 73145 - DNA, 64 bp, Homo sapiens
acggggcggggcggtggaaagggggtggtgcccggaggggagggggcgcgcagagctggggtgg

SEQ ID NO: 73146 - DNA, 65 bp, Homo sapiens
ggcggtggaaagggggtggtgcccggaggggagggggcgcgcagagctggggtgggggggccgtg

SEQ ID NO: 73147 - DNA, 69 bp, Homo sapiens
gggtggtgcccggaggggagggggcgcgcagagctggggtgggggggccgtggcgcgtaccaccagaga

SEQ ID NO: 73148 - DNA, 70 bp, Homo sapiens
cggaggggagggggcgcgcagagctggggtgggggggccgtggcgcgtaccaccagagaccgagcgagtc

SEQ ID NO: 73149 - DNA, 72 bp, Homo sapiens
tgggggggccgtggcgcgtaccaccagagaccgagcgagtcgccagctgcccctggcctggcgggggcggaa

SEQ ID NO: 73150 - DNA, 74 bp, Homo sapiens
gtggcgcgtaccaccagagaccgagcgagtcgccagctgcccctggcctggcgggggcggaaccgcgcgggatc

SEQ ID NO: 73151 - DNA, 72 bp, Homo sapiens
taccaccagagaccgagcgagtcgccagctgcccctggcctggcgggggcggaaccgcgcgggatccccacc

SEQ ID NO: 73152 - DNA, 69 bp, Homo sapiens
agaccgagcgagtcgccagctgcccctggcctggcgggggcggaaccgcgcgggatccccacccccacc

SEQ ID NO: 73153 - DNA, 67 bp, Homo sapiens
agtcgccagctgcccctggcctggcgggggcggaaccgcgcgggatccccacccccacccggaatcc

SEQ ID NO: 73154 - DNA, 66 bp, Homo sapiens
cctggcctggcgggggcggaaccgcgcgggatccccacccccacccggaatcctcgccacggagaa

SEQ ID NO: 73155 - DNA, 66 bp, Homo sapiens
cgggggcggaaccgcgcgggatccccacccccacccggaatcctcgccacggagaatccctggaga

SEQ ID NO: 73156 - DNA, 66 bp, Homo sapiens
aaccgcgcgggatccccacccccacccggaatcctcgccacggagaatccctggagaagccccgga

SEQ ID NO: 73157 - DNA, 67 bp, Homo sapiens
cccacccggaatcctcgccacggagaatccctggagaagccccggatccccggctgggaggaggaag

SEQ ID NO: 73158 - DNA, 70 bp, Homo sapiens
aatcctcgccacggagaatccctggagaagccccggatccccggctgggaggaggaagtgctcgttgacc

SEQ ID NO: 73159 - DNA, 68 bp, Homo sapiens
acggagaatccctggagaagccccggatccccggctgggaggaggaagtgctcgttgacccccagccc

SEQ ID NO: 73160 - DNA, 71 bp, Homo sapiens
atccctggagaagccccggatccccggctgggaggaggaagtgctcgttgacccccagccccgcgctgatc

SEQ ID NO: 73161 - DNA, 70 bp, Homo sapiens
ggctgggaggaggaagtgctcgttgacccccagccccgcgctgatcccgcccccggcctgcggacttggg

SEQ ID NO: 73162 - DNA, 71 bp, Homo sapiens
aggaagtgctcgttgacccccagccccgcgctgatcccgcccccggcctgcggacttggggagccgctgta

SEQ ID NO: 73163 - DNA, 74 bp, Homo sapiens
tgctcgttgacccccagccccgcgctgatcccgcccccggcctgcggacttggggagccgctgtactctgcctc

SEQ ID NO: 73164 - DNA, 74 bp, Homo sapiens
ccagccccgcgctgatcccgcccccggcctgcggacttggggagccgctgtactctgcctcggacgccacgaga

SEQ ID NO: 73165 - DNA, 71 bp, Homo sapiens
cccccggcctgcggacttggggagccgctgtactctgcctcggacgccacgagactctagacgggagtccc

SEQ ID NO: 73166 - DNA, 74 bp, Homo sapiens
ctgcggacttggggagccgctgtactctgcctcggacgccacgagactctagacgggagtcccctcgaggtgaa

SEQ ID NO: 73167 - DNA, 75 bp, Homo sapiens
gagccgctgtactctgcctcggacgccacgagactctagacgggagtcccctcgaggtgaagccgctgagttccc

SEQ ID NO: 73168 - DNA, 73 bp, Homo sapiens
ctgtactctgcctcggacgccacgagactctagacgggagtcccctcgaggtgaagccgctgagttcccgggc

SEQ ID NO: 73169 - DNA, 70 bp, Homo sapiens
cctcggacgccacgagactctagacgggagtcccctcgaggtgaagccgctgagttcccgggccccgcca

SEQ ID NO: 73170 - DNA, 69 bp, Homo sapiens
acgagactctagacgggagtcccctcgaggtgaagccgctgagttcccgggccccgccaggcttccctg

SEQ ID NO: 73171 - DNA, 70 bp, Homo sapiens
tagacgggagtcccctcgaggtgaagccgctgagttcccgggccccgccaggcttccctgggagagccga

SEQ ID NO: 73172 - DNA, 68 bp, Homo sapiens
gtcccctcgaggtgaagccgctgagttcccgggccccgccaggcttccctgggagagccgacggaccc

SEQ ID NO: 73173 - DNA, 67 bp, Homo sapiens
ggtgaagccgctgagttcccgggccccgccaggcttccctgggagagccgacggaccccccctccca

SEQ ID NO: 73174 - DNA, 68 bp, Homo sapiens
tgagttcccgggccccgccaggcttccctgggagagccgacggaccccccctcccagcacacacaact

SEQ ID NO: 73175 - DNA, 69 bp, Homo sapiens
cccgccaggcttccctgggagagccgacggaccccccctcccagcacacacaacttccctgcttttcac

SEQ ID NO: 73176 - DNA, 68 bp, Homo sapiens
cttccctgggagagccgacggaccccccctcccagcacacacaacttccctgcttttcaccgggactg

SEQ ID NO: 73177 - DNA, 69 bp, Homo sapiens
gggagagccgacggaccccccctcccagcacacacaacttccctgcttttcaccgggactggcggagcg

SEQ ID NO: 73178 - DNA, 68 bp, Homo sapiens
accccccctcccagcacacacaacttccctgcttttcaccgggactggcggagcggccggcggactta

SEQ ID NO: 73179 - DNA, 68 bp, Homo sapiens
acacaacttccctgcttttcaccgggactggcggagcggccggcggacttagacgcggggacttcagg

SEQ ID NO: 73180 - DNA, 68 bp, Homo sapiens
ccctgcttttcaccgggactggcggagcggccggcggacttagacgcggggacttcagggcagggggc

SEQ ID NO: 73181 - DNA, 67 bp, Homo sapiens
agcggccggcggacttagacgcggggacttcagggcagggggcgccccctgcccgggtcaccagtcg

SEQ ID NO: 73182 - DNA, 66 bp, Homo sapiens
cggacttagacgcggggacttcagggcagggggcgccccctgcccgggtcaccagtcggggcgagg

SEQ ID NO: 73183 - DNA, 67 bp, Homo sapiens
tagacgcggggacttcagggcagggggcgccccctgcccgggtcaccagtcggggcgaggggacgtc

SEQ ID NO: 73184 - DNA, 72 bp, Homo sapiens
gggcgccccctgcccgggtcaccagtcggggcgaggggacgtctcctctcccccagctgctctgctcggatg

SEQ ID NO: 73185 - DNA, 76 bp, Homo sapiens
tgcccgggtcaccagtcggggcgaggggacgtctcctctcccccagctgctctgctcggatggcgccgccggctga

SEQ ID NO: 73186 - DNA, 77 bp, Homo sapiens
acgtctcctctcccccagctgctctgctcggatggcgccgccggctgagtgacgggggcggcgcgcaggacttccca

SEQ ID NO: 73187 - DNA, 79 bp, Homo sapiens
cccagctgctctgctcggatggcgccgccggctgagtgacgggggcggcgcgcaggacttcccagctcggacctcttgc

SEQ ID NO: 73188 - DNA, 79 bp, Homo sapiens
tgctctgctcggatggcgccgccggctgagtgacgggggcggcgcgcaggacttcccagctcggacctcttgccttcga

SEQ ID NO: 73189 - DNA, 74 bp, Homo sapiens
ggctgagtgacgggggcggcgcgcaggacttcccagctcggacctcttgccttcgaggggaaagatgtacgaga

SEQ ID NO: 73190 - DNA, 72 bp, Homo sapiens
gggggcggcgcgcaggacttcccagctcggacctcttgccttcgaggggaaagatgtacgagagtgtagaag

SEQ ID NO: 73191 - DNA, 72 bp, Homo sapiens
cggcgcgcaggacttcccagctcggacctcttgccttcgaggggaaagatgtacgagagtgtagaagtgggg

SEQ ID NO: 73192 - DNA, 66 bp, Homo sapiens
acctcttgccttcgaggggaaagatgtacgagagtgtagaagtggggggtcccacccctaatccct

SEQ ID NO: 73193 - DNA, 67 bp, Homo sapiens
ttgccttcgaggggaaagatgtacgagagtgtagaagtggggggtcccacccctaatcccttcctag

SEQ ID NO: 73194 - DNA, 66 bp, Homo sapiens
aaagatgtacgagagtgtagaagtggggggtcccacccctaatcccttcctagtggtggattttta

SEQ ID NO: 73195 - DNA, 66 bp, Homo sapiens
gtacgagagtgtagaagtggggggtcccacccctaatcccttcctagtggtggatttttataacca

SEQ ID NO: 73196 - DNA, 68 bp, Homo sapiens
tcccacccctaatcccttcctagtggtggatttttataaccagaaccgggcctgtttgctcccagaga

SEQ ID NO: 73197 - DNA, 64 bp, Homo sapiens
atttttataaccagaaccgggcctgtttgctcccagagaaggggctccccgccccgggtccgta

SEQ ID NO: 73198 - DNA, 65 bp, Homo sapiens
taaccagaaccgggcctgtttgctcccagagaaggggctccccgccccgggtccgtactccaccc

SEQ ID NO: 73199 - DNA, 66 bp, Homo sapiens
ctgtttgctcccagagaaggggctccccgccccgggtccgtactccaccccgctccggactccgct

SEQ ID NO: 73200 - DNA, 66 bp, Homo sapiens
tcccagagaaggggctccccgccccgggtccgtactccaccccgctccggactccgctttggaatg

SEQ ID NO: 73201 - DNA, 67 bp, Homo sapiens
ggctccccgccccgggtccgtactccaccccgctccggactccgctttggaatggctcaaaccactg

SEQ ID NO: 73202 - DNA, 66 bp, Homo sapiens
cccgggtccgtactccaccccgctccggactccgctttggaatggctcaaaccactgtacgtaccg

SEQ ID NO: 73203 - DNA, 71 bp, Homo sapiens
tccgtactccaccccgctccggactccgctttggaatggctcaaaccactgtacgtaccggcctctcagtc

SEQ ID NO: 73204 - DNA, 72 bp, Homo sapiens
cccgctccggactccgctttggaatggctcaaaccactgtacgtaccggcctctcagtctgctgttgtaggg

SEQ ID NO: 73205 - DNA, 72 bp, Homo sapiens
actccgctttggaatggctcaaaccactgtacgtaccggcctctcagtctgctgttgtagggggtgggagtg

SEQ ID NO: 73206 - DNA, 72 bp, Homo sapiens
tttggaatggctcaaaccactgtacgtaccggcctctcagtctgctgttgtagggggtgggagtgggcggta

SEQ ID NO: 73207 - DNA, 70 bp, Homo sapiens
aaccactgtacgtaccggcctctcagtctgctgttgtagggggtgggagtgggcggtagggcttccacta

SEQ ID NO: 73208 - DNA, 71 bp, Homo sapiens
tctcagtctgctgttgtagggggtgggagtgggcggtagggcttccactactactcgggggtgagagtccc

SEQ ID NO: 73209 - DNA, 68 bp, Homo sapiens
tctgctgttgtagggggtgggagtgggcggtagggcttccactactactcgggggtgagagtcccggg

SEQ ID NO: 73210 - DNA, 67 bp, Homo sapiens
ggtgggagtgggcggtagggcttccactactactcgggggtgagagtcccggggtgtagtggaggtc

SEQ ID NO: 73211 - DNA, 68 bp, Homo sapiens
agtgggcggtagggcttccactactactcgggggtgagagtcccggggtgtagtggaggtcctgtctc

SEQ ID NO: 73212 - DNA, 66 bp, Homo sapiens
actactactcgggggtgagagtcccggggtgtagtggaggtcctgtctctacctttcacttaaccc

SEQ ID NO: 73213 - DNA, 70 bp, Homo sapiens
tcccggggtgtagtggaggtcctgtctctacctttcacttaacccgtgttgcccttgctggacaattgaa

SEQ ID NO: 73214 - DNA, 69 bp, Homo sapiens
gtagtggaggtcctgtctctacctttcacttaacccgtgttgcccttgctggacaattgaaccctcccg

SEQ ID NO: 73215 - DNA, 67 bp, Homo sapiens
tttcacttaacccgtgttgcccttgctggacaattgaaccctcccggccgcaccctccccccagtaa

SEQ ID NO: 73216 - DNA, 66 bp, Homo sapiens
taacccgtgttgcccttgctggacaattgaaccctcccggccgcaccctccccccagtaaccctaa

SEQ ID NO: 73217 - DNA, 69 bp, Homo sapiens
ttgctggacaattgaaccctcccggccgcaccctccccccagtaaccctaagtgcaatttgtgttagat

SEQ ID NO: 73218 - DNA, 66 bp, Homo sapiens
acaattgaaccctcccggccgcaccctccccccagtaaccctaagtgcaatttgtgttagattagg

SEQ ID NO: 73219 - DNA, 69 bp, Homo sapiens
tcccggccgcaccctccccccagtaaccctaagtgcaatttgtgttagattagggctgaggaactttga

SEQ ID NO: 73220 - DNA, 67 bp, Homo sapiens
accctccccccagtaaccctaagtgcaatttgtgttagattagggctgaggaactttgagagttcct

SEQ ID NO: 73221 - DNA, 71 bp, Homo sapiens
agtaaccctaagtgcaatttgtgttagattagggctgaggaactttgagagttccttctttcaagcaacat

SEQ ID NO: 73222 - DNA, 75 bp, Homo sapiens
taagtgcaatttgtgttagattagggctgaggaactttgagagttccttctttcaagcaacattccttcatctct

SEQ ID NO: 73223 - DNA, 72 bp, Homo sapiens
aatttgtgttagattagggctgaggaactttgagagttccttctttcaagcaacattccttcatctcttgtt

SEQ ID NO: 73224 - DNA, 74 bp, Homo sapiens
agattagggctgaggaactttgagagttccttctttcaagcaacattccttcatctcttgtttcacttcttcca

SEQ ID NO: 73225 - DNA, 73 bp, Homo sapiens
aggaactttgagagttccttctttcaagcaacattccttcatctcttgtttcacttcttccaggagaaatgaa

SEQ ID NO: 73226 - DNA, 73 bp, Homo sapiens
agagttccttctttcaagcaacattccttcatctcttgtttcacttcttccaggagaaatgaagcccaagccc

SEQ ID NO: 73227 - DNA, 73 bp, Homo sapiens
ttctttcaagcaacattccttcatctcttgtttcacttcttccaggagaaatgaagcccaagccccttgcccc

SEQ ID NO: 73228 - DNA, 72 bp, Homo sapiens
atctcttgtttcacttcttccaggagaaatgaagcccaagccccttgcccccagtttatatcttcttgcctg

SEQ ID NO: 73229 - DNA, 75 bp, Homo sapiens
aggagaaatgaagcccaagccccttgcccccagtttatatcttcttgcctggaatccaacagcttcacagcaggc

SEQ ID NO: 73230 - DNA, 75 bp, Homo sapiens
atgaagcccaagccccttgcccccagtttatatcttcttgcctggaatccaacagcttcacagcaggctggaggg

SEQ ID NO: 73231 - DNA, 75 bp, Homo sapiens
tatcttcttgcctggaatccaacagcttcacagcaggctggagggtggggtaaaggtcctgtctgtgtgggtttg

SEQ ID NO: 73232 - DNA, 72 bp, Homo sapiens
aatccaacagcttcacagcaggctggagggtggggtaaaggtcctgtctgtgtgggtttgtctgctcccggg

SEQ ID NO: 73233 - DNA, 71 bp, Homo sapiens
aacagcttcacagcaggctggagggtggggtaaaggtcctgtctgtgtgggtttgtctgctcccgggggaa

SEQ ID NO: 73234 - DNA, 67 bp, Homo sapiens
agcaggctggagggtggggtaaaggtcctgtctgtgtgggtttgtctgctcccgggggaaggccccc

SEQ ID NO: 73235 - DNA, 67 bp, Homo sapiens
gtggggtaaaggtcctgtctgtgtgggtttgtctgctcccgggggaaggcccccccgccagatccca

SEQ ID NO: 73236 - DNA, 69 bp, Homo sapiens
taaaggtcctgtctgtgtgggtttgtctgctcccgggggaaggcccccccgccagatcccacttgccaa

SEQ ID NO: 73237 - DNA, 69 bp, Homo sapiens
tgtgtgggtttgtctgctcccgggggaaggcccccccgccagatcccacttgccaaagcccgagggaga

SEQ ID NO: 73238 - DNA, 67 bp, Homo sapiens
tttgtctgctcccgggggaaggcccccccgccagatcccacttgccaaagcccgagggagagcccct

SEQ ID NO: 73239 - DNA, 73 bp, Homo sapiens
ggggaaggcccccccgccagatcccacttgccaaagcccgagggagagccccttcctgtgcgacagctgctgc

SEQ ID NO: 73240 - DNA, 77 bp, Homo sapiens
atcccacttgccaaagcccgagggagagccccttcctgtgcgacagctgctgcccccagcccttgctcttgcgtcat

SEQ ID NO: 73241 - DNA, 77 bp, Homo sapiens
acttgccaaagcccgagggagagccccttcctgtgcgacagctgctgcccccagcccttgctcttgcgtcattagag

SEQ ID NO: 73242 - DNA, 80 bp, Homo sapiens
ccttcctgtgcgacagctgctgcccccagcccttgctcttgcgtcattagagtgggtgtcaggggagcactcagtgtctt

SEQ ID NO: 73243 - DNA, 77 bp, Homo sapiens
ctgcccccagcccttgctcttgcgtcattagagtgggtgtcaggggagcactcagtgtctttggtattgacagtggg

SEQ ID NO: 73244 - DNA, 74 bp, Homo sapiens
acagtggggtgtggcagaaaggggcaacttcatcagacacccgtctgccatcctaaccttccatcttggcaagg

SEQ ID NO: 73245 - DNA, 76 bp, Homo sapiens
tgtggcagaaaggggcaacttcatcagacacccgtctgccatcctaaccttccatcttggcaaggggcactgggtc

SEQ ID NO: 73246 - DNA, 72 bp, Homo sapiens
aaaggggcaacttcatcagacacccgtctgccatcctaaccttccatcttggcaaggggcactgggtcctta

SEQ ID NO: 73247 - DNA, 73 bp, Homo sapiens
cttcatcagacacccgtctgccatcctaaccttccatcttggcaaggggcactgggtccttatggggttgttg

SEQ ID NO: 73248 - DNA, 70 bp, Homo sapiens
acccgtctgccatcctaaccttccatcttggcaaggggcactgggtccttatggggttgttgtcctggcc

SEQ ID NO: 73249 - DNA, 70 bp, Homo sapiens
atcctaaccttccatcttggcaaggggcactgggtccttatggggttgttgtcctggccccagacacttg

SEQ ID NO: 73250 - DNA, 75 bp, Homo sapiens
ttccatcttggcaaggggcactgggtccttatggggttgttgtcctggccccagacacttggctgtcatctttga

SEQ ID NO: 73251 - DNA, 73 bp, Homo sapiens
aaggggcactgggtccttatggggttgttgtcctggccccagacacttggctgtcatctttgaggctttcatc

SEQ ID NO: 73252 - DNA, 73 bp, Homo sapiens
actgggtccttatggggttgttgtcctggccccagacacttggctgtcatctttgaggctttcatccccagga

SEQ ID NO: 73253 - DNA, 74 bp, Homo sapiens
gggttgttgtcctggccccagacacttggctgtcatctttgaggctttcatccccaggagtggaggggagaagc

SEQ ID NO: 73254 - DNA, 79 bp, Homo sapiens
ttgtcctggccccagacacttggctgtcatctttgaggctttcatccccaggagtggaggggagaagctgctctggtga

SEQ ID NO: 73255 - DNA, 74 bp, Homo sapiens
ttgaggctttcatccccaggagtggaggggagaagctgctctggtgagaagaatccctctccccctaatcctaa

SEQ ID NO: 73256 - DNA, 70 bp, Homo sapiens
atccccaggagtggaggggagaagctgctctggtgagaagaatccctctccccctaatcctaatccggtt

SEQ ID NO: 73257 - DNA, 71 bp, Homo sapiens
agctgctctggtgagaagaatccctctccccctaatcctaatccggtttgttctctggggaatgagtttgt

SEQ ID NO: 73258 - DNA, 65 bp, Homo sapiens
aagaatccctctccccctaatcctaatccggtttgttctctggggaatgagtttgtttttgtggg

SEQ ID NO: 73259 - DNA, 69 bp, Homo sapiens
cctaatcctaatccggtttgttctctggggaatgagtttgtttttgtgggtctggggctgctctggaaa

SEQ ID NO: 73260 - DNA, 71 bp, Homo sapiens
tcctaatccggtttgttctctggggaatgagtttgtttttgtgggtctggggctgctctggaaatgaggac

SEQ ID NO: 73261 - DNA, 74 bp, Homo sapiens
tttgttctctggggaatgagtttgtttttgtgggtctggggctgctctggaaatgaggactgcatcccttccca

SEQ ID NO: 73262 - DNA, 74 bp, Homo sapiens
aatgagtttgtttttgtgggtctggggctgctctggaaatgaggactgcatcccttcccagctccgccaccgag

SEQ ID NO: 73263 - DNA, 73 bp, Homo sapiens
tttttgtgggtctggggctgctctggaaatgaggactgcatcccttcccagctccgccaccgagtccttttgt

SEQ ID NO: 73264 - DNA, 76 bp, Homo sapiens
tctggggctgctctggaaatgaggactgcatcccttcccagctccgccaccgagtccttttgttaccctgacttca

SEQ ID NO: 73265 - DNA, 72 bp, Homo sapiens
ctctggaaatgaggactgcatcccttcccagctccgccaccgagtccttttgttaccctgacttcacttggg

SEQ ID NO: 73266 - DNA, 71 bp, Homo sapiens
aaatgaggactgcatcccttcccagctccgccaccgagtccttttgttaccctgacttcacttggggatag

SEQ ID NO: 73267 - DNA, 68 bp, Homo sapiens
atcccttcccagctccgccaccgagtccttttgttaccctgacttcacttggggatagggccaggtcc

SEQ ID NO: 73268 - DNA, 70 bp, Homo sapiens
agctccgccaccgagtccttttgttaccctgacttcacttggggatagggccaggtcctgggctgtgcct

SEQ ID NO: 73269 - DNA, 69 bp, Homo sapiens
accgagtccttttgttaccctgacttcacttggggatagggccaggtcctgggctgtgccttcctaaga

SEQ ID NO: 73270 - DNA, 73 bp, Homo sapiens
ttttgttaccctgacttcacttggggatagggccaggtcctgggctgtgccttcctaagaggggcactgatga

SEQ ID NO: 73271 - DNA, 76 bp, Homo sapiens
acttcacttggggatagggccaggtcctgggctgtgccttcctaagaggggcactgatgagaatcctagcatcctg

SEQ ID NO: 73272 - DNA, 79 bp, Homo sapiens
caggtcctgggctgtgccttcctaagaggggcactgatgagaatcctagcatcctggcagcctggtcactttctctcct

SEQ ID NO: 73273 - DNA, 80 bp, Homo sapiens
cctgggctgtgccttcctaagaggggcactgatgagaatcctagcatcctggcagcctggtcactttctctccttgttgc

SEQ ID NO: 73274 - DNA, 78 bp, Homo sapiens
cttcctaagaggggcactgatgagaatcctagcatcctggcagcctggtcactttctctccttgttgccccctgcctg

SEQ ID NO: 73275 - DNA, 82 bp, Homo sapiens
ggcactgatgagaatcctagcatcctggcagcctggtcactttctctccttgttgccccctgcctgggtgcaggctcctctg

SEQ ID NO: 73276 - DNA, 79 bp, Homo sapiens
atgagaatcctagcatcctggcagcctggtcactttctctccttgttgccccctgcctgggtgcaggctcctctgggag

SEQ ID NO: 73277 - DNA, 76 bp, Homo sapiens
atcctggcagcctggtcactttctctccttgttgccccctgcctgggtgcaggctcctctgggaggaagggctctg

SEQ ID NO: 73278 - DNA, 78 bp, Homo sapiens
agcctggtcactttctctccttgttgccccctgcctgggtgcaggctcctctgggaggaagggctctgtgcacactca

SEQ ID NO: 73279 - DNA, 80 bp, Homo sapiens
tttctctccttgttgccccctgcctgggtgcaggctcctctgggaggaagggctctgtgcacactcaggagctcggagca

SEQ ID NO: 73280 - DNA, 80 bp, Homo sapiens
tgttgccccctgcctgggtgcaggctcctctgggaggaagggctctgtgcacactcaggagctcggagcaccagggtgta

SEQ ID NO: 73281 - DNA, 81 bp, Homo sapiens
tgcctgggtgcaggctcctctgggaggaagggctctgtgcacactcaggagctcggagcaccagggtgtacacctgggcat

SEQ ID NO: 73282 - DNA, 78 bp, Homo sapiens
aggctcctctgggaggaagggctctgtgcacactcaggagctcggagcaccagggtgtacacctgggcattttcctgc

SEQ ID NO: 73283 - DNA, 83 bp, Homo sapiens
tgggaggaagggctctgtgcacactcaggagctcggagcaccagggtgtacacctgggcattttcctgcgcagctgtgaggca

SEQ ID NO: 73284 - DNA, 83 bp, Homo sapiens
aagggctctgtgcacactcaggagctcggagcaccagggtgtacacctgggcattttcctgcgcagctgtgaggcagtgtaca

SEQ ID NO: 73285 - DNA, 80 bp, Homo sapiens
acactcaggagctcggagcaccagggtgtacacctgggcattttcctgcgcagctgtgaggcagtgtacactgggtgggc

SEQ ID NO: 73286 - DNA, 75 bp, Homo sapiens
acctgggcattttcctgcgcagctgtgaggcagtgtacactgggtgggcgggagcaggcgcaagggggttattgt

SEQ ID NO: 73287 - DNA, 75 bp, Homo sapiens
agctgtgaggcagtgtacactgggtgggcgggagcaggcgcaagggggttattgttagatggctcaggtttcttc

SEQ ID NO: 73288 - DNA, 71 bp, Homo sapiens
tacactgggtgggcgggagcaggcgcaagggggttattgttagatggctcaggtttcttcccctcctgggc

SEQ ID NO: 73289 - DNA, 72 bp, Homo sapiens
ggagcaggcgcaagggggttattgttagatggctcaggtttcttcccctcctgggctttgggctctttgctg

SEQ ID NO: 73290 - DNA, 70 bp, Homo sapiens
aggcgcaagggggttattgttagatggctcaggtttcttcccctcctgggctttgggctctttgctggag

SEQ ID NO: 73291 - DNA, 71 bp, Homo sapiens
ggttattgttagatggctcaggtttcttcccctcctgggctttgggctctttgctggaggggaagctcttc

SEQ ID NO: 73292 - DNA, 73 bp, Homo sapiens
tagatggctcaggtttcttcccctcctgggctttgggctctttgctggaggggaagctcttccgtggaggatc

SEQ ID NO: 73293 - DNA, 70 bp, Homo sapiens
tttcttcccctcctgggctttgggctctttgctggaggggaagctcttccgtggaggatctcccaccttc

SEQ ID NO: 73294 - DNA, 70 bp, Homo sapiens
ccctcctgggctttgggctctttgctggaggggaagctcttccgtggaggatctcccaccttcctggacc

SEQ ID NO: 73295 - DNA, 73 bp, Homo sapiens
ctttgggctctttgctggaggggaagctcttccgtggaggatctcccaccttcctggacctgctgcctccctc

SEQ ID NO: 73296 - DNA, 75 bp, Homo sapiens
tttgctggaggggaagctcttccgtggaggatctcccaccttcctggacctgctgcctccctcctgcctgccagg

SEQ ID NO: 73297 - DNA, 73 bp, Homo sapiens
gggaagctcttccgtggaggatctcccaccttcctggacctgctgcctccctcctgcctgccagggaggaggg

SEQ ID NO: 73298 - DNA, 74 bp, Homo sapiens
tggaggatctcccaccttcctggacctgctgcctccctcctgcctgccagggaggaggggtggagtgggtctcg

SEQ ID NO: 73299 - DNA, 71 bp, Homo sapiens
atctcccaccttcctggacctgctgcctccctcctgcctgccagggaggaggggtggagtgggtctcgggg

SEQ ID NO: 73300 - DNA, 73 bp, Homo sapiens
tggacctgctgcctccctcctgcctgccagggaggaggggtggagtgggtctcgggggggccctggcagattg

SEQ ID NO: 73301 - DNA, 69 bp, Homo sapiens
cctccctcctgcctgccagggaggaggggtggagtgggtctcgggggggccctggcagattggagaagg

SEQ ID NO: 73302 - DNA, 68 bp, Homo sapiens
gaggaggggtggagtgggtctcgggggggccctggcagattggagaaggttgaagggcaaaggactta

SEQ ID NO: 73303 - DNA, 67 bp, Homo sapiens
ggtggagtgggtctcgggggggccctggcagattggagaaggttgaagggcaaaggacttaccccac

SEQ ID NO: 73304 - DNA, 65 bp, Homo sapiens
gggtctcgggggggccctggcagattggagaaggttgaagggcaaaggacttaccccacccctct

SEQ ID NO: 73305 - DNA, 72 bp, Homo sapiens
aaggttgaagggcaaaggacttaccccacccctcttgctgggagaagagagacctgagatggacagacagcc

SEQ ID NO: 73306 - DNA, 73 bp, Homo sapiens
aaaggacttaccccacccctcttgctgggagaagagagacctgagatggacagacagcccacctctgccctcc

SEQ ID NO: 73307 - DNA, 78 bp, Homo sapiens
ccacccctcttgctgggagaagagagacctgagatggacagacagcccacctctgccctcccagagccacttctatcc

SEQ ID NO: 73308 - DNA, 77 bp, Homo sapiens
aagagagacctgagatggacagacagcccacctctgccctcccagagccacttctatcccagcttttcctattgtcc

SEQ ID NO: 73309 - DNA, 76 bp, Homo sapiens
acctgagatggacagacagcccacctctgccctcccagagccacttctatcccagcttttcctattgtcctgcccc

SEQ ID NO: 73310 - DNA, 73 bp, Homo sapiens
agacagcccacctctgccctcccagagccacttctatcccagcttttcctattgtcctgcccccgaccatttc

SEQ ID NO: 73311 - DNA, 71 bp, Homo sapiens
acctctgccctcccagagccacttctatcccagcttttcctattgtcctgcccccgaccatttcctctagg

SEQ ID NO: 73312 - DNA, 74 bp, Homo sapiens
ccagagccacttctatcccagcttttcctattgtcctgcccccgaccatttcctctagggccgaatctgctgtg

SEQ ID NO: 73313 - DNA, 74 bp, Homo sapiens
acttctatcccagcttttcctattgtcctgcccccgaccatttcctctagggccgaatctgctgtgtggctgta

SEQ ID NO: 73314 - DNA, 74 bp, Homo sapiens
agcttttcctattgtcctgcccccgaccatttcctctagggccgaatctgctgtgtggctgtagacacaagagg

SEQ ID NO: 73315 - DNA, 76 bp, Homo sapiens
tattgtcctgcccccgaccatttcctctagggccgaatctgctgtgtggctgtagacacaagagggaaggtatcac

SEQ ID NO: 73316 - DNA, 73 bp, Homo sapiens
cccgaccatttcctctagggccgaatctgctgtgtggctgtagacacaagagggaaggtatcacccttgactt

SEQ ID NO: 73317 - DNA, 74 bp, Homo sapiens
atttcctctagggccgaatctgctgtgtggctgtagacacaagagggaaggtatcacccttgactttggaagaa

SEQ ID NO: 73318 - DNA, 78 bp, Homo sapiens
tagggccgaatctgctgtgtggctgtagacacaagagggaaggtatcacccttgactttggaagaagagagagtgaga

SEQ ID NO: 73319 - DNA, 78 bp, Homo sapiens
tgtgtggctgtagacacaagagggaaggtatcacccttgactttggaagaagagagagtgagaggatgactctaggac

SEQ ID NO: 73320 - DNA, 73 bp, Homo sapiens
tagacacaagagggaaggtatcacccttgactttggaagaagagagagtgagaggatgactctaggacccttt

SEQ ID NO: 73321 - DNA, 72 bp, Homo sapiens
aagagggaaggtatcacccttgactttggaagaagagagagtgagaggatgactctaggaccctttttctca

SEQ ID NO: 73322 - DNA, 73 bp, Homo sapiens
aggtatcacccttgactttggaagaagagagagtgagaggatgactctaggaccctttttctcattctcccag

SEQ ID NO: 73323 - DNA, 74 bp, Homo sapiens
aagaagagagagtgagaggatgactctaggaccctttttctcattctcccagtgctggagcaagacccccctcc

SEQ ID NO: 73324 - DNA, 69 bp, Homo sapiens
atgactctaggaccctttttctcattctcccagtgctggagcaagacccccctcccctagggggatagt

SEQ ID NO: 73325 - DNA, 73 bp, Homo sapiens
tttttctcattctcccagtgctggagcaagacccccctcccctagggggatagttggagcagggctgccagag

SEQ ID NO: 73326 - DNA, 74 bp, Homo sapiens
ctcattctcccagtgctggagcaagacccccctcccctagggggatagttggagcagggctgccagagtcaccc

SEQ ID NO: 73327 - DNA, 71 bp, Homo sapiens
ctggagcaagacccccctcccctagggggatagttggagcagggctgccagagtcaccccttccactgcct

SEQ ID NO: 73328 - DNA, 70 bp, Homo sapiens
aagacccccctcccctagggggatagttggagcagggctgccagagtcaccccttccactgccttggcca

SEQ ID NO: 73329 - DNA, 77 bp, Homo sapiens
atagttggagcagggctgccagagtcaccccttccactgccttggccaccttctccagagggctggagagaagctgg

SEQ ID NO: 73330 - DNA, 77 bp, Homo sapiens
agggctgccagagtcaccccttccactgccttggccaccttctccagagggctggagagaagctgggatctgagacc

SEQ ID NO: 73331 - DNA, 76 bp, Homo sapiens
agagtcaccccttccactgccttggccaccttctccagagggctggagagaagctgggatctgagaccttggtctc

SEQ ID NO: 73332 - DNA, 75 bp, Homo sapiens
accccttccactgccttggccaccttctccagagggctggagagaagctgggatctgagaccttggtctccagcc

SEQ ID NO: 73333 - DNA, 76 bp, Homo sapiens
ccttggccaccttctccagagggctggagagaagctgggatctgagaccttggtctccagcccctgtctcttctta

SEQ ID NO: 73334 - DNA, 80 bp, Homo sapiens
gctggagagaagctgggatctgagaccttggtctccagcccctgtctcttcttagcccatggggacagctcagctcttcc

SEQ ID NO: 73335 - DNA, 78 bp, Homo sapiens
atctgagaccttggtctccagcccctgtctcttcttagcccatggggacagctcagctcttcctggcccagaactgga

SEQ ID NO: 73336 - DNA, 77 bp, Homo sapiens
ttggtctccagcccctgtctcttcttagcccatggggacagctcagctcttcctggcccagaactggagagggagga

SEQ ID NO: 73337 - DNA, 79 bp, Homo sapiens
ctcttcttagcccatggggacagctcagctcttcctggcccagaactggagagggaggaggatcacagagagtaggaca

SEQ ID NO: 73338 - DNA, 81 bp, Homo sapiens
tggggacagctcagctcttcctggcccagaactggagagggaggaggatcacagagagtaggacaggcagtgtattggtga

SEQ ID NO: 73339 - DNA, 75 bp, Homo sapiens
tggcccagaactggagagggaggaggatcacagagagtaggacaggcagtgtattggtgagcccttcccctaaac

SEQ ID NO: 73340 - DNA, 74 bp, Homo sapiens
aactggagagggaggaggatcacagagagtaggacaggcagtgtattggtgagcccttcccctaaaccactgga

SEQ ID NO: 73341 - DNA, 74 bp, Homo sapiens
aggaggatcacagagagtaggacaggcagtgtattggtgagcccttcccctaaaccactggacatggggaagtg

SEQ ID NO: 73342 - DNA, 74 bp, Homo sapiens
atcacagagagtaggacaggcagtgtattggtgagcccttcccctaaaccactggacatggggaagtggagacc

SEQ ID NO: 73343 - DNA, 71 bp, Homo sapiens
agtaggacaggcagtgtattggtgagcccttcccctaaaccactggacatggggaagtggagacctgtccc

SEQ ID NO: 73344 - DNA, 72 bp, Homo sapiens
agtgtattggtgagcccttcccctaaaccactggacatggggaagtggagacctgtccccacatccattctg

SEQ ID NO: 73345 - DNA, 70 bp, Homo sapiens
ggtgagcccttcccctaaaccactggacatggggaagtggagacctgtccccacatccattctggggtgg

SEQ ID NO: 73346 - DNA, 71 bp, Homo sapiens
taaaccactggacatggggaagtggagacctgtccccacatccattctggggtggggtagtagacctagag

SEQ ID NO: 73347 - DNA, 70 bp, Homo sapiens
gacatggggaagtggagacctgtccccacatccattctggggtggggtagtagacctagaggcctgggtt

SEQ ID NO: 73348 - DNA, 69 bp, Homo sapiens
aagtggagacctgtccccacatccattctggggtggggtagtagacctagaggcctgggtttccagttc

SEQ ID NO: 73349 - DNA, 70 bp, Homo sapiens
ctgtccccacatccattctggggtggggtagtagacctagaggcctgggtttccagttcccgtagtctga

SEQ ID NO: 73350 - DNA, 69 bp, Homo sapiens
atccattctggggtggggtagtagacctagaggcctgggtttccagttcccgtagtctgagcgtgggtg

SEQ ID NO: 73351 - DNA, 73 bp, Homo sapiens
ggtggggtagtagacctagaggcctgggtttccagttcccgtagtctgagcgtgggtgtgcatatataagtga

SEQ ID NO: 73352 - DNA, 77 bp, Homo sapiens
tagaggcctgggtttccagttcccgtagtctgagcgtgggtgtgcatatataagtgagtgaggtgtcagtggactcg

SEQ ID NO: 73353 - DNA, 76 bp, Homo sapiens
ggtttccagttcccgtagtctgagcgtgggtgtgcatatataagtgagtgaggtgtcagtggactcgggtcctgag

SEQ ID NO: 73354 - DNA, 79 bp, Homo sapiens
ttcccgtagtctgagcgtgggtgtgcatatataagtgagtgaggtgtcagtggactcgggtcctgaggctgtgaggttg

SEQ ID NO: 73355 - DNA, 78 bp, Homo sapiens
gtgtgcatatataagtgagtgaggtgtcagtggactcgggtcctgaggctgtgaggttgggagtgatgggggtctggg

SEQ ID NO: 73356 - DNA, 74 bp, Homo sapiens
tggactcgggtcctgaggctgtgaggttgggagtgatgggggtctgggggcttgccttgaggcacaggaaggac

SEQ ID NO: 73357 - DNA, 72 bp, Homo sapiens
aggctgtgaggttgggagtgatgggggtctgggggcttgccttgaggcacaggaaggacccggagtctgagg

SEQ ID NO: 73358 - DNA, 72 bp, Homo sapiens
gttgggagtgatgggggtctgggggcttgccttgaggcacaggaaggacccggagtctgagggtggcaacta

SEQ ID NO: 73359 - DNA, 73 bp, Homo sapiens
atgggggtctgggggcttgccttgaggcacaggaaggacccggagtctgagggtggcaactagactcagtcta

SEQ ID NO: 73360 - DNA, 76 bp, Homo sapiens
tctgggggcttgccttgaggcacaggaaggacccggagtctgagggtggcaactagactcagtctagaatatgtgg

SEQ ID NO: 73361 - DNA, 74 bp, Homo sapiens
acaggaaggacccggagtctgagggtggcaactagactcagtctagaatatgtggggccaatgccaccaccttg

SEQ ID NO: 73362 - DNA, 73 bp, Homo sapiens
acccggagtctgagggtggcaactagactcagtctagaatatgtggggccaatgccaccaccttggaagggtc

SEQ ID NO: 73363 - DNA, 71 bp, Homo sapiens
agggtggcaactagactcagtctagaatatgtggggccaatgccaccaccttggaagggtccccttgggtg

SEQ ID NO: 73364 - DNA, 71 bp, Homo sapiens
aactagactcagtctagaatatgtggggccaatgccaccaccttggaagggtccccttgggtgtgtggaag

SEQ ID NO: 73365 - DNA, 74 bp, Homo sapiens
atatgtggggccaatgccaccaccttggaagggtccccttgggtgtgtggaagtccgctggtgactggagctgc

SEQ ID NO: 73366 - DNA, 73 bp, Homo sapiens
ccaatgccaccaccttggaagggtccccttgggtgtgtggaagtccgctggtgactggagctgcctccagccc

SEQ ID NO: 73367 - DNA, 70 bp, Homo sapiens
accttggaagggtccccttgggtgtgtggaagtccgctggtgactggagctgcctccagccccctcttgg

SEQ ID NO: 73368 - DNA, 73 bp, Homo sapiens
cccttgggtgtgtggaagtccgctggtgactggagctgcctccagccccctcttggggaattctccactctcc

SEQ ID NO: 73369 - DNA, 73 bp, Homo sapiens
ggtgtgtggaagtccgctggtgactggagctgcctccagccccctcttggggaattctccactctccccttta

SEQ ID NO: 73370 - DNA, 74 bp, Homo sapiens
aagtccgctggtgactggagctgcctccagccccctcttggggaattctccactctcccctttactgccactga

SEQ ID NO: 73371 - DNA, 72 bp, Homo sapiens
actggagctgcctccagccccctcttggggaattctccactctcccctttactgccactgaaggtgggaaga

SEQ ID NO: 73372 - DNA, 70 bp, Homo sapiens
cctccagccccctcttggggaattctccactctcccctttactgccactgaaggtgggaagagcaggttg

SEQ ID NO: 73373 - DNA, 73 bp, Homo sapiens
actctcccctttactgccactgaaggtgggaagagcaggttggctctgggaggaggtggcctgggttctgcag

SEQ ID NO: 73374 - DNA, 73 bp, Homo sapiens
tttactgccactgaaggtgggaagagcaggttggctctgggaggaggtggcctgggttctgcagggccctagg

SEQ ID NO: 73375 - DNA, 72 bp, Homo sapiens
aaggtgggaagagcaggttggctctgggaggaggtggcctgggttctgcagggccctagggacattgcctcc

SEQ ID NO: 73376 - DNA, 73 bp, Homo sapiens
aagagcaggttggctctgggaggaggtggcctgggttctgcagggccctagggacattgcctccctccccaga

SEQ ID NO: 73377 - DNA, 72 bp, Homo sapiens
tctgggaggaggtggcctgggttctgcagggccctagggacattgcctccctccccagagccctcatttcgg

SEQ ID NO: 73378 - DNA, 73 bp, Homo sapiens
aggtggcctgggttctgcagggccctagggacattgcctccctccccagagccctcatttcggtgcattagag

SEQ ID NO: 73379 - DNA, 73 bp, Homo sapiens
tgggttctgcagggccctagggacattgcctccctccccagagccctcatttcggtgcattagaggacaaggg

SEQ ID NO: 73380 - DNA, 72 bp, Homo sapiens
agggccctagggacattgcctccctccccagagccctcatttcggtgcattagaggacaaggggggtgcaca

SEQ ID NO: 73381 - DNA, 75 bp, Homo sapiens
agggacattgcctccctccccagagccctcatttcggtgcattagaggacaaggggggtgcacaggatgtggctc

SEQ ID NO: 73382 - DNA, 76 bp, Homo sapiens
ctccccagagccctcatttcggtgcattagaggacaaggggggtgcacaggatgtggctccccatctgtctcccac

SEQ ID NO: 73383 - DNA, 77 bp, Homo sapiens
agagccctcatttcggtgcattagaggacaaggggggtgcacaggatgtggctccccatctgtctcccaccaatctc

SEQ ID NO: 73384 - DNA, 77 bp, Homo sapiens
atttcggtgcattagaggacaaggggggtgcacaggatgtggctccccatctgtctcccaccaatctccgccactca

SEQ ID NO: 73385 - DNA, 76 bp, Homo sapiens
attagaggacaaggggggtgcacaggatgtggctccccatctgtctcccaccaatctccgccactcacacctccgc

SEQ ID NO: 73386 - DNA, 78 bp, Homo sapiens
gggtgcacaggatgtggctccccatctgtctcccaccaatctccgccactcacacctccgcccgctcccagacgtcca

SEQ ID NO: 73387 - DNA, 78 bp, Homo sapiens
gatgtggctccccatctgtctcccaccaatctccgccactcacacctccgcccgctcccagacgtccaagaatgtgaa

SEQ ID NO: 73388 - DNA, 77 bp, Homo sapiens
cccatctgtctcccaccaatctccgccactcacacctccgcccgctcccagacgtccaagaatgtgaagcacgtgga

SEQ ID NO: 73389 - DNA, 77 bp, Homo sapiens
tctcccaccaatctccgccactcacacctccgcccgctcccagacgtccaagaatgtgaagcacgtggatgcccgta

SEQ ID NO: 73390 - DNA, 74 bp, Homo sapiens
aatctccgccactcacacctccgcccgctcccagacgtccaagaatgtgaagcacgtggatgcccgtagttggg

SEQ ID NO: 73391 - DNA, 72 bp, Homo sapiens
ccactcacacctccgcccgctcccagacgtccaagaatgtgaagcacgtggatgcccgtagttgggggaggg

SEQ ID NO: 73392 - DNA, 72 bp, Homo sapiens
cccgctcccagacgtccaagaatgtgaagcacgtggatgcccgtagttgggggagggggagacgcttatcag

SEQ ID NO: 73393 - DNA, 73 bp, Homo sapiens
agacgtccaagaatgtgaagcacgtggatgcccgtagttgggggagggggagacgcttatcaggcggccgctg

SEQ ID NO: 73394 - DNA, 72 bp, Homo sapiens
aagaatgtgaagcacgtggatgcccgtagttgggggagggggagacgcttatcaggcggccgctgggctagg

SEQ ID NO: 73395 - DNA, 69 bp, Homo sapiens
acgtggatgcccgtagttgggggagggggagacgcttatcaggcggccgctgggctaggggccttcttc

SEQ ID NO: 73396 - DNA, 70 bp, Homo sapiens
atgcccgtagttgggggagggggagacgcttatcaggcggccgctgggctaggggccttcttccgctgcc

SEQ ID NO: 73397 - DNA, 72 bp, Homo sapiens
gggagggggagacgcttatcaggcggccgctgggctaggggccttcttccgctgccgcggtacacccagagc

SEQ ID NO: 73398 - DNA, 72 bp, Homo sapiens
ggggagacgcttatcaggcggccgctgggctaggggccttcttccgctgccgcggtacacccagagctaccc

SEQ ID NO: 73399 - DNA, 72 bp, Homo sapiens
ttatcaggcggccgctgggctaggggccttcttccgctgccgcggtacacccagagctacccccgcctctcc

SEQ ID NO: 73400 - DNA, 69 bp, Homo sapiens
tgggctaggggccttcttccgctgccgcggtacacccagagctacccccgcctctccccgggaggagga

SEQ ID NO: 73401 - DNA, 68 bp, Homo sapiens
gccttcttccgctgccgcggtacacccagagctacccccgcctctccccgggaggaggaaggacggta

SEQ ID NO: 73402 - DNA, 66 bp, Homo sapiens
cgcggtacacccagagctacccccgcctctccccgggaggaggaaggacggtacagagggccctac

SEQ ID NO: 73403 - DNA, 64 bp, Homo sapiens
agagctacccccgcctctccccgggaggaggaaggacggtacagagggccctacgccccctccc

SEQ ID NO: 73404 - DNA, 64 bp, Homo sapiens
cccgcctctccccgggaggaggaaggacggtacagagggccctacgccccctccccaaccatcc

SEQ ID NO: 73405 - DNA, 68 bp, Homo sapiens
aggaaggacggtacagagggccctacgccccctccccaaccatccccaggggctgcgaggggagctgc

SEQ ID NO: 73406 - DNA, 73 bp, Homo sapiens
tacgccccctccccaaccatccccaggggctgcgaggggagctgcggaggagcgggcgccagctggattggga

SEQ ID NO: 73407 - DNA, 74 bp, Homo sapiens
cccaaccatccccaggggctgcgaggggagctgcggaggagcgggcgccagctggattgggaggggagccgctg

SEQ ID NO: 73408 - DNA, 74 bp, Homo sapiens
tgcgaggggagctgcggaggagcgggcgccagctggattgggaggggagccgctggccgggggcccggctgatt

SEQ ID NO: 73409 - DNA, 76 bp, Homo sapiens
agctgcggaggagcgggcgccagctggattgggaggggagccgctggccgggggcccggctgatttcctgctgatc

SEQ ID NO: 73410 - DNA, 75 bp, Homo sapiens
aggagcgggcgccagctggattgggaggggagccgctggccgggggcccggctgatttcctgctgatctcctcca

SEQ ID NO: 73411 - DNA, 72 bp, Homo sapiens
ccagctggattgggaggggagccgctggccgggggcccggctgatttcctgctgatctcctccaggaaaccg

SEQ ID NO: 73412 - DNA, 71 bp, Homo sapiens
aggggagccgctggccgggggcccggctgatttcctgctgatctcctccaggaaaccggccccttgtgcga

SEQ ID NO: 73413 - DNA, 72 bp, Homo sapiens
ctggccgggggcccggctgatttcctgctgatctcctccaggaaaccggccccttgtgcgagcctgcgaacg

SEQ ID NO: 73414 - DNA, 72 bp, Homo sapiens
ggggcccggctgatttcctgctgatctcctccaggaaaccggccccttgtgcgagcctgcgaacggctcggg

SEQ ID NO: 73415 - DNA, 71 bp, Homo sapiens
atttcctgctgatctcctccaggaaaccggccccttgtgcgagcctgcgaacggctcgggggcgtggggaa

SEQ ID NO: 73416 - DNA, 69 bp, Homo sapiens
atctcctccaggaaaccggccccttgtgcgagcctgcgaacggctcgggggcgtggggaatccggagtg

SEQ ID NO: 73417 - DNA, 71 bp, Homo sapiens
aggaaaccggccccttgtgcgagcctgcgaacggctcgggggcgtggggaatccggagtggagcgctctgc

SEQ ID NO: 73418 - DNA, 72 bp, Homo sapiens
aacggctcgggggcgtggggaatccggagtggagcgctctgcgccgcccgccctgccaggatggggagcgag

SEQ ID NO: 73419 - DNA, 74 bp, Homo sapiens
gcgtggggaatccggagtggagcgctctgcgccgcccgccctgccaggatggggagcgagggaggggcaccctg

SEQ ID NO: 73420 - DNA, 75 bp, Homo sapiens
aatccggagtggagcgctctgcgccgcccgccctgccaggatggggagcgagggaggggcaccctggcagcgtcg

SEQ ID NO: 73421 - DNA, 75 bp, Homo sapiens
agtggagcgctctgcgccgcccgccctgccaggatggggagcgagggaggggcaccctggcagcgtcggcgggag

SEQ ID NO: 73422 - DNA, 73 bp, Homo sapiens
tgcgccgcccgccctgccaggatggggagcgagggaggggcaccctggcagcgtcggcgggaggggacgcctg

SEQ ID NO: 73423 - DNA, 73 bp, Homo sapiens
ctgccaggatggggagcgagggaggggcaccctggcagcgtcggcgggaggggacgcctggcttcctgggtca

SEQ ID NO: 73424 - DNA, 71 bp, Homo sapiens
atggggagcgagggaggggcaccctggcagcgtcggcgggaggggacgcctggcttcctgggtcagttcca

SEQ ID NO: 73425 - DNA, 70 bp, Homo sapiens
agggaggggcaccctggcagcgtcggcgggaggggacgcctggcttcctgggtcagttccagtcctctgt

SEQ ID NO: 73426 - DNA, 72 bp, Homo sapiens
accctggcagcgtcggcgggaggggacgcctggcttcctgggtcagttccagtcctctgttgggcgctggaa

SEQ ID NO: 73427 - DNA, 74 bp, Homo sapiens
tcggcgggaggggacgcctggcttcctgggtcagttccagtcctctgttgggcgctggaactttgagctgagaa

SEQ ID NO: 73428 - DNA, 76 bp, Homo sapiens
tggcttcctgggtcagttccagtcctctgttgggcgctggaactttgagctgagaaggtgtggtccttctctagcc

SEQ ID NO: 73429 - DNA, 78 bp, Homo sapiens
tcagttccagtcctctgttgggcgctggaactttgagctgagaaggtgtggtccttctctagcccgagtccttctgca

SEQ ID NO: 73430 - DNA, 76 bp, Homo sapiens
agtcctctgttgggcgctggaactttgagctgagaaggtgtggtccttctctagcccgagtccttctgcaggaaga

SEQ ID NO: 73431 - DNA, 77 bp, Homo sapiens
tgttgggcgctggaactttgagctgagaaggtgtggtccttctctagcccgagtccttctgcaggaagaggagagat

SEQ ID NO: 73432 - DNA, 75 bp, Homo sapiens
aactttgagctgagaaggtgtggtccttctctagcccgagtccttctgcaggaagaggagagattggtgggctgg

SEQ ID NO: 73433 - DNA, 76 bp, Homo sapiens
agctgagaaggtgtggtccttctctagcccgagtccttctgcaggaagaggagagattggtgggctgggcctctgg

SEQ ID NO: 73434 - DNA, 73 bp, Homo sapiens
gtccttctctagcccgagtccttctgcaggaagaggagagattggtgggctgggcctctggggagggaggtta

SEQ ID NO: 73435 - DNA, 71 bp, Homo sapiens
aagaggagagattggtgggctgggcctctggggagggaggttagcagggatgggccaggcccgggcagtcc

SEQ ID NO: 73436 - DNA, 70 bp, Homo sapiens
agagattggtgggctgggcctctggggagggaggttagcagggatgggccaggcccgggcagtccctccc

SEQ ID NO: 73437 - DNA, 68 bp, Homo sapiens
tgggcctctggggagggaggttagcagggatgggccaggcccgggcagtccctcccccgttggtgtcc

SEQ ID NO: 73438 - DNA, 67 bp, Homo sapiens
tctggggagggaggttagcagggatgggccaggcccgggcagtccctcccccgttggtgtccctccc

SEQ ID NO: 73439 - DNA, 72 bp, Homo sapiens
ttagcagggatgggccaggcccgggcagtccctcccccgttggtgtccctccccactccacctgtgtgtgca

SEQ ID NO: 73440 - DNA, 70 bp, Homo sapiens
ccgggcagtccctcccccgttggtgtccctccccactccacctgtgtgtgcagggagttatggccgtgtc

SEQ ID NO: 73441 - DNA, 77 bp, Homo sapiens
ttggtgtccctccccactccacctgtgtgtgcagggagttatggccgtgtcctaactcttgcagaggctgtgaggat

SEQ ID NO: 73442 - DNA, 75 bp, Homo sapiens
acctgtgtgtgcagggagttatggccgtgtcctaactcttgcagaggctgtgaggattccggagttccccacacc

SEQ ID NO: 73443 - DNA, 72 bp, Homo sapiens
cagggagttatggccgtgtcctaactcttgcagaggctgtgaggattccggagttccccacacctccggcct

SEQ ID NO: 73444 - DNA, 72 bp, Homo sapiens
ttatggccgtgtcctaactcttgcagaggctgtgaggattccggagttccccacacctccggccttggtcct

SEQ ID NO: 73445 - DNA, 73 bp, Homo sapiens
tgtcctaactcttgcagaggctgtgaggattccggagttccccacacctccggccttggtccttgtacctcac

SEQ ID NO: 73446 - DNA, 72 bp, Homo sapiens
cagaggctgtgaggattccggagttccccacacctccggccttggtccttgtacctcacctccttggactgc

SEQ ID NO: 73447 - DNA, 71 bp, Homo sapiens
ttccggagttccccacacctccggccttggtccttgtacctcacctccttggactgctggctggaggcctg

SEQ ID NO: 73448 - DNA, 70 bp, Homo sapiens
cccacacctccggccttggtccttgtacctcacctccttggactgctggctggaggcctggggaggtggg

SEQ ID NO: 73449 - DNA, 74 bp, Homo sapiens
tccttgtacctcacctccttggactgctggctggaggcctggggaggtggggcatcgagctctgggttcaaagg

SEQ ID NO: 73450 - DNA, 75 bp, Homo sapiens
acctccttggactgctggctggaggcctggggaggtggggcatcgagctctgggttcaaagggcagagcagggaa

SEQ ID NO: 73451 - DNA, 72 bp, Homo sapiens
aggcctggggaggtggggcatcgagctctgggttcaaagggcagagcagggaaacctcagagctgggttacc

SEQ ID NO: 73452 - DNA, 75 bp, Homo sapiens
atcgagctctgggttcaaagggcagagcagggaaacctcagagctgggttacctgggtgacaggtggggatgtgc

SEQ ID NO: 73453 - DNA, 74 bp, Homo sapiens
tgggttcaaagggcagagcagggaaacctcagagctgggttacctgggtgacaggtggggatgtgctggaggta

SEQ ID NO: 73454 - DNA, 72 bp, Homo sapiens
agggaaacctcagagctgggttacctgggtgacaggtggggatgtgctggaggtagggggcaggctatgtta

SEQ ID NO: 73455 - DNA, 75 bp, Homo sapiens
agagctgggttacctgggtgacaggtggggatgtgctggaggtagggggcaggctatgttacagcctccaaggca

SEQ ID NO: 73456 - DNA, 77 bp, Homo sapiens
ctgggtgacaggtggggatgtgctggaggtagggggcaggctatgttacagcctccaaggcagtcaagctgccgttg

SEQ ID NO: 73457 - DNA, 75 bp, Homo sapiens
acaggtggggatgtgctggaggtagggggcaggctatgttacagcctccaaggcagtcaagctgccgttgggtgg

SEQ ID NO: 73458 - DNA, 75 bp, Homo sapiens
atgtgctggaggtagggggcaggctatgttacagcctccaaggcagtcaagctgccgttgggtgggctaaaagga

SEQ ID NO: 73459 - DNA, 71 bp, Homo sapiens
aggtagggggcaggctatgttacagcctccaaggcagtcaagctgccgttgggtgggctaaaaggaggcct

SEQ ID NO: 73460 - DNA, 73 bp, Homo sapiens
aggctatgttacagcctccaaggcagtcaagctgccgttgggtgggctaaaaggaggccttgcccagcctaaa

SEQ ID NO: 73461 - DNA, 73 bp, Homo sapiens
ttacagcctccaaggcagtcaagctgccgttgggtgggctaaaaggaggccttgcccagcctaaactgtagtc

SEQ ID NO: 73462 - DNA, 72 bp, Homo sapiens
aaggcagtcaagctgccgttgggtgggctaaaaggaggccttgcccagcctaaactgtagtccttgcctctg

SEQ ID NO: 73463 - DNA, 73 bp, Homo sapiens
aagctgccgttgggtgggctaaaaggaggccttgcccagcctaaactgtagtccttgcctctggtcatctctc

SEQ ID NO: 73464 - DNA, 74 bp, Homo sapiens
tgggctaaaaggaggccttgcccagcctaaactgtagtccttgcctctggtcatctctcccattctgccaaaaa

SEQ ID NO: 73465 - DNA, 72 bp, Homo sapiens
aaaaggaggccttgcccagcctaaactgtagtccttgcctctggtcatctctcccattctgccaaaaaataa

SEQ ID NO: 73466 - DNA, 69 bp, Homo sapiens
aattttaaaaagcacattctctcagttccgtaaacaccctctgttggactttgctttagctccatgttt

SEQ ID NO: 73467 - DNA, 71 bp, Homo sapiens
aaaagcacattctctcagttccgtaaacaccctctgttggactttgctttagctccatgtttttatggctt

SEQ ID NO: 73468 - DNA, 70 bp, Homo sapiens
attctctcagttccgtaaacaccctctgttggactttgctttagctccatgtttttatggctttttgccc

SEQ ID NO: 73469 - DNA, 71 bp, Homo sapiens
ttccgtaaacaccctctgttggactttgctttagctccatgtttttatggctttttgccctctagtctgtc

SEQ ID NO: 73470 - DNA, 74 bp, Homo sapiens
tctgttggactttgctttagctccatgtttttatggctttttgccctctagtctgtcccaggccttagagctgt

SEQ ID NO: 73471 - DNA, 71 bp, Homo sapiens
gtttttatggctttttgccctctagtctgtcccaggccttagagctgtttacctctcatcctggtatcccc

SEQ ID NO: 73472 - DNA, 74 bp, Homo sapiens
tttttgccctctagtctgtcccaggccttagagctgtttacctctcatcctggtatcccccatgactccccata

SEQ ID NO: 73473 - DNA, 73 bp, Homo sapiens
ccctctagtctgtcccaggccttagagctgtttacctctcatcctggtatcccccatgactccccatacccta

SEQ ID NO: 73474 - DNA, 75 bp, Homo sapiens
tctagtctgtcccaggccttagagctgtttacctctcatcctggtatcccccatgactccccataccctagctcc

SEQ ID NO: 73475 - DNA, 74 bp, Homo sapiens
tcccaggccttagagctgtttacctctcatcctggtatcccccatgactccccataccctagctcccctcgtga

SEQ ID NO: 73476 - DNA, 74 bp, Homo sapiens
aggccttagagctgtttacctctcatcctggtatcccccatgactccccataccctagctcccctcgtgacatc

SEQ ID NO: 73477 - DNA, 73 bp, Homo sapiens
ccttagagctgtttacctctcatcctggtatcccccatgactccccataccctagctcccctcgtgacatccc

SEQ ID NO: 73478 - DNA, 74 bp, Homo sapiens
tgtttacctctcatcctggtatcccccatgactccccataccctagctcccctcgtgacatcccgctctgtacc

SEQ ID NO: 73479 - DNA, 73 bp, Homo sapiens
ctctcatcctggtatcccccatgactccccataccctagctcccctcgtgacatcccgctctgtacccccaaa

SEQ ID NO: 73480 - DNA, 72 bp, Homo sapiens
atcctggtatcccccatgactccccataccctagctcccctcgtgacatcccgctctgtacccccaaagctc

SEQ ID NO: 73481 - DNA, 73 bp, Homo sapiens
tggtatcccccatgactccccataccctagctcccctcgtgacatcccgctctgtacccccaaagctccctca

SEQ ID NO: 73482 - DNA, 72 bp, Homo sapiens
ccatgactccccataccctagctcccctcgtgacatcccgctctgtacccccaaagctccctcagtcctttc

SEQ ID NO: 73483 - DNA, 74 bp, Homo sapiens
tagctcccctcgtgacatcccgctctgtacccccaaagctccctcagtcctttctccctctccagtctggttca

SEQ ID NO: 73484 - DNA, 73 bp, Homo sapiens
tcgtgacatcccgctctgtacccccaaagctccctcagtcctttctccctctccagtctggttcattttagaa

SEQ ID NO: 73485 - DNA, 70 bp, Homo sapiens
tcccgctctgtacccccaaagctccctcagtcctttctccctctccagtctggttcattttagaagtggg

SEQ ID NO: 73486 - DNA, 70 bp, Homo sapiens
ccaaagctccctcagtcctttctccctctccagtctggttcattttagaagtggggccttgggagaggcg

SEQ ID NO: 73487 - DNA, 70 bp, Homo sapiens
tccctcagtcctttctccctctccagtctggttcattttagaagtggggccttgggagaggcggggccca

SEQ ID NO: 73488 - DNA, 68 bp, Homo sapiens
tttctccctctccagtctggttcattttagaagtggggccttgggagaggcggggcccagggcaaacg

SEQ ID NO: 73489 - DNA, 69 bp, Homo sapiens
tccagtctggttcattttagaagtggggccttgggagaggcggggcccagggcaaacggtggattagga

SEQ ID NO: 73490 - DNA, 67 bp, Homo sapiens
tagaagtggggccttgggagaggcggggcccagggcaaacggtggattaggaggggtggggaggtca

SEQ ID NO: 73491 - DNA, 71 bp, Homo sapiens
gggcccagggcaaacggtggattaggaggggtggggaggtcagtgccttcttcctctgcttgtcggaatgc

SEQ ID NO: 73492 - DNA, 73 bp, Homo sapiens
caaacggtggattaggaggggtggggaggtcagtgccttcttcctctgcttgtcggaatgctgaccaagattc

SEQ ID NO: 73493 - DNA, 75 bp, Homo sapiens
attaggaggggtggggaggtcagtgccttcttcctctgcttgtcggaatgctgaccaagattctaggccatggtc

SEQ ID NO: 73494 - DNA, 74 bp, Homo sapiens
gtggggaggtcagtgccttcttcctctgcttgtcggaatgctgaccaagattctaggccatggtccccccaacc

SEQ ID NO: 73495 - DNA, 76 bp, Homo sapiens
tcagtgccttcttcctctgcttgtcggaatgctgaccaagattctaggccatggtccccccaaccctccacatacc

SEQ ID NO: 73496 - DNA, 72 bp, Homo sapiens
ccttcttcctctgcttgtcggaatgctgaccaagattctaggccatggtccccccaaccctccacatacccc

SEQ ID NO: 73497 - DNA, 73 bp, Homo sapiens
ttgtcggaatgctgaccaagattctaggccatggtccccccaaccctccacatacccccttgcccttgatctc

SEQ ID NO: 73498 - DNA, 71 bp, Homo sapiens
aatgctgaccaagattctaggccatggtccccccaaccctccacatacccccttgcccttgatctcccctc

SEQ ID NO: 73499 - DNA, 67 bp, Homo sapiens
aagattctaggccatggtccccccaaccctccacatacccccttgcccttgatctcccctcccccca

SEQ ID NO: 73500 - DNA, 67 bp, Homo sapiens
atggtccccccaaccctccacatacccccttgcccttgatctcccctccccccaccagtctggattg

SEQ ID NO: 73501 - DNA, 70 bp, Homo sapiens
aaccctccacatacccccttgcccttgatctcccctccccccaccagtctggattgtctattgttactgc

SEQ ID NO: 73502 - DNA, 69 bp, Homo sapiens
atacccccttgcccttgatctcccctccccccaccagtctggattgtctattgttactgcttttacgtc

SEQ ID NO: 73503 - DNA, 70 bp, Homo sapiens
ttgcccttgatctcccctccccccaccagtctggattgtctattgttactgcttttacgtcttggaaaaa

SEQ ID NO: 73504 - DNA, 70 bp, Homo sapiens
tcccctccccccaccagtctggattgtctattgttactgcttttacgtcttggaaaaagttagcacaaca

SEQ ID NO: 73505 - DNA, 71 bp, Homo sapiens
ccaccagtctggattgtctattgttactgcttttacgtcttggaaaaagttagcacaacaaagggctgctt

SEQ ID NO: 73506 - DNA, 72 bp, Homo sapiens
agtctggattgtctattgttactgcttttacgtcttggaaaaagttagcacaacaaagggctgctttgtggc

SEQ ID NO: 73507 - DNA, 71 bp, Homo sapiens
tctattgttactgcttttacgtcttggaaaaagttagcacaacaaagggctgctttgtggctcaccccctc

SEQ ID NO: 73508 - DNA, 71 bp, Homo sapiens
actgcttttacgtcttggaaaaagttagcacaacaaagggctgctttgtggctcaccccctctgcctcctg

SEQ ID NO: 73509 - DNA, 71 bp, Homo sapiens
aaagttagcacaacaaagggctgctttgtggctcaccccctctgcctcctggcctcacccaggccccccaa

SEQ ID NO: 73510 - DNA, 68 bp, Homo sapiens
aacaaagggctgctttgtggctcaccccctctgcctcctggcctcacccaggccccccaaccccgccc

SEQ ID NO: 73511 - DNA, 71 bp, Homo sapiens
ccccctctgcctcctggcctcacccaggccccccaaccccgcccccccagcagctgttctcaggcctctca

SEQ ID NO: 73512 - DNA, 73 bp, Homo sapiens
ctcctggcctcacccaggccccccaaccccgcccccccagcagctgttctcaggcctctcagcctgtctgatt

SEQ ID NO: 73513 - DNA, 74 bp, Homo sapiens
aggccccccaaccccgcccccccagcagctgttctcaggcctctcagcctgtctgatttgcttgtctggcctgg

SEQ ID NO: 73514 - DNA, 79 bp, Homo sapiens
gcccccccagcagctgttctcaggcctctcagcctgtctgatttgcttgtctggcctggggagaatgaggtgggagaaa

SEQ ID NO: 73515 - DNA, 80 bp, Homo sapiens
agcagctgttctcaggcctctcagcctgtctgatttgcttgtctggcctggggagaatgaggtgggagaaaaccaggcca

SEQ ID NO: 73516 - DNA, 78 bp, Homo sapiens
gttctcaggcctctcagcctgtctgatttgcttgtctggcctggggagaatgaggtgggagaaaaccaggccagggca

SEQ ID NO: 73517 - DNA, 75 bp, Homo sapiens
agcctgtctgatttgcttgtctggcctggggagaatgaggtgggagaaaaccaggccagggcagttggtgttgga

SEQ ID NO: 73518 - DNA, 76 bp, Homo sapiens
tctgatttgcttgtctggcctggggagaatgaggtgggagaaaaccaggccagggcagttggtgttggagtgaaga

SEQ ID NO: 73519 - DNA, 74 bp, Homo sapiens
tgggagaaaaccaggccagggcagttggtgttggagtgaagagcagacggcggtggggaggtcaggagagaatc

SEQ ID NO: 73520 - DNA, 74 bp, Homo sapiens
aaaaccaggccagggcagttggtgttggagtgaagagcagacggcggtggggaggtcaggagagaatctgctgg

SEQ ID NO: 73521 - DNA, 76 bp, Homo sapiens
agggcagttggtgttggagtgaagagcagacggcggtggggaggtcaggagagaatctgctgggctggggatggtg

SEQ ID NO: 73522 - DNA, 80 bp, Homo sapiens
tgttggagtgaagagcagacggcggtggggaggtcaggagagaatctgctgggctggggatggtgtgggcatcaactgtc

SEQ ID NO: 73523 - DNA, 81 bp, Homo sapiens
aagagcagacggcggtggggaggtcaggagagaatctgctgggctggggatggtgtgggcatcaactgtcccattgctgca

SEQ ID NO: 73524 - DNA, 79 bp, Homo sapiens
agagaatctgctgggctggggatggtgtgggcatcaactgtcccattgctgcaggctggtcttggggcagggaagggga

SEQ ID NO: 73525 - DNA, 79 bp, Homo sapiens
atggtgtgggcatcaactgtcccattgctgcaggctggtcttggggcagggaaggggatggggggccatagcagtgctg

SEQ ID NO: 73526 - DNA, 79 bp, Homo sapiens
atcaactgtcccattgctgcaggctggtcttggggcagggaaggggatggggggccatagcagtgctggtcagccaggc

SEQ ID NO: 73527 - DNA, 78 bp, Homo sapiens
attgctgcaggctggtcttggggcagggaaggggatggggggccatagcagtgctggtcagccaggctggcctgggaa

SEQ ID NO: 73528 - DNA, 74 bp, Homo sapiens
aggctggtcttggggcagggaaggggatggggggccatagcagtgctggtcagccaggctggcctgggaagtgg

SEQ ID NO: 73529 - DNA, 76 bp, Homo sapiens
gggcagggaaggggatggggggccatagcagtgctggtcagccaggctggcctgggaagtggtgcccaggcactac

SEQ ID NO: 73530 - DNA, 77 bp, Homo sapiens
aaggggatggggggccatagcagtgctggtcagccaggctggcctgggaagtggtgcccaggcactactaagagcca

SEQ ID NO: 73531 - DNA, 74 bp, Homo sapiens
agccaggctggcctgggaagtggtgcccaggcactactaagagccaggaaagccctgccaaggttgttggccta

SEQ ID NO: 73532 - DNA, 71 bp, Homo sapiens
cctgggaagtggtgcccaggcactactaagagccaggaaagccctgccaaggttgttggcctagttccctg

SEQ ID NO: 73533 - DNA, 74 bp, Homo sapiens
aagtggtgcccaggcactactaagagccaggaaagccctgccaaggttgttggcctagttccctgtcatcagcc

SEQ ID NO: 73534 - DNA, 75 bp, Homo sapiens
aggcactactaagagccaggaaagccctgccaaggttgttggcctagttccctgtcatcagccgcctagcagccc

SEQ ID NO: 73535 - DNA, 77 bp, Homo sapiens
ctagttccctgtcatcagccgcctagcagcccccactgtgtctgcaggtaaggggggagggtggtagcacatagtca

SEQ ID NO: 73536 - DNA, 78 bp, Homo sapiens
tgtcatcagccgcctagcagcccccactgtgtctgcaggtaaggggggagggtggtagcacatagtcagcccctggtg

SEQ ID NO: 73537 - DNA, 74 bp, Homo sapiens
agccgcctagcagcccccactgtgtctgcaggtaaggggggagggtggtagcacatagtcagcccctggtgttc

SEQ ID NO: 73538 - DNA, 73 bp, Homo sapiens
ccccactgtgtctgcaggtaaggggggagggtggtagcacatagtcagcccctggtgttcccatgcttccttc

SEQ ID NO: 73539 - DNA, 76 bp, Homo sapiens
ctgtgtctgcaggtaaggggggagggtggtagcacatagtcagcccctggtgttcccatgcttccttcctctgtgc

SEQ ID NO: 73540 - DNA, 71 bp, Homo sapiens
aggggggagggtggtagcacatagtcagcccctggtgttcccatgcttccttcctctgtgccccaatttta

SEQ ID NO: 73541 - DNA, 76 bp, Homo sapiens
gtggtagcacatagtcagcccctggtgttcccatgcttccttcctctgtgccccaattttagggccatgtgatttg

SEQ ID NO: 73542 - DNA, 74 bp, Homo sapiens
acatagtcagcccctggtgttcccatgcttccttcctctgtgccccaattttagggccatgtgatttggggcta

SEQ ID NO: 73543 - DNA, 77 bp, Homo sapiens
cctggtgttcccatgcttccttcctctgtgccccaattttagggccatgtgatttggggctatgtgactcatgtctg

SEQ ID NO: 73544 - DNA, 77 bp, Homo sapiens
tgttcccatgcttccttcctctgtgccccaattttagggccatgtgatttggggctatgtgactcatgtctgtaagg

SEQ ID NO: 73545 - DNA, 77 bp, Homo sapiens
ttccttcctctgtgccccaattttagggccatgtgatttggggctatgtgactcatgtctgtaaggtgcttgggcca

SEQ ID NO: 73546 - DNA, 78 bp, Homo sapiens
ctgtgccccaattttagggccatgtgatttggggctatgtgactcatgtctgtaaggtgcttgggccaggagctgtgg

SEQ ID NO: 73547 - DNA, 77 bp, Homo sapiens
tttagggccatgtgatttggggctatgtgactcatgtctgtaaggtgcttgggccaggagctgtgggcacctttaaa

SEQ ID NO: 73548 - DNA, 80 bp, Homo sapiens
atgtgatttggggctatgtgactcatgtctgtaaggtgcttgggccaggagctgtgggcacctttaaatgccagccagtc

SEQ ID NO: 73549 - DNA, 75 bp, Homo sapiens
tgtaaggtgcttgggccaggagctgtgggcacctttaaatgccagccagtctcatgtgccggagtttggggtagg

SEQ ID NO: 73550 - DNA, 74 bp, Homo sapiens
ccaggagctgtgggcacctttaaatgccagccagtctcatgtgccggagtttggggtagggctaggtaggattg

SEQ ID NO: 73551 - DNA, 75 bp, Homo sapiens
tgtgggcacctttaaatgccagccagtctcatgtgccggagtttggggtagggctaggtaggattgtggaatatg

SEQ ID NO: 73552 - DNA, 72 bp, Homo sapiens
acctttaaatgccagccagtctcatgtgccggagtttggggtagggctaggtaggattgtggaatatgggag

SEQ ID NO: 73553 - DNA, 72 bp, Homo sapiens
agtttggggtagggctaggtaggattgtggaatatgggaggaggcagggatctgtctacctagggaggcatc

SEQ ID NO: 73554 - DNA, 78 bp, Homo sapiens
taggattgtggaatatgggaggaggcagggatctgtctacctagggaggcatcctcatccatccttggccctggacaa

SEQ ID NO: 73555 - DNA, 77 bp, Homo sapiens
aatatgggaggaggcagggatctgtctacctagggaggcatcctcatccatccttggccctggacaagagaacttga

SEQ ID NO: 73556 - DNA, 75 bp, Homo sapiens
aggcagggatctgtctacctagggaggcatcctcatccatccttggccctggacaagagaacttgaacgttggta

SEQ ID NO: 73557 - DNA, 73 bp, Homo sapiens
atctgtctacctagggaggcatcctcatccatccttggccctggacaagagaacttgaacgttggtaggggcc

SEQ ID NO: 73558 - DNA, 75 bp, Homo sapiens
ctagggaggcatcctcatccatccttggccctggacaagagaacttgaacgttggtaggggcctcaggacgatgc

SEQ ID NO: 73559 - DNA, 73 bp, Homo sapiens
ttggccctggacaagagaacttgaacgttggtaggggcctcaggacgatgctgcgtggccccttgggaatctg

SEQ ID NO: 73560 - DNA, 72 bp, Homo sapiens
acaagagaacttgaacgttggtaggggcctcaggacgatgctgcgtggccccttgggaatctgggattgtcc

SEQ ID NO: 73561 - DNA, 73 bp, Homo sapiens
aacttgaacgttggtaggggcctcaggacgatgctgcgtggccccttgggaatctgggattgtcctggtcata

SEQ ID NO: 73562 - DNA, 74 bp, Homo sapiens
gttggtaggggcctcaggacgatgctgcgtggccccttgggaatctgggattgtcctggtcatagttcttatct

SEQ ID NO: 73563 - DNA, 76 bp, Homo sapiens
tcaggacgatgctgcgtggccccttgggaatctgggattgtcctggtcatagttcttatcttgcacccaacaccct

SEQ ID NO: 73564 - DNA, 76 bp, Homo sapiens
atgctgcgtggccccttgggaatctgggattgtcctggtcatagttcttatcttgcacccaacacccttagctgcc

SEQ ID NO: 73565 - DNA, 73 bp, Homo sapiens
cccttgggaatctgggattgtcctggtcatagttcttatcttgcacccaacacccttagctgcccaggctttg

SEQ ID NO: 73566 - DNA, 73 bp, Homo sapiens
atagttcttatcttgcacccaacacccttagctgcccaggctttggacatggatagcccctacccaacccagc

SEQ ID NO: 73567 - DNA, 74 bp, Homo sapiens
aacacccttagctgcccaggctttggacatggatagcccctacccaacccagccctgttctgcctacagtgatg

SEQ ID NO: 73568 - DNA, 79 bp, Homo sapiens
tgcccaggctttggacatggatagcccctacccaacccagccctgttctgcctacagtgatgggcatggagccagacac

SEQ ID NO: 73569 - DNA, 77 bp, Homo sapiens
ggctttggacatggatagcccctacccaacccagccctgttctgcctacagtgatgggcatggagccagacactggg

SEQ ID NO: 73570 - DNA, 76 bp, Homo sapiens
atggatagcccctacccaacccagccctgttctgcctacagtgatgggcatggagccagacactggggaggatttg

SEQ ID NO: 73571 - DNA, 76 bp, Homo sapiens
cctacccaacccagccctgttctgcctacagtgatgggcatggagccagacactggggaggatttggccagtgagg

SEQ ID NO: 73572 - DNA, 81 bp, Homo sapiens
agccctgttctgcctacagtgatgggcatggagccagacactggggaggatttggccagtgagggctgcccctgctgtctg

SEQ ID NO: 73573 - DNA, 81 bp, Homo sapiens
tctgcctacagtgatgggcatggagccagacactggggaggatttggccagtgagggctgcccctgctgtctgggtcaccc

SEQ ID NO: 73574 - DNA, 79 bp, Homo sapiens
gtgatgggcatggagccagacactggggaggatttggccagtgagggctgcccctgctgtctgggtcacccctcctggc

SEQ ID NO: 73575 - DNA, 76 bp, Homo sapiens
ccagacactggggaggatttggccagtgagggctgcccctgctgtctgggtcacccctcctggctgccctcttgga

SEQ ID NO: 73576 - DNA, 76 bp, Homo sapiens
atttggccagtgagggctgcccctgctgtctgggtcacccctcctggctgccctcttggagctgaataacagaagg

SEQ ID NO: 73577 - DNA, 73 bp, Homo sapiens
ggctgcccctgctgtctgggtcacccctcctggctgccctcttggagctgaataacagaaggggaggggttag

SEQ ID NO: 73578 - DNA, 71 bp, Homo sapiens
tgctgtctgggtcacccctcctggctgccctcttggagctgaataacagaaggggaggggttagtaacccg

SEQ ID NO: 73579 - DNA, 70 bp, Homo sapiens
tcacccctcctggctgccctcttggagctgaataacagaaggggaggggttagtaacccggacatagtat

SEQ ID NO: 73580 - DNA, 76 bp, Homo sapiens
tcttggagctgaataacagaaggggaggggttagtaacccggacatagtattgaggccagacagacagagcattga

SEQ ID NO: 73581 - DNA, 72 bp, Homo sapiens
agaaggggaggggttagtaacccggacatagtattgaggccagacagacagagcattgatgggaacagaccc

SEQ ID NO: 73582 - DNA, 79 bp, Homo sapiens
ttagtaacccggacatagtattgaggccagacagacagagcattgatgggaacagaccccctttgtcatgccatctctc

SEQ ID NO: 73583 - DNA, 79 bp, Homo sapiens
acccggacatagtattgaggccagacagacagagcattgatgggaacagaccccctttgtcatgccatctctccccaga

SEQ ID NO: 73584 - DNA, 78 bp, Homo sapiens
agtattgaggccagacagacagagcattgatgggaacagaccccctttgtcatgccatctctccccagatggggggta

SEQ ID NO: 73585 - DNA, 76 bp, Homo sapiens
agacagacagagcattgatgggaacagaccccctttgtcatgccatctctccccagatggggggtacccagaataa

SEQ ID NO: 73586 - DNA, 71 bp, Homo sapiens
attgatgggaacagaccccctttgtcatgccatctctccccagatggggggtacccagaataatgggcttt

SEQ ID NO: 73587 - DNA, 70 bp, Homo sapiens
tgggaacagaccccctttgtcatgccatctctccccagatggggggtacccagaataatgggcttttggg

SEQ ID NO: 73588 - DNA, 71 bp, Homo sapiens
tttgtcatgccatctctccccagatggggggtacccagaataatgggcttttggggccctggggactcttc

SEQ ID NO: 73589 - DNA, 69 bp, Homo sapiens
catctctccccagatggggggtacccagaataatgggcttttggggccctggggactcttctccctgta

SEQ ID NO: 73590 - DNA, 68 bp, Homo sapiens
cagatggggggtacccagaataatgggcttttggggccctggggactcttctccctgtattcagggta

SEQ ID NO: 73591 - DNA, 67 bp, Homo sapiens
ggggtacccagaataatgggcttttggggccctggggactcttctccctgtattcagggtatctccc

SEQ ID NO: 73592 - DNA, 69 bp, Homo sapiens
aataatgggcttttggggccctggggactcttctccctgtattcagggtatctccccctatctcaggga

SEQ ID NO: 73593 - DNA, 70 bp, Homo sapiens
ttttggggccctggggactcttctccctgtattcagggtatctccccctatctcagggagacacctccta

SEQ ID NO: 73594 - DNA, 76 bp, Homo sapiens
ttctccctgtattcagggtatctccccctatctcagggagacacctcctactgtgcccagcatttgtgactcttct

SEQ ID NO: 73595 - DNA, 76 bp, Homo sapiens
gtatctccccctatctcagggagacacctcctactgtgcccagcatttgtgactcttctttgcaccccctgccttg

SEQ ID NO: 73596 - DNA, 76 bp, Homo sapiens
ctatctcagggagacacctcctactgtgcccagcatttgtgactcttctttgcaccccctgccttgggtccctggc

SEQ ID NO: 73597 - DNA, 72 bp, Homo sapiens
acctcctactgtgcccagcatttgtgactcttctttgcaccccctgccttgggtccctggccctgggattgt

SEQ ID NO: 73598 - DNA, 73 bp, Homo sapiens
tactgtgcccagcatttgtgactcttctttgcaccccctgccttgggtccctggccctgggattgtttgggtg

SEQ ID NO: 73599 - DNA, 70 bp, Homo sapiens
agcatttgtgactcttctttgcaccccctgccttgggtccctggccctgggattgtttgggtggaggagg

SEQ ID NO: 73600 - DNA, 69 bp, Homo sapiens
actcttctttgcaccccctgccttgggtccctggccctgggattgtttgggtggaggaggggcagtggc

SEQ ID NO: 73601 - DNA, 71 bp, Homo sapiens
accccctgccttgggtccctggccctgggattgtttgggtggaggaggggcagtggctgctggcagaatgg

SEQ ID NO: 73602 - DNA, 73 bp, Homo sapiens
ccctgggattgtttgggtggaggaggggcagtggctgctggcagaatggggtggaggggggagcggaagcaga

SEQ ID NO: 73603 - DNA, 72 bp, Homo sapiens
ggattgtttgggtggaggaggggcagtggctgctggcagaatggggtggaggggggagcggaagcagagggg

SEQ ID NO: 73604 - DNA, 72 bp, Homo sapiens
gtggaggaggggcagtggctgctggcagaatggggtggaggggggagcggaagcagagggggcgggggagtg

SEQ ID NO: 73605 - DNA, 72 bp, Homo sapiens
gtggctgctggcagaatggggtggaggggggagcggaagcagagggggcgggggagtggccggctttgaata

SEQ ID NO: 73606 - DNA, 71 bp, Homo sapiens
gcagaatggggtggaggggggagcggaagcagagggggcgggggagtggccggctttgaatatcctgttga

SEQ ID NO: 73607 - DNA, 68 bp, Homo sapiens
gtggaggggggagcggaagcagagggggcgggggagtggccggctttgaatatcctgttgaccccagt

SEQ ID NO: 73608 - DNA, 70 bp, Homo sapiens
gggagcggaagcagagggggcgggggagtggccggctttgaatatcctgttgaccccagtttcctctgcc

SEQ ID NO: 73609 - DNA, 71 bp, Homo sapiens
ggggagtggccggctttgaatatcctgttgaccccagtttcctctgcccccagcttatgtcctcttccctc

SEQ ID NO: 73610 - DNA, 71 bp, Homo sapiens
gtggccggctttgaatatcctgttgaccccagtttcctctgcccccagcttatgtcctcttccctccctcc

SEQ ID NO: 73611 - DNA, 71 bp, Homo sapiens
atatcctgttgaccccagtttcctctgcccccagcttatgtcctcttccctccctcctcttcaagcgttaa

SEQ ID NO: 73612 - DNA, 69 bp, Homo sapiens
agtttcctctgcccccagcttatgtcctcttccctccctcctcttcaagcgttaactccttcctaactc

SEQ ID NO: 73613 - DNA, 67 bp, Homo sapiens
cagcttatgtcctcttccctccctcctcttcaagcgttaactccttcctaactcggggggagaacgg

SEQ ID NO: 73614 - DNA, 67 bp, Homo sapiens
tatgtcctcttccctccctcctcttcaagcgttaactccttcctaactcggggggagaacggggcca

SEQ ID NO: 73615 - DNA, 65 bp, Homo sapiens
tccctcctcttcaagcgttaactccttcctaactcggggggagaacggggccaggccgcccaggg

SEQ ID NO: 73616 - DNA, 67 bp, Homo sapiens
tcaagcgttaactccttcctaactcggggggagaacggggccaggccgcccaggggcaagagcttta

SEQ ID NO: 73617 - DNA, 67 bp, Homo sapiens
gggagaacggggccaggccgcccaggggcaagagctttagaatcagggtgacccccacccctactcc

SEQ ID NO: 73618 - DNA, 72 bp, Homo sapiens
caggccgcccaggggcaagagctttagaatcagggtgacccccacccctactccccaagcacagtcacggca

SEQ ID NO: 73619 - DNA, 72 bp, Homo sapiens
aggggcaagagctttagaatcagggtgacccccacccctactccccaagcacagtcacggcacacatacaaa

SEQ ID NO: 73620 - DNA, 74 bp, Homo sapiens
gctttagaatcagggtgacccccacccctactccccaagcacagtcacggcacacatacaaatgtgatggttta

SEQ ID NO: 73621 - DNA, 75 bp, Homo sapiens
aatcagggtgacccccacccctactccccaagcacagtcacggcacacatacaaatgtgatggtttatcattgta

SEQ ID NO: 73622 - DNA, 74 bp, Homo sapiens
cccacccctactccccaagcacagtcacggcacacatacaaatgtgatggtttatcattgtatctttgtggttt

SEQ ID NO: 73623 - DNA, 76 bp, Homo sapiens
cctactccccaagcacagtcacggcacacatacaaatgtgatggtttatcattgtatctttgtggttttgaaggtg

SEQ ID NO: 73624 - DNA, 75 bp, Homo sapiens
aagcacagtcacggcacacatacaaatgtgatggtttatcattgtatctttgtggttttgaaggtgggggtccta

SEQ ID NO: 73625 - DNA, 74 bp, Homo sapiens
cacacatacaaatgtgatggtttatcattgtatctttgtggttttgaaggtgggggtcctaggagtccagagga

SEQ ID NO: 73626 - DNA, 73 bp, Homo sapiens
atacaaatgtgatggtttatcattgtatctttgtggttttgaaggtgggggtcctaggagtccagaggagtga

SEQ ID NO: 73627 - DNA, 72 bp, Homo sapiens
atggtttatcattgtatctttgtggttttgaaggtgggggtcctaggagtccagaggagtgatggggtgctg

SEQ ID NO: 73628 - DNA, 72 bp, Homo sapiens
attgtatctttgtggttttgaaggtgggggtcctaggagtccagaggagtgatggggtgctggaggcttcat

SEQ ID NO: 73629 - DNA, 74 bp, Homo sapiens
ttgtggttttgaaggtgggggtcctaggagtccagaggagtgatggggtgctggaggcttcattggcagcctcc

SEQ ID NO: 73630 - DNA, 76 bp, Homo sapiens
aaggtgggggtcctaggagtccagaggagtgatggggtgctggaggcttcattggcagcctcctgccctgagtctg

SEQ ID NO: 73631 - DNA, 79 bp, Homo sapiens
taggagtccagaggagtgatggggtgctggaggcttcattggcagcctcctgccctgagtctggctggggagtcccagt

SEQ ID NO: 73632 - DNA, 76 bp, Homo sapiens
aggagtgatggggtgctggaggcttcattggcagcctcctgccctgagtctggctggggagtcccagttttcttaa

SEQ ID NO: 73633 - DNA, 76 bp, Homo sapiens
gggtgctggaggcttcattggcagcctcctgccctgagtctggctggggagtcccagttttcttaagacttgaatc

SEQ ID NO: 73634 - DNA, 77 bp, Homo sapiens
attggcagcctcctgccctgagtctggctggggagtcccagttttcttaagacttgaatcctgccagcagtggtgag

SEQ ID NO: 73635 - DNA, 75 bp, Homo sapiens
agtctggctggggagtcccagttttcttaagacttgaatcctgccagcagtggtgaggctgggagaggctcttag

SEQ ID NO: 73636 - DNA, 74 bp, Homo sapiens
agtcccagttttcttaagacttgaatcctgccagcagtggtgaggctgggagaggctcttaggagggacggtga

SEQ ID NO: 73637 - DNA, 74 bp, Homo sapiens
agttttcttaagacttgaatcctgccagcagtggtgaggctgggagaggctcttaggagggacggtgaggcagg

SEQ ID NO: 73638 - DNA, 77 bp, Homo sapiens
ttgaatcctgccagcagtggtgaggctgggagaggctcttaggagggacggtgaggcagggtggagcttggtactaa

SEQ ID NO: 73639 - DNA, 76 bp, Homo sapiens
cagcagtggtgaggctgggagaggctcttaggagggacggtgaggcagggtggagcttggtactaaggatggcgac

SEQ ID NO: 73640 - DNA, 73 bp, Homo sapiens
gaggctgggagaggctcttaggagggacggtgaggcagggtggagcttggtactaaggatggcgacctaggtc

SEQ ID NO: 73641 - DNA, 73 bp, Homo sapiens
agaggctcttaggagggacggtgaggcagggtggagcttggtactaaggatggcgacctaggtctctaactgc

SEQ ID NO: 73642 - DNA, 72 bp, Homo sapiens
tcttaggagggacggtgaggcagggtggagcttggtactaaggatggcgacctaggtctctaactgcccctc

SEQ ID NO: 73643 - DNA, 71 bp, Homo sapiens
acggtgaggcagggtggagcttggtactaaggatggcgacctaggtctctaactgcccctcccctcttctc

SEQ ID NO: 73644 - DNA, 75 bp, Homo sapiens
ggtggagcttggtactaaggatggcgacctaggtctctaactgcccctcccctcttctctctctagccattgaga

SEQ ID NO: 73645 - DNA, 74 bp, Homo sapiens
cttggtactaaggatggcgacctaggtctctaactgcccctcccctcttctctctctagccattgagacccaga

SEQ ID NO: 73646 - DNA, 80 bp, Homo sapiens
tggcgacctaggtctctaactgcccctcccctcttctctctctagccattgagacccagagcagcagttctgaagagata

SEQ ID NO: 73647 - DNA, 80 bp, Homo sapiens
ctaggtctctaactgcccctcccctcttctctctctagccattgagacccagagcagcagttctgaagagatagtgccca

SEQ ID NO: 73648 - DNA, 79 bp, Homo sapiens
taactgcccctcccctcttctctctctagccattgagacccagagcagcagttctgaagagatagtgcccagccctccc

SEQ ID NO: 73649 - DNA, 80 bp, Homo sapiens
tcttctctctctagccattgagacccagagcagcagttctgaagagatagtgcccagccctccctcgccaccccctctac

SEQ ID NO: 73650 - DNA, 78 bp, Homo sapiens
tctctctagccattgagacccagagcagcagttctgaagagatagtgcccagccctccctcgccaccccctctacccc

SEQ ID NO: 73651 - DNA, 76 bp, Homo sapiens
cagcagttctgaagagatagtgcccagccctccctcgccaccccctctaccccgcatctacaagccttgctttgtc

SEQ ID NO: 73652 - DNA, 76 bp, Homo sapiens
gttctgaagagatagtgcccagccctccctcgccaccccctctaccccgcatctacaagccttgctttgtctgtca

SEQ ID NO: 73653 - DNA, 75 bp, Homo sapiens
tccctcgccaccccctctaccccgcatctacaagccttgctttgtctgtcaggacaagtcctcaggctaccacta

SEQ ID NO: 73654 - DNA, 74 bp, Homo sapiens
cgccaccccctctaccccgcatctacaagccttgctttgtctgtcaggacaagtcctcaggctaccactatggg

SEQ ID NO: 73655 - DNA, 81 bp, Homo sapiens
cccgcatctacaagccttgctttgtctgtcaggacaagtcctcaggctaccactatggggtcagcgcctgtgagggctgca

SEQ ID NO: 73656 - DNA, 79 bp, Homo sapiens
atctacaagccttgctttgtctgtcaggacaagtcctcaggctaccactatggggtcagcgcctgtgagggctgcaagg

SEQ ID NO: 73657 - DNA, 79 bp, Homo sapiens
ttgctttgtctgtcaggacaagtcctcaggctaccactatggggtcagcgcctgtgagggctgcaaggtgagttgaagg

SEQ ID NO: 73658 - DNA, 76 bp, Homo sapiens
aggacaagtcctcaggctaccactatggggtcagcgcctgtgagggctgcaaggtgagttgaaggggtcattggga

SEQ ID NO: 73659 - DNA, 75 bp, Homo sapiens
aagtcctcaggctaccactatggggtcagcgcctgtgagggctgcaaggtgagttgaaggggtcattgggaagga

SEQ ID NO: 73660 - DNA, 75 bp, Homo sapiens
tcccactgtgggtgtggacaacctgactccctcccctccatacccagggcttcttccgccgcagcatccagaaga

SEQ ID NO: 73661 - DNA, 76 bp, Homo sapiens
gtgtggacaacctgactccctcccctccatacccagggcttcttccgccgcagcatccagaagaacatggtgtaca

SEQ ID NO: 73662 - DNA, 75 bp, Homo sapiens
aacctgactccctcccctccatacccagggcttcttccgccgcagcatccagaagaacatggtgtacacgtgtca

SEQ ID NO: 73663 - DNA, 75 bp, Homo sapiens
tcccctccatacccagggcttcttccgccgcagcatccagaagaacatggtgtacacgtgtcaccgggacaagaa

SEQ ID NO: 73664 - DNA, 79 bp, Homo sapiens
atacccagggcttcttccgccgcagcatccagaagaacatggtgtacacgtgtcaccgggacaagaactgcatcatcaa

SEQ ID NO: 73665 - DNA, 79 bp, Homo sapiens
cttcttccgccgcagcatccagaagaacatggtgtacacgtgtcaccgggacaagaactgcatcatcaacaaggtgacc

SEQ ID NO: 73666 - DNA, 79 bp, Homo sapiens
cagcatccagaagaacatggtgtacacgtgtcaccgggacaagaactgcatcatcaacaaggtgacccggaaccgctgc

SEQ ID NO: 73667 - DNA, 75 bp, Homo sapiens
aagaacatggtgtacacgtgtcaccgggacaagaactgcatcatcaacaaggtgacccggaaccgctgccagtac

SEQ ID NO: 73668 - DNA, 79 bp, Homo sapiens
tgtacacgtgtcaccgggacaagaactgcatcatcaacaaggtgacccggaaccgctgccagtactgccgactgcagaa

SEQ ID NO: 73669 - DNA, 78 bp, Homo sapiens
gtgtcaccgggacaagaactgcatcatcaacaaggtgacccggaaccgctgccagtactgccgactgcagaagtgctt

SEQ ID NO: 73670 - DNA, 80 bp, Homo sapiens
aagaactgcatcatcaacaaggtgacccggaaccgctgccagtactgccgactgcagaagtgctttgaagtgggcatgtc

SEQ ID NO: 73671 - DNA, 78 bp, Homo sapiens
atcatcaacaaggtgacccggaaccgctgccagtactgccgactgcagaagtgctttgaagtgggcatgtccaaggag

SEQ ID NO: 73672 - DNA, 77 bp, Homo sapiens
aacaaggtgacccggaaccgctgccagtactgccgactgcagaagtgctttgaagtgggcatgtccaaggagtgtga

SEQ ID NO: 73673 - DNA, 80 bp, Homo sapiens
cccggaaccgctgccagtactgccgactgcagaagtgctttgaagtgggcatgtccaaggagtgtgagtgccatagggca

SEQ ID NO: 73674 - DNA, 78 bp, Homo sapiens
agtactgccgactgcagaagtgctttgaagtgggcatgtccaaggagtgtgagtgccatagggcaggggccgagtccc

SEQ ID NO: 73675 - DNA, 77 bp, Homo sapiens
ctgagcagcctgcagctgccctcttaaccccctctgccctccacagctgtgagaaacgaccgaaacaagaagaagaa

SEQ ID NO: 73676 - DNA, 74 bp, Homo sapiens
agcctgcagctgccctcttaaccccctctgccctccacagctgtgagaaacgaccgaaacaagaagaagaagga

SEQ ID NO: 73677 - DNA, 70 bp, Homo sapiens
cctcttaaccccctctgccctccacagctgtgagaaacgaccgaaacaagaagaagaaggaggtgcccaa

SEQ ID NO: 73678 - DNA, 76 bp, Homo sapiens
cctctgccctccacagctgtgagaaacgaccgaaacaagaagaagaaggaggtgcccaagcccgagtgctctgaga

SEQ ID NO: 73679 - DNA, 79 bp, Homo sapiens
tccacagctgtgagaaacgaccgaaacaagaagaagaaggaggtgcccaagcccgagtgctctgagagctacacgctga

SEQ ID NO: 73680 - DNA, 76 bp, Homo sapiens
tgtgagaaacgaccgaaacaagaagaagaaggaggtgcccaagcccgagtgctctgagagctacacgctgacgccg

SEQ ID NO: 73681 - DNA, 74 bp, Homo sapiens
acgaccgaaacaagaagaagaaggaggtgcccaagcccgagtgctctgagagctacacgctgacgccggaggtg

SEQ ID NO: 73682 - DNA, 77 bp, Homo sapiens
aagaagaaggaggtgcccaagcccgagtgctctgagagctacacgctgacgccggaggtgggggagctcattgagaa

SEQ ID NO: 73683 - DNA, 79 bp, Homo sapiens
aggtgcccaagcccgagtgctctgagagctacacgctgacgccggaggtgggggagctcattgagaaggtgcgcaaagc

SEQ ID NO: 73684 - DNA, 79 bp, Homo sapiens
cccgagtgctctgagagctacacgctgacgccggaggtgggggagctcattgagaaggtgcgcaaagcgcaccaggaaa

SEQ ID NO: 73685 - DNA, 77 bp, Homo sapiens
ctctgagagctacacgctgacgccggaggtgggggagctcattgagaaggtgcgcaaagcgcaccaggaaaccttcc

SEQ ID NO: 73686 - DNA, 75 bp, Homo sapiens
agctacacgctgacgccggaggtgggggagctcattgagaaggtgcgcaaagcgcaccaggaaaccttccctgcc

SEQ ID NO: 73687 - DNA, 77 bp, Homo sapiens
tgacgccggaggtgggggagctcattgagaaggtgcgcaaagcgcaccaggaaaccttccctgccctctgccagctg

SEQ ID NO: 73688 - DNA, 77 bp, Homo sapiens
gggagctcattgagaaggtgcgcaaagcgcaccaggaaaccttccctgccctctgccagctgggcaaatacactacg

SEQ ID NO: 73689 - DNA, 76 bp, Homo sapiens
tgagaaggtgcgcaaagcgcaccaggaaaccttccctgccctctgccagctgggcaaatacactacggtatggctt

SEQ ID NO: 73690 - DNA, 74 bp, Homo sapiens
aggtgcgcaaagcgcaccaggaaaccttccctgccctctgccagctgggcaaatacactacggtatggctttcc

SEQ ID NO: 73691 - DNA, 71 bp, Homo sapiens
accaggaaaccttccctgccctctgccagctgggcaaatacactacggtatggctttcccccggcctgcag

SEQ ID NO: 73692 - DNA, 70 bp, Homo sapiens
aaaccttccctgccctctgccagctgggcaaatacactacggtatggctttcccccggcctgcagggtgg

SEQ ID NO: 73693 - DNA, 73 bp, Homo sapiens
aaggggtgccatggagaagaaggccctcactctccctcctcccccagaacaacagctcagaacaacgtgtctc

SEQ ID NO: 73694 - DNA, 76 bp, Homo sapiens
atggagaagaaggccctcactctccctcctcccccagaacaacagctcagaacaacgtgtctctctggacattgac

SEQ ID NO: 73695 - DNA, 75 bp, Homo sapiens
aagaaggccctcactctccctcctcccccagaacaacagctcagaacaacgtgtctctctggacattgacctctg

SEQ ID NO: 73696 - DNA, 76 bp, Homo sapiens
ctccctcctcccccagaacaacagctcagaacaacgtgtctctctggacattgacctctgggacaagttcagtgaa

SEQ ID NO: 73697 - DNA, 77 bp, Homo sapiens
ccccagaacaacagctcagaacaacgtgtctctctggacattgacctctgggacaagttcagtgaactctccaccaa

SEQ ID NO: 73698 - DNA, 80 bp, Homo sapiens
aacagctcagaacaacgtgtctctctggacattgacctctgggacaagttcagtgaactctccaccaagtgcatcattaa

SEQ ID NO: 73699 - DNA, 79 bp, Homo sapiens
agaacaacgtgtctctctggacattgacctctgggacaagttcagtgaactctccaccaagtgcatcattaagactgtg

SEQ ID NO: 73700 - DNA, 81 bp, Homo sapiens
tgtctctctggacattgacctctgggacaagttcagtgaactctccaccaagtgcatcattaagactgtggagttcgccaa

SEQ ID NO: 73701 - DNA, 80 bp, Homo sapiens
acattgacctctgggacaagttcagtgaactctccaccaagtgcatcattaagactgtggagttcgccaagcagctgccc

SEQ ID NO: 73702 - DNA, 81 bp, Homo sapiens
tctgggacaagttcagtgaactctccaccaagtgcatcattaagactgtggagttcgccaagcagctgcccggcttcacca

SEQ ID NO: 73703 - DNA, 79 bp, Homo sapiens
agttcagtgaactctccaccaagtgcatcattaagactgtggagttcgccaagcagctgcccggcttcaccaccctcac

SEQ ID NO: 73704 - DNA, 82 bp, Homo sapiens
tccaccaagtgcatcattaagactgtggagttcgccaagcagctgcccggcttcaccaccctcaccatcgccgaccagatca

SEQ ID NO: 73705 - DNA, 80 bp, Homo sapiens
agtgcatcattaagactgtggagttcgccaagcagctgcccggcttcaccaccctcaccatcgccgaccagatcaccctc

SEQ ID NO: 73706 - DNA, 77 bp, Homo sapiens
ttaagactgtggagttcgccaagcagctgcccggcttcaccaccctcaccatcgccgaccagatcaccctcctcaag

SEQ ID NO: 73707 - DNA, 79 bp, Homo sapiens
agttcgccaagcagctgcccggcttcaccaccctcaccatcgccgaccagatcaccctcctcaaggctgcctgcctgga

SEQ ID NO: 73708 - DNA, 79 bp, Homo sapiens
aagcagctgcccggcttcaccaccctcaccatcgccgaccagatcaccctcctcaaggctgcctgcctggacatcctgg

SEQ ID NO: 73709 - DNA, 79 bp, Homo sapiens
cttcaccaccctcaccatcgccgaccagatcaccctcctcaaggctgcctgcctggacatcctggtgagggtctgcacc

SEQ ID NO: 73710 - DNA, 78 bp, Homo sapiens
accctcaccatcgccgaccagatcaccctcctcaaggctgcctgcctggacatcctggtgagggtctgcaccctggcc

SEQ ID NO: 73711 - DNA, 78 bp, Homo sapiens
atcgccgaccagatcaccctcctcaaggctgcctgcctggacatcctggtgagggtctgcaccctggcccccaggcac

SEQ ID NO: 73712 - DNA, 77 bp, Homo sapiens
agagtgggttcgggttcagtccctgaacccaagcatcctctgcacccagatcctgcggatctgcacgcggtacacgc

SEQ ID NO: 73713 - DNA, 82 bp, Homo sapiens
gttcagtccctgaacccaagcatcctctgcacccagatcctgcggatctgcacgcggtacacgcccgagcaggacaccatga

SEQ ID NO: 73714 - DNA, 82 bp, Homo sapiens
tgaacccaagcatcctctgcacccagatcctgcggatctgcacgcggtacacgcccgagcaggacaccatgaccttctcgga

SEQ ID NO: 73715 - DNA, 82 bp, Homo sapiens
agcatcctctgcacccagatcctgcggatctgcacgcggtacacgcccgagcaggacaccatgaccttctcggacgggctga

SEQ ID NO: 73716 - DNA, 77 bp, Homo sapiens
acccagatcctgcggatctgcacgcggtacacgcccgagcaggacaccatgaccttctcggacgggctgaccctgaa

SEQ ID NO: 73717 - DNA, 76 bp, Homo sapiens
atcctgcggatctgcacgcggtacacgcccgagcaggacaccatgaccttctcggacgggctgaccctgaaccgga

SEQ ID NO: 73718 - DNA, 77 bp, Homo sapiens
atctgcacgcggtacacgcccgagcaggacaccatgaccttctcggacgggctgaccctgaaccggacccagatgca

SEQ ID NO: 73719 - DNA, 76 bp, Homo sapiens
tacacgcccgagcaggacaccatgaccttctcggacgggctgaccctgaaccggacccagatgcacaacgctggct

SEQ ID NO: 73720 - DNA, 75 bp, Homo sapiens
cgagcaggacaccatgaccttctcggacgggctgaccctgaaccggacccagatgcacaacgctggcttcggccc

SEQ ID NO: 73721 - DNA, 72 bp, Homo sapiens
atgaccttctcggacgggctgaccctgaaccggacccagatgcacaacgctggcttcggccccctcaccgac

SEQ ID NO: 73722 - DNA, 71 bp, Homo sapiens
tcggacgggctgaccctgaaccggacccagatgcacaacgctggcttcggccccctcaccgacctggtctt

SEQ ID NO: 73723 - DNA, 71 bp, Homo sapiens
accctgaaccggacccagatgcacaacgctggcttcggccccctcaccgacctggtctttgccttcgccaa

SEQ ID NO: 73724 - DNA, 73 bp, Homo sapiens
aaccggacccagatgcacaacgctggcttcggccccctcaccgacctggtctttgccttcgccaaccagctgc

SEQ ID NO: 73725 - DNA, 77 bp, Homo sapiens
agatgcacaacgctggcttcggccccctcaccgacctggtctttgccttcgccaaccagctgctgcccctggagatg

SEQ ID NO: 73726 - DNA, 78 bp, Homo sapiens
tggcttcggccccctcaccgacctggtctttgccttcgccaaccagctgctgcccctggagatggatgatgcggagac

SEQ ID NO: 73727 - DNA, 80 bp, Homo sapiens
ccctcaccgacctggtctttgccttcgccaaccagctgctgcccctggagatggatgatgcggagacggggctgctcagc

SEQ ID NO: 73728 - DNA, 84 bp, Homo sapiens
acctggtctttgccttcgccaaccagctgctgcccctggagatggatgatgcggagacggggctgctcagcgccatctgcctca

SEQ ID NO: 73729 - DNA, 86 bp, Homo sapiens
ctttgccttcgccaaccagctgctgcccctggagatggatgatgcggagacggggctgctcagcgccatctgcctcatctgcggag

SEQ ID NO: 73730 - DNA, 85 bp, Homo sapiens
ccaaccagctgctgcccctggagatggatgatgcggagacggggctgctcagcgccatctgcctcatctgcggaggtgggcaggg

SEQ ID NO: 73731 - DNA, 81 bp, Homo sapiens
cccctggagatggatgatgcggagacggggctgctcagcgccatctgcctcatctgcggaggtgggcagggggcctgggtc

SEQ ID NO: 73732 - DNA, 81 bp, Homo sapiens
ggagatggatgatgcggagacggggctgctcagcgccatctgcctcatctgcggaggtgggcagggggcctgggtctgggg

SEQ ID NO: 73733 - DNA, 79 bp, Homo sapiens
atgcggagacggggctgctcagcgccatctgcctcatctgcggaggtgggcagggggcctgggtctgggggctgggctg

SEQ ID NO: 73734 - DNA, 78 bp, Homo sapiens
tgcagctgtgttcccagctgctcagggggtggttctgcttcctcagaccgccaggacctggagcagccggaccgggtg

SEQ ID NO: 73735 - DNA, 76 bp, Homo sapiens
tgtgttcccagctgctcagggggtggttctgcttcctcagaccgccaggacctggagcagccggaccgggtggaca

SEQ ID NO: 73736 - DNA, 79 bp, Homo sapiens
agctgctcagggggtggttctgcttcctcagaccgccaggacctggagcagccggaccgggtggacatgctgcaggagc

SEQ ID NO: 73737 - DNA, 82 bp, Homo sapiens
tggttctgcttcctcagaccgccaggacctggagcagccggaccgggtggacatgctgcaggagccgctgctggaggcgcta

SEQ ID NO: 73738 - DNA, 80 bp, Homo sapiens
tcctcagaccgccaggacctggagcagccggaccgggtggacatgctgcaggagccgctgctggaggcgctaaaggtcta

SEQ ID NO: 73739 - DNA, 78 bp, Homo sapiens
ccaggacctggagcagccggaccgggtggacatgctgcaggagccgctgctggaggcgctaaaggtctacgtgcggaa

SEQ ID NO: 73740 - DNA, 78 bp, Homo sapiens
acctggagcagccggaccgggtggacatgctgcaggagccgctgctggaggcgctaaaggtctacgtgcggaagcgga

SEQ ID NO: 73741 - DNA, 76 bp, Homo sapiens
ccggaccgggtggacatgctgcaggagccgctgctggaggcgctaaaggtctacgtgcggaagcggaggcccagcc

SEQ ID NO: 73742 - DNA, 78 bp, Homo sapiens
acatgctgcaggagccgctgctggaggcgctaaaggtctacgtgcggaagcggaggcccagccgcccccacatgttcc

SEQ ID NO: 73743 - DNA, 73 bp, Homo sapiens
aggagccgctgctggaggcgctaaaggtctacgtgcggaagcggaggcccagccgcccccacatgttccccaa

SEQ ID NO: 73744 - DNA, 75 bp, Homo sapiens
tggaggcgctaaaggtctacgtgcggaagcggaggcccagccgcccccacatgttccccaagatgctaatgaaga

SEQ ID NO: 73745 - DNA, 74 bp, Homo sapiens
ctaaaggtctacgtgcggaagcggaggcccagccgcccccacatgttccccaagatgctaatgaagattactga

SEQ ID NO: 73746 - DNA, 79 bp, Homo sapiens
tacgtgcggaagcggaggcccagccgcccccacatgttccccaagatgctaatgaagattactgacctgcgaagcatca

SEQ ID NO: 73747 - DNA, 78 bp, Homo sapiens
aagcggaggcccagccgcccccacatgttccccaagatgctaatgaagattactgacctgcgaagcatcagcgccaag

SEQ ID NO: 73748 - DNA, 81 bp, Homo sapiens
agccgcccccacatgttccccaagatgctaatgaagattactgacctgcgaagcatcagcgccaagggtgaggctcacaga

SEQ ID NO: 73749 - DNA, 81 bp, Homo sapiens
cccacatgttccccaagatgctaatgaagattactgacctgcgaagcatcagcgccaagggtgaggctcacagacctggag

SEQ ID NO: 73750 - DNA, 78 bp, Homo sapiens
aagatgctaatgaagattactgacctgcgaagcatcagcgccaagggtgaggctcacagacctggaggggtaccggcc

SEQ ID NO: 73751 - DNA, 76 bp, Homo sapiens
taatgaagattactgacctgcgaagcatcagcgccaagggtgaggctcacagacctggaggggtaccggcccccga

SEQ ID NO: 73752 - DNA, 81 bp, Homo sapiens
gagggctggcccagcgtgctgacctctgccccctcctttcctgcaggggctgagcgggtgatcacgctgaagatggagatc

SEQ ID NO: 73753 - DNA, 79 bp, Homo sapiens
ccagcgtgctgacctctgccccctcctttcctgcaggggctgagcgggtgatcacgctgaagatggagatcccgggctc

SEQ ID NO: 73754 - DNA, 80 bp, Homo sapiens
gtgctgacctctgccccctcctttcctgcaggggctgagcgggtgatcacgctgaagatggagatcccgggctccatgcc

SEQ ID NO: 73755 - DNA, 80 bp, Homo sapiens
ccctcctttcctgcaggggctgagcgggtgatcacgctgaagatggagatcccgggctccatgccgcctctcatccagga

SEQ ID NO: 73756 - DNA, 81 bp, Homo sapiens
tttcctgcaggggctgagcgggtgatcacgctgaagatggagatcccgggctccatgccgcctctcatccaggaaatgttg

SEQ ID NO: 73757 - DNA, 81 bp, Homo sapiens
ctgagcgggtgatcacgctgaagatggagatcccgggctccatgccgcctctcatccaggaaatgttggagaactcagagg

SEQ ID NO: 73758 - DNA, 82 bp, Homo sapiens
gtgatcacgctgaagatggagatcccgggctccatgccgcctctcatccaggaaatgttggagaactcagagggcctggaca

SEQ ID NO: 73759 - DNA, 79 bp, Homo sapiens
aagatggagatcccgggctccatgccgcctctcatccaggaaatgttggagaactcagagggcctggacactctgagcg

SEQ ID NO: 73760 - DNA, 79 bp, Homo sapiens
agatcccgggctccatgccgcctctcatccaggaaatgttggagaactcagagggcctggacactctgagcggacagcc

SEQ ID NO: 73761 - DNA, 77 bp, Homo sapiens
tccatgccgcctctcatccaggaaatgttggagaactcagagggcctggacactctgagcggacagccggggggtgg

SEQ ID NO: 73762 - DNA, 73 bp, Homo sapiens
cctctcatccaggaaatgttggagaactcagagggcctggacactctgagcggacagccggggggtggggggc

SEQ ID NO: 73763 - DNA, 69 bp, Homo sapiens
aggaaatgttggagaactcagagggcctggacactctgagcggacagccggggggtggggggcgggacg

SEQ ID NO: 73764 - DNA, 68 bp, Homo sapiens
agaactcagagggcctggacactctgagcggacagccggggggtggggggcgggacgggggtggcctg

SEQ ID NO: 73765 - DNA, 66 bp, Homo sapiens
agagggcctggacactctgagcggacagccggggggtggggggcgggacgggggtggcctggcccc

SEQ ID NO: 73766 - DNA, 68 bp, Homo sapiens
tctgagcggacagccggggggtggggggcgggacgggggtggcctggcccccccgccaggcagctgta

SEQ ID NO: 73767 - DNA, 65 bp, Homo sapiens
cggacagccggggggtggggggcgggacgggggtggcctggcccccccgccaggcagctgtagcc

SEQ ID NO: 73768 - DNA, 68 bp, Homo sapiens
gggtggggggcgggacgggggtggcctggcccccccgccaggcagctgtagccccagcctcagcccca

SEQ ID NO: 73769 - DNA, 73 bp, Homo sapiens
cgggacgggggtggcctggcccccccgccaggcagctgtagccccagcctcagccccagctccaacagaagca

SEQ ID NO: 73770 - DNA, 76 bp, Homo sapiens
tggcctggcccccccgccaggcagctgtagccccagcctcagccccagctccaacagaagcagcccggccacccac

SEQ ID NO: 73771 - DNA, 74 bp, Homo sapiens
ggcccccccgccaggcagctgtagccccagcctcagccccagctccaacagaagcagcccggccacccactccc

SEQ ID NO: 73772 - DNA, 75 bp, Homo sapiens
aggcagctgtagccccagcctcagccccagctccaacagaagcagcccggccacccactccccgtgaccgcccac

SEQ ID NO: 73773 - DNA, 75 bp, Homo sapiens
agccccagctccaacagaagcagcccggccacccactccccgtgaccgcccacgccacatggacacagccctcgc

SEQ ID NO: 73774 - DNA, 74 bp, Homo sapiens
agctccaacagaagcagcccggccacccactccccgtgaccgcccacgccacatggacacagccctcgccctcc

SEQ ID NO: 73775 - DNA, 69 bp, Homo sapiens
agcccggccacccactccccgtgaccgcccacgccacatggacacagccctcgccctccgccccggctt

SEQ ID NO: 73776 - DNA, 70 bp, Homo sapiens
acccactccccgtgaccgcccacgccacatggacacagccctcgccctccgccccggcttttctctgcct

SEQ ID NO: 73777 - DNA, 73 bp, Homo sapiens
gtgaccgcccacgccacatggacacagccctcgccctccgccccggcttttctctgcctttctaccgaccatg

SEQ ID NO: 73778 - DNA, 72 bp, Homo sapiens
cccacgccacatggacacagccctcgccctccgccccggcttttctctgcctttctaccgaccatgtgaccc

SEQ ID NO: 73779 - DNA, 73 bp, Homo sapiens
acatggacacagccctcgccctccgccccggcttttctctgcctttctaccgaccatgtgaccccgcaccagc

SEQ ID NO: 73780 - DNA, 71 bp, Homo sapiens
tccgccccggcttttctctgcctttctaccgaccatgtgaccccgcaccagccctgcccccacctgccctc

SEQ ID NO: 73781 - DNA, 71 bp, Homo sapiens
ttttctctgcctttctaccgaccatgtgaccccgcaccagccctgcccccacctgccctcccgggcagtac

SEQ ID NO: 73782 - DNA, 69 bp, Homo sapiens
tttctaccgaccatgtgaccccgcaccagccctgcccccacctgccctcccgggcagtactggggacct

SEQ ID NO: 73783 - DNA, 68 bp, Homo sapiens
accatgtgaccccgcaccagccctgcccccacctgccctcccgggcagtactggggaccttccctggg

SEQ ID NO: 73784 - DNA, 65 bp, Homo sapiens
cccgcaccagccctgcccccacctgccctcccgggcagtactggggaccttccctgggggacggg

SEQ ID NO: 73785 - DNA, 64 bp, Homo sapiens
cctgcccccacctgccctcccgggcagtactggggaccttccctgggggacggggagggaggag

SEQ ID NO: 73786 - DNA, 68 bp, Homo sapiens
tgccctcccgggcagtactggggaccttccctgggggacggggagggaggaggcagcgactccttgga

SEQ ID NO: 73787 - DNA, 68 bp, Homo sapiens
tcccgggcagtactggggaccttccctgggggacggggagggaggaggcagcgactccttggacagag

SEQ ID NO: 73788 - DNA, 69 bp, Homo sapiens
gggaccttccctgggggacggggagggaggaggcagcgactccttggacagaggcctgggccctcagtg

SEQ ID NO: 73789 - DNA, 73 bp, Homo sapiens
ttccctgggggacggggagggaggaggcagcgactccttggacagaggcctgggccctcagtggactgcctgc

SEQ ID NO: 73790 - DNA, 78 bp, Homo sapiens
gggagggaggaggcagcgactccttggacagaggcctgggccctcagtggactgcctgctcccacagcctgggctgac

SEQ ID NO: 73791 - DNA, 80 bp, Homo sapiens
aggcagcgactccttggacagaggcctgggccctcagtggactgcctgctcccacagcctgggctgacgtcagaggccga

SEQ ID NO: 73792 - DNA, 79 bp, Homo sapiens
tccttggacagaggcctgggccctcagtggactgcctgctcccacagcctgggctgacgtcagaggccgaggccaggaa

SEQ ID NO: 73793 - DNA, 80 bp, Homo sapiens
acagaggcctgggccctcagtggactgcctgctcccacagcctgggctgacgtcagaggccgaggccaggaactgagtga

SEQ ID NO: 73794 - DNA, 78 bp, Homo sapiens
ccctcagtggactgcctgctcccacagcctgggctgacgtcagaggccgaggccaggaactgagtgaggcccctggtc

SEQ ID NO: 73795 - DNA, 76 bp, Homo sapiens
tcccacagcctgggctgacgtcagaggccgaggccaggaactgagtgaggcccctggtcctgggtctcaggatggg

SEQ ID NO: 73796 - DNA, 73 bp, Homo sapiens
tcagaggccgaggccaggaactgagtgaggcccctggtcctgggtctcaggatgggtcctgggggcctcgtgt

SEQ ID NO: 73797 - DNA, 72 bp, Homo sapiens
aactgagtgaggcccctggtcctgggtctcaggatgggtcctgggggcctcgtgttcatcaagacacccctc

SEQ ID NO: 73798 - DNA, 75 bp, Homo sapiens
ccctggtcctgggtctcaggatgggtcctgggggcctcgtgttcatcaagacacccctctgcccagctcaccaca

SEQ ID NO: 73799 - DNA, 79 bp, Homo sapiens
ctgggtctcaggatgggtcctgggggcctcgtgttcatcaagacacccctctgcccagctcaccacatcttcatcacca

SEQ ID NO: 73800 - DNA, 78 bp, Homo sapiens
atgggtcctgggggcctcgtgttcatcaagacacccctctgcccagctcaccacatcttcatcaccagcaaacgccag

SEQ ID NO: 73801 - DNA, 79 bp, Homo sapiens
ggggcctcgtgttcatcaagacacccctctgcccagctcaccacatcttcatcaccagcaaacgccaggacttggctcc

SEQ ID NO: 73802 - DNA, 82 bp, Homo sapiens
tgttcatcaagacacccctctgcccagctcaccacatcttcatcaccagcaaacgccaggacttggctcccccatcctcaga

SEQ ID NO: 73803 - DNA, 82 bp, Homo sapiens
tgcccagctcaccacatcttcatcaccagcaaacgccaggacttggctcccccatcctcagaactcacaagccattgctccc

SEQ ID NO: 73804 - DNA, 79 bp, Homo sapiens
accacatcttcatcaccagcaaacgccaggacttggctcccccatcctcagaactcacaagccattgctccccagctgg

SEQ ID NO: 73805 - DNA, 77 bp, Homo sapiens
atcaccagcaaacgccaggacttggctcccccatcctcagaactcacaagccattgctccccagctggggaacctca

SEQ ID NO: 73806 - DNA, 73 bp, Homo sapiens
aaacgccaggacttggctcccccatcctcagaactcacaagccattgctccccagctggggaacctcaacctc

SEQ ID NO: 73807 - DNA, 71 bp, Homo sapiens
aggacttggctcccccatcctcagaactcacaagccattgctccccagctggggaacctcaacctcccccc

SEQ ID NO: 73808 - DNA, 74 bp, Homo sapiens
ccatcctcagaactcacaagccattgctccccagctggggaacctcaacctcccccctgcctcggttggtgaca

SEQ ID NO: 73809 - DNA, 71 bp, Homo sapiens
agaactcacaagccattgctccccagctggggaacctcaacctcccccctgcctcggttggtgacagaggg

SEQ ID NO: 73810 - DNA, 69 bp, Homo sapiens
acaagccattgctccccagctggggaacctcaacctcccccctgcctcggttggtgacagagggggtgg

SEQ ID NO: 73811 - DNA, 66 bp, Homo sapiens
ccagctggggaacctcaacctcccccctgcctcggttggtgacagagggggtgggacaggggcggg

SEQ ID NO: 73812 - DNA, 65 bp, Homo sapiens
ctcccccctgcctcggttggtgacagagggggtgggacaggggcggggggttccccctgtacata

SEQ ID NO: 73813 - DNA, 67 bp, Homo sapiens
ctcggttggtgacagagggggtgggacaggggcggggggttccccctgtacataccctgccatacca

SEQ ID NO: 73814 - DNA, 66 bp, Homo sapiens
ttggtgacagagggggtgggacaggggcggggggttccccctgtacataccctgccataccaaccc

SEQ ID NO: 73815 - DNA, 66 bp, Homo sapiens
gtgggacaggggcggggggttccccctgtacataccctgccataccaaccccaggtattaattctc

SEQ ID NO: 73816 - DNA, 66 bp, Homo sapiens
ggcggggggttccccctgtacataccctgccataccaaccccaggtattaattctcgctggttttg

SEQ ID NO: 73817 - DNA, 70 bp, Homo sapiens
gttttgatttttttaataagaattttcattttaagcacatttatactgaaggaatttgtgctgtgtattg

SEQ ID NO: 73818 - DNA, 70 bp, Homo sapiens
tttgatttttttaataagaattttcattttaagcacatttatactgaaggaatttgtgctgtgtattggg

SEQ ID NO: 73819 - DNA, 72 bp, Homo sapiens
ttttaataagaattttcattttaagcacatttatactgaaggaatttgtgctgtgtattggggggagctgga

SEQ ID NO: 73820 - DNA, 74 bp, Homo sapiens
ttaataagaattttcattttaagcacatttatactgaaggaatttgtgctgtgtattggggggagctggatcca

SEQ ID NO: 73821 - DNA, 75 bp, Homo sapiens
aattttcattttaagcacatttatactgaaggaatttgtgctgtgtattggggggagctggatccagagctggag

SEQ ID NO: 73822 - DNA, 75 bp, Homo sapiens
ttaagcacatttatactgaaggaatttgtgctgtgtattggggggagctggatccagagctggagggggtgggtc

SEQ ID NO: 73823 - DNA, 72 bp, Homo sapiens
acatttatactgaaggaatttgtgctgtgtattggggggagctggatccagagctggagggggtgggtccgg

SEQ ID NO: 73824 - DNA, 72 bp, Homo sapiens
ttatactgaaggaatttgtgctgtgtattggggggagctggatccagagctggagggggtgggtccggggga

SEQ ID NO: 73825 - DNA, 69 bp, Homo sapiens
aaggaatttgtgctgtgtattggggggagctggatccagagctggagggggtgggtccgggggagggag

SEQ ID NO: 73826 - DNA, 71 bp, Homo sapiens
aatttgtgctgtgtattggggggagctggatccagagctggagggggtgggtccgggggagggagtggctc

SEQ ID NO: 73827 - DNA, 68 bp, Homo sapiens
agctggatccagagctggagggggtgggtccgggggagggagtggctcggaaggggcccccactctcc

SEQ ID NO: 73828 - DNA, 66 bp, Homo sapiens
ggggtgggtccgggggagggagtggctcggaaggggcccccactctcctttcatgtccctgtgccc

SEQ ID NO: 73829 - DNA, 68 bp, Homo sapiens
tccgggggagggagtggctcggaaggggcccccactctcctttcatgtccctgtgccccccagttctc

SEQ ID NO: 73830 - DNA, 69 bp, Homo sapiens
agtggctcggaaggggcccccactctcctttcatgtccctgtgccccccagttctcctcctcagccttt

SEQ ID NO: 73831 - DNA, 69 bp, Homo sapiens
aaggggcccccactctcctttcatgtccctgtgccccccagttctcctcctcagccttttcctcctcag

SEQ ID NO: 73832 - DNA, 71 bp, Homo sapiens
cactctcctttcatgtccctgtgccccccagttctcctcctcagccttttcctcctcagttttctctttaa

SEQ ID NO: 73833 - DNA, 71 bp, Homo sapiens
tttcatgtccctgtgccccccagttctcctcctcagccttttcctcctcagttttctctttaaaactgtga

SEQ ID NO: 73834 - DNA, 69 bp, Homo sapiens
tgtgccccccagttctcctcctcagccttttcctcctcagttttctctttaaaactgtgaagtactaac

SEQ ID NO: 73835 - DNA, 66 bp, Homo sapiens
cttttcctcctcagttttctctttaaaactgtgaagtactaactttccaaggcctgccttcccctc

SEQ ID NO: 73836 - DNA, 67 bp, Homo sapiens
ttttctctttaaaactgtgaagtactaactttccaaggcctgccttcccctccctcccactggagaa

SEQ ID NO: 73837 - DNA, 68 bp, Homo sapiens
ctttaaaactgtgaagtactaactttccaaggcctgccttcccctccctcccactggagaagccgcca

SEQ ID NO: 73838 - DNA, 67 bp, Homo sapiens
aagtactaactttccaaggcctgccttcccctccctcccactggagaagccgccagcccctttctcc

SEQ ID NO: 73839 - DNA, 70 bp, Homo sapiens
aactttccaaggcctgccttcccctccctcccactggagaagccgccagcccctttctccctctgcctga

SEQ ID NO: 73840 - DNA, 72 bp, Homo sapiens
tgccttcccctccctcccactggagaagccgccagcccctttctccctctgcctgaccactgggtgtggacg

SEQ ID NO: 73841 - DNA, 71 bp, Homo sapiens
cctccctcccactggagaagccgccagcccctttctccctctgcctgaccactgggtgtggacggtgtggg

SEQ ID NO: 73842 - DNA, 73 bp, Homo sapiens
actggagaagccgccagcccctttctccctctgcctgaccactgggtgtggacggtgtggggcagccctgaaa

SEQ ID NO: 73843 - DNA, 75 bp, Homo sapiens
ttctccctctgcctgaccactgggtgtggacggtgtggggcagccctgaaaggacaggctcctggccttggcact

SEQ ID NO: 73844 - DNA, 78 bp, Homo sapiens
tgcctgaccactgggtgtggacggtgtggggcagccctgaaaggacaggctcctggccttggcacttgcctgcaccca

SEQ ID NO: 73845 - DNA, 80 bp, Homo sapiens
tggacggtgtggggcagccctgaaaggacaggctcctggccttggcacttgcctgcacccaccatgaggcatggagcagg

SEQ ID NO: 73846 - DNA, 80 bp, Homo sapiens
tgaaaggacaggctcctggccttggcacttgcctgcacccaccatgaggcatggagcagggcagagcaagggccccggga

SEQ ID NO: 73847 - DNA, 78 bp, Homo sapiens
ctggccttggcacttgcctgcacccaccatgaggcatggagcagggcagagcaagggccccgggacagagttttccca

SEQ ID NO: 73848 - DNA, 78 bp, Homo sapiens
ttggcacttgcctgcacccaccatgaggcatggagcagggcagagcaagggccccgggacagagttttcccagacctg

SEQ ID NO: 73849 - DNA, 77 bp, Homo sapiens
cacccaccatgaggcatggagcagggcagagcaagggccccgggacagagttttcccagacctggctcctcggcaga

SEQ ID NO: 73850 - DNA, 78 bp, Homo sapiens
accatgaggcatggagcagggcagagcaagggccccgggacagagttttcccagacctggctcctcggcagagctgcc

SEQ ID NO: 73851 - DNA, 74 bp, Homo sapiens
agcagggcagagcaagggccccgggacagagttttcccagacctggctcctcggcagagctgcctcccgtcagg

SEQ ID NO: 73852 - DNA, 74 bp, Homo sapiens
agcaagggccccgggacagagttttcccagacctggctcctcggcagagctgcctcccgtcagggcccacatca

SEQ ID NO: 73853 - DNA, 75 bp, Homo sapiens
cccgggacagagttttcccagacctggctcctcggcagagctgcctcccgtcagggcccacatcatctaggctcc

SEQ ID NO: 73854 - DNA, 75 bp, Homo sapiens
agagttttcccagacctggctcctcggcagagctgcctcccgtcagggcccacatcatctaggctccccagcccc

SEQ ID NO: 73855 - DNA, 77 bp, Homo sapiens
ctcctcggcagagctgcctcccgtcagggcccacatcatctaggctccccagcccccactgtgaaggggctggccag

SEQ ID NO: 73856 - DNA, 74 bp, Homo sapiens
agctgcctcccgtcagggcccacatcatctaggctccccagcccccactgtgaaggggctggccaggggcccga

SEQ ID NO: 73857 - DNA, 73 bp, Homo sapiens
ccgtcagggcccacatcatctaggctccccagcccccactgtgaaggggctggccaggggcccgagctgcccc

SEQ ID NO: 73858 - DNA, 71 bp, Homo sapiens
ccacatcatctaggctccccagcccccactgtgaaggggctggccaggggcccgagctgcccccacccccg

SEQ ID NO: 73859 - DNA, 72 bp, Homo sapiens
tccccagcccccactgtgaaggggctggccaggggcccgagctgcccccacccccggcctcagccaccagca

SEQ ID NO: 73860 - DNA, 71 bp, Homo sapiens
cccactgtgaaggggctggccaggggcccgagctgcccccacccccggcctcagccaccagcacccccata

SEQ ID NO: 73861 - DNA, 70 bp, Homo sapiens
tgaaggggctggccaggggcccgagctgcccccacccccggcctcagccaccagcacccccatagggccc

SEQ ID NO: 73862 - DNA, 70 bp, Homo sapiens
aggggcccgagctgcccccacccccggcctcagccaccagcacccccatagggcccccagacaccacaca

SEQ ID NO: 73863 - DNA, 77 bp, Homo sapiens
agctgcccccacccccggcctcagccaccagcacccccatagggcccccagacaccacacacatgcgcgtgcgcaca

SEQ ID NO: 73864 - DNA, 77 bp, Homo sapiens
ccacccccggcctcagccaccagcacccccatagggcccccagacaccacacacatgcgcgtgcgcacacacacaaa

SEQ ID NO: 73865 - DNA, 74 bp, Homo sapiens
aaacacacacacactggacagtagatgggccgacacacacttggcccgagttcctccatttccctggcctgccc

SEQ ID NO: 73866 - DNA, 71 bp, Homo sapiens
acactggacagtagatgggccgacacacacttggcccgagttcctccatttccctggcctgccccccaccc

SEQ ID NO: 73867 - DNA, 71 bp, Homo sapiens
tggacagtagatgggccgacacacacttggcccgagttcctccatttccctggcctgccccccacccccaa

SEQ ID NO: 73868 - DNA, 68 bp, Homo sapiens
agtagatgggccgacacacacttggcccgagttcctccatttccctggcctgccccccacccccaacc

SEQ ID NO: 73869 - DNA, 68 bp, Homo sapiens
atgggccgacacacacttggcccgagttcctccatttccctggcctgccccccacccccaacctgtcc

SEQ ID NO: 73870 - DNA, 67 bp, Homo sapiens
ccgacacacacttggcccgagttcctccatttccctggcctgccccccacccccaacctgtcccacc

SEQ ID NO: 73871 - DNA, 65 bp, Homo sapiens
cttggcccgagttcctccatttccctggcctgccccccacccccaacctgtcccacccccgtgcc

SEQ ID NO: 73872 - DNA, 64 bp, Homo sapiens
gttcctccatttccctggcctgccccccacccccaacctgtcccacccccgtgccccctcctta

SEQ ID NO: 73873 - DNA, 64 bp, Homo sapiens
ttcctccatttccctggcctgccccccacccccaacctgtcccacccccgtgccccctccttac

SEQ ID NO: 73874 - DNA, 63 bp, Homo sapiens
atttccctggcctgccccccacccccaacctgtcccacccccgtgccccctccttaccccgca

SEQ ID NO: 73875 - DNA, 64 bp, Homo sapiens
ttccctggcctgccccccacccccaacctgtcccacccccgtgccccctccttaccccgcagga

SEQ ID NO: 73876 - DNA, 64 bp, Homo sapiens
tgccccccacccccaacctgtcccacccccgtgccccctccttaccccgcaggacgggcctaca

SEQ ID NO: 73877 - DNA, 62 bp, Homo sapiens
cccacccccaacctgtcccacccccgtgccccctccttaccccgcaggacgggcctacaggg

SEQ ID NO: 73878 - DNA, 64 bp, Homo sapiens
ctgtcccacccccgtgccccctccttaccccgcaggacgggcctacaggggggtctcccctcac

SEQ ID NO: 73879 - DNA, 64 bp, Homo sapiens
cccgtgccccctccttaccccgcaggacgggcctacaggggggtctcccctcacccctgcaccc

SEQ ID NO: 73880 - DNA, 65 bp, Homo sapiens
ccctccttaccccgcaggacgggcctacaggggggtctcccctcacccctgcacccccagctggg

SEQ ID NO: 73881 - DNA, 70 bp, Homo sapiens
cccgcaggacgggcctacaggggggtctcccctcacccctgcacccccagctgggggagctggctctgcc

SEQ ID NO: 73882 - DNA, 71 bp, Homo sapiens
tacaggggggtctcccctcacccctgcacccccagctgggggagctggctctgccccgacctccttcacca

SEQ ID NO: 73883 - DNA, 70 bp, Homo sapiens
tctcccctcacccctgcacccccagctgggggagctggctctgccccgacctccttcaccaggggttggg

SEQ ID NO: 73884 - DNA, 69 bp, Homo sapiens
cctcacccctgcacccccagctgggggagctggctctgccccgacctccttcaccaggggttggggccc

SEQ ID NO: 73885 - DNA, 68 bp, Homo sapiens
cccagctgggggagctggctctgccccgacctccttcaccaggggttggggccccttcccctggagcc

SEQ ID NO: 73886 - DNA, 69 bp, Homo sapiens
ggagctggctctgccccgacctccttcaccaggggttggggccccttcccctggagcccgtgggtgcac

SEQ ID NO: 73887 - DNA, 67 bp, Homo sapiens
tctgccccgacctccttcaccaggggttggggccccttcccctggagcccgtgggtgcacctgttac

SEQ ID NO: 73888 - DNA, 66 bp, Homo sapiens
ctccttcaccaggggttggggccccttcccctggagcccgtgggtgcacctgttactgttgggctt

SEQ ID NO: 73889 - DNA, 68 bp, Homo sapiens
aggggttggggccccttcccctggagcccgtgggtgcacctgttactgttgggctttccactgagatc

SEQ ID NO: 73890 - DNA, 72 bp, Homo sapiens
gccccttcccctggagcccgtgggtgcacctgttactgttgggctttccactgagatctactggataaagaa

SEQ ID NO: 73891 - DNA, 73 bp, Homo sapiens
ctggagcccgtgggtgcacctgttactgttgggctttccactgagatctactggataaagaataaagttctat

SEQ ID NO: 73892 - DNA, 73 bp, Homo sapiens
cgtgggtgcacctgttactgttgggctttccactgagatctactggataaagaataaagttctatttattcta

SEQ ID NO: 73893 - DNA, 78 bp, Homo sapiens
ctgttgggctttccactgagatctactggataaagaataaagttctatttattctacacatgcctccagccttgctgc

SEQ ID NO: 73894 - DNA, 77 bp, Homo sapiens
ttccactgagatctactggataaagaataaagttctatttattctacacatgcctccagccttgctgcctccacccc

SEQ ID NO: 73895 - DNA, 77 bp, Homo sapiens
agtaaaccaaaaaagagataatggtgagaagctactgcagcatccaagagatgattcttattgaccggattagagag

SEQ ID NO: 73896 - DNA, 78 bp, Homo sapiens
aaagagataatggtgagaagctactgcagcatccaagagatgattcttattgaccggattagagaggaggggaaataa

SEQ ID NO: 73897 - DNA, 77 bp, Homo sapiens
atggtgagaagctactgcagcatccaagagatgattcttattgaccggattagagaggaggggaaataaaggaaggc

SEQ ID NO: 73898 - DNA, 76 bp, Homo sapiens
tactgcagcatccaagagatgattcttattgaccggattagagaggaggggaaataaaggaaggctcccagctttc

SEQ ID NO: 73899 - DNA, 70 bp, Homo sapiens
aagagatgattcttattgaccggattagagaggaggggaaataaaggaaggctcccagctttcttgttta

SEQ ID NO: 73900 - DNA, 70 bp, Homo sapiens
atgattcttattgaccggattagagaggaggggaaataaaggaaggctcccagctttcttgtttatacaa

SEQ ID NO: 73901 - DNA, 66 bp, Homo sapiens
accggattagagaggaggggaaataaaggaaggctcccagctttcttgtttatacaacctagaggt

SEQ ID NO: 73902 - DNA, 67 bp, Homo sapiens
tagagaggaggggaaataaaggaaggctcccagctttcttgtttatacaacctagaggttggttggg

SEQ ID NO: 73903 - DNA, 65 bp, Homo sapiens
aataaaggaaggctcccagctttcttgtttatacaacctagaggttggttggggctttttactaa

SEQ ID NO: 73904 - DNA, 67 bp, Homo sapiens
gctcccagctttcttgtttatacaacctagaggttggttggggctttttactaagataggaagttgt

SEQ ID NO: 73905 - DNA, 65 bp, Homo sapiens
cagctttcttgtttatacaacctagaggttggttggggctttttactaagataggaagttgtttt

SEQ ID NO: 73906 - DNA, 65 bp, Homo sapiens
ttatacaacctagaggttggttggggctttttactaagataggaagttgtttttttgttggagag

SEQ ID NO: 73907 - DNA, 63 bp, Homo sapiens
cctagaggttggttggggctttttactaagataggaagttgtttttttgttggagagtggggg

SEQ ID NO: 73908 - DNA, 78 bp, Homo sapiens
gggctggggccgcagccgctcagccggagcgcagcgcacccagcgagtccgtctgtcaggccgcctcctctccggccg

SEQ ID NO: 73909 - DNA, 80 bp, Homo sapiens
cgcagccgctcagccggagcgcagcgcacccagcgagtccgtctgtcaggccgcctcctctccggccgtctgattttcta

SEQ ID NO: 73910 - DNA, 76 bp, Homo sapiens
ctcagccggagcgcagcgcacccagcgagtccgtctgtcaggccgcctcctctccggccgtctgattttctaccct

SEQ ID NO: 73911 - DNA, 75 bp, Homo sapiens
agcgcagcgcacccagcgagtccgtctgtcaggccgcctcctctccggccgtctgattttctacccttcggcgcc

SEQ ID NO: 73912 - DNA, 72 bp, Homo sapiens
acccagcgagtccgtctgtcaggccgcctcctctccggccgtctgattttctacccttcggcgccctgctct

SEQ ID NO: 73913 - DNA, 73 bp, Homo sapiens
agtccgtctgtcaggccgcctcctctccggccgtctgattttctacccttcggcgccctgctcttcctcatgt

SEQ ID NO: 73914 - DNA, 74 bp, Homo sapiens
tcctctccggccgtctgattttctacccttcggcgccctgctcttcctcatgttggcatccccggccacggaga

SEQ ID NO: 73915 - DNA, 75 bp, Homo sapiens
tgattttctacccttcggcgccctgctcttcctcatgttggcatccccggccacggagaccaccgtcctcatgtc

SEQ ID NO: 73916 - DNA, 75 bp, Homo sapiens
ttctacccttcggcgccctgctcttcctcatgttggcatccccggccacggagaccaccgtcctcatgtcccaga

SEQ ID NO: 73917 - DNA, 76 bp, Homo sapiens
ccctgctcttcctcatgttggcatccccggccacggagaccaccgtcctcatgtcccagactgaggccgacctggc

SEQ ID NO: 73918 - DNA, 76 bp, Homo sapiens
tcttcctcatgttggcatccccggccacggagaccaccgtcctcatgtcccagactgaggccgacctggccctgcg

SEQ ID NO: 73919 - DNA, 73 bp, Homo sapiens
tgttggcatccccggccacggagaccaccgtcctcatgtcccagactgaggccgacctggccctgcggccccc

SEQ ID NO: 73920 - DNA, 73 bp, Homo sapiens
ccacggagaccaccgtcctcatgtcccagactgaggccgacctggccctgcggcccccgcctcctcttggcac

SEQ ID NO: 73921 - DNA, 72 bp, Homo sapiens
agaccaccgtcctcatgtcccagactgaggccgacctggccctgcggcccccgcctcctcttggcaccgcgg

SEQ ID NO: 73922 - DNA, 74 bp, Homo sapiens
tcatgtcccagactgaggccgacctggccctgcggcccccgcctcctcttggcaccgcggggcagccccgcctc

SEQ ID NO: 73923 - DNA, 70 bp, Homo sapiens
agactgaggccgacctggccctgcggcccccgcctcctcttggcaccgcggggcagccccgcctcgggcc

SEQ ID NO: 73924 - DNA, 68 bp, Homo sapiens
acctggccctgcggcccccgcctcctcttggcaccgcggggcagccccgcctcgggccccctcctcgc

SEQ ID NO: 73925 - DNA, 70 bp, Homo sapiens
ctgcggcccccgcctcctcttggcaccgcggggcagccccgcctcgggccccctcctcgccgagcgcgcc

SEQ ID NO: 73926 - DNA, 70 bp, Homo sapiens
ctcctcttggcaccgcggggcagccccgcctcgggccccctcctcgccgagcgcgccgcttctccgggaa

SEQ ID NO: 73927 - DNA, 71 bp, Homo sapiens
cttggcaccgcggggcagccccgcctcgggccccctcctcgccgagcgcgccgcttctccgggaaggctga

SEQ ID NO: 73928 - DNA, 71 bp, Homo sapiens
cagccccgcctcgggccccctcctcgccgagcgcgccgcttctccgggaaggctgagccccggccgcgctc

SEQ ID NO: 73929 - DNA, 73 bp, Homo sapiens
ctcgggccccctcctcgccgagcgcgccgcttctccgggaaggctgagccccggccgcgctcttctcgtctca

SEQ ID NO: 73930 - DNA, 77 bp, Homo sapiens
ctcctcgccgagcgcgccgcttctccgggaaggctgagccccggccgcgctcttctcgtctcagccgccgtagctca

SEQ ID NO: 73931 - DNA, 76 bp, Homo sapiens
agcgcgccgcttctccgggaaggctgagccccggccgcgctcttctcgtctcagccgccgtagctcagtcgacttg

SEQ ID NO: 73932 - DNA, 78 bp, Homo sapiens
aaggctgagccccggccgcgctcttctcgtctcagccgccgtagctcagtcgacttggggctgctgagctcttggtcc

SEQ ID NO: 73933 - DNA, 80 bp, Homo sapiens
cccggccgcgctcttctcgtctcagccgccgtagctcagtcgacttggggctgctgagctcttggtccctgccagcctca

SEQ ID NO: 73934 - DNA, 80 bp, Homo sapiens
tcttctcgtctcagccgccgtagctcagtcgacttggggctgctgagctcttggtccctgccagcctcacccgctccgga

SEQ ID NO: 73935 - DNA, 77 bp, Homo sapiens
cgtctcagccgccgtagctcagtcgacttggggctgctgagctcttggtccctgccagcctcacccgctccggaccc

SEQ ID NO: 73936 - DNA, 75 bp, Homo sapiens
gtagctcagtcgacttggggctgctgagctcttggtccctgccagcctcacccgctccggacccccccgatcctc

SEQ ID NO: 73937 - DNA, 72 bp, Homo sapiens
agtcgacttggggctgctgagctcttggtccctgccagcctcacccgctccggacccccccgatcctccgga

SEQ ID NO: 73938 - DNA, 69 bp, Homo sapiens
ctcttggtccctgccagcctcacccgctccggacccccccgatcctccggactccgctggtcctggccc

SEQ ID NO: 73939 - DNA, 69 bp, Homo sapiens
cagcctcacccgctccggacccccccgatcctccggactccgctggtcctggccccgcgaggagcccac

SEQ ID NO: 73940 - DNA, 69 bp, Homo sapiens
cgctccggacccccccgatcctccggactccgctggtcctggccccgcgaggagcccaccgcctagctc

SEQ ID NO: 73941 - DNA, 68 bp, Homo sapiens
ccccccgatcctccggactccgctggtcctggccccgcgaggagcccaccgcctagctccaaagaacc

SEQ ID NO: 73942 - DNA, 68 bp, Homo sapiens
atcctccggactccgctggtcctggccccgcgaggagcccaccgcctagctccaaagaaccccccgag

SEQ ID NO: 73943 - DNA, 69 bp, Homo sapiens
actccgctggtcctggccccgcgaggagcccaccgcctagctccaaagaaccccccgagggcacgtgga

SEQ ID NO: 73944 - DNA, 68 bp, Homo sapiens
gtcctggccccgcgaggagcccaccgcctagctccaaagaaccccccgagggcacgtggaccgaggga

SEQ ID NO: 73945 - DNA, 68 bp, Homo sapiens
cgaggagcccaccgcctagctccaaagaaccccccgagggcacgtggaccgagggagcccctgtgaag

SEQ ID NO: 73946 - DNA, 69 bp, Homo sapiens
accgcctagctccaaagaaccccccgagggcacgtggaccgagggagcccctgtgaaggctgcggaaga

SEQ ID NO: 73947 - DNA, 70 bp, Homo sapiens
tccaaagaaccccccgagggcacgtggaccgagggagcccctgtgaaggctgcggaagactccgcgcgtc

SEQ ID NO: 73948 - DNA, 71 bp, Homo sapiens
ccgagggcacgtggaccgagggagcccctgtgaaggctgcggaagactccgcgcgtcccgagctcccggac

SEQ ID NO: 73949 - DNA, 73 bp, Homo sapiens
acgtggaccgagggagcccctgtgaaggctgcggaagactccgcgcgtcccgagctcccggactctgcagtgg

SEQ ID NO: 73950 - DNA, 72 bp, Homo sapiens
cgagggagcccctgtgaaggctgcggaagactccgcgcgtcccgagctcccggactctgcagtgggcccggg

SEQ ID NO: 73951 - DNA, 70 bp, Homo sapiens
ggaagactccgcgcgtcccgagctcccggactctgcagtgggcccggggtccagggagccgctaagggtc

SEQ ID NO: 73952 - DNA, 70 bp, Homo sapiens
actccgcgcgtcccgagctcccggactctgcagtgggcccggggtccagggagccgctaagggtccctga

SEQ ID NO: 73953 - DNA, 71 bp, Homo sapiens
actctgcagtgggcccggggtccagggagccgctaagggtccctgaagctgtggccctagagcggcggcgg

SEQ ID NO: 73954 - DNA, 71 bp, Homo sapiens
tgggcccggggtccagggagccgctaagggtccctgaagctgtggccctagagcggcggcgggagcaggaa

SEQ ID NO: 73955 - DNA, 71 bp, Homo sapiens
gggtccagggagccgctaagggtccctgaagctgtggccctagagcggcggcgggagcaggaagaaaagga

SEQ ID NO: 73956 - DNA, 73 bp, Homo sapiens
agccgctaagggtccctgaagctgtggccctagagcggcggcgggagcaggaagaaaaggaggacatggagac

SEQ ID NO: 73957 - DNA, 76 bp, Homo sapiens
tccctgaagctgtggccctagagcggcggcgggagcaggaagaaaaggaggacatggagacccaggctgtggcaac

SEQ ID NO: 73958 - DNA, 74 bp, Homo sapiens
agctgtggccctagagcggcggcgggagcaggaagaaaaggaggacatggagacccaggctgtggcaacgtccc

SEQ ID NO: 73959 - DNA, 73 bp, Homo sapiens
agcggcggcgggagcaggaagaaaaggaggacatggagacccaggctgtggcaacgtcccccgatggccgata

SEQ ID NO: 73960 - DNA, 74 bp, Homo sapiens
gagcaggaagaaaaggaggacatggagacccaggctgtggcaacgtcccccgatggccgatacctcaagtttga

SEQ ID NO: 73961 - DNA, 73 bp, Homo sapiens
aaaaggaggacatggagacccaggctgtggcaacgtcccccgatggccgatacctcaagtttgacatcgagat

SEQ ID NO: 73962 - DNA, 75 bp, Homo sapiens
caggctgtggcaacgtcccccgatggccgatacctcaagtttgacatcgagattggacgtggctccttcaagacg

SEQ ID NO: 73963 - DNA, 74 bp, Homo sapiens
caacgtcccccgatggccgatacctcaagtttgacatcgagattggacgtggctccttcaagacggtgtatcga

SEQ ID NO: 73964 - DNA, 76 bp, Homo sapiens
cccgatggccgatacctcaagtttgacatcgagattggacgtggctccttcaagacggtgtatcgagggctagaca

SEQ ID NO: 73965 - DNA, 76 bp, Homo sapiens
atacctcaagtttgacatcgagattggacgtggctccttcaagacggtgtatcgagggctagacaccgacaccaca

SEQ ID NO: 73966 - DNA, 75 bp, Homo sapiens
aagtttgacatcgagattggacgtggctccttcaagacggtgtatcgagggctagacaccgacaccacagtggag

SEQ ID NO: 73967 - DNA, 77 bp, Homo sapiens
acgtggctccttcaagacggtgtatcgagggctagacaccgacaccacagtggaggtggcctggtgtgagctgcagg

SEQ ID NO: 73968 - DNA, 79 bp, Homo sapiens
cttcaagacggtgtatcgagggctagacaccgacaccacagtggaggtggcctggtgtgagctgcaggtgcggctggga

SEQ ID NO: 73969 - DNA, 78 bp, Homo sapiens
gtgtatcgagggctagacaccgacaccacagtggaggtggcctggtgtgagctgcaggtgcggctgggagccccctcg

SEQ ID NO: 73970 - DNA, 77 bp, Homo sapiens
tagacaccgacaccacagtggaggtggcctggtgtgagctgcaggtgcggctgggagccccctcggtggcaccttgg

SEQ ID NO: 73971 - DNA, 76 bp, Homo sapiens
tttctgtgggtgtcctgggcctgacatgacacccgtcccccatcccacagactcggaaactgtctagagctgagcg

SEQ ID NO: 73972 - DNA, 80 bp, Homo sapiens
ctgggcctgacatgacacccgtcccccatcccacagactcggaaactgtctagagctgagcggcagcgcttctcagagga

SEQ ID NO: 73973 - DNA, 79 bp, Homo sapiens
cctgacatgacacccgtcccccatcccacagactcggaaactgtctagagctgagcggcagcgcttctcagaggaggtg

SEQ ID NO: 73974 - DNA, 79 bp, Homo sapiens
acccgtcccccatcccacagactcggaaactgtctagagctgagcggcagcgcttctcagaggaggtggagatgctcaa

SEQ ID NO: 73975 - DNA, 83 bp, Homo sapiens
atcccacagactcggaaactgtctagagctgagcggcagcgcttctcagaggaggtggagatgctcaaggggctgcagcaccc

SEQ ID NO: 73976 - DNA, 82 bp, Homo sapiens
actcggaaactgtctagagctgagcggcagcgcttctcagaggaggtggagatgctcaaggggctgcagcaccccaacatcg

SEQ ID NO: 73977 - DNA, 86 bp, Homo sapiens
tctagagctgagcggcagcgcttctcagaggaggtggagatgctcaaggggctgcagcaccccaacatcgtccgcttctatgattc

SEQ ID NO: 73978 - DNA, 82 bp, Homo sapiens
agcggcagcgcttctcagaggaggtggagatgctcaaggggctgcagcaccccaacatcgtccgcttctatgattcgtggaa

SEQ ID NO: 73979 - DNA, 82 bp, Homo sapiens
ttctcagaggaggtggagatgctcaaggggctgcagcaccccaacatcgtccgcttctatgattcgtggaagtcggtgctga

SEQ ID NO: 73980 - DNA, 78 bp, Homo sapiens
aggaggtggagatgctcaaggggctgcagcaccccaacatcgtccgcttctatgattcgtggaagtcggtgctgaggg

SEQ ID NO: 73981 - DNA, 77 bp, Homo sapiens
agatgctcaaggggctgcagcaccccaacatcgtccgcttctatgattcgtggaagtcggtgctgaggggccaggtt

SEQ ID NO: 73982 - DNA, 80 bp, Homo sapiens
tgcagcaccccaacatcgtccgcttctatgattcgtggaagtcggtgctgaggggccaggtttgcatcgtgctggtcacc

SEQ ID NO: 73983 - DNA, 80 bp, Homo sapiens
caacatcgtccgcttctatgattcgtggaagtcggtgctgaggggccaggtttgcatcgtgctggtcaccgaactcatga

SEQ ID NO: 73984 - DNA, 79 bp, Homo sapiens
tcgtccgcttctatgattcgtggaagtcggtgctgaggggccaggtttgcatcgtgctggtcaccgaactcatgacctc

SEQ ID NO: 73985 - DNA, 80 bp, Homo sapiens
tatgattcgtggaagtcggtgctgaggggccaggtttgcatcgtgctggtcaccgaactcatgacctcgggcacgctcaa

SEQ ID NO: 73986 - DNA, 79 bp, Homo sapiens
aagtcggtgctgaggggccaggtttgcatcgtgctggtcaccgaactcatgacctcgggcacgctcaagacgtgagctc

SEQ ID NO: 73987 - DNA, 81 bp, Homo sapiens
aggggccaggtttgcatcgtgctggtcaccgaactcatgacctcgggcacgctcaagacgtgagctctgcgcatgagtggg

SEQ ID NO: 73988 - DNA, 82 bp, Homo sapiens
aggtttgcatcgtgctggtcaccgaactcatgacctcgggcacgctcaagacgtgagctctgcgcatgagtgggtggggaga

SEQ ID NO: 73989 - DNA, 81 bp, Homo sapiens
atcgtgctggtcaccgaactcatgacctcgggcacgctcaagacgtgagctctgcgcatgagtgggtggggagagggaggc

SEQ ID NO: 73990 - DNA, 74 bp, Homo sapiens
tgggaagtctccatcccttccccctttcacctttgagctcctactcatcattcaagatgcaacacaaaagtatt

SEQ ID NO: 73991 - DNA, 73 bp, Homo sapiens
atcccttccccctttcacctttgagctcctactcatcattcaagatgcaacacaaaagtatttcctctccgaa

SEQ ID NO: 73992 - DNA, 78 bp, Homo sapiens
cctttcacctttgagctcctactcatcattcaagatgcaacacaaaagtatttcctctccgaagctctccctcatgct

SEQ ID NO: 73993 - DNA, 80 bp, Homo sapiens
tttgagctcctactcatcattcaagatgcaacacaaaagtatttcctctccgaagctctccctcatgcttggggcagtta

SEQ ID NO: 73994 - DNA, 79 bp, Homo sapiens
tactcatcattcaagatgcaacacaaaagtatttcctctccgaagctctccctcatgcttggggcagttagtcatccct

SEQ ID NO: 73995 - DNA, 77 bp, Homo sapiens
attcaagatgcaacacaaaagtatttcctctccgaagctctccctcatgcttggggcagttagtcatcccttcctgc

SEQ ID NO: 73996 - DNA, 76 bp, Homo sapiens
aagtatttcctctccgaagctctccctcatgcttggggcagttagtcatcccttcctgcgctcccacagcaccttg

SEQ ID NO: 73997 - DNA, 80 bp, Homo sapiens
gaagctctccctcatgcttggggcagttagtcatcccttcctgcgctcccacagcaccttggccgaggccctatctatca

SEQ ID NO: 73998 - DNA, 77 bp, Homo sapiens
ctcatgcttggggcagttagtcatcccttcctgcgctcccacagcaccttggccgaggccctatctatcaatttact

SEQ ID NO: 73999 - DNA, 74 bp, Homo sapiens
gggcagttagtcatcccttcctgcgctcccacagcaccttggccgaggccctatctatcaatttacttcccaac

SEQ ID NO: 74000 - DNA, 72 bp, Homo sapiens
tagtcatcccttcctgcgctcccacagcaccttggccgaggccctatctatcaatttacttcccaacccgtt

SEQ ID NO: 74001 - DNA, 70 bp, Homo sapiens
ttcctgcgctcccacagcaccttggccgaggccctatctatcaatttacttcccaacccgtttggtaacg

SEQ ID NO: 74002 - DNA, 71 bp, Homo sapiens
acagcaccttggccgaggccctatctatcaatttacttcccaacccgtttggtaacgtcatgtctatccac

SEQ ID NO: 74003 - DNA, 71 bp, Homo sapiens
accttggccgaggccctatctatcaatttacttcccaacccgtttggtaacgtcatgtctatccaccatgc

SEQ ID NO: 74004 - DNA, 71 bp, Homo sapiens
cctatctatcaatttacttcccaacccgtttggtaacgtcatgtctatccaccatgccccctgactcagtt

SEQ ID NO: 74005 - DNA, 71 bp, Homo sapiens
tatcaatttacttcccaacccgtttggtaacgtcatgtctatccaccatgccccctgactcagtttctccc

SEQ ID NO: 74006 - DNA, 69 bp, Homo sapiens
cttcccaacccgtttggtaacgtcatgtctatccaccatgccccctgactcagtttctccctggggccg

SEQ ID NO: 74007 - DNA, 75 bp, Homo sapiens
tttggtaacgtcatgtctatccaccatgccccctgactcagtttctccctggggccgggcagacataggctagga

SEQ ID NO: 74008 - DNA, 80 bp, Homo sapiens
gtcatgtctatccaccatgccccctgactcagtttctccctggggccgggcagacataggctaggagaatgctggcagaa

SEQ ID NO: 74009 - DNA, 79 bp, Homo sapiens
atccaccatgccccctgactcagtttctccctggggccgggcagacataggctaggagaatgctggcagaagatgcgga

SEQ ID NO: 74010 - DNA, 81 bp, Homo sapiens
tgactcagtttctccctggggccgggcagacataggctaggagaatgctggcagaagatgcggaggcggcagcagggtgcg

SEQ ID NO: 74011 - DNA, 79 bp, Homo sapiens
agtttctccctggggccgggcagacataggctaggagaatgctggcagaagatgcggaggcggcagcagggtgcggcag

SEQ ID NO: 74012 - DNA, 79 bp, Homo sapiens
gccgggcagacataggctaggagaatgctggcagaagatgcggaggcggcagcagggtgcggcaggggggaacttccca

SEQ ID NO: 74013 - DNA, 75 bp, Homo sapiens
taggagaatgctggcagaagatgcggaggcggcagcagggtgcggcaggggggaacttcccagtggggggctcct

SEQ ID NO: 74014 - DNA, 69 bp, Homo sapiens
atgcggaggcggcagcagggtgcggcaggggggaacttcccagtggggggctccttcccggaggacgtg

SEQ ID NO: 74015 - DNA, 66 bp, Homo sapiens
cggcagcagggtgcggcaggggggaacttcccagtggggggctccttcccggaggacgtgtccccc

SEQ ID NO: 74016 - DNA, 65 bp, Homo sapiens
ggtgcggcaggggggaacttcccagtggggggctccttcccggaggacgtgtccccccaccagga

SEQ ID NO: 74017 - DNA, 68 bp, Homo sapiens
aacttcccagtggggggctccttcccggaggacgtgtccccccaccaggactctggctatgcgccctc

SEQ ID NO: 74018 - DNA, 68 bp, Homo sapiens
gtggggggctccttcccggaggacgtgtccccccaccaggactctggctatgcgccctcccccaggta

SEQ ID NO: 74019 - DNA, 68 bp, Homo sapiens
cttcccggaggacgtgtccccccaccaggactctggctatgcgccctcccccaggtacctgaggcggt

SEQ ID NO: 74020 - DNA, 71 bp, Homo sapiens
gacgtgtccccccaccaggactctggctatgcgccctcccccaggtacctgaggcggttccgggagatgaa

SEQ ID NO: 74021 - DNA, 71 bp, Homo sapiens
cccaccaggactctggctatgcgccctcccccaggtacctgaggcggttccgggagatgaagccgcgggtc

SEQ ID NO: 74022 - DNA, 72 bp, Homo sapiens
aggactctggctatgcgccctcccccaggtacctgaggcggttccgggagatgaagccgcgggtccttcagc

SEQ ID NO: 74023 - DNA, 74 bp, Homo sapiens
tatgcgccctcccccaggtacctgaggcggttccgggagatgaagccgcgggtccttcagcgctggagccgcca

SEQ ID NO: 74024 - DNA, 72 bp, Homo sapiens
ccaggtacctgaggcggttccgggagatgaagccgcgggtccttcagcgctggagccgccaaatcctgcggg

SEQ ID NO: 74025 - DNA, 74 bp, Homo sapiens
tgaggcggttccgggagatgaagccgcgggtccttcagcgctggagccgccaaatcctgcggggacttcatttc

SEQ ID NO: 74026 - DNA, 73 bp, Homo sapiens
ggttccgggagatgaagccgcgggtccttcagcgctggagccgccaaatcctgcggggacttcatttcctaca

SEQ ID NO: 74027 - DNA, 71 bp, Homo sapiens
atgaagccgcgggtccttcagcgctggagccgccaaatcctgcggggacttcatttcctacactcccgggt

SEQ ID NO: 74028 - DNA, 70 bp, Homo sapiens
cgggtccttcagcgctggagccgccaaatcctgcggggacttcatttcctacactcccgggttcctccca

SEQ ID NO: 74029 - DNA, 73 bp, Homo sapiens
tggagccgccaaatcctgcggggacttcatttcctacactcccgggttcctcccatcctgcaccgggatctca

SEQ ID NO: 74030 - DNA, 72 bp, Homo sapiens
aaatcctgcggggacttcatttcctacactcccgggttcctcccatcctgcaccgggatctcaagtgcgaca

SEQ ID NO: 74031 - DNA, 74 bp, Homo sapiens
gggacttcatttcctacactcccgggttcctcccatcctgcaccgggatctcaagtgcgacaatgtctttatca

SEQ ID NO: 74032 - DNA, 74 bp, Homo sapiens
ttcatttcctacactcccgggttcctcccatcctgcaccgggatctcaagtgcgacaatgtctttatcacggga

SEQ ID NO: 74033 - DNA, 73 bp, Homo sapiens
acactcccgggttcctcccatcctgcaccgggatctcaagtgcgacaatgtctttatcacgggacctactggc

SEQ ID NO: 74034 - DNA, 75 bp, Homo sapiens
cctcccatcctgcaccgggatctcaagtgcgacaatgtctttatcacgggacctactggctctgtcaaaatcggg

SEQ ID NO: 74035 - DNA, 75 bp, Homo sapiens
ggatctcaagtgcgacaatgtctttatcacgggacctactggctctgtcaaaatcggggacctgggcctggccac

SEQ ID NO: 74036 - DNA, 74 bp, Homo sapiens
acaatgtctttatcacgggacctactggctctgtcaaaatcggggacctgggcctggccacgctcaagcgcgcc

SEQ ID NO: 74037 - DNA, 73 bp, Homo sapiens
tctttatcacgggacctactggctctgtcaaaatcggggacctgggcctggccacgctcaagcgcgcctcctt

SEQ ID NO: 74038 - DNA, 76 bp, Homo sapiens
acctactggctctgtcaaaatcggggacctgggcctggccacgctcaagcgcgcctcctttgccaagagtgtcatc

SEQ ID NO: 74039 - DNA, 78 bp, Homo sapiens
tctgtcaaaatcggggacctgggcctggccacgctcaagcgcgcctcctttgccaagagtgtcatcggtgcgtctctc

SEQ ID NO: 74040 - DNA, 80 bp, Homo sapiens
gcctggccacgctcaagcgcgcctcctttgccaagagtgtcatcggtgcgtctctccaggagggtccatgccattccttc

SEQ ID NO: 74041 - DNA, 78 bp, Homo sapiens
ccacgctcaagcgcgcctcctttgccaagagtgtcatcggtgcgtctctccaggagggtccatgccattccttcctcc

SEQ ID NO: 74042 - DNA, 77 bp, Homo sapiens
gaggccagagtgcccagcaatctgatccctgctgtggaccctacagggaccccggaattcatggcccccgagatgta

SEQ ID NO: 74043 - DNA, 75 bp, Homo sapiens
tgcccagcaatctgatccctgctgtggaccctacagggaccccggaattcatggcccccgagatgtacgaggaaa

SEQ ID NO: 74044 - DNA, 71 bp, Homo sapiens
aatctgatccctgctgtggaccctacagggaccccggaattcatggcccccgagatgtacgaggaaaagta

SEQ ID NO: 74045 - DNA, 71 bp, Homo sapiens
tgctgtggaccctacagggaccccggaattcatggcccccgagatgtacgaggaaaagtacgatgaggccg

SEQ ID NO: 74046 - DNA, 70 bp, Homo sapiens
ctacagggaccccggaattcatggcccccgagatgtacgaggaaaagtacgatgaggccgtggacgtgta

SEQ ID NO: 74047 - DNA, 71 bp, Homo sapiens
cccggaattcatggcccccgagatgtacgaggaaaagtacgatgaggccgtggacgtgtacgcgttcggca

SEQ ID NO: 74048 - DNA, 77 bp, Homo sapiens
aattcatggcccccgagatgtacgaggaaaagtacgatgaggccgtggacgtgtacgcgttcggcatgtgcatgctg

SEQ ID NO: 74049 - DNA, 78 bp, Homo sapiens
cccgagatgtacgaggaaaagtacgatgaggccgtggacgtgtacgcgttcggcatgtgcatgctggagatggccacc

SEQ ID NO: 74050 - DNA, 79 bp, Homo sapiens
tacgaggaaaagtacgatgaggccgtggacgtgtacgcgttcggcatgtgcatgctggagatggccacctctgagtacc

SEQ ID NO: 74051 - DNA, 79 bp, Homo sapiens
agtacgatgaggccgtggacgtgtacgcgttcggcatgtgcatgctggagatggccacctctgagtacccgtactccga

SEQ ID NO: 74052 - DNA, 83 bp, Homo sapiens
tggacgtgtacgcgttcggcatgtgcatgctggagatggccacctctgagtacccgtactccgagtgccagaatgccgcgcaa

SEQ ID NO: 74053 - DNA, 83 bp, Homo sapiens
gtgtacgcgttcggcatgtgcatgctggagatggccacctctgagtacccgtactccgagtgccagaatgccgcgcaaatcta

SEQ ID NO: 74054 - DNA, 81 bp, Homo sapiens
atgtgcatgctggagatggccacctctgagtacccgtactccgagtgccagaatgccgcgcaaatctaccgcaaggtcact

SEQ ID NO: 74055 - DNA, 78 bp, Homo sapiens
tggagatggccacctctgagtacccgtactccgagtgccagaatgccgcgcaaatctaccgcaaggtcacttcggtga

SEQ ID NO: 74056 - DNA, 76 bp, Homo sapiens
cacctctgagtacccgtactccgagtgccagaatgccgcgcaaatctaccgcaaggtcacttcggtgagagggatg

SEQ ID NO: 74057 - DNA, 75 bp, Homo sapiens
ctgagtacccgtactccgagtgccagaatgccgcgcaaatctaccgcaaggtcacttcggtgagagggatggggc

SEQ ID NO: 74058 - DNA, 75 bp, Homo sapiens
gtactccgagtgccagaatgccgcgcaaatctaccgcaaggtcacttcggtgagagggatggggctggcgggaaa

SEQ ID NO: 74059 - DNA, 75 bp, Homo sapiens
tcaagccgagagctggggatcagaggacgggaggtgtcatgcaaccccttccccagggcagaaagccgaacagct

SEQ ID NO: 74060 - DNA, 74 bp, Homo sapiens
tggggatcagaggacgggaggtgtcatgcaaccccttccccagggcagaaagccgaacagcttccacaaggtga

SEQ ID NO: 74061 - DNA, 72 bp, Homo sapiens
agaggacgggaggtgtcatgcaaccccttccccagggcagaaagccgaacagcttccacaaggtgaagatac

SEQ ID NO: 74062 - DNA, 72 bp, Homo sapiens
aggtgtcatgcaaccccttccccagggcagaaagccgaacagcttccacaaggtgaagatacccgaggtgaa

SEQ ID NO: 74063 - DNA, 72 bp, Homo sapiens
ccccttccccagggcagaaagccgaacagcttccacaaggtgaagatacccgaggtgaaggagatcattgaa

SEQ ID NO: 74064 - DNA, 77 bp, Homo sapiens
agggcagaaagccgaacagcttccacaaggtgaagatacccgaggtgaaggagatcattgaaggctgcatccgcacg

SEQ ID NO: 74065 - DNA, 77 bp, Homo sapiens
aagccgaacagcttccacaaggtgaagatacccgaggtgaaggagatcattgaaggctgcatccgcacggataagaa

SEQ ID NO: 74066 - DNA, 76 bp, Homo sapiens
ttccacaaggtgaagatacccgaggtgaaggagatcattgaaggctgcatccgcacggataagaacgagaggtggg

SEQ ID NO: 74067 - DNA, 75 bp, Homo sapiens
aaggtgaagatacccgaggtgaaggagatcattgaaggctgcatccgcacggataagaacgagaggtgggggtga

SEQ ID NO: 74068 - DNA, 75 bp, Homo sapiens
atacccgaggtgaaggagatcattgaaggctgcatccgcacggataagaacgagaggtgggggtgaaagggcaga

SEQ ID NO: 74069 - DNA, 76 bp, Homo sapiens
aggagatcattgaaggctgcatccgcacggataagaacgagaggtgggggtgaaagggcagagcgtgggtagaata

SEQ ID NO: 74070 - DNA, 73 bp, Homo sapiens
attgaaggctgcatccgcacggataagaacgagaggtgggggtgaaagggcagagcgtgggtagaatagggcc

SEQ ID NO: 74071 - DNA, 70 bp, Homo sapiens
agaggtgggggtgaaagggcagagcgtgggtagaatagggccgcgggccgcggcgggctcggctcaccca

SEQ ID NO: 74072 - DNA, 71 bp, Homo sapiens
ggtgaaagggcagagcgtgggtagaatagggccgcgggccgcggcgggctcggctcacccacgcgtcaccc

SEQ ID NO: 74073 - DNA, 71 bp, Homo sapiens
aatagggccgcgggccgcggcgggctcggctcacccacgcgtcaccctcaggttcaccatccaggacctcc

SEQ ID NO: 74074 - DNA, 73 bp, Homo sapiens
cgcggcgggctcggctcacccacgcgtcaccctcaggttcaccatccaggacctcctggcccacgccttcttc

SEQ ID NO: 74075 - DNA, 74 bp, Homo sapiens
ctcggctcacccacgcgtcaccctcaggttcaccatccaggacctcctggcccacgccttcttccgcgaggagc

SEQ ID NO: 74076 - DNA, 74 bp, Homo sapiens
tcacccacgcgtcaccctcaggttcaccatccaggacctcctggcccacgccttcttccgcgaggagcgcggtg

SEQ ID NO: 74077 - DNA, 74 bp, Homo sapiens
ccctcaggttcaccatccaggacctcctggcccacgccttcttccgcgaggagcgcggtgtgcacgtggaacta

SEQ ID NO: 74078 - DNA, 75 bp, Homo sapiens
ttcaccatccaggacctcctggcccacgccttcttccgcgaggagcgcggtgtgcacgtggaactagcggaggag

SEQ ID NO: 74079 - DNA, 73 bp, Homo sapiens
acctcctggcccacgccttcttccgcgaggagcgcggtgtgcacgtggaactagcggaggaggacgacggcga

SEQ ID NO: 74080 - DNA, 72 bp, Homo sapiens
cccacgccttcttccgcgaggagcgcggtgtgcacgtggaactagcggaggaggacgacggcgagaagccgg

SEQ ID NO: 74081 - DNA, 73 bp, Homo sapiens
ccttcttccgcgaggagcgcggtgtgcacgtggaactagcggaggaggacgacggcgagaagccgggcctcaa

SEQ ID NO: 74082 - DNA, 79 bp, Homo sapiens
ggtgtgcacgtggaactagcggaggaggacgacggcgagaagccgggcctcaagctctggctgcgcatggaggacgcgc

SEQ ID NO: 74083 - DNA, 77 bp, Homo sapiens
tggaactagcggaggaggacgacggcgagaagccgggcctcaagctctggctgcgcatggaggacgcgcggcgcggg

SEQ ID NO: 74084 - DNA, 75 bp, Homo sapiens
aggaggacgacggcgagaagccgggcctcaagctctggctgcgcatggaggacgcgcggcgcggggggcgcccac

SEQ ID NO: 74085 - DNA, 74 bp, Homo sapiens
acggcgagaagccgggcctcaagctctggctgcgcatggaggacgcgcggcgcggggggcgcccacgggacaac

SEQ ID NO: 74086 - DNA, 76 bp, Homo sapiens
ggcctcaagctctggctgcgcatggaggacgcgcggcgcggggggcgcccacgggacaaccaggccatcgagttcc

SEQ ID NO: 74087 - DNA, 75 bp, Homo sapiens
aagctctggctgcgcatggaggacgcgcggcgcggggggcgcccacgggacaaccaggccatcgagttcctgttc

SEQ ID NO: 74088 - DNA, 72 bp, Homo sapiens
catggaggacgcgcggcgcggggggcgcccacgggacaaccaggccatcgagttcctgttccagctgggccg

SEQ ID NO: 74089 - DNA, 70 bp, Homo sapiens
aggacgcgcggcgcggggggcgcccacgggacaaccaggccatcgagttcctgttccagctgggccggga

SEQ ID NO: 74090 - DNA, 69 bp, Homo sapiens
gggggcgcccacgggacaaccaggccatcgagttcctgttccagctgggccgggacgcggccgaggagg

SEQ ID NO: 74091 - DNA, 75 bp, Homo sapiens
acaaccaggccatcgagttcctgttccagctgggccgggacgcggccgaggaggtggcacaggagatggtgagcg

SEQ ID NO: 74092 - DNA, 76 bp, Homo sapiens
atcgagttcctgttccagctgggccgggacgcggccgaggaggtggcacaggagatggtgagcggaggacagactg

SEQ ID NO: 74093 - DNA, 80 bp, Homo sapiens
tgttccagctgggccgggacgcggccgaggaggtggcacaggagatggtgagcggaggacagactgtgctgccactggac

SEQ ID NO: 74094 - DNA, 73 bp, Homo sapiens
tttgatagggggtcccaagctgtgttcctcatcccccaccccaattccaggtggctctgggcttggtctgtga

SEQ ID NO: 74095 - DNA, 74 bp, Homo sapiens
gtcccaagctgtgttcctcatcccccaccccaattccaggtggctctgggcttggtctgtgaagccgattacca

SEQ ID NO: 74096 - DNA, 75 bp, Homo sapiens
tgtgttcctcatcccccaccccaattccaggtggctctgggcttggtctgtgaagccgattaccagccagtggcc

SEQ ID NO: 74097 - DNA, 75 bp, Homo sapiens
cccaccccaattccaggtggctctgggcttggtctgtgaagccgattaccagccagtggcccgtgcagtacgtga

SEQ ID NO: 74098 - DNA, 73 bp, Homo sapiens
aattccaggtggctctgggcttggtctgtgaagccgattaccagccagtggcccgtgcagtacgtgaacgggt

SEQ ID NO: 74099 - DNA, 78 bp, Homo sapiens
ctctgggcttggtctgtgaagccgattaccagccagtggcccgtgcagtacgtgaacgggttgctgccatccagcgaa

SEQ ID NO: 74100 - DNA, 79 bp, Homo sapiens
tggtctgtgaagccgattaccagccagtggcccgtgcagtacgtgaacgggttgctgccatccagcgaaagcgtgagaa

SEQ ID NO: 74101 - DNA, 78 bp, Homo sapiens
gccgattaccagccagtggcccgtgcagtacgtgaacgggttgctgccatccagcgaaagcgtgagaagctgcgtaaa

SEQ ID NO: 74102 - DNA, 77 bp, Homo sapiens
gtggcccgtgcagtacgtgaacgggttgctgccatccagcgaaagcgtgagaagctgcgtaaagcaagggaattgga

SEQ ID NO: 74103 - DNA, 76 bp, Homo sapiens
agtacgtgaacgggttgctgccatccagcgaaagcgtgagaagctgcgtaaagcaagggaattggaggcactccca

SEQ ID NO: 74104 - DNA, 77 bp, Homo sapiens
acgggttgctgccatccagcgaaagcgtgagaagctgcgtaaagcaagggaattggaggcactcccaccagagccag

SEQ ID NO: 74105 - DNA, 78 bp, Homo sapiens
atccagcgaaagcgtgagaagctgcgtaaagcaagggaattggaggcactcccaccagagccaggacctccaccagca

SEQ ID NO: 74106 - DNA, 77 bp, Homo sapiens
aaagcgtgagaagctgcgtaaagcaagggaattggaggcactcccaccagagccaggacctccaccagcaactgtgc

SEQ ID NO: 74107 - DNA, 76 bp, Homo sapiens
aagctgcgtaaagcaagggaattggaggcactcccaccagagccaggacctccaccagcaactgtgcccatggccc

SEQ ID NO: 74108 - DNA, 73 bp, Homo sapiens
aaagcaagggaattggaggcactcccaccagagccaggacctccaccagcaactgtgcccatggcccccggtc

SEQ ID NO: 74109 - DNA, 72 bp, Homo sapiens
aattggaggcactcccaccagagccaggacctccaccagcaactgtgcccatggcccccggtccccccagtg

SEQ ID NO: 74110 - DNA, 70 bp, Homo sapiens
actcccaccagagccaggacctccaccagcaactgtgcccatggcccccggtccccccagtgtcttcccc

SEQ ID NO: 74111 - DNA, 71 bp, Homo sapiens
agccaggacctccaccagcaactgtgcccatggcccccggtccccccagtgtcttcccccctgagcctgag

SEQ ID NO: 74112 - DNA, 74 bp, Homo sapiens
ctccaccagcaactgtgcccatggcccccggtccccccagtgtcttcccccctgagcctgaggagccagaggca

SEQ ID NO: 74113 - DNA, 73 bp, Homo sapiens
aactgtgcccatggcccccggtccccccagtgtcttcccccctgagcctgaggagccagaggcagaccagcac

SEQ ID NO: 74114 - DNA, 70 bp, Homo sapiens
ccccggtccccccagtgtcttcccccctgagcctgaggagccagaggcagaccagcaccagcccttcctt

SEQ ID NO: 74115 - DNA, 75 bp, Homo sapiens
cccagtgtcttcccccctgagcctgaggagccagaggcagaccagcaccagcccttccttttccgccacgccagc

SEQ ID NO: 74116 - DNA, 78 bp, Homo sapiens
tcttcccccctgagcctgaggagccagaggcagaccagcaccagcccttccttttccgccacgccagctactcatcta

SEQ ID NO: 74117 - DNA, 76 bp, Homo sapiens
aggagccagaggcagaccagcaccagcccttccttttccgccacgccagctactcatctaccacttgtaagtcacc

SEQ ID NO: 74118 - DNA, 73 bp, Homo sapiens
agcccttccttttccgccacgccagctactcatctaccacttgtaagtcacccctgatcttgagacgtaggtc

SEQ ID NO: 74119 - DNA, 68 bp, Homo sapiens
actattcccttttatttcccctttttttgatcctctccctccccaaccagcggattgcgagactgatg

SEQ ID NO: 74120 - DNA, 72 bp, Homo sapiens
ttttatttcccctttttttgatcctctccctccccaaccagcggattgcgagactgatggctacctcagctc

SEQ ID NO: 74121 - DNA, 79 bp, Homo sapiens
ttttgatcctctccctccccaaccagcggattgcgagactgatggctacctcagctcctccggcttcctggatgcctca

SEQ ID NO: 74122 - DNA, 78 bp, Homo sapiens
ctccctccccaaccagcggattgcgagactgatggctacctcagctcctccggcttcctggatgcctcagaccctgcc

SEQ ID NO: 74123 - DNA, 79 bp, Homo sapiens
cccaaccagcggattgcgagactgatggctacctcagctcctccggcttcctggatgcctcagaccctgcccttcagcc

SEQ ID NO: 74124 - DNA, 77 bp, Homo sapiens
cggattgcgagactgatggctacctcagctcctccggcttcctggatgcctcagaccctgcccttcagccccctggg

SEQ ID NO: 74125 - DNA, 75 bp, Homo sapiens
agactgatggctacctcagctcctccggcttcctggatgcctcagaccctgcccttcagccccctgggggggtgc

SEQ ID NO: 74126 - DNA, 75 bp, Homo sapiens
tacctcagctcctccggcttcctggatgcctcagaccctgcccttcagccccctgggggggtgccatccagcctg

SEQ ID NO: 74127 - DNA, 76 bp, Homo sapiens
tccggcttcctggatgcctcagaccctgcccttcagccccctgggggggtgccatccagcctggctgagtcccatc

SEQ ID NO: 74128 - DNA, 79 bp, Homo sapiens
tcctggatgcctcagaccctgcccttcagccccctgggggggtgccatccagcctggctgagtcccatctctgcctgcc

SEQ ID NO: 74129 - DNA, 76 bp, Homo sapiens
agaccctgcccttcagccccctgggggggtgccatccagcctggctgagtcccatctctgcctgccctcggtgaga

SEQ ID NO: 74130 - DNA, 77 bp, Homo sapiens
ttcagccccctgggggggtgccatccagcctggctgagtcccatctctgcctgccctcggtgagagggggtcgcatg

SEQ ID NO: 74131 - DNA, 74 bp, Homo sapiens
ccctgggggggtgccatccagcctggctgagtcccatctctgcctgccctcggtgagagggggtcgcatggggg

SEQ ID NO: 74132 - DNA, 78 bp, Homo sapiens
ccatccagcctggctgagtcccatctctgcctgccctcggtgagagggggtcgcatggggggctcccagccattccaa

SEQ ID NO: 74133 - DNA, 74 bp, Homo sapiens
cttgacaccatctccctagatctcaacagttatcttcccctgacctcatgaacccttatcctgtttcaggcttt

SEQ ID NO: 74134 - DNA, 74 bp, Homo sapiens
tccctagatctcaacagttatcttcccctgacctcatgaacccttatcctgtttcaggcttttgccctatccat

SEQ ID NO: 74135 - DNA, 74 bp, Homo sapiens
agatctcaacagttatcttcccctgacctcatgaacccttatcctgtttcaggcttttgccctatccattccac

SEQ ID NO: 74136 - DNA, 72 bp, Homo sapiens
agttatcttcccctgacctcatgaacccttatcctgtttcaggcttttgccctatccattccacgttctggc

SEQ ID NO: 74137 - DNA, 71 bp, Homo sapiens
acctcatgaacccttatcctgtttcaggcttttgccctatccattccacgttctggccctggaagtgactt

SEQ ID NO: 74138 - DNA, 70 bp, Homo sapiens
atgaacccttatcctgtttcaggcttttgccctatccattccacgttctggccctggaagtgacttttcc

SEQ ID NO: 74139 - DNA, 68 bp, Homo sapiens
atcctgtttcaggcttttgccctatccattccacgttctggccctggaagtgacttttcccccgggga

SEQ ID NO: 74140 - DNA, 69 bp, Homo sapiens
tttgccctatccattccacgttctggccctggaagtgacttttcccccggggacaggtatgttctggta

SEQ ID NO: 74141 - DNA, 69 bp, Homo sapiens
tatccattccacgttctggccctggaagtgacttttcccccggggacaggtatgttctggtacaagttg

SEQ ID NO: 74142 - DNA, 67 bp, Homo sapiens
acgttctggccctggaagtgacttttcccccggggacaggtatgttctggtacaagttggggtgcca

SEQ ID NO: 74143 - DNA, 69 bp, Homo sapiens
tggaagtgacttttcccccggggacaggtatgttctggtacaagttggggtgccagggtgagacacctg

SEQ ID NO: 74144 - DNA, 67 bp, Homo sapiens
acttttcccccggggacaggtatgttctggtacaagttggggtgccagggtgagacacctggggcac

SEQ ID NO: 74145 - DNA, 77 bp, Homo sapiens
gggtgccagggtgagacacctggggcactggggtcccagtgtctgctctgacagtcattctctctcctttctcttta

SEQ ID NO: 74146 - DNA, 86 bp, Homo sapiens
ccagtgtctgctctgacagtcattctctctcctttctctttaacagctatgcctcagatgcagcttcaggccttagcgatgtggga

SEQ ID NO: 74147 - DNA, 83 bp, Homo sapiens
ctctgacagtcattctctctcctttctctttaacagctatgcctcagatgcagcttcaggccttagcgatgtgggagaaggga

SEQ ID NO: 74148 - DNA, 81 bp, Homo sapiens
cattctctctcctttctctttaacagctatgcctcagatgcagcttcaggccttagcgatgtgggagaagggatgggacaa

SEQ ID NO: 74149 - DNA, 81 bp, Homo sapiens
tcctttctctttaacagctatgcctcagatgcagcttcaggccttagcgatgtgggagaagggatgggacaaatgaggaga

SEQ ID NO: 74150 - DNA, 79 bp, Homo sapiens
ctctttaacagctatgcctcagatgcagcttcaggccttagcgatgtgggagaagggatgggacaaatgaggagacccc

SEQ ID NO: 74151 - DNA, 79 bp, Homo sapiens
tatgcctcagatgcagcttcaggccttagcgatgtgggagaagggatgggacaaatgaggagacccccagggaggaatc

SEQ ID NO: 74152 - DNA, 75 bp, Homo sapiens
agatgcagcttcaggccttagcgatgtgggagaagggatgggacaaatgaggagacccccagggaggaatctccg

SEQ ID NO: 74153 - DNA, 74 bp, Homo sapiens
tcaggccttagcgatgtgggagaagggatgggacaaatgaggagacccccagggaggaatctccggcgcagacc

SEQ ID NO: 74154 - DNA, 70 bp, Homo sapiens
atgtgggagaagggatgggacaaatgaggagacccccagggaggaatctccggcgcagaccccgatcccg

SEQ ID NO: 74155 - DNA, 72 bp, Homo sapiens
ggatgggacaaatgaggagacccccagggaggaatctccggcgcagaccccgatcccggctgcgggtcacta

SEQ ID NO: 74156 - DNA, 71 bp, Homo sapiens
acaaatgaggagacccccagggaggaatctccggcgcagaccccgatcccggctgcgggtcactagtgtaa

SEQ ID NO: 74157 - DNA, 71 bp, Homo sapiens
acccccagggaggaatctccggcgcagaccccgatcccggctgcgggtcactagtgtaaggatggagtaca

SEQ ID NO: 74158 - DNA, 75 bp, Homo sapiens
aggaatctccggcgcagaccccgatcccggctgcgggtcactagtgtaaggatggagtacaggagatagagagta

SEQ ID NO: 74159 - DNA, 75 bp, Homo sapiens
tccggcgcagaccccgatcccggctgcgggtcactagtgtaaggatggagtacaggagatagagagtaacctaca

SEQ ID NO: 74160 - DNA, 80 bp, Homo sapiens
atgatgaagagggcttgaccttctcccctctgctgactttgaatctgaaggtctcagaccagaatgacagagtggttgag

SEQ ID NO: 74161 - DNA, 81 bp, Homo sapiens
ttgaccttctcccctctgctgactttgaatctgaaggtctcagaccagaatgacagagtggttgagtgccagctacagacc

SEQ ID NO: 74162 - DNA, 83 bp, Homo sapiens
tcccctctgctgactttgaatctgaaggtctcagaccagaatgacagagtggttgagtgccagctacagacccataacagcaa

SEQ ID NO: 74163 - DNA, 83 bp, Homo sapiens
tgactttgaatctgaaggtctcagaccagaatgacagagtggttgagtgccagctacagacccataacagcaagatggtgacc

SEQ ID NO: 74164 - DNA, 81 bp, Homo sapiens
tctgaaggtctcagaccagaatgacagagtggttgagtgccagctacagacccataacagcaagatggtgaccttccgatt

SEQ ID NO: 74165 - DNA, 84 bp, Homo sapiens
tctcagaccagaatgacagagtggttgagtgccagctacagacccataacagcaagatggtgaccttccgatttgatctggatg

SEQ ID NO: 74166 - DNA, 81 bp, Homo sapiens
agaatgacagagtggttgagtgccagctacagacccataacagcaagatggtgaccttccgatttgatctggatggggaca

SEQ ID NO: 74167 - DNA, 79 bp, Homo sapiens
gttgagtgccagctacagacccataacagcaagatggtgaccttccgatttgatctggatggggacagcccggaagaga

SEQ ID NO: 74168 - DNA, 81 bp, Homo sapiens
agctacagacccataacagcaagatggtgaccttccgatttgatctggatggggacagcccggaagagattgcagctgcca

SEQ ID NO: 74169 - DNA, 81 bp, Homo sapiens
agacccataacagcaagatggtgaccttccgatttgatctggatggggacagcccggaagagattgcagctgccatggtga

SEQ ID NO: 74170 - DNA, 80 bp, Homo sapiens
acagcaagatggtgaccttccgatttgatctggatggggacagcccggaagagattgcagctgccatggtgagggggaga

SEQ ID NO: 74171 - DNA, 80 bp, Homo sapiens
accttccgatttgatctggatggggacagcccggaagagattgcagctgccatggtgagggggagagagatgaggacaga

SEQ ID NO: 74172 - DNA, 81 bp, Homo sapiens
atttgatctggatggggacagcccggaagagattgcagctgccatggtgagggggagagagatgaggacagagtgtttgga

SEQ ID NO: 74173 - DNA, 76 bp, Homo sapiens
atgagtgagataacaagctctccctccccatcctgttgaccctcgcaaggtatataacgagttcattctgccttcg

SEQ ID NO: 74174 - DNA, 75 bp, Homo sapiens
ataacaagctctccctccccatcctgttgaccctcgcaaggtatataacgagttcattctgccttcggagcgaga

SEQ ID NO: 74175 - DNA, 76 bp, Homo sapiens
ctccccatcctgttgaccctcgcaaggtatataacgagttcattctgccttcggagcgagatggatttctcagacg

SEQ ID NO: 74176 - DNA, 76 bp, Homo sapiens
atcctgttgaccctcgcaaggtatataacgagttcattctgccttcggagcgagatggatttctcagacggattcg

SEQ ID NO: 74177 - DNA, 75 bp, Homo sapiens
accctcgcaaggtatataacgagttcattctgccttcggagcgagatggatttctcagacggattcgggagatta

SEQ ID NO: 74178 - DNA, 79 bp, Homo sapiens
tatataacgagttcattctgccttcggagcgagatggatttctcagacggattcgggagattatccagcgagtggagac

SEQ ID NO: 74179 - DNA, 78 bp, Homo sapiens
agttcattctgccttcggagcgagatggatttctcagacggattcgggagattatccagcgagtggagaccctgttga

SEQ ID NO: 74180 - DNA, 77 bp, Homo sapiens
ccttcggagcgagatggatttctcagacggattcgggagattatccagcgagtggagaccctgttgaagagagacac

SEQ ID NO: 74181 - DNA, 77 bp, Homo sapiens
atggatttctcagacggattcgggagattatccagcgagtggagaccctgttgaagagagacactggccccatggag

SEQ ID NO: 74182 - DNA, 80 bp, Homo sapiens
tttctcagacggattcgggagattatccagcgagtggagaccctgttgaagagagacactggccccatggaggctgctga

SEQ ID NO: 74183 - DNA, 78 bp, Homo sapiens
attcgggagattatccagcgagtggagaccctgttgaagagagacactggccccatggaggctgctgaagacacccta

SEQ ID NO: 74184 - DNA, 77 bp, Homo sapiens
attatccagcgagtggagaccctgttgaagagagacactggccccatggaggctgctgaagacaccctaagccccca

SEQ ID NO: 74185 - DNA, 75 bp, Homo sapiens
agtggagaccctgttgaagagagacactggccccatggaggctgctgaagacaccctaagcccccaggtcagacc

SEQ ID NO: 74186 - DNA, 76 bp, Homo sapiens
tgttgaagagagacactggccccatggaggctgctgaagacaccctaagcccccaggtcagaccccttggtggaca

SEQ ID NO: 74187 - DNA, 74 bp, Homo sapiens
agagacactggccccatggaggctgctgaagacaccctaagcccccaggtcagaccccttggtggacacttcca

SEQ ID NO: 74188 - DNA, 72 bp, Homo sapiens
catggaggctgctgaagacaccctaagcccccaggtcagaccccttggtggacacttccaggggaaatggac

SEQ ID NO: 74189 - DNA, 71 bp, Homo sapiens
aggctgctgaagacaccctaagcccccaggtcagaccccttggtggacacttccaggggaaatggactctc

SEQ ID NO: 74190 - DNA, 70 bp, Homo sapiens
agacaccctaagcccccaggtcagaccccttggtggacacttccaggggaaatggactctctgctccagg

SEQ ID NO: 74191 - DNA, 72 bp, Homo sapiens
cccaggtcagaccccttggtggacacttccaggggaaatggactctctgctccagggtttattactctctgc

SEQ ID NO: 74192 - DNA, 72 bp, Homo sapiens
agaccccttggtggacacttccaggggaaatggactctctgctccagggtttattactctctgccctcagcg

SEQ ID NO: 74193 - DNA, 72 bp, Homo sapiens
gacacttccaggggaaatggactctctgctccagggtttattactctctgccctcagcggtccccttggatt

SEQ ID NO: 74194 - DNA, 71 bp, Homo sapiens
ttccaggggaaatggactctctgctccagggtttattactctctgccctcagcggtccccttggatttaac

SEQ ID NO: 74195 - DNA, 74 bp, Homo sapiens
aatggactctctgctccagggtttattactctctgccctcagcggtccccttggatttaactcctcttcatctc

SEQ ID NO: 74196 - DNA, 71 bp, Homo sapiens
tccagggtttattactctctgccctcagcggtccccttggatttaactcctcttcatctctgggaccctaa

SEQ ID NO: 74197 - DNA, 71 bp, Homo sapiens
tttattactctctgccctcagcggtccccttggatttaactcctcttcatctctgggaccctaaaacagtg

SEQ ID NO: 74198 - DNA, 70 bp, Homo sapiens
tctgccctcagcggtccccttggatttaactcctcttcatctctgggaccctaaaacagtggcgcttttt

SEQ ID NO: 74199 - DNA, 65 bp, Homo sapiens
agcggtccccttggatttaactcctcttcatctctgggaccctaaaacagtggcgcttttttttt

SEQ ID NO: 74200 - DNA, 76 bp, Homo sapiens
accgtgcctggcctaaaacagtggctcttagcccatttgagaatatgatgaaagccatggactcttgttctagaaa

SEQ ID NO: 74201 - DNA, 76 bp, Homo sapiens
gcctggcctaaaacagtggctcttagcccatttgagaatatgatgaaagccatggactcttgttctagaaaacttg

SEQ ID NO: 74202 - DNA, 76 bp, Homo sapiens
gcctaaaacagtggctcttagcccatttgagaatatgatgaaagccatggactcttgttctagaaaacttgttcaa

SEQ ID NO: 74203 - DNA, 77 bp, Homo sapiens
aaacagtggctcttagcccatttgagaatatgatgaaagccatggactcttgttctagaaaacttgttcaatacata

SEQ ID NO: 74204 - DNA, 75 bp, Homo sapiens
ctcttagcccatttgagaatatgatgaaagccatggactcttgttctagaaaacttgttcaatacatacttttct

SEQ ID NO: 74205 - DNA, 75 bp, Homo sapiens
tcttagcccatttgagaatatgatgaaagccatggactcttgttctagaaaacttgttcaatacatacttttctt

SEQ ID NO: 74206 - DNA, 74 bp, Homo sapiens
gcccatttgagaatatgatgaaagccatggactcttgttctagaaaacttgttcaatacatacttttcttttaa

SEQ ID NO: 74207 - DNA, 74 bp, Homo sapiens
tttgagaatatgatgaaagccatggactcttgttctagaaaacttgttcaatacatacttttcttttaactcat

SEQ ID NO: 74208 - DNA, 73 bp, Homo sapiens
gaatatgatgaaagccatggactcttgttctagaaaacttgttcaatacatacttttcttttaactcattatt

SEQ ID NO: 74209 - DNA, 69 bp, Homo sapiens
aaagccatggactcttgttctagaaaacttgttcaatacatacttttcttttaactcattattttgaaa

SEQ ID NO: 74210 - DNA, 72 bp, Homo sapiens
attttgaaataatttcagacttgtggagagaagttgcaagaattatataaagaaccactggataccctttgc

SEQ ID NO: 74211 - DNA, 72 bp, Homo sapiens
aataatttcagacttgtggagagaagttgcaagaattatataaagaaccactggataccctttgcccagatt

SEQ ID NO: 74212 - DNA, 73 bp, Homo sapiens
acttgtggagagaagttgcaagaattatataaagaaccactggataccctttgcccagatttgccacttgtta

SEQ ID NO: 74213 - DNA, 71 bp, Homo sapiens
agagaagttgcaagaattatataaagaaccactggataccctttgcccagatttgccacttgttagtgttt

SEQ ID NO: 74214 - DNA, 70 bp, Homo sapiens
aagaattatataaagaaccactggataccctttgcccagatttgccacttgttagtgttttgccacctta

SEQ ID NO: 74215 - DNA, 74 bp, Homo sapiens
tataaagaaccactggataccctttgcccagatttgccacttgttagtgttttgccaccttagcgtcatcattg

SEQ ID NO: 74216 - DNA, 75 bp, Homo sapiens
actggataccctttgcccagatttgccacttgttagtgttttgccaccttagcgtcatcattgtctcttcctctc

SEQ ID NO: 74217 - DNA, 77 bp, Homo sapiens
tttgcccagatttgccacttgttagtgttttgccaccttagcgtcatcattgtctcttcctctcccctctgtatgtg

SEQ ID NO: 74218 - DNA, 81 bp, Homo sapiens
ttgccacttgttagtgttttgccaccttagcgtcatcattgtctcttcctctcccctctgtatgtgtgcatacataatata

SEQ ID NO: 74219 - DNA, 78 bp, Homo sapiens
ttgttagtgttttgccaccttagcgtcatcattgtctcttcctctcccctctgtatgtgtgcatacataatatatttt

SEQ ID NO: 74220 - DNA, 77 bp, Homo sapiens
caccttagcgtcatcattgtctcttcctctcccctctgtatgtgtgcatacataatatatttttcggaaccacttaa

SEQ ID NO: 74221 - DNA, 76 bp, Homo sapiens
gtcatcattgtctcttcctctcccctctgtatgtgtgcatacataatatatttttcggaaccacttaagagtaagt

SEQ ID NO: 74222 - DNA, 76 bp, Homo sapiens
attgtctcttcctctcccctctgtatgtgtgcatacataatatatttttcggaaccacttaagagtaagttgcaga

SEQ ID NO: 74223 - DNA, 77 bp, Homo sapiens
tgtgtgcatacataatatatttttcggaaccacttaagagtaagttgcagacatcatgcccttttacctctatacat

SEQ ID NO: 74224 - DNA, 77 bp, Homo sapiens
tatatttttcggaaccacttaagagtaagttgcagacatcatgcccttttacctctatacatttcagcacatatgct

SEQ ID NO: 74225 - DNA, 79 bp, Homo sapiens
cacttaagagtaagttgcagacatcatgcccttttacctctatacatttcagcacatatgcttctgaatcccttgaaac

SEQ ID NO: 74226 - DNA, 78 bp, Homo sapiens
cttttacctctatacatttcagcacatatgcttctgaatcccttgaaactcatgtacagactcctataggttcatggg

SEQ ID NO: 74227 - DNA, 78 bp, Homo sapiens
ccggtctgacaccttccatctcagactgctcttccccactgtgactgcggactcctttttctgcctcaggaggagcca

SEQ ID NO: 74228 - DNA, 79 bp, Homo sapiens
acaccttccatctcagactgctcttccccactgtgactgcggactcctttttctgcctcaggaggagccagcaccatta

SEQ ID NO: 74229 - DNA, 80 bp, Homo sapiens
atctcagactgctcttccccactgtgactgcggactcctttttctgcctcaggaggagccagcaccattacctgccctgc

SEQ ID NO: 74230 - DNA, 75 bp, Homo sapiens
tcttccccactgtgactgcggactcctttttctgcctcaggaggagccagcaccattacctgccctgcccgtccc

SEQ ID NO: 74231 - DNA, 74 bp, Homo sapiens
actgtgactgcggactcctttttctgcctcaggaggagccagcaccattacctgccctgcccgtccccctccca

SEQ ID NO: 74232 - DNA, 72 bp, Homo sapiens
actcctttttctgcctcaggaggagccagcaccattacctgccctgcccgtccccctcccagacccatccaa

SEQ ID NO: 74233 - DNA, 75 bp, Homo sapiens
ttttctgcctcaggaggagccagcaccattacctgccctgcccgtccccctcccagacccatccaatggtatgta

SEQ ID NO: 74234 - DNA, 74 bp, Homo sapiens
aggagccagcaccattacctgccctgcccgtccccctcccagacccatccaatggtatgtactgagttgtgtcc

SEQ ID NO: 74235 - DNA, 74 bp, Homo sapiens
accattacctgccctgcccgtccccctcccagacccatccaatggtatgtactgagttgtgtccttgctcatcc

SEQ ID NO: 74236 - DNA, 74 bp, Homo sapiens
tacctgccctgcccgtccccctcccagacccatccaatggtatgtactgagttgtgtccttgctcatcccaacc

SEQ ID NO: 74237 - DNA, 73 bp, Homo sapiens
tccccctcccagacccatccaatggtatgtactgagttgtgtccttgctcatcccaacccctggggttgctcc

SEQ ID NO: 74238 - DNA, 74 bp, Homo sapiens
tcccagacccatccaatggtatgtactgagttgtgtccttgctcatcccaacccctggggttgctcctgggaag

SEQ ID NO: 74239 - DNA, 75 bp, Homo sapiens
tgctcatcccaacccctggggttgctcctgggaagggcatagggcatgtgggactgtggtctcaacataccctcc

SEQ ID NO: 74240 - DNA, 78 bp, Homo sapiens
aagggcatagggcatgtgggactgtggtctcaacataccctccttcccagaagagctccagagcagcacctccctgga

SEQ ID NO: 74241 - DNA, 81 bp, Homo sapiens
atgtgggactgtggtctcaacataccctccttcccagaagagctccagagcagcacctccctggagcacaggagctggaca

SEQ ID NO: 74242 - DNA, 80 bp, Homo sapiens
actgtggtctcaacataccctccttcccagaagagctccagagcagcacctccctggagcacaggagctggacagccttc

SEQ ID NO: 74243 - DNA, 78 bp, Homo sapiens
aacataccctccttcccagaagagctccagagcagcacctccctggagcacaggagctggacagccttctccacctcc

SEQ ID NO: 74244 - DNA, 82 bp, Homo sapiens
ttcccagaagagctccagagcagcacctccctggagcacaggagctggacagccttctccacctcctcatcttctcctggaa

SEQ ID NO: 74245 - DNA, 80 bp, Homo sapiens
agctccagagcagcacctccctggagcacaggagctggacagccttctccacctcctcatcttctcctggaactcctttg

SEQ ID NO: 74246 - DNA, 78 bp, Homo sapiens
agcacctccctggagcacaggagctggacagccttctccacctcctcatcttctcctggaactcctttgtctcctgga

SEQ ID NO: 74247 - DNA, 76 bp, Homo sapiens
tggagcacaggagctggacagccttctccacctcctcatcttctcctggaactcctttgtctcctggaaacccatt

SEQ ID NO: 74248 - DNA, 66 bp, Homo sapiens
acctcctcatcttctcctggaactcctttgtctcctggaaacccattttcccctggaacccccatt

SEQ ID NO: 74249 - DNA, 65 bp, Homo sapiens
atcttctcctggaactcctttgtctcctggaaacccattttcccctggaacccccatttccccag

SEQ ID NO: 74250 - DNA, 64 bp, Homo sapiens
aactcctttgtctcctggaaacccattttcccctggaacccccatttccccaggtcccatcttc

SEQ ID NO: 74251 - DNA, 66 bp, Homo sapiens
ttgtctcctggaaacccattttcccctggaacccccatttccccaggtcccatcttccccatcact

SEQ ID NO: 74252 - DNA, 69 bp, Homo sapiens
tttcccctggaacccccatttccccaggtcccatcttccccatcacttctcccccatgtcatcccagcc

SEQ ID NO: 74253 - DNA, 70 bp, Homo sapiens
cccatttccccaggtcccatcttccccatcacttctcccccatgtcatcccagcccctccccattctccc

SEQ ID NO: 74254 - DNA, 70 bp, Homo sapiens
aggtcccatcttccccatcacttctcccccatgtcatcccagcccctccccattctcccccatttcttcc

SEQ ID NO: 74255 - DNA, 71 bp, Homo sapiens
atcttccccatcacttctcccccatgtcatcccagcccctccccattctcccccatttcttcccaggtctc

SEQ ID NO: 74256 - DNA, 71 bp, Homo sapiens
atcacttctcccccatgtcatcccagcccctccccattctcccccatttcttcccaggtctcctcaaatcc

SEQ ID NO: 74257 - DNA, 71 bp, Homo sapiens
cccatgtcatcccagcccctccccattctcccccatttcttcccaggtctcctcaaatccctctccacacc

SEQ ID NO: 74258 - DNA, 70 bp, Homo sapiens
agcccctccccattctcccccatttcttcccaggtctcctcaaatccctctccacaccccaccagctctc

SEQ ID NO: 74259 - DNA, 73 bp, Homo sapiens
cattctcccccatttcttcccaggtctcctcaaatccctctccacaccccaccagctctccacttccattctc

SEQ ID NO: 74260 - DNA, 75 bp, Homo sapiens
catttcttcccaggtctcctcaaatccctctccacaccccaccagctctccacttccattctcctccagcacacc

SEQ ID NO: 74261 - DNA, 74 bp, Homo sapiens
caggtctcctcaaatccctctccacaccccaccagctctccacttccattctcctccagcacacccgagtttcc

SEQ ID NO: 74262 - DNA, 73 bp, Homo sapiens
tcaaatccctctccacaccccaccagctctccacttccattctcctccagcacacccgagtttccggtcccac

SEQ ID NO: 74263 - DNA, 75 bp, Homo sapiens
tccacaccccaccagctctccacttccattctcctccagcacacccgagtttccggtcccactctctcagtgtcc

SEQ ID NO: 74264 - DNA, 74 bp, Homo sapiens
accagctctccacttccattctcctccagcacacccgagtttccggtcccactctctcagtgtccctggagttc

SEQ ID NO: 74265 - DNA, 74 bp, Homo sapiens
tctccacttccattctcctccagcacacccgagtttccggtcccactctctcagtgtccctggagttctctccc

SEQ ID NO: 74266 - DNA, 72 bp, Homo sapiens
attctcctccagcacacccgagtttccggtcccactctctcagtgtccctggagttctctccccacgacttc

SEQ ID NO: 74267 - DNA, 69 bp, Homo sapiens
acacccgagtttccggtcccactctctcagtgtccctggagttctctccccacgacttctccacctacg

SEQ ID NO: 74268 - DNA, 71 bp, Homo sapiens
ctggagttctctccccacgacttctccacctacgttctctcccacttgttctcaggtcactcttagttccc

SEQ ID NO: 74269 - DNA, 69 bp, Homo sapiens
tacgttctctcccacttgttctcaggtcactcttagttcccctttctttcctccgtgcccctccacttc

SEQ ID NO: 74270 - DNA, 67 bp, Homo sapiens
cccacttgttctcaggtcactcttagttcccctttctttcctccgtgcccctccacttcttccttcc

SEQ ID NO: 74271 - DNA, 68 bp, Homo sapiens
ctcaggtcactcttagttcccctttctttcctccgtgcccctccacttcttccttcccctccaccaca

SEQ ID NO: 74272 - DNA, 68 bp, Homo sapiens
tcttagttcccctttctttcctccgtgcccctccacttcttccttcccctccaccacagcagcccctc

SEQ ID NO: 74273 - DNA, 74 bp, Homo sapiens
tccgtgcccctccacttcttccttcccctccaccacagcagcccctctcctttctctggctagtgccttctcac

SEQ ID NO: 74274 - DNA, 78 bp, Homo sapiens
acttcttccttcccctccaccacagcagcccctctcctttctctggctagtgccttctcactggctgtgatgactgtg

SEQ ID NO: 74275 - DNA, 79 bp, Homo sapiens
ttcccctccaccacagcagcccctctcctttctctggctagtgccttctcactggctgtgatgactgtggcccagtccc

SEQ ID NO: 74276 - DNA, 81 bp, Homo sapiens
ccaccacagcagcccctctcctttctctggctagtgccttctcactggctgtgatgactgtggcccagtccctgctgtccc

SEQ ID NO: 74277 - DNA, 80 bp, Homo sapiens
ctctcctttctctggctagtgccttctcactggctgtgatgactgtggcccagtccctgctgtccccctcacctgggctc

SEQ ID NO: 74278 - DNA, 79 bp, Homo sapiens
tttctctggctagtgccttctcactggctgtgatgactgtggcccagtccctgctgtccccctcacctgggctcctttc

SEQ ID NO: 74279 - DNA, 78 bp, Homo sapiens
ctagtgccttctcactggctgtgatgactgtggcccagtccctgctgtccccctcacctgggctcctttcccagtctc

SEQ ID NO: 74280 - DNA, 77 bp, Homo sapiens
ctcactggctgtgatgactgtggcccagtccctgctgtccccctcacctgggctcctttcccagtctcctccagccc

SEQ ID NO: 74281 - DNA, 75 bp, Homo sapiens
tgatgactgtggcccagtccctgctgtccccctcacctgggctcctttcccagtctcctccagcccctcctagtc

SEQ ID NO: 74282 - DNA, 70 bp, Homo sapiens
cagtccctgctgtccccctcacctgggctcctttcccagtctcctccagcccctcctagtcccctcccta

SEQ ID NO: 74283 - DNA, 69 bp, Homo sapiens
ctgtccccctcacctgggctcctttcccagtctcctccagcccctcctagtcccctccctagcctgccc

SEQ ID NO: 74284 - DNA, 68 bp, Homo sapiens
ccctcacctgggctcctttcccagtctcctccagcccctcctagtcccctccctagcctgccccttcc

SEQ ID NO: 74285 - DNA, 67 bp, Homo sapiens
ctttcccagtctcctccagcccctcctagtcccctccctagcctgccccttccccctcccgttgctc

SEQ ID NO: 74286 - DNA, 66 bp, Homo sapiens
ccctcctagtcccctccctagcctgccccttccccctcccgttgctcctggtggccaggaaagccc

SEQ ID NO: 74287 - DNA, 67 bp, Homo sapiens
ctagtcccctccctagcctgccccttccccctcccgttgctcctggtggccaggaaagcccttcacc

SEQ ID NO: 74288 - DNA, 72 bp, Homo sapiens
tagcctgccccttccccctcccgttgctcctggtggccaggaaagcccttcaccccacacagctgaggtgga

SEQ ID NO: 74289 - DNA, 74 bp, Homo sapiens
tccccctcccgttgctcctggtggccaggaaagcccttcaccccacacagctgaggtggagagtgaggtgagta

SEQ ID NO: 74290 - DNA, 75 bp, Homo sapiens
gttgctcctggtggccaggaaagcccttcaccccacacagctgaggtggagagtgaggtgagtagaaaaccaaga

SEQ ID NO: 74291 - DNA, 75 bp, Homo sapiens
gtggccaggaaagcccttcaccccacacagctgaggtggagagtgaggtgagtagaaaaccaagagggatgatta

SEQ ID NO: 74292 - DNA, 78 bp, Homo sapiens
ttcaccccacacagctgaggtggagagtgaggtgagtagaaaaccaagagggatgattagggagactccactctgcac

SEQ ID NO: 74293 - DNA, 77 bp, Homo sapiens
tggagagtgaggtgagtagaaaaccaagagggatgattagggagactccactctgcactcttcccttctcatggccc

SEQ ID NO: 74294 - DNA, 73 bp, Homo sapiens
ggtgagtagaaaaccaagagggatgattagggagactccactctgcactcttcccttctcatggccccccact

SEQ ID NO: 74295 - DNA, 72 bp, Homo sapiens
aaaaccaagagggatgattagggagactccactctgcactcttcccttctcatggccccccactttctaggc

SEQ ID NO: 74296 - DNA, 74 bp, Homo sapiens
agggatgattagggagactccactctgcactcttcccttctcatggccccccactttctaggcctcaccacctc

SEQ ID NO: 74297 - DNA, 74 bp, Homo sapiens
agggagactccactctgcactcttcccttctcatggccccccactttctaggcctcaccacctcctgctcggcc

SEQ ID NO: 74298 - DNA, 72 bp, Homo sapiens
actctgcactcttcccttctcatggccccccactttctaggcctcaccacctcctgctcggcccctcccagg

SEQ ID NO: 74299 - DNA, 71 bp, Homo sapiens
tcttcccttctcatggccccccactttctaggcctcaccacctcctgctcggcccctcccaggggaagcca

SEQ ID NO: 74300 - DNA, 73 bp, Homo sapiens
tcatggccccccactttctaggcctcaccacctcctgctcggcccctcccaggggaagccaggctggcgccca

SEQ ID NO: 74301 - DNA, 73 bp, Homo sapiens
tttctaggcctcaccacctcctgctcggcccctcccaggggaagccaggctggcgcccatctctgaaggtaag

SEQ ID NO: 74302 - DNA, 75 bp, Homo sapiens
tcaccacctcctgctcggcccctcccaggggaagccaggctggcgcccatctctgaaggtaaggcctctgaccac

SEQ ID NO: 74303 - DNA, 75 bp, Homo sapiens
tcctgctcggcccctcccaggggaagccaggctggcgcccatctctgaaggtaaggcctctgaccactgaccttc

SEQ ID NO: 74304 - DNA, 75 bp, Homo sapiens
ctcccaggggaagccaggctggcgcccatctctgaaggtaaggcctctgaccactgaccttcccctgccattatc

SEQ ID NO: 74305 - DNA, 76 bp, Homo sapiens
aagccaggctggcgcccatctctgaaggtaaggcctctgaccactgaccttcccctgccattatccctactcactg

SEQ ID NO: 74306 - DNA, 76 bp, Homo sapiens
tgtcactgctctcctttcctcatgccttcttcctcgtcgccctacagagggaaagccgcagcttgttgggcgtttc

SEQ ID NO: 74307 - DNA, 73 bp, Homo sapiens
tcctttcctcatgccttcttcctcgtcgccctacagagggaaagccgcagcttgttgggcgtttccaagtgac

SEQ ID NO: 74308 - DNA, 73 bp, Homo sapiens
atgccttcttcctcgtcgccctacagagggaaagccgcagcttgttgggcgtttccaagtgacttcatccaag

SEQ ID NO: 74309 - DNA, 72 bp, Homo sapiens
ttcttcctcgtcgccctacagagggaaagccgcagcttgttgggcgtttccaagtgacttcatccaaggaac

SEQ ID NO: 74310 - DNA, 73 bp, Homo sapiens
cctacagagggaaagccgcagcttgttgggcgtttccaagtgacttcatccaaggaaccggctgagcctcttc

SEQ ID NO: 74311 - DNA, 73 bp, Homo sapiens
agggaaagccgcagcttgttgggcgtttccaagtgacttcatccaaggaaccggctgagcctcttcccttgca

SEQ ID NO: 74312 - DNA, 75 bp, Homo sapiens
cgcagcttgttgggcgtttccaagtgacttcatccaaggaaccggctgagcctcttcccttgcagccaacatccc

SEQ ID NO: 74313 - DNA, 75 bp, Homo sapiens
tgggcgtttccaagtgacttcatccaaggaaccggctgagcctcttcccttgcagccaacatcccccactctctc

SEQ ID NO: 74314 - DNA, 75 bp, Homo sapiens
aagtgacttcatccaaggaaccggctgagcctcttcccttgcagccaacatcccccactctctctggttctccaa

SEQ ID NO: 74315 - DNA, 73 bp, Homo sapiens
atccaaggaaccggctgagcctcttcccttgcagccaacatcccccactctctctggttctccaaaaccttca

SEQ ID NO: 74316 - DNA, 74 bp, Homo sapiens
ctgagcctcttcccttgcagccaacatcccccactctctctggttctccaaaaccttcaacccctcagctcact

SEQ ID NO: 74317 - DNA, 77 bp, Homo sapiens
ttcccttgcagccaacatcccccactctctctggttctccaaaaccttcaacccctcagctcacttcagagagctca

SEQ ID NO: 74318 - DNA, 77 bp, Homo sapiens
ccaacatcccccactctctctggttctccaaaaccttcaacccctcagctcacttcagagagctcagatacagagga

SEQ ID NO: 74319 - DNA, 79 bp, Homo sapiens
cccactctctctggttctccaaaaccttcaacccctcagctcacttcagagagctcagatacagaggacagtgctggag

SEQ ID NO: 74320 - DNA, 80 bp, Homo sapiens
tggttctccaaaaccttcaacccctcagctcacttcagagagctcagatacagaggacagtgctggaggcgggccagaga

SEQ ID NO: 74321 - DNA, 78 bp, Homo sapiens
aaaaccttcaacccctcagctcacttcagagagctcagatacagaggacagtgctggaggcgggccagagaccaggga

SEQ ID NO: 74322 - DNA, 84 bp, Homo sapiens
ttcaacccctcagctcacttcagagagctcagatacagaggacagtgctggaggcgggccagagaccagggaagctctggctga

SEQ ID NO: 74323 - DNA, 88 bp, Homo sapiens
tcacttcagagagctcagatacagaggacagtgctggaggcgggccagagaccagggaagctctggctgagagcgaccgtgcagctga

SEQ ID NO: 74324 - DNA, 84 bp, Homo sapiens
agagagctcagatacagaggacagtgctggaggcgggccagagaccagggaagctctggctgagagcgaccgtgcagctgaggg

SEQ ID NO: 74325 - DNA, 81 bp, Homo sapiens
agatacagaggacagtgctggaggcgggccagagaccagggaagctctggctgagagcgaccgtgcagctgagggtctggg

SEQ ID NO: 74326 - DNA, 80 bp, Homo sapiens
agtgctggaggcgggccagagaccagggaagctctggctgagagcgaccgtgcagctgagggtctgggggctggagttga

SEQ ID NO: 74327 - DNA, 78 bp, Homo sapiens
gggccagagaccagggaagctctggctgagagcgaccgtgcagctgagggtctgggggctggagttgaggaggaagga

SEQ ID NO: 74328 - DNA, 80 bp, Homo sapiens
agagaccagggaagctctggctgagagcgaccgtgcagctgagggtctgggggctggagttgaggaggaaggagatgatg

SEQ ID NO: 74329 - DNA, 78 bp, Homo sapiens
aagctctggctgagagcgaccgtgcagctgagggtctgggggctggagttgaggaggaaggagatgatgggaaggaac

SEQ ID NO: 74330 - DNA, 75 bp, Homo sapiens
tgagagcgaccgtgcagctgagggtctgggggctggagttgaggaggaaggagatgatgggaaggaaccccaagt

SEQ ID NO: 74331 - DNA, 68 bp, Homo sapiens
agggtctgggggctggagttgaggaggaaggagatgatgggaaggaaccccaagttgggggcagcccc

SEQ ID NO: 74332 - DNA, 71 bp, Homo sapiens
tggagttgaggaggaaggagatgatgggaaggaaccccaagttgggggcagcccccaacccctgagccatc

SEQ ID NO: 74333 - DNA, 69 bp, Homo sapiens
aggaaggagatgatgggaaggaaccccaagttgggggcagcccccaacccctgagccatcccagcccag

SEQ ID NO: 74334 - DNA, 72 bp, Homo sapiens
tgatgggaaggaaccccaagttgggggcagcccccaacccctgagccatcccagcccagtgtggatgaacta

SEQ ID NO: 74335 - DNA, 70 bp, Homo sapiens
aggaaccccaagttgggggcagcccccaacccctgagccatcccagcccagtgtggatgaactactccta

SEQ ID NO: 74336 - DNA, 74 bp, Homo sapiens
aagttgggggcagcccccaacccctgagccatcccagcccagtgtggatgaactactcctacagcagcctgtgt

SEQ ID NO: 74337 - DNA, 79 bp, Homo sapiens
cccccaacccctgagccatcccagcccagtgtggatgaactactcctacagcagcctgtgtttgagcagcgaggagtca

SEQ ID NO: 74338 - DNA, 82 bp, Homo sapiens
cctgagccatcccagcccagtgtggatgaactactcctacagcagcctgtgtttgagcagcgaggagtcagaaagcagtggg

SEQ ID NO: 74339 - DNA, 82 bp, Homo sapiens
atcccagcccagtgtggatgaactactcctacagcagcctgtgtttgagcagcgaggagtcagaaagcagtggggaagatga

SEQ ID NO: 74340 - DNA, 81 bp, Homo sapiens
agtgtggatgaactactcctacagcagcctgtgtttgagcagcgaggagtcagaaagcagtggggaagatgaggagttctg

SEQ ID NO: 74341 - DNA, 83 bp, Homo sapiens
aactactcctacagcagcctgtgtttgagcagcgaggagtcagaaagcagtggggaagatgaggagttctgggctgagctgca

SEQ ID NO: 74342 - DNA, 84 bp, Homo sapiens
tgtttgagcagcgaggagtcagaaagcagtggggaagatgaggagttctgggctgagctgcagagtcttcggcagaagtgagtc

SEQ ID NO: 74343 - DNA, 81 bp, Homo sapiens
gaggagtcagaaagcagtggggaagatgaggagttctgggctgagctgcagagtcttcggcagaagtgagtctcgggagga

SEQ ID NO: 74344 - DNA, 80 bp, Homo sapiens
agaaagcagtggggaagatgaggagttctgggctgagctgcagagtcttcggcagaagtgagtctcgggaggatggagga

SEQ ID NO: 74345 - DNA, 80 bp, Homo sapiens
agcaaggtgtgtggctagccctttcatgccctccgtgcatcctcaggcacttgtcagaggtggaaacactacagacacta

SEQ ID NO: 74346 - DNA, 79 bp, Homo sapiens
tgtggctagccctttcatgccctccgtgcatcctcaggcacttgtcagaggtggaaacactacagacactacagaaaaa

SEQ ID NO: 74347 - DNA, 77 bp, Homo sapiens
tagccctttcatgccctccgtgcatcctcaggcacttgtcagaggtggaaacactacagacactacagaaaaaagaa

SEQ ID NO: 74348 - DNA, 76 bp, Homo sapiens
ctccgtgcatcctcaggcacttgtcagaggtggaaacactacagacactacagaaaaaagaaattgaagatttgta

SEQ ID NO: 74349 - DNA, 74 bp, Homo sapiens
atcctcaggcacttgtcagaggtggaaacactacagacactacagaaaaaagaaattgaagatttgtacagccg

SEQ ID NO: 74350 - DNA, 73 bp, Homo sapiens
ggcacttgtcagaggtggaaacactacagacactacagaaaaaagaaattgaagatttgtacagccggctggg

SEQ ID NO: 74351 - DNA, 72 bp, Homo sapiens
agaggtggaaacactacagacactacagaaaaaagaaattgaagatttgtacagccggctggggaagcagcc

SEQ ID NO: 74352 - DNA, 70 bp, Homo sapiens
tacagacactacagaaaaaagaaattgaagatttgtacagccggctggggaagcagcccccaccgggtat

SEQ ID NO: 74353 - DNA, 69 bp, Homo sapiens
actacagaaaaaagaaattgaagatttgtacagccggctggggaagcagcccccaccgggtattgtggc

SEQ ID NO: 74354 - DNA, 75 bp, Homo sapiens
aaattgaagatttgtacagccggctggggaagcagcccccaccgggtattgtggccccagctgctatgctgtcca

SEQ ID NO: 74355 - DNA, 76 bp, Homo sapiens
aagatttgtacagccggctggggaagcagcccccaccgggtattgtggccccagctgctatgctgtccagccgcca

SEQ ID NO: 74356 - DNA, 77 bp, Homo sapiens
cggctggggaagcagcccccaccgggtattgtggccccagctgctatgctgtccagccgccagcgccgcctctccaa

SEQ ID NO: 74357 - DNA, 78 bp, Homo sapiens
aagcagcccccaccgggtattgtggccccagctgctatgctgtccagccgccagcgccgcctctccaagggcagcttc

SEQ ID NO: 74358 - DNA, 76 bp, Homo sapiens
cccaccgggtattgtggccccagctgctatgctgtccagccgccagcgccgcctctccaagggcagcttccccacc

SEQ ID NO: 74359 - DNA, 80 bp, Homo sapiens
tattgtggccccagctgctatgctgtccagccgccagcgccgcctctccaagggcagcttccccacctcccgccgcaaca

SEQ ID NO: 74360 - DNA, 82 bp, Homo sapiens
ctgctatgctgtccagccgccagcgccgcctctccaagggcagcttccccacctcccgccgcaacagcctacagcgctctga

SEQ ID NO: 74361 - DNA, 80 bp, Homo sapiens
atgctgtccagccgccagcgccgcctctccaagggcagcttccccacctcccgccgcaacagcctacagcgctctgagcc

SEQ ID NO: 74362 - DNA, 76 bp, Homo sapiens
ccgccagcgccgcctctccaagggcagcttccccacctcccgccgcaacagcctacagcgctctgagcccccaggc

SEQ ID NO: 74363 - DNA, 78 bp, Homo sapiens
ctctccaagggcagcttccccacctcccgccgcaacagcctacagcgctctgagcccccaggccctggtgagactgca

SEQ ID NO: 74364 - DNA, 77 bp, Homo sapiens
aagggcagcttccccacctcccgccgcaacagcctacagcgctctgagcccccaggccctggtgagactgcagtcac

SEQ ID NO: 74365 - DNA, 77 bp, Homo sapiens
acctcccgccgcaacagcctacagcgctctgagcccccaggccctggtgagactgcagtcacccagcttccatcttt

SEQ ID NO: 74366 - DNA, 76 bp, Homo sapiens
acctcccctttcctcacttagtgctctccttcccccatcctgctcccaggcatcatgcgaaggaactctctgagtg

SEQ ID NO: 74367 - DNA, 81 bp, Homo sapiens
ctttcctcacttagtgctctccttcccccatcctgctcccaggcatcatgcgaaggaactctctgagtggcagcagcaccg

SEQ ID NO: 74368 - DNA, 84 bp, Homo sapiens
ttagtgctctccttcccccatcctgctcccaggcatcatgcgaaggaactctctgagtggcagcagcaccggctcccaggagca

SEQ ID NO: 74369 - DNA, 83 bp, Homo sapiens
ccccatcctgctcccaggcatcatgcgaaggaactctctgagtggcagcagcaccggctcccaggagcagcgggcaagcaagg

SEQ ID NO: 74370 - DNA, 84 bp, Homo sapiens
tgctcccaggcatcatgcgaaggaactctctgagtggcagcagcaccggctcccaggagcagcgggcaagcaagggggtgacat

SEQ ID NO: 74371 - DNA, 80 bp, Homo sapiens
atcatgcgaaggaactctctgagtggcagcagcaccggctcccaggagcagcgggcaagcaagggggtgacattcgccgg

SEQ ID NO: 74372 - DNA, 77 bp, Homo sapiens
aggaactctctgagtggcagcagcaccggctcccaggagcagcgggcaagcaagggggtgacattcgccggggatgt

SEQ ID NO: 74373 - DNA, 79 bp, Homo sapiens
agtggcagcagcaccggctcccaggagcagcgggcaagcaagggggtgacattcgccggggatgttggcaggatggtga

SEQ ID NO: 74374 - DNA, 75 bp, Homo sapiens
agcaccggctcccaggagcagcgggcaagcaagggggtgacattcgccggggatgttggcaggatggtgagggcg

SEQ ID NO: 74375 - DNA, 74 bp, Homo sapiens
ctcccaggagcagcgggcaagcaagggggtgacattcgccggggatgttggcaggatggtgagggcgggcccaa

SEQ ID NO: 74376 - DNA, 71 bp, Homo sapiens
agcgggcaagcaagggggtgacattcgccggggatgttggcaggatggtgagggcgggcccaagggaggga

SEQ ID NO: 74377 - DNA, 71 bp, Homo sapiens
aagcaagggggtgacattcgccggggatgttggcaggatggtgagggcgggcccaagggagggagagccca

SEQ ID NO: 74378 - DNA, 72 bp, Homo sapiens
ttcctcccaccttggaggtttcttcatcactttttcttttccctccagtgaattcagaacagaagccatgta

SEQ ID NO: 74379 - DNA, 71 bp, Homo sapiens
accttggaggtttcttcatcactttttcttttccctccagtgaattcagaacagaagccatgtatctcccc

SEQ ID NO: 74380 - DNA, 73 bp, Homo sapiens
gtttcttcatcactttttcttttccctccagtgaattcagaacagaagccatgtatctcccccacaccagggc

SEQ ID NO: 74381 - DNA, 75 bp, Homo sapiens
tttcttttccctccagtgaattcagaacagaagccatgtatctcccccacaccagggcccaccatggagcttgtg

SEQ ID NO: 74382 - DNA, 78 bp, Homo sapiens
ttccctccagtgaattcagaacagaagccatgtatctcccccacaccagggcccaccatggagcttgtgttctcagaa

SEQ ID NO: 74383 - DNA, 80 bp, Homo sapiens
agaagccatgtatctcccccacaccagggcccaccatggagcttgtgttctcagaatctgatgctttctgatcaacaaaa

SEQ ID NO: 74384 - DNA, 81 bp, Homo sapiens
atgtatctcccccacaccagggcccaccatggagcttgtgttctcagaatctgatgctttctgatcaacaaaactgagcaa

SEQ ID NO: 74385 - DNA, 80 bp, Homo sapiens
accagggcccaccatggagcttgtgttctcagaatctgatgctttctgatcaacaaaactgagcaaggaagatcccaaca

SEQ ID NO: 74386 - DNA, 80 bp, Homo sapiens
ccaccatggagcttgtgttctcagaatctgatgctttctgatcaacaaaactgagcaaggaagatcccaacactgaaggg

SEQ ID NO: 74387 - DNA, 78 bp, Homo sapiens
agcttgtgttctcagaatctgatgctttctgatcaacaaaactgagcaaggaagatcccaacactgaaggggtagaag

SEQ ID NO: 74388 - DNA, 77 bp, Homo sapiens
ttctcagaatctgatgctttctgatcaacaaaactgagcaaggaagatcccaacactgaaggggtagaaggccaggg

SEQ ID NO: 74389 - DNA, 75 bp, Homo sapiens
atgctttctgatcaacaaaactgagcaaggaagatcccaacactgaaggggtagaaggccaggggggcatggaga

SEQ ID NO: 74390 - DNA, 76 bp, Homo sapiens
tcaacaaaactgagcaaggaagatcccaacactgaaggggtagaaggccaggggggcatggagagtgcagctccat

SEQ ID NO: 74391 - DNA, 77 bp, Homo sapiens
actgagcaaggaagatcccaacactgaaggggtagaaggccaggggggcatggagagtgcagctccattatagtgaa

SEQ ID NO: 74392 - DNA, 77 bp, Homo sapiens
agatcccaacactgaaggggtagaaggccaggggggcatggagagtgcagctccattatagtgaagagccaaacata

SEQ ID NO: 74393 - DNA, 77 bp, Homo sapiens
aacactgaaggggtagaaggccaggggggcatggagagtgcagctccattatagtgaagagccaaacatatgtgaac

SEQ ID NO: 74394 - DNA, 81 bp, Homo sapiens
ggtagaaggccaggggggcatggagagtgcagctccattatagtgaagagccaaacatatgtgaactgtttgctgtgtgga

SEQ ID NO: 74395 - DNA, 82 bp, Homo sapiens
gggggcatggagagtgcagctccattatagtgaagagccaaacatatgtgaactgtttgctgtgtggaggtgttagttctgc

SEQ ID NO: 74396 - DNA, 83 bp, Homo sapiens
agagtgcagctccattatagtgaagagccaaacatatgtgaactgtttgctgtgtggaggtgttagttctgctgcctaccatc

SEQ ID NO: 74397 - DNA, 83 bp, Homo sapiens
tccattatagtgaagagccaaacatatgtgaactgtttgctgtgtggaggtgttagttctgctgcctaccatcttcatctcta

SEQ ID NO: 74398 - DNA, 83 bp, Homo sapiens
tatagtgaagagccaaacatatgtgaactgtttgctgtgtggaggtgttagttctgctgcctaccatcttcatctctagcacc

SEQ ID NO: 74399 - DNA, 81 bp, Homo sapiens
atgtgaactgtttgctgtgtggaggtgttagttctgctgcctaccatcttcatctctagcacctcccctgccaagagtcaa

SEQ ID NO: 74400 - DNA, 80 bp, Homo sapiens
tgtgtggaggtgttagttctgctgcctaccatcttcatctctagcacctcccctgccaagagtcaaccactaagcaatcc

SEQ ID NO: 74401 - DNA, 78 bp, Homo sapiens
gtgttagttctgctgcctaccatcttcatctctagcacctcccctgccaagagtcaaccactaagcaatcccacccaa

SEQ ID NO: 74402 - DNA, 79 bp, Homo sapiens
gttctgctgcctaccatcttcatctctagcacctcccctgccaagagtcaaccactaagcaatcccacccaagcctgga

SEQ ID NO: 74403 - DNA, 79 bp, Homo sapiens
ctaccatcttcatctctagcacctcccctgccaagagtcaaccactaagcaatcccacccaagcctggatgcttctaga

SEQ ID NO: 74404 - DNA, 76 bp, Homo sapiens
atctctagcacctcccctgccaagagtcaaccactaagcaatcccacccaagcctggatgcttctagaggggccca

SEQ ID NO: 74405 - DNA, 75 bp, Homo sapiens
ccctgccaagagtcaaccactaagcaatcccacccaagcctggatgcttctagaggggcccactcccagctggga

SEQ ID NO: 74406 - DNA, 75 bp, Homo sapiens
aagagtcaaccactaagcaatcccacccaagcctggatgcttctagaggggcccactcccagctgggagagtgta

SEQ ID NO: 74407 - DNA, 77 bp, Homo sapiens
actaagcaatcccacccaagcctggatgcttctagaggggcccactcccagctgggagagtgtaggggatatgctca

SEQ ID NO: 74408 - DNA, 78 bp, Homo sapiens
tcccacccaagcctggatgcttctagaggggcccactcccagctgggagagtgtaggggatatgctcacaccacatta

SEQ ID NO: 74409 - DNA, 80 bp, Homo sapiens
tggatgcttctagaggggcccactcccagctgggagagtgtaggggatatgctcacaccacattagcagcaaccaataaa

SEQ ID NO: 74410 - DNA, 78 bp, Homo sapiens
cactcccagctgggagagtgtaggggatatgctcacaccacattagcagcaaccaataaaaatgctggaaacaagaac

SEQ ID NO: 74411 - DNA, 79 bp, Homo sapiens
agtgtaggggatatgctcacaccacattagcagcaaccaataaaaatgctggaaacaagaacgccgtgaatccatatgc

SEQ ID NO: 74412 - DNA, 76 bp, Homo sapiens
accacattagcagcaaccaataaaaatgctggaaacaagaacgccgtgaatccatatgccatgccttaggaattgg

SEQ ID NO: 74413 - DNA, 77 bp, Homo sapiens
gcgtgatctccgaagcccacagtacactcatccataaagtaggaaacactacaccctccagtgctgttagtagtgct

SEQ ID NO: 74414 - DNA, 74 bp, Homo sapiens
cgaagcccacagtacactcatccataaagtaggaaacactacaccctccagtgctgttagtagtgctttctact

SEQ ID NO: 74415 - DNA, 73 bp, Homo sapiens
acagtacactcatccataaagtaggaaacactacaccctccagtgctgttagtagtgctttctactttatggg

SEQ ID NO: 74416 - DNA, 75 bp, Homo sapiens
atccataaagtaggaaacactacaccctccagtgctgttagtagtgctttctactttatgggtgactgcactgtc

SEQ ID NO: 74417 - DNA, 75 bp, Homo sapiens
aaagtaggaaacactacaccctccagtgctgttagtagtgctttctactttatgggtgactgcactgtctgtctg

SEQ ID NO: 74418 - DNA, 77 bp, Homo sapiens
actacaccctccagtgctgttagtagtgctttctactttatgggtgactgcactgtctgtctgtccgtcggcgtgta

SEQ ID NO: 74419 - DNA, 79 bp, Homo sapiens
agtgctgttagtagtgctttctactttatgggtgactgcactgtctgtctgtccgtcggcgtgtactcttcaggctgcc

SEQ ID NO: 74420 - DNA, 78 bp, Homo sapiens
gttagtagtgctttctactttatgggtgactgcactgtctgtctgtccgtcggcgtgtactcttcaggctgcccaggc

SEQ ID NO: 74421 - DNA, 69 bp, Homo sapiens
ctaagcctcaattttctatttaatatttctcagaataaagaaaacagctcattttaaacaagaagttta

SEQ ID NO: 74422 - DNA, 68 bp, Homo sapiens
tttctatttaatatttctcagaataaagaaaacagctcattttaaacaagaagtttatttaaacaaca

SEQ ID NO: 74423 - DNA, 67 bp, Homo sapiens
atttaatatttctcagaataaagaaaacagctcattttaaacaagaagtttatttaaacaacaagac

SEQ ID NO: 74424 - DNA, 69 bp, Homo sapiens
aacacagctgttcaaagaattacaaatggtaatttttctaattaggagagatttttttacctgtgcagg

SEQ ID NO: 74425 - DNA, 71 bp, Homo sapiens
gctgttcaaagaattacaaatggtaatttttctaattaggagagatttttttacctgtgcaggtgtgtctg

SEQ ID NO: 74426 - DNA, 71 bp, Homo sapiens
tacaaatggtaatttttctaattaggagagatttttttacctgtgcaggtgtgtctgtttcattgattggt

SEQ ID NO: 74427 - DNA, 71 bp, Homo sapiens
atggtaatttttctaattaggagagatttttttacctgtgcaggtgtgtctgtttcattgattggttgccc

SEQ ID NO: 74428 - DNA, 77 bp, Homo sapiens
ttgcccgtcaaatcggaatctgatctgcctcattgacaatccctgaacgagaatttaaaagcaataaacagcattaa

SEQ ID NO: 74429 - DNA, 76 bp, Homo sapiens
aaatcggaatctgatctgcctcattgacaatccctgaacgagaatttaaaagcaataaacagcattaagagaaaca

SEQ ID NO: 74430 - DNA, 73 bp, Homo sapiens
ttaaaaatagttttattcagtggaagtacacatatgaattcctcacctgtcgttcacaataggctttcattag

SEQ ID NO: 74431 - DNA, 73 bp, Homo sapiens
aatagttttattcagtggaagtacacatatgaattcctcacctgtcgttcacaataggctttcattagtttac

SEQ ID NO: 74432 - DNA, 71 bp, Homo sapiens
ccatgacccccaccgcgcggcgaggcgaaggggccggcggcgagctcaccttgggcttttcgtcggccatg

SEQ ID NO: 74433 - DNA, 72 bp, Homo sapiens
accgcgcggcgaggcgaaggggccggcggcgagctcaccttgggcttttcgtcggccatggcgagcgccgga

SEQ ID NO: 74434 - DNA, 78 bp, Homo sapiens
cagcaccaggagcggcagaagaaggaggcggcagcggtggacgaggggagagggtgcgcgcacgtcgtgcgctccctc

SEQ ID NO: 74435 - DNA, 75 bp, Homo sapiens
ccaggagcggcagaagaaggaggcggcagcggtggacgaggggagagggtgcgcgcacgtcgtgcgctccctccc

SEQ ID NO: 74436 - DNA, 71 bp, Homo sapiens
agaagaaggaggcggcagcggtggacgaggggagagggtgcgcgcacgtcgtgcgctccctccccccaccc

SEQ ID NO: 74437 - DNA, 77 bp, Homo sapiens
gcagcggtggacgaggggagagggtgcgcgcacgtcgtgcgctccctccccccaccctgcgtgcgcgagcacgagta

SEQ ID NO: 74438 - DNA, 76 bp, Homo sapiens
tggacgaggggagagggtgcgcgcacgtcgtgcgctccctccccccaccctgcgtgcgcgagcacgagtagccgaa

SEQ ID NO: 74439 - DNA, 76 bp, Homo sapiens
agagggtgcgcgcacgtcgtgcgctccctccccccaccctgcgtgcgcgagcacgagtagccgaagcctcccattg

SEQ ID NO: 74440 - DNA, 76 bp, Homo sapiens
aatctataagaagcgtcgttcagcgagttcgctgctcagaagcgccgagagcgcggccgggacggttggagaagaa

SEQ ID NO: 74441 - DNA, 75 bp, Homo sapiens
ataagaagcgtcgttcagcgagttcgctgctcagaagcgccgagagcgcggccgggacggttggagaagaaggcg

SEQ ID NO: 74442 - DNA, 75 bp, Homo sapiens
tcgttcagcgagttcgctgctcagaagcgccgagagcgcggccgggacggttggagaagaaggcggctcccggaa

SEQ ID NO: 74443 - DNA, 71 bp, Homo sapiens
agttcgctgctcagaagcgccgagagcgcggccgggacggttggagaagaaggcggctcccggaaggggga

SEQ ID NO: 74444 - DNA, 70 bp, Homo sapiens
tcagaagcgccgagagcgcggccgggacggttggagaagaaggcggctcccggaagggggagagacaaac

SEQ ID NO: 74445 - DNA, 67 bp, Homo sapiens
agagcgcggccgggacggttggagaagaaggcggctcccggaagggggagagacaaactgccgtaac

SEQ ID NO: 74446 - DNA, 69 bp, Homo sapiens
gacggttggagaagaaggcggctcccggaagggggagagacaaactgccgtaacctctgccgttcagga

SEQ ID NO: 74447 - DNA, 68 bp, Homo sapiens
ttggagaagaaggcggctcccggaagggggagagacaaactgccgtaacctctgccgttcaggaaccc

SEQ ID NO: 74448 - DNA, 66 bp, Homo sapiens
gctcccggaagggggagagacaaactgccgtaacctctgccgttcaggaacccggttacttattta

SEQ ID NO: 74449 - DNA, 65 bp, Homo sapiens
aagggggagagacaaactgccgtaacctctgccgttcaggaacccggttacttatttattcgtta

SEQ ID NO: 74450 - DNA, 63 bp, Homo sapiens
agacaaactgccgtaacctctgccgttcaggaacccggttacttatttattcgttaccctttt

SEQ ID NO: 74451 - DNA, 62 bp, Homo sapiens
ccgtaacctctgccgttcaggaacccggttacttatttattcgttaccctttttcttcttcc

SEQ ID NO: 74452 - DNA, 60 bp, Homo sapiens
cgttcaggaacccggttacttatttattcgttaccctttttcttcttcctcccccaaaaa

SEQ ID NO: 74453 - DNA, 58 bp, Homo sapiens
gaacccggttacttatttattcgttaccctttttcttcttcctcccccaaaaaccttt

SEQ ID NO: 74454 - DNA, 58 bp, Homo sapiens
acttatttattcgttaccctttttcttcttcctcccccaaaaaccttttccttttccc

SEQ ID NO: 74455 - DNA, 57 bp, Homo sapiens
attcgttaccctttttcttcttcctcccccaaaaaccttttccttttcccttctttt

SEQ ID NO: 74456 - DNA, 62 bp, Homo sapiens
tttttttcctttttgggagctgaaaaatttccggtaagggaaagaagggctcctttcgctcc

SEQ ID NO: 74457 - DNA, 64 bp, Homo sapiens
ttcctttttgggagctgaaaaatttccggtaagggaaagaagggctcctttcgctccttatttc

SEQ ID NO: 74458 - DNA, 64 bp, Homo sapiens
agctgaaaaatttccggtaagggaaagaagggctcctttcgctccttatttccccgcctccttc

SEQ ID NO: 74459 - DNA, 62 bp, Homo sapiens
aatttccggtaagggaaagaagggctcctttcgctccttatttccccgcctccttccctccc

SEQ ID NO: 74460 - DNA, 62 bp, Homo sapiens
aagggaaagaagggctcctttcgctccttatttccccgcctccttccctcccccaccttccc

SEQ ID NO: 74461 - DNA, 63 bp, Homo sapiens
tcctttcgctccttatttccccgcctccttccctcccccaccttcccctcctccggctttttc

SEQ ID NO: 74462 - DNA, 61 bp, Homo sapiens
tttccccgcctccttccctcccccaccttcccctcctccggctttttcctcccaactcggg

SEQ ID NO: 74463 - DNA, 61 bp, Homo sapiens
ttccctcccccaccttcccctcctccggctttttcctcccaactcggggaggtccttcccg

SEQ ID NO: 74464 - DNA, 63 bp, Homo sapiens
accttcccctcctccggctttttcctcccaactcggggaggtccttcccggtggccgccctga

SEQ ID NO: 74465 - DNA, 68 bp, Homo sapiens
tttttcctcccaactcggggaggtccttcccggtggccgccctgacgaggtctgagcacctaggcgga

SEQ ID NO: 74466 - DNA, 70 bp, Homo sapiens
aactcggggaggtccttcccggtggccgccctgacgaggtctgagcacctaggcggaggcggcgcaggct

SEQ ID NO: 74467 - DNA, 72 bp, Homo sapiens
aggtccttcccggtggccgccctgacgaggtctgagcacctaggcggaggcggcgcaggctttttgtagtga

SEQ ID NO: 74468 - DNA, 75 bp, Homo sapiens
cggtggccgccctgacgaggtctgagcacctaggcggaggcggcgcaggctttttgtagtgaggtttgcgcctgc

SEQ ID NO: 74469 - DNA, 80 bp, Homo sapiens
ctgacgaggtctgagcacctaggcggaggcggcgcaggctttttgtagtgaggtttgcgcctgcgcagcgcgcctgcctc

SEQ ID NO: 74470 - DNA, 82 bp, Homo sapiens
tctgagcacctaggcggaggcggcgcaggctttttgtagtgaggtttgcgcctgcgcagcgcgcctgcctccgccatgcacg

SEQ ID NO: 74471 - DNA, 77 bp, Homo sapiens
cctaggcggaggcggcgcaggctttttgtagtgaggtttgcgcctgcgcagcgcgcctgcctccgccatgcacgggg

SEQ ID NO: 74472 - DNA, 76 bp, Homo sapiens
ggcggcgcaggctttttgtagtgaggtttgcgcctgcgcagcgcgcctgcctccgccatgcacgggggtggccccc

SEQ ID NO: 74473 - DNA, 72 bp, Homo sapiens
ctttttgtagtgaggtttgcgcctgcgcagcgcgcctgcctccgccatgcacgggggtggccccccctcggg

SEQ ID NO: 74474 - DNA, 77 bp, Homo sapiens
gtgaggtttgcgcctgcgcagcgcgcctgcctccgccatgcacgggggtggccccccctcgggggacagcgcatgcc

SEQ ID NO: 74475 - DNA, 81 bp, Homo sapiens
tgcgcagcgcgcctgcctccgccatgcacgggggtggccccccctcgggggacagcgcatgcccgctgcgcaccatcaaga

SEQ ID NO: 74476 - DNA, 75 bp, Homo sapiens
ccatgcacgggggtggccccccctcgggggacagcgcatgcccgctgcgcaccatcaagagagtccagttcggag

SEQ ID NO: 74477 - DNA, 78 bp, Homo sapiens
ccctcgggggacagcgcatgcccgctgcgcaccatcaagagagtccagttcggagtcctgagtccggatgaactggta

SEQ ID NO: 74478 - DNA, 74 bp, Homo sapiens
cgcaccatcaagagagtccagttcggagtcctgagtccggatgaactggtaagcggctctgtcctccccttccc

SEQ ID NO: 74479 - DNA, 70 bp, Homo sapiens
aagagagtccagttcggagtcctgagtccggatgaactggtaagcggctctgtcctccccttcccccctc

SEQ ID NO: 74480 - DNA, 73 bp, Homo sapiens
ctagaaactaggaacgctgttcagttgttggcctttctttctttgcagaagcgaatgtctgtgacggagggtg

SEQ ID NO: 74481 - DNA, 76 bp, Homo sapiens
ctaggaacgctgttcagttgttggcctttctttctttgcagaagcgaatgtctgtgacggagggtggcatcaaata

SEQ ID NO: 74482 - DNA, 77 bp, Homo sapiens
tgttcagttgttggcctttctttctttgcagaagcgaatgtctgtgacggagggtggcatcaaatacccagagacga

SEQ ID NO: 74483 - DNA, 76 bp, Homo sapiens
ctttctttctttgcagaagcgaatgtctgtgacggagggtggcatcaaatacccagagacgactgagggaggccgc

SEQ ID NO: 74484 - DNA, 76 bp, Homo sapiens
tttctttgcagaagcgaatgtctgtgacggagggtggcatcaaatacccagagacgactgagggaggccgccccaa

SEQ ID NO: 74485 - DNA, 73 bp, Homo sapiens
aagcgaatgtctgtgacggagggtggcatcaaatacccagagacgactgagggaggccgccccaagcttgggg

SEQ ID NO: 74486 - DNA, 75 bp, Homo sapiens
tctgtgacggagggtggcatcaaatacccagagacgactgagggaggccgccccaagcttggggggctgatggac

SEQ ID NO: 74487 - DNA, 73 bp, Homo sapiens
agggtggcatcaaatacccagagacgactgagggaggccgccccaagcttggggggctgatggacccgaggca

SEQ ID NO: 74488 - DNA, 70 bp, Homo sapiens
aaatacccagagacgactgagggaggccgccccaagcttggggggctgatggacccgaggcagggggtga

SEQ ID NO: 74489 - DNA, 72 bp, Homo sapiens
agacgactgagggaggccgccccaagcttggggggctgatggacccgaggcagggggtgattgagcggactg

SEQ ID NO: 74490 - DNA, 73 bp, Homo sapiens
aggccgccccaagcttggggggctgatggacccgaggcagggggtgattgagcggactggccgctgccaaaca

SEQ ID NO: 74491 - DNA, 75 bp, Homo sapiens
aagcttggggggctgatggacccgaggcagggggtgattgagcggactggccgctgccaaacatgtgcaggtaag

SEQ ID NO: 74492 - DNA, 76 bp, Homo sapiens
ggggggctgatggacccgaggcagggggtgattgagcggactggccgctgccaaacatgtgcaggtaagtgctggg

SEQ ID NO: 74493 - DNA, 74 bp, Homo sapiens
acccgaggcagggggtgattgagcggactggccgctgccaaacatgtgcaggtaagtgctggggggccaggtgg

SEQ ID NO: 74494 - DNA, 74 bp, Homo sapiens
gggtgattgagcggactggccgctgccaaacatgtgcaggtaagtgctggggggccaggtgggatcccaaaggg

SEQ ID NO: 74495 - DNA, 80 bp, Homo sapiens
tctgagatgagtgggagctgggaggaaagcactgggtgtgtgtcccacaggaaacatgacagagtgtcctggccactttg

SEQ ID NO: 74496 - DNA, 78 bp, Homo sapiens
gagctgggaggaaagcactgggtgtgtgtcccacaggaaacatgacagagtgtcctggccactttggccacattgaac

SEQ ID NO: 74497 - DNA, 77 bp, Homo sapiens
aggaaagcactgggtgtgtgtcccacaggaaacatgacagagtgtcctggccactttggccacattgaactggccaa

SEQ ID NO: 74498 - DNA, 79 bp, Homo sapiens
tgggtgtgtgtcccacaggaaacatgacagagtgtcctggccactttggccacattgaactggccaagcctgtgtttca

SEQ ID NO: 74499 - DNA, 77 bp, Homo sapiens
ccacaggaaacatgacagagtgtcctggccactttggccacattgaactggccaagcctgtgtttcacgtgggcttc

SEQ ID NO: 74500 - DNA, 77 bp, Homo sapiens
aacatgacagagtgtcctggccactttggccacattgaactggccaagcctgtgtttcacgtgggcttcctggtgaa

SEQ ID NO: 74501 - DNA, 76 bp, Homo sapiens
agtgtcctggccactttggccacattgaactggccaagcctgtgtttcacgtgggcttcctggtgaagacaatgaa

SEQ ID NO: 74502 - DNA, 74 bp, Homo sapiens
actttggccacattgaactggccaagcctgtgtttcacgtgggcttcctggtgaagacaatgaaagttttgcgc

SEQ ID NO: 74503 - DNA, 77 bp, Homo sapiens
acattgaactggccaagcctgtgtttcacgtgggcttcctggtgaagacaatgaaagttttgcgctgtgtctgcttc

SEQ ID NO: 74504 - DNA, 77 bp, Homo sapiens
aactggccaagcctgtgtttcacgtgggcttcctggtgaagacaatgaaagttttgcgctgtgtctgcttcttctgc

SEQ ID NO: 74505 - DNA, 79 bp, Homo sapiens
tgtgtttcacgtgggcttcctggtgaagacaatgaaagttttgcgctgtgtctgcttcttctgctccaaactgcttgtg

SEQ ID NO: 74506 - DNA, 78 bp, Homo sapiens
acgtgggcttcctggtgaagacaatgaaagttttgcgctgtgtctgcttcttctgctccaaactgcttgtggactctg

SEQ ID NO: 74507 - DNA, 80 bp, Homo sapiens
tcctggtgaagacaatgaaagttttgcgctgtgtctgcttcttctgctccaaactgcttgtggactctgtgagtggggaa

SEQ ID NO: 74508 - DNA, 79 bp, Homo sapiens
aatgaaagttttgcgctgtgtctgcttcttctgctccaaactgcttgtggactctgtgagtggggaacaggctctggtc

SEQ ID NO: 74509 - DNA, 80 bp, Homo sapiens
gttttgcgctgtgtctgcttcttctgctccaaactgcttgtggactctgtgagtggggaacaggctctggtctgggagcg

SEQ ID NO: 74510 - DNA, 75 bp, Homo sapiens
gggcagggggacagcttcaactgaccctgctctgccctgtccccagaacaacccaaagatcaaggatatcctggc

SEQ ID NO: 74511 - DNA, 75 bp, Homo sapiens
acagcttcaactgaccctgctctgccctgtccccagaacaacccaaagatcaaggatatcctggctaagtccaag

SEQ ID NO: 74512 - DNA, 75 bp, Homo sapiens
ttcaactgaccctgctctgccctgtccccagaacaacccaaagatcaaggatatcctggctaagtccaagggaca

SEQ ID NO: 74513 - DNA, 73 bp, Homo sapiens
ctctgccctgtccccagaacaacccaaagatcaaggatatcctggctaagtccaagggacagcccaagaagcg

SEQ ID NO: 74514 - DNA, 76 bp, Homo sapiens
tgtccccagaacaacccaaagatcaaggatatcctggctaagtccaagggacagcccaagaagcggctcacacatg

SEQ ID NO: 74515 - DNA, 74 bp, Homo sapiens
acccaaagatcaaggatatcctggctaagtccaagggacagcccaagaagcggctcacacatgtctacgacctt

SEQ ID NO: 74516 - DNA, 76 bp, Homo sapiens
aagatcaaggatatcctggctaagtccaagggacagcccaagaagcggctcacacatgtctacgacctttgcaagg

SEQ ID NO: 74517 - DNA, 75 bp, Homo sapiens
atatcctggctaagtccaagggacagcccaagaagcggctcacacatgtctacgacctttgcaagggcaaaaaca

SEQ ID NO: 74518 - DNA, 75 bp, Homo sapiens
taagtccaagggacagcccaagaagcggctcacacatgtctacgacctttgcaagggcaaaaacatatgcgaggg

SEQ ID NO: 74519 - DNA, 76 bp, Homo sapiens
ggacagcccaagaagcggctcacacatgtctacgacctttgcaagggcaaaaacatatgcgagggtggggaggaga

SEQ ID NO: 74520 - DNA, 76 bp, Homo sapiens
agaagcggctcacacatgtctacgacctttgcaagggcaaaaacatatgcgagggtggggaggagatggacaacaa

SEQ ID NO: 74521 - DNA, 72 bp, Homo sapiens
tacgacctttgcaagggcaaaaacatatgcgagggtggggaggagatggacaacaagttcggtgtggaacaa

SEQ ID NO: 74522 - DNA, 71 bp, Homo sapiens
aagggcaaaaacatatgcgagggtggggaggagatggacaacaagttcggtgtggaacaacctgagggtga

SEQ ID NO: 74523 - DNA, 74 bp, Homo sapiens
aaacatatgcgagggtggggaggagatggacaacaagttcggtgtggaacaacctgagggtgacgaggatctga

SEQ ID NO: 74524 - DNA, 71 bp, Homo sapiens
tggggaggagatggacaacaagttcggtgtggaacaacctgagggtgacgaggatctgaccaaagaaaagg

SEQ ID NO: 74525 - DNA, 72 bp, Homo sapiens
aggagatggacaacaagttcggtgtggaacaacctgagggtgacgaggatctgaccaaagaaaaggtggctg

SEQ ID NO: 74526 - DNA, 70 bp, Homo sapiens
aacaagttcggtgtggaacaacctgagggtgacgaggatctgaccaaagaaaaggtggctggggctggcg

SEQ ID NO: 74527 - DNA, 71 bp, Homo sapiens
tggaacaacctgagggtgacgaggatctgaccaaagaaaaggtggctggggctggcggagacttttgggaa

SEQ ID NO: 74528 - DNA, 69 bp, Homo sapiens
aacctgagggtgacgaggatctgaccaaagaaaaggtggctggggctggcggagacttttgggaaggag

SEQ ID NO: 74529 - DNA, 74 bp, Homo sapiens
aaatggcccaccctctgggctctgatggcccctgtctctccttggaagggccatggtggctgtgggcggtacca

SEQ ID NO: 74530 - DNA, 75 bp, Homo sapiens
accctctgggctctgatggcccctgtctctccttggaagggccatggtggctgtgggcggtaccagcccaggatc

SEQ ID NO: 74531 - DNA, 75 bp, Homo sapiens
ctctgatggcccctgtctctccttggaagggccatggtggctgtgggcggtaccagcccaggatccggcgttctg

SEQ ID NO: 74532 - DNA, 75 bp, Homo sapiens
tgtctctccttggaagggccatggtggctgtgggcggtaccagcccaggatccggcgttctggcctagagttgta

SEQ ID NO: 74533 - DNA, 75 bp, Homo sapiens
atggtggctgtgggcggtaccagcccaggatccggcgttctggcctagagttgtatgcggaatggaagcacgtta

SEQ ID NO: 74534 - DNA, 75 bp, Homo sapiens
tgtgggcggtaccagcccaggatccggcgttctggcctagagttgtatgcggaatggaagcacgttaatgaggac

SEQ ID NO: 74535 - DNA, 77 bp, Homo sapiens
taccagcccaggatccggcgttctggcctagagttgtatgcggaatggaagcacgttaatgaggactctcaggagaa

SEQ ID NO: 74536 - DNA, 76 bp, Homo sapiens
aggatccggcgttctggcctagagttgtatgcggaatggaagcacgttaatgaggactctcaggagaagaagatcc

SEQ ID NO: 74537 - DNA, 80 bp, Homo sapiens
cgttctggcctagagttgtatgcggaatggaagcacgttaatgaggactctcaggagaagaagatcctgctgagtccaga

SEQ ID NO: 74538 - DNA, 86 bp, Homo sapiens
ttgtatgcggaatggaagcacgttaatgaggactctcaggagaagaagatcctgctgagtccagagcgagtgcatgagatcttcaa

SEQ ID NO: 74539 - DNA, 86 bp, Homo sapiens
aatggaagcacgttaatgaggactctcaggagaagaagatcctgctgagtccagagcgagtgcatgagatcttcaaacgcatctca

SEQ ID NO: 74540 - DNA, 87 bp, Homo sapiens
aagcacgttaatgaggactctcaggagaagaagatcctgctgagtccagagcgagtgcatgagatcttcaaacgcatctcagatgag

SEQ ID NO: 74541 - DNA, 87 bp, Homo sapiens
atgaggactctcaggagaagaagatcctgctgagtccagagcgagtgcatgagatcttcaaacgcatctcagatgaggagtgttttg

SEQ ID NO: 74542 - DNA, 88 bp, Homo sapiens
aggagaagaagatcctgctgagtccagagcgagtgcatgagatcttcaaacgcatctcagatgaggagtgttttgtgctgggcatgga

SEQ ID NO: 74543 - DNA, 90 bp, Homo sapiens
atcctgctgagtccagagcgagtgcatgagatcttcaaacgcatctcagatgaggagtgttttgtgctgggcatggagccccgctatgca

SEQ ID NO: 74544 - DNA, 87 bp, Homo sapiens
agtccagagcgagtgcatgagatcttcaaacgcatctcagatgaggagtgttttgtgctgggcatggagccccgctatgcacggcca

SEQ ID NO: 74545 - DNA, 90 bp, Homo sapiens
tgcatgagatcttcaaacgcatctcagatgaggagtgttttgtgctgggcatggagccccgctatgcacggccagagtggatgattgtca

SEQ ID NO: 74546 - DNA, 86 bp, Homo sapiens
agatcttcaaacgcatctcagatgaggagtgttttgtgctgggcatggagccccgctatgcacggccagagtggatgattgtcaca

SEQ ID NO: 74547 - DNA, 87 bp, Homo sapiens
aacgcatctcagatgaggagtgttttgtgctgggcatggagccccgctatgcacggccagagtggatgattgtcacagtgctgcctg

SEQ ID NO: 74548 - DNA, 84 bp, Homo sapiens
agatgaggagtgttttgtgctgggcatggagccccgctatgcacggccagagtggatgattgtcacagtgctgcctgtgccccc

SEQ ID NO: 74549 - DNA, 85 bp, Homo sapiens
tgttttgtgctgggcatggagccccgctatgcacggccagagtggatgattgtcacagtgctgcctgtgcccccgctctccgtgc

SEQ ID NO: 74550 - DNA, 85 bp, Homo sapiens
atggagccccgctatgcacggccagagtggatgattgtcacagtgctgcctgtgcccccgctctccgtgcggcctgctgttgtga

SEQ ID NO: 74551 - DNA, 87 bp, Homo sapiens
ccgctatgcacggccagagtggatgattgtcacagtgctgcctgtgcccccgctctccgtgcggcctgctgttgtgatgcagggctc

SEQ ID NO: 74552 - DNA, 85 bp, Homo sapiens
gccagagtggatgattgtcacagtgctgcctgtgcccccgctctccgtgcggcctgctgttgtgatgcagggctctgcccgtaac

SEQ ID NO: 74553 - DNA, 83 bp, Homo sapiens
atgattgtcacagtgctgcctgtgcccccgctctccgtgcggcctgctgttgtgatgcagggctctgcccgtaaccaggtcag

SEQ ID NO: 74554 - DNA, 82 bp, Homo sapiens
acagtgctgcctgtgcccccgctctccgtgcggcctgctgttgtgatgcagggctctgcccgtaaccaggtcagtggctcca

SEQ ID NO: 74555 - DNA, 81 bp, Homo sapiens
tgcctgtgcccccgctctccgtgcggcctgctgttgtgatgcagggctctgcccgtaaccaggtcagtggctccagggctc

SEQ ID NO: 74556 - DNA, 82 bp, Homo sapiens
ctctccgtgcggcctgctgttgtgatgcagggctctgcccgtaaccaggtcagtggctccagggctctgcctcttagctgga

SEQ ID NO: 74557 - DNA, 87 bp, Homo sapiens
ctggcagtggtggctggaccatgatgattctgacttcctgcctcaggatgacctgactcacaaactggctgacatcgtgaagatcaa

SEQ ID NO: 74558 - DNA, 85 bp, Homo sapiens
agtggtggctggaccatgatgattctgacttcctgcctcaggatgacctgactcacaaactggctgacatcgtgaagatcaacaa

SEQ ID NO: 74559 - DNA, 91 bp, Homo sapiens
atgatgattctgacttcctgcctcaggatgacctgactcacaaactggctgacatcgtgaagatcaacaatcagctgcggcgcaatgagca

SEQ ID NO: 74560 - DNA, 88 bp, Homo sapiens
attctgacttcctgcctcaggatgacctgactcacaaactggctgacatcgtgaagatcaacaatcagctgcggcgcaatgagcagaa

SEQ ID NO: 74561 - DNA, 87 bp, Homo sapiens
cctcaggatgacctgactcacaaactggctgacatcgtgaagatcaacaatcagctgcggcgcaatgagcagaacggcgcagcggcc

SEQ ID NO: 74562 - DNA, 88 bp, Homo sapiens
atgacctgactcacaaactggctgacatcgtgaagatcaacaatcagctgcggcgcaatgagcagaacggcgcagcggcccatgtcat

SEQ ID NO: 74563 - DNA, 89 bp, Homo sapiens
actcacaaactggctgacatcgtgaagatcaacaatcagctgcggcgcaatgagcagaacggcgcagcggcccatgtcattgcagagga

SEQ ID NO: 74564 - DNA, 91 bp, Homo sapiens
ctgacatcgtgaagatcaacaatcagctgcggcgcaatgagcagaacggcgcagcggcccatgtcattgcagaggatgtgaagctcctcca

SEQ ID NO: 74565 - DNA, 88 bp, Homo sapiens
cgtgaagatcaacaatcagctgcggcgcaatgagcagaacggcgcagcggcccatgtcattgcagaggatgtgaagctcctccagttc

SEQ ID NO: 74566 - DNA, 88 bp, Homo sapiens
aacaatcagctgcggcgcaatgagcagaacggcgcagcggcccatgtcattgcagaggatgtgaagctcctccagttccatgtggcca

SEQ ID NO: 74567 - DNA, 86 bp, Homo sapiens
cgcaatgagcagaacggcgcagcggcccatgtcattgcagaggatgtgaagctcctccagttccatgtggccaccatggtggacaa

SEQ ID NO: 74568 - DNA, 87 bp, Homo sapiens
agcagaacggcgcagcggcccatgtcattgcagaggatgtgaagctcctccagttccatgtggccaccatggtggacaatgagctgc

SEQ ID NO: 74569 - DNA, 85 bp, Homo sapiens
agcggcccatgtcattgcagaggatgtgaagctcctccagttccatgtggccaccatggtggacaatgagctgcctggcttgccc

SEQ ID NO: 74570 - DNA, 87 bp, Homo sapiens
tgtcattgcagaggatgtgaagctcctccagttccatgtggccaccatggtggacaatgagctgcctggcttgccccgtgtgagtca

SEQ ID NO: 74571 - DNA, 86 bp, Homo sapiens
agaggatgtgaagctcctccagttccatgtggccaccatggtggacaatgagctgcctggcttgccccgtgtgagtcagcatgctc

SEQ ID NO: 74572 - DNA, 84 bp, Homo sapiens
gtgaagctcctccagttccatgtggccaccatggtggacaatgagctgcctggcttgccccgtgtgagtcagcatgctccccac

SEQ ID NO: 74573 - DNA, 83 bp, Homo sapiens
ttccatgtggccaccatggtggacaatgagctgcctggcttgccccgtgtgagtcagcatgctccccacccctctgtgtattg

SEQ ID NO: 74574 - DNA, 74 bp, Homo sapiens
cccagtgctgactttctggattgcccccaccctgtgttttttcctcacaggccatgcagaagtctgggcgtccc

SEQ ID NO: 74575 - DNA, 72 bp, Homo sapiens
actttctggattgcccccaccctgtgttttttcctcacaggccatgcagaagtctgggcgtcccctcaagtc

SEQ ID NO: 74576 - DNA, 72 bp, Homo sapiens
ccccaccctgtgttttttcctcacaggccatgcagaagtctgggcgtcccctcaagtccctgaagcagcggt

SEQ ID NO: 74577 - DNA, 75 bp, Homo sapiens
tgttttttcctcacaggccatgcagaagtctgggcgtcccctcaagtccctgaagcagcggttgaagggcaagga

SEQ ID NO: 74578 - DNA, 75 bp, Homo sapiens
tttcctcacaggccatgcagaagtctgggcgtcccctcaagtccctgaagcagcggttgaagggcaaggaaggcc

SEQ ID NO: 74579 - DNA, 73 bp, Homo sapiens
tgcagaagtctgggcgtcccctcaagtccctgaagcagcggttgaagggcaaggaaggccgggtgcgagggaa

SEQ ID NO: 74580 - DNA, 69 bp, Homo sapiens
aagtctgggcgtcccctcaagtccctgaagcagcggttgaagggcaaggaaggccgggtgcgagggaac

SEQ ID NO: 74581 - DNA, 72 bp, Homo sapiens
ctcaagtccctgaagcagcggttgaagggcaaggaaggccgggtgcgagggaacctgatgggcaaaagagtg

SEQ ID NO: 74582 - DNA, 72 bp, Homo sapiens
tccctgaagcagcggttgaagggcaaggaaggccgggtgcgagggaacctgatgggcaaaagagtggacttc

SEQ ID NO: 74583 - DNA, 69 bp, Homo sapiens
gttgaagggcaaggaaggccgggtgcgagggaacctgatgggcaaaagagtggacttctcggcccgtac

SEQ ID NO: 74584 - DNA, 70 bp, Homo sapiens
aaggaaggccgggtgcgagggaacctgatgggcaaaagagtggacttctcggcccgtactgtcatcaccc

SEQ ID NO: 74585 - DNA, 70 bp, Homo sapiens
aggccgggtgcgagggaacctgatgggcaaaagagtggacttctcggcccgtactgtcatcacccccgac

SEQ ID NO: 74586 - DNA, 72 bp, Homo sapiens
gaacctgatgggcaaaagagtggacttctcggcccgtactgtcatcacccccgaccccaacctctccattga

SEQ ID NO: 74587 - DNA, 70 bp, Homo sapiens
ggcaaaagagtggacttctcggcccgtactgtcatcacccccgaccccaacctctccattgaccaggttg

SEQ ID NO: 74588 - DNA, 71 bp, Homo sapiens
aagagtggacttctcggcccgtactgtcatcacccccgaccccaacctctccattgaccaggttggcgtgc

SEQ ID NO: 74589 - DNA, 75 bp, Homo sapiens
tgtcatcacccccgaccccaacctctccattgaccaggttggcgtgccccgctccattgctgccaacatgacctt

SEQ ID NO: 74590 - DNA, 75 bp, Homo sapiens
ccgaccccaacctctccattgaccaggttggcgtgccccgctccattgctgccaacatgacctttgcggagattg

SEQ ID NO: 74591 - DNA, 76 bp, Homo sapiens
cccaacctctccattgaccaggttggcgtgccccgctccattgctgccaacatgacctttgcggagattgtcaccc

SEQ ID NO: 74592 - DNA, 77 bp, Homo sapiens
attgaccaggttggcgtgccccgctccattgctgccaacatgacctttgcggagattgtcacccccttcaacattga

SEQ ID NO: 74593 - DNA, 79 bp, Homo sapiens
ttggcgtgccccgctccattgctgccaacatgacctttgcggagattgtcacccccttcaacattgacaggtgtgcctc

SEQ ID NO: 74594 - DNA, 75 bp, Homo sapiens
ttgctgccaacatgacctttgcggagattgtcacccccttcaacattgacaggtgtgcctccgttggaaagccct

SEQ ID NO: 74595 - DNA, 72 bp, Homo sapiens
atgacctttgcggagattgtcacccccttcaacattgacaggtgtgcctccgttggaaagcccttcctggaa

SEQ ID NO: 74596 - DNA, 72 bp, Homo sapiens
aggggtattttaggaagcattgagttcattgcacctctttccttcctagacttcaagaactagtgcgcaggg

SEQ ID NO: 74597 - DNA, 76 bp, Homo sapiens
ttaggaagcattgagttcattgcacctctttccttcctagacttcaagaactagtgcgcagggggaacagccagta

SEQ ID NO: 74598 - DNA, 74 bp, Homo sapiens
attgagttcattgcacctctttccttcctagacttcaagaactagtgcgcagggggaacagccagtacccaggc

SEQ ID NO: 74599 - DNA, 74 bp, Homo sapiens
cctctttccttcctagacttcaagaactagtgcgcagggggaacagccagtacccaggcgccaagtacatcatc

SEQ ID NO: 74600 - DNA, 78 bp, Homo sapiens
tcctagacttcaagaactagtgcgcagggggaacagccagtacccaggcgccaagtacatcatccgagacaatggtga

SEQ ID NO: 74601 - DNA, 80 bp, Homo sapiens
tcaagaactagtgcgcagggggaacagccagtacccaggcgccaagtacatcatccgagacaatggtgatcgcattgact

SEQ ID NO: 74602 - DNA, 80 bp, Homo sapiens
tagtgcgcagggggaacagccagtacccaggcgccaagtacatcatccgagacaatggtgatcgcattgacttgcgtttc

SEQ ID NO: 74603 - DNA, 78 bp, Homo sapiens
gaacagccagtacccaggcgccaagtacatcatccgagacaatggtgatcgcattgacttgcgtttccaccccaagcc

SEQ ID NO: 74604 - DNA, 77 bp, Homo sapiens
agtacccaggcgccaagtacatcatccgagacaatggtgatcgcattgacttgcgtttccaccccaagcccagtgac

SEQ ID NO: 74605 - DNA, 79 bp, Homo sapiens
ccaagtacatcatccgagacaatggtgatcgcattgacttgcgtttccaccccaagcccagtgaccttcacctgcagac

SEQ ID NO: 74606 - DNA, 79 bp, Homo sapiens
atcatccgagacaatggtgatcgcattgacttgcgtttccaccccaagcccagtgaccttcacctgcagaccggctata

SEQ ID NO: 74607 - DNA, 76 bp, Homo sapiens
aatggtgatcgcattgacttgcgtttccaccccaagcccagtgaccttcacctgcagaccggctataaggcacgta

SEQ ID NO: 74608 - DNA, 77 bp, Homo sapiens
atcgcattgacttgcgtttccaccccaagcccagtgaccttcacctgcagaccggctataaggcacgtagcaggcca

SEQ ID NO: 74609 - DNA, 73 bp, Homo sapiens
acttgcgtttccaccccaagcccagtgaccttcacctgcagaccggctataaggcacgtagcaggccagggcc

SEQ ID NO: 74610 - DNA, 74 bp, Homo sapiens
attcttagatacctccttcactgagaccttttccttacctcacctctctaggtggaacggcacatgtgtgatgg

SEQ ID NO: 74611 - DNA, 76 bp, Homo sapiens
cttcactgagaccttttccttacctcacctctctaggtggaacggcacatgtgtgatggggacattgttatcttca

SEQ ID NO: 74612 - DNA, 72 bp, Homo sapiens
agaccttttccttacctcacctctctaggtggaacggcacatgtgtgatggggacattgttatcttcaaccg

SEQ ID NO: 74613 - DNA, 79 bp, Homo sapiens
tacctcacctctctaggtggaacggcacatgtgtgatggggacattgttatcttcaaccggcagccaactctgcacaaa

SEQ ID NO: 74614 - DNA, 78 bp, Homo sapiens
acctctctaggtggaacggcacatgtgtgatggggacattgttatcttcaaccggcagccaactctgcacaaaatgtc

SEQ ID NO: 74615 - DNA, 80 bp, Homo sapiens
aacggcacatgtgtgatggggacattgttatcttcaaccggcagccaactctgcacaaaatgtccatgatggggcatcgg

SEQ ID NO: 74616 - DNA, 80 bp, Homo sapiens
gtgtgatggggacattgttatcttcaaccggcagccaactctgcacaaaatgtccatgatggggcatcgggtccgcattc

SEQ ID NO: 74617 - DNA, 80 bp, Homo sapiens
gacattgttatcttcaaccggcagccaactctgcacaaaatgtccatgatggggcatcgggtccgcattctcccatggtc

SEQ ID NO: 74618 - DNA, 78 bp, Homo sapiens
ttatcttcaaccggcagccaactctgcacaaaatgtccatgatggggcatcgggtccgcattctcccatggtctacct

SEQ ID NO: 74619 - DNA, 80 bp, Homo sapiens
gcagccaactctgcacaaaatgtccatgatggggcatcgggtccgcattctcccatggtctacctttcgcttgaatctta

SEQ ID NO: 74620 - DNA, 76 bp, Homo sapiens
aactctgcacaaaatgtccatgatggggcatcgggtccgcattctcccatggtctacctttcgcttgaatcttagg

SEQ ID NO: 74621 - DNA, 74 bp, Homo sapiens
aaaatgtccatgatggggcatcgggtccgcattctcccatggtctacctttcgcttgaatcttaggtcagtccc

SEQ ID NO: 74622 - DNA, 74 bp, Homo sapiens
atggggcatcgggtccgcattctcccatggtctacctttcgcttgaatcttaggtcagtccctggctgagggaa

SEQ ID NO: 74623 - DNA, 75 bp, Homo sapiens
atcgggtccgcattctcccatggtctacctttcgcttgaatcttaggtcagtccctggctgagggaagcaggctg

SEQ ID NO: 74624 - DNA, 75 bp, Homo sapiens
tttcgctgcagacatcttcccaaccctgacttttctctttaactgtagtgtgacaactccgtacaatgcagactt

SEQ ID NO: 74625 - DNA, 72 bp, Homo sapiens
agacatcttcccaaccctgacttttctctttaactgtagtgtgacaactccgtacaatgcagactttgacgg

SEQ ID NO: 74626 - DNA, 73 bp, Homo sapiens
accctgacttttctctttaactgtagtgtgacaactccgtacaatgcagactttgacggggatgagatgaact

SEQ ID NO: 74627 - DNA, 78 bp, Homo sapiens
ttttctctttaactgtagtgtgacaactccgtacaatgcagactttgacggggatgagatgaacttgcacctgccaca

SEQ ID NO: 74628 - DNA, 80 bp, Homo sapiens
tttaactgtagtgtgacaactccgtacaatgcagactttgacggggatgagatgaacttgcacctgccacagtctctgga

SEQ ID NO: 74629 - DNA, 83 bp, Homo sapiens
acaactccgtacaatgcagactttgacggggatgagatgaacttgcacctgccacagtctctggagacgcgagcagagatcca

SEQ ID NO: 74630 - DNA, 85 bp, Homo sapiens
tccgtacaatgcagactttgacggggatgagatgaacttgcacctgccacagtctctggagacgcgagcagagatccaggagctg

SEQ ID NO: 74631 - DNA, 83 bp, Homo sapiens
agactttgacggggatgagatgaacttgcacctgccacagtctctggagacgcgagcagagatccaggagctggccatggttc

SEQ ID NO: 74632 - DNA, 88 bp, Homo sapiens
gatgagatgaacttgcacctgccacagtctctggagacgcgagcagagatccaggagctggccatggttcctcgcatgattgtcaccc

SEQ ID NO: 74633 - DNA, 84 bp, Homo sapiens
agtctctggagacgcgagcagagatccaggagctggccatggttcctcgcatgattgtcaccccccagagcaatcggcctgtca

SEQ ID NO: 74634 - DNA, 85 bp, Homo sapiens
gagcagagatccaggagctggccatggttcctcgcatgattgtcaccccccagagcaatcggcctgtcatgggtattgtgcagga

SEQ ID NO: 74635 - DNA, 83 bp, Homo sapiens
agatccaggagctggccatggttcctcgcatgattgtcaccccccagagcaatcggcctgtcatgggtattgtgcaggacaca

SEQ ID NO: 74636 - DNA, 85 bp, Homo sapiens
ttcctcgcatgattgtcaccccccagagcaatcggcctgtcatgggtattgtgcaggacacactcacagcagtgcgcaaattcac

SEQ ID NO: 74637 - DNA, 84 bp, Homo sapiens
atgattgtcaccccccagagcaatcggcctgtcatgggtattgtgcaggacacactcacagcagtgcgcaaattcaccaagaga

SEQ ID NO: 74638 - DNA, 84 bp, Homo sapiens
ccagagcaatcggcctgtcatgggtattgtgcaggacacactcacagcagtgcgcaaattcaccaagagagacgtcttcctgga

SEQ ID NO: 74639 - DNA, 81 bp, Homo sapiens
aatcggcctgtcatgggtattgtgcaggacacactcacagcagtgcgcaaattcaccaagagagacgtcttcctggagcgg

SEQ ID NO: 74640 - DNA, 81 bp, Homo sapiens
atgggtattgtgcaggacacactcacagcagtgcgcaaattcaccaagagagacgtcttcctggagcgggtgtgtggtcca

SEQ ID NO: 74641 - DNA, 78 bp, Homo sapiens
caggacacactcacagcagtgcgcaaattcaccaagagagacgtcttcctggagcgggtgtgtggtccaaatggaaac

SEQ ID NO: 74642 - DNA, 77 bp, Homo sapiens
tcacagcagtgcgcaaattcaccaagagagacgtcttcctggagcgggtgtgtggtccaaatggaaacctggcttaa

SEQ ID NO: 74643 - DNA, 73 bp, Homo sapiens
agtgcgcaaattcaccaagagagacgtcttcctggagcgggtgtgtggtccaaatggaaacctggcttaagtg

SEQ ID NO: 74644 - DNA, 72 bp, Homo sapiens
aattcaccaagagagacgtcttcctggagcgggtgtgtggtccaaatggaaacctggcttaagtgggcagtg

SEQ ID NO: 74645 - DNA, 71 bp, Homo sapiens
agagacgtcttcctggagcgggtgtgtggtccaaatggaaacctggcttaagtgggcagtggggctctggg

SEQ ID NO: 74646 - DNA, 72 bp, Homo sapiens
ttcctggagcgggtgtgtggtccaaatggaaacctggcttaagtgggcagtggggctctggggtgcaaggtg

SEQ ID NO: 74647 - DNA, 73 bp, Homo sapiens
aaatggaaacctggcttaagtgggcagtggggctctggggtgcaaggtggaggctagagaggaagagctgtgt

SEQ ID NO: 74648 - DNA, 71 bp, Homo sapiens
aacctggcttaagtgggcagtggggctctggggtgcaaggtggaggctagagaggaagagctgtgtttttt

SEQ ID NO: 74649 - DNA, 72 bp, Homo sapiens
aagtgggcagtggggctctggggtgcaaggtggaggctagagaggaagagctgtgttttttttcctgactta

SEQ ID NO: 74650 - DNA, 75 bp, Homo sapiens
ctctggggtgcaaggtggaggctagagaggaagagctgtgttttttttcctgacttacccagcagtggtctgtga

SEQ ID NO: 74651 - DNA, 74 bp, Homo sapiens
aggctagagaggaagagctgtgttttttttcctgacttacccagcagtggtctgtgagattgtcttttctggtg

SEQ ID NO: 74652 - DNA, 72 bp, Homo sapiens
aagagctgtgttttttttcctgacttacccagcagtggtctgtgagattgtcttttctggtgggcgaacaaa

SEQ ID NO: 74653 - DNA, 68 bp, Homo sapiens
gttttttttcctgacttacccagcagtggtctgtgagattgtcttttctggtgggcgaacaaaaaggg

SEQ ID NO: 74654 - DNA, 69 bp, Homo sapiens
ctgacttacccagcagtggtctgtgagattgtcttttctggtgggcgaacaaaaagggggttaggaaaa

SEQ ID NO: 74655 - DNA, 69 bp, Homo sapiens
agcagtggtctgtgagattgtcttttctggtgggcgaacaaaaagggggttaggaaaactcaggccaaa

SEQ ID NO: 74656 - DNA, 67 bp, Homo sapiens
tgtgagattgtcttttctggtgggcgaacaaaaagggggttaggaaaactcaggccaaaaaggtgta

SEQ ID NO: 74657 - DNA, 63 bp, Homo sapiens
attgtcttttctggtgggcgaacaaaaagggggttaggaaaactcaggccaaaaaggtgtaag

SEQ ID NO: 74658 - DNA, 64 bp, Homo sapiens
tctggtgggcgaacaaaaagggggttaggaaaactcaggccaaaaaggtgtaaggcgttaattc

SEQ ID NO: 74659 - DNA, 60 bp, Homo sapiens
aaaaagggggttaggaaaactcaggccaaaaaggtgtaaggcgttaattccccatttaat

SEQ ID NO: 74660 - DNA, 62 bp, Homo sapiens
gggttaggaaaactcaggccaaaaaggtgtaaggcgttaattccccatttaattccttaaaa

SEQ ID NO: 74661 - DNA, 65 bp, Homo sapiens
caggccaaaaaggtgtaaggcgttaattccccatttaattccttaaaatttcatgtaataccagg

SEQ ID NO: 74662 - DNA, 66 bp, Homo sapiens
aaaggtgtaaggcgttaattccccatttaattccttaaaatttcatgtaataccaggtattgcctg

SEQ ID NO: 74663 - DNA, 67 bp, Homo sapiens
ggcgttaattccccatttaattccttaaaatttcatgtaataccaggtattgcctgtaaaggaaaga

SEQ ID NO: 74664 - DNA, 66 bp, Homo sapiens
cccatttaattccttaaaatttcatgtaataccaggtattgcctgtaaaggaaagataaagggaaa

SEQ ID NO: 74665 - DNA, 65 bp, Homo sapiens
tattgcctgtaaaggaaagataaagggaaaaataagtaagaccttgttcaaattttatttttcta

SEQ ID NO: 74666 - DNA, 78 bp, Homo sapiens
atgtggggcctgcactctgacttctgtctgccttactctttgtcttacagggtgaagtgatgaacctcctgatgttcc

SEQ ID NO: 74667 - DNA, 76 bp, Homo sapiens
actctgacttctgtctgccttactctttgtcttacagggtgaagtgatgaacctcctgatgttcctgtcgacgtgg

SEQ ID NO: 74668 - DNA, 76 bp, Homo sapiens
ttctgtctgccttactctttgtcttacagggtgaagtgatgaacctcctgatgttcctgtcgacgtgggatgggaa

SEQ ID NO: 74669 - DNA, 74 bp, Homo sapiens
ttactctttgtcttacagggtgaagtgatgaacctcctgatgttcctgtcgacgtgggatgggaaggtcccaca

SEQ ID NO: 74670 - DNA, 75 bp, Homo sapiens
ttacagggtgaagtgatgaacctcctgatgttcctgtcgacgtgggatgggaaggtcccacagccggccatccta

SEQ ID NO: 74671 - DNA, 74 bp, Homo sapiens
gtgaagtgatgaacctcctgatgttcctgtcgacgtgggatgggaaggtcccacagccggccatcctaaagccc

SEQ ID NO: 74672 - DNA, 71 bp, Homo sapiens
atgaacctcctgatgttcctgtcgacgtgggatgggaaggtcccacagccggccatcctaaagccccggcc

SEQ ID NO: 74673 - DNA, 70 bp, Homo sapiens
atgttcctgtcgacgtgggatgggaaggtcccacagccggccatcctaaagccccggcccctgtggacag

SEQ ID NO: 74674 - DNA, 70 bp, Homo sapiens
acgtgggatgggaaggtcccacagccggccatcctaaagccccggcccctgtggacaggcaagcaaatct

SEQ ID NO: 74675 - DNA, 72 bp, Homo sapiens
atgggaaggtcccacagccggccatcctaaagccccggcccctgtggacaggcaagcaaatcttctccctca

SEQ ID NO: 74676 - DNA, 77 bp, Homo sapiens
acagccggccatcctaaagccccggcccctgtggacaggcaagcaaatcttctccctcatcatacctggtcacatca

SEQ ID NO: 74677 - DNA, 76 bp, Homo sapiens
atcctaaagccccggcccctgtggacaggcaagcaaatcttctccctcatcatacctggtcacatcaattgtatcc

SEQ ID NO: 74678 - DNA, 77 bp, Homo sapiens
ccggcccctgtggacaggcaagcaaatcttctccctcatcatacctggtcacatcaattgtatccgtacccacagta

SEQ ID NO: 74679 - DNA, 80 bp, Homo sapiens
tggacaggcaagcaaatcttctccctcatcatacctggtcacatcaattgtatccgtacccacagtacccatcccgatga

SEQ ID NO: 74680 - DNA, 79 bp, Homo sapiens
aagcaaatcttctccctcatcatacctggtcacatcaattgtatccgtacccacagtacccatcccgatgatgaagaca

SEQ ID NO: 74681 - DNA, 79 bp, Homo sapiens
atcttctccctcatcatacctggtcacatcaattgtatccgtacccacagtacccatcccgatgatgaagacagtggcc

SEQ ID NO: 74682 - DNA, 79 bp, Homo sapiens
atcatacctggtcacatcaattgtatccgtacccacagtacccatcccgatgatgaagacagtggcccttacaagcaca

SEQ ID NO: 74683 - DNA, 76 bp, Homo sapiens
aattgtatccgtacccacagtacccatcccgatgatgaagacagtggcccttacaagcacatctctcctggggaca

SEQ ID NO: 74684 - DNA, 75 bp, Homo sapiens
gtacccacagtacccatcccgatgatgaagacagtggcccttacaagcacatctctcctggggacaccaaggtag

SEQ ID NO: 74685 - DNA, 77 bp, Homo sapiens
atcccgatgatgaagacagtggcccttacaagcacatctctcctggggacaccaaggtagggcttggcttctggata

SEQ ID NO: 74686 - DNA, 78 bp, Homo sapiens
atgaagacagtggcccttacaagcacatctctcctggggacaccaaggtagggcttggcttctggatatgtgaggaca

SEQ ID NO: 74687 - DNA, 75 bp, Homo sapiens
agtggcccttacaagcacatctctcctggggacaccaaggtagggcttggcttctggatatgtgaggacagaatt

SEQ ID NO: 74688 - DNA, 77 bp, Homo sapiens
gagccaggaccagagcaggggccttgagtgggtgctttgtccttaggtggtggtggagaatggggagctgatcatgg

SEQ ID NO: 74689 - DNA, 79 bp, Homo sapiens
cagagcaggggccttgagtgggtgctttgtccttaggtggtggtggagaatggggagctgatcatgggcatcctgtgta

SEQ ID NO: 74690 - DNA, 78 bp, Homo sapiens
gccttgagtgggtgctttgtccttaggtggtggtggagaatggggagctgatcatgggcatcctgtgtaagaagtctc

SEQ ID NO: 74691 - DNA, 78 bp, Homo sapiens
agtgggtgctttgtccttaggtggtggtggagaatggggagctgatcatgggcatcctgtgtaagaagtctctgggca

SEQ ID NO: 74692 - DNA, 80 bp, Homo sapiens
tttgtccttaggtggtggtggagaatggggagctgatcatgggcatcctgtgtaagaagtctctgggcacgtcagctggc

SEQ ID NO: 74693 - DNA, 83 bp, Homo sapiens
tggtggagaatggggagctgatcatgggcatcctgtgtaagaagtctctgggcacgtcagctggctccctggtccacatctcc

SEQ ID NO: 74694 - DNA, 81 bp, Homo sapiens
aatggggagctgatcatgggcatcctgtgtaagaagtctctgggcacgtcagctggctccctggtccacatctcctaccta

SEQ ID NO: 74695 - DNA, 83 bp, Homo sapiens
atcatgggcatcctgtgtaagaagtctctgggcacgtcagctggctccctggtccacatctcctacctagagatgggtcatga

SEQ ID NO: 74696 - DNA, 82 bp, Homo sapiens
atcctgtgtaagaagtctctgggcacgtcagctggctccctggtccacatctcctacctagagatgggtcatgacatcactc

SEQ ID NO: 74697 - DNA, 82 bp, Homo sapiens
agaagtctctgggcacgtcagctggctccctggtccacatctcctacctagagatgggtcatgacatcactcgcctcttcta

SEQ ID NO: 74698 - DNA, 83 bp, Homo sapiens
ggcacgtcagctggctccctggtccacatctcctacctagagatgggtcatgacatcactcgcctcttctactccaacattca

SEQ ID NO: 74699 - DNA, 82 bp, Homo sapiens
ctggctccctggtccacatctcctacctagagatgggtcatgacatcactcgcctcttctactccaacattcagactgtcat

SEQ ID NO: 74700 - DNA, 82 bp, Homo sapiens
tggtccacatctcctacctagagatgggtcatgacatcactcgcctcttctactccaacattcagactgtcattaacaactg

SEQ ID NO: 74701 - DNA, 82 bp, Homo sapiens
atctcctacctagagatgggtcatgacatcactcgcctcttctactccaacattcagactgtcattaacaactggctcctca

SEQ ID NO: 74702 - DNA, 83 bp, Homo sapiens
ctagagatgggtcatgacatcactcgcctcttctactccaacattcagactgtcattaacaactggctcctcatcgagggtga

SEQ ID NO: 74703 - DNA, 83 bp, Homo sapiens
atgacatcactcgcctcttctactccaacattcagactgtcattaacaactggctcctcatcgagggtgagcatggaggcgtg

SEQ ID NO: 74704 - DNA, 80 bp, Homo sapiens
tcgcctcttctactccaacattcagactgtcattaacaactggctcctcatcgagggtgagcatggaggcgtggtaccaa

SEQ ID NO: 74705 - DNA, 79 bp, Homo sapiens
ttctactccaacattcagactgtcattaacaactggctcctcatcgagggtgagcatggaggcgtggtaccaagacgtc

SEQ ID NO: 74706 - DNA, 79 bp, Homo sapiens
aacattcagactgtcattaacaactggctcctcatcgagggtgagcatggaggcgtggtaccaagacgtctctgtgaat

SEQ ID NO: 74707 - DNA, 71 bp, Homo sapiens
atgtttcttagaggtccaaaggggtttgctgatgtttttccctgtctctaggtcatactattggcattggg

SEQ ID NO: 74708 - DNA, 72 bp, Homo sapiens
ttagaggtccaaaggggtttgctgatgtttttccctgtctctaggtcatactattggcattggggactccat

SEQ ID NO: 74709 - DNA, 76 bp, Homo sapiens
gggtttgctgatgtttttccctgtctctaggtcatactattggcattggggactccattgctgattctaagactta

SEQ ID NO: 74710 - DNA, 75 bp, Homo sapiens
atgtttttccctgtctctaggtcatactattggcattggggactccattgctgattctaagacttaccaggacat

SEQ ID NO: 74711 - DNA, 79 bp, Homo sapiens
tgtctctaggtcatactattggcattggggactccattgctgattctaagacttaccaggacattcagaacactattaa

SEQ ID NO: 74712 - DNA, 77 bp, Homo sapiens
ctaggtcatactattggcattggggactccattgctgattctaagacttaccaggacattcagaacactattaagaa

SEQ ID NO: 74713 - DNA, 77 bp, Homo sapiens
ctattggcattggggactccattgctgattctaagacttaccaggacattcagaacactattaagaaggccaagcag

SEQ ID NO: 74714 - DNA, 75 bp, Homo sapiens
actccattgctgattctaagacttaccaggacattcagaacactattaagaaggccaagcaggacgtaatagagg

SEQ ID NO: 74715 - DNA, 71 bp, Homo sapiens
ctaagacttaccaggacattcagaacactattaagaaggccaagcaggacgtaatagaggtaagaggggag

SEQ ID NO: 74716 - DNA, 72 bp, Homo sapiens
acattcagaacactattaagaaggccaagcaggacgtaatagaggtaagaggggaggccaccagagacggaa

SEQ ID NO: 74717 - DNA, 70 bp, Homo sapiens
agaacactattaagaaggccaagcaggacgtaatagaggtaagaggggaggccaccagagacggaataag

SEQ ID NO: 74718 - DNA, 83 bp, Homo sapiens
gggcagagagtagggattgatgtctcaccgagaactctgcctccaggtcatcgagaaggcacacaacaatgagctggagccca

SEQ ID NO: 74719 - DNA, 80 bp, Homo sapiens
agagtagggattgatgtctcaccgagaactctgcctccaggtcatcgagaaggcacacaacaatgagctggagcccaccc

SEQ ID NO: 74720 - DNA, 80 bp, Homo sapiens
attgatgtctcaccgagaactctgcctccaggtcatcgagaaggcacacaacaatgagctggagcccaccccagggaaca

SEQ ID NO: 74721 - DNA, 79 bp, Homo sapiens
agaactctgcctccaggtcatcgagaaggcacacaacaatgagctggagcccaccccagggaacactctgcggcagacg

SEQ ID NO: 74722 - DNA, 80 bp, Homo sapiens
ctccaggtcatcgagaaggcacacaacaatgagctggagcccaccccagggaacactctgcggcagacgtttgagaatca

SEQ ID NO: 74723 - DNA, 80 bp, Homo sapiens
gtcatcgagaaggcacacaacaatgagctggagcccaccccagggaacactctgcggcagacgtttgagaatcaggtgaa

SEQ ID NO: 74724 - DNA, 77 bp, Homo sapiens
acacaacaatgagctggagcccaccccagggaacactctgcggcagacgtttgagaatcaggtgaaccgcattctta

SEQ ID NO: 74725 - DNA, 76 bp, Homo sapiens
acaatgagctggagcccaccccagggaacactctgcggcagacgtttgagaatcaggtgaaccgcattcttaacga

SEQ ID NO: 74726 - DNA, 75 bp, Homo sapiens
ccaccccagggaacactctgcggcagacgtttgagaatcaggtgaaccgcattcttaacgatgcccgagacaaga

SEQ ID NO: 74727 - DNA, 76 bp, Homo sapiens
agggaacactctgcggcagacgtttgagaatcaggtgaaccgcattcttaacgatgcccgagacaagactggctcc

SEQ ID NO: 74728 - DNA, 80 bp, Homo sapiens
ctctgcggcagacgtttgagaatcaggtgaaccgcattcttaacgatgcccgagacaagactggctcctctgctcagaaa

SEQ ID NO: 74729 - DNA, 80 bp, Homo sapiens
tttgagaatcaggtgaaccgcattcttaacgatgcccgagacaagactggctcctctgctcagaaatccctgtctgaata

SEQ ID NO: 74730 - DNA, 79 bp, Homo sapiens
aatcaggtgaaccgcattcttaacgatgcccgagacaagactggctcctctgctcagaaatccctgtctgaatacaata

SEQ ID NO: 74731 - DNA, 78 bp, Homo sapiens
attcttaacgatgcccgagacaagactggctcctctgctcagaaatccctgtctgaatacaataacttcaagtctatg

SEQ ID NO: 74732 - DNA, 79 bp, Homo sapiens
taacgatgcccgagacaagactggctcctctgctcagaaatccctgtctgaatacaataacttcaagtctatggtcgtg

SEQ ID NO: 74733 - DNA, 77 bp, Homo sapiens
acaagactggctcctctgctcagaaatccctgtctgaatacaataacttcaagtctatggtcgtgtccggagctaaa

SEQ ID NO: 74734 - DNA, 76 bp, Homo sapiens
tcctctgctcagaaatccctgtctgaatacaataacttcaagtctatggtcgtgtccggagctaaaggttccaaga

SEQ ID NO: 74735 - DNA, 72 bp, Homo sapiens
agaaatccctgtctgaatacaataacttcaagtctatggtcgtgtccggagctaaaggttccaagattaaca

SEQ ID NO: 74736 - DNA, 74 bp, Homo sapiens
tccctgtctgaatacaataacttcaagtctatggtcgtgtccggagctaaaggttccaagattaacatctccca

SEQ ID NO: 74737 - DNA, 72 bp, Homo sapiens
aatacaataacttcaagtctatggtcgtgtccggagctaaaggttccaagattaacatctcccaggtgagaa

SEQ ID NO: 74738 - DNA, 71 bp, Homo sapiens
ttcaagtctatggtcgtgtccggagctaaaggttccaagattaacatctcccaggtgagaagccttgtttt

SEQ ID NO: 74739 - DNA, 71 bp, Homo sapiens
atggtcgtgtccggagctaaaggttccaagattaacatctcccaggtgagaagccttgtttttccatatac

SEQ ID NO: 74740 - DNA, 76 bp, Homo sapiens
tattcttaaggcagagggaattcagtatacaccacctttctgtttcccaggtcattgctgtcgttggacagcagaa

SEQ ID NO: 74741 - DNA, 74 bp, Homo sapiens
agggaattcagtatacaccacctttctgtttcccaggtcattgctgtcgttggacagcagaacgtcgagggcaa

SEQ ID NO: 74742 - DNA, 75 bp, Homo sapiens
attcagtatacaccacctttctgtttcccaggtcattgctgtcgttggacagcagaacgtcgagggcaagcggat

SEQ ID NO: 74743 - DNA, 75 bp, Homo sapiens
cctttctgtttcccaggtcattgctgtcgttggacagcagaacgtcgagggcaagcggattccatttggcttcaa

SEQ ID NO: 74744 - DNA, 77 bp, Homo sapiens
tgtttcccaggtcattgctgtcgttggacagcagaacgtcgagggcaagcggattccatttggcttcaagcaccgga

SEQ ID NO: 74745 - DNA, 79 bp, Homo sapiens
attgctgtcgttggacagcagaacgtcgagggcaagcggattccatttggcttcaagcaccggactctgcctcacttca

SEQ ID NO: 74746 - DNA, 80 bp, Homo sapiens
gttggacagcagaacgtcgagggcaagcggattccatttggcttcaagcaccggactctgcctcacttcatcaaggatga

SEQ ID NO: 74747 - DNA, 76 bp, Homo sapiens
agaacgtcgagggcaagcggattccatttggcttcaagcaccggactctgcctcacttcatcaaggatgactacgg

SEQ ID NO: 74748 - DNA, 78 bp, Homo sapiens
agggcaagcggattccatttggcttcaagcaccggactctgcctcacttcatcaaggatgactacgggcctgagagcc

SEQ ID NO: 74749 - DNA, 78 bp, Homo sapiens
attccatttggcttcaagcaccggactctgcctcacttcatcaaggatgactacgggcctgagagccgtggctttgtg

SEQ ID NO: 74750 - DNA, 78 bp, Homo sapiens
cttcaagcaccggactctgcctcacttcatcaaggatgactacgggcctgagagccgtggctttgtggagaactccta

SEQ ID NO: 74751 - DNA, 76 bp, Homo sapiens
accggactctgcctcacttcatcaaggatgactacgggcctgagagccgtggctttgtggagaactcctacctagc

SEQ ID NO: 74752 - DNA, 77 bp, Homo sapiens
tcacttcatcaaggatgactacgggcctgagagccgtggctttgtggagaactcctacctagccggcctcacaccca

SEQ ID NO: 74753 - DNA, 73 bp, Homo sapiens
aaggatgactacgggcctgagagccgtggctttgtggagaactcctacctagccggcctcacacccactgagt

SEQ ID NO: 74754 - DNA, 71 bp, Homo sapiens
actacgggcctgagagccgtggctttgtggagaactcctacctagccggcctcacacccactgagttcttt

SEQ ID NO: 74755 - DNA, 72 bp, Homo sapiens
agagccgtggctttgtggagaactcctacctagccggcctcacacccactgagttctttttccacgccatgg

SEQ ID NO: 74756 - DNA, 71 bp, Homo sapiens
tttgtggagaactcctacctagccggcctcacacccactgagttctttttccacgccatggggggtcgtga

SEQ ID NO: 74757 - DNA, 69 bp, Homo sapiens
ggagaactcctacctagccggcctcacacccactgagttctttttccacgccatggggggtcgtgaggg

SEQ ID NO: 74758 - DNA, 72 bp, Homo sapiens
tacctagccggcctcacacccactgagttctttttccacgccatggggggtcgtgaggggctcattgacacg

SEQ ID NO: 74759 - DNA, 76 bp, Homo sapiens
acacccactgagttctttttccacgccatggggggtcgtgaggggctcattgacacggctgtcaagactgctgaga

SEQ ID NO: 74760 - DNA, 76 bp, Homo sapiens
agttctttttccacgccatggggggtcgtgaggggctcattgacacggctgtcaagactgctgagactggtgaggc

SEQ ID NO: 74761 - DNA, 76 bp, Homo sapiens
tttttccacgccatggggggtcgtgaggggctcattgacacggctgtcaagactgctgagactggtgaggctttcc

SEQ ID NO: 74762 - DNA, 75 bp, Homo sapiens
gggggtcgtgaggggctcattgacacggctgtcaagactgctgagactggtgaggctttcctcaggggtcttcct

SEQ ID NO: 74763 - DNA, 78 bp, Homo sapiens
gtgaggggctcattgacacggctgtcaagactgctgagactggtgaggctttcctcaggggtcttccttgggctgtta

SEQ ID NO: 74764 - DNA, 74 bp, Homo sapiens
cccagcctgggtctttgggctttatcatccccttacttccctccaggatacatccagcggcggctgatcaagtc

SEQ ID NO: 74765 - DNA, 78 bp, Homo sapiens
gtctttgggctttatcatccccttacttccctccaggatacatccagcggcggctgatcaagtccatggagtcagtga

SEQ ID NO: 74766 - DNA, 79 bp, Homo sapiens
tttatcatccccttacttccctccaggatacatccagcggcggctgatcaagtccatggagtcagtgatggtgaagtac

SEQ ID NO: 74767 - DNA, 79 bp, Homo sapiens
ccttacttccctccaggatacatccagcggcggctgatcaagtccatggagtcagtgatggtgaagtacgacgcgactg

SEQ ID NO: 74768 - DNA, 84 bp, Homo sapiens
ctccaggatacatccagcggcggctgatcaagtccatggagtcagtgatggtgaagtacgacgcgactgtgcggaactccatca

SEQ ID NO: 74769 - DNA, 82 bp, Homo sapiens
atacatccagcggcggctgatcaagtccatggagtcagtgatggtgaagtacgacgcgactgtgcggaactccatcaaccag

SEQ ID NO: 74770 - DNA, 82 bp, Homo sapiens
agcggcggctgatcaagtccatggagtcagtgatggtgaagtacgacgcgactgtgcggaactccatcaaccaggtggtgca

SEQ ID NO: 74771 - DNA, 82 bp, Homo sapiens
atcaagtccatggagtcagtgatggtgaagtacgacgcgactgtgcggaactccatcaaccaggtggtgcagctgcgctacg

SEQ ID NO: 74772 - DNA, 81 bp, Homo sapiens
atggagtcagtgatggtgaagtacgacgcgactgtgcggaactccatcaaccaggtggtgcagctgcgctacggcgaagac

SEQ ID NO: 74773 - DNA, 79 bp, Homo sapiens
atggtgaagtacgacgcgactgtgcggaactccatcaaccaggtggtgcagctgcgctacggcgaagacggcctggcag

SEQ ID NO: 74774 - DNA, 80 bp, Homo sapiens
tacgacgcgactgtgcggaactccatcaaccaggtggtgcagctgcgctacggcgaagacggcctggcaggcgagagcgt

SEQ ID NO: 74775 - DNA, 81 bp, Homo sapiens
tgtgcggaactccatcaaccaggtggtgcagctgcgctacggcgaagacggcctggcaggcgagagcgttgagttccagaa

SEQ ID NO: 74776 - DNA, 80 bp, Homo sapiens
tccatcaaccaggtggtgcagctgcgctacggcgaagacggcctggcaggcgagagcgttgagttccagaacctggctac

SEQ ID NO: 74777 - DNA, 79 bp, Homo sapiens
tggtgcagctgcgctacggcgaagacggcctggcaggcgagagcgttgagttccagaacctggctacgcttaagccttc

SEQ ID NO: 74778 - DNA, 76 bp, Homo sapiens
tgcgctacggcgaagacggcctggcaggcgagagcgttgagttccagaacctggctacgcttaagccttccaacaa

SEQ ID NO: 74779 - DNA, 74 bp, Homo sapiens
gaagacggcctggcaggcgagagcgttgagttccagaacctggctacgcttaagccttccaacaaggcttttga

SEQ ID NO: 74780 - DNA, 75 bp, Homo sapiens
ctggcaggcgagagcgttgagttccagaacctggctacgcttaagccttccaacaaggcttttgagaagaagtga

SEQ ID NO: 74781 - DNA, 72 bp, Homo sapiens
agagcgttgagttccagaacctggctacgcttaagccttccaacaaggcttttgagaagaagtgaggaggcg

SEQ ID NO: 74782 - DNA, 69 bp, Homo sapiens
aacctggctacgcttaagccttccaacaaggcttttgagaagaagtgaggaggcgggcaggcgggtggt

SEQ ID NO: 74783 - DNA, 73 bp, Homo sapiens
aaggtcccagagcccacctgtccactagctaccccttgcacttccaggttccgctttgattataccaatgaga

SEQ ID NO: 74784 - DNA, 74 bp, Homo sapiens
agagcccacctgtccactagctaccccttgcacttccaggttccgctttgattataccaatgagagggccctgc

SEQ ID NO: 74785 - DNA, 78 bp, Homo sapiens
ctgtccactagctaccccttgcacttccaggttccgctttgattataccaatgagagggccctgcggcgcactctgca

SEQ ID NO: 74786 - DNA, 75 bp, Homo sapiens
ccccttgcacttccaggttccgctttgattataccaatgagagggccctgcggcgcactctgcaggaggacctgg

SEQ ID NO: 74787 - DNA, 75 bp, Homo sapiens
acttccaggttccgctttgattataccaatgagagggccctgcggcgcactctgcaggaggacctggtgaaggac

SEQ ID NO: 74788 - DNA, 79 bp, Homo sapiens
ggttccgctttgattataccaatgagagggccctgcggcgcactctgcaggaggacctggtgaaggacgtgctgagcaa

SEQ ID NO: 74789 - DNA, 82 bp, Homo sapiens
attataccaatgagagggccctgcggcgcactctgcaggaggacctggtgaaggacgtgctgagcaacgcacacatccagaa

SEQ ID NO: 74790 - DNA, 81 bp, Homo sapiens
aatgagagggccctgcggcgcactctgcaggaggacctggtgaaggacgtgctgagcaacgcacacatccagaacgagttg

SEQ ID NO: 74791 - DNA, 80 bp, Homo sapiens
cggcgcactctgcaggaggacctggtgaaggacgtgctgagcaacgcacacatccagaacgagttggagcgggaatttga

SEQ ID NO: 74792 - DNA, 79 bp, Homo sapiens
actctgcaggaggacctggtgaaggacgtgctgagcaacgcacacatccagaacgagttggagcgggaatttgagcgga

SEQ ID NO: 74793 - DNA, 78 bp, Homo sapiens
acctggtgaaggacgtgctgagcaacgcacacatccagaacgagttggagcgggaatttgagcggatgcgggaggatc

SEQ ID NO: 74794 - DNA, 76 bp, Homo sapiens
aaggacgtgctgagcaacgcacacatccagaacgagttggagcgggaatttgagcggatgcgggaggatcgggagg

SEQ ID NO: 74795 - DNA, 78 bp, Homo sapiens
agcaacgcacacatccagaacgagttggagcgggaatttgagcggatgcgggaggatcgggaggtgctcagggtcatc

SEQ ID NO: 74796 - DNA, 75 bp, Homo sapiens
acatccagaacgagttggagcgggaatttgagcggatgcgggaggatcgggaggtgctcagggtcatcttcccaa

SEQ ID NO: 74797 - DNA, 74 bp, Homo sapiens
agaacgagttggagcgggaatttgagcggatgcgggaggatcgggaggtgctcagggtcatcttcccaactgga

SEQ ID NO: 74798 - DNA, 77 bp, Homo sapiens
gggaatttgagcggatgcgggaggatcgggaggtgctcagggtcatcttcccaactggagacagcaaggtgcgtgtg

SEQ ID NO: 74799 - DNA, 78 bp, Homo sapiens
ttgagcggatgcgggaggatcgggaggtgctcagggtcatcttcccaactggagacagcaaggtgcgtgtgggtcgaa

SEQ ID NO: 74800 - DNA, 82 bp, Homo sapiens
gaggatcgggaggtgctcagggtcatcttcccaactggagacagcaaggtgcgtgtgggtcgaagtgctgatgctagagatg

SEQ ID NO: 74801 - DNA, 73 bp, Homo sapiens
atggctgtccccagacacagccctccctccatttccccctctctcaggtcgtcctcccctgtaacctgctgcg

SEQ ID NO: 74802 - DNA, 77 bp, Homo sapiens
cagacacagccctccctccatttccccctctctcaggtcgtcctcccctgtaacctgctgcggatgatctggaatgc

SEQ ID NO: 74803 - DNA, 75 bp, Homo sapiens
cctccctccatttccccctctctcaggtcgtcctcccctgtaacctgctgcggatgatctggaatgctcagaaaa

SEQ ID NO: 74804 - DNA, 78 bp, Homo sapiens
tttccccctctctcaggtcgtcctcccctgtaacctgctgcggatgatctggaatgctcagaaaatcttccacatcaa

SEQ ID NO: 74805 - DNA, 79 bp, Homo sapiens
tctcaggtcgtcctcccctgtaacctgctgcggatgatctggaatgctcagaaaatcttccacatcaacccacgccttc

SEQ ID NO: 74806 - DNA, 77 bp, Homo sapiens
gtcgtcctcccctgtaacctgctgcggatgatctggaatgctcagaaaatcttccacatcaacccacgccttccctc

SEQ ID NO: 74807 - DNA, 78 bp, Homo sapiens
ctgtaacctgctgcggatgatctggaatgctcagaaaatcttccacatcaacccacgccttccctccgacctgcaccc

SEQ ID NO: 74808 - DNA, 76 bp, Homo sapiens
cggatgatctggaatgctcagaaaatcttccacatcaacccacgccttccctccgacctgcaccccatcaaagtgg

SEQ ID NO: 74809 - DNA, 75 bp, Homo sapiens
atctggaatgctcagaaaatcttccacatcaacccacgccttccctccgacctgcaccccatcaaagtggtggag

SEQ ID NO: 74810 - DNA, 70 bp, Homo sapiens
agaaaatcttccacatcaacccacgccttccctccgacctgcaccccatcaaagtggtggagggtaagta

SEQ ID NO: 74811 - DNA, 72 bp, Homo sapiens
tcttccacatcaacccacgccttccctccgacctgcaccccatcaaagtggtggagggtaagtacctgctta

SEQ ID NO: 74812 - DNA, 69 bp, Homo sapiens
ccacgccttccctccgacctgcaccccatcaaagtggtggagggtaagtacctgcttaggggtctccaa

SEQ ID NO: 74813 - DNA, 71 bp, Homo sapiens
ttccctccgacctgcaccccatcaaagtggtggagggtaagtacctgcttaggggtctccaagccaggcta

SEQ ID NO: 74814 - DNA, 75 bp, Homo sapiens
actgctgggccctggtctaatgatctcctcacctttaattggtccccaggagtcaaggaattgagcaagaagctg

SEQ ID NO: 74815 - DNA, 77 bp, Homo sapiens
ctggtctaatgatctcctcacctttaattggtccccaggagtcaaggaattgagcaagaagctggtgattgtgaatg

SEQ ID NO: 74816 - DNA, 77 bp, Homo sapiens
aatgatctcctcacctttaattggtccccaggagtcaaggaattgagcaagaagctggtgattgtgaatggggatga

SEQ ID NO: 74817 - DNA, 73 bp, Homo sapiens
acctttaattggtccccaggagtcaaggaattgagcaagaagctggtgattgtgaatggggatgacccactaa

SEQ ID NO: 74818 - DNA, 76 bp, Homo sapiens
ttggtccccaggagtcaaggaattgagcaagaagctggtgattgtgaatggggatgacccactaagtcgacaggcc

SEQ ID NO: 74819 - DNA, 77 bp, Homo sapiens
agtcaaggaattgagcaagaagctggtgattgtgaatggggatgacccactaagtcgacaggcccaggaaaatgcca

SEQ ID NO: 74820 - DNA, 78 bp, Homo sapiens
aattgagcaagaagctggtgattgtgaatggggatgacccactaagtcgacaggcccaggaaaatgccacgctgctct

SEQ ID NO: 74821 - DNA, 78 bp, Homo sapiens
aagctggtgattgtgaatggggatgacccactaagtcgacaggcccaggaaaatgccacgctgctcttcaacatccac

SEQ ID NO: 74822 - DNA, 77 bp, Homo sapiens
attgtgaatggggatgacccactaagtcgacaggcccaggaaaatgccacgctgctcttcaacatccacctgcggtc

SEQ ID NO: 74823 - DNA, 76 bp, Homo sapiens
atgacccactaagtcgacaggcccaggaaaatgccacgctgctcttcaacatccacctgcggtccacgttgtgttc

SEQ ID NO: 74824 - DNA, 74 bp, Homo sapiens
actaagtcgacaggcccaggaaaatgccacgctgctcttcaacatccacctgcggtccacgttgtgttcccgcc

SEQ ID NO: 74825 - DNA, 77 bp, Homo sapiens
ccaggaaaatgccacgctgctcttcaacatccacctgcggtccacgttgtgttcccgccgcatggcagaggagtttc

SEQ ID NO: 74826 - DNA, 78 bp, Homo sapiens
aaaatgccacgctgctcttcaacatccacctgcggtccacgttgtgttcccgccgcatggcagaggagtttcggctca

SEQ ID NO: 74827 - DNA, 74 bp, Homo sapiens
aacatccacctgcggtccacgttgtgttcccgccgcatggcagaggagtttcggctcagtggggaggccttcga

SEQ ID NO: 74828 - DNA, 76 bp, Homo sapiens
tgcggtccacgttgtgttcccgccgcatggcagaggagtttcggctcagtggggaggccttcgactggctgcttgg

SEQ ID NO: 74829 - DNA, 77 bp, Homo sapiens
ttgtgttcccgccgcatggcagaggagtttcggctcagtggggaggccttcgactggctgcttggggagattgagtc

SEQ ID NO: 74830 - DNA, 76 bp, Homo sapiens
catggcagaggagtttcggctcagtggggaggccttcgactggctgcttggggagattgagtccaagttcaaccaa

SEQ ID NO: 74831 - DNA, 73 bp, Homo sapiens
aggagtttcggctcagtggggaggccttcgactggctgcttggggagattgagtccaagttcaaccaagccat

SEQ ID NO: 74832 - DNA, 78 bp, Homo sapiens
tcagtggggaggccttcgactggctgcttggggagattgagtccaagttcaaccaagccattgtgagtgttgtgctct

SEQ ID NO: 74833 - DNA, 80 bp, Homo sapiens
aggccttcgactggctgcttggggagattgagtccaagttcaaccaagccattgtgagtgttgtgctcttcacagcagtc

SEQ ID NO: 74834 - DNA, 79 bp, Homo sapiens
actggctgcttggggagattgagtccaagttcaaccaagccattgtgagtgttgtgctcttcacagcagtcttcttttc

SEQ ID NO: 74835 - DNA, 73 bp, Homo sapiens
attcactgaaagagaggcgttggctttgtctgatgctagctttttcttaggcgcatcccggggaaatggtggg

SEQ ID NO: 74836 - DNA, 73 bp, Homo sapiens
aagagaggcgttggctttgtctgatgctagctttttcttaggcgcatcccggggaaatggtgggggctctggc

SEQ ID NO: 74837 - DNA, 76 bp, Homo sapiens
tttgtctgatgctagctttttcttaggcgcatcccggggaaatggtgggggctctggctgcgcagtcccttggaga

SEQ ID NO: 74838 - DNA, 74 bp, Homo sapiens
atgctagctttttcttaggcgcatcccggggaaatggtgggggctctggctgcgcagtcccttggagaacctgc

SEQ ID NO: 74839 - DNA, 72 bp, Homo sapiens
tttttcttaggcgcatcccggggaaatggtgggggctctggctgcgcagtcccttggagaacctgccaccca

SEQ ID NO: 74840 - DNA, 73 bp, Homo sapiens
atcccggggaaatggtgggggctctggctgcgcagtcccttggagaacctgccacccagatgaccttgaatac

SEQ ID NO: 74841 - DNA, 76 bp, Homo sapiens
aaatggtgggggctctggctgcgcagtcccttggagaacctgccacccagatgaccttgaataccttccactatgc

SEQ ID NO: 74842 - DNA, 82 bp, Homo sapiens
gctctggctgcgcagtcccttggagaacctgccacccagatgaccttgaataccttccactatgctggtgtgtctgccaaga

SEQ ID NO: 74843 - DNA, 79 bp, Homo sapiens
cgcagtcccttggagaacctgccacccagatgaccttgaataccttccactatgctggtgtgtctgccaagaatgtgac

SEQ ID NO: 74844 - DNA, 79 bp, Homo sapiens
cttggagaacctgccacccagatgaccttgaataccttccactatgctggtgtgtctgccaagaatgtgacgctgggtg

SEQ ID NO: 74845 - DNA, 80 bp, Homo sapiens
tgccacccagatgaccttgaataccttccactatgctggtgtgtctgccaagaatgtgacgctgggtgtgccccgactta

SEQ ID NO: 74846 - DNA, 79 bp, Homo sapiens
atgaccttgaataccttccactatgctggtgtgtctgccaagaatgtgacgctgggtgtgccccgacttaaggagctca

SEQ ID NO: 74847 - DNA, 78 bp, Homo sapiens
aataccttccactatgctggtgtgtctgccaagaatgtgacgctgggtgtgccccgacttaaggagctcatcaacatt

SEQ ID NO: 74848 - DNA, 80 bp, Homo sapiens
tatgctggtgtgtctgccaagaatgtgacgctgggtgtgccccgacttaaggagctcatcaacatttccaagaagccaaa

SEQ ID NO: 74849 - DNA, 77 bp, Homo sapiens
tgtctgccaagaatgtgacgctgggtgtgccccgacttaaggagctcatcaacatttccaagaagccaaagactcct

SEQ ID NO: 74850 - DNA, 75 bp, Homo sapiens
agaatgtgacgctgggtgtgccccgacttaaggagctcatcaacatttccaagaagccaaagactccttcgctta

SEQ ID NO: 74851 - DNA, 73 bp, Homo sapiens
ctgggtgtgccccgacttaaggagctcatcaacatttccaagaagccaaagactccttcgcttactgtcttcc

SEQ ID NO: 74852 - DNA, 73 bp, Homo sapiens
cccgacttaaggagctcatcaacatttccaagaagccaaagactccttcgcttactgtcttcctgttgggcca

SEQ ID NO: 74853 - DNA, 75 bp, Homo sapiens
ttaaggagctcatcaacatttccaagaagccaaagactccttcgcttactgtcttcctgttgggccagtccgctc

SEQ ID NO: 74854 - DNA, 78 bp, Homo sapiens
atcaacatttccaagaagccaaagactccttcgcttactgtcttcctgttgggccagtccgctcgagatgctgagaga

SEQ ID NO: 74855 - DNA, 76 bp, Homo sapiens
aagaagccaaagactccttcgcttactgtcttcctgttgggccagtccgctcgagatgctgagagagccaaggtag

SEQ ID NO: 74856 - DNA, 77 bp, Homo sapiens
aaagactccttcgcttactgtcttcctgttgggccagtccgctcgagatgctgagagagccaaggtagggatcagga

SEQ ID NO: 74857 - DNA, 77 bp, Homo sapiens
cttactgtcttcctgttgggccagtccgctcgagatgctgagagagccaaggtagggatcaggactgctgggctttt

SEQ ID NO: 74858 - DNA, 77 bp, Homo sapiens
ttcctgttgggccagtccgctcgagatgctgagagagccaaggtagggatcaggactgctgggctttttggccggaa

SEQ ID NO: 74859 - DNA, 79 bp, Homo sapiens
tttagagctactcagttccctgtgtcatggacttctgtctcttcccaggatattctgtgccgtctggagcatacaacgt

SEQ ID NO: 74860 - DNA, 79 bp, Homo sapiens
tactcagttccctgtgtcatggacttctgtctcttcccaggatattctgtgccgtctggagcatacaacgttgaggaag

SEQ ID NO: 74861 - DNA, 82 bp, Homo sapiens
tgtgtcatggacttctgtctcttcccaggatattctgtgccgtctggagcatacaacgttgaggaaggtgactgccaacaca

SEQ ID NO: 74862 - DNA, 81 bp, Homo sapiens
ttctgtctcttcccaggatattctgtgccgtctggagcatacaacgttgaggaaggtgactgccaacacagccatctacta

SEQ ID NO: 74863 - DNA, 81 bp, Homo sapiens
tctcttcccaggatattctgtgccgtctggagcatacaacgttgaggaaggtgactgccaacacagccatctactatgacc

SEQ ID NO: 74864 - DNA, 78 bp, Homo sapiens
ggatattctgtgccgtctggagcatacaacgttgaggaaggtgactgccaacacagccatctactatgaccccaaccc

SEQ ID NO: 74865 - DNA, 77 bp, Homo sapiens
gtctggagcatacaacgttgaggaaggtgactgccaacacagccatctactatgaccccaacccccagagcacggtg

SEQ ID NO: 74866 - DNA, 76 bp, Homo sapiens
atacaacgttgaggaaggtgactgccaacacagccatctactatgaccccaacccccagagcacggtggtggcaga

SEQ ID NO: 74867 - DNA, 78 bp, Homo sapiens
ttgaggaaggtgactgccaacacagccatctactatgaccccaacccccagagcacggtggtggcagaggatcaggaa

SEQ ID NO: 74868 - DNA, 79 bp, Homo sapiens
tgccaacacagccatctactatgaccccaacccccagagcacggtggtggcagaggatcaggaatgggtgaatgtctac

SEQ ID NO: 74869 - DNA, 77 bp, Homo sapiens
tatgaccccaacccccagagcacggtggtggcagaggatcaggaatgggtgaatgtctactatgaaatgcctgactt

SEQ ID NO: 74870 - DNA, 78 bp, Homo sapiens
aacccccagagcacggtggtggcagaggatcaggaatgggtgaatgtctactatgaaatgcctgactttgatgtggcc

SEQ ID NO: 74871 - DNA, 80 bp, Homo sapiens
agagcacggtggtggcagaggatcaggaatgggtgaatgtctactatgaaatgcctgactttgatgtggcccgaatctcc

SEQ ID NO: 74872 - DNA, 79 bp, Homo sapiens
cagaggatcaggaatgggtgaatgtctactatgaaatgcctgactttgatgtggcccgaatctccccctggctgttgcg

SEQ ID NO: 74873 - DNA, 77 bp, Homo sapiens
atcaggaatgggtgaatgtctactatgaaatgcctgactttgatgtggcccgaatctccccctggctgttgcgggtg

SEQ ID NO: 74874 - DNA, 77 bp, Homo sapiens
aatgtctactatgaaatgcctgactttgatgtggcccgaatctccccctggctgttgcgggtggagctggatcggaa

SEQ ID NO: 74875 - DNA, 80 bp, Homo sapiens
tgactttgatgtggcccgaatctccccctggctgttgcgggtggagctggatcggaagcacatgactgaccggaagctca

SEQ ID NO: 74876 - DNA, 80 bp, Homo sapiens
ttgatgtggcccgaatctccccctggctgttgcgggtggagctggatcggaagcacatgactgaccggaagctcaccatg

SEQ ID NO: 74877 - DNA, 82 bp, Homo sapiens
aatctccccctggctgttgcgggtggagctggatcggaagcacatgactgaccggaagctcaccatggagcagattgctgaa

SEQ ID NO: 74878 - DNA, 83 bp, Homo sapiens
ccctggctgttgcgggtggagctggatcggaagcacatgactgaccggaagctcaccatggagcagattgctgaaaagatcaa

SEQ ID NO: 74879 - DNA, 85 bp, Homo sapiens
gtggagctggatcggaagcacatgactgaccggaagctcaccatggagcagattgctgaaaagatcaatgctggtaagcctagga

SEQ ID NO: 74880 - DNA, 84 bp, Homo sapiens
tggatcggaagcacatgactgaccggaagctcaccatggagcagattgctgaaaagatcaatgctggtaagcctaggagggctg

SEQ ID NO: 74881 - DNA, 83 bp, Homo sapiens
aagcacatgactgaccggaagctcaccatggagcagattgctgaaaagatcaatgctggtaagcctaggagggctggcctggc

SEQ ID NO: 74882 - DNA, 82 bp, Homo sapiens
ctgaccggaagctcaccatggagcagattgctgaaaagatcaatgctggtaagcctaggagggctggcctggctcaggagcc

SEQ ID NO: 74883 - DNA, 76 bp, Homo sapiens
cagtccccttagctgcagcctttctcatggctcctcaccccaccaggttttggtgacgacttgaactgcatcttta

SEQ ID NO: 74884 - DNA, 79 bp, Homo sapiens
cttagctgcagcctttctcatggctcctcaccccaccaggttttggtgacgacttgaactgcatctttaatgatgacaa

SEQ ID NO: 74885 - DNA, 79 bp, Homo sapiens
agcctttctcatggctcctcaccccaccaggttttggtgacgacttgaactgcatctttaatgatgacaatgcagagaa

SEQ ID NO: 74886 - DNA, 79 bp, Homo sapiens
ctcctcaccccaccaggttttggtgacgacttgaactgcatctttaatgatgacaatgcagagaagctggtgctccgta

SEQ ID NO: 74887 - DNA, 84 bp, Homo sapiens
caccaggttttggtgacgacttgaactgcatctttaatgatgacaatgcagagaagctggtgctccgtattcgcatcatgaaca

SEQ ID NO: 74888 - DNA, 87 bp, Homo sapiens
ttttggtgacgacttgaactgcatctttaatgatgacaatgcagagaagctggtgctccgtattcgcatcatgaacagcgatgagaa

SEQ ID NO: 74889 - DNA, 89 bp, Homo sapiens
acgacttgaactgcatctttaatgatgacaatgcagagaagctggtgctccgtattcgcatcatgaacagcgatgagaacaagatgcaa

SEQ ID NO: 74890 - DNA, 86 bp, Homo sapiens
atctttaatgatgacaatgcagagaagctggtgctccgtattcgcatcatgaacagcgatgagaacaagatgcaagaggtaatggg

SEQ ID NO: 74891 - DNA, 85 bp, Homo sapiens
tgacaatgcagagaagctggtgctccgtattcgcatcatgaacagcgatgagaacaagatgcaagaggtaatgggggtcctagaa

SEQ ID NO: 74892 - DNA, 82 bp, Homo sapiens
agagaagctggtgctccgtattcgcatcatgaacagcgatgagaacaagatgcaagaggtaatgggggtcctagaagtcagc

SEQ ID NO: 74893 - DNA, 85 bp, Homo sapiens
tgctccgtattcgcatcatgaacagcgatgagaacaagatgcaagaggtaatgggggtcctagaagtcagcgtgtcacatgtata

SEQ ID NO: 74894 - DNA, 82 bp, Homo sapiens
gtattcgcatcatgaacagcgatgagaacaagatgcaagaggtaatgggggtcctagaagtcagcgtgtcacatgtataaaa

SEQ ID NO: 74895 - DNA, 85 bp, Homo sapiens
ggaagagaccagaggatgccaagtgctgacctcactctcactgcaggaggaagaggtggtggacaagatggatgatgatgtcttc

SEQ ID NO: 74896 - DNA, 89 bp, Homo sapiens
agaggatgccaagtgctgacctcactctcactgcaggaggaagaggtggtggacaagatggatgatgatgtcttcctgcgctgcatcga

SEQ ID NO: 74897 - DNA, 87 bp, Homo sapiens
aagtgctgacctcactctcactgcaggaggaagaggtggtggacaagatggatgatgatgtcttcctgcgctgcatcgagtccaaca

SEQ ID NO: 74898 - DNA, 92 bp, Homo sapiens
ctcactctcactgcaggaggaagaggtggtggacaagatggatgatgatgtcttcctgcgctgcatcgagtccaacatgctgacagatatga

SEQ ID NO: 74899 - DNA, 90 bp, Homo sapiens
actgcaggaggaagaggtggtggacaagatggatgatgatgtcttcctgcgctgcatcgagtccaacatgctgacagatatgaccctgca

SEQ ID NO: 74900 - DNA, 91 bp, Homo sapiens
aagaggtggtggacaagatggatgatgatgtcttcctgcgctgcatcgagtccaacatgctgacagatatgaccctgcagggcatcgagca

SEQ ID NO: 74901 - DNA, 96 bp, Homo sapiens
tggacaagatggatgatgatgtcttcctgcgctgcatcgagtccaacatgctgacagatatgaccctgcagggcatcgagcagatcagcaaggtca

SEQ ID NO: 74902 - DNA, 95 bp, Homo sapiens
atggatgatgatgtcttcctgcgctgcatcgagtccaacatgctgacagatatgaccctgcagggcatcgagcagatcagcaaggtcagccatcc

SEQ ID NO: 74903 - DNA, 92 bp, Homo sapiens
atgtcttcctgcgctgcatcgagtccaacatgctgacagatatgaccctgcagggcatcgagcagatcagcaaggtcagccatcccctctgc

SEQ ID NO: 74904 - DNA, 89 bp, Homo sapiens
ctgcatcgagtccaacatgctgacagatatgaccctgcagggcatcgagcagatcagcaaggtcagccatcccctctgccaccgccttc

SEQ ID NO: 74905 - DNA, 87 bp, Homo sapiens
tcgagtccaacatgctgacagatatgaccctgcagggcatcgagcagatcagcaaggtcagccatcccctctgccaccgccttcctc

SEQ ID NO: 74906 - DNA, 85 bp, Homo sapiens
atgctgacagatatgaccctgcagggcatcgagcagatcagcaaggtcagccatcccctctgccaccgccttcctcctcccactc

SEQ ID NO: 74907 - DNA, 81 bp, Homo sapiens
ccacactcccctccctgcctactctgagcacgctgtcttcccacaggtgtacatgcacttgccacagacagacaacaagaa

SEQ ID NO: 74908 - DNA, 86 bp, Homo sapiens
ctccctgcctactctgagcacgctgtcttcccacaggtgtacatgcacttgccacagacagacaacaagaagaagatcatcatcac

SEQ ID NO: 74909 - DNA, 86 bp, Homo sapiens
tactctgagcacgctgtcttcccacaggtgtacatgcacttgccacagacagacaacaagaagaagatcatcatcacggaggatgg

SEQ ID NO: 74910 - DNA, 81 bp, Homo sapiens
acgctgtcttcccacaggtgtacatgcacttgccacagacagacaacaagaagaagatcatcatcacggaggatggggaat

SEQ ID NO: 74911 - DNA, 82 bp, Homo sapiens
tcttcccacaggtgtacatgcacttgccacagacagacaacaagaagaagatcatcatcacggaggatggggaattcaaggc

SEQ ID NO: 74912 - DNA, 84 bp, Homo sapiens
tgtacatgcacttgccacagacagacaacaagaagaagatcatcatcacggaggatggggaattcaaggccctgcaggagtgga

SEQ ID NO: 74913 - DNA, 80 bp, Homo sapiens
acttgccacagacagacaacaagaagaagatcatcatcacggaggatggggaattcaaggccctgcaggagtggatcctg

SEQ ID NO: 74914 - DNA, 79 bp, Homo sapiens
agacagacaacaagaagaagatcatcatcacggaggatggggaattcaaggccctgcaggagtggatcctggagacgga

SEQ ID NO: 74915 - DNA, 79 bp, Homo sapiens
aagaagatcatcatcacggaggatggggaattcaaggccctgcaggagtggatcctggagacggacggcgtgagcttga

SEQ ID NO: 74916 - DNA, 79 bp, Homo sapiens
atcatcatcacggaggatggggaattcaaggccctgcaggagtggatcctggagacggacggcgtgagcttgatgcggg

SEQ ID NO: 74917 - DNA, 79 bp, Homo sapiens
aggatggggaattcaaggccctgcaggagtggatcctggagacggacggcgtgagcttgatgcgggtgctgagtgagaa

SEQ ID NO: 74918 - DNA, 79 bp, Homo sapiens
aattcaaggccctgcaggagtggatcctggagacggacggcgtgagcttgatgcgggtgctgagtgagaaggacgtgga

SEQ ID NO: 74919 - DNA, 79 bp, Homo sapiens
tgcaggagtggatcctggagacggacggcgtgagcttgatgcgggtgctgagtgagaaggacgtggaccccgtacgcac

SEQ ID NO: 74920 - DNA, 76 bp, Homo sapiens
atcctggagacggacggcgtgagcttgatgcgggtgctgagtgagaaggacgtggaccccgtacgcaccacgtcca

SEQ ID NO: 74921 - DNA, 76 bp, Homo sapiens
acggacggcgtgagcttgatgcgggtgctgagtgagaaggacgtggaccccgtacgcaccacgtccaatgacattg

SEQ ID NO: 74922 - DNA, 79 bp, Homo sapiens
ggcgtgagcttgatgcgggtgctgagtgagaaggacgtggaccccgtacgcaccacgtccaatgacattgtggagatct

SEQ ID NO: 74923 - DNA, 78 bp, Homo sapiens
atgcgggtgctgagtgagaaggacgtggaccccgtacgcaccacgtccaatgacattgtggagatcttcacggtgagc

SEQ ID NO: 74924 - DNA, 76 bp, Homo sapiens
ctgagtgagaaggacgtggaccccgtacgcaccacgtccaatgacattgtggagatcttcacggtgagcccgtgtg

SEQ ID NO: 74925 - DNA, 76 bp, Homo sapiens
aaggacgtggaccccgtacgcaccacgtccaatgacattgtggagatcttcacggtgagcccgtgtgtgctgccta

SEQ ID NO: 74926 - DNA, 75 bp, Homo sapiens
agagttgctcagtcctggccctcccctccacttccctcccctgtgccaggtgctgggcattgaagccgtgcggaa

SEQ ID NO: 74927 - DNA, 74 bp, Homo sapiens
tcagtcctggccctcccctccacttccctcccctgtgccaggtgctgggcattgaagccgtgcggaaggccctg

SEQ ID NO: 74928 - DNA, 74 bp, Homo sapiens
ccctccacttccctcccctgtgccaggtgctgggcattgaagccgtgcggaaggccctggagcgggagctgtac

SEQ ID NO: 74929 - DNA, 77 bp, Homo sapiens
ttccctcccctgtgccaggtgctgggcattgaagccgtgcggaaggccctggagcgggagctgtaccacgtcatctc

SEQ ID NO: 74930 - DNA, 80 bp, Homo sapiens
tgccaggtgctgggcattgaagccgtgcggaaggccctggagcgggagctgtaccacgtcatctcctttgatggctccta

SEQ ID NO: 74931 - DNA, 79 bp, Homo sapiens
tgggcattgaagccgtgcggaaggccctggagcgggagctgtaccacgtcatctcctttgatggctcctatgtcaatta

SEQ ID NO: 74932 - DNA, 76 bp, Homo sapiens
attgaagccgtgcggaaggccctggagcgggagctgtaccacgtcatctcctttgatggctcctatgtcaattacc

SEQ ID NO: 74933 - DNA, 76 bp, Homo sapiens
aaggccctggagcgggagctgtaccacgtcatctcctttgatggctcctatgtcaattaccgacacttggctctct

SEQ ID NO: 74934 - DNA, 81 bp, Homo sapiens
agcgggagctgtaccacgtcatctcctttgatggctcctatgtcaattaccgacacttggctctcttgtgtgataccatga

SEQ ID NO: 74935 - DNA, 81 bp, Homo sapiens
tgtaccacgtcatctcctttgatggctcctatgtcaattaccgacacttggctctcttgtgtgataccatgacctgtcgtg

SEQ ID NO: 74936 - DNA, 81 bp, Homo sapiens
atctcctttgatggctcctatgtcaattaccgacacttggctctcttgtgtgataccatgacctgtcgtggccacttgatg

SEQ ID NO: 74937 - DNA, 83 bp, Homo sapiens
tttgatggctcctatgtcaattaccgacacttggctctcttgtgtgataccatgacctgtcgtggccacttgatggccatcac

SEQ ID NO: 74938 - DNA, 81 bp, Homo sapiens
tatgtcaattaccgacacttggctctcttgtgtgataccatgacctgtcgtggccacttgatggccatcacccgacacgga

SEQ ID NO: 74939 - DNA, 79 bp, Homo sapiens
attaccgacacttggctctcttgtgtgataccatgacctgtcgtggccacttgatggccatcacccgacacggagtcaa

SEQ ID NO: 74940 - DNA, 80 bp, Homo sapiens
ctctcttgtgtgataccatgacctgtcgtggccacttgatggccatcacccgacacggagtcaaccgccaggacacagga

SEQ ID NO: 74941 - DNA, 81 bp, Homo sapiens
tgataccatgacctgtcgtggccacttgatggccatcacccgacacggagtcaaccgccaggacacaggaccactcatgaa

SEQ ID NO: 74942 - DNA, 78 bp, Homo sapiens
atgacctgtcgtggccacttgatggccatcacccgacacggagtcaaccgccaggacacaggaccactcatgaagtgt

SEQ ID NO: 74943 - DNA, 78 bp, Homo sapiens
tcgtggccacttgatggccatcacccgacacggagtcaaccgccaggacacaggaccactcatgaagtgttcctttga

SEQ ID NO: 74944 - DNA, 75 bp, Homo sapiens
ttgatggccatcacccgacacggagtcaaccgccaggacacaggaccactcatgaagtgttcctttgaggaaacg

SEQ ID NO: 74945 - DNA, 72 bp, Homo sapiens
cgacacggagtcaaccgccaggacacaggaccactcatgaagtgttcctttgaggaaacggtaacagtggaa

SEQ ID NO: 74946 - DNA, 72 bp, Homo sapiens
agtcaaccgccaggacacaggaccactcatgaagtgttcctttgaggaaacggtaacagtggaatttctgaa

SEQ ID NO: 74947 - DNA, 72 bp, Homo sapiens
aggacacaggaccactcatgaagtgttcctttgaggaaacggtaacagtggaatttctgaatagggcagaag

SEQ ID NO: 74948 - DNA, 81 bp, Homo sapiens
gtgctgtgtgtggaggggtctcatggggccggtctgctctgttcaggtggacgtgcttatggaagcagccgcacacggtga

SEQ ID NO: 74949 - DNA, 81 bp, Homo sapiens
tgtgtggaggggtctcatggggccggtctgctctgttcaggtggacgtgcttatggaagcagccgcacacggtgagagtga

SEQ ID NO: 74950 - DNA, 80 bp, Homo sapiens
ggtctcatggggccggtctgctctgttcaggtggacgtgcttatggaagcagccgcacacggtgagagtgaccccatgaa

SEQ ID NO: 74951 - DNA, 79 bp, Homo sapiens
cggtctgctctgttcaggtggacgtgcttatggaagcagccgcacacggtgagagtgaccccatgaagggggtctctga

SEQ ID NO: 74952 - DNA, 80 bp, Homo sapiens
ctctgttcaggtggacgtgcttatggaagcagccgcacacggtgagagtgaccccatgaagggggtctctgagaatatca

SEQ ID NO: 74953 - DNA, 81 bp, Homo sapiens
ggtggacgtgcttatggaagcagccgcacacggtgagagtgaccccatgaagggggtctctgagaatatcatgctgggcca

SEQ ID NO: 74954 - DNA, 81 bp, Homo sapiens
cttatggaagcagccgcacacggtgagagtgaccccatgaagggggtctctgagaatatcatgctgggccagctggctccg

SEQ ID NO: 74955 - DNA, 80 bp, Homo sapiens
agccgcacacggtgagagtgaccccatgaagggggtctctgagaatatcatgctgggccagctggctccggccggcactg

SEQ ID NO: 74956 - DNA, 80 bp, Homo sapiens
agagtgaccccatgaagggggtctctgagaatatcatgctgggccagctggctccggccggcactggctgctttgacctc

SEQ ID NO: 74957 - DNA, 86 bp, Homo sapiens
catgaagggggtctctgagaatatcatgctgggccagctggctccggccggcactggctgctttgacctcctgcttgatgcagaga

SEQ ID NO: 74958 - DNA, 88 bp, Homo sapiens
gtctctgagaatatcatgctgggccagctggctccggccggcactggctgctttgacctcctgcttgatgcagagaagtgcaagtatg

SEQ ID NO: 74959 - DNA, 88 bp, Homo sapiens
agaatatcatgctgggccagctggctccggccggcactggctgctttgacctcctgcttgatgcagagaagtgcaagtatggcatgga

SEQ ID NO: 74960 - DNA, 86 bp, Homo sapiens
atgctgggccagctggctccggccggcactggctgctttgacctcctgcttgatgcagagaagtgcaagtatggcatggagatccc

SEQ ID NO: 74961 - DNA, 84 bp, Homo sapiens
agctggctccggccggcactggctgctttgacctcctgcttgatgcagagaagtgcaagtatggcatggagatccccaccaata

SEQ ID NO: 74962 - DNA, 82 bp, Homo sapiens
gcactggctgctttgacctcctgcttgatgcagagaagtgcaagtatggcatggagatccccaccaatatccccggcctggg

SEQ ID NO: 74963 - DNA, 80 bp, Homo sapiens
ctttgacctcctgcttgatgcagagaagtgcaagtatggcatggagatccccaccaatatccccggcctgggggctgctg

SEQ ID NO: 74964 - DNA, 80 bp, Homo sapiens
atgcagagaagtgcaagtatggcatggagatccccaccaatatccccggcctgggggctgctggacgtgagtatgaggcc

SEQ ID NO: 74965 - DNA, 77 bp, Homo sapiens
aagtgcaagtatggcatggagatccccaccaatatccccggcctgggggctgctggacgtgagtatgaggccccagc

SEQ ID NO: 74966 - DNA, 75 bp, Homo sapiens
atggagatccccaccaatatccccggcctgggggctgctggacgtgagtatgaggccccagctgcggtacctgct

SEQ ID NO: 74967 - DNA, 79 bp, Homo sapiens
atgattgctgttcttgctcctcacgatttcctgtgttcctctttgcagccaccggcatgttctttggttcagcacccag

SEQ ID NO: 74968 - DNA, 77 bp, Homo sapiens
ctgttcttgctcctcacgatttcctgtgttcctctttgcagccaccggcatgttctttggttcagcacccagtccca

SEQ ID NO: 74969 - DNA, 75 bp, Homo sapiens
acgatttcctgtgttcctctttgcagccaccggcatgttctttggttcagcacccagtcccatgggtggaatctc

SEQ ID NO: 74970 - DNA, 80 bp, Homo sapiens
tgtgttcctctttgcagccaccggcatgttctttggttcagcacccagtcccatgggtggaatctctcctgccatgacac

SEQ ID NO: 74971 - DNA, 79 bp, Homo sapiens
tctttgcagccaccggcatgttctttggttcagcacccagtcccatgggtggaatctctcctgccatgacaccttggaa

SEQ ID NO: 74972 - DNA, 74 bp, Homo sapiens
accggcatgttctttggttcagcacccagtcccatgggtggaatctctcctgccatgacaccttggaaccaggg

SEQ ID NO: 74973 - DNA, 75 bp, Homo sapiens
tgttctttggttcagcacccagtcccatgggtggaatctctcctgccatgacaccttggaaccagggtgcaaccc

SEQ ID NO: 74974 - DNA, 76 bp, Homo sapiens
cacccagtcccatgggtggaatctctcctgccatgacaccttggaaccagggtgcaacccctgcctatggcgcctg

SEQ ID NO: 74975 - DNA, 75 bp, Homo sapiens
agtcccatgggtggaatctctcctgccatgacaccttggaaccagggtgcaacccctgcctatggcgcctggtcc

SEQ ID NO: 74976 - DNA, 75 bp, Homo sapiens
aatctctcctgccatgacaccttggaaccagggtgcaacccctgcctatggcgcctggtcccccagtgttggtga

SEQ ID NO: 74977 - DNA, 73 bp, Homo sapiens
ccatgacaccttggaaccagggtgcaacccctgcctatggcgcctggtcccccagtgttggtgagtaacctga

SEQ ID NO: 74978 - DNA, 73 bp, Homo sapiens
ttggaaccagggtgcaacccctgcctatggcgcctggtcccccagtgttggtgagtaacctgatccaggaaga

SEQ ID NO: 74979 - DNA, 72 bp, Homo sapiens
accagggtgcaacccctgcctatggcgcctggtcccccagtgttggtgagtaacctgatccaggaagagggc

SEQ ID NO: 74980 - DNA, 71 bp, Homo sapiens
ggggcctttggtctcccgctctggccttaacttgcttctctcactctatagggagtggaatgaccccaggg

SEQ ID NO: 74981 - DNA, 76 bp, Homo sapiens
tctcccgctctggccttaacttgcttctctcactctatagggagtggaatgaccccaggggcagccggcttctctc

SEQ ID NO: 74982 - DNA, 78 bp, Homo sapiens
cttaacttgcttctctcactctatagggagtggaatgaccccaggggcagccggcttctctcccagtgctgcgtcaga

SEQ ID NO: 74983 - DNA, 82 bp, Homo sapiens
ttctctcactctatagggagtggaatgaccccaggggcagccggcttctctcccagtgctgcgtcagatgccagcggcttca

SEQ ID NO: 74984 - DNA, 80 bp, Homo sapiens
actctatagggagtggaatgaccccaggggcagccggcttctctcccagtgctgcgtcagatgccagcggcttcagccca

SEQ ID NO: 74985 - DNA, 78 bp, Homo sapiens
agtggaatgaccccaggggcagccggcttctctcccagtgctgcgtcagatgccagcggcttcagcccaggttactcc

SEQ ID NO: 74986 - DNA, 79 bp, Homo sapiens
ccaggggcagccggcttctctcccagtgctgcgtcagatgccagcggcttcagcccaggttactcccctgcctggtctc

SEQ ID NO: 74987 - DNA, 78 bp, Homo sapiens
agccggcttctctcccagtgctgcgtcagatgccagcggcttcagcccaggttactcccctgcctggtctcccacacc

SEQ ID NO: 74988 - DNA, 78 bp, Homo sapiens
ttctctcccagtgctgcgtcagatgccagcggcttcagcccaggttactcccctgcctggtctcccacaccgggctcc

SEQ ID NO: 74989 - DNA, 75 bp, Homo sapiens
tgctgcgtcagatgccagcggcttcagcccaggttactcccctgcctggtctcccacaccgggctccccggggtc

SEQ ID NO: 74990 - DNA, 70 bp, Homo sapiens
agatgccagcggcttcagcccaggttactcccctgcctggtctcccacaccgggctccccggggtcccca

SEQ ID NO: 74991 - DNA, 67 bp, Homo sapiens
ttcagcccaggttactcccctgcctggtctcccacaccgggctccccggggtccccaggtccctcaa

SEQ ID NO: 74992 - DNA, 67 bp, Homo sapiens
ttactcccctgcctggtctcccacaccgggctccccggggtccccaggtccctcaagcccctacatc

SEQ ID NO: 74993 - DNA, 66 bp, Homo sapiens
cctggtctcccacaccgggctccccggggtccccaggtccctcaagcccctacatcccttcaccag

SEQ ID NO: 74994 - DNA, 67 bp, Homo sapiens
tcccacaccgggctccccggggtccccaggtccctcaagcccctacatcccttcaccaggtgagttg

SEQ ID NO: 74995 - DNA, 72 bp, Homo sapiens
tccccggggtccccaggtccctcaagcccctacatcccttcaccaggtgagttgtcgccatctgtcaggcca

SEQ ID NO: 74996 - DNA, 73 bp, Homo sapiens
tccccaggtccctcaagcccctacatcccttcaccaggtgagttgtcgccatctgtcaggccaggtttgtttc

SEQ ID NO: 74997 - DNA, 81 bp, Homo sapiens
tccattgctcatctcctttgttggctgcttccccacaggtggtgccatgtctcccagctactcgccaacgtcacctgccta

SEQ ID NO: 74998 - DNA, 77 bp, Homo sapiens
atctcctttgttggctgcttccccacaggtggtgccatgtctcccagctactcgccaacgtcacctgcctacgagcc

SEQ ID NO: 74999 - DNA, 78 bp, Homo sapiens
ttgttggctgcttccccacaggtggtgccatgtctcccagctactcgccaacgtcacctgcctacgagccccgctctc

SEQ ID NO: 75000 - DNA, 77 bp, Homo sapiens
ccacaggtggtgccatgtctcccagctactcgccaacgtcacctgcctacgagccccgctctcctgggggctacaca

SEQ ID NO: 75001 - DNA, 75 bp, Homo sapiens
ggtggtgccatgtctcccagctactcgccaacgtcacctgcctacgagccccgctctcctgggggctacacaccc

SEQ ID NO: 75002 - DNA, 72 bp, Homo sapiens
ctactcgccaacgtcacctgcctacgagccccgctctcctgggggctacacaccccagagtccctcttattc

SEQ ID NO: 75003 - DNA, 69 bp, Homo sapiens
acgtcacctgcctacgagccccgctctcctgggggctacacaccccagagtccctcttattcccccact

SEQ ID NO: 75004 - DNA, 69 bp, Homo sapiens
ctacgagccccgctctcctgggggctacacaccccagagtccctcttattcccccacttcaccctccta

SEQ ID NO: 75005 - DNA, 68 bp, Homo sapiens
tctcctgggggctacacaccccagagtccctcttattcccccacttcaccctcctactcccctacctc

SEQ ID NO: 75006 - DNA, 69 bp, Homo sapiens
ctacacaccccagagtccctcttattcccccacttcaccctcctactcccctacctctccatcctattc

SEQ ID NO: 75007 - DNA, 70 bp, Homo sapiens
cagagtccctcttattcccccacttcaccctcctactcccctacctctccatcctattctccaaccagtc

SEQ ID NO: 75008 - DNA, 70 bp, Homo sapiens
tcttattcccccacttcaccctcctactcccctacctctccatcctattctccaaccagtcccaactata

SEQ ID NO: 75009 - DNA, 72 bp, Homo sapiens
cacttcaccctcctactcccctacctctccatcctattctccaaccagtcccaactatagtcccacatcacc

SEQ ID NO: 75010 - DNA, 73 bp, Homo sapiens
cctcctactcccctacctctccatcctattctccaaccagtcccaactatagtcccacatcacccagctattc

SEQ ID NO: 75011 - DNA, 75 bp, Homo sapiens
ctacctctccatcctattctccaaccagtcccaactatagtcccacatcacccagctattcgccaacgtcaccca

SEQ ID NO: 75012 - DNA, 75 bp, Homo sapiens
atcctattctccaaccagtcccaactatagtcccacatcacccagctattcgccaacgtcacccagctactcacc

SEQ ID NO: 75013 - DNA, 74 bp, Homo sapiens
ccaaccagtcccaactatagtcccacatcacccagctattcgccaacgtcacccagctactcaccgacctctcc

SEQ ID NO: 75014 - DNA, 75 bp, Homo sapiens
agtcccaactatagtcccacatcacccagctattcgccaacgtcacccagctactcaccgacctctcccagctac

SEQ ID NO: 75015 - DNA, 77 bp, Homo sapiens
tatagtcccacatcacccagctattcgccaacgtcacccagctactcaccgacctctcccagctactcacccacctc

SEQ ID NO: 75016 - DNA, 76 bp, Homo sapiens
atcacccagctattcgccaacgtcacccagctactcaccgacctctcccagctactcacccacctctcccagctac

SEQ ID NO: 75017 - DNA, 75 bp, Homo sapiens
ctattcgccaacgtcacccagctactcaccgacctctcccagctactcacccacctctcccagctactcgcccac

SEQ ID NO: 75018 - DNA, 75 bp, Homo sapiens
acccagctactcaccgacctctcccagctactcacccacctctcccagctactcgcccacctctcccagctactc

SEQ ID NO: 75019 - DNA, 78 bp, Homo sapiens
tctcccagctactcacccacctctcccagctactcgcccacctctcccagctactcgcccacctctcccagctactca

SEQ ID NO: 75020 - DNA, 75 bp, Homo sapiens
tactcacccacctctcccagctactcgcccacctctcccagctactcgcccacctctcccagctactcacccact

SEQ ID NO: 75021 - DNA, 75 bp, Homo sapiens
tctcccagctactcgcccacctctcccagctactcgcccacctctcccagctactcacccacttcccctagctac

SEQ ID NO: 75022 - DNA, 72 bp, Homo sapiens
ccacctctcccagctactcgcccacctctcccagctactcacccacttcccctagctactcgcccacttccc

SEQ ID NO: 75023 - DNA, 73 bp, Homo sapiens
tactcgcccacctctcccagctactcacccacttcccctagctactcgcccacttcccctagctactcgccaa

SEQ ID NO: 75024 - DNA, 71 bp, Homo sapiens
acctctcccagctactcacccacttcccctagctactcgcccacttcccctagctactcgccaacgtctcc

SEQ ID NO: 75025 - DNA, 72 bp, Homo sapiens
cccagctactcacccacttcccctagctactcgcccacttcccctagctactcgccaacgtctcccagctac

SEQ ID NO: 75026 - DNA, 75 bp, Homo sapiens
ccctagctactcgcccacttcccctagctactcgccaacgtctcccagctactcaccgacatctcccagctactc

SEQ ID NO: 75027 - DNA, 78 bp, Homo sapiens
ctagctactcgccaacgtctcccagctactcaccgacatctcccagctactcgccaacttcacccagctattctccca

SEQ ID NO: 75028 - DNA, 77 bp, Homo sapiens
ctcgccaacgtctcccagctactcaccgacatctcccagctactcgccaacttcacccagctattctcccacttctc

SEQ ID NO: 75029 - DNA, 78 bp, Homo sapiens
ccagctactcaccgacatctcccagctactcgccaacttcacccagctattctcccacttctcccagctactcaccta

SEQ ID NO: 75030 - DNA, 76 bp, Homo sapiens
actcaccgacatctcccagctactcgccaacttcacccagctattctcccacttctcccagctactcacctacctc

SEQ ID NO: 75031 - DNA, 76 bp, Homo sapiens
atctcccagctactcgccaacttcacccagctattctcccacttctcccagctactcacctacctctccaagctat

SEQ ID NO: 75032 - DNA, 75 bp, Homo sapiens
tactcgccaacttcacccagctattctcccacttctcccagctactcacctacctctccaagctattcacccacc

SEQ ID NO: 75033 - DNA, 75 bp, Homo sapiens
ttcacccagctattctcccacttctcccagctactcacctacctctccaagctattcacccacctcccccagcta

SEQ ID NO: 75034 - DNA, 72 bp, Homo sapiens
tcccagctactcacctacctctccaagctattcacccacctcccccagctactcacccacttccccaagtta

SEQ ID NO: 75035 - DNA, 71 bp, Homo sapiens
ctactcacctacctctccaagctattcacccacctcccccagctactcacccacttccccaagttactcac

SEQ ID NO: 75036 - DNA, 71 bp, Homo sapiens
tacctctccaagctattcacccacctcccccagctactcacccacttccccaagttactcacccaccagcc

SEQ ID NO: 75037 - DNA, 70 bp, Homo sapiens
tattcacccacctcccccagctactcacccacttccccaagttactcacccaccagcccgaactattctc

SEQ ID NO: 75038 - DNA, 68 bp, Homo sapiens
acctcccccagctactcacccacttccccaagttactcacccaccagcccgaactattctccaaccag

SEQ ID NO: 75039 - DNA, 69 bp, Homo sapiens
acttccccaagttactcacccaccagcccgaactattctccaaccagtcccaattacaccccaacatca

SEQ ID NO: 75040 - DNA, 74 bp, Homo sapiens
accagtcccaattacaccccaacatcacccagctacagcccgacatcacccagctattcacctactagtcccaa

SEQ ID NO: 75041 - DNA, 74 bp, Homo sapiens
aattacaccccaacatcacccagctacagcccgacatcacccagctattcacctactagtcccaactacacacc

SEQ ID NO: 75042 - DNA, 75 bp, Homo sapiens
aacatcacccagctacagcccgacatcacccagctattcacctactagtcccaactacacacctaccagccctaa

SEQ ID NO: 75043 - DNA, 74 bp, Homo sapiens
acccagctacagcccgacatcacccagctattcacctactagtcccaactacacacctaccagccctaactaca

SEQ ID NO: 75044 - DNA, 74 bp, Homo sapiens
cgacatcacccagctattcacctactagtcccaactacacacctaccagccctaactacagcccaacctctcca

SEQ ID NO: 75045 - DNA, 72 bp, Homo sapiens
acccagctattcacctactagtcccaactacacacctaccagccctaactacagcccaacctctccaagcta

SEQ ID NO: 75046 - DNA, 72 bp, Homo sapiens
attcacctactagtcccaactacacacctaccagccctaactacagcccaacctctccaagctactctccaa

SEQ ID NO: 75047 - DNA, 74 bp, Homo sapiens
gtcccaactacacacctaccagccctaactacagcccaacctctccaagctactctccaacatcacccagctat

SEQ ID NO: 75048 - DNA, 73 bp, Homo sapiens
acctaccagccctaactacagcccaacctctccaagctactctccaacatcacccagctattccccgacctca

SEQ ID NO: 75049 - DNA, 72 bp, Homo sapiens
ccctaactacagcccaacctctccaagctactctccaacatcacccagctattccccgacctcaccaagtta

SEQ ID NO: 75050 - DNA, 72 bp, Homo sapiens
tacagcccaacctctccaagctactctccaacatcacccagctattccccgacctcaccaagttactcccct

SEQ ID NO: 75051 - DNA, 74 bp, Homo sapiens
tactctccaacatcacccagctattccccgacctcaccaagttactccccttccagcccacgatacacaccaca

SEQ ID NO: 75052 - DNA, 72 bp, Homo sapiens
atcacccagctattccccgacctcaccaagttactccccttccagcccacgatacacaccacagtctccaac

SEQ ID NO: 75053 - DNA, 71 bp, Homo sapiens
agctattccccgacctcaccaagttactccccttccagcccacgatacacaccacagtctccaacctatac

SEQ ID NO: 75054 - DNA, 71 bp, Homo sapiens
acctcaccaagttactccccttccagcccacgatacacaccacagtctccaacctataccccaagctcacc

SEQ ID NO: 75055 - DNA, 78 bp, Homo sapiens
ttccagcccacgatacacaccacagtctccaacctataccccaagctcacccagctacagccccagctcgcccagcta

SEQ ID NO: 75056 - DNA, 78 bp, Homo sapiens
acgatacacaccacagtctccaacctataccccaagctcacccagctacagccccagctcgcccagctacagcccagc

SEQ ID NO: 75057 - DNA, 74 bp, Homo sapiens
aacctataccccaagctcacccagctacagccccagctcgcccagctacagcccagcctcacccaagtacaccc

SEQ ID NO: 75058 - DNA, 73 bp, Homo sapiens
cccagctcgcccagctacagcccagcctcacccaagtacaccccaaccagtccttcttacagtcccagctccc

SEQ ID NO: 75059 - DNA, 72 bp, Homo sapiens
agctacagcccagcctcacccaagtacaccccaaccagtccttcttacagtcccagctccccagagtatacc

SEQ ID NO: 75060 - DNA, 70 bp, Homo sapiens
cagcctcacccaagtacaccccaaccagtccttcttacagtcccagctccccagagtataccccaacctc

SEQ ID NO: 75061 - DNA, 69 bp, Homo sapiens
caagtacaccccaaccagtccttcttacagtcccagctccccagagtataccccaacctctcccaagta

SEQ ID NO: 75062 - DNA, 70 bp, Homo sapiens
ccaaccagtccttcttacagtcccagctccccagagtataccccaacctctcccaagtactcacctacca

SEQ ID NO: 75063 - DNA, 71 bp, Homo sapiens
tacagtcccagctccccagagtataccccaacctctcccaagtactcacctaccagtcccaaatattcacc

SEQ ID NO: 75064 - DNA, 69 bp, Homo sapiens
cccagagtataccccaacctctcccaagtactcacctaccagtcccaaatattcacccacctctcccaa

SEQ ID NO: 75065 - DNA, 69 bp, Homo sapiens
gtataccccaacctctcccaagtactcacctaccagtcccaaatattcacccacctctcccaagtactc

SEQ ID NO: 75066 - DNA, 70 bp, Homo sapiens
tcccaagtactcacctaccagtcccaaatattcacccacctctcccaagtactcgcctaccagtcccacc

SEQ ID NO: 75067 - DNA, 71 bp, Homo sapiens
agtactcacctaccagtcccaaatattcacccacctctcccaagtactcgcctaccagtcccacctattca

SEQ ID NO: 75068 - DNA, 68 bp, Homo sapiens
aaatattcacccacctctcccaagtactcgcctaccagtcccacctattcacccaccaccccaaaata

SEQ ID NO: 75069 - DNA, 70 bp, Homo sapiens
tctcccaagtactcgcctaccagtcccacctattcacccaccaccccaaaatactccccaacatctccta

SEQ ID NO: 75070 - DNA, 68 bp, Homo sapiens
aagtactcgcctaccagtcccacctattcacccaccaccccaaaatactccccaacatctcctactta

SEQ ID NO: 75071 - DNA, 67 bp, Homo sapiens
ctaccagtcccacctattcacccaccaccccaaaatactccccaacatctcctacttattccccaac

SEQ ID NO: 75072 - DNA, 68 bp, Homo sapiens
acctattcacccaccaccccaaaatactccccaacatctcctacttattccccaacctctccagtcta

SEQ ID NO: 75073 - DNA, 66 bp, Homo sapiens
accaccccaaaatactccccaacatctcctacttattccccaacctctccagtctacaccccaacc

SEQ ID NO: 75074 - DNA, 68 bp, Homo sapiens
aaatactccccaacatctcctacttattccccaacctctccagtctacaccccaacctctcccaagta

SEQ ID NO: 75075 - DNA, 69 bp, Homo sapiens
tacttattccccaacctctccagtctacaccccaacctctcccaagtactcacctactagccccactta

SEQ ID NO: 75076 - DNA, 69 bp, Homo sapiens
aacctctccagtctacaccccaacctctcccaagtactcacctactagccccacttactcgcccacttc

SEQ ID NO: 75077 - DNA, 68 bp, Homo sapiens
gtctacaccccaacctctcccaagtactcacctactagccccacttactcgcccacttcccccaagta

SEQ ID NO: 75078 - DNA, 69 bp, Homo sapiens
caacctctcccaagtactcacctactagccccacttactcgcccacttcccccaagtactcgcccacca

SEQ ID NO: 75079 - DNA, 70 bp, Homo sapiens
tctcccaagtactcacctactagccccacttactcgcccacttcccccaagtactcgcccaccagcccca

SEQ ID NO: 75080 - DNA, 69 bp, Homo sapiens
actcacctactagccccacttactcgcccacttcccccaagtactcgcccaccagccccacctactcgc

SEQ ID NO: 75081 - DNA, 68 bp, Homo sapiens
tagccccacttactcgcccacttcccccaagtactcgcccaccagccccacctactcgcccacctccc

SEQ ID NO: 75082 - DNA, 69 bp, Homo sapiens
tactcgcccacttcccccaagtactcgcccaccagccccacctactcgcccacctcccccaaaggctca

SEQ ID NO: 75083 - DNA, 68 bp, Homo sapiens
gtactcgcccaccagccccacctactcgcccacctcccccaaaggctcaacctactctcccacttccc

SEQ ID NO: 75084 - DNA, 66 bp, Homo sapiens
accagccccacctactcgcccacctcccccaaaggctcaacctactctcccacttcccctggttac

SEQ ID NO: 75085 - DNA, 68 bp, Homo sapiens
ctactcgcccacctcccccaaaggctcaacctactctcccacttcccctggttactcgcccaccagcc

SEQ ID NO: 75086 - DNA, 70 bp, Homo sapiens
tcccccaaaggctcaacctactctcccacttcccctggttactcgcccaccagccccacctacagtctca

SEQ ID NO: 75087 - DNA, 70 bp, Homo sapiens
aaaggctcaacctactctcccacttcccctggttactcgcccaccagccccacctacagtctcacaagcc

SEQ ID NO: 75088 - DNA, 74 bp, Homo sapiens
tctcccacttcccctggttactcgcccaccagccccacctacagtctcacaagcccggctatcagcccggatga

SEQ ID NO: 75089 - DNA, 74 bp, Homo sapiens
acttcccctggttactcgcccaccagccccacctacagtctcacaagcccggctatcagcccggatgacagtga

SEQ ID NO: 75090 - DNA, 76 bp, Homo sapiens
accagccccacctacagtctcacaagcccggctatcagcccggatgacagtgacgaggagaactgagggcacgtgg

SEQ ID NO: 75091 - DNA, 78 bp, Homo sapiens
acctacagtctcacaagcccggctatcagcccggatgacagtgacgaggagaactgagggcacgtggggtgcggcagc

SEQ ID NO: 75092 - DNA, 77 bp, Homo sapiens
cggctatcagcccggatgacagtgacgaggagaactgagggcacgtggggtgcggcagcgggctagggcccagggca

SEQ ID NO: 75093 - DNA, 79 bp, Homo sapiens
atgacagtgacgaggagaactgagggcacgtggggtgcggcagcgggctagggcccagggcagcttgcccgtgctgctg

SEQ ID NO: 75094 - DNA, 80 bp, Homo sapiens
tgacgaggagaactgagggcacgtggggtgcggcagcgggctagggcccagggcagcttgcccgtgctgctgtgcagttc

SEQ ID NO: 75095 - DNA, 79 bp, Homo sapiens
agaactgagggcacgtggggtgcggcagcgggctagggcccagggcagcttgcccgtgctgctgtgcagttcttgcctc

SEQ ID NO: 75096 - DNA, 76 bp, Homo sapiens
acgtggggtgcggcagcgggctagggcccagggcagcttgcccgtgctgctgtgcagttcttgcctccctcacggg

SEQ ID NO: 75097 - DNA, 78 bp, Homo sapiens
tgcggcagcgggctagggcccagggcagcttgcccgtgctgctgtgcagttcttgcctccctcacggggcgtcacccc

SEQ ID NO: 75098 - DNA, 77 bp, Homo sapiens
ctagggcccagggcagcttgcccgtgctgctgtgcagttcttgcctccctcacggggcgtcacccccagcccagctc

SEQ ID NO: 75099 - DNA, 77 bp, Homo sapiens
cagcttgcccgtgctgctgtgcagttcttgcctccctcacggggcgtcacccccagcccagctccgttgtacataaa

SEQ ID NO: 75100 - DNA, 77 bp, Homo sapiens
cgtgctgctgtgcagttcttgcctccctcacggggcgtcacccccagcccagctccgttgtacataaatgccttgtg

SEQ ID NO: 75101 - DNA, 78 bp, Homo sapiens
tgtgcagttcttgcctccctcacggggcgtcacccccagcccagctccgttgtacataaatgccttgtggcagagctc

SEQ ID NO: 75102 - DNA, 73 bp, Homo sapiens
cctccctcacggggcgtcacccccagcccagctccgttgtacataaatgccttgtggcagagctcccggtgaa

SEQ ID NO: 75103 - DNA, 75 bp, Homo sapiens
tcacggggcgtcacccccagcccagctccgttgtacataaatgccttgtggcagagctcccggtgaacttctgga

SEQ ID NO: 75104 - DNA, 77 bp, Homo sapiens
ccccagcccagctccgttgtacataaatgccttgtggcagagctcccggtgaacttctggatcccgtttctgatgca

SEQ ID NO: 75105 - DNA, 78 bp, Homo sapiens
agctccgttgtacataaatgccttgtggcagagctcccggtgaacttctggatcccgtttctgatgcagactcttgtc

SEQ ID NO: 75106 - DNA, 78 bp, Homo sapiens
gttgtacataaatgccttgtggcagagctcccggtgaacttctggatcccgtttctgatgcagactcttgtcttgttc

SEQ ID NO: 75107 - DNA, 79 bp, Homo sapiens
cttgtggcagagctcccggtgaacttctggatcccgtttctgatgcagactcttgtcttgttctccacttgtgctgtta

SEQ ID NO: 75108 - DNA, 78 bp, Homo sapiens
agagctcccggtgaacttctggatcccgtttctgatgcagactcttgtcttgttctccacttgtgctgttagaactca

SEQ ID NO: 75109 - DNA, 79 bp, Homo sapiens
gtgaacttctggatcccgtttctgatgcagactcttgtcttgttctccacttgtgctgttagaactcactggcccagtg

SEQ ID NO: 75110 - DNA, 79 bp, Homo sapiens
atcccgtttctgatgcagactcttgtcttgttctccacttgtgctgttagaactcactggcccagtggtgttctcactc

SEQ ID NO: 75111 - DNA, 79 bp, Homo sapiens
gtttctgatgcagactcttgtcttgttctccacttgtgctgttagaactcactggcccagtggtgttctcactcctacc

SEQ ID NO: 75112 - DNA, 75 bp, Homo sapiens
agactcttgtcttgttctccacttgtgctgttagaactcactggcccagtggtgttctcactcctaccccaccca

SEQ ID NO: 75113 - DNA, 74 bp, Homo sapiens
tcttgttctccacttgtgctgttagaactcactggcccagtggtgttctcactcctaccccacccaccccctgc

SEQ ID NO: 75114 - DNA, 72 bp, Homo sapiens
ttgtgctgttagaactcactggcccagtggtgttctcactcctaccccacccaccccctgcctgtccccaaa

SEQ ID NO: 75115 - DNA, 71 bp, Homo sapiens
ttagaactcactggcccagtggtgttctcactcctaccccacccaccccctgcctgtccccaaattgaaga

SEQ ID NO: 75116 - DNA, 69 bp, Homo sapiens
actggcccagtggtgttctcactcctaccccacccaccccctgcctgtccccaaattgaagatccttcc

SEQ ID NO: 75117 - DNA, 70 bp, Homo sapiens
actcctaccccacccaccccctgcctgtccccaaattgaagatccttccttgcctgtggcttgatgcggg

SEQ ID NO: 75118 - DNA, 69 bp, Homo sapiens
accccctgcctgtccccaaattgaagatccttccttgcctgtggcttgatgcggggcgggtaaagggta

SEQ ID NO: 75119 - DNA, 69 bp, Homo sapiens
tgtccccaaattgaagatccttccttgcctgtggcttgatgcggggcgggtaaagggtattttaactta

SEQ ID NO: 75120 - DNA, 67 bp, Homo sapiens
ccaaattgaagatccttccttgcctgtggcttgatgcggggcgggtaaagggtattttaacttaggg

SEQ ID NO: 75121 - DNA, 69 bp, Homo sapiens
cttccttgcctgtggcttgatgcggggcgggtaaagggtattttaacttaggggtagttcctgctgtga

SEQ ID NO: 75122 - DNA, 69 bp, Homo sapiens
ctgtggcttgatgcggggcgggtaaagggtattttaacttaggggtagttcctgctgtgagtggttaca

SEQ ID NO: 75123 - DNA, 70 bp, Homo sapiens
ttgatgcggggcgggtaaagggtattttaacttaggggtagttcctgctgtgagtggttacagctgatcc

SEQ ID NO: 75124 - DNA, 69 bp, Homo sapiens
taaagggtattttaacttaggggtagttcctgctgtgagtggttacagctgatcctcgggaagaacaaa

SEQ ID NO: 75125 - DNA, 70 bp, Homo sapiens
ggtattttaacttaggggtagttcctgctgtgagtggttacagctgatcctcgggaagaacaaagctaaa

SEQ ID NO: 75126 - DNA, 74 bp, Homo sapiens
gggtagttcctgctgtgagtggttacagctgatcctcgggaagaacaaagctaaagctgccttttgtctgttat

SEQ ID NO: 75127 - DNA, 74 bp, Homo sapiens
ttcctgctgtgagtggttacagctgatcctcgggaagaacaaagctaaagctgccttttgtctgttattttatt

SEQ ID NO: 75128 - DNA, 67 bp, Homo sapiens
ttatttttttgaagtttaaataaagtttactaattttgaccaaaagtatgtacatcgagtgcttcat

SEQ ID NO: 75129 - DNA, 69 bp, Homo sapiens
gaagtttaaataaagtttactaattttgaccaaaagtatgtacatcgagtgcttcattggggttcagga

SEQ ID NO: 75130 - DNA, 69 bp, Homo sapiens
attgaataggtccttcaaataaatgggggaaaaaaagaccgagacatattctgagaaaagctaacacca

SEQ ID NO: 75131 - DNA, 66 bp, Homo sapiens
aataaatgggggaaaaaaagaccgagacatattctgagaaaagctaacaccaagaaaatgttttaa

SEQ ID NO: 75132 - DNA, 68 bp, Homo sapiens
aaaaagaccgagacatattctgagaaaagctaacaccaagaaaatgttttaattaaactacagaaaca

SEQ ID NO: 75133 - DNA, 69 bp, Homo sapiens
accgagacatattctgagaaaagctaacaccaagaaaatgttttaattaaactacagaaacaatggtta

SEQ ID NO: 75134 - DNA, 69 bp, Homo sapiens
attctgagaaaagctaacaccaagaaaatgttttaattaaactacagaaacaatggttataatacagaa

SEQ ID NO: 75135 - DNA, 71 bp, Homo sapiens
aagctaacaccaagaaaatgttttaattaaactacagaaacaatggttataatacagaatattcataagca

SEQ ID NO: 75136 - DNA, 71 bp, Homo sapiens
aaatgttttaattaaactacagaaacaatggttataatacagaatattcataagcaaaaagatacaccatg

SEQ ID NO: 75137 - DNA, 72 bp, Homo sapiens
attaaactacagaaacaatggttataatacagaatattcataagcaaaaagatacaccatgttataagtact

SEQ ID NO: 75138 - DNA, 73 bp, Homo sapiens
ctacagaaacaatggttataatacagaatattcataagcaaaaagatacaccatgttataagtacttacaaag

SEQ ID NO: 75139 - DNA, 73 bp, Homo sapiens
gttataatacagaatattcataagcaaaaagatacaccatgttataagtacttacaaagttacaaccatttgc

SEQ ID NO: 75140 - DNA, 72 bp, Homo sapiens
cagaatattcataagcaaaaagatacaccatgttataagtacttacaaagttacaaccatttgcttccttaa

SEQ ID NO: 75141 - DNA, 70 bp, Homo sapiens
taagcaaaaagatacaccatgttataagtacttacaaagttacaaccatttgcttccttaacattttcca

SEQ ID NO: 75142 - DNA, 71 bp, Homo sapiens
gatacaccatgttataagtacttacaaagttacaaccatttgcttccttaacattttccatgttaagttca

SEQ ID NO: 75143 - DNA, 71 bp, Homo sapiens
ccatgttataagtacttacaaagttacaaccatttgcttccttaacattttccatgttaagttcatacatg

SEQ ID NO: 75144 - DNA, 75 bp, Homo sapiens
gtacttacaaagttacaaccatttgcttccttaacattttccatgttaagttcatacatgtagatatgatcagat

SEQ ID NO: 75145 - DNA, 74 bp, Homo sapiens
aaagttacaaccatttgcttccttaacattttccatgttaagttcatacatgtagatatgatcagatttaccat

SEQ ID NO: 75146 - DNA, 73 bp, Homo sapiens
ccatttgcttccttaacattttccatgttaagttcatacatgtagatatgatcagatttaccatttttagggg

SEQ ID NO: 75147 - DNA, 72 bp, Homo sapiens
ccttaacattttccatgttaagttcatacatgtagatatgatcagatttaccatttttagggggaagaggga

SEQ ID NO: 75148 - DNA, 70 bp, Homo sapiens
ccatgttaagttcatacatgtagatatgatcagatttaccatttttagggggaagagggaaaaaaaggtg

SEQ ID NO: 75149 - DNA, 75 bp, Homo sapiens
tcatacatgtagatatgatcagatttaccatttttagggggaagagggaaaaaaaggtgtatttatcatcagcta

SEQ ID NO: 75150 - DNA, 76 bp, Homo sapiens
tagatatgatcagatttaccatttttagggggaagagggaaaaaaaggtgtatttatcatcagctagatgtgctca

SEQ ID NO: 75151 - DNA, 73 bp, Homo sapiens
atcagatttaccatttttagggggaagagggaaaaaaaggtgtatttatcatcagctagatgtgctcactgta

SEQ ID NO: 75152 - DNA, 74 bp, Homo sapiens
tttagggggaagagggaaaaaaaggtgtatttatcatcagctagatgtgctcactgtatgctccgttatttata

SEQ ID NO: 75153 - DNA, 76 bp, Homo sapiens
agagggaaaaaaaggtgtatttatcatcagctagatgtgctcactgtatgctccgttatttatatgcaaggcccgg

SEQ ID NO: 75154 - DNA, 84 bp, Homo sapiens
tgtatttatcatcagctagatgtgctcactgtatgctccgttatttatatgcaaggcccgggtgactggaagtgcagttgtcag

SEQ ID NO: 75155 - DNA, 78 bp, Homo sapiens
tgtgctcactgtatgctccgttatttatatgcaaggcccgggtgactggaagtgcagttgtcaggcattttaataaac

SEQ ID NO: 75156 - DNA, 77 bp, Homo sapiens
tatgctccgttatttatatgcaaggcccgggtgactggaagtgcagttgtcaggcattttaataaactggacagcca

SEQ ID NO: 75157 - DNA, 74 bp, Homo sapiens
ttatttatatgcaaggcccgggtgactggaagtgcagttgtcaggcattttaataaactggacagccatttgtt

SEQ ID NO: 75158 - DNA, 74 bp, Homo sapiens
aaggcccgggtgactggaagtgcagttgtcaggcattttaataaactggacagccatttgtttctgcacgacaa

SEQ ID NO: 75159 - DNA, 77 bp, Homo sapiens
actggaagtgcagttgtcaggcattttaataaactggacagccatttgtttctgcacgacaaggcatctttacacag

SEQ ID NO: 75160 - DNA, 76 bp, Homo sapiens
agttgtcaggcattttaataaactggacagccatttgtttctgcacgacaaggcatctttacacaggagcaatcgg

SEQ ID NO: 75161 - DNA, 75 bp, Homo sapiens
cattttaataaactggacagccatttgtttctgcacgacaaggcatctttacacaggagcaatcgggagaaaaca

SEQ ID NO: 75162 - DNA, 75 bp, Homo sapiens
taataaactggacagccatttgtttctgcacgacaaggcatctttacacaggagcaatcgggagaaaacaggaaa

SEQ ID NO: 75163 - DNA, 77 bp, Homo sapiens
acagccatttgtttctgcacgacaaggcatctttacacaggagcaatcgggagaaaacaggaaacagccaagcactc

SEQ ID NO: 75164 - DNA, 81 bp, Homo sapiens
tgtttctgcacgacaaggcatctttacacaggagcaatcgggagaaaacaggaaacagccaagcactctgcactgcaacac

SEQ ID NO: 75165 - DNA, 77 bp, Homo sapiens
aaggcatctttacacaggagcaatcgggagaaaacaggaaacagccaagcactctgcactgcaacacgccaccttaa

SEQ ID NO: 75166 - DNA, 78 bp, Homo sapiens
tctttacacaggagcaatcgggagaaaacaggaaacagccaagcactctgcactgcaacacgccaccttaacagctaa

SEQ ID NO: 75167 - DNA, 77 bp, Homo sapiens
aatcgggagaaaacaggaaacagccaagcactctgcactgcaacacgccaccttaacagctaaccagcattactcaa

SEQ ID NO: 75168 - DNA, 79 bp, Homo sapiens
aaaacaggaaacagccaagcactctgcactgcaacacgccaccttaacagctaaccagcattactcaactgctacacaa

SEQ ID NO: 75169 - DNA, 81 bp, Homo sapiens
aaacagccaagcactctgcactgcaacacgccaccttaacagctaaccagcattactcaactgctacacaactgcgcctag

SEQ ID NO: 75170 - DNA, 81 bp, Homo sapiens
actctgcactgcaacacgccaccttaacagctaaccagcattactcaactgctacacaactgcgcctagtgcacaaaaata

SEQ ID NO: 75171 - DNA, 79 bp, Homo sapiens
actgcaacacgccaccttaacagctaaccagcattactcaactgctacacaactgcgcctagtgcacaaaaatacataa

SEQ ID NO: 75172 - DNA, 78 bp, Homo sapiens
accttaacagctaaccagcattactcaactgctacacaactgcgcctagtgcacaaaaatacataagagaagagatta

SEQ ID NO: 75173 - DNA, 80 bp, Homo sapiens
taaccagcattactcaactgctacacaactgcgcctagtgcacaaaaatacataagagaagagattagaattgtgtttga

SEQ ID NO: 75174 - DNA, 78 bp, Homo sapiens
attactcaactgctacacaactgcgcctagtgcacaaaaatacataagagaagagattagaattgtgtttgataaaca

SEQ ID NO: 75175 - DNA, 72 bp, Homo sapiens
agtgcacaaaaatacataagagaagagattagaattgtgtttgataaacaatcctttcaaaaaatcaagtct

SEQ ID NO: 75176 - DNA, 72 bp, Homo sapiens
atacataagagaagagattagaattgtgtttgataaacaatcctttcaaaaaatcaagtcttttcacctgaa

SEQ ID NO: 75177 - DNA, 69 bp, Homo sapiens
tagaattgtgtttgataaacaatcctttcaaaaaatcaagtcttttcacctgaaaagtctttatacaaa

SEQ ID NO: 75178 - DNA, 69 bp, Homo sapiens
tgataaacaatcctttcaaaaaatcaagtcttttcacctgaaaagtctttatacaaatttgggttcaga

SEQ ID NO: 75179 - DNA, 69 bp, Homo sapiens
aaatcaagtcttttcacctgaaaagtctttatacaaatttgggttcagattaccatttagatctgaagg

SEQ ID NO: 75180 - DNA, 69 bp, Homo sapiens
cttttcacctgaaaagtctttatacaaatttgggttcagattaccatttagatctgaaggtaaataaca

SEQ ID NO: 75181 - DNA, 70 bp, Homo sapiens
agtctttatacaaatttgggttcagattaccatttagatctgaaggtaaataacatatacaaatttacac

SEQ ID NO: 75182 - DNA, 69 bp, Homo sapiens
caaatttgggttcagattaccatttagatctgaaggtaaataacatatacaaatttacaccaacttttg

SEQ ID NO: 75183 - DNA, 69 bp, Homo sapiens
ttgggttcagattaccatttagatctgaaggtaaataacatatacaaatttacaccaacttttgtaggt

SEQ ID NO: 75184 - DNA, 66 bp, Homo sapiens
attaccatttagatctgaaggtaaataacatatacaaatttacaccaacttttgtaggtttttaat

SEQ ID NO: 75185 - DNA, 67 bp, Homo sapiens
gatctgaaggtaaataacatatacaaatttacaccaacttttgtaggtttttaattttaaggaatga

SEQ ID NO: 75186 - DNA, 71 bp, Homo sapiens
caaatttacaccaacttttgtaggtttttaattttaaggaatgaaggcaatgctgagtcaatctcttgaca

SEQ ID NO: 75187 - DNA, 71 bp, Homo sapiens
acaccaacttttgtaggtttttaattttaaggaatgaaggcaatgctgagtcaatctcttgacagctttag

SEQ ID NO: 75188 - DNA, 75 bp, Homo sapiens
tttgtaggtttttaattttaaggaatgaaggcaatgctgagtcaatctcttgacagctttaggctgtgtgtaatg

SEQ ID NO: 75189 - DNA, 78 bp, Homo sapiens
aggaatgaaggcaatgctgagtcaatctcttgacagctttaggctgtgtgtaatggctgcacacgttttccttaaaag

SEQ ID NO: 75190 - DNA, 79 bp, Homo sapiens
aatgctgagtcaatctcttgacagctttaggctgtgtgtaatggctgcacacgttttccttaaaagtcaggaggccaca

SEQ ID NO: 75191 - DNA, 74 bp, Homo sapiens
aatctcttgacagctttaggctgtgtgtaatggctgcacacgttttccttaaaagtcaggaggccacaaattag

SEQ ID NO: 75192 - DNA, 71 bp, Homo sapiens
agctttaggctgtgtgtaatggctgcacacgttttccttaaaagtcaggaggccacaaattaggttaccaa

SEQ ID NO: 75193 - DNA, 71 bp, Homo sapiens
tgtgtgtaatggctgcacacgttttccttaaaagtcaggaggccacaaattaggttaccaatctgtttaat

SEQ ID NO: 75194 - DNA, 70 bp, Homo sapiens
taatggctgcacacgttttccttaaaagtcaggaggccacaaattaggttaccaatctgtttaatttcaa

SEQ ID NO: 75195 - DNA, 65 bp, Homo sapiens
acacgttttccttaaaagtcaggaggccacaaattaggttaccaatctgtttaatttcaaacaaa

SEQ ID NO: 75196 - DNA, 68 bp, Homo sapiens
aggaggccacaaattaggttaccaatctgtttaatttcaaacaaaaaaagtcagcactatataacaaa

SEQ ID NO: 75197 - DNA, 66 bp, Homo sapiens
aggttaccaatctgtttaatttcaaacaaaaaaagtcagcactatataacaaaatgaaattttacc

SEQ ID NO: 75198 - DNA, 70 bp, Homo sapiens
caatctgtttaatttcaaacaaaaaaagtcagcactatataacaaaatgaaattttacctcaaatatcca

SEQ ID NO: 75199 - DNA, 71 bp, Homo sapiens
ttcaaacaaaaaaagtcagcactatataacaaaatgaaattttacctcaaatatccaaatccaataatgaa

SEQ ID NO: 75200 - DNA, 72 bp, Homo sapiens
aaaagtcagcactatataacaaaatgaaattttacctcaaatatccaaatccaataatgaaatctgaagtcg

SEQ ID NO: 75201 - DNA, 75 bp, Homo sapiens
cagcactatataacaaaatgaaattttacctcaaatatccaaatccaataatgaaatctgaagtcgttcacctca

SEQ ID NO: 75202 - DNA, 72 bp, Homo sapiens
caaaatgaaattttacctcaaatatccaaatccaataatgaaatctgaagtcgttcacctcactaaattaca

SEQ ID NO: 75203 - DNA, 75 bp, Homo sapiens
ctcaaatatccaaatccaataatgaaatctgaagtcgttcacctcactaaattacaagaaatttgaataacagca

SEQ ID NO: 75204 - DNA, 75 bp, Homo sapiens
atccaataatgaaatctgaagtcgttcacctcactaaattacaagaaatttgaataacagcaacaaaatggcaca

SEQ ID NO: 75205 - DNA, 73 bp, Homo sapiens
gaagtcgttcacctcactaaattacaagaaatttgaataacagcaacaaaatggcacataaaatgaagtttgc

SEQ ID NO: 75206 - DNA, 73 bp, Homo sapiens
caagaaatttgaataacagcaacaaaatggcacataaaatgaagtttgccaactgaggcaaagcttaaacaag

SEQ ID NO: 75207 - DNA, 71 bp, Homo sapiens
gaataacagcaacaaaatggcacataaaatgaagtttgccaactgaggcaaagcttaaacaagtaaaaagt

SEQ ID NO: 75208 - DNA, 72 bp, Homo sapiens
cagcaacaaaatggcacataaaatgaagtttgccaactgaggcaaagcttaaacaagtaaaaagttagacaa

SEQ ID NO: 75209 - DNA, 66 bp, Homo sapiens
gaagtttgccaactgaggcaaagcttaaacaagtaaaaagttagacaaatgttacaaaataacctt

SEQ ID NO: 75210 - DNA, 68 bp, Homo sapiens
caagtaaaaagttagacaaatgttacaaaataaccttttcaatagccagttgcttgttccaaggactc

SEQ ID NO: 75211 - DNA, 70 bp, Homo sapiens
aagttagacaaatgttacaaaataaccttttcaatagccagttgcttgttccaaggactcttcttcgatg

SEQ ID NO: 75212 - DNA, 71 bp, Homo sapiens
ttacaaaataaccttttcaatagccagttgcttgttccaaggactcttcttcgatggactatgtggtcctt

SEQ ID NO: 75213 - DNA, 70 bp, Homo sapiens
aataaccttttcaatagccagttgcttgttccaaggactcttcttcgatggactatgtggtcctttttcc

SEQ ID NO: 75214 - DNA, 72 bp, Homo sapiens
ttcaatagccagttgcttgttccaaggactcttcttcgatggactatgtggtcctttttccccaagtcctcc

SEQ ID NO: 75215 - DNA, 69 bp, Homo sapiens
agttgcttgttccaaggactcttcttcgatggactatgtggtcctttttccccaagtcctccgtttaca

SEQ ID NO: 75216 - DNA, 71 bp, Homo sapiens
aaggactcttcttcgatggactatgtggtcctttttccccaagtcctccgtttacactgcttgccgataca

SEQ ID NO: 75217 - DNA, 71 bp, Homo sapiens
ttcttcgatggactatgtggtcctttttccccaagtcctccgtttacactgcttgccgatacatctaggtt

SEQ ID NO: 75218 - DNA, 69 bp, Homo sapiens
actatgtggtcctttttccccaagtcctccgtttacactgcttgccgatacatctaggtttgaaaagaa

SEQ ID NO: 75219 - DNA, 67 bp, Homo sapiens
gtcctttttccccaagtcctccgtttacactgcttgccgatacatctaggtttgaaaagaaagaagt

SEQ ID NO: 75220 - DNA, 71 bp, Homo sapiens
agtcctccgtttacactgcttgccgatacatctaggtttgaaaagaaagaagttcagcttaccttccatta

SEQ ID NO: 75221 - DNA, 74 bp, Homo sapiens
gtttacactgcttgccgatacatctaggtttgaaaagaaagaagttcagcttaccttccattaaagtgcacatg

SEQ ID NO: 75222 - DNA, 70 bp, Homo sapiens
aaaagaaagaagttcagcttaccttccattaaagtgcacatggtttcagtttcaggcacgtacttactaa

SEQ ID NO: 75223 - DNA, 72 bp, Homo sapiens
attaaagtgcacatggtttcagtttcaggcacgtacttactaaggctctggtcaaaccagtagggtacagaa

SEQ ID NO: 75224 - DNA, 70 bp, Homo sapiens
atggtttcagtttcaggcacgtacttactaaggctctggtcaaaccagtagggtacagaaatgttccacc

SEQ ID NO: 75225 - DNA, 71 bp, Homo sapiens
tttcaggcacgtacttactaaggctctggtcaaaccagtagggtacagaaatgttccacccagccatgttt

SEQ ID NO: 75226 - DNA, 68 bp, Homo sapiens
acgtacttactaaggctctggtcaaaccagtagggtacagaaatgttccacccagccatgtttttaaa

SEQ ID NO: 75227 - DNA, 64 bp, Homo sapiens
aaaccagtagggtacagaaatgttccacccagccatgtttttaaaaggcccaattaggaaaatt

SEQ ID NO: 75228 - DNA, 66 bp, Homo sapiens
gtagggtacagaaatgttccacccagccatgtttttaaaaggcccaattaggaaaatttcacaaag

SEQ ID NO: 75229 - DNA, 71 bp, Homo sapiens
aatgttccacccagccatgtttttaaaaggcccaattaggaaaatttcacaaaggctaccatcagcatgta

SEQ ID NO: 75230 - DNA, 70 bp, Homo sapiens
gccatgtttttaaaaggcccaattaggaaaatttcacaaaggctaccatcagcatgtacaagtttgaatt

SEQ ID NO: 75231 - DNA, 70 bp, Homo sapiens
taaaaggcccaattaggaaaatttcacaaaggctaccatcagcatgtacaagtttgaatttacgtattcc

SEQ ID NO: 75232 - DNA, 72 bp, Homo sapiens
caattaggaaaatttcacaaaggctaccatcagcatgtacaagtttgaatttacgtattcctggccaaataa

SEQ ID NO: 75233 - DNA, 71 bp, Homo sapiens
acaaaggctaccatcagcatgtacaagtttgaatttacgtattcctggccaaataaccaaggtgaagaaag

SEQ ID NO: 75234 - DNA, 69 bp, Homo sapiens
atcagcatgtacaagtttgaatttacgtattcctggccaaataaccaaggtgaagaaaggtaaggggaa

SEQ ID NO: 75235 - DNA, 64 bp, Homo sapiens
acaagtttgaatttacgtattcctggccaaataaccaaggtgaagaaaggtaaggggaagaaaa

SEQ ID NO: 75236 - DNA, 63 bp, Homo sapiens
gaatttacgtattcctggccaaataaccaaggtgaagaaaggtaaggggaagaaaaaaaaaga

SEQ ID NO: 75237 - DNA, 73 bp, Homo sapiens
aagggctgtatccaaacaaaaacaactcgagatcagagaattggtctatatttcattaagataaattgtttca

SEQ ID NO: 75238 - DNA, 74 bp, Homo sapiens
ctgtatccaaacaaaaacaactcgagatcagagaattggtctatatttcattaagataaattgtttcaaatgaa

SEQ ID NO: 75239 - DNA, 72 bp, Homo sapiens
acaaaaacaactcgagatcagagaattggtctatatttcattaagataaattgtttcaaatgaaacatttgg

SEQ ID NO: 75240 - DNA, 75 bp, Homo sapiens
ctcgagatcagagaattggtctatatttcattaagataaattgtttcaaatgaaacatttggtaattgagaatac

SEQ ID NO: 75241 - DNA, 72 bp, Homo sapiens
gagaattggtctatatttcattaagataaattgtttcaaatgaaacatttggtaattgagaatactacttta

SEQ ID NO: 75242 - DNA, 73 bp, Homo sapiens
tttcattaagataaattgtttcaaatgaaacatttggtaattgagaatactactttaatatctgagctactta

SEQ ID NO: 75243 - DNA, 72 bp, Homo sapiens
ttaagataaattgtttcaaatgaaacatttggtaattgagaatactactttaatatctgagctacttagggc

SEQ ID NO: 75244 - DNA, 71 bp, Homo sapiens
gataaattgtttcaaatgaaacatttggtaattgagaatactactttaatatctgagctacttagggccct

SEQ ID NO: 75245 - DNA, 70 bp, Homo sapiens
ttgtttcaaatgaaacatttggtaattgagaatactactttaatatctgagctacttagggccctttcct

SEQ ID NO: 75246 - DNA, 69 bp, Homo sapiens
gtttcaaatgaaacatttggtaattgagaatactactttaatatctgagctacttagggccctttcctt

SEQ ID NO: 75247 - DNA, 69 bp, Homo sapiens
caaatgaaacatttggtaattgagaatactactttaatatctgagctacttagggccctttccttttta

SEQ ID NO: 75248 - DNA, 67 bp, Homo sapiens
gaaacatttggtaattgagaatactactttaatatctgagctacttagggccctttcctttttaaaa

SEQ ID NO: 75249 - DNA, 66 bp, Homo sapiens
ggtaattgagaatactactttaatatctgagctacttagggccctttcctttttaaaaaataggac

SEQ ID NO: 75250 - DNA, 66 bp, Homo sapiens
gagaatactactttaatatctgagctacttagggccctttcctttttaaaaaataggaccaaacaa

SEQ ID NO: 75251 - DNA, 63 bp, Homo sapiens
ttcctttttaaaaaataggaccaaacaatttaagagttaaagacacactatcctttccccacc

SEQ ID NO: 75252 - DNA, 67 bp, Homo sapiens
aaaaataggaccaaacaatttaagagttaaagacacactatcctttccccacccagtgcaatacctg

SEQ ID NO: 75253 - DNA, 67 bp, Homo sapiens
ccaaacaatttaagagttaaagacacactatcctttccccacccagtgcaatacctgtaactttctt

SEQ ID NO: 75254 - DNA, 67 bp, Homo sapiens
ttaaagacacactatcctttccccacccagtgcaatacctgtaactttcttttggggttccaaatgt

SEQ ID NO: 75255 - DNA, 69 bp, Homo sapiens
tatcctttccccacccagtgcaatacctgtaactttcttttggggttccaaatgttcactgcttcttat

SEQ ID NO: 75256 - DNA, 70 bp, Homo sapiens
ccacccagtgcaatacctgtaactttcttttggggttccaaatgttcactgcttcttattgcaattcttt

SEQ ID NO: 75257 - DNA, 72 bp, Homo sapiens
atacctgtaactttcttttggggttccaaatgttcactgcttcttattgcaattcttttgccacatccatta

SEQ ID NO: 75258 - DNA, 75 bp, Homo sapiens
tgtaactttcttttggggttccaaatgttcactgcttcttattgcaattcttttgccacatccattagaatatga

SEQ ID NO: 75259 - DNA, 77 bp, Homo sapiens
gggttccaaatgttcactgcttcttattgcaattcttttgccacatccattagaatatgaagtcccagtcagtacaa

SEQ ID NO: 75260 - DNA, 77 bp, Homo sapiens
aaatgttcactgcttcttattgcaattcttttgccacatccattagaatatgaagtcccagtcagtacaacaatagt

SEQ ID NO: 75261 - DNA, 77 bp, Homo sapiens
ttcttattgcaattcttttgccacatccattagaatatgaagtcccagtcagtacaacaatagttgaactgattgtt

SEQ ID NO: 75262 - DNA, 76 bp, Homo sapiens
aattcttttgccacatccattagaatatgaagtcccagtcagtacaacaatagttgaactgattgtttctctaaga

SEQ ID NO: 75263 - DNA, 77 bp, Homo sapiens
ttttgccacatccattagaatatgaagtcccagtcagtacaacaatagttgaactgattgtttctctaagaggatag

SEQ ID NO: 75264 - DNA, 77 bp, Homo sapiens
tagaatatgaagtcccagtcagtacaacaatagttgaactgattgtttctctaagaggatagtgcatctttaacatt

SEQ ID NO: 75265 - DNA, 76 bp, Homo sapiens
agaatatgaagtcccagtcagtacaacaatagttgaactgattgtttctctaagaggatagtgcatctttaacatt

SEQ ID NO: 75266 - DNA, 75 bp, Homo sapiens
agtcccagtcagtacaacaatagttgaactgattgtttctctaagaggatagtgcatctttaacatttaaagaca

SEQ ID NO: 75267 - DNA, 76 bp, Homo sapiens
tcagtacaacaatagttgaactgattgtttctctaagaggatagtgcatctttaacatttaaagacaaacctgctc

SEQ ID NO: 75268 - DNA, 75 bp, Homo sapiens
gtacaacaatagttgaactgattgtttctctaagaggatagtgcatctttaacatttaaagacaaacctgctcca

SEQ ID NO: 75269 - DNA, 75 bp, Homo sapiens
caatagttgaactgattgtttctctaagaggatagtgcatctttaacatttaaagacaaacctgctccaatacac

SEQ ID NO: 75270 - DNA, 75 bp, Homo sapiens
tagttgaactgattgtttctctaagaggatagtgcatctttaacatttaaagacaaacctgctccaatacacgcc

SEQ ID NO: 75271 - DNA, 73 bp, Homo sapiens
attgtttctctaagaggatagtgcatctttaacatttaaagacaaacctgctccaatacacgcccacagaaac

SEQ ID NO: 75272 - DNA, 73 bp, Homo sapiens
ctaagaggatagtgcatctttaacatttaaagacaaacctgctccaatacacgcccacagaaactggtccctg

SEQ ID NO: 75273 - DNA, 72 bp, Homo sapiens
atctttaacatttaaagacaaacctgctccaatacacgcccacagaaactggtccctggaggatcagccaaa

SEQ ID NO: 75274 - DNA, 76 bp, Homo sapiens
agacaaacctgctccaatacacgcccacagaaactggtccctggaggatcagccaaatcagttaaaatctgcaata

SEQ ID NO: 75275 - DNA, 75 bp, Homo sapiens
aatacacgcccacagaaactggtccctggaggatcagccaaatcagttaaaatctgcaatactggccaatattct

SEQ ID NO: 75276 - DNA, 76 bp, Homo sapiens
cacagaaactggtccctggaggatcagccaaatcagttaaaatctgcaatactggccaatattcttttatcaaaca

SEQ ID NO: 75277 - DNA, 74 bp, Homo sapiens
aaactggtccctggaggatcagccaaatcagttaaaatctgcaatactggccaatattcttttatcaaacagga

SEQ ID NO: 75278 - DNA, 75 bp, Homo sapiens
aggatcagccaaatcagttaaaatctgcaatactggccaatattcttttatcaaacaggagaccgcagctttaaa

SEQ ID NO: 75279 - DNA, 72 bp, Homo sapiens
agccaaatcagttaaaatctgcaatactggccaatattcttttatcaaacaggagaccgcagctttaaaggg

SEQ ID NO: 75280 - DNA, 73 bp, Homo sapiens
ttaaaatctgcaatactggccaatattcttttatcaaacaggagaccgcagctttaaagggggaaaatgcaga

SEQ ID NO: 75281 - DNA, 71 bp, Homo sapiens
tactggccaatattcttttatcaaacaggagaccgcagctttaaagggggaaaatgcagacgttggataaa

SEQ ID NO: 75282 - DNA, 70 bp, Homo sapiens
atattcttttatcaaacaggagaccgcagctttaaagggggaaaatgcagacgttggataaaaacagcaa

SEQ ID NO: 75283 - DNA, 70 bp, Homo sapiens
tttatcaaacaggagaccgcagctttaaagggggaaaatgcagacgttggataaaaacagcaagaaatag

SEQ ID NO: 75284 - DNA, 70 bp, Homo sapiens
accgcagctttaaagggggaaaatgcagacgttggataaaaacagcaagaaatagtcattttcattaata

SEQ ID NO: 75285 - DNA, 71 bp, Homo sapiens
gctttaaagggggaaaatgcagacgttggataaaaacagcaagaaatagtcattttcattaataggtctca

SEQ ID NO: 75286 - DNA, 71 bp, Homo sapiens
gggaaaatgcagacgttggataaaaacagcaagaaatagtcattttcattaataggtctcaaacagtttac

SEQ ID NO: 75287 - DNA, 72 bp, Homo sapiens
cagacgttggataaaaacagcaagaaatagtcattttcattaataggtctcaaacagtttacgaaacagcca

SEQ ID NO: 75288 - DNA, 74 bp, Homo sapiens
aacagcaagaaatagtcattttcattaataggtctcaaacagtttacgaaacagccattattatctaagcttca

SEQ ID NO: 75289 - DNA, 75 bp, Homo sapiens
gaaatagtcattttcattaataggtctcaaacagtttacgaaacagccattattatctaagcttcatacacatcc

SEQ ID NO: 75290 - DNA, 76 bp, Homo sapiens
ttttcattaataggtctcaaacagtttacgaaacagccattattatctaagcttcatacacatcctttctgcagac

SEQ ID NO: 75291 - DNA, 76 bp, Homo sapiens
taataggtctcaaacagtttacgaaacagccattattatctaagcttcatacacatcctttctgcagacccctctc

SEQ ID NO: 75292 - DNA, 75 bp, Homo sapiens
aaacagtttacgaaacagccattattatctaagcttcatacacatcctttctgcagacccctctcttcagtatta

SEQ ID NO: 75293 - DNA, 76 bp, Homo sapiens
aaacagccattattatctaagcttcatacacatcctttctgcagacccctctcttcagtattactcccaaaggtga

SEQ ID NO: 75294 - DNA, 74 bp, Homo sapiens
attattatctaagcttcatacacatcctttctgcagacccctctcttcagtattactcccaaaggtgagtaacc

SEQ ID NO: 75295 - DNA, 77 bp, Homo sapiens
ttcatacacatcctttctgcagacccctctcttcagtattactcccaaaggtgagtaacctccgagcagcactccta

SEQ ID NO: 75296 - DNA, 75 bp, Homo sapiens
atcctttctgcagacccctctcttcagtattactcccaaaggtgagtaacctccgagcagcactcctaatgatag

SEQ ID NO: 75297 - DNA, 74 bp, Homo sapiens
agacccctctcttcagtattactcccaaaggtgagtaacctccgagcagcactcctaatgataggagtcattct

SEQ ID NO: 75298 - DNA, 77 bp, Homo sapiens
tctcttcagtattactcccaaaggtgagtaacctccgagcagcactcctaatgataggagtcattcttacattaaca

SEQ ID NO: 75299 - DNA, 75 bp, Homo sapiens
tactcccaaaggtgagtaacctccgagcagcactcctaatgataggagtcattcttacattaacacgactcaaaa

SEQ ID NO: 75300 - DNA, 74 bp, Homo sapiens
aaggtgagtaacctccgagcagcactcctaatgataggagtcattcttacattaacacgactcaaaaagaccta

SEQ ID NO: 75301 - DNA, 73 bp, Homo sapiens
taacctccgagcagcactcctaatgataggagtcattcttacattaacacgactcaaaaagacctaccccaaa

SEQ ID NO: 75302 - DNA, 71 bp, Homo sapiens
actcctaatgataggagtcattcttacattaacacgactcaaaaagacctaccccaaatcccatttatgaa

SEQ ID NO: 75303 - DNA, 69 bp, Homo sapiens
attcttacattaacacgactcaaaaagacctaccccaaatcccatttatgaattagggttatgtgtctc

SEQ ID NO: 75304 - DNA, 69 bp, Homo sapiens
acattaacacgactcaaaaagacctaccccaaatcccatttatgaattagggttatgtgtctcggattc

SEQ ID NO: 75305 - DNA, 68 bp, Homo sapiens
aaaaagacctaccccaaatcccatttatgaattagggttatgtgtctcggattcccagacattaccat

SEQ ID NO: 75306 - DNA, 70 bp, Homo sapiens
taccccaaatcccatttatgaattagggttatgtgtctcggattcccagacattaccattttcttaagag

SEQ ID NO: 75307 - DNA, 70 bp, Homo sapiens
aaatcccatttatgaattagggttatgtgtctcggattcccagacattaccattttcttaagaggacacc

SEQ ID NO: 75308 - DNA, 72 bp, Homo sapiens
tatgaattagggttatgtgtctcggattcccagacattaccattttcttaagaggacaccgctccttcctct

SEQ ID NO: 75309 - DNA, 69 bp, Homo sapiens
attcccagacattaccattttcttaagaggacaccgctccttcctcttcaggagacttggggggactct

SEQ ID NO: 75310 - DNA, 70 bp, Homo sapiens
attaccattttcttaagaggacaccgctccttcctcttcaggagacttggggggactcttcgatcgcgac

SEQ ID NO: 75311 - DNA, 70 bp, Homo sapiens
ttttcttaagaggacaccgctccttcctcttcaggagacttggggggactcttcgatcgcgacctggatt

SEQ ID NO: 75312 - DNA, 71 bp, Homo sapiens
acaccgctccttcctcttcaggagacttggggggactcttcgatcgcgacctggatttggattccctcttg

SEQ ID NO: 75313 - DNA, 71 bp, Homo sapiens
cttcctcttcaggagacttggggggactcttcgatcgcgacctggatttggattccctcttggacactggg

SEQ ID NO: 75314 - DNA, 71 bp, Homo sapiens
ttcaggagacttggggggactcttcgatcgcgacctggatttggattccctcttggacactgggggaggac

SEQ ID NO: 75315 - DNA, 71 bp, Homo sapiens
ggggactcttcgatcgcgacctggatttggattccctcttggacactgggggaggactcctggaccgagac

SEQ ID NO: 75316 - DNA, 71 bp, Homo sapiens
ctcttcgatcgcgacctggatttggattccctcttggacactgggggaggactcctggaccgagaccggga

SEQ ID NO: 75317 - DNA, 69 bp, Homo sapiens
ctggatttggattccctcttggacactgggggaggactcctggaccgagaccgggacctggaccgcgaa

SEQ ID NO: 75318 - DNA, 70 bp, Homo sapiens
attccctcttggacactgggggaggactcctggaccgagaccgggacctggaccgcgaacgagatctgga

SEQ ID NO: 75319 - DNA, 71 bp, Homo sapiens
ttggacactgggggaggactcctggaccgagaccgggacctggaccgcgaacgagatctggagaccgacga

SEQ ID NO: 75320 - DNA, 70 bp, Homo sapiens
ggaggactcctggaccgagaccgggacctggaccgcgaacgagatctggagaccgacgaggacttggact

SEQ ID NO: 75321 - DNA, 70 bp, Homo sapiens
actcctggaccgagaccgggacctggaccgcgaacgagatctggagaccgacgaggacttggacttggac

SEQ ID NO: 75322 - DNA, 71 bp, Homo sapiens
accgggacctggaccgcgaacgagatctggagaccgacgaggacttggacttggaccttcgtgcggatctg

SEQ ID NO: 75323 - DNA, 73 bp, Homo sapiens
acctggaccgcgaacgagatctggagaccgacgaggacttggacttggaccttcgtgcggatctggacttgga

SEQ ID NO: 75324 - DNA, 73 bp, Homo sapiens
aacgagatctggagaccgacgaggacttggacttggaccttcgtgcggatctggacttggaggtcgaccgaga

SEQ ID NO: 75325 - DNA, 72 bp, Homo sapiens
agaccgacgaggacttggacttggaccttcgtgcggatctggacttggaggtcgaccgagatcgagaacgag

SEQ ID NO: 75326 - DNA, 74 bp, Homo sapiens
gacttggacttggaccttcgtgcggatctggacttggaggtcgaccgagatcgagaacgagtgcgggaccgaga

SEQ ID NO: 75327 - DNA, 73 bp, Homo sapiens
acttggaccttcgtgcggatctggacttggaggtcgaccgagatcgagaacgagtgcgggaccgagacttcga

SEQ ID NO: 75328 - DNA, 77 bp, Homo sapiens
ttcgtgcggatctggacttggaggtcgaccgagatcgagaacgagtgcgggaccgagacttcgagcggctgtagcga

SEQ ID NO: 75329 - DNA, 79 bp, Homo sapiens
tggacttggaggtcgaccgagatcgagaacgagtgcgggaccgagacttcgagcggctgtagcgagatcggctgcgaga

SEQ ID NO: 75330 - DNA, 77 bp, Homo sapiens
aggtcgaccgagatcgagaacgagtgcgggaccgagacttcgagcggctgtagcgagatcggctgcgagacctggaa

SEQ ID NO: 75331 - DNA, 77 bp, Homo sapiens
agatcgagaacgagtgcgggaccgagacttcgagcggctgtagcgagatcggctgcgagacctggaacgactccgac

SEQ ID NO: 75332 - DNA, 74 bp, Homo sapiens
aacgagtgcgggaccgagacttcgagcggctgtagcgagatcggctgcgagacctggaacgactccgactccgg

SEQ ID NO: 75333 - DNA, 77 bp, Homo sapiens
accgagacttcgagcggctgtagcgagatcggctgcgagacctggaacgactccgactccgggatcggctgcggcga

SEQ ID NO: 75334 - DNA, 77 bp, Homo sapiens
tgtagcgagatcggctgcgagacctggaacgactccgactccgggatcggctgcggcgacgccgcctagggctgcgg

SEQ ID NO: 75335 - DNA, 75 bp, Homo sapiens
tgcgagacctggaacgactccgactccgggatcggctgcggcgacgccgcctagggctgcgggcgggacgagcaa

SEQ ID NO: 75336 - DNA, 74 bp, Homo sapiens
acctggaacgactccgactccgggatcggctgcggcgacgccgcctagggctgcgggcgggacgagcaagcaca

SEQ ID NO: 75337 - DNA, 73 bp, Homo sapiens
tccgactccgggatcggctgcggcgacgccgcctagggctgcgggcgggacgagcaagcacagcggggttaat

SEQ ID NO: 75338 - DNA, 66 bp, Homo sapiens
ccgcgcgccccgccccgcctcccgcggtcccctcagccccgtttacctgcggctccggcgtccgta

SEQ ID NO: 75339 - DNA, 66 bp, Homo sapiens
cgccccgcctcccgcggtcccctcagccccgtttacctgcggctccggcgtccgtagccaccgccc

SEQ ID NO: 75340 - DNA, 67 bp, Homo sapiens
tcccgcggtcccctcagccccgtttacctgcggctccggcgtccgtagccaccgcccccgtacctgc

SEQ ID NO: 75341 - DNA, 66 bp, Homo sapiens
ccctcagccccgtttacctgcggctccggcgtccgtagccaccgcccccgtacctgcggggtggcg

SEQ ID NO: 75342 - DNA, 64 bp, Homo sapiens
ccccgtttacctgcggctccggcgtccgtagccaccgcccccgtacctgcggggtggcggtccc

SEQ ID NO: 75343 - DNA, 70 bp, Homo sapiens
tgcggctccggcgtccgtagccaccgcccccgtacctgcggggtggcggtccccggcggctgtggtgtga

SEQ ID NO: 75344 - DNA, 66 bp, Homo sapiens
cgtccgtagccaccgcccccgtacctgcggggtggcggtccccggcggctgtggtgtgagtccggg

SEQ ID NO: 75345 - DNA, 65 bp, Homo sapiens
ccgcccccgtacctgcggggtggcggtccccggcggctgtggtgtgagtccggggggcggccgta

SEQ ID NO: 75346 - DNA, 71 bp, Homo sapiens
gtacctgcggggtggcggtccccggcggctgtggtgtgagtccggggggcggccgtagcgcgccatttgca

SEQ ID NO: 75347 - DNA, 72 bp, Homo sapiens
gggtggcggtccccggcggctgtggtgtgagtccggggggcggccgtagcgcgccatttgcacccgcagctc

SEQ ID NO: 75348 - DNA, 75 bp, Homo sapiens
cggcggctgtggtgtgagtccggggggcggccgtagcgcgccatttgcacccgcagctcgcggccgtccagcacg

SEQ ID NO: 75349 - DNA, 74 bp, Homo sapiens
tggtgtgagtccggggggcggccgtagcgcgccatttgcacccgcagctcgcggccgtccagcacggccccgtc

SEQ ID NO: 75350 - DNA, 76 bp, Homo sapiens
cggggggcggccgtagcgcgccatttgcacccgcagctcgcggccgtccagcacggccccgtccatggcatccata

SEQ ID NO: 75351 - DNA, 80 bp, Homo sapiens
ccatttgcacccgcagctcgcggccgtccagcacggccccgtccatggcatccatagcgtcctcagcgtcgcgcttgtcg

SEQ ID NO: 75352 - DNA, 80 bp, Homo sapiens
ccgcagctcgcggccgtccagcacggccccgtccatggcatccatagcgtcctcagcgtcgcgcttgtcgtgaaagcgaa

SEQ ID NO: 75353 - DNA, 78 bp, Homo sapiens
ctcgcggccgtccagcacggccccgtccatggcatccatagcgtcctcagcgtcgcgcttgtcgtgaaagcgaacgaa

SEQ ID NO: 75354 - DNA, 78 bp, Homo sapiens
gtccagcacggccccgtccatggcatccatagcgtcctcagcgtcgcgcttgtcgtgaaagcgaacgaaggcgaagcc

SEQ ID NO: 75355 - DNA, 77 bp, Homo sapiens
cgtccatggcatccatagcgtcctcagcgtcgcgcttgtcgtgaaagcgaacgaaggcgaagccgcgggactccttg

SEQ ID NO: 75356 - DNA, 75 bp, Homo sapiens
atccatagcgtcctcagcgtcgcgcttgtcgtgaaagcgaacgaaggcgaagccgcgggactccttggtgtagcg

SEQ ID NO: 75357 - DNA, 73 bp, Homo sapiens
agcgtcctcagcgtcgcgcttgtcgtgaaagcgaacgaaggcgaagccgcgggactccttggtgtagcggtcc

SEQ ID NO: 75358 - DNA, 73 bp, Homo sapiens
tcgcgcttgtcgtgaaagcgaacgaaggcgaagccgcgggactccttggtgtagcggtcccgcgggatgtaca

SEQ ID NO: 75359 - DNA, 72 bp, Homo sapiens
tgtcgtgaaagcgaacgaaggcgaagccgcgggactccttggtgtagcggtcccgcgggatgtacacgtcgc

SEQ ID NO: 75360 - DNA, 69 bp, Homo sapiens
aacgaaggcgaagccgcgggactccttggtgtagcggtcccgcgggatgtacacgtcgccgacgcgccc

SEQ ID NO: 75361 - DNA, 70 bp, Homo sapiens
cgaagccgcgggactccttggtgtagcggtcccgcgggatgtacacgtcgccgacgcgcccgtacttctc

SEQ ID NO: 75362 - DNA, 73 bp, Homo sapiens
cgggatgtacacgtcgccgacgcgcccgtacttctcgaagacgcgcctcagcgtgtcgggcgaggtgcggtag

SEQ ID NO: 75363 - DNA, 73 bp, Homo sapiens
tacacgtcgccgacgcgcccgtacttctcgaagacgcgcctcagcgtgtcgggcgaggtgcggtaggtcaggt

SEQ ID NO: 75364 - DNA, 73 bp, Homo sapiens
acgcgcccgtacttctcgaagacgcgcctcagcgtgtcgggcgaggtgcggtaggtcaggttgtccaccttga

SEQ ID NO: 75365 - DNA, 75 bp, Homo sapiens
tacttctcgaagacgcgcctcagcgtgtcgggcgaggtgcggtaggtcaggttgtccaccttgagggaggtcata

SEQ ID NO: 75366 - DNA, 73 bp, Homo sapiens
aagacgcgcctcagcgtgtcgggcgaggtgcggtaggtcaggttgtccaccttgagggaggtcataccctcca

SEQ ID NO: 75367 - DNA, 70 bp, Homo sapiens
tcgggcgaggtgcggtaggtcaggttgtccaccttgagggaggtcataccctccacatcgggaggggggc

SEQ ID NO: 75368 - DNA, 73 bp, Homo sapiens
taggtcaggttgtccaccttgagggaggtcataccctccacatcgggaggggggcggccgtagctcatagctc

SEQ ID NO: 75369 - DNA, 73 bp, Homo sapiens
aggttgtccaccttgagggaggtcataccctccacatcgggaggggggcggccgtagctcatagctctgagtg

SEQ ID NO: 75370 - DNA, 72 bp, Homo sapiens
acatcgggaggggggcggccgtagctcatagctctgagtggcggcccggagccccgcgaactggcgccggct

SEQ ID NO: 75371 - DNA, 76 bp, Homo sapiens
ggggcggccgtagctcatagctctgagtggcggcccggagccccgcgaactggcgccggcttcctcagctctgggc

SEQ ID NO: 75372 - DNA, 77 bp, Homo sapiens
ccgtagctcatagctctgagtggcggcccggagccccgcgaactggcgccggcttcctcagctctgggcggtgcgac

SEQ ID NO: 75373 - DNA, 76 bp, Homo sapiens
atagctctgagtggcggcccggagccccgcgaactggcgccggcttcctcagctctgggcggtgcgacgccgcgcc

SEQ ID NO: 75374 - DNA, 76 bp, Homo sapiens
agtggcggcccggagccccgcgaactggcgccggcttcctcagctctgggcggtgcgacgccgcgcctctcaggca

SEQ ID NO: 75375 - DNA, 76 bp, Homo sapiens
ccccgcgaactggcgccggcttcctcagctctgggcggtgcgacgccgcgcctctcaggcagttgccttccgcgtg

SEQ ID NO: 75376 - DNA, 76 bp, Homo sapiens
aactggcgccggcttcctcagctctgggcggtgcgacgccgcgcctctcaggcagttgccttccgcgtggggacac

SEQ ID NO: 75377 - DNA, 75 bp, Homo sapiens
ttcctcagctctgggcggtgcgacgccgcgcctctcaggcagttgccttccgcgtggggacactgggaaaggcct

SEQ ID NO: 75378 - DNA, 76 bp, Homo sapiens
tctgggcggtgcgacgccgcgcctctcaggcagttgccttccgcgtggggacactgggaaaggccttgccgcagaa

SEQ ID NO: 75379 - DNA, 77 bp, Homo sapiens
gtgcgacgccgcgcctctcaggcagttgccttccgcgtggggacactgggaaaggccttgccgcagaacagcacgga

SEQ ID NO: 75380 - DNA, 75 bp, Homo sapiens
cctctcaggcagttgccttccgcgtggggacactgggaaaggccttgccgcagaacagcacggacgggctccgca

SEQ ID NO: 75381 - DNA, 74 bp, Homo sapiens
aggcagttgccttccgcgtggggacactgggaaaggccttgccgcagaacagcacggacgggctccgcaggcta

SEQ ID NO: 75382 - DNA, 76 bp, Homo sapiens
cgcgtggggacactgggaaaggccttgccgcagaacagcacggacgggctccgcaggctagcgcacctgagtaaca

SEQ ID NO: 75383 - DNA, 75 bp, Homo sapiens
acactgggaaaggccttgccgcagaacagcacggacgggctccgcaggctagcgcacctgagtaacaactgggcg

SEQ ID NO: 75384 - DNA, 75 bp, Homo sapiens
aaaggccttgccgcagaacagcacggacgggctccgcaggctagcgcacctgagtaacaactgggcgggcagccg

SEQ ID NO: 75385 - DNA, 74 bp, Homo sapiens
acggacgggctccgcaggctagcgcacctgagtaacaactgggcgggcagccggcctctgcgcccgtttatatc

SEQ ID NO: 75386 - DNA, 76 bp, Homo sapiens
ctagcgcacctgagtaacaactgggcgggcagccggcctctgcgcccgtttatatcgctcctcacaaaatggcgcc

SEQ ID NO: 75387 - DNA, 73 bp, Homo sapiens
ggcgggcagccggcctctgcgcccgtttatatcgctcctcacaaaatggcgcccgcgccacccggaaatgaaa

SEQ ID NO: 75388 - DNA, 72 bp, Homo sapiens
cggcctctgcgcccgtttatatcgctcctcacaaaatggcgcccgcgccacccggaaatgaaaccttctgat

SEQ ID NO: 75389 - DNA, 74 bp, Homo sapiens
tctgcgcccgtttatatcgctcctcacaaaatggcgcccgcgccacccggaaatgaaaccttctgattggccca

SEQ ID NO: 75390 - DNA, 72 bp, Homo sapiens
tttatatcgctcctcacaaaatggcgcccgcgccacccggaaatgaaaccttctgattggcccaccgcgccc

SEQ ID NO: 75391 - DNA, 68 bp, Homo sapiens
acaaaatggcgcccgcgccacccggaaatgaaaccttctgattggcccaccgcgccccgcttcgtaac

SEQ ID NO: 75392 - DNA, 68 bp, Homo sapiens
atggcgcccgcgccacccggaaatgaaaccttctgattggcccaccgcgccccgcttcgtaacgaccc

SEQ ID NO: 75393 - DNA, 79 bp, Homo sapiens
tcactcacccctgcacctgctgaccccagtagcctgcactggcgttcacccctcagacacacaggtggcagcaaagttt

SEQ ID NO: 75394 - DNA, 78 bp, Homo sapiens
ctgcacctgctgaccccagtagcctgcactggcgttcacccctcagacacacaggtggcagcaaagttttattgtaaa

SEQ ID NO: 75395 - DNA, 76 bp, Homo sapiens
tgaccccagtagcctgcactggcgttcacccctcagacacacaggtggcagcaaagttttattgtaaaataagaga

SEQ ID NO: 75396 - DNA, 77 bp, Homo sapiens
tagcctgcactggcgttcacccctcagacacacaggtggcagcaaagttttattgtaaaataagagatcgatataaa

SEQ ID NO: 75397 - DNA, 73 bp, Homo sapiens
actggcgttcacccctcagacacacaggtggcagcaaagttttattgtaaaataagagatcgatataaaaatg

SEQ ID NO: 75398 - DNA, 72 bp, Homo sapiens
cctcagacacacaggtggcagcaaagttttattgtaaaataagagatcgatataaaaatgggatataaaaag

SEQ ID NO: 75399 - DNA, 72 bp, Homo sapiens
gacacacaggtggcagcaaagttttattgtaaaataagagatcgatataaaaatgggatataaaaagggaga

SEQ ID NO: 75400 - DNA, 69 bp, Homo sapiens
tggcagcaaagttttattgtaaaataagagatcgatataaaaatgggatataaaaagggagaaggaggg

SEQ ID NO: 75401 - DNA, 66 bp, Homo sapiens
ttattgtaaaataagagatcgatataaaaatgggatataaaaagggagaaggaggggaagggtggg

SEQ ID NO: 75402 - DNA, 65 bp, Homo sapiens
aaaataagagatcgatataaaaatgggatataaaaagggagaaggaggggaagggtggggtgaaa

SEQ ID NO: 75403 - DNA, 71 bp, Homo sapiens
atataaaaatgggatataaaaagggagaaggaggggaagggtggggtgaaaatgcagatgtgcttgcagaa

SEQ ID NO: 75404 - DNA, 71 bp, Homo sapiens
aatgggatataaaaagggagaaggaggggaagggtggggtgaaaatgcagatgtgcttgcagaatgtaaaa

SEQ ID NO: 75405 - DNA, 72 bp, Homo sapiens
taaaaagggagaaggaggggaagggtggggtgaaaatgcagatgtgcttgcagaatgtaaaagatgttgacc

SEQ ID NO: 75406 - DNA, 74 bp, Homo sapiens
aggggaagggtggggtgaaaatgcagatgtgcttgcagaatgtaaaagatgttgacccttccagctggacgtgg

SEQ ID NO: 75407 - DNA, 77 bp, Homo sapiens
aaaaaagaaattgaccctgagcataaaacaagtcttggtggatccagatcatcatatacaagagatgaaatcctcca

SEQ ID NO: 75408 - DNA, 79 bp, Homo sapiens
agaaattgaccctgagcataaaacaagtcttggtggatccagatcatcatatacaagagatgaaatcctccagggtgtg

SEQ ID NO: 75409 - DNA, 79 bp, Homo sapiens
agcataaaacaagtcttggtggatccagatcatcatatacaagagatgaaatcctccagggtgtgggatggggtgagat

SEQ ID NO: 75410 - DNA, 76 bp, Homo sapiens
aagtcttggtggatccagatcatcatatacaagagatgaaatcctccagggtgtgggatggggtgagatttccttt

SEQ ID NO: 75411 - DNA, 77 bp, Homo sapiens
tggatccagatcatcatatacaagagatgaaatcctccagggtgtgggatggggtgagatttccttttaggtactaa

SEQ ID NO: 75412 - DNA, 74 bp, Homo sapiens
atcatcatatacaagagatgaaatcctccagggtgtgggatggggtgagatttccttttaggtactaaggttca

SEQ ID NO: 75413 - DNA, 70 bp, Homo sapiens
atacaagagatgaaatcctccagggtgtgggatggggtgagatttccttttaggtactaaggttcaccaa

SEQ ID NO: 75414 - DNA, 68 bp, Homo sapiens
aaatcctccagggtgtgggatggggtgagatttccttttaggtactaaggttcaccaagaggttgtca

SEQ ID NO: 75415 - DNA, 68 bp, Homo sapiens
ggtgtgggatggggtgagatttccttttaggtactaaggttcaccaagaggttgtcagacagggtttg

SEQ ID NO: 75416 - DNA, 72 bp, Homo sapiens
ggtgagatttccttttaggtactaaggttcaccaagaggttgtcagacagggtttggctgggccagcagaga

SEQ ID NO: 75417 - DNA, 71 bp, Homo sapiens
atttccttttaggtactaaggttcaccaagaggttgtcagacagggtttggctgggccagcagagacttga

SEQ ID NO: 75418 - DNA, 74 bp, Homo sapiens
taggtactaaggttcaccaagaggttgtcagacagggtttggctgggccagcagagacttgacaactccctcta

SEQ ID NO: 75419 - DNA, 74 bp, Homo sapiens
ggttcaccaagaggttgtcagacagggtttggctgggccagcagagacttgacaactccctctacctaaccagc

SEQ ID NO: 75420 - DNA, 76 bp, Homo sapiens
ttgtcagacagggtttggctgggccagcagagacttgacaactccctctacctaaccagctgcccaactgtagaaa

SEQ ID NO: 75421 - DNA, 73 bp, Homo sapiens
ggtttggctgggccagcagagacttgacaactccctctacctaaccagctgcccaactgtagaaactaccaac

SEQ ID NO: 75422 - DNA, 73 bp, Homo sapiens
ggccagcagagacttgacaactccctctacctaaccagctgcccaactgtagaaactaccaacccaccgacca

SEQ ID NO: 75423 - DNA, 70 bp, Homo sapiens
ctaaccagctgcccaactgtagaaactaccaacccaccgaccaacagggagagggaacaagcaccctcaa

SEQ ID NO: 75424 - DNA, 68 bp, Homo sapiens
agctgcccaactgtagaaactaccaacccaccgaccaacagggagagggaacaagcaccctcaagggg

SEQ ID NO: 75425 - DNA, 68 bp, Homo sapiens
tagaaactaccaacccaccgaccaacagggagagggaacaagcaccctcaagggggtcaagttctaga

SEQ ID NO: 75426 - DNA, 70 bp, Homo sapiens
agcaccctcaagggggtcaagttctagaccccatgtaataaaaggtggtttcaaggccagatgtacatta

SEQ ID NO: 75427 - DNA, 69 bp, Homo sapiens
aagggggtcaagttctagaccccatgtaataaaaggtggtttcaaggccagatgtacattatttcatta

SEQ ID NO: 75428 - DNA, 70 bp, Homo sapiens
aagttctagaccccatgtaataaaaggtggtttcaaggccagatgtacattatttcattaaccctcacaa

SEQ ID NO: 75429 - DNA, 75 bp, Homo sapiens
cccatgtaataaaaggtggtttcaaggccagatgtacattatttcattaaccctcacaatgcactctgtgaggta

SEQ ID NO: 75430 - DNA, 75 bp, Homo sapiens
ataaaaggtggtttcaaggccagatgtacattatttcattaaccctcacaatgcactctgtgaggtaggtgcaaa

SEQ ID NO: 75431 - DNA, 83 bp, Homo sapiens
tttcaaggccagatgtacattatttcattaaccctcacaatgcactctgtgaggtaggtgcaaatgccagcatttcacagata

SEQ ID NO: 75432 - DNA, 82 bp, Homo sapiens
atgtacattatttcattaaccctcacaatgcactctgtgaggtaggtgcaaatgccagcatttcacagatatgggccttgaa

SEQ ID NO: 75433 - DNA, 80 bp, Homo sapiens
attatttcattaaccctcacaatgcactctgtgaggtaggtgcaaatgccagcatttcacagatatgggccttgaagtta

SEQ ID NO: 75434 - DNA, 81 bp, Homo sapiens
taaccctcacaatgcactctgtgaggtaggtgcaaatgccagcatttcacagatatgggccttgaagttagagaaaattca

SEQ ID NO: 75435 - DNA, 77 bp, Homo sapiens
aggtaggtgcaaatgccagcatttcacagatatgggccttgaagttagagaaaattcaacagtgagggacagcttcc

SEQ ID NO: 75436 - DNA, 76 bp, Homo sapiens
aatgccagcatttcacagatatgggccttgaagttagagaaaattcaacagtgagggacagcttccctggttagta

SEQ ID NO: 75437 - DNA, 73 bp, Homo sapiens
tttcacagatatgggccttgaagttagagaaaattcaacagtgagggacagcttccctggttagtacggtgaa

SEQ ID NO: 75438 - DNA, 71 bp, Homo sapiens
agatatgggccttgaagttagagaaaattcaacagtgagggacagcttccctggttagtacggtgaagtgg

SEQ ID NO: 75439 - DNA, 68 bp, Homo sapiens
aagttagagaaaattcaacagtgagggacagcttccctggttagtacggtgaagtgggcccctaccta

SEQ ID NO: 75440 - DNA, 71 bp, Homo sapiens
aaattcaacagtgagggacagcttccctggttagtacggtgaagtgggcccctacctagaatgtggctgat

SEQ ID NO: 75441 - DNA, 67 bp, Homo sapiens
cttccctggttagtacggtgaagtgggcccctacctagaatgtggctgattgtaaactaacccttaa

SEQ ID NO: 75442 - DNA, 70 bp, Homo sapiens
cggtgaagtgggcccctacctagaatgtggctgattgtaaactaacccttaactgcaagaacatttctta

SEQ ID NO: 75443 - DNA, 72 bp, Homo sapiens
ccctacctagaatgtggctgattgtaaactaacccttaactgcaagaacatttcttacatctcccaaacatc

SEQ ID NO: 75444 - DNA, 68 bp, Homo sapiens
attgtaaactaacccttaactgcaagaacatttcttacatctcccaaacatccctcacagtaaaaacc

SEQ ID NO: 75445 - DNA, 71 bp, Homo sapiens
caagaacatttcttacatctcccaaacatccctcacagtaaaaaccttaaaatctaagctggtatgtccta

SEQ ID NO: 75446 - DNA, 69 bp, Homo sapiens
atttcttacatctcccaaacatccctcacagtaaaaaccttaaaatctaagctggtatgtcctactccc

SEQ ID NO: 75447 - DNA, 70 bp, Homo sapiens
atctcccaaacatccctcacagtaaaaaccttaaaatctaagctggtatgtcctactccccatcctcctc

SEQ ID NO: 75448 - DNA, 68 bp, Homo sapiens
cctcacagtaaaaaccttaaaatctaagctggtatgtcctactccccatcctcctccccacaacaaaa

SEQ ID NO: 75449 - DNA, 67 bp, Homo sapiens
agtaaaaaccttaaaatctaagctggtatgtcctactccccatcctcctccccacaacaaaacacca

SEQ ID NO: 75450 - DNA, 72 bp, Homo sapiens
taaaatctaagctggtatgtcctactccccatcctcctccccacaacaaaacaccagtgcaggccaacttgt

SEQ ID NO: 75451 - DNA, 74 bp, Homo sapiens
aagctggtatgtcctactccccatcctcctccccacaacaaaacaccagtgcaggccaacttgttcagtggagc

SEQ ID NO: 75452 - DNA, 71 bp, Homo sapiens
tactccccatcctcctccccacaacaaaacaccagtgcaggccaacttgttcagtggagccccgggacaaa

SEQ ID NO: 75453 - DNA, 72 bp, Homo sapiens
atcctcctccccacaacaaaacaccagtgcaggccaacttgttcagtggagccccgggacaaagcaaatgga

SEQ ID NO: 75454 - DNA, 72 bp, Homo sapiens
caacaaaacaccagtgcaggccaacttgttcagtggagccccgggacaaagcaaatggaagtcctgggtgct

SEQ ID NO: 75455 - DNA, 73 bp, Homo sapiens
aaacaccagtgcaggccaacttgttcagtggagccccgggacaaagcaaatggaagtcctgggtgcttctgac

SEQ ID NO: 75456 - DNA, 76 bp, Homo sapiens
ccaacttgttcagtggagccccgggacaaagcaaatggaagtcctgggtgcttctgacgcacacctattgcaagca

SEQ ID NO: 75457 - DNA, 76 bp, Homo sapiens
ttcagtggagccccgggacaaagcaaatggaagtcctgggtgcttctgacgcacacctattgcaagcaagggttca

SEQ ID NO: 75458 - DNA, 73 bp, Homo sapiens
ccgggacaaagcaaatggaagtcctgggtgcttctgacgcacacctattgcaagcaagggttcaaagacccaa

SEQ ID NO: 75459 - DNA, 69 bp, Homo sapiens
acgcacacctattgcaagcaagggttcaaagacccaaaacccaaaatggcaggggagggagagatgggg

SEQ ID NO: 75460 - DNA, 69 bp, Homo sapiens
tattgcaagcaagggttcaaagacccaaaacccaaaatggcaggggagggagagatgggggtgggaggc

SEQ ID NO: 75461 - DNA, 67 bp, Homo sapiens
aagggttcaaagacccaaaacccaaaatggcaggggagggagagatgggggtgggaggctgtcagtg

SEQ ID NO: 75462 - DNA, 70 bp, Homo sapiens
caaaacccaaaatggcaggggagggagagatgggggtgggaggctgtcagtggggaacaagaagtggaga

SEQ ID NO: 75463 - DNA, 74 bp, Homo sapiens
aaaatggcaggggagggagagatgggggtgggaggctgtcagtggggaacaagaagtggagaatgtcagtctga

SEQ ID NO: 75464 - DNA, 76 bp, Homo sapiens
gagggagagatgggggtgggaggctgtcagtggggaacaagaagtggagaatgtcagtctgagtcaggcccttctg

SEQ ID NO: 75465 - DNA, 76 bp, Homo sapiens
atgggggtgggaggctgtcagtggggaacaagaagtggagaatgtcagtctgagtcaggcccttctgtcttgaaca

SEQ ID NO: 75466 - DNA, 76 bp, Homo sapiens
ggaggctgtcagtggggaacaagaagtggagaatgtcagtctgagtcaggcccttctgtcttgaacatgagttttt

SEQ ID NO: 75467 - DNA, 74 bp, Homo sapiens
agtggggaacaagaagtggagaatgtcagtctgagtcaggcccttctgtcttgaacatgagttttttatggcgg

SEQ ID NO: 75468 - DNA, 72 bp, Homo sapiens
aatgtcagtctgagtcaggcccttctgtcttgaacatgagttttttatggcgggaggtagactgaccctttt

SEQ ID NO: 75469 - DNA, 72 bp, Homo sapiens
tttttatggcgggaggtagactgaccctttttggacttcaggtggctgtaggagacagaagcagggaggaga

SEQ ID NO: 75470 - DNA, 71 bp, Homo sapiens
aacctaggaaggcaggggagtagggccaggaaggggctgaggtcactcacctggagtgagccctgctcccc

SEQ ID NO: 75471 - DNA, 71 bp, Homo sapiens
aggggagtagggccaggaaggggctgaggtcactcacctggagtgagccctgctcccccctggctccttcc

SEQ ID NO: 75472 - DNA, 73 bp, Homo sapiens
gtagggccaggaaggggctgaggtcactcacctggagtgagccctgctcccccctggctccttcccagcctgg

SEQ ID NO: 75473 - DNA, 76 bp, Homo sapiens
ggctgaggtcactcacctggagtgagccctgctcccccctggctccttcccagcctgggcatccttgagttccaag

SEQ ID NO: 75474 - DNA, 78 bp, Homo sapiens
tcactcacctggagtgagccctgctcccccctggctccttcccagcctgggcatccttgagttccaaggcctcattca

SEQ ID NO: 75475 - DNA, 76 bp, Homo sapiens
agtgagccctgctcccccctggctccttcccagcctgggcatccttgagttccaaggcctcattcagctctcggaa

SEQ ID NO: 75476 - DNA, 77 bp, Homo sapiens
ctgctcccccctggctccttcccagcctgggcatccttgagttccaaggcctcattcagctctcggaacatctcgaa

SEQ ID NO: 75477 - DNA, 80 bp, Homo sapiens
tggctccttcccagcctgggcatccttgagttccaaggcctcattcagctctcggaacatctcgaagcgctcacgcccac

SEQ ID NO: 75478 - DNA, 84 bp, Homo sapiens
cagcctgggcatccttgagttccaaggcctcattcagctctcggaacatctcgaagcgctcacgcccacggatctgcagcaaca

SEQ ID NO: 75479 - DNA, 81 bp, Homo sapiens
atccttgagttccaaggcctcattcagctctcggaacatctcgaagcgctcacgcccacggatctgcagcaacagaggagg

SEQ ID NO: 75480 - DNA, 80 bp, Homo sapiens
agttccaaggcctcattcagctctcggaacatctcgaagcgctcacgcccacggatctgcagcaacagaggagggggaga

SEQ ID NO: 75481 - DNA, 82 bp, Homo sapiens
tcattcagctctcggaacatctcgaagcgctcacgcccacggatctgcagcaacagaggagggggagaagtaagtatataca

SEQ ID NO: 75482 - DNA, 70 bp, Homo sapiens
gtgtattaaatccattttcaacttacaatattttcaacttacgacgagtttatcaggaagtaacaccatc

SEQ ID NO: 75483 - DNA, 70 bp, Homo sapiens
tccattttcaacttacaatattttcaacttacgacgagtttatcaggaagtaacaccatcgtaagtcaag

SEQ ID NO: 75484 - DNA, 74 bp, Homo sapiens
acttacaatattttcaacttacgacgagtttatcaggaagtaacaccatcgtaagtcaagtagcatctgtatca

SEQ ID NO: 75485 - DNA, 76 bp, Homo sapiens
ttttcaacttacgacgagtttatcaggaagtaacaccatcgtaagtcaagtagcatctgtatcaggcaaagtcata

SEQ ID NO: 75486 - DNA, 75 bp, Homo sapiens
aacttacgacgagtttatcaggaagtaacaccatcgtaagtcaagtagcatctgtatcaggcaaagtcatagaac

SEQ ID NO: 75487 - DNA, 80 bp, Homo sapiens
tatcaggaagtaacaccatcgtaagtcaagtagcatctgtatcaggcaaagtcatagaaccattttcatgctctctttaa

SEQ ID NO: 75488 - DNA, 77 bp, Homo sapiens
aagtaacaccatcgtaagtcaagtagcatctgtatcaggcaaagtcatagaaccattttcatgctctctttaacaat

SEQ ID NO: 75489 - DNA, 76 bp, Homo sapiens
catcgtaagtcaagtagcatctgtatcaggcaaagtcatagaaccattttcatgctctctttaacaattttctttt

SEQ ID NO: 75490 - DNA, 75 bp, Homo sapiens
aagtagcatctgtatcaggcaaagtcatagaaccattttcatgctctctttaacaattttctttttgaaagctgg

SEQ ID NO: 75491 - DNA, 73 bp, Homo sapiens
tatcaggcaaagtcatagaaccattttcatgctctctttaacaattttctttttgaaagctggtctggtcctt

SEQ ID NO: 75492 - DNA, 71 bp, Homo sapiens
gcaaagtcatagaaccattttcatgctctctttaacaattttctttttgaaagctggtctggtcctttaaa

SEQ ID NO: 75493 - DNA, 69 bp, Homo sapiens
agaaccattttcatgctctctttaacaattttctttttgaaagctggtctggtcctttaaaatatatat

SEQ ID NO: 75494 - DNA, 69 bp, Homo sapiens
aaacggcattttgagtgttagactggaaactttccacttgataagaggtcccaagacttagtacctgaa

SEQ ID NO: 75495 - DNA, 70 bp, Homo sapiens
ttgagtgttagactggaaactttccacttgataagaggtcccaagacttagtacctgaagggtgaaatat

SEQ ID NO: 75496 - DNA, 70 bp, Homo sapiens
gaaactttccacttgataagaggtcccaagacttagtacctgaagggtgaaatattctccatccagtggt

SEQ ID NO: 75497 - DNA, 71 bp, Homo sapiens
tttccacttgataagaggtcccaagacttagtacctgaagggtgaaatattctccatccagtggtttcttc

SEQ ID NO: 75498 - DNA, 70 bp, Homo sapiens
ataagaggtcccaagacttagtacctgaagggtgaaatattctccatccagtggtttcttctttggctgg

SEQ ID NO: 75499 - DNA, 71 bp, Homo sapiens
aagacttagtacctgaagggtgaaatattctccatccagtggtttcttctttggctggggagaggagctgg

SEQ ID NO: 75500 - DNA, 72 bp, Homo sapiens
gtacctgaagggtgaaatattctccatccagtggtttcttctttggctggggagaggagctggtgttgttgg

SEQ ID NO: 75501 - DNA, 74 bp, Homo sapiens
aaatattctccatccagtggtttcttctttggctggggagaggagctggtgttgttgggcagtgctaggaaaga

SEQ ID NO: 75502 - DNA, 73 bp, Homo sapiens
atccagtggtttcttctttggctggggagaggagctggtgttgttgggcagtgctaggaaagaggcaaggaaa

SEQ ID NO: 75503 - DNA, 73 bp, Homo sapiens
ttcttctttggctggggagaggagctggtgttgttgggcagtgctaggaaagaggcaaggaaaggtgataaaa

SEQ ID NO: 75504 - DNA, 74 bp, Homo sapiens
tttggctggggagaggagctggtgttgttgggcagtgctaggaaagaggcaaggaaaggtgataaaagtgaatc

SEQ ID NO: 75505 - DNA, 74 bp, Homo sapiens
agaggcaaggaaaggtgataaaagtgaatctgaggcataactgcacccttggtctcctccaccgcttcttgtcc

SEQ ID NO: 75506 - DNA, 75 bp, Homo sapiens
ataactgcacccttggtctcctccaccgcttcttgtcctgcttgcttacctcgcttagtgctccctgggggcagc

SEQ ID NO: 75507 - DNA, 77 bp, Homo sapiens
ttggtctcctccaccgcttcttgtcctgcttgcttacctcgcttagtgctccctgggggcagctcgtggtgaggctc

SEQ ID NO: 75508 - DNA, 74 bp, Homo sapiens
caccgcttcttgtcctgcttgcttacctcgcttagtgctccctgggggcagctcgtggtgaggctcccctttct

SEQ ID NO: 75509 - DNA, 76 bp, Homo sapiens
ttgtcctgcttgcttacctcgcttagtgctccctgggggcagctcgtggtgaggctcccctttcttgcggagattc

SEQ ID NO: 75510 - DNA, 75 bp, Homo sapiens
ttgcttacctcgcttagtgctccctgggggcagctcgtggtgaggctcccctttcttgcggagattctcttcctc

SEQ ID NO: 75511 - DNA, 75 bp, Homo sapiens
cttagtgctccctgggggcagctcgtggtgaggctcccctttcttgcggagattctcttcctctgtgcgccggtc

SEQ ID NO: 75512 - DNA, 75 bp, Homo sapiens
cctgggggcagctcgtggtgaggctcccctttcttgcggagattctcttcctctgtgcgccggtctctcccagga

SEQ ID NO: 75513 - DNA, 76 bp, Homo sapiens
agctcgtggtgaggctcccctttcttgcggagattctcttcctctgtgcgccggtctctcccaggacaggcacaaa

SEQ ID NO: 75514 - DNA, 76 bp, Homo sapiens
aggctcccctttcttgcggagattctcttcctctgtgcgccggtctctcccaggacaggcacaaacacgcacctca

SEQ ID NO: 75515 - DNA, 77 bp, Homo sapiens
ctttcttgcggagattctcttcctctgtgcgccggtctctcccaggacaggcacaaacacgcacctcaaagctgttc

SEQ ID NO: 75516 - DNA, 76 bp, Homo sapiens
agattctcttcctctgtgcgccggtctctcccaggacaggcacaaacacgcacctcaaagctgttccgtcccagta

SEQ ID NO: 75517 - DNA, 76 bp, Homo sapiens
ttcctctgtgcgccggtctctcccaggacaggcacaaacacgcacctcaaagctgttccgtcccagtagattacca

SEQ ID NO: 75518 - DNA, 75 bp, Homo sapiens
cggtctctcccaggacaggcacaaacacgcacctcaaagctgttccgtcccagtagattaccactactcaggata

SEQ ID NO: 75519 - DNA, 74 bp, Homo sapiens
tcccaggacaggcacaaacacgcacctcaaagctgttccgtcccagtagattaccactactcaggataggaaaa

SEQ ID NO: 75520 - DNA, 74 bp, Homo sapiens
aggcacaaacacgcacctcaaagctgttccgtcccagtagattaccactactcaggataggaaaagagaagcaa

SEQ ID NO: 75521 - DNA, 84 bp, Homo sapiens
agaggctggggcacagcaggccagtgtgcagggtggcaagtggctcctgacctggagtcttccagtgtgatgatggtgaggatg

SEQ ID NO: 75522 - DNA, 82 bp, Homo sapiens
gcaggccagtgtgcagggtggcaagtggctcctgacctggagtcttccagtgtgatgatggtgaggatgggcctccggttca

SEQ ID NO: 75523 - DNA, 81 bp, Homo sapiens
agtgtgcagggtggcaagtggctcctgacctggagtcttccagtgtgatgatggtgaggatgggcctccggttcatgccgc

SEQ ID NO: 75524 - DNA, 82 bp, Homo sapiens
gcaagtggctcctgacctggagtcttccagtgtgatgatggtgaggatgggcctccggttcatgccgcccatgcaggaactg

SEQ ID NO: 75525 - DNA, 82 bp, Homo sapiens
tcctgacctggagtcttccagtgtgatgatggtgaggatgggcctccggttcatgccgcccatgcaggaactgttacacatg

SEQ ID NO: 75526 - DNA, 80 bp, Homo sapiens
agtcttccagtgtgatgatggtgaggatgggcctccggttcatgccgcccatgcaggaactgttacacatgtagttgtag

SEQ ID NO: 75527 - DNA, 82 bp, Homo sapiens
tgtgatgatggtgaggatgggcctccggttcatgccgcccatgcaggaactgttacacatgtagttgtagtggatggtggta

SEQ ID NO: 75528 - DNA, 78 bp, Homo sapiens
atggtgaggatgggcctccggttcatgccgcccatgcaggaactgttacacatgtagttgtagtggatggtggtacag

SEQ ID NO: 75529 - DNA, 79 bp, Homo sapiens
atgggcctccggttcatgccgcccatgcaggaactgttacacatgtagttgtagtggatggtggtacagtcagagccaa

SEQ ID NO: 75530 - DNA, 81 bp, Homo sapiens
ttcatgccgcccatgcaggaactgttacacatgtagttgtagtggatggtggtacagtcagagccaacctaggagataaca

SEQ ID NO: 75531 - DNA, 78 bp, Homo sapiens
atgcaggaactgttacacatgtagttgtagtggatggtggtacagtcagagccaacctaggagataacacaggcccaa

SEQ ID NO: 75532 - DNA, 77 bp, Homo sapiens
aactgttacacatgtagttgtagtggatggtggtacagtcagagccaacctaggagataacacaggcccaagatgag

SEQ ID NO: 75533 - DNA, 73 bp, Homo sapiens
actgcgcccagccaagcaggggaggcccttagcctctgtaagcttcagttttttcaactgtgcaatagttaaa

SEQ ID NO: 75534 - DNA, 71 bp, Homo sapiens
gccaagcaggggaggcccttagcctctgtaagcttcagttttttcaactgtgcaatagttaaacccattta

SEQ ID NO: 75535 - DNA, 72 bp, Homo sapiens
ggaggcccttagcctctgtaagcttcagttttttcaactgtgcaatagttaaacccatttactttgcacatc

SEQ ID NO: 75536 - DNA, 73 bp, Homo sapiens
cccttagcctctgtaagcttcagttttttcaactgtgcaatagttaaacccatttactttgcacatctcatgg

SEQ ID NO: 75537 - DNA, 73 bp, Homo sapiens
tgtaagcttcagttttttcaactgtgcaatagttaaacccatttactttgcacatctcatggggttataggga

SEQ ID NO: 75538 - DNA, 73 bp, Homo sapiens
tttttcaactgtgcaatagttaaacccatttactttgcacatctcatggggttatagggaggtcaaataagca

SEQ ID NO: 75539 - DNA, 75 bp, Homo sapiens
aactgtgcaatagttaaacccatttactttgcacatctcatggggttatagggaggtcaaataagcagcaggaga

SEQ ID NO: 75540 - DNA, 72 bp, Homo sapiens
tagttaaacccatttactttgcacatctcatggggttatagggaggtcaaataagcagcaggagaaagcccc

SEQ ID NO: 75541 - DNA, 74 bp, Homo sapiens
atttactttgcacatctcatggggttatagggaggtcaaataagcagcaggagaaagcccccctactgctcacc

SEQ ID NO: 75542 - DNA, 75 bp, Homo sapiens
atctcatggggttatagggaggtcaaataagcagcaggagaaagcccccctactgctcacctggagggccactga

SEQ ID NO: 75543 - DNA, 73 bp, Homo sapiens
gggttatagggaggtcaaataagcagcaggagaaagcccccctactgctcacctggagggccactgacaacca

SEQ ID NO: 75544 - DNA, 71 bp, Homo sapiens
aggtcaaataagcagcaggagaaagcccccctactgctcacctggagggccactgacaaccacccttaacc

SEQ ID NO: 75545 - DNA, 68 bp, Homo sapiens
agaaagcccccctactgctcacctggagggccactgacaaccacccttaacccctcctcccagagacc

SEQ ID NO: 75546 - DNA, 72 bp, Homo sapiens
tactgctcacctggagggccactgacaaccacccttaacccctcctcccagagaccccagttgcaaaccaga

SEQ ID NO: 75547 - DNA, 70 bp, Homo sapiens
actgacaaccacccttaacccctcctcccagagaccccagttgcaaaccagacctcaggcggctcatagg

SEQ ID NO: 75548 - DNA, 75 bp, Homo sapiens
ctcctcccagagaccccagttgcaaaccagacctcaggcggctcatagggcaccaccacactatgtcgaaaagtg

SEQ ID NO: 75549 - DNA, 76 bp, Homo sapiens
agagaccccagttgcaaaccagacctcaggcggctcatagggcaccaccacactatgtcgaaaagtgtttctgtca

SEQ ID NO: 75550 - DNA, 76 bp, Homo sapiens
agttgcaaaccagacctcaggcggctcatagggcaccaccacactatgtcgaaaagtgtttctgtcatccaaatac

SEQ ID NO: 75551 - DNA, 76 bp, Homo sapiens
acctcaggcggctcatagggcaccaccacactatgtcgaaaagtgtttctgtcatccaaatactccacacgcaaat

SEQ ID NO: 75552 - DNA, 74 bp, Homo sapiens
caccaccacactatgtcgaaaagtgtttctgtcatccaaatactccacacgcaaatttccttccactcggataa

SEQ ID NO: 75553 - DNA, 76 bp, Homo sapiens
acactatgtcgaaaagtgtttctgtcatccaaatactccacacgcaaatttccttccactcggataagatgctgag

SEQ ID NO: 75554 - DNA, 74 bp, Homo sapiens
aaaagtgtttctgtcatccaaatactccacacgcaaatttccttccactcggataagatgctgaggaggggcca

SEQ ID NO: 75555 - DNA, 76 bp, Homo sapiens
tttctgtcatccaaatactccacacgcaaatttccttccactcggataagatgctgaggaggggccagacctaaga

SEQ ID NO: 75556 - DNA, 76 bp, Homo sapiens
aaatactccacacgcaaatttccttccactcggataagatgctgaggaggggccagacctaagagcaatcagtgag

SEQ ID NO: 75557 - DNA, 78 bp, Homo sapiens
acacgcaaatttccttccactcggataagatgctgaggaggggccagacctaagagcaatcagtgaggaatcagaggc

SEQ ID NO: 75558 - DNA, 76 bp, Homo sapiens
ccagacctaagagcaatcagtgaggaatcagaggcctggggaccctgggcaaccagccctgtcgtctctccagccc

SEQ ID NO: 75559 - DNA, 83 bp, Homo sapiens
gggaccctgggcaaccagccctgtcgtctctccagccccagctgctcaccatcgctatctgagcagcgctcatggtgggggca

SEQ ID NO: 75560 - DNA, 84 bp, Homo sapiens
aaccagccctgtcgtctctccagccccagctgctcaccatcgctatctgagcagcgctcatggtgggggcagcgcctcacaacc

SEQ ID NO: 75561 - DNA, 90 bp, Homo sapiens
tcgtctctccagccccagctgctcaccatcgctatctgagcagcgctcatggtgggggcagcgcctcacaacctccgtcatgtgctgtga

SEQ ID NO: 75562 - DNA, 89 bp, Homo sapiens
agccccagctgctcaccatcgctatctgagcagcgctcatggtgggggcagcgcctcacaacctccgtcatgtgctgtgactgcttgta

SEQ ID NO: 75563 - DNA, 91 bp, Homo sapiens
agctgctcaccatcgctatctgagcagcgctcatggtgggggcagcgcctcacaacctccgtcatgtgctgtgactgcttgtagatggcca

SEQ ID NO: 75564 - DNA, 89 bp, Homo sapiens
atcgctatctgagcagcgctcatggtgggggcagcgcctcacaacctccgtcatgtgctgtgactgcttgtagatggccatggcgcgga

SEQ ID NO: 75565 - DNA, 80 bp, Homo sapiens
atggtgggggcagcgcctcacaacctccgtcatgtgctgtgactgcttgtagatggccatggcgcggacgcgggtgccgg

SEQ ID NO: 75566 - DNA, 79 bp, Homo sapiens
gggcagcgcctcacaacctccgtcatgtgctgtgactgcttgtagatggccatggcgcggacgcgggtgccgggcgggg

SEQ ID NO: 75567 - DNA, 77 bp, Homo sapiens
aacctccgtcatgtgctgtgactgcttgtagatggccatggcgcggacgcgggtgccgggcgggggtgtggaatcaa

SEQ ID NO: 75568 - DNA, 80 bp, Homo sapiens
tgtgactgcttgtagatggccatggcgcggacgcgggtgccgggcgggggtgtggaatcaacccacagctgcacagggca

SEQ ID NO: 75569 - DNA, 77 bp, Homo sapiens
tgtagatggccatggcgcggacgcgggtgccgggcgggggtgtggaatcaacccacagctgcacagggcaggtcttg

SEQ ID NO: 75570 - DNA, 74 bp, Homo sapiens
atggcgcggacgcgggtgccgggcgggggtgtggaatcaacccacagctgcacagggcaggtcttggccagttg

SEQ ID NO: 75571 - DNA, 74 bp, Homo sapiens
ggtgccgggcgggggtgtggaatcaacccacagctgcacagggcaggtcttggccagttggcaaaacatcttgt

SEQ ID NO: 75572 - DNA, 75 bp, Homo sapiens
cgggggtgtggaatcaacccacagctgcacagggcaggtcttggccagttggcaaaacatcttgttgagggcagg

SEQ ID NO: 75573 - DNA, 76 bp, Homo sapiens
aatcaacccacagctgcacagggcaggtcttggccagttggcaaaacatcttgttgagggcaggggagtactgtag

SEQ ID NO: 75574 - DNA, 76 bp, Homo sapiens
acagctgcacagggcaggtcttggccagttggcaaaacatcttgttgagggcaggggagtactgtaggaagaggaa

SEQ ID NO: 75575 - DNA, 73 bp, Homo sapiens
acagggcaggtcttggccagttggcaaaacatcttgttgagggcaggggagtactgtaggaagaggaaggaga

SEQ ID NO: 75576 - DNA, 74 bp, Homo sapiens
tcttggccagttggcaaaacatcttgttgagggcaggggagtactgtaggaagaggaaggagacagagttgaaa

SEQ ID NO: 75577 - DNA, 72 bp, Homo sapiens
agttggcaaaacatcttgttgagggcaggggagtactgtaggaagaggaaggagacagagttgaaagtcagg

SEQ ID NO: 75578 - DNA, 75 bp, Homo sapiens
ttgttgagggcaggggagtactgtaggaagaggaaggagacagagttgaaagtcagggcacaagtgaacagataa

SEQ ID NO: 75579 - DNA, 74 bp, Homo sapiens
agggcaggggagtactgtaggaagaggaaggagacagagttgaaagtcagggcacaagtgaacagataaagcaa

SEQ ID NO: 75580 - DNA, 74 bp, Homo sapiens
agtactgtaggaagaggaaggagacagagttgaaagtcagggcacaagtgaacagataaagcaactggaagacg

SEQ ID NO: 75581 - DNA, 75 bp, Homo sapiens
aggaaggagacagagttgaaagtcagggcacaagtgaacagataaagcaactggaagacggcagcaaagaaacaa

SEQ ID NO: 75582 - DNA, 76 bp, Homo sapiens
acagagttgaaagtcagggcacaagtgaacagataaagcaactggaagacggcagcaaagaaacaaacatgcgtaa

SEQ ID NO: 75583 - DNA, 77 bp, Homo sapiens
ttgaaagtcagggcacaagtgaacagataaagcaactggaagacggcagcaaagaaacaaacatgcgtaagcacctc

SEQ ID NO: 75584 - DNA, 76 bp, Homo sapiens
acaagtgaacagataaagcaactggaagacggcagcaaagaaacaaacatgcgtaagcacctcctgcaacccacta

SEQ ID NO: 75585 - DNA, 77 bp, Homo sapiens
aacagataaagcaactggaagacggcagcaaagaaacaaacatgcgtaagcacctcctgcaacccactagcgagcta

SEQ ID NO: 75586 - DNA, 78 bp, Homo sapiens
agcaactggaagacggcagcaaagaaacaaacatgcgtaagcacctcctgcaacccactagcgagctagagagagttg

SEQ ID NO: 75587 - DNA, 80 bp, Homo sapiens
gcagcaaagaaacaaacatgcgtaagcacctcctgcaacccactagcgagctagagagagttggcgtctacacctcagga

SEQ ID NO: 75588 - DNA, 76 bp, Homo sapiens
aaacaaacatgcgtaagcacctcctgcaacccactagcgagctagagagagttggcgtctacacctcaggagcttt

SEQ ID NO: 75589 - DNA, 76 bp, Homo sapiens
acatgcgtaagcacctcctgcaacccactagcgagctagagagagttggcgtctacacctcaggagcttttctttt

SEQ ID NO: 75590 - DNA, 82 bp, Homo sapiens
ccaggcattgaagtctcatggaagccagcccctcagggcaactgaccgtgcaagtcacagacttggctgtcccagaatgcaa

SEQ ID NO: 75591 - DNA, 78 bp, Homo sapiens
gaagccagcccctcagggcaactgaccgtgcaagtcacagacttggctgtcccagaatgcaagaagcccagacggaaa

SEQ ID NO: 75592 - DNA, 76 bp, Homo sapiens
ccctcagggcaactgaccgtgcaagtcacagacttggctgtcccagaatgcaagaagcccagacggaaaccgtagc

SEQ ID NO: 75593 - DNA, 76 bp, Homo sapiens
aactgaccgtgcaagtcacagacttggctgtcccagaatgcaagaagcccagacggaaaccgtagctgccctggta

SEQ ID NO: 75594 - DNA, 74 bp, Homo sapiens
caagtcacagacttggctgtcccagaatgcaagaagcccagacggaaaccgtagctgccctggtaggttttctg

SEQ ID NO: 75595 - DNA, 72 bp, Homo sapiens
acagacttggctgtcccagaatgcaagaagcccagacggaaaccgtagctgccctggtaggttttctgggaa

SEQ ID NO: 75596 - DNA, 71 bp, Homo sapiens
ctgtcccagaatgcaagaagcccagacggaaaccgtagctgccctggtaggttttctgggaagggacagaa

SEQ ID NO: 75597 - DNA, 71 bp, Homo sapiens
aatgcaagaagcccagacggaaaccgtagctgccctggtaggttttctgggaagggacagaagatgacagg

SEQ ID NO: 75598 - DNA, 68 bp, Homo sapiens
agacggaaaccgtagctgccctggtaggttttctgggaagggacagaagatgacaggggccaggaggg

SEQ ID NO: 75599 - DNA, 68 bp, Homo sapiens
aaaccgtagctgccctggtaggttttctgggaagggacagaagatgacaggggccaggagggggctgg

SEQ ID NO: 75600 - DNA, 70 bp, Homo sapiens
tggtaggttttctgggaagggacagaagatgacaggggccaggagggggctggtgcaggggccgccggtg

SEQ ID NO: 75601 - DNA, 73 bp, Homo sapiens
ttttctgggaagggacagaagatgacaggggccaggagggggctggtgcaggggccgccggtgtaggagctgc

SEQ ID NO: 75602 - DNA, 74 bp, Homo sapiens
aagggacagaagatgacaggggccaggagggggctggtgcaggggccgccggtgtaggagctgctggtgcaggg

SEQ ID NO: 75603 - DNA, 73 bp, Homo sapiens
aagatgacaggggccaggagggggctggtgcaggggccgccggtgtaggagctgctggtgcaggggccacggg

SEQ ID NO: 75604 - DNA, 75 bp, Homo sapiens
aggagggggctggtgcaggggccgccggtgtaggagctgctggtgcaggggccacggggggagcagcctctggca

SEQ ID NO: 75605 - DNA, 79 bp, Homo sapiens
tggtgcaggggccgccggtgtaggagctgctggtgcaggggccacggggggagcagcctctggcattctgggagcttca

SEQ ID NO: 75606 - DNA, 79 bp, Homo sapiens
gccgccggtgtaggagctgctggtgcaggggccacggggggagcagcctctggcattctgggagcttcatctggacctg

SEQ ID NO: 75607 - DNA, 81 bp, Homo sapiens
taggagctgctggtgcaggggccacggggggagcagcctctggcattctgggagcttcatctggacctgggtcttcagtga

SEQ ID NO: 75608 - DNA, 78 bp, Homo sapiens
tggtgcaggggccacggggggagcagcctctggcattctgggagcttcatctggacctgggtcttcagtgaaccattg

SEQ ID NO: 75609 - DNA, 78 bp, Homo sapiens
ggccacggggggagcagcctctggcattctgggagcttcatctggacctgggtcttcagtgaaccattgttcaatatc

SEQ ID NO: 75610 - DNA, 81 bp, Homo sapiens
gagcagcctctggcattctgggagcttcatctggacctgggtcttcagtgaaccattgttcaatatcgtccggggacagca

SEQ ID NO: 75611 - DNA, 81 bp, Homo sapiens
tggcattctgggagcttcatctggacctgggtcttcagtgaaccattgttcaatatcgtccggggacagcatcaaatcatc

SEQ ID NO: 75612 - DNA, 79 bp, Homo sapiens
ttctgggagcttcatctggacctgggtcttcagtgaaccattgttcaatatcgtccggggacagcatcaaatcatccat

SEQ ID NO: 75613 - DNA, 79 bp, Homo sapiens
ttcatctggacctgggtcttcagtgaaccattgttcaatatcgtccggggacagcatcaaatcatccattgcttgggac

SEQ ID NO: 75614 - DNA, 76 bp, Homo sapiens
ctgggtcttcagtgaaccattgttcaatatcgtccggggacagcatcaaatcatccattgcttgggacggcaaggg

SEQ ID NO: 75615 - DNA, 75 bp, Homo sapiens
aaccattgttcaatatcgtccggggacagcatcaaatcatccattgcttgggacggcaagggggactgtagatgg

SEQ ID NO: 75616 - DNA, 76 bp, Homo sapiens
ttgttcaatatcgtccggggacagcatcaaatcatccattgcttgggacggcaagggggactgtagatgggtgaaa

SEQ ID NO: 75617 - DNA, 78 bp, Homo sapiens
tcgtccggggacagcatcaaatcatccattgcttgggacggcaagggggactgtagatgggtgaaaagagcagtcaga

SEQ ID NO: 75618 - DNA, 67 bp, Homo sapiens
tccaggtccccagccctccaggtccccagcccaacccttgtccttaccagaacgttgttttcaggaa

SEQ ID NO: 75619 - DNA, 68 bp, Homo sapiens
agccctccaggtccccagcccaacccttgtccttaccagaacgttgttttcaggaagtctgaaagaca

SEQ ID NO: 75620 - DNA, 69 bp, Homo sapiens
aggtccccagcccaacccttgtccttaccagaacgttgttttcaggaagtctgaaagacaagagcagaa

SEQ ID NO: 75621 - DNA, 72 bp, Homo sapiens
caacccttgtccttaccagaacgttgttttcaggaagtctgaaagacaagagcagaaagtcagtcccatgga

SEQ ID NO: 75622 - DNA, 72 bp, Homo sapiens
ttgtccttaccagaacgttgttttcaggaagtctgaaagacaagagcagaaagtcagtcccatggaattttc

SEQ ID NO: 75623 - DNA, 72 bp, Homo sapiens
agaacgttgttttcaggaagtctgaaagacaagagcagaaagtcagtcccatggaattttcgcttcccacag

SEQ ID NO: 75624 - DNA, 75 bp, Homo sapiens
ttttcaggaagtctgaaagacaagagcagaaagtcagtcccatggaattttcgcttcccacaggtctctgctagg

SEQ ID NO: 75625 - DNA, 74 bp, Homo sapiens
agtctgaaagacaagagcagaaagtcagtcccatggaattttcgcttcccacaggtctctgctagggggctggg

SEQ ID NO: 75626 - DNA, 71 bp, Homo sapiens
acaagagcagaaagtcagtcccatggaattttcgcttcccacaggtctctgctagggggctggggttgggg

SEQ ID NO: 75627 - DNA, 67 bp, Homo sapiens
aaagtcagtcccatggaattttcgcttcccacaggtctctgctagggggctggggttggggtggggg

SEQ ID NO: 75628 - DNA, 68 bp, Homo sapiens
atggaattttcgcttcccacaggtctctgctagggggctggggttggggtgggggtggtgggcctgcc

SEQ ID NO: 75629 - DNA, 70 bp, Homo sapiens
ttcccacaggtctctgctagggggctggggttggggtgggggtggtgggcctgcccttccaatggatcca

SEQ ID NO: 75630 - DNA, 71 bp, Homo sapiens
tctctgctagggggctggggttggggtgggggtggtgggcctgcccttccaatggatccactcacagtttc

SEQ ID NO: 75631 - DNA, 69 bp, Homo sapiens
ggggctggggttggggtgggggtggtgggcctgcccttccaatggatccactcacagtttccataggtc

SEQ ID NO: 75632 - DNA, 71 bp, Homo sapiens
ttggggtgggggtggtgggcctgcccttccaatggatccactcacagtttccataggtctgaaaatgtttc

SEQ ID NO: 75633 - DNA, 74 bp, Homo sapiens
gggtggtgggcctgcccttccaatggatccactcacagtttccataggtctgaaaatgtttcctgactcagagg

SEQ ID NO: 75634 - DNA, 76 bp, Homo sapiens
ctgcccttccaatggatccactcacagtttccataggtctgaaaatgtttcctgactcagagggggctcgacgcta

SEQ ID NO: 75635 - DNA, 78 bp, Homo sapiens
ttccaatggatccactcacagtttccataggtctgaaaatgtttcctgactcagagggggctcgacgctaggatctga

SEQ ID NO: 75636 - DNA, 77 bp, Homo sapiens
actcacagtttccataggtctgaaaatgtttcctgactcagagggggctcgacgctaggatctgactgcggctcctc

SEQ ID NO: 75637 - DNA, 78 bp, Homo sapiens
agtttccataggtctgaaaatgtttcctgactcagagggggctcgacgctaggatctgactgcggctcctccatggca

SEQ ID NO: 75638 - DNA, 79 bp, Homo sapiens
tgaaaatgtttcctgactcagagggggctcgacgctaggatctgactgcggctcctccatggcagtgacccggaaggca

SEQ ID NO: 75639 - DNA, 80 bp, Homo sapiens
tgtttcctgactcagagggggctcgacgctaggatctgactgcggctcctccatggcagtgacccggaaggcagtctggc

SEQ ID NO: 75640 - DNA, 80 bp, Homo sapiens
agggggctcgacgctaggatctgactgcggctcctccatggcagtgacccggaaggcagtctggctgctgcaagaggaaa

SEQ ID NO: 75641 - DNA, 80 bp, Homo sapiens
ctcgacgctaggatctgactgcggctcctccatggcagtgacccggaaggcagtctggctgctgcaagaggaaaagtggg

SEQ ID NO: 75642 - DNA, 84 bp, Homo sapiens
atctgactgcggctcctccatggcagtgacccggaaggcagtctggctgctgcaagaggaaaagtggggatccagcatgagaca

SEQ ID NO: 75643 - DNA, 68 bp, Homo sapiens
aatctctgtatggggaaggacacccccttggcccccacccttccccacctgatacacggctccatttc

SEQ ID NO: 75644 - DNA, 66 bp, Homo sapiens
gggaaggacacccccttggcccccacccttccccacctgatacacggctccatttctttgattcct

SEQ ID NO: 75645 - DNA, 68 bp, Homo sapiens
acccccttggcccccacccttccccacctgatacacggctccatttctttgattcctttcactgcaaa

SEQ ID NO: 75646 - DNA, 72 bp, Homo sapiens
ccccacccttccccacctgatacacggctccatttctttgattcctttcactgcaaagcttctggaagaaca

SEQ ID NO: 75647 - DNA, 75 bp, Homo sapiens
ttccccacctgatacacggctccatttctttgattcctttcactgcaaagcttctggaagaacaactgtctcacc

SEQ ID NO: 75648 - DNA, 77 bp, Homo sapiens
atacacggctccatttctttgattcctttcactgcaaagcttctggaagaacaactgtctcaccgctcacctgccca

SEQ ID NO: 75649 - DNA, 77 bp, Homo sapiens
catttctttgattcctttcactgcaaagcttctggaagaacaactgtctcaccgctcacctgcccattctcttcgga

SEQ ID NO: 75650 - DNA, 79 bp, Homo sapiens
ttgattcctttcactgcaaagcttctggaagaacaactgtctcaccgctcacctgcccattctcttcggacactcctca

SEQ ID NO: 75651 - DNA, 81 bp, Homo sapiens
ttcactgcaaagcttctggaagaacaactgtctcaccgctcacctgcccattctcttcggacactcctcagccctgcatta

SEQ ID NO: 75652 - DNA, 77 bp, Homo sapiens
aagcttctggaagaacaactgtctcaccgctcacctgcccattctcttcggacactcctcagccctgcattacaaac

SEQ ID NO: 75653 - DNA, 76 bp, Homo sapiens
aacaactgtctcaccgctcacctgcccattctcttcggacactcctcagccctgcattacaaacccctcacgaatg

SEQ ID NO: 75654 - DNA, 77 bp, Homo sapiens
tctcaccgctcacctgcccattctcttcggacactcctcagccctgcattacaaacccctcacgaatggcccgtctc

SEQ ID NO: 75655 - DNA, 77 bp, Homo sapiens
agagcccgtgactcagagaggactcatcaagttcagtcaggagcttacccaatccagggaagcgtgtcaccgtcgtg

SEQ ID NO: 75656 - DNA, 78 bp, Homo sapiens
tcagagaggactcatcaagttcagtcaggagcttacccaatccagggaagcgtgtcaccgtcgtggaaagcacgctcc

SEQ ID NO: 75657 - DNA, 76 bp, Homo sapiens
aggactcatcaagttcagtcaggagcttacccaatccagggaagcgtgtcaccgtcgtggaaagcacgctcccagc

SEQ ID NO: 75658 - DNA, 74 bp, Homo sapiens
ttcagtcaggagcttacccaatccagggaagcgtgtcaccgtcgtggaaagcacgctcccagcccgaacgcaaa

SEQ ID NO: 75659 - DNA, 72 bp, Homo sapiens
aggagcttacccaatccagggaagcgtgtcaccgtcgtggaaagcacgctcccagcccgaacgcaaagtgtc

SEQ ID NO: 75660 - DNA, 71 bp, Homo sapiens
aatccagggaagcgtgtcaccgtcgtggaaagcacgctcccagcccgaacgcaaagtgtccccggagccca

SEQ ID NO: 75661 - DNA, 73 bp, Homo sapiens
ggaagcgtgtcaccgtcgtggaaagcacgctcccagcccgaacgcaaagtgtccccggagcccagcagctacc

SEQ ID NO: 75662 - DNA, 73 bp, Homo sapiens
accgtcgtggaaagcacgctcccagcccgaacgcaaagtgtccccggagcccagcagctacctgctccctgga

SEQ ID NO: 75663 - DNA, 74 bp, Homo sapiens
aaagcacgctcccagcccgaacgcaaagtgtccccggagcccagcagctacctgctccctggacggtggctcta

SEQ ID NO: 75664 - DNA, 73 bp, Homo sapiens
agcccgaacgcaaagtgtccccggagcccagcagctacctgctccctggacggtggctctagacttttgagaa

SEQ ID NO: 75665 - DNA, 72 bp, Homo sapiens
aaagtgtccccggagcccagcagctacctgctccctggacggtggctctagacttttgagaagctcaaaact

SEQ ID NO: 75666 - DNA, 75 bp, Homo sapiens
cggagcccagcagctacctgctccctggacggtggctctagacttttgagaagctcaaaacttttagcgccagtc

SEQ ID NO: 75667 - DNA, 78 bp, Homo sapiens
agcagctacctgctccctggacggtggctctagacttttgagaagctcaaaacttttagcgccagtcttgagcacatg

SEQ ID NO: 75668 - DNA, 75 bp, Homo sapiens
acctgctccctggacggtggctctagacttttgagaagctcaaaacttttagcgccagtcttgagcacatgggag

SEQ ID NO: 75669 - DNA, 73 bp, Homo sapiens
tggacggtggctctagacttttgagaagctcaaaacttttagcgccagtcttgagcacatgggaggggaaaac

SEQ ID NO: 75670 - DNA, 71 bp, Homo sapiens
ttgagaagctcaaaacttttagcgccagtcttgagcacatgggaggggaaaaccccaatcccatcaacccc

SEQ ID NO: 75671 - DNA, 70 bp, Homo sapiens
aaaacttttagcgccagtcttgagcacatgggaggggaaaaccccaatcccatcaacccctgcgaggctc

SEQ ID NO: 75672 - DNA, 66 bp, Homo sapiens
ctggaagacccccacctctaactgacttttttcttttaggttccccccagggcaacatgccagccc

SEQ ID NO: 75673 - DNA, 68 bp, Homo sapiens
acctctaactgacttttttcttttaggttccccccagggcaacatgccagccccgtagcactgcccac

SEQ ID NO: 75674 - DNA, 66 bp, Homo sapiens
acttttttcttttaggttccccccagggcaacatgccagccccgtagcactgcccaccccacccac

SEQ ID NO: 75675 - DNA, 71 bp, Homo sapiens
ttttaggttccccccagggcaacatgccagccccgtagcactgcccaccccacccactgtggtctgttgta

SEQ ID NO: 75676 - DNA, 73 bp, Homo sapiens
ccccagggcaacatgccagccccgtagcactgcccaccccacccactgtggtctgttgtaccccactgctggg

SEQ ID NO: 75677 - DNA, 72 bp, Homo sapiens
aacatgccagccccgtagcactgcccaccccacccactgtggtctgttgtaccccactgctggggtggtggt

SEQ ID NO: 75678 - DNA, 73 bp, Homo sapiens
cccgtagcactgcccaccccacccactgtggtctgttgtaccccactgctggggtggtggttccaatgagaca

SEQ ID NO: 75679 - DNA, 74 bp, Homo sapiens
tgcccaccccacccactgtggtctgttgtaccccactgctggggtggtggttccaatgagacagggcacaccaa

SEQ ID NO: 75680 - DNA, 74 bp, Homo sapiens
acccactgtggtctgttgtaccccactgctggggtggtggttccaatgagacagggcacaccaaactccatctg

SEQ ID NO: 75681 - DNA, 75 bp, Homo sapiens
tgtggtctgttgtaccccactgctggggtggtggttccaatgagacagggcacaccaaactccatctggtaagtc

SEQ ID NO: 75682 - DNA, 75 bp, Homo sapiens
ttgtaccccactgctggggtggtggttccaatgagacagggcacaccaaactccatctggtaagtcctgtctgag

SEQ ID NO: 75683 - DNA, 77 bp, Homo sapiens
tggggtggtggttccaatgagacagggcacaccaaactccatctggtaagtcctgtctgagtgaccctctctcctca

SEQ ID NO: 75684 - DNA, 74 bp, Homo sapiens
cggccaccgctgccgggctcacctcgctcccattggttccggccaggctgttactgaggcggagacacgggtga

SEQ ID NO: 75685 - DNA, 76 bp, Homo sapiens
tgccgggctcacctcgctcccattggttccggccaggctgttactgaggcggagacacgggtgatgattggctttc

SEQ ID NO: 75686 - DNA, 75 bp, Homo sapiens
ggctcacctcgctcccattggttccggccaggctgttactgaggcggagacacgggtgatgattggctttctggg

SEQ ID NO: 75687 - DNA, 74 bp, Homo sapiens
ctcccattggttccggccaggctgttactgaggcggagacacgggtgatgattggctttctggggagagaggaa

SEQ ID NO: 75688 - DNA, 76 bp, Homo sapiens
ttccggccaggctgttactgaggcggagacacgggtgatgattggctttctggggagagaggaagtcctgtgattg

SEQ ID NO: 75689 - DNA, 79 bp, Homo sapiens
ctgttactgaggcggagacacgggtgatgattggctttctggggagagaggaagtcctgtgattggccagatctctgga

SEQ ID NO: 75690 - DNA, 79 bp, Homo sapiens
aggcggagacacgggtgatgattggctttctggggagagaggaagtcctgtgattggccagatctctggagcttgccga

SEQ ID NO: 75691 - DNA, 79 bp, Homo sapiens
acgggtgatgattggctttctggggagagaggaagtcctgtgattggccagatctctggagcttgccgacgcggtgtga

SEQ ID NO: 75692 - DNA, 78 bp, Homo sapiens
attggctttctggggagagaggaagtcctgtgattggccagatctctggagcttgccgacgcggtgtgaggacgctcc

SEQ ID NO: 75693 - DNA, 77 bp, Homo sapiens
gagagaggaagtcctgtgattggccagatctctggagcttgccgacgcggtgtgaggacgctcccacggaggccggg

SEQ ID NO: 75694 - DNA, 75 bp, Homo sapiens
aggaagtcctgtgattggccagatctctggagcttgccgacgcggtgtgaggacgctcccacggaggccgggtaa

SEQ ID NO: 75695 - DNA, 75 bp, Homo sapiens
tggccagatctctggagcttgccgacgcggtgtgaggacgctcccacggaggccgggtaagcggccgctgcgttt

SEQ ID NO: 75696 - DNA, 72 bp, Homo sapiens
atctctggagcttgccgacgcggtgtgaggacgctcccacggaggccgggtaagcggccgctgcgttttggg

SEQ ID NO: 75697 - DNA, 70 bp, Homo sapiens
agcttgccgacgcggtgtgaggacgctcccacggaggccgggtaagcggccgctgcgttttgggtcggcc

SEQ ID NO: 75698 - DNA, 82 bp, Homo sapiens
cttgactgtgtgctggccagctcgtctcactccttttccttctctctagaattggctgtgaaaggactgaggcagccatctg

SEQ ID NO: 75699 - DNA, 80 bp, Homo sapiens
tgtgctggccagctcgtctcactccttttccttctctctagaattggctgtgaaaggactgaggcagccatctgggggta

SEQ ID NO: 75700 - DNA, 76 bp, Homo sapiens
gtctcactccttttccttctctctagaattggctgtgaaaggactgaggcagccatctgggggtagcgggcactct

SEQ ID NO: 75701 - DNA, 78 bp, Homo sapiens
ttttccttctctctagaattggctgtgaaaggactgaggcagccatctgggggtagcgggcactcttatcagagcggc

SEQ ID NO: 75702 - DNA, 80 bp, Homo sapiens
ttctctctagaattggctgtgaaaggactgaggcagccatctgggggtagcgggcactcttatcagagcggctggagccg

SEQ ID NO: 75703 - DNA, 78 bp, Homo sapiens
aattggctgtgaaaggactgaggcagccatctgggggtagcgggcactcttatcagagcggctggagccggaccatcg

SEQ ID NO: 75704 - DNA, 78 bp, Homo sapiens
aaaggactgaggcagccatctgggggtagcgggcactcttatcagagcggctggagccggaccatcgtcccagagagc

SEQ ID NO: 75705 - DNA, 78 bp, Homo sapiens
aggcagccatctgggggtagcgggcactcttatcagagcggctggagccggaccatcgtcccagagagctggggcagg

SEQ ID NO: 75706 - DNA, 76 bp, Homo sapiens
gggtagcgggcactcttatcagagcggctggagccggaccatcgtcccagagagctggggcagggggccgtgccca

SEQ ID NO: 75707 - DNA, 77 bp, Homo sapiens
cgggcactcttatcagagcggctggagccggaccatcgtcccagagagctggggcagggggccgtgcccaatctcca

SEQ ID NO: 75708 - DNA, 77 bp, Homo sapiens
ttatcagagcggctggagccggaccatcgtcccagagagctggggcagggggccgtgcccaatctccagggctcctg

SEQ ID NO: 75709 - DNA, 77 bp, Homo sapiens
tggagccggaccatcgtcccagagagctggggcagggggccgtgcccaatctccagggctcctggggccactgctga

SEQ ID NO: 75710 - DNA, 74 bp, Homo sapiens
atcgtcccagagagctggggcagggggccgtgcccaatctccagggctcctggggccactgctgacctggtaag

SEQ ID NO: 75711 - DNA, 72 bp, Homo sapiens
agagctggggcagggggccgtgcccaatctccagggctcctggggccactgctgacctggtaagggaaactc

SEQ ID NO: 75712 - DNA, 71 bp, Homo sapiens
tggggcagggggccgtgcccaatctccagggctcctggggccactgctgacctggtaagggaaactctggg

SEQ ID NO: 75713 - DNA, 77 bp, Homo sapiens
tgcccaatctccagggctcctggggccactgctgacctggtaagggaaactctggggccgagctggctggatgtaca

SEQ ID NO: 75714 - DNA, 77 bp, Homo sapiens
ctctggttttgcctccagtaagagcataatttcttatccccaactcaggctggatgcatcgggcagtggaccctcca

SEQ ID NO: 75715 - DNA, 76 bp, Homo sapiens
tttgcctccagtaagagcataatttcttatccccaactcaggctggatgcatcgggcagtggaccctccaggggcc

SEQ ID NO: 75716 - DNA, 76 bp, Homo sapiens
agcataatttcttatccccaactcaggctggatgcatcgggcagtggaccctccaggggcccgcgctgcacgggaa

SEQ ID NO: 75717 - DNA, 74 bp, Homo sapiens
tttcttatccccaactcaggctggatgcatcgggcagtggaccctccaggggcccgcgctgcacgggaagcctt

SEQ ID NO: 75718 - DNA, 74 bp, Homo sapiens
ccaactcaggctggatgcatcgggcagtggaccctccaggggcccgcgctgcacgggaagcctttgcccttggg

SEQ ID NO: 75719 - DNA, 75 bp, Homo sapiens
ctggatgcatcgggcagtggaccctccaggggcccgcgctgcacgggaagcctttgcccttgggggcctgagctg

SEQ ID NO: 75720 - DNA, 73 bp, Homo sapiens
atcgggcagtggaccctccaggggcccgcgctgcacgggaagcctttgcccttgggggcctgagctgtgctgg

SEQ ID NO: 75721 - DNA, 73 bp, Homo sapiens
accctccaggggcccgcgctgcacgggaagcctttgcccttgggggcctgagctgtgctggggcctggagctc

SEQ ID NO: 75722 - DNA, 77 bp, Homo sapiens
ggcccgcgctgcacgggaagcctttgcccttgggggcctgagctgtgctggggcctggagctcctgcccgcctcatc

SEQ ID NO: 75723 - DNA, 72 bp, Homo sapiens
acgggaagcctttgcccttgggggcctgagctgtgctggggcctggagctcctgcccgcctcatccccctcc

SEQ ID NO: 75724 - DNA, 79 bp, Homo sapiens
tttgcccttgggggcctgagctgtgctggggcctggagctcctgcccgcctcatccccctcctcgtagcgcatggctgc

SEQ ID NO: 75725 - DNA, 80 bp, Homo sapiens
tgtgctggggcctggagctcctgcccgcctcatccccctcctcgtagcgcatggctgcctggaggcaggtgagaagttgg

SEQ ID NO: 75726 - DNA, 77 bp, Homo sapiens
cctggagctcctgcccgcctcatccccctcctcgtagcgcatggctgcctggaggcaggtgagaagttggggccctc

SEQ ID NO: 75727 - DNA, 78 bp, Homo sapiens
agctcctgcccgcctcatccccctcctcgtagcgcatggctgcctggaggcaggtgagaagttggggccctctgtctc

SEQ ID NO: 75728 - DNA, 78 bp, Homo sapiens
tcatccccctcctcgtagcgcatggctgcctggaggcaggtgagaagttggggccctctgtctccaggcacacctctt

SEQ ID NO: 75729 - DNA, 79 bp, Homo sapiens
acaagactgctcctttttgccgtatataacagactccttctctctccagatgctcagccagcattgggcagcccccgct

SEQ ID NO: 75730 - DNA, 79 bp, Homo sapiens
ctcctttttgccgtatataacagactccttctctctccagatgctcagccagcattgggcagcccccgcttcctgctcc

SEQ ID NO: 75731 - DNA, 77 bp, Homo sapiens
ccgtatataacagactccttctctctccagatgctcagccagcattgggcagcccccgcttcctgctcccctacccc

SEQ ID NO: 75732 - DNA, 79 bp, Homo sapiens
actccttctctctccagatgctcagccagcattgggcagcccccgcttcctgctcccctacccccttcacatggcagta

SEQ ID NO: 75733 - DNA, 80 bp, Homo sapiens
tctctctccagatgctcagccagcattgggcagcccccgcttcctgctcccctacccccttcacatggcagtagttctgg

SEQ ID NO: 75734 - DNA, 77 bp, Homo sapiens
atgctcagccagcattgggcagcccccgcttcctgctcccctacccccttcacatggcagtagttctgggcacccca

SEQ ID NO: 75735 - DNA, 73 bp, Homo sapiens
ttgggcagcccccgcttcctgctcccctacccccttcacatggcagtagttctgggcaccccagcaaaccata

SEQ ID NO: 75736 - DNA, 74 bp, Homo sapiens
cccgcttcctgctcccctacccccttcacatggcagtagttctgggcaccccagcaaaccatattatgctccag

SEQ ID NO: 75737 - DNA, 77 bp, Homo sapiens
tgctcccctacccccttcacatggcagtagttctgggcaccccagcaaaccatattatgctccagggtgagtggata

SEQ ID NO: 75738 - DNA, 75 bp, Homo sapiens
ccccttcacatggcagtagttctgggcaccccagcaaaccatattatgctccagggtgagtggatatttgaaggt

SEQ ID NO: 75739 - DNA, 76 bp, Homo sapiens
acatggcagtagttctgggcaccccagcaaaccatattatgctccagggtgagtggatatttgaaggttctgggag

SEQ ID NO: 75740 - DNA, 74 bp, Homo sapiens
gtagttctgggcaccccagcaaaccatattatgctccagggtgagtggatatttgaaggttctgggagtgggag

SEQ ID NO: 75741 - DNA, 67 bp, Homo sapiens
ccctcaagcccaacccccacccacacccccaccccttctgctctgtagggcgcccactccaagaccc

SEQ ID NO: 75742 - DNA, 67 bp, Homo sapiens
aacccccacccacacccccaccccttctgctctgtagggcgcccactccaagacccctccatgggaa

SEQ ID NO: 75743 - DNA, 73 bp, Homo sapiens
acacccccaccccttctgctctgtagggcgcccactccaagacccctccatgggaagctggaatccctgcatg

SEQ ID NO: 75744 - DNA, 80 bp, Homo sapiens
ctctgtagggcgcccactccaagacccctccatgggaagctggaatccctgcatggctgtgtgcaggcattgctccggga

SEQ ID NO: 75745 - DNA, 81 bp, Homo sapiens
cccactccaagacccctccatgggaagctggaatccctgcatggctgtgtgcaggcattgctccgggagccagcccagcca

SEQ ID NO: 75746 - DNA, 79 bp, Homo sapiens
aagacccctccatgggaagctggaatccctgcatggctgtgtgcaggcattgctccgggagccagcccagccagggctt

SEQ ID NO: 75747 - DNA, 81 bp, Homo sapiens
atgggaagctggaatccctgcatggctgtgtgcaggcattgctccgggagccagcccagccagggctttgggaacagcttg

SEQ ID NO: 75748 - DNA, 82 bp, Homo sapiens
tggaatccctgcatggctgtgtgcaggcattgctccgggagccagcccagccagggctttgggaacagcttgggcaactgta

SEQ ID NO: 75749 - DNA, 82 bp, Homo sapiens
atggctgtgtgcaggcattgctccgggagccagcccagccagggctttgggaacagcttgggcaactgtacgagtcagagca

SEQ ID NO: 75750 - DNA, 82 bp, Homo sapiens
tgcaggcattgctccgggagccagcccagccagggctttgggaacagcttgggcaactgtacgagtcagagcacgatagtga

SEQ ID NO: 75751 - DNA, 78 bp, Homo sapiens
attgctccgggagccagcccagccagggctttgggaacagcttgggcaactgtacgagtcagagcacgatagtgagga

SEQ ID NO: 75752 - DNA, 80 bp, Homo sapiens
cagcccagccagggctttgggaacagcttgggcaactgtacgagtcagagcacgatagtgaggaggccacacgctgctac

SEQ ID NO: 75753 - DNA, 79 bp, Homo sapiens
agggctttgggaacagcttgggcaactgtacgagtcagagcacgatagtgaggaggccacacgctgctaccacagcgcc

SEQ ID NO: 75754 - DNA, 81 bp, Homo sapiens
ttgggaacagcttgggcaactgtacgagtcagagcacgatagtgaggaggccacacgctgctaccacagcgcccttcgata

SEQ ID NO: 75755 - DNA, 79 bp, Homo sapiens
cttgggcaactgtacgagtcagagcacgatagtgaggaggccacacgctgctaccacagcgcccttcgatacggaggaa

SEQ ID NO: 75756 - DNA, 83 bp, Homo sapiens
tgtacgagtcagagcacgatagtgaggaggccacacgctgctaccacagcgcccttcgatacggaggaagcttcgctgagctg

SEQ ID NO: 75757 - DNA, 79 bp, Homo sapiens
agagcacgatagtgaggaggccacacgctgctaccacagcgcccttcgatacggaggaagcttcgctgagctggggccc

SEQ ID NO: 75758 - DNA, 77 bp, Homo sapiens
aggaggccacacgctgctaccacagcgcccttcgatacggaggaagcttcgctgagctggggccccgcattggccga

SEQ ID NO: 75759 - DNA, 79 bp, Homo sapiens
acgctgctaccacagcgcccttcgatacggaggaagcttcgctgagctggggccccgcattggccgactgcagcaggta

SEQ ID NO: 75760 - DNA, 78 bp, Homo sapiens
taccacagcgcccttcgatacggaggaagcttcgctgagctggggccccgcattggccgactgcagcaggtaggagaa

SEQ ID NO: 75761 - DNA, 76 bp, Homo sapiens
cgcccttcgatacggaggaagcttcgctgagctggggccccgcattggccgactgcagcaggtaggagaaggcagg

SEQ ID NO: 75762 - DNA, 76 bp, Homo sapiens
tacggaggaagcttcgctgagctggggccccgcattggccgactgcagcaggtaggagaaggcagggcgtggggga

SEQ ID NO: 75763 - DNA, 73 bp, Homo sapiens
ctcagtgccccacctgacatctgcccctgccccgtgtccccccacccccaggcccagctctggaactttcata

SEQ ID NO: 75764 - DNA, 73 bp, Homo sapiens
acctgacatctgcccctgccccgtgtccccccacccccaggcccagctctggaactttcatactggctcctgc

SEQ ID NO: 75765 - DNA, 74 bp, Homo sapiens
acatctgcccctgccccgtgtccccccacccccaggcccagctctggaactttcatactggctcctgccagcac

SEQ ID NO: 75766 - DNA, 72 bp, Homo sapiens
ccgtgtccccccacccccaggcccagctctggaactttcatactggctcctgccagcaccgagccaaggtcc

SEQ ID NO: 75767 - DNA, 75 bp, Homo sapiens
ccacccccaggcccagctctggaactttcatactggctcctgccagcaccgagccaaggtcctgcccccactgga

SEQ ID NO: 75768 - DNA, 78 bp, Homo sapiens
gcccagctctggaactttcatactggctcctgccagcaccgagccaaggtcctgcccccactggagcaagtgtggaac

SEQ ID NO: 75769 - DNA, 78 bp, Homo sapiens
tggaactttcatactggctcctgccagcaccgagccaaggtcctgcccccactggagcaagtgtggaacttgctacac

SEQ ID NO: 75770 - DNA, 78 bp, Homo sapiens
tttcatactggctcctgccagcaccgagccaaggtcctgcccccactggagcaagtgtggaacttgctacaccttgag

SEQ ID NO: 75771 - DNA, 79 bp, Homo sapiens
ctcctgccagcaccgagccaaggtcctgcccccactggagcaagtgtggaacttgctacaccttgaggtgaggctggca

SEQ ID NO: 75772 - DNA, 75 bp, Homo sapiens
accgagccaaggtcctgcccccactggagcaagtgtggaacttgctacaccttgaggtgaggctggcactgggtg

SEQ ID NO: 75773 - DNA, 73 bp, Homo sapiens
aaggtcctgcccccactggagcaagtgtggaacttgctacaccttgaggtgaggctggcactgggtgggttag

SEQ ID NO: 75774 - DNA, 75 bp, Homo sapiens
cccactggagcaagtgtggaacttgctacaccttgaggtgaggctggcactgggtgggttagggaggagagccag

SEQ ID NO: 75775 - DNA, 74 bp, Homo sapiens
aggctggcactgggtgggttagggaggagagccaggctgtgcctgcacccgtgccattttctcttctctctttt

SEQ ID NO: 75776 - DNA, 76 bp, Homo sapiens
aggctgtgcctgcacccgtgccattttctcttctctctttttgttctcagcacaaacggaactatggagccaagcg

SEQ ID NO: 75777 - DNA, 71 bp, Homo sapiens
acccgtgccattttctcttctctctttttgttctcagcacaaacggaactatggagccaagcggggaggtc

SEQ ID NO: 75778 - DNA, 70 bp, Homo sapiens
tttctcttctctctttttgttctcagcacaaacggaactatggagccaagcggggaggtcccccggtgaa

SEQ ID NO: 75779 - DNA, 73 bp, Homo sapiens
ctctttttgttctcagcacaaacggaactatggagccaagcggggaggtcccccggtgaagcgagctgctgaa

SEQ ID NO: 75780 - DNA, 72 bp, Homo sapiens
tttgttctcagcacaaacggaactatggagccaagcggggaggtcccccggtgaagcgagctgctgaacccc

SEQ ID NO: 75781 - DNA, 72 bp, Homo sapiens
acaaacggaactatggagccaagcggggaggtcccccggtgaagcgagctgctgaacccccagtggtgcagc

SEQ ID NO: 75782 - DNA, 74 bp, Homo sapiens
aactatggagccaagcggggaggtcccccggtgaagcgagctgctgaacccccagtggtgcagcctgtgcctcc

SEQ ID NO: 75783 - DNA, 78 bp, Homo sapiens
ccaagcggggaggtcccccggtgaagcgagctgctgaacccccagtggtgcagcctgtgcctcctgcagcactctcag

SEQ ID NO: 75784 - DNA, 78 bp, Homo sapiens
aggtcccccggtgaagcgagctgctgaacccccagtggtgcagcctgtgcctcctgcagcactctcaggcccctcagg

SEQ ID NO: 75785 - DNA, 82 bp, Homo sapiens
gtgaagcgagctgctgaacccccagtggtgcagcctgtgcctcctgcagcactctcaggcccctcaggggaggagggcctca

SEQ ID NO: 75786 - DNA, 80 bp, Homo sapiens
ctgctgaacccccagtggtgcagcctgtgcctcctgcagcactctcaggcccctcaggggaggagggcctcagccctgga

SEQ ID NO: 75787 - DNA, 80 bp, Homo sapiens
agtggtgcagcctgtgcctcctgcagcactctcaggcccctcaggggaggagggcctcagccctggaggcaagcgaagga

SEQ ID NO: 75788 - DNA, 81 bp, Homo sapiens
tcctgcagcactctcaggcccctcaggggaggagggcctcagccctggaggcaagcgaaggagaggctgcaactctgaaca

SEQ ID NO: 75789 - DNA, 76 bp, Homo sapiens
actctcaggcccctcaggggaggagggcctcagccctggaggcaagcgaaggagaggctgcaactctgaacaggtg

SEQ ID NO: 75790 - DNA, 75 bp, Homo sapiens
ctcaggggaggagggcctcagccctggaggcaagcgaaggagaggctgcaactctgaacaggtgtgggtataggg

SEQ ID NO: 75791 - DNA, 78 bp, Homo sapiens
ggcctcagccctggaggcaagcgaaggagaggctgcaactctgaacaggtgtgggtataggggggccagcaggcagta

SEQ ID NO: 75792 - DNA, 74 bp, Homo sapiens
aggtgtgggtataggggggccagcaggcagtaagtaggcaggacttgggaatgggattctcacactctcttctc

SEQ ID NO: 75793 - DNA, 75 bp, Homo sapiens
gtaagtaggcaggacttgggaatgggattctcacactctcttctctcctagactggccttcccccagggctgcca

SEQ ID NO: 75794 - DNA, 75 bp, Homo sapiens
aggacttgggaatgggattctcacactctcttctctcctagactggccttcccccagggctgccactgcctccac

SEQ ID NO: 75795 - DNA, 76 bp, Homo sapiens
aatgggattctcacactctcttctctcctagactggccttcccccagggctgccactgcctccaccaccattacca

SEQ ID NO: 75796 - DNA, 74 bp, Homo sapiens
acactctcttctctcctagactggccttcccccagggctgccactgcctccaccaccattaccaccaccaccac

SEQ ID NO: 75797 - DNA, 72 bp, Homo sapiens
accaccaccacccctgcctggcctggctaccagccccccatttcagctaaccaagccagggctgtggagtac

SEQ ID NO: 75798 - DNA, 77 bp, Homo sapiens
ccctgcctggcctggctaccagccccccatttcagctaaccaagccagggctgtggagtaccctgcatggagatgcc

SEQ ID NO: 75799 - DNA, 76 bp, Homo sapiens
cctggcctggctaccagccccccatttcagctaaccaagccagggctgtggagtaccctgcatggagatgcctggg

SEQ ID NO: 75800 - DNA, 78 bp, Homo sapiens
taccagccccccatttcagctaaccaagccagggctgtggagtaccctgcatggagatgcctggggcccagagcgcaa

SEQ ID NO: 75801 - DNA, 78 bp, Homo sapiens
tttcagctaaccaagccagggctgtggagtaccctgcatggagatgcctggggcccagagcgcaagggttcagcaccc

SEQ ID NO: 75802 - DNA, 77 bp, Homo sapiens
ctaaccaagccagggctgtggagtaccctgcatggagatgcctggggcccagagcgcaagggttcagcacccccaga

SEQ ID NO: 75803 - DNA, 79 bp, Homo sapiens
agggctgtggagtaccctgcatggagatgcctggggcccagagcgcaagggttcagcacccccagagcgccaggtgagc

SEQ ID NO: 75804 - DNA, 78 bp, Homo sapiens
agtaccctgcatggagatgcctggggcccagagcgcaagggttcagcacccccagagcgccaggtgagcccctgcctg

SEQ ID NO: 75805 - DNA, 78 bp, Homo sapiens
atggagatgcctggggcccagagcgcaagggttcagcacccccagagcgccaggtgagcccctgcctgttgcctttca

SEQ ID NO: 75806 - DNA, 77 bp, Homo sapiens
ggcccagagcgcaagggttcagcacccccagagcgccaggtgagcccctgcctgttgcctttcacctctcacctaca

SEQ ID NO: 75807 - DNA, 77 bp, Homo sapiens
ggtgagcccctgcctgttgcctttcacctctcacctacaagtcccacgctctctattcctcatcctgcatccctgtt

SEQ ID NO: 75808 - DNA, 82 bp, Homo sapiens
aagtcccacgctctctattcctcatcctgcatccctgtttatctcctataggagcagcggcactcgctgcctcacccatatc

SEQ ID NO: 75809 - DNA, 85 bp, Homo sapiens
tctctattcctcatcctgcatccctgtttatctcctataggagcagcggcactcgctgcctcacccatatccatacccagctcca

SEQ ID NO: 75810 - DNA, 82 bp, Homo sapiens
atcctgcatccctgtttatctcctataggagcagcggcactcgctgcctcacccatatccatacccagctccagcgtacacc

SEQ ID NO: 75811 - DNA, 81 bp, Homo sapiens
atccctgtttatctcctataggagcagcggcactcgctgcctcacccatatccatacccagctccagcgtacaccgcgcac

SEQ ID NO: 75812 - DNA, 80 bp, Homo sapiens
atctcctataggagcagcggcactcgctgcctcacccatatccatacccagctccagcgtacaccgcgcacccccctggc

SEQ ID NO: 75813 - DNA, 77 bp, Homo sapiens
agcggcactcgctgcctcacccatatccatacccagctccagcgtacaccgcgcacccccctggccaccggctggtc

SEQ ID NO: 75814 - DNA, 74 bp, Homo sapiens
actcgctgcctcacccatatccatacccagctccagcgtacaccgcgcacccccctggccaccggctggtcccg

SEQ ID NO: 75815 - DNA, 74 bp, Homo sapiens
ctcacccatatccatacccagctccagcgtacaccgcgcacccccctggccaccggctggtcccggctgctccc

SEQ ID NO: 75816 - DNA, 73 bp, Homo sapiens
tccatacccagctccagcgtacaccgcgcacccccctggccaccggctggtcccggctgctcccccaggccca

SEQ ID NO: 75817 - DNA, 69 bp, Homo sapiens
ctccagcgtacaccgcgcacccccctggccaccggctggtcccggctgctcccccaggcccaggccccc

SEQ ID NO: 75818 - DNA, 66 bp, Homo sapiens
acaccgcgcacccccctggccaccggctggtcccggctgctcccccaggcccaggcccccgccccc

SEQ ID NO: 75819 - DNA, 71 bp, Homo sapiens
ccctggccaccggctggtcccggctgctcccccaggcccaggcccccgccccccaggagcagagagccatg

SEQ ID NO: 75820 - DNA, 73 bp, Homo sapiens
accggctggtcccggctgctcccccaggcccaggcccccgccccccaggagcagagagccatggctgcctgcc

SEQ ID NO: 75821 - DNA, 75 bp, Homo sapiens
tcccggctgctcccccaggcccaggcccccgccccccaggagcagagagccatggctgcctgcctgccacccgtc

SEQ ID NO: 75822 - DNA, 73 bp, Homo sapiens
caggcccaggcccccgccccccaggagcagagagccatggctgcctgcctgccacccgtccccccggaagtga

SEQ ID NO: 75823 - DNA, 72 bp, Homo sapiens
cccccgccccccaggagcagagagccatggctgcctgcctgccacccgtccccccggaagtgaccttagaga

SEQ ID NO: 75824 - DNA, 78 bp, Homo sapiens
ccaggagcagagagccatggctgcctgcctgccacccgtccccccggaagtgaccttagagagagcagagttcagagg

SEQ ID NO: 75825 - DNA, 77 bp, Homo sapiens
agagccatggctgcctgcctgccacccgtccccccggaagtgaccttagagagagcagagttcagaggtcgcggatg

SEQ ID NO: 75826 - DNA, 76 bp, Homo sapiens
ctgcctgcctgccacccgtccccccggaagtgaccttagagagagcagagttcagaggtcgcggatggactccagc

SEQ ID NO: 75827 - DNA, 74 bp, Homo sapiens
tgccacccgtccccccggaagtgaccttagagagagcagagttcagaggtcgcggatggactccagcgtttcac

SEQ ID NO: 75828 - DNA, 81 bp, Homo sapiens
tgaccttagagagagcagagttcagaggtcgcggatggactccagcgtttcaccagcagcaaccaccgcctgcgtgcctta

SEQ ID NO: 75829 - DNA, 80 bp, Homo sapiens
ttagagagagcagagttcagaggtcgcggatggactccagcgtttcaccagcagcaaccaccgcctgcgtgccttacgcc

SEQ ID NO: 75830 - DNA, 75 bp, Homo sapiens
agagttcagaggtcgcggatggactccagcgtttcaccagcagcaaccaccgcctgcgtgccttacgccccttcc

SEQ ID NO: 75831 - DNA, 72 bp, Homo sapiens
aggtcgcggatggactccagcgtttcaccagcagcaaccaccgcctgcgtgccttacgccccttcccggccc

SEQ ID NO: 75832 - DNA, 72 bp, Homo sapiens
tggactccagcgtttcaccagcagcaaccaccgcctgcgtgccttacgccccttcccggccccctggcctcc

SEQ ID NO: 75833 - DNA, 70 bp, Homo sapiens
tttcaccagcagcaaccaccgcctgcgtgccttacgccccttcccggccccctggcctccccggcaccac

SEQ ID NO: 75834 - DNA, 71 bp, Homo sapiens
agcaaccaccgcctgcgtgccttacgccccttcccggccccctggcctccccggcaccaccaccagcagca

SEQ ID NO: 75835 - DNA, 75 bp, Homo sapiens
ccgcctgcgtgccttacgccccttcccggccccctggcctccccggcaccaccaccagcagcagcagtagcagca

SEQ ID NO: 75836 - DNA, 77 bp, Homo sapiens
ttacgccccttcccggccccctggcctccccggcaccaccaccagcagcagcagtagcagcagcagcaacactggtc

SEQ ID NO: 75837 - DNA, 85 bp, Homo sapiens
gcaccaccaccagcagcagcagtagcagcagcagcaacactggtctccggggcgtggagccgaacccaggcattgtgagtgacaa

SEQ ID NO: 75838 - DNA, 78 bp, Homo sapiens
agtagcagcagcagcaacactggtctccggggcgtggagccgaacccaggcattgtgagtgacaactgagggtggagg

SEQ ID NO: 75839 - DNA, 75 bp, Homo sapiens
agcagcagcaacactggtctccggggcgtggagccgaacccaggcattgtgagtgacaactgagggtggaggggg

SEQ ID NO: 75840 - DNA, 78 bp, Homo sapiens
gtcttgaggcagcccgagcaatgctcctaccacctgcttctacacttgcagcccggcgctgaccattaccaaactccc

SEQ ID NO: 75841 - DNA, 78 bp, Homo sapiens
atgctcctaccacctgcttctacacttgcagcccggcgctgaccattaccaaactcccgcgctggaggtctctcacca

SEQ ID NO: 75842 - DNA, 77 bp, Homo sapiens
acctgcttctacacttgcagcccggcgctgaccattaccaaactcccgcgctggaggtctctcaccatggccgcctg

SEQ ID NO: 75843 - DNA, 76 bp, Homo sapiens
tacacttgcagcccggcgctgaccattaccaaactcccgcgctggaggtctctcaccatggccgcctggggccctc

SEQ ID NO: 75844 - DNA, 78 bp, Homo sapiens
gcgctgaccattaccaaactcccgcgctggaggtctctcaccatggccgcctggggccctcggcacacagcagtcgga

SEQ ID NO: 75845 - DNA, 72 bp, Homo sapiens
aaactcccgcgctggaggtctctcaccatggccgcctggggccctcggcacacagcagtcggaaaccgttct

SEQ ID NO: 75846 - DNA, 73 bp, Homo sapiens
aggtctctcaccatggccgcctggggccctcggcacacagcagtcggaaaccgttcttgggggctcccgctgc

SEQ ID NO: 75847 - DNA, 74 bp, Homo sapiens
tctcaccatggccgcctggggccctcggcacacagcagtcggaaaccgttcttgggggctcccgctgccactcc

SEQ ID NO: 75848 - DNA, 70 bp, Homo sapiens
cctggggccctcggcacacagcagtcggaaaccgttcttgggggctcccgctgccactccccacctatcc

SEQ ID NO: 75849 - DNA, 73 bp, Homo sapiens
ctcggcacacagcagtcggaaaccgttcttgggggctcccgctgccactccccacctatccctgccacctgga

SEQ ID NO: 75850 - DNA, 70 bp, Homo sapiens
acagcagtcggaaaccgttcttgggggctcccgctgccactccccacctatccctgccacctggaccttc

SEQ ID NO: 75851 - DNA, 69 bp, Homo sapiens
gggctcccgctgccactccccacctatccctgccacctggaccttcctcaccccctccacccccctgtc

SEQ ID NO: 75852 - DNA, 68 bp, Homo sapiens
tgccactccccacctatccctgccacctggaccttcctcaccccctccacccccctgtccccgcctct

SEQ ID NO: 75853 - DNA, 66 bp, Homo sapiens
ccacctatccctgccacctggaccttcctcaccccctccacccccctgtccccgcctcttacgccc

SEQ ID NO: 75854 - DNA, 65 bp, Homo sapiens
atccctgccacctggaccttcctcaccccctccacccccctgtccccgcctcttacgccccccac

SEQ ID NO: 75855 - DNA, 62 bp, Homo sapiens
cctggaccttcctcaccccctccacccccctgtccccgcctcttacgccccccaccaccccc

SEQ ID NO: 75856 - DNA, 62 bp, Homo sapiens
accccctccacccccctgtccccgcctcttacgccccccaccaccccctgcctggttgaagg

SEQ ID NO: 75857 - DNA, 64 bp, Homo sapiens
ccccctgtccccgcctcttacgccccccaccaccccctgcctggttgaagggtccggcctgccg

SEQ ID NO: 75858 - DNA, 67 bp, Homo sapiens
cccgcctcttacgccccccaccaccccctgcctggttgaagggtccggcctgccgggcagcccgaga

SEQ ID NO: 75859 - DNA, 74 bp, Homo sapiens
caccccctgcctggttgaagggtccggcctgccgggcagcccgagaggatggagagatcttagaagagctcttc

SEQ ID NO: 75860 - DNA, 75 bp, Homo sapiens
ctggttgaagggtccggcctgccgggcagcccgagaggatggagagatcttagaagagctcttctttgggactga

SEQ ID NO: 75861 - DNA, 73 bp, Homo sapiens
aagggtccggcctgccgggcagcccgagaggatggagagatcttagaagagctcttctttgggactgagggac

SEQ ID NO: 75862 - DNA, 71 bp, Homo sapiens
agcccgagaggatggagagatcttagaagagctcttctttgggactgagggacccccccgccctgccccac

SEQ ID NO: 75863 - DNA, 67 bp, Homo sapiens
atcttagaagagctcttctttgggactgagggacccccccgccctgccccaccacccctcccccatc

SEQ ID NO: 75864 - DNA, 66 bp, Homo sapiens
ttgggactgagggacccccccgccctgccccaccacccctcccccatcgcgagggcttcttggggc

SEQ ID NO: 75865 - DNA, 65 bp, Homo sapiens
ccccccgccctgccccaccacccctcccccatcgcgagggcttcttggggcctccggcctcccgc

SEQ ID NO: 75866 - DNA, 69 bp, Homo sapiens
tgccccaccacccctcccccatcgcgagggcttcttggggcctccggcctcccgcttttctgtgggcac

SEQ ID NO: 75867 - DNA, 69 bp, Homo sapiens
acccctcccccatcgcgagggcttcttggggcctccggcctcccgcttttctgtgggcactcaggattc

SEQ ID NO: 75868 - DNA, 72 bp, Homo sapiens
cccatcgcgagggcttcttggggcctccggcctcccgcttttctgtgggcactcaggattctcacacccctc

SEQ ID NO: 75869 - DNA, 69 bp, Homo sapiens
tggggcctccggcctcccgcttttctgtgggcactcaggattctcacacccctcccactcccccaaccc

SEQ ID NO: 75870 - DNA, 71 bp, Homo sapiens
ctcccgcttttctgtgggcactcaggattctcacacccctcccactcccccaaccccaaccaccagcagta

SEQ ID NO: 75871 - DNA, 74 bp, Homo sapiens
ttttctgtgggcactcaggattctcacacccctcccactcccccaaccccaaccaccagcagtagcaacagcaa

SEQ ID NO: 75872 - DNA, 76 bp, Homo sapiens
actcaggattctcacacccctcccactcccccaaccccaaccaccagcagtagcaacagcaacagtggcagccaca

SEQ ID NO: 75873 - DNA, 78 bp, Homo sapiens
ttctcacacccctcccactcccccaaccccaaccaccagcagtagcaacagcaacagtggcagccacagcagcagccc

SEQ ID NO: 75874 - DNA, 80 bp, Homo sapiens
cactcccccaaccccaaccaccagcagtagcaacagcaacagtggcagccacagcagcagccctgctgggcctgtgtcct

SEQ ID NO: 75875 - DNA, 79 bp, Homo sapiens
cccaaccccaaccaccagcagtagcaacagcaacagtggcagccacagcagcagccctgctgggcctgtgtcctttccc

SEQ ID NO: 75876 - DNA, 81 bp, Homo sapiens
accagcagtagcaacagcaacagtggcagccacagcagcagccctgctgggcctgtgtcctttcccccaccaccctatctg

SEQ ID NO: 75877 - DNA, 80 bp, Homo sapiens
caacagcaacagtggcagccacagcagcagccctgctgggcctgtgtcctttcccccaccaccctatctggccagaagta

SEQ ID NO: 75878 - DNA, 78 bp, Homo sapiens
aacagtggcagccacagcagcagccctgctgggcctgtgtcctttcccccaccaccctatctggccagaagtatagac

SEQ ID NO: 75879 - DNA, 73 bp, Homo sapiens
acagcagcagccctgctgggcctgtgtcctttcccccaccaccctatctggccagaagtatagacccccttcc

SEQ ID NO: 75880 - DNA, 69 bp, Homo sapiens
accaccctatctggccagaagtatagacccccttccccggcctcccagcccagcacagaacccccagga

SEQ ID NO: 75881 - DNA, 66 bp, Homo sapiens
aagtatagacccccttccccggcctcccagcccagcacagaacccccaggacccacctcttgtacc

SEQ ID NO: 75882 - DNA, 70 bp, Homo sapiens
ttccccggcctcccagcccagcacagaacccccaggacccacctcttgtacccctgactcttgccctgcc

SEQ ID NO: 75883 - DNA, 72 bp, Homo sapiens
ggcctcccagcccagcacagaacccccaggacccacctcttgtacccctgactcttgccctgcctccagccc

SEQ ID NO: 75884 - DNA, 70 bp, Homo sapiens
agcacagaacccccaggacccacctcttgtacccctgactcttgccctgcctccagcccctccttcctcc

SEQ ID NO: 75885 - DNA, 71 bp, Homo sapiens
ccaggacccacctcttgtacccctgactcttgccctgcctccagcccctccttcctcctgccaccaaaata

SEQ ID NO: 75886 - DNA, 71 bp, Homo sapiens
acctcttgtacccctgactcttgccctgcctccagcccctccttcctcctgccaccaaaatacctcaggaa

SEQ ID NO: 75887 - DNA, 73 bp, Homo sapiens
ccctgactcttgccctgcctccagcccctccttcctcctgccaccaaaatacctcaggaagcttcaggcgccc

SEQ ID NO: 75888 - DNA, 73 bp, Homo sapiens
actcttgccctgcctccagcccctccttcctcctgccaccaaaatacctcaggaagcttcaggcgcccggaga

SEQ ID NO: 75889 - DNA, 71 bp, Homo sapiens
tccagcccctccttcctcctgccaccaaaatacctcaggaagcttcaggcgcccggagagcccccggccca

SEQ ID NO: 75890 - DNA, 69 bp, Homo sapiens
cttcctcctgccaccaaaatacctcaggaagcttcaggcgcccggagagcccccggcccagggtctcct

SEQ ID NO: 75891 - DNA, 68 bp, Homo sapiens
ccaccaaaatacctcaggaagcttcaggcgcccggagagcccccggcccagggtctccttcccaaaga

SEQ ID NO: 75892 - DNA, 66 bp, Homo sapiens
aaaatacctcaggaagcttcaggcgcccggagagcccccggcccagggtctccttcccaaagaccc

SEQ ID NO: 75893 - DNA, 65 bp, Homo sapiens
aggaagcttcaggcgcccggagagcccccggcccagggtctccttcccaaagacccccgaggtgg

SEQ ID NO: 75894 - DNA, 62 bp, Homo sapiens
aggcgcccggagagcccccggcccagggtctccttcccaaagacccccgaggtggggccggg

SEQ ID NO: 75895 - DNA, 61 bp, Homo sapiens
ccccggcccagggtctccttcccaaagacccccgaggtggggccggggccacccccaggcc

SEQ ID NO: 75896 - DNA, 62 bp, Homo sapiens
gggtctccttcccaaagacccccgaggtggggccggggccacccccaggccccctgagtaaa

SEQ ID NO: 75897 - DNA, 62 bp, Homo sapiens
tccttcccaaagacccccgaggtggggccggggccacccccaggccccctgagtaaagcccc

SEQ ID NO: 75898 - DNA, 67 bp, Homo sapiens
acccccaggccccctgagtaaagccccccagcctgtgccgcccggggttggggagctgcctgcccga

SEQ ID NO: 75899 - DNA, 68 bp, Homo sapiens
cccggggttggggagctgcctgcccgaggccctcgactctttgattttccccccactccgctggagga

SEQ ID NO: 75900 - DNA, 72 bp, Homo sapiens
gggagctgcctgcccgaggccctcgactctttgattttccccccactccgctggaggaccagtttgaggagc

SEQ ID NO: 75901 - DNA, 71 bp, Homo sapiens
tgcccgaggccctcgactctttgattttccccccactccgctggaggaccagtttgaggagccagccgaat

SEQ ID NO: 75902 - DNA, 72 bp, Homo sapiens
cctcgactctttgattttccccccactccgctggaggaccagtttgaggagccagccgaattcaagatccta

SEQ ID NO: 75903 - DNA, 72 bp, Homo sapiens
actctttgattttccccccactccgctggaggaccagtttgaggagccagccgaattcaagatcctacctga

SEQ ID NO: 75904 - DNA, 78 bp, Homo sapiens
ccccactccgctggaggaccagtttgaggagccagccgaattcaagatcctacctgatgggctggccaacatcatgaa

SEQ ID NO: 75905 - DNA, 81 bp, Homo sapiens
ctggaggaccagtttgaggagccagccgaattcaagatcctacctgatgggctggccaacatcatgaagatgctggacgaa

SEQ ID NO: 75906 - DNA, 82 bp, Homo sapiens
agtttgaggagccagccgaattcaagatcctacctgatgggctggccaacatcatgaagatgctggacgaatccattcgcaa

SEQ ID NO: 75907 - DNA, 82 bp, Homo sapiens
aggagccagccgaattcaagatcctacctgatgggctggccaacatcatgaagatgctggacgaatccattcgcaaggaaga

SEQ ID NO: 75908 - DNA, 81 bp, Homo sapiens
atcctacctgatgggctggccaacatcatgaagatgctggacgaatccattcgcaaggaagaggaacagcaacaacacgaa

SEQ ID NO: 75909 - DNA, 82 bp, Homo sapiens
atgggctggccaacatcatgaagatgctggacgaatccattcgcaaggaagaggaacagcaacaacacgaagcaggcgtggc

SEQ ID NO: 75910 - DNA, 78 bp, Homo sapiens
aacatcatgaagatgctggacgaatccattcgcaaggaagaggaacagcaacaacacgaagcaggcgtggccccccaa

SEQ ID NO: 75911 - DNA, 73 bp, Homo sapiens
aagatgctggacgaatccattcgcaaggaagaggaacagcaacaacacgaagcaggcgtggccccccaacccc

SEQ ID NO: 75912 - DNA, 71 bp, Homo sapiens
acgaatccattcgcaaggaagaggaacagcaacaacacgaagcaggcgtggccccccaacccccgctgaag

SEQ ID NO: 75913 - DNA, 74 bp, Homo sapiens
aacagcaacaacacgaagcaggcgtggccccccaacccccgctgaaggagccctttgcatctctgcagtctcct

SEQ ID NO: 75914 - DNA, 72 bp, Homo sapiens
aagcaggcgtggccccccaacccccgctgaaggagccctttgcatctctgcagtctcctttccccaccgaca

SEQ ID NO: 75915 - DNA, 72 bp, Homo sapiens
cccaacccccgctgaaggagccctttgcatctctgcagtctcctttccccaccgacacagcccccaccacta

SEQ ID NO: 75916 - DNA, 78 bp, Homo sapiens
ccgctgaaggagccctttgcatctctgcagtctcctttccccaccgacacagcccccaccactactgctcctgctgtc

SEQ ID NO: 75917 - DNA, 78 bp, Homo sapiens
agccctttgcatctctgcagtctcctttccccaccgacacagcccccaccactactgctcctgctgtcgccgtcacca

SEQ ID NO: 75918 - DNA, 77 bp, Homo sapiens
atctctgcagtctcctttccccaccgacacagcccccaccactactgctcctgctgtcgccgtcaccaccaccacca

SEQ ID NO: 75919 - DNA, 70 bp, Homo sapiens
accaccaccaccacggccacccaggaagaggagaagaagccaccaccagccctaccaccaccaccgcctc

SEQ ID NO: 75920 - DNA, 70 bp, Homo sapiens
accacggccacccaggaagaggagaagaagccaccaccagccctaccaccaccaccgcctctagccaagt

SEQ ID NO: 75921 - DNA, 70 bp, Homo sapiens
acccaggaagaggagaagaagccaccaccagccctaccaccaccaccgcctctagccaagttccctccac

SEQ ID NO: 75922 - DNA, 72 bp, Homo sapiens
aagaggagaagaagccaccaccagccctaccaccaccaccgcctctagccaagttccctccaccctctcagc

SEQ ID NO: 75923 - DNA, 73 bp, Homo sapiens
aagccaccaccagccctaccaccaccaccgcctctagccaagttccctccaccctctcagccacagccaccac

SEQ ID NO: 75924 - DNA, 70 bp, Homo sapiens
accaccaccgcctctagccaagttccctccaccctctcagccacagccaccaccacccccaccccccagc

SEQ ID NO: 75925 - DNA, 73 bp, Homo sapiens
tagccaagttccctccaccctctcagccacagccaccaccacccccaccccccagcccggccagcctgctcaa

SEQ ID NO: 75926 - DNA, 71 bp, Homo sapiens
aagttccctccaccctctcagccacagccaccaccacccccaccccccagcccggccagcctgctcaaatc

SEQ ID NO: 75927 - DNA, 75 bp, Homo sapiens
tctcagccacagccaccaccacccccaccccccagcccggccagcctgctcaaatccttggcctccgtgctggag

SEQ ID NO: 75928 - DNA, 71 bp, Homo sapiens
agccaccaccacccccaccccccagcccggccagcctgctcaaatccttggcctccgtgctggagggacaa

SEQ ID NO: 75929 - DNA, 69 bp, Homo sapiens
acccccaccccccagcccggccagcctgctcaaatccttggcctccgtgctggagggacaaaagtactg

SEQ ID NO: 75930 - DNA, 71 bp, Homo sapiens
cccagcccggccagcctgctcaaatccttggcctccgtgctggagggacaaaagtactgttatcgggggac

SEQ ID NO: 75931 - DNA, 74 bp, Homo sapiens
ccagcctgctcaaatccttggcctccgtgctggagggacaaaagtactgttatcgggggactggagcagctgtt

SEQ ID NO: 75932 - DNA, 72 bp, Homo sapiens
ctcaaatccttggcctccgtgctggagggacaaaagtactgttatcgggggactggagcagctgtttccacc

SEQ ID NO: 75933 - DNA, 71 bp, Homo sapiens
ttggcctccgtgctggagggacaaaagtactgttatcgggggactggagcagctgtttccacccggcctgg

SEQ ID NO: 75934 - DNA, 70 bp, Homo sapiens
tggagggacaaaagtactgttatcgggggactggagcagctgtttccacccggcctgggcccttgcccac

SEQ ID NO: 75935 - DNA, 70 bp, Homo sapiens
aaagtactgttatcgggggactggagcagctgtttccacccggcctgggcccttgcccaccactcagtat

SEQ ID NO: 75936 - DNA, 70 bp, Homo sapiens
actgttatcgggggactggagcagctgtttccacccggcctgggcccttgcccaccactcagtattcccc

SEQ ID NO: 75937 - DNA, 70 bp, Homo sapiens
agctgtttccacccggcctgggcccttgcccaccactcagtattcccctggccccccatcaggtgctacc

SEQ ID NO: 75938 - DNA, 70 bp, Homo sapiens
acccggcctgggcccttgcccaccactcagtattcccctggccccccatcaggtgctaccgccctgccgc

SEQ ID NO: 75939 - DNA, 73 bp, Homo sapiens
tgggcccttgcccaccactcagtattcccctggccccccatcaggtgctaccgccctgccgcccacctcagcg

SEQ ID NO: 75940 - DNA, 74 bp, Homo sapiens
ccccatcaggtgctaccgccctgccgcccacctcagcggcccctagcgcccagggctccccacagccctctgct

SEQ ID NO: 75941 - DNA, 77 bp, Homo sapiens
ctgccgcccacctcagcggcccctagcgcccagggctccccacagccctctgcttcctcgtcatctcagttctctac

SEQ ID NO: 75942 - DNA, 76 bp, Homo sapiens
cccacctcagcggcccctagcgcccagggctccccacagccctctgcttcctcgtcatctcagttctctacctcag

SEQ ID NO: 75943 - DNA, 75 bp, Homo sapiens
ccctagcgcccagggctccccacagccctctgcttcctcgtcatctcagttctctacctcaggcgggccctgggc

SEQ ID NO: 75944 - DNA, 76 bp, Homo sapiens
cagggctccccacagccctctgcttcctcgtcatctcagttctctacctcaggcgggccctgggcccgggagcgca

SEQ ID NO: 75945 - DNA, 76 bp, Homo sapiens
tgcttcctcgtcatctcagttctctacctcaggcgggccctgggcccgggagcgcagggcgggcgaagagccagtc

SEQ ID NO: 75946 - DNA, 73 bp, Homo sapiens
cctcgtcatctcagttctctacctcaggcgggccctgggcccgggagcgcagggcgggcgaagagccagtccc

SEQ ID NO: 75947 - DNA, 71 bp, Homo sapiens
ttctctacctcaggcgggccctgggcccgggagcgcagggcgggcgaagagccagtcccgggccccatgac

SEQ ID NO: 75948 - DNA, 68 bp, Homo sapiens
acctcaggcgggccctgggcccgggagcgcagggcgggcgaagagccagtcccgggccccatgacccc

SEQ ID NO: 75949 - DNA, 67 bp, Homo sapiens
cctgggcccgggagcgcagggcgggcgaagagccagtcccgggccccatgacccccacccaaccgcc

SEQ ID NO: 75950 - DNA, 66 bp, Homo sapiens
ccgggagcgcagggcgggcgaagagccagtcccgggccccatgacccccacccaaccgcccccacc

SEQ ID NO: 75951 - DNA, 67 bp, Homo sapiens
agggcgggcgaagagccagtcccgggccccatgacccccacccaaccgcccccacccctatctctgc

SEQ ID NO: 75952 - DNA, 70 bp, Homo sapiens
agccagtcccgggccccatgacccccacccaaccgcccccacccctatctctgccccctgctcgctctga

SEQ ID NO: 75953 - DNA, 74 bp, Homo sapiens
gccccatgacccccacccaaccgcccccacccctatctctgccccctgctcgctctgagtctgaggtgctagaa

SEQ ID NO: 75954 - DNA, 75 bp, Homo sapiens
ccccacccaaccgcccccacccctatctctgccccctgctcgctctgagtctgaggtgctagaagagatcagccg

SEQ ID NO: 75955 - DNA, 78 bp, Homo sapiens
aaccgcccccacccctatctctgccccctgctcgctctgagtctgaggtgctagaagagatcagccgggcttgcgaga

SEQ ID NO: 75956 - DNA, 80 bp, Homo sapiens
tctgccccctgctcgctctgagtctgaggtgctagaagagatcagccgggcttgcgagacccttgtggagcgggtgggcc

SEQ ID NO: 75957 - DNA, 81 bp, Homo sapiens
tcgctctgagtctgaggtgctagaagagatcagccgggcttgcgagacccttgtggagcgggtgggccggagtgccactga

SEQ ID NO: 75958 - DNA, 77 bp, Homo sapiens
agtctgaggtgctagaagagatcagccgggcttgcgagacccttgtggagcgggtgggccggagtgccactgaccca

SEQ ID NO: 75959 - DNA, 75 bp, Homo sapiens
agatcagccgggcttgcgagacccttgtggagcgggtgggccggagtgccactgacccagccgacccagtggaca

SEQ ID NO: 75960 - DNA, 78 bp, Homo sapiens
ttgcgagacccttgtggagcgggtgggccggagtgccactgacccagccgacccagtggacacagcagagccagcgga

SEQ ID NO: 75961 - DNA, 79 bp, Homo sapiens
ttgtggagcgggtgggccggagtgccactgacccagccgacccagtggacacagcagagccagcggacagtgggactga

SEQ ID NO: 75962 - DNA, 78 bp, Homo sapiens
agcgggtgggccggagtgccactgacccagccgacccagtggacacagcagagccagcggacagtgggactgagcgac

SEQ ID NO: 75963 - DNA, 81 bp, Homo sapiens
agtgccactgacccagccgacccagtggacacagcagagccagcggacagtgggactgagcgactgctgccccccgcacag

SEQ ID NO: 75964 - DNA, 80 bp, Homo sapiens
actgacccagccgacccagtggacacagcagagccagcggacagtgggactgagcgactgctgccccccgcacaggccaa

SEQ ID NO: 75965 - DNA, 79 bp, Homo sapiens
ccgacccagtggacacagcagagccagcggacagtgggactgagcgactgctgccccccgcacaggccaaggaggaggc

SEQ ID NO: 75966 - DNA, 78 bp, Homo sapiens
acagcagagccagcggacagtgggactgagcgactgctgccccccgcacaggccaaggaggaggctggcggggtggcg

SEQ ID NO: 75967 - DNA, 77 bp, Homo sapiens
agcggacagtgggactgagcgactgctgccccccgcacaggccaaggaggaggctggcggggtggcggcagtgtcag

SEQ ID NO: 75968 - DNA, 79 bp, Homo sapiens
agtgggactgagcgactgctgccccccgcacaggccaaggaggaggctggcggggtggcggcagtgtcaggcagctgta

SEQ ID NO: 75969 - DNA, 79 bp, Homo sapiens
gactgctgccccccgcacaggccaaggaggaggctggcggggtggcggcagtgtcaggcagctgtaagcggcgacagaa

SEQ ID NO: 75970 - DNA, 80 bp, Homo sapiens
ccccgcacaggccaaggaggaggctggcggggtggcggcagtgtcaggcagctgtaagcggcgacagaaggagcatcaga

SEQ ID NO: 75971 - DNA, 81 bp, Homo sapiens
aggccaaggaggaggctggcggggtggcggcagtgtcaggcagctgtaagcggcgacagaaggagcatcagaaggagcatc

SEQ ID NO: 75972 - DNA, 82 bp, Homo sapiens
aggaggctggcggggtggcggcagtgtcaggcagctgtaagcggcgacagaaggagcatcagaaggagcatcggcggcacag

SEQ ID NO: 75973 - DNA, 82 bp, Homo sapiens
ggtggcggcagtgtcaggcagctgtaagcggcgacagaaggagcatcagaaggagcatcggcggcacaggcgggcctgtaag

SEQ ID NO: 75974 - DNA, 82 bp, Homo sapiens
agtgtcaggcagctgtaagcggcgacagaaggagcatcagaaggagcatcggcggcacaggcgggcctgtaaggacagtgtg

SEQ ID NO: 75975 - DNA, 76 bp, Homo sapiens
aaggagcatcagaaggagcatcggcggcacaggcgggcctgtaaggacagtgtgggtcgtcggccccgtgagggca

SEQ ID NO: 75976 - DNA, 75 bp, Homo sapiens
tcagaaggagcatcggcggcacaggcgggcctgtaaggacagtgtgggtcgtcggccccgtgagggcagggcaaa

SEQ ID NO: 75977 - DNA, 71 bp, Homo sapiens
atcggcggcacaggcgggcctgtaaggacagtgtgggtcgtcggccccgtgagggcagggcaaaggccaag

SEQ ID NO: 75978 - DNA, 69 bp, Homo sapiens
acaggcgggcctgtaaggacagtgtgggtcgtcggccccgtgagggcagggcaaaggccaaggccaagg

SEQ ID NO: 75979 - DNA, 68 bp, Homo sapiens
taaggacagtgtgggtcgtcggccccgtgagggcagggcaaaggccaaggccaaggtccccaaagaaa

SEQ ID NO: 75980 - DNA, 67 bp, Homo sapiens
agtgtgggtcgtcggccccgtgagggcagggcaaaggccaaggccaaggtccccaaagaaaagagcc

SEQ ID NO: 75981 - DNA, 67 bp, Homo sapiens
agggcagggcaaaggccaaggccaaggtccccaaagaaaagagccgccgggtgctggggaacctgga

SEQ ID NO: 75982 - DNA, 71 bp, Homo sapiens
ggccaaggccaaggtccccaaagaaaagagccgccgggtgctggggaacctggacctgcagagcgaggaga

SEQ ID NO: 75983 - DNA, 70 bp, Homo sapiens
aaggtccccaaagaaaagagccgccgggtgctggggaacctggacctgcagagcgaggagatccagggtc

SEQ ID NO: 75984 - DNA, 72 bp, Homo sapiens
ccgccgggtgctggggaacctggacctgcagagcgaggagatccagggtcgtgagaagtcccggcccgatct

SEQ ID NO: 75985 - DNA, 73 bp, Homo sapiens
ggtgctggggaacctggacctgcagagcgaggagatccagggtcgtgagaagtcccggcccgatcttggcggg

SEQ ID NO: 75986 - DNA, 72 bp, Homo sapiens
aacctggacctgcagagcgaggagatccagggtcgtgagaagtcccggcccgatcttggcggggcctccaag

SEQ ID NO: 75987 - DNA, 72 bp, Homo sapiens
agagcgaggagatccagggtcgtgagaagtcccggcccgatcttggcggggcctccaaggccaagccaccca

SEQ ID NO: 75988 - DNA, 74 bp, Homo sapiens
gtcgtgagaagtcccggcccgatcttggcggggcctccaaggccaagccacccacagctccagcccctccatca

SEQ ID NO: 75989 - DNA, 75 bp, Homo sapiens
aagtcccggcccgatcttggcggggcctccaaggccaagccacccacagctccagcccctccatcagctcctgca

SEQ ID NO: 75990 - DNA, 78 bp, Homo sapiens
atcttggcggggcctccaaggccaagccacccacagctccagcccctccatcagctcctgcaccttctgcccagccca

SEQ ID NO: 75991 - DNA, 76 bp, Homo sapiens
cggggcctccaaggccaagccacccacagctccagcccctccatcagctcctgcaccttctgcccagcccacaccc

SEQ ID NO: 75992 - DNA, 77 bp, Homo sapiens
aaggccaagccacccacagctccagcccctccatcagctcctgcaccttctgcccagcccacacccccgtcagcctc

SEQ ID NO: 75993 - DNA, 77 bp, Homo sapiens
acagctccagcccctccatcagctcctgcaccttctgcccagcccacacccccgtcagcctctgtccctggaaagaa

SEQ ID NO: 75994 - DNA, 75 bp, Homo sapiens
agcccctccatcagctcctgcaccttctgcccagcccacacccccgtcagcctctgtccctggaaagaaggctcg

SEQ ID NO: 75995 - DNA, 75 bp, Homo sapiens
atcagctcctgcaccttctgcccagcccacacccccgtcagcctctgtccctggaaagaaggctcgggaggaagc

SEQ ID NO: 75996 - DNA, 69 bp, Homo sapiens
accttctgcccagcccacacccccgtcagcctctgtccctggaaagaaggctcgggaggaagccccagg

SEQ ID NO: 75997 - DNA, 67 bp, Homo sapiens
agcccacacccccgtcagcctctgtccctggaaagaaggctcgggaggaagccccagggccaccggg

SEQ ID NO: 75998 - DNA, 69 bp, Homo sapiens
cccgtcagcctctgtccctggaaagaaggctcgggaggaagccccagggccaccgggtgtcagccgggc

SEQ ID NO: 75999 - DNA, 72 bp, Homo sapiens
ctctgtccctggaaagaaggctcgggaggaagccccagggccaccgggtgtcagccgggccgacatgctgaa

SEQ ID NO: 76000 - DNA, 75 bp, Homo sapiens
gaaagaaggctcgggaggaagccccagggccaccgggtgtcagccgggccgacatgctgaagctgcgctcactta

SEQ ID NO: 76001 - DNA, 75 bp, Homo sapiens
aaggctcgggaggaagccccagggccaccgggtgtcagccgggccgacatgctgaagctgcgctcacttagtgag

SEQ ID NO: 76002 - DNA, 73 bp, Homo sapiens
aggaagccccagggccaccgggtgtcagccgggccgacatgctgaagctgcgctcacttagtgaggggccccc

SEQ ID NO: 76003 - DNA, 75 bp, Homo sapiens
agggccaccgggtgtcagccgggccgacatgctgaagctgcgctcacttagtgaggggccccccaaggagctgaa

SEQ ID NO: 76004 - DNA, 80 bp, Homo sapiens
tcagccgggccgacatgctgaagctgcgctcacttagtgaggggccccccaaggagctgaagatccggctcatcaaggta

SEQ ID NO: 76005 - DNA, 82 bp, Homo sapiens
gacatgctgaagctgcgctcacttagtgaggggccccccaaggagctgaagatccggctcatcaaggtagagagtggtgaca

SEQ ID NO: 76006 - DNA, 77 bp, Homo sapiens
aagctgcgctcacttagtgaggggccccccaaggagctgaagatccggctcatcaaggtagagagtggtgacaagga

SEQ ID NO: 76007 - DNA, 77 bp, Homo sapiens
cccaaggagctgaagatccggctcatcaaggtagagagtggtgacaaggagacctttatcgcctctgaggtggaaga

SEQ ID NO: 76008 - DNA, 79 bp, Homo sapiens
ctgaagatccggctcatcaaggtagagagtggtgacaaggagacctttatcgcctctgaggtggaagagcggcggctgc

SEQ ID NO: 76009 - DNA, 80 bp, Homo sapiens
atcaaggtagagagtggtgacaaggagacctttatcgcctctgaggtggaagagcggcggctgcgcatggcagacctcac

SEQ ID NO: 76010 - DNA, 86 bp, Homo sapiens
agacctttatcgcctctgaggtggaagagcggcggctgcgcatggcagacctcaccatcagccactgtgctgctgacgtcgtgcgc

SEQ ID NO: 76011 - DNA, 89 bp, Homo sapiens
ctctgaggtggaagagcggcggctgcgcatggcagacctcaccatcagccactgtgctgctgacgtcgtgcgcgccagcaggtgagtcg

SEQ ID NO: 76012 - DNA, 91 bp, Homo sapiens
tggaagagcggcggctgcgcatggcagacctcaccatcagccactgtgctgctgacgtcgtgcgcgccagcaggtgagtcggctgcctgct

SEQ ID NO: 76013 - DNA, 74 bp, Homo sapiens
cccatcaccctgatgtttctgtcttcattccactgtcctcccgcaggaatgccaaggtgaaagggaagtttcga

SEQ ID NO: 76014 - DNA, 74 bp, Homo sapiens
tgatgtttctgtcttcattccactgtcctcccgcaggaatgccaaggtgaaagggaagtttcgagagtcctacc

SEQ ID NO: 76015 - DNA, 71 bp, Homo sapiens
tttctgtcttcattccactgtcctcccgcaggaatgccaaggtgaaagggaagtttcgagagtcctacctt

SEQ ID NO: 76016 - DNA, 69 bp, Homo sapiens
attccactgtcctcccgcaggaatgccaaggtgaaagggaagtttcgagagtcctacctttcccctgcc

SEQ ID NO: 76017 - DNA, 70 bp, Homo sapiens
ctcccgcaggaatgccaaggtgaaagggaagtttcgagagtcctacctttcccctgcccagtctgtgaaa

SEQ ID NO: 76018 - DNA, 70 bp, Homo sapiens
atgccaaggtgaaagggaagtttcgagagtcctacctttcccctgcccagtctgtgaaaccgaagatcaa

SEQ ID NO: 76019 - DNA, 70 bp, Homo sapiens
aaagggaagtttcgagagtcctacctttcccctgcccagtctgtgaaaccgaagatcaacactgaggaga

SEQ ID NO: 76020 - DNA, 72 bp, Homo sapiens
aagtttcgagagtcctacctttcccctgcccagtctgtgaaaccgaagatcaacactgaggagaagctgccc

SEQ ID NO: 76021 - DNA, 71 bp, Homo sapiens
tacctttcccctgcccagtctgtgaaaccgaagatcaacactgaggagaagctgccccgggaaaaactcaa

SEQ ID NO: 76022 - DNA, 71 bp, Homo sapiens
ctgcccagtctgtgaaaccgaagatcaacactgaggagaagctgccccgggaaaaactcaacccccctaca

SEQ ID NO: 76023 - DNA, 69 bp, Homo sapiens
agtctgtgaaaccgaagatcaacactgaggagaagctgccccgggaaaaactcaacccccctacaccca

SEQ ID NO: 76024 - DNA, 71 bp, Homo sapiens
aaccgaagatcaacactgaggagaagctgccccgggaaaaactcaacccccctacacccagcatctatgta

SEQ ID NO: 76025 - DNA, 73 bp, Homo sapiens
aacactgaggagaagctgccccgggaaaaactcaacccccctacacccagcatctatgtatgtgtgccacttg

SEQ ID NO: 76026 - DNA, 73 bp, Homo sapiens
agaagctgccccgggaaaaactcaacccccctacacccagcatctatgtatgtgtgccacttggcctcagaac

SEQ ID NO: 76027 - DNA, 80 bp, Homo sapiens
agcctgggccagggctctgaccccagctctcctggtcatgtctcagctggagagcaaacgggatgccttctcacctgtcc

SEQ ID NO: 76028 - DNA, 83 bp, Homo sapiens
agggctctgaccccagctctcctggtcatgtctcagctggagagcaaacgggatgccttctcacctgtcctgctgcagttctg

SEQ ID NO: 76029 - DNA, 82 bp, Homo sapiens
accccagctctcctggtcatgtctcagctggagagcaaacgggatgccttctcacctgtcctgctgcagttctgtacagacc

SEQ ID NO: 76030 - DNA, 83 bp, Homo sapiens
tctcctggtcatgtctcagctggagagcaaacgggatgccttctcacctgtcctgctgcagttctgtacagaccctcgaaatc

SEQ ID NO: 76031 - DNA, 82 bp, Homo sapiens
atgtctcagctggagagcaaacgggatgccttctcacctgtcctgctgcagttctgtacagaccctcgaaatcccatcacag

SEQ ID NO: 76032 - DNA, 78 bp, Homo sapiens
agagcaaacgggatgccttctcacctgtcctgctgcagttctgtacagaccctcgaaatcccatcacagtgatccggg

SEQ ID NO: 76033 - DNA, 76 bp, Homo sapiens
aaacgggatgccttctcacctgtcctgctgcagttctgtacagaccctcgaaatcccatcacagtgatccggggcc

SEQ ID NO: 76034 - DNA, 79 bp, Homo sapiens
ttctcacctgtcctgctgcagttctgtacagaccctcgaaatcccatcacagtgatccggggcctggcgggctccctgc

SEQ ID NO: 76035 - DNA, 81 bp, Homo sapiens
tgctgcagttctgtacagaccctcgaaatcccatcacagtgatccggggcctggcgggctccctgcggctcagtgagtatg

SEQ ID NO: 76036 - DNA, 76 bp, Homo sapiens
agttctgtacagaccctcgaaatcccatcacagtgatccggggcctggcgggctccctgcggctcagtgagtatgg

SEQ ID NO: 76037 - DNA, 74 bp, Homo sapiens
accctcgaaatcccatcacagtgatccggggcctggcgggctccctgcggctcagtgagtatggggggcagaaa

SEQ ID NO: 76038 - DNA, 74 bp, Homo sapiens
aaatcccatcacagtgatccggggcctggcgggctccctgcggctcagtgagtatggggggcagaaagtgttag

SEQ ID NO: 76039 - DNA, 73 bp, Homo sapiens
acagtgatccggggcctggcgggctccctgcggctcagtgagtatggggggcagaaagtgttagggagggcta

SEQ ID NO: 76040 - DNA, 74 bp, Homo sapiens
tccctatcctctgcctctgccccgacaccctgctcggccctcccttccagacttgggcctcttctccaccaaga

SEQ ID NO: 76041 - DNA, 71 bp, Homo sapiens
ctctgccccgacaccctgctcggccctcccttccagacttgggcctcttctccaccaagaccctggtggaa

SEQ ID NO: 76042 - DNA, 72 bp, Homo sapiens
acaccctgctcggccctcccttccagacttgggcctcttctccaccaagaccctggtggaagcgagtggcga

SEQ ID NO: 76043 - DNA, 71 bp, Homo sapiens
tcggccctcccttccagacttgggcctcttctccaccaagaccctggtggaagcgagtggcgaacacaccg

SEQ ID NO: 76044 - DNA, 73 bp, Homo sapiens
ttccagacttgggcctcttctccaccaagaccctggtggaagcgagtggcgaacacaccgtggaagttcgcac

SEQ ID NO: 76045 - DNA, 74 bp, Homo sapiens
ttgggcctcttctccaccaagaccctggtggaagcgagtggcgaacacaccgtggaagttcgcacccaggtgca

SEQ ID NO: 76046 - DNA, 77 bp, Homo sapiens
tcttctccaccaagaccctggtggaagcgagtggcgaacacaccgtggaagttcgcacccaggtgcagcagccctca

SEQ ID NO: 76047 - DNA, 77 bp, Homo sapiens
aagaccctggtggaagcgagtggcgaacacaccgtggaagttcgcacccaggtgcagcagccctcagatgagaactg

SEQ ID NO: 76048 - DNA, 81 bp, Homo sapiens
aagcgagtggcgaacacaccgtggaagttcgcacccaggtgcagcagccctcagatgagaactgggatctgacaggcactc

SEQ ID NO: 76049 - DNA, 84 bp, Homo sapiens
tggcgaacacaccgtggaagttcgcacccaggtgcagcagccctcagatgagaactgggatctgacaggcactcggcagatctg

SEQ ID NO: 76050 - DNA, 83 bp, Homo sapiens
accgtggaagttcgcacccaggtgcagcagccctcagatgagaactgggatctgacaggcactcggcagatctggccttgtga

SEQ ID NO: 76051 - DNA, 85 bp, Homo sapiens
ttcgcacccaggtgcagcagccctcagatgagaactgggatctgacaggcactcggcagatctggccttgtgagagctcccgttc

SEQ ID NO: 76052 - DNA, 83 bp, Homo sapiens
cagcagccctcagatgagaactgggatctgacaggcactcggcagatctggccttgtgagagctcccgttcccacaccaccat

SEQ ID NO: 76053 - DNA, 83 bp, Homo sapiens
tcagatgagaactgggatctgacaggcactcggcagatctggccttgtgagagctcccgttcccacaccaccattgccaagta

SEQ ID NO: 76054 - DNA, 80 bp, Homo sapiens
aactgggatctgacaggcactcggcagatctggccttgtgagagctcccgttcccacaccaccattgccaagtacgcaca

SEQ ID NO: 76055 - DNA, 80 bp, Homo sapiens
atctgacaggcactcggcagatctggccttgtgagagctcccgttcccacaccaccattgccaagtacgcacagtaccag

SEQ ID NO: 76056 - DNA, 78 bp, Homo sapiens
actcggcagatctggccttgtgagagctcccgttcccacaccaccattgccaagtacgcacagtaccaggcctcatcc

SEQ ID NO: 76057 - DNA, 77 bp, Homo sapiens
atctggccttgtgagagctcccgttcccacaccaccattgccaagtacgcacagtaccaggcctcatccttccagga

SEQ ID NO: 76058 - DNA, 80 bp, Homo sapiens
ttcccacaccaccattgccaagtacgcacagtaccaggcctcatccttccaggagtctctgcaggtgagatgagaacgtg

SEQ ID NO: 76059 - DNA, 80 bp, Homo sapiens
accaccattgccaagtacgcacagtaccaggcctcatccttccaggagtctctgcaggtgagatgagaacgtggccagag

SEQ ID NO: 76060 - DNA, 79 bp, Homo sapiens
aagtacgcacagtaccaggcctcatccttccaggagtctctgcaggtgagatgagaacgtggccagaggcaggtcctgg

SEQ ID NO: 76061 - DNA, 75 bp, Homo sapiens
aggtgagatgagaacgtggccagaggcaggtcctgggacggggctgcggtgggagggctctcgaaaggtctctga

SEQ ID NO: 76062 - DNA, 75 bp, Homo sapiens
ggctgcggtgggagggctctcgaaaggtctctgacccaggcctgcctaccctctggctgaacaggaggagaagga

SEQ ID NO: 76063 - DNA, 77 bp, Homo sapiens
ggagggctctcgaaaggtctctgacccaggcctgcctaccctctggctgaacaggaggagaaggagagtgaggatga

SEQ ID NO: 76064 - DNA, 79 bp, Homo sapiens
tctcgaaaggtctctgacccaggcctgcctaccctctggctgaacaggaggagaaggagagtgaggatgaggagtcaga

SEQ ID NO: 76065 - DNA, 81 bp, Homo sapiens
gtctctgacccaggcctgcctaccctctggctgaacaggaggagaaggagagtgaggatgaggagtcagaggagccagaca

SEQ ID NO: 76066 - DNA, 80 bp, Homo sapiens
cctgcctaccctctggctgaacaggaggagaaggagagtgaggatgaggagtcagaggagccagacagcaccactggaac

SEQ ID NO: 76067 - DNA, 79 bp, Homo sapiens
ctctggctgaacaggaggagaaggagagtgaggatgaggagtcagaggagccagacagcaccactggaacccctcctag

SEQ ID NO: 76068 - DNA, 76 bp, Homo sapiens
aacaggaggagaaggagagtgaggatgaggagtcagaggagccagacagcaccactggaacccctcctaggtactg

SEQ ID NO: 76069 - DNA, 78 bp, Homo sapiens
aaggagagtgaggatgaggagtcagaggagccagacagcaccactggaacccctcctaggtactgtgcaggtgtgccc

SEQ ID NO: 76070 - DNA, 77 bp, Homo sapiens
aggatgaggagtcagaggagccagacagcaccactggaacccctcctaggtactgtgcaggtgtgccccttctgttc

SEQ ID NO: 76071 - DNA, 76 bp, Homo sapiens
aggagtcagaggagccagacagcaccactggaacccctcctaggtactgtgcaggtgtgccccttctgttcctgct

SEQ ID NO: 76072 - DNA, 74 bp, Homo sapiens
aggagccagacagcaccactggaacccctcctaggtactgtgcaggtgtgccccttctgttcctgcttccttcc

SEQ ID NO: 76073 - DNA, 71 bp, Homo sapiens
agcaccactggaacccctcctaggtactgtgcaggtgtgccccttctgttcctgcttccttcccctccctc

SEQ ID NO: 76074 - DNA, 72 bp, Homo sapiens
ccctcctaggtactgtgcaggtgtgccccttctgttcctgcttccttcccctccctctgctctccaccaacc

SEQ ID NO: 76075 - DNA, 76 bp, Homo sapiens
taggtactgtgcaggtgtgccccttctgttcctgcttccttcccctccctctgctctccaccaacctgtgctcttc

SEQ ID NO: 76076 - DNA, 76 bp, Homo sapiens
aggtgtgccccttctgttcctgcttccttcccctccctctgctctccaccaacctgtgctcttcgccccagcagca

SEQ ID NO: 76077 - DNA, 78 bp, Homo sapiens
cccttctgttcctgcttccttcccctccctctgctctccaccaacctgtgctcttcgccccagcagcagcgcaccaga

SEQ ID NO: 76078 - DNA, 78 bp, Homo sapiens
tgttcctgcttccttcccctccctctgctctccaccaacctgtgctcttcgccccagcagcagcgcaccagacccgaa

SEQ ID NO: 76079 - DNA, 79 bp, Homo sapiens
tccttcccctccctctgctctccaccaacctgtgctcttcgccccagcagcagcgcaccagacccgaagaaccatcaca

SEQ ID NO: 76080 - DNA, 82 bp, Homo sapiens
tccctctgctctccaccaacctgtgctcttcgccccagcagcagcgcaccagacccgaagaaccatcacatcatcaagtttg

SEQ ID NO: 76081 - DNA, 82 bp, Homo sapiens
tccaccaacctgtgctcttcgccccagcagcagcgcaccagacccgaagaaccatcacatcatcaagtttggcaccaacatc

SEQ ID NO: 76082 - DNA, 80 bp, Homo sapiens
aacctgtgctcttcgccccagcagcagcgcaccagacccgaagaaccatcacatcatcaagtttggcaccaacatcgact

SEQ ID NO: 76083 - DNA, 84 bp, Homo sapiens
tcttcgccccagcagcagcgcaccagacccgaagaaccatcacatcatcaagtttggcaccaacatcgacttgtctgatgctaa

SEQ ID NO: 76084 - DNA, 82 bp, Homo sapiens
agcagcgcaccagacccgaagaaccatcacatcatcaagtttggcaccaacatcgacttgtctgatgctaagcggtcagtgg

SEQ ID NO: 76085 - DNA, 80 bp, Homo sapiens
aagaaccatcacatcatcaagtttggcaccaacatcgacttgtctgatgctaagcggtcagtggggctgaggccagggaa

SEQ ID NO: 76086 - DNA, 79 bp, Homo sapiens
acatcatcaagtttggcaccaacatcgacttgtctgatgctaagcggtcagtggggctgaggccagggaagttggggca

SEQ ID NO: 76087 - DNA, 77 bp, Homo sapiens
agtttggcaccaacatcgacttgtctgatgctaagcggtcagtggggctgaggccagggaagttggggcaggagtgc

SEQ ID NO: 76088 - DNA, 78 bp, Homo sapiens
aacatcgacttgtctgatgctaagcggtcagtggggctgaggccagggaagttggggcaggagtgctgctaggacctc

SEQ ID NO: 76089 - DNA, 74 bp, Homo sapiens
acctcgtggcgggggcggggtgtagcctctcgtcgcacttccgcaccgcaggtggaagccccagctgcaggagc

SEQ ID NO: 76090 - DNA, 80 bp, Homo sapiens
cggggtgtagcctctcgtcgcacttccgcaccgcaggtggaagccccagctgcaggagctgctgaagctgcccgccttca

SEQ ID NO: 76091 - DNA, 82 bp, Homo sapiens
tagcctctcgtcgcacttccgcaccgcaggtggaagccccagctgcaggagctgctgaagctgcccgccttcatgcgggtaa

SEQ ID NO: 76092 - DNA, 81 bp, Homo sapiens
cgtcgcacttccgcaccgcaggtggaagccccagctgcaggagctgctgaagctgcccgccttcatgcgggtaacatccac

SEQ ID NO: 76093 - DNA, 83 bp, Homo sapiens
accgcaggtggaagccccagctgcaggagctgctgaagctgcccgccttcatgcgggtaacatccacgggcaacatgctgagc

SEQ ID NO: 76094 - DNA, 83 bp, Homo sapiens
aagccccagctgcaggagctgctgaagctgcccgccttcatgcgggtaacatccacgggcaacatgctgagccacgtgggcca

SEQ ID NO: 76095 - DNA, 84 bp, Homo sapiens
tgcaggagctgctgaagctgcccgccttcatgcgggtaacatccacgggcaacatgctgagccacgtgggccacaccatcctgg

SEQ ID NO: 76096 - DNA, 84 bp, Homo sapiens
tgctgaagctgcccgccttcatgcgggtaacatccacgggcaacatgctgagccacgtgggccacaccatcctgggcatgaaca

SEQ ID NO: 76097 - DNA, 80 bp, Homo sapiens
agctgcccgccttcatgcgggtaacatccacgggcaacatgctgagccacgtgggccacaccatcctgggcatgaacacg

SEQ ID NO: 76098 - DNA, 85 bp, Homo sapiens
ttcatgcgggtaacatccacgggcaacatgctgagccacgtgggccacaccatcctgggcatgaacacggtgcagctgtacatga

SEQ ID NO: 76099 - DNA, 82 bp, Homo sapiens
aacatgctgagccacgtgggccacaccatcctgggcatgaacacggtgcagctgtacatgaaggtgcccggcagccgaacgc

SEQ ID NO: 76100 - DNA, 80 bp, Homo sapiens
agccacgtgggccacaccatcctgggcatgaacacggtgcagctgtacatgaaggtgcccggcagccgaacgccaggtgc

SEQ ID NO: 76101 - DNA, 81 bp, Homo sapiens
ccacaccatcctgggcatgaacacggtgcagctgtacatgaaggtgcccggcagccgaacgccaggtgcgctccacgcctg

SEQ ID NO: 76102 - DNA, 84 bp, Homo sapiens
atcctgggcatgaacacggtgcagctgtacatgaaggtgcccggcagccgaacgccaggtgcgctccacgcctgtgcgcgctga

SEQ ID NO: 76103 - DNA, 85 bp, Homo sapiens
atgaacacggtgcagctgtacatgaaggtgcccggcagccgaacgccaggtgcgctccacgcctgtgcgcgctgatgctggaagc

SEQ ID NO: 76104 - DNA, 78 bp, Homo sapiens
atcgcagttccgacctggccagccatgccgttctctgtcgacccctgcaggccaccaggagaataacaacttctgctc

SEQ ID NO: 76105 - DNA, 79 bp, Homo sapiens
ctggccagccatgccgttctctgtcgacccctgcaggccaccaggagaataacaacttctgctccgtcaacatcaacat

SEQ ID NO: 76106 - DNA, 77 bp, Homo sapiens
atgccgttctctgtcgacccctgcaggccaccaggagaataacaacttctgctccgtcaacatcaacattggcccag

SEQ ID NO: 76107 - DNA, 78 bp, Homo sapiens
ctgtcgacccctgcaggccaccaggagaataacaacttctgctccgtcaacatcaacattggcccaggcgactgcgag

SEQ ID NO: 76108 - DNA, 78 bp, Homo sapiens
ctgcaggccaccaggagaataacaacttctgctccgtcaacatcaacattggcccaggcgactgcgagtggttcgcgg

SEQ ID NO: 76109 - DNA, 79 bp, Homo sapiens
accaggagaataacaacttctgctccgtcaacatcaacattggcccaggcgactgcgagtggttcgcggtgcacgagca

SEQ ID NO: 76110 - DNA, 78 bp, Homo sapiens
aataacaacttctgctccgtcaacatcaacattggcccaggcgactgcgagtggttcgcggtgcacgagcactactgg

SEQ ID NO: 76111 - DNA, 82 bp, Homo sapiens
tgctccgtcaacatcaacattggcccaggcgactgcgagtggttcgcggtgcacgagcactactgggagaccatcagcgctt

SEQ ID NO: 76112 - DNA, 82 bp, Homo sapiens
aacatcaacattggcccaggcgactgcgagtggttcgcggtgcacgagcactactgggagaccatcagcgctttctgtgatc

SEQ ID NO: 76113 - DNA, 81 bp, Homo sapiens
acattggcccaggcgactgcgagtggttcgcggtgcacgagcactactgggagaccatcagcgctttctgtgatcggtgcg

SEQ ID NO: 76114 - DNA, 82 bp, Homo sapiens
actgcgagtggttcgcggtgcacgagcactactgggagaccatcagcgctttctgtgatcggtgcgtgccgtcctgcgcaag

SEQ ID NO: 76115 - DNA, 82 bp, Homo sapiens
agtggttcgcggtgcacgagcactactgggagaccatcagcgctttctgtgatcggtgcgtgccgtcctgcgcaagtcagac

SEQ ID NO: 76116 - DNA, 83 bp, Homo sapiens
cggtgcacgagcactactgggagaccatcagcgctttctgtgatcggtgcgtgccgtcctgcgcaagtcagactgccgcgtcc

SEQ ID NO: 76117 - DNA, 69 bp, Homo sapiens
ccgccctcggtccccagttcccacctgacctgtggccaccccgcaggcacggcgtggactacttgacgg

SEQ ID NO: 76118 - DNA, 70 bp, Homo sapiens
gtccccagttcccacctgacctgtggccaccccgcaggcacggcgtggactacttgacgggttcctggtg

SEQ ID NO: 76119 - DNA, 71 bp, Homo sapiens
agttcccacctgacctgtggccaccccgcaggcacggcgtggactacttgacgggttcctggtggccaatc

SEQ ID NO: 76120 - DNA, 79 bp, Homo sapiens
tgtggccaccccgcaggcacggcgtggactacttgacgggttcctggtggccaatcctggatgatctctatgcatccaa

SEQ ID NO: 76121 - DNA, 79 bp, Homo sapiens
ccgcaggcacggcgtggactacttgacgggttcctggtggccaatcctggatgatctctatgcatccaatattcctgtg

SEQ ID NO: 76122 - DNA, 78 bp, Homo sapiens
ggcgtggactacttgacgggttcctggtggccaatcctggatgatctctatgcatccaatattcctgtgtaccgcttc

SEQ ID NO: 76123 - DNA, 80 bp, Homo sapiens
actacttgacgggttcctggtggccaatcctggatgatctctatgcatccaatattcctgtgtaccgcttcgtgcagcga

SEQ ID NO: 76124 - DNA, 80 bp, Homo sapiens
ttcctggtggccaatcctggatgatctctatgcatccaatattcctgtgtaccgcttcgtgcagcgacccggagacctcg

SEQ ID NO: 76125 - DNA, 80 bp, Homo sapiens
ccaatcctggatgatctctatgcatccaatattcctgtgtaccgcttcgtgcagcgacccggagacctcgtgtggattaa

SEQ ID NO: 76126 - DNA, 80 bp, Homo sapiens
ctggatgatctctatgcatccaatattcctgtgtaccgcttcgtgcagcgacccggagacctcgtgtggattaatgcggg

SEQ ID NO: 76127 - DNA, 79 bp, Homo sapiens
atgcatccaatattcctgtgtaccgcttcgtgcagcgacccggagacctcgtgtggattaatgcggggactgtgcactg

SEQ ID NO: 76128 - DNA, 77 bp, Homo sapiens
aatattcctgtgtaccgcttcgtgcagcgacccggagacctcgtgtggattaatgcggggactgtgcactgggtgca

SEQ ID NO: 76129 - DNA, 77 bp, Homo sapiens
tgtgtaccgcttcgtgcagcgacccggagacctcgtgtggattaatgcggggactgtgcactgggtgcaggccaccg

SEQ ID NO: 76130 - DNA, 79 bp, Homo sapiens
tgcagcgacccggagacctcgtgtggattaatgcggggactgtgcactgggtgcaggccaccggctggtgcaacaacat

SEQ ID NO: 76131 - DNA, 78 bp, Homo sapiens
cggagacctcgtgtggattaatgcggggactgtgcactgggtgcaggccaccggctggtgcaacaacattgcctggaa

SEQ ID NO: 76132 - DNA, 77 bp, Homo sapiens
cctcgtgtggattaatgcggggactgtgcactgggtgcaggccaccggctggtgcaacaacattgcctggaacgtgg

SEQ ID NO: 76133 - DNA, 76 bp, Homo sapiens
tgtgcactgggtgcaggccaccggctggtgcaacaacattgcctggaacgtggggcccctcaccggtgagagggtg

SEQ ID NO: 76134 - DNA, 72 bp, Homo sapiens
ctgggtgcaggccaccggctggtgcaacaacattgcctggaacgtggggcccctcaccggtgagagggtggg

SEQ ID NO: 76135 - DNA, 72 bp, Homo sapiens
ggtgcaacaacattgcctggaacgtggggcccctcaccggtgagagggtggggcaggtgttggcgtggtgtg

SEQ ID NO: 76136 - DNA, 78 bp, Homo sapiens
tctgggggctgtttgagagtcctgttgtgatcgcctttggcccgcagcctatcagtaccagctggccctggaacgata

SEQ ID NO: 76137 - DNA, 79 bp, Homo sapiens
tttgagagtcctgttgtgatcgcctttggcccgcagcctatcagtaccagctggccctggaacgatacgagtggaatga

SEQ ID NO: 76138 - DNA, 78 bp, Homo sapiens
agtcctgttgtgatcgcctttggcccgcagcctatcagtaccagctggccctggaacgatacgagtggaatgaggtga

SEQ ID NO: 76139 - DNA, 76 bp, Homo sapiens
atcgcctttggcccgcagcctatcagtaccagctggccctggaacgatacgagtggaatgaggtgaagaacgtcaa

SEQ ID NO: 76140 - DNA, 77 bp, Homo sapiens
ttggcccgcagcctatcagtaccagctggccctggaacgatacgagtggaatgaggtgaagaacgtcaaatccatcg

SEQ ID NO: 76141 - DNA, 79 bp, Homo sapiens
tatcagtaccagctggccctggaacgatacgagtggaatgaggtgaagaacgtcaaatccatcgtgcccatgattcacg

SEQ ID NO: 76142 - DNA, 79 bp, Homo sapiens
agctggccctggaacgatacgagtggaatgaggtgaagaacgtcaaatccatcgtgcccatgattcacgtgtcatggaa

SEQ ID NO: 76143 - DNA, 79 bp, Homo sapiens
ctggaacgatacgagtggaatgaggtgaagaacgtcaaatccatcgtgcccatgattcacgtgtcatggaacgtggctc

SEQ ID NO: 76144 - DNA, 80 bp, Homo sapiens
gtggaatgaggtgaagaacgtcaaatccatcgtgcccatgattcacgtgtcatggaacgtggctcgcacggtcaaaatca

SEQ ID NO: 76145 - DNA, 80 bp, Homo sapiens
atgaggtgaagaacgtcaaatccatcgtgcccatgattcacgtgtcatggaacgtggctcgcacggtcaaaatcagcgac

SEQ ID NO: 76146 - DNA, 79 bp, Homo sapiens
tcaaatccatcgtgcccatgattcacgtgtcatggaacgtggctcgcacggtcaaaatcagcgaccccgacttgttcaa

SEQ ID NO: 76147 - DNA, 80 bp, Homo sapiens
atcgtgcccatgattcacgtgtcatggaacgtggctcgcacggtcaaaatcagcgaccccgacttgttcaagatgatcaa

SEQ ID NO: 76148 - DNA, 79 bp, Homo sapiens
atgattcacgtgtcatggaacgtggctcgcacggtcaaaatcagcgaccccgacttgttcaagatgatcaagtgaggac

SEQ ID NO: 76149 - DNA, 77 bp, Homo sapiens
tgtcatggaacgtggctcgcacggtcaaaatcagcgaccccgacttgttcaagatgatcaagtgaggaccctatttg

SEQ ID NO: 76150 - DNA, 73 bp, Homo sapiens
aacgtggctcgcacggtcaaaatcagcgaccccgacttgttcaagatgatcaagtgaggaccctatttgggtg

SEQ ID NO: 76151 - DNA, 71 bp, Homo sapiens
acggtcaaaatcagcgaccccgacttgttcaagatgatcaagtgaggaccctatttgggtgggagcccacc

SEQ ID NO: 76152 - DNA, 79 bp, Homo sapiens
aggcctcctccttgccggtggtctcaacacaaccccactgctccccaggttctgcctgctgcagtccatgaagcactgc

SEQ ID NO: 76153 - DNA, 81 bp, Homo sapiens
tccttgccggtggtctcaacacaaccccactgctccccaggttctgcctgctgcagtccatgaagcactgccaggtgcaac

SEQ ID NO: 76154 - DNA, 83 bp, Homo sapiens
tggtctcaacacaaccccactgctccccaggttctgcctgctgcagtccatgaagcactgccaggtgcaacgcgagagcctgg

SEQ ID NO: 76155 - DNA, 82 bp, Homo sapiens
acaaccccactgctccccaggttctgcctgctgcagtccatgaagcactgccaggtgcaacgcgagagcctggtgcgggcag

SEQ ID NO: 76156 - DNA, 81 bp, Homo sapiens
ctccccaggttctgcctgctgcagtccatgaagcactgccaggtgcaacgcgagagcctggtgcgggcagggaagaaaatc

SEQ ID NO: 76157 - DNA, 82 bp, Homo sapiens
ttctgcctgctgcagtccatgaagcactgccaggtgcaacgcgagagcctggtgcgggcagggaagaaaatcgcttaccagg

SEQ ID NO: 76158 - DNA, 78 bp, Homo sapiens
agtccatgaagcactgccaggtgcaacgcgagagcctggtgcgggcagggaagaaaatcgcttaccagggccgtgtca

SEQ ID NO: 76159 - DNA, 77 bp, Homo sapiens
atgaagcactgccaggtgcaacgcgagagcctggtgcgggcagggaagaaaatcgcttaccagggccgtgtcaagga

SEQ ID NO: 76160 - DNA, 75 bp, Homo sapiens
ggtgcaacgcgagagcctggtgcgggcagggaagaaaatcgcttaccagggccgtgtcaaggacgagccagccta

SEQ ID NO: 76161 - DNA, 74 bp, Homo sapiens
agagcctggtgcgggcagggaagaaaatcgcttaccagggccgtgtcaaggacgagccagcctactactgcaac

SEQ ID NO: 76162 - DNA, 78 bp, Homo sapiens
tgcgggcagggaagaaaatcgcttaccagggccgtgtcaaggacgagccagcctactactgcaacgagtgcgatgtga

SEQ ID NO: 76163 - DNA, 75 bp, Homo sapiens
agggaagaaaatcgcttaccagggccgtgtcaaggacgagccagcctactactgcaacgagtgcgatgtgagtgg

SEQ ID NO: 76164 - DNA, 80 bp, Homo sapiens
aatcgcttaccagggccgtgtcaaggacgagccagcctactactgcaacgagtgcgatgtgagtgggccggctctgctgc

SEQ ID NO: 76165 - DNA, 81 bp, Homo sapiens
agggccgtgtcaaggacgagccagcctactactgcaacgagtgcgatgtgagtgggccggctctgctgctctccctgagtg

SEQ ID NO: 76166 - DNA, 71 bp, Homo sapiens
acagtggccctccctccccctgactgcactgtcctccctgccccaggtggaggtgtttaacatcctgttcg

SEQ ID NO: 76167 - DNA, 74 bp, Homo sapiens
tccctccccctgactgcactgtcctccctgccccaggtggaggtgtttaacatcctgttcgtgacaagtgagaa

SEQ ID NO: 76168 - DNA, 79 bp, Homo sapiens
tgactgcactgtcctccctgccccaggtggaggtgtttaacatcctgttcgtgacaagtgagaatggcagccgcaacac

SEQ ID NO: 76169 - DNA, 75 bp, Homo sapiens
actgtcctccctgccccaggtggaggtgtttaacatcctgttcgtgacaagtgagaatggcagccgcaacacgta

SEQ ID NO: 76170 - DNA, 78 bp, Homo sapiens
tttaacatcctgttcgtgacaagtgagaatggcagccgcaacacgtacctggtacactgcgagggctgtgcccggcgc

SEQ ID NO: 76171 - DNA, 81 bp, Homo sapiens
tgttcgtgacaagtgagaatggcagccgcaacacgtacctggtacactgcgagggctgtgcccggcgccgcagcgcaggcc

SEQ ID NO: 76172 - DNA, 80 bp, Homo sapiens
aagtgagaatggcagccgcaacacgtacctggtacactgcgagggctgtgcccggcgccgcagcgcaggcctgcagggcg

SEQ ID NO: 76173 - DNA, 80 bp, Homo sapiens
agccgcaacacgtacctggtacactgcgagggctgtgcccggcgccgcagcgcaggcctgcagggcgtggtggtgctgga

SEQ ID NO: 76174 - DNA, 80 bp, Homo sapiens
acacgtacctggtacactgcgagggctgtgcccggcgccgcagcgcaggcctgcagggcgtggtggtgctggagcagtac

SEQ ID NO: 76175 - DNA, 84 bp, Homo sapiens
gtacactgcgagggctgtgcccggcgccgcagcgcaggcctgcagggcgtggtggtgctggagcagtaccgcactgaggagctg

SEQ ID NO: 76176 - DNA, 84 bp, Homo sapiens
ctgtgcccggcgccgcagcgcaggcctgcagggcgtggtggtgctggagcagtaccgcactgaggagctggctcaggcctacga

SEQ ID NO: 76177 - DNA, 83 bp, Homo sapiens
cgccgcagcgcaggcctgcagggcgtggtggtgctggagcagtaccgcactgaggagctggctcaggcctacgacgccttcac

SEQ ID NO: 76178 - DNA, 82 bp, Homo sapiens
caggcctgcagggcgtggtggtgctggagcagtaccgcactgaggagctggctcaggcctacgacgccttcacgctggtgag

SEQ ID NO: 76179 - DNA, 78 bp, Homo sapiens
gggcgtggtggtgctggagcagtaccgcactgaggagctggctcaggcctacgacgccttcacgctggtgagggcccg

SEQ ID NO: 76180 - DNA, 79 bp, Homo sapiens
tggtggtgctggagcagtaccgcactgaggagctggctcaggcctacgacgccttcacgctggtgagggcccggcgggc

SEQ ID NO: 76181 - DNA, 78 bp, Homo sapiens
ggagcagtaccgcactgaggagctggctcaggcctacgacgccttcacgctggtgagggcccggcgggcgcgcgggca

SEQ ID NO: 76182 - DNA, 75 bp, Homo sapiens
actgaggagctggctcaggcctacgacgccttcacgctggtgagggcccggcgggcgcgcgggcagcggaggagg

SEQ ID NO: 76183 - DNA, 75 bp, Homo sapiens
agctggctcaggcctacgacgccttcacgctggtgagggcccggcgggcgcgcgggcagcggaggagggcactgg

SEQ ID NO: 76184 - DNA, 75 bp, Homo sapiens
cctacgacgccttcacgctggtgagggcccggcgggcgcgcgggcagcggaggagggcactggggcaggctgcag

SEQ ID NO: 76185 - DNA, 75 bp, Homo sapiens
ttcacgctggtgagggcccggcgggcgcgcgggcagcggaggagggcactggggcaggctgcagggacgggcttc

SEQ ID NO: 76186 - DNA, 74 bp, Homo sapiens
tggtgagggcccggcgggcgcgcgggcagcggaggagggcactggggcaggctgcagggacgggcttcgggagc

SEQ ID NO: 76187 - DNA, 72 bp, Homo sapiens
gggcgcgcgggcagcggaggagggcactggggcaggctgcagggacgggcttcgggagcccggccgcgcctt

SEQ ID NO: 76188 - DNA, 72 bp, Homo sapiens
cgggcagcggaggagggcactggggcaggctgcagggacgggcttcgggagcccggccgcgcctttccctga

SEQ ID NO: 76189 - DNA, 70 bp, Homo sapiens
aggagggcactggggcaggctgcagggacgggcttcgggagcccggccgcgcctttccctgagcccccgc

SEQ ID NO: 76190 - DNA, 69 bp, Homo sapiens
ggcaggctgcagggacgggcttcgggagcccggccgcgcctttccctgagcccccgccggctttctccc

SEQ ID NO: 76191 - DNA, 64 bp, Homo sapiens
agggacgggcttcgggagcccggccgcgcctttccctgagcccccgccggctttctccccccag

SEQ ID NO: 76192 - DNA, 70 bp, Homo sapiens
ccggccgcgcctttccctgagcccccgccggctttctccccccaggccccagccagcacgtcgcgatgag

SEQ ID NO: 76193 - DNA, 70 bp, Homo sapiens
tttccctgagcccccgccggctttctccccccaggccccagccagcacgtcgcgatgaggccggacgccc

SEQ ID NO: 76194 - DNA, 70 bp, Homo sapiens
ctgagcccccgccggctttctccccccaggccccagccagcacgtcgcgatgaggccggacgccccgccc

SEQ ID NO: 76195 - DNA, 73 bp, Homo sapiens
ctttctccccccaggccccagccagcacgtcgcgatgaggccggacgccccgcccgcctgcctgcccgcgcaa

SEQ ID NO: 76196 - DNA, 77 bp, Homo sapiens
agccagcacgtcgcgatgaggccggacgccccgcccgcctgcctgcccgcgcaaggcgccgcggggccaccagcaca

SEQ ID NO: 76197 - DNA, 76 bp, Homo sapiens
acgtcgcgatgaggccggacgccccgcccgcctgcctgcccgcgcaaggcgccgcggggccaccagcacatgcctg

SEQ ID NO: 76198 - DNA, 74 bp, Homo sapiens
ccggacgccccgcccgcctgcctgcccgcgcaaggcgccgcggggccaccagcacatgcctgggctggacctag

SEQ ID NO: 76199 - DNA, 76 bp, Homo sapiens
cgcccgcctgcctgcccgcgcaaggcgccgcggggccaccagcacatgcctgggctggacctaggtcccgcctgtg

SEQ ID NO: 76200 - DNA, 77 bp, Homo sapiens
ctgcctgcccgcgcaaggcgccgcggggccaccagcacatgcctgggctggacctaggtcccgcctgtggccgagaa

SEQ ID NO: 76201 - DNA, 73 bp, Homo sapiens
ccgcgcaaggcgccgcggggccaccagcacatgcctgggctggacctaggtcccgcctgtggccgagaagggg

SEQ ID NO: 76202 - DNA, 71 bp, Homo sapiens
ccgcggggccaccagcacatgcctgggctggacctaggtcccgcctgtggccgagaagggggtcgggccca

SEQ ID NO: 76203 - DNA, 71 bp, Homo sapiens
accagcacatgcctgggctggacctaggtcccgcctgtggccgagaagggggtcgggcccagcccttccac

SEQ ID NO: 76204 - DNA, 68 bp, Homo sapiens
atgcctgggctggacctaggtcccgcctgtggccgagaagggggtcgggcccagcccttccaccccat

SEQ ID NO: 76205 - DNA, 69 bp, Homo sapiens
tggacctaggtcccgcctgtggccgagaagggggtcgggcccagcccttccaccccattggcagctccc

SEQ ID NO: 76206 - DNA, 68 bp, Homo sapiens
cctgtggccgagaagggggtcgggcccagcccttccaccccattggcagctcccctcacttaatttat

SEQ ID NO: 76207 - DNA, 67 bp, Homo sapiens
ccgagaagggggtcgggcccagcccttccaccccattggcagctcccctcacttaatttattaagaa

SEQ ID NO: 76208 - DNA, 66 bp, Homo sapiens
aaggaaaaaaaatgggagacgggggagggggctggcagcccctcgcccaccagcgcctcccctcac

SEQ ID NO: 76209 - DNA, 67 bp, Homo sapiens
aaaaatgggagacgggggagggggctggcagcccctcgcccaccagcgcctcccctcaccgactttg

SEQ ID NO: 76210 - DNA, 73 bp, Homo sapiens
gctggcagcccctcgcccaccagcgcctcccctcaccgactttggcctttttagcaacagacacaaggaccag

SEQ ID NO: 76211 - DNA, 70 bp, Homo sapiens
ccctcgcccaccagcgcctcccctcaccgactttggcctttttagcaacagacacaaggaccaggctccg

SEQ ID NO: 76212 - DNA, 70 bp, Homo sapiens
cccaccagcgcctcccctcaccgactttggcctttttagcaacagacacaaggaccaggctccggcggcg

SEQ ID NO: 76213 - DNA, 70 bp, Homo sapiens
ccctcaccgactttggcctttttagcaacagacacaaggaccaggctccggcggcggcgggggtcacata

SEQ ID NO: 76214 - DNA, 68 bp, Homo sapiens
actttggcctttttagcaacagacacaaggaccaggctccggcggcggcgggggtcacatacgggttc

SEQ ID NO: 76215 - DNA, 68 bp, Homo sapiens
ctttttagcaacagacacaaggaccaggctccggcggcggcgggggtcacatacgggttccctcaccc

SEQ ID NO: 76216 - DNA, 70 bp, Homo sapiens
aacagacacaaggaccaggctccggcggcggcgggggtcacatacgggttccctcaccctgccagccgcc

SEQ ID NO: 76217 - DNA, 68 bp, Homo sapiens
aggaccaggctccggcggcggcgggggtcacatacgggttccctcaccctgccagccgcccgcccgcc

SEQ ID NO: 76218 - DNA, 72 bp, Homo sapiens
cggcggcgggggtcacatacgggttccctcaccctgccagccgcccgcccgcccggcgcagatgcacgcggc

SEQ ID NO: 76219 - DNA, 77 bp, Homo sapiens
ggtcacatacgggttccctcaccctgccagccgcccgcccgcccggcgcagatgcacgcggctcgtgtatgtacata

SEQ ID NO: 76220 - DNA, 75 bp, Homo sapiens
gggttccctcaccctgccagccgcccgcccgcccggcgcagatgcacgcggctcgtgtatgtacatagacgttac

SEQ ID NO: 76221 - DNA, 73 bp, Homo sapiens
ccgcccgcccgcccggcgcagatgcacgcggctcgtgtatgtacatagacgttacggcagccgaggtttttaa

SEQ ID NO: 76222 - DNA, 77 bp, Homo sapiens
gcccggcgcagatgcacgcggctcgtgtatgtacatagacgttacggcagccgaggtttttaatgagattctttcta

SEQ ID NO: 76223 - DNA, 76 bp, Homo sapiens
gatgcacgcggctcgtgtatgtacatagacgttacggcagccgaggtttttaatgagattctttctatgggcttta

SEQ ID NO: 76224 - DNA, 70 bp, Homo sapiens
tgtatgtacatagacgttacggcagccgaggtttttaatgagattctttctatgggctttacccctcccc

SEQ ID NO: 76225 - DNA, 62 bp, Homo sapiens
agccgaggtttttaatgagattctttctatgggctttacccctcccccggaacctccttttt

SEQ ID NO: 76226 - DNA, 67 bp, Homo sapiens
agattctttctatgggctttacccctcccccggaacctccttttttacttccaatgctagctgtgac

SEQ ID NO: 76227 - DNA, 68 bp, Homo sapiens
tatgggctttacccctcccccggaacctccttttttacttccaatgctagctgtgacccctgtacatg

SEQ ID NO: 76228 - DNA, 69 bp, Homo sapiens
cctcccccggaacctccttttttacttccaatgctagctgtgacccctgtacatgtctctttattcact

SEQ ID NO: 76229 - DNA, 73 bp, Homo sapiens
acctccttttttacttccaatgctagctgtgacccctgtacatgtctctttattcacttggttatgatttgta

SEQ ID NO: 76230 - DNA, 73 bp, Homo sapiens
tttttacttccaatgctagctgtgacccctgtacatgtctctttattcacttggttatgatttgtattttttg

SEQ ID NO: 76231 - DNA, 73 bp, Homo sapiens
ccaatgctagctgtgacccctgtacatgtctctttattcacttggttatgatttgtattttttgttcttttct

SEQ ID NO: 76232 - DNA, 69 bp, Homo sapiens
ctgtgacccctgtacatgtctctttattcacttggttatgatttgtattttttgttcttttcttgtttt

SEQ ID NO: 76233 - DNA, 65 bp, Homo sapiens
ttgtttttaatttataacagtcccactcacctctatttattcatttttgggaaaacccgacctcc

SEQ ID NO: 76234 - DNA, 66 bp, Homo sapiens
tttaatttataacagtcccactcacctctatttattcatttttgggaaaacccgacctcccacacc

SEQ ID NO: 76235 - DNA, 67 bp, Homo sapiens
aacagtcccactcacctctatttattcatttttgggaaaacccgacctcccacacccccaagccatc

SEQ ID NO: 76236 - DNA, 67 bp, Homo sapiens
ctcacctctatttattcatttttgggaaaacccgacctcccacacccccaagccatcctgcccgccc

SEQ ID NO: 76237 - DNA, 66 bp, Homo sapiens
tttattcatttttgggaaaacccgacctcccacacccccaagccatcctgcccgcccctccaggga

SEQ ID NO: 76238 - DNA, 67 bp, Homo sapiens
ccgacctcccacacccccaagccatcctgcccgcccctccagggaccgcccgtcgccgggctctccc

SEQ ID NO: 76239 - DNA, 69 bp, Homo sapiens
ccccaagccatcctgcccgcccctccagggaccgcccgtcgccgggctctccccgcgccccagtgtgtg

SEQ ID NO: 76240 - DNA, 69 bp, Homo sapiens
agccatcctgcccgcccctccagggaccgcccgtcgccgggctctccccgcgccccagtgtgtgtccgg

SEQ ID NO: 76241 - DNA, 66 bp, Homo sapiens
ccctccagggaccgcccgtcgccgggctctccccgcgccccagtgtgtgtccgggcccggcccgac

SEQ ID NO: 76242 - DNA, 67 bp, Homo sapiens
cagggaccgcccgtcgccgggctctccccgcgccccagtgtgtgtccgggcccggcccgaccgtctc

SEQ ID NO: 76243 - DNA, 66 bp, Homo sapiens
accgcccgtcgccgggctctccccgcgccccagtgtgtgtccgggcccggcccgaccgtctccacc

SEQ ID NO: 76244 - DNA, 66 bp, Homo sapiens
cccgtcgccgggctctccccgcgccccagtgtgtgtccgggcccggcccgaccgtctccacccgtc

SEQ ID NO: 76245 - DNA, 66 bp, Homo sapiens
ccgtcgccgggctctccccgcgccccagtgtgtgtccgggcccggcccgaccgtctccacccgtcc

SEQ ID NO: 76246 - DNA, 69 bp, Homo sapiens
gctctccccgcgccccagtgtgtgtccgggcccggcccgaccgtctccacccgtccgcccgcggctcca

SEQ ID NO: 76247 - DNA, 68 bp, Homo sapiens
ctctccccgcgccccagtgtgtgtccgggcccggcccgaccgtctccacccgtccgcccgcggctcca

SEQ ID NO: 76248 - DNA, 66 bp, Homo sapiens
cgccccagtgtgtgtccgggcccggcccgaccgtctccacccgtccgcccgcggctccagccgggt

SEQ ID NO: 76249 - DNA, 69 bp, Homo sapiens
cagtgtgtgtccgggcccggcccgaccgtctccacccgtccgcccgcggctccagccgggttctcatgg

SEQ ID NO: 76250 - DNA, 70 bp, Homo sapiens
tgtccgggcccggcccgaccgtctccacccgtccgcccgcggctccagccgggttctcatggtgctcaaa

SEQ ID NO: 76251 - DNA, 69 bp, Homo sapiens
cccgaccgtctccacccgtccgcccgcggctccagccgggttctcatggtgctcaaacccgctcccctc

SEQ ID NO: 76252 - DNA, 70 bp, Homo sapiens
ccgtccgcccgcggctccagccgggttctcatggtgctcaaacccgctcccctcccctacgtcctgcact

SEQ ID NO: 76253 - DNA, 72 bp, Homo sapiens
gcggctccagccgggttctcatggtgctcaaacccgctcccctcccctacgtcctgcactttctcggaccag

SEQ ID NO: 76254 - DNA, 71 bp, Homo sapiens
tccagccgggttctcatggtgctcaaacccgctcccctcccctacgtcctgcactttctcggaccagtccc

SEQ ID NO: 76255 - DNA, 70 bp, Homo sapiens
ttctcatggtgctcaaacccgctcccctcccctacgtcctgcactttctcggaccagtccccccactccc

SEQ ID NO: 76256 - DNA, 66 bp, Homo sapiens
tcaaacccgctcccctcccctacgtcctgcactttctcggaccagtccccccactcccgacccgac

SEQ ID NO: 76257 - DNA, 65 bp, Homo sapiens
ctcccctcccctacgtcctgcactttctcggaccagtccccccactcccgacccgaccccagccc

SEQ ID NO: 76258 - DNA, 68 bp, Homo sapiens
ctacgtcctgcactttctcggaccagtccccccactcccgacccgaccccagccccacctgagggtga

SEQ ID NO: 76259 - DNA, 68 bp, Homo sapiens
tttctcggaccagtccccccactcccgacccgaccccagccccacctgagggtgagcaactcctgtac

SEQ ID NO: 76260 - DNA, 67 bp, Homo sapiens
accagtccccccactcccgacccgaccccagccccacctgagggtgagcaactcctgtactgtaggg

SEQ ID NO: 76261 - DNA, 68 bp, Homo sapiens
actcccgacccgaccccagccccacctgagggtgagcaactcctgtactgtaggggaagaagtgggaa

SEQ ID NO: 76262 - DNA, 70 bp, Homo sapiens
gaccccagccccacctgagggtgagcaactcctgtactgtaggggaagaagtgggaactgaaatggtatt

SEQ ID NO: 76263 - DNA, 69 bp, Homo sapiens
ccacctgagggtgagcaactcctgtactgtaggggaagaagtgggaactgaaatggtattttgtaaaaa

SEQ ID NO: 76264 - DNA, 60 bp, Homo sapiens
ataaaaaaattaaaggttttaaagaaagaactatgaggaaaaggaaccccgtccttccca

SEQ ID NO: 76265 - DNA, 62 bp, Homo sapiens
ttaaagaaagaactatgaggaaaaggaaccccgtccttcccagccccggccaactttaaaaa

SEQ ID NO: 76266 - DNA, 63 bp, Homo sapiens
aagaactatgaggaaaaggaaccccgtccttcccagccccggccaactttaaaaaacacagac

SEQ ID NO: 76267 - DNA, 61 bp, Homo sapiens
aggaaaaggaaccccgtccttcccagccccggccaactttaaaaaacacagaccttcaccc

SEQ ID NO: 76268 - DNA, 61 bp, Homo sapiens
gtccttcccagccccggccaactttaaaaaacacagaccttcacccccacccccttttctt

SEQ ID NO: 76269 - DNA, 61 bp, Homo sapiens
tcccagccccggccaactttaaaaaacacagaccttcacccccacccccttttctttttaa

SEQ ID NO: 76270 - DNA, 60 bp, Homo sapiens
aactttaaaaaacacagaccttcacccccacccccttttctttttaagtgtgaaacaacc

SEQ ID NO: 76271 - DNA, 62 bp, Homo sapiens
aaaaacacagaccttcacccccacccccttttctttttaagtgtgaaacaacccagggccag

SEQ ID NO: 76272 - DNA, 63 bp, Homo sapiens
accttcacccccacccccttttctttttaagtgtgaaacaacccagggccagggcctcactgg

SEQ ID NO: 76273 - DNA, 64 bp, Homo sapiens
acccccttttctttttaagtgtgaaacaacccagggccagggcctcactggggcagggacaccc

SEQ ID NO: 76274 - DNA, 66 bp, Homo sapiens
tttttaagtgtgaaacaacccagggccagggcctcactggggcagggacaccccggggtgagtttc

SEQ ID NO: 76275 - DNA, 68 bp, Homo sapiens
tgaaacaacccagggccagggcctcactggggcagggacaccccggggtgagtttctctggggcttta

SEQ ID NO: 76276 - DNA, 65 bp, Homo sapiens
cctcactggggcagggacaccccggggtgagtttctctggggctttattttcgttttgttggttg

SEQ ID NO: 76277 - DNA, 62 bp, Homo sapiens
gggcagggacaccccggggtgagtttctctggggctttattttcgttttgttggttgttttt

SEQ ID NO: 76278 - DNA, 63 bp, Homo sapiens
cccggggtgagtttctctggggctttattttcgttttgttggttgttttttctccacgctggg

SEQ ID NO: 76279 - DNA, 65 bp, Homo sapiens
agtttctctggggctttattttcgttttgttggttgttttttctccacgctggggctgcggaggg

SEQ ID NO: 76280 - DNA, 70 bp, Homo sapiens
tggttgttttttctccacgctggggctgcggaggggtggggggtttacagtcccgcaccctcgcactgca

SEQ ID NO: 76281 - DNA, 72 bp, Homo sapiens
tttttctccacgctggggctgcggaggggtggggggtttacagtcccgcaccctcgcactgcactgtctctc

SEQ ID NO: 76282 - DNA, 72 bp, Homo sapiens
acgctggggctgcggaggggtggggggtttacagtcccgcaccctcgcactgcactgtctctctgccccagg

SEQ ID NO: 76283 - DNA, 72 bp, Homo sapiens
gggtttacagtcccgcaccctcgcactgcactgtctctctgccccaggggcagaggggtcttcccaacccta

SEQ ID NO: 76284 - DNA, 71 bp, Homo sapiens
tcgcactgcactgtctctctgccccaggggcagaggggtcttcccaaccctacccctattttcggtgattt

SEQ ID NO: 76285 - DNA, 67 bp, Homo sapiens
actgtctctctgccccaggggcagaggggtcttcccaaccctacccctattttcggtgatttttgtg

SEQ ID NO: 76286 - DNA, 66 bp, Homo sapiens
ccccaggggcagaggggtcttcccaaccctacccctattttcggtgatttttgtgtgagaatatta

SEQ ID NO: 76287 - DNA, 65 bp, Homo sapiens
agaggggtcttcccaaccctacccctattttcggtgatttttgtgtgagaatattaatattaaaa

SEQ ID NO: 76288 - DNA, 66 bp, Homo sapiens
tcccaaccctacccctattttcggtgatttttgtgtgagaatattaatattaaaaataaacggaga

SEQ ID NO: 76289 - DNA, 64 bp, Homo sapiens
accctacccctattttcggtgatttttgtgtgagaatattaatattaaaaataaacggagaaaa

SEQ ID NO: 76290 - DNA, 67 bp, Homo sapiens
tcggtgatttttgtgtgagaatattaatattaaaaataaacggagaaaaaaaatcctgtttcgctaa

SEQ ID NO: 76291 - DNA, 67 bp, Homo sapiens
ttgtgtgagaatattaatattaaaaataaacggagaaaaaaaatcctgtttcgctaacggctggtgg

SEQ ID NO: 76292 - DNA, 67 bp, Homo sapiens
aagaaaaaaaaaacgagatgggatttaacttcctgaaaactctttataataatgcaggacaactgta

SEQ ID NO: 76293 - DNA, 71 bp, Homo sapiens
aaaacgagatgggatttaacttcctgaaaactctttataataatgcaggacaactgtatatagcaaacgcc

SEQ ID NO: 76294 - DNA, 72 bp, Homo sapiens
gatgggatttaacttcctgaaaactctttataataatgcaggacaactgtatatagcaaacgccttcaaaat

SEQ ID NO: 76295 - DNA, 71 bp, Homo sapiens
taacttcctgaaaactctttataataatgcaggacaactgtatatagcaaacgccttcaaaatttaaactc

SEQ ID NO: 76296 - DNA, 69 bp, Homo sapiens
aaactctttataataatgcaggacaactgtatatagcaaacgccttcaaaatttaaactctttaaacat

SEQ ID NO: 76297 - DNA, 73 bp, Homo sapiens
taataatgcaggacaactgtatatagcaaacgccttcaaaatttaaactctttaaacatttaattcttcagca

SEQ ID NO: 76298 - DNA, 72 bp, Homo sapiens
caactgtatatagcaaacgccttcaaaatttaaactctttaaacatttaattcttcagcattaatacacaca

SEQ ID NO: 76299 - DNA, 71 bp, Homo sapiens
tatagcaaacgccttcaaaatttaaactctttaaacatttaattcttcagcattaatacacacaaatgcgg

SEQ ID NO: 76300 - DNA, 69 bp, Homo sapiens
gccttcaaaatttaaactctttaaacatttaattcttcagcattaatacacacaaatgcggtaacaggg

SEQ ID NO: 76301 - DNA, 68 bp, Homo sapiens
aatttaaactctttaaacatttaattcttcagcattaatacacacaaatgcggtaacaggggtcaggg

SEQ ID NO: 76302 - DNA, 69 bp, Homo sapiens
tttaaacatttaattcttcagcattaatacacacaaatgcggtaacaggggtcaggggggtggtgcggg

SEQ ID NO: 76303 - DNA, 70 bp, Homo sapiens
attcttcagcattaatacacacaaatgcggtaacaggggtcaggggggtggtgcgggggcaggtgggtta

SEQ ID NO: 76304 - DNA, 69 bp, Homo sapiens
attaatacacacaaatgcggtaacaggggtcaggggggtggtgcgggggcaggtgggttacagcctcca

SEQ ID NO: 76305 - DNA, 70 bp, Homo sapiens
acacaaatgcggtaacaggggtcaggggggtggtgcgggggcaggtgggttacagcctccactgggatca

SEQ ID NO: 76306 - DNA, 69 bp, Homo sapiens
taacaggggtcaggggggtggtgcgggggcaggtgggttacagcctccactgggatcagggtttcaaca

SEQ ID NO: 76307 - DNA, 69 bp, Homo sapiens
ggggggtggtgcgggggcaggtgggttacagcctccactgggatcagggtttcaacagtgttacttata

SEQ ID NO: 76308 - DNA, 71 bp, Homo sapiens
tggtgcgggggcaggtgggttacagcctccactgggatcagggtttcaacagtgttacttataaattatat

SEQ ID NO: 76309 - DNA, 71 bp, Homo sapiens
gtgggttacagcctccactgggatcagggtttcaacagtgttacttataaattatattacatcaattttat

SEQ ID NO: 76310 - DNA, 73 bp, Homo sapiens
acagcctccactgggatcagggtttcaacagtgttacttataaattatattacatcaattttatttactgatc

SEQ ID NO: 76311 - DNA, 75 bp, Homo sapiens
cactgggatcagggtttcaacagtgttacttataaattatattacatcaattttatttactgatctaggcagcca

SEQ ID NO: 76312 - DNA, 73 bp, Homo sapiens
gggtttcaacagtgttacttataaattatattacatcaattttatttactgatctaggcagccagagggtgga

SEQ ID NO: 76313 - DNA, 75 bp, Homo sapiens
gttacttataaattatattacatcaattttatttactgatctaggcagccagagggtggaaggatatacaatgtg

SEQ ID NO: 76314 - DNA, 75 bp, Homo sapiens
aaattatattacatcaattttatttactgatctaggcagccagagggtggaaggatatacaatgtggaggaaaca

SEQ ID NO: 76315 - DNA, 77 bp, Homo sapiens
attacatcaattttatttactgatctaggcagccagagggtggaaggatatacaatgtggaggaaacacattcatac

SEQ ID NO: 76316 - DNA, 75 bp, Homo sapiens
ttttatttactgatctaggcagccagagggtggaaggatatacaatgtggaggaaacacattcataccggggtga

SEQ ID NO: 76317 - DNA, 74 bp, Homo sapiens
agagggtggaaggatatacaatgtggaggaaacacattcataccggggtgaggagtgctggcgggagacacggc

SEQ ID NO: 76318 - DNA, 74 bp, Homo sapiens
aaggatatacaatgtggaggaaacacattcataccggggtgaggagtgctggcgggagacacggctctttaaca

SEQ ID NO: 76319 - DNA, 74 bp, Homo sapiens
tacaatgtggaggaaacacattcataccggggtgaggagtgctggcgggagacacggctctttaacatgaaaaa

SEQ ID NO: 76320 - DNA, 72 bp, Homo sapiens
aggaaacacattcataccggggtgaggagtgctggcgggagacacggctctttaacatgaaaaatgtataaa

SEQ ID NO: 76321 - DNA, 71 bp, Homo sapiens
ggcgggagacacggctctttaacatgaaaaatgtataaagtatttagcaaaagttacagaaaacagatcaa

SEQ ID NO: 76322 - DNA, 71 bp, Homo sapiens
cacggctctttaacatgaaaaatgtataaagtatttagcaaaagttacagaaaacagatcaaacaagcaag

SEQ ID NO: 76323 - DNA, 69 bp, Homo sapiens
acatgaaaaatgtataaagtatttagcaaaagttacagaaaacagatcaaacaagcaagtttattttgt

SEQ ID NO: 76324 - DNA, 68 bp, Homo sapiens
gtataaagtatttagcaaaagttacagaaaacagatcaaacaagcaagtttattttgttagaaaattc

SEQ ID NO: 76325 - DNA, 69 bp, Homo sapiens
gtatttagcaaaagttacagaaaacagatcaaacaagcaagtttattttgttagaaaattccactttca

SEQ ID NO: 76326 - DNA, 69 bp, Homo sapiens
gttacagaaaacagatcaaacaagcaagtttattttgttagaaaattccactttcatagggtttgccga

SEQ ID NO: 76327 - DNA, 70 bp, Homo sapiens
aaaacagatcaaacaagcaagtttattttgttagaaaattccactttcatagggtttgccgatgtgctcg

SEQ ID NO: 76328 - DNA, 71 bp, Homo sapiens
aaacaagcaagtttattttgttagaaaattccactttcatagggtttgccgatgtgctcgtgtctgtgaag

SEQ ID NO: 76329 - DNA, 70 bp, Homo sapiens
agtttattttgttagaaaattccactttcatagggtttgccgatgtgctcgtgtctgtgaaggggttgct

SEQ ID NO: 76330 - DNA, 73 bp, Homo sapiens
ttagaaaattccactttcatagggtttgccgatgtgctcgtgtctgtgaaggggttgcttccggtcatctcct

SEQ ID NO: 76331 - DNA, 72 bp, Homo sapiens
atgtgctcgtgtctgtgaaggggttgcttccggtcatctccttcctaacggaagggaagggatgctaagttg

SEQ ID NO: 76332 - DNA, 69 bp, Homo sapiens
gttgcttccggtcatctccttcctaacggaagggaagggatgctaagttggggcccctgtcactaagga

SEQ ID NO: 76333 - DNA, 69 bp, Homo sapiens
ttcctaacggaagggaagggatgctaagttggggcccctgtcactaaggatggctggcgtccctttgaa

SEQ ID NO: 76334 - DNA, 73 bp, Homo sapiens
agggatgctaagttggggcccctgtcactaaggatggctggcgtccctttgaatgtctgtccctgggtccaca

SEQ ID NO: 76335 - DNA, 75 bp, Homo sapiens
gggcccctgtcactaaggatggctggcgtccctttgaatgtctgtccctgggtccacacagctgcctggaaccca

SEQ ID NO: 76336 - DNA, 76 bp, Homo sapiens
tcactaaggatggctggcgtccctttgaatgtctgtccctgggtccacacagctgcctggaacccacgactcccga

SEQ ID NO: 76337 - DNA, 75 bp, Homo sapiens
aggatggctggcgtccctttgaatgtctgtccctgggtccacacagctgcctggaacccacgactcccgagagcc

SEQ ID NO: 76338 - DNA, 78 bp, Homo sapiens
tccctttgaatgtctgtccctgggtccacacagctgcctggaacccacgactcccgagagcccgtctgctgcaggtga

SEQ ID NO: 76339 - DNA, 79 bp, Homo sapiens
aatgtctgtccctgggtccacacagctgcctggaacccacgactcccgagagcccgtctgctgcaggtgatgctggaag

SEQ ID NO: 76340 - DNA, 78 bp, Homo sapiens
agctgcctggaacccacgactcccgagagcccgtctgctgcaggtgatgctggaagggaagcgcccccacttgacaga

SEQ ID NO: 76341 - DNA, 80 bp, Homo sapiens
ctggaacccacgactcccgagagcccgtctgctgcaggtgatgctggaagggaagcgcccccacttgacagatgagtgca

SEQ ID NO: 76342 - DNA, 80 bp, Homo sapiens
tcccgagagcccgtctgctgcaggtgatgctggaagggaagcgcccccacttgacagatgagtgcacggaggtcccgaca

SEQ ID NO: 76343 - DNA, 80 bp, Homo sapiens
cgtctgctgcaggtgatgctggaagggaagcgcccccacttgacagatgagtgcacggaggtcccgacaggggatgtgac

SEQ ID NO: 76344 - DNA, 75 bp, Homo sapiens
aggtgatgctggaagggaagcgcccccacttgacagatgagtgcacggaggtcccgacaggggatgtgacttaac

SEQ ID NO: 76345 - DNA, 73 bp, Homo sapiens
tggaagggaagcgcccccacttgacagatgagtgcacggaggtcccgacaggggatgtgacttaacttcaggt

SEQ ID NO: 76346 - DNA, 72 bp, Homo sapiens
aggtcccgacaggggatgtgacttaacttcaggttatgggacaaaggaggccgcagagcagggccagtcctg

SEQ ID NO: 76347 - DNA, 77 bp, Homo sapiens
gggatgtgacttaacttcaggttatgggacaaaggaggccgcagagcagggccagtcctgtgctctccccctgcata

SEQ ID NO: 76348 - DNA, 77 bp, Homo sapiens
ttaacttcaggttatgggacaaaggaggccgcagagcagggccagtcctgtgctctccccctgcatagcaggctttc

SEQ ID NO: 76349 - DNA, 78 bp, Homo sapiens
ttcaggttatgggacaaaggaggccgcagagcagggccagtcctgtgctctccccctgcatagcaggctttccctcta

SEQ ID NO: 76350 - DNA, 77 bp, Homo sapiens
aggccgcagagcagggccagtcctgtgctctccccctgcatagcaggctttccctctaggtctcccagtcaccccac

SEQ ID NO: 76351 - DNA, 74 bp, Homo sapiens
agggccagtcctgtgctctccccctgcatagcaggctttccctctaggtctcccagtcaccccaccccgagaga

SEQ ID NO: 76352 - DNA, 76 bp, Homo sapiens
tgtgctctccccctgcatagcaggctttccctctaggtctcccagtcaccccaccccgagagagcacccacgtgcc

SEQ ID NO: 76353 - DNA, 71 bp, Homo sapiens
aggctttccctctaggtctcccagtcaccccaccccgagagagcacccacgtgccctgaccttacattcca

SEQ ID NO: 76354 - DNA, 75 bp, Homo sapiens
tctaggtctcccagtcaccccaccccgagagagcacccacgtgccctgaccttacattccactgcaatcccacta

SEQ ID NO: 76355 - DNA, 72 bp, Homo sapiens
cagtcaccccaccccgagagagcacccacgtgccctgaccttacattccactgcaatcccactaaagtttcc

SEQ ID NO: 76356 - DNA, 71 bp, Homo sapiens
accccgagagagcacccacgtgccctgaccttacattccactgcaatcccactaaagtttccctcaaacac

SEQ ID NO: 76357 - DNA, 72 bp, Homo sapiens
agagagcacccacgtgccctgaccttacattccactgcaatcccactaaagtttccctcaaacaccaaggaa

SEQ ID NO: 76358 - DNA, 71 bp, Homo sapiens
acgtgccctgaccttacattccactgcaatcccactaaagtttccctcaaacaccaaggaacagtcctgaa

SEQ ID NO: 76359 - DNA, 74 bp, Homo sapiens
ttacattccactgcaatcccactaaagtttccctcaaacaccaaggaacagtcctgaacaccacacgcaatctc

SEQ ID NO: 76360 - DNA, 73 bp, Homo sapiens
ttccactgcaatcccactaaagtttccctcaaacaccaaggaacagtcctgaacaccacacgcaatctccaaa

SEQ ID NO: 76361 - DNA, 72 bp, Homo sapiens
atcccactaaagtttccctcaaacaccaaggaacagtcctgaacaccacacgcaatctccaaaggccatcgc

SEQ ID NO: 76362 - DNA, 72 bp, Homo sapiens
agtttccctcaaacaccaaggaacagtcctgaacaccacacgcaatctccaaaggccatcgccccaacctca

SEQ ID NO: 76363 - DNA, 71 bp, Homo sapiens
aacaccacacgcaatctccaaaggccatcgccccaacctcaccccacccccagagacacctcccaggaagc

SEQ ID NO: 76364 - DNA, 71 bp, Homo sapiens
aaaggccatcgccccaacctcaccccacccccagagacacctcccaggaagccctcctgacagccatgccc

SEQ ID NO: 76365 - DNA, 72 bp, Homo sapiens
aacctcaccccacccccagagacacctcccaggaagccctcctgacagccatgccccagcatttagaacgtg

SEQ ID NO: 76366 - DNA, 74 bp, Homo sapiens
cacccccagagacacctcccaggaagccctcctgacagccatgccccagcatttagaacgtggggagaagcgaa

SEQ ID NO: 76367 - DNA, 72 bp, Homo sapiens
gacacctcccaggaagccctcctgacagccatgccccagcatttagaacgtggggagaagcgaattggtttt

SEQ ID NO: 76368 - DNA, 73 bp, Homo sapiens
aggaagccctcctgacagccatgccccagcatttagaacgtggggagaagcgaattggtttttgccctctgtc

SEQ ID NO: 76369 - DNA, 78 bp, Homo sapiens
tcctgacagccatgccccagcatttagaacgtggggagaagcgaattggtttttgccctctgtctgattctcgctcta

SEQ ID NO: 76370 - DNA, 77 bp, Homo sapiens
atgccccagcatttagaacgtggggagaagcgaattggtttttgccctctgtctgattctcgctctaacctgctgca

SEQ ID NO: 76371 - DNA, 74 bp, Homo sapiens
atttagaacgtggggagaagcgaattggtttttgccctctgtctgattctcgctctaacctgctgcaatgggaa

SEQ ID NO: 76372 - DNA, 75 bp, Homo sapiens
aacgtggggagaagcgaattggtttttgccctctgtctgattctcgctctaacctgctgcaatgggaattgcttc

SEQ ID NO: 76373 - DNA, 77 bp, Homo sapiens
agaagcgaattggtttttgccctctgtctgattctcgctctaacctgctgcaatgggaattgcttcttcacctccag

SEQ ID NO: 76374 - DNA, 78 bp, Homo sapiens
tttttgccctctgtctgattctcgctctaacctgctgcaatgggaattgcttcttcacctccaggaaagcctcaacaa

SEQ ID NO: 76375 - DNA, 75 bp, Homo sapiens
attctcgctctaacctgctgcaatgggaattgcttcttcacctccaggaaagcctcaacaaaaatactcctgagg

SEQ ID NO: 76376 - DNA, 74 bp, Homo sapiens
taacctgctgcaatgggaattgcttcttcacctccaggaaagcctcaacaaaaatactcctgagggggagacaa

SEQ ID NO: 76377 - DNA, 71 bp, Homo sapiens
aatgggaattgcttcttcacctccaggaaagcctcaacaaaaatactcctgagggggagacaagagtcctc

SEQ ID NO: 76378 - DNA, 70 bp, Homo sapiens
agcctcaacaaaaatactcctgagggggagacaagagtcctccccggcaaatttcaacccagcagagtcc

SEQ ID NO: 76379 - DNA, 73 bp, Homo sapiens
gggagacaagagtcctccccggcaaatttcaacccagcagagtcctggcagcctcttcggctccctaccttga

SEQ ID NO: 76380 - DNA, 72 bp, Homo sapiens
acaagagtcctccccggcaaatttcaacccagcagagtcctggcagcctcttcggctccctaccttgaggcc

SEQ ID NO: 76381 - DNA, 72 bp, Homo sapiens
ggcaaatttcaacccagcagagtcctggcagcctcttcggctccctaccttgaggccccgggggctcaggct

SEQ ID NO: 76382 - DNA, 72 bp, Homo sapiens
atttcaacccagcagagtcctggcagcctcttcggctccctaccttgaggccccgggggctcaggcttcctg

SEQ ID NO: 76383 - DNA, 72 bp, Homo sapiens
agagtcctggcagcctcttcggctccctaccttgaggccccgggggctcaggcttcctggccctaatcttca

SEQ ID NO: 76384 - DNA, 70 bp, Homo sapiens
agcctcttcggctccctaccttgaggccccgggggctcaggcttcctggccctaatcttcacctggcctg

SEQ ID NO: 76385 - DNA, 71 bp, Homo sapiens
ctccctaccttgaggccccgggggctcaggcttcctggccctaatcttcacctggcctggatccagaaatg

SEQ ID NO: 76386 - DNA, 76 bp, Homo sapiens
tgaggccccgggggctcaggcttcctggccctaatcttcacctggcctggatccagaaatgtctctggttcgcata

SEQ ID NO: 76387 - DNA, 76 bp, Homo sapiens
ggggctcaggcttcctggccctaatcttcacctggcctggatccagaaatgtctctggttcgcatagagaggtacc

SEQ ID NO: 76388 - DNA, 76 bp, Homo sapiens
ctaatcttcacctggcctggatccagaaatgtctctggttcgcatagagaggtacccaactggtctcgggactcac

SEQ ID NO: 76389 - DNA, 76 bp, Homo sapiens
ttcacctggcctggatccagaaatgtctctggttcgcatagagaggtacccaactggtctcgggactcacctttca

SEQ ID NO: 76390 - DNA, 76 bp, Homo sapiens
cctggatccagaaatgtctctggttcgcatagagaggtacccaactggtctcgggactcacctttcactgagcagg

SEQ ID NO: 76391 - DNA, 76 bp, Homo sapiens
aatgtctctggttcgcatagagaggtacccaactggtctcgggactcacctttcactgagcagggggcatgaacaa

SEQ ID NO: 76392 - DNA, 77 bp, Homo sapiens
gttcgcatagagaggtacccaactggtctcgggactcacctttcactgagcagggggcatgaacaagacacagctta

SEQ ID NO: 76393 - DNA, 75 bp, Homo sapiens
aactggtctcgggactcacctttcactgagcagggggcatgaacaagacacagcttagtggagtgtttacctcag

SEQ ID NO: 76394 - DNA, 78 bp, Homo sapiens
ctttcactgagcagggggcatgaacaagacacagcttagtggagtgtttacctcaggggtcacactcagcctggtctg

SEQ ID NO: 76395 - DNA, 75 bp, Homo sapiens
ggggcatgaacaagacacagcttagtggagtgtttacctcaggggtcacactcagcctggtctggccttaactgg

SEQ ID NO: 76396 - DNA, 73 bp, Homo sapiens
acagcttagtggagtgtttacctcaggggtcacactcagcctggtctggccttaactgggtgtggtcctgtcc

SEQ ID NO: 76397 - DNA, 74 bp, Homo sapiens
agtgtttacctcaggggtcacactcagcctggtctggccttaactgggtgtggtcctgtccctgccaccatgta

SEQ ID NO: 76398 - DNA, 76 bp, Homo sapiens
acactcagcctggtctggccttaactgggtgtggtcctgtccctgccaccatgtaccaccatccagtggggtgcag

SEQ ID NO: 76399 - DNA, 74 bp, Homo sapiens
cctggtctggccttaactgggtgtggtcctgtccctgccaccatgtaccaccatccagtggggtgcaggtacag

SEQ ID NO: 76400 - DNA, 79 bp, Homo sapiens
taactgggtgtggtcctgtccctgccaccatgtaccaccatccagtggggtgcaggtacaggccaggctgtgtgatcac

SEQ ID NO: 76401 - DNA, 82 bp, Homo sapiens
tgtggtcctgtccctgccaccatgtaccaccatccagtggggtgcaggtacaggccaggctgtgtgatcaccagctaggcaa

SEQ ID NO: 76402 - DNA, 85 bp, Homo sapiens
tgccaccatgtaccaccatccagtggggtgcaggtacaggccaggctgtgtgatcaccagctaggcaaggctccagctgcgacaa

SEQ ID NO: 76403 - DNA, 82 bp, Homo sapiens
atgtaccaccatccagtggggtgcaggtacaggccaggctgtgtgatcaccagctaggcaaggctccagctgcgacaaggac

SEQ ID NO: 76404 - DNA, 83 bp, Homo sapiens
atccagtggggtgcaggtacaggccaggctgtgtgatcaccagctaggcaaggctccagctgcgacaaggactccatcttcac

SEQ ID NO: 76405 - DNA, 84 bp, Homo sapiens
caggtacaggccaggctgtgtgatcaccagctaggcaaggctccagctgcgacaaggactccatcttcacgcctgtcctggctc

SEQ ID NO: 76406 - DNA, 83 bp, Homo sapiens
acaggccaggctgtgtgatcaccagctaggcaaggctccagctgcgacaaggactccatcttcacgcctgtcctggctcctgg

SEQ ID NO: 76407 - DNA, 83 bp, Homo sapiens
tgtgatcaccagctaggcaaggctccagctgcgacaaggactccatcttcacgcctgtcctggctcctggggagtagactcca

SEQ ID NO: 76408 - DNA, 80 bp, Homo sapiens
agctaggcaaggctccagctgcgacaaggactccatcttcacgcctgtcctggctcctggggagtagactccagaacata

SEQ ID NO: 76409 - DNA, 80 bp, Homo sapiens
ctccagctgcgacaaggactccatcttcacgcctgtcctggctcctggggagtagactccagaacatactatcaaagatc

SEQ ID NO: 76410 - DNA, 78 bp, Homo sapiens
gctcctggggagtagactccagaacatactatcaaagatcgacgaatgagatccaaacggtcattacttgcactgtct

SEQ ID NO: 76411 - DNA, 73 bp, Homo sapiens
atactatcaaagatcgacgaatgagatccaaacggtcattacttgcactgtctttggggggtcctaggagaaa

SEQ ID NO: 76412 - DNA, 72 bp, Homo sapiens
agatcgacgaatgagatccaaacggtcattacttgcactgtctttggggggtcctaggagaaactacctcat

SEQ ID NO: 76413 - DNA, 72 bp, Homo sapiens
atccaaacggtcattacttgcactgtctttggggggtcctaggagaaactacctcattcttaacagctcata

SEQ ID NO: 76414 - DNA, 69 bp, Homo sapiens
acttgcactgtctttggggggtcctaggagaaactacctcattcttaacagctcataaaactcttaatt

SEQ ID NO: 76415 - DNA, 68 bp, Homo sapiens
tttggggggtcctaggagaaactacctcattcttaacagctcataaaactcttaattttagctccatt

SEQ ID NO: 76416 - DNA, 72 bp, Homo sapiens
gtcctaggagaaactacctcattcttaacagctcataaaactcttaattttagctccatttgaatctaaatg

SEQ ID NO: 76417 - DNA, 70 bp, Homo sapiens
acctcattcttaacagctcataaaactcttaattttagctccatttgaatctaaatggaaaagtaccacg

SEQ ID NO: 76418 - DNA, 75 bp, Homo sapiens
tcttaacagctcataaaactcttaattttagctccatttgaatctaaatggaaaagtaccacggcatctctctca

SEQ ID NO: 76419 - DNA, 71 bp, Homo sapiens
ataaaactcttaattttagctccatttgaatctaaatggaaaagtaccacggcatctctctcaccaggact

SEQ ID NO: 76420 - DNA, 75 bp, Homo sapiens
ttaattttagctccatttgaatctaaatggaaaagtaccacggcatctctctcaccaggacttgaggcaattcta

SEQ ID NO: 76421 - DNA, 83 bp, Homo sapiens
tccatttgaatctaaatggaaaagtaccacggcatctctctcaccaggacttgaggcaattctatgcacgattgtgcagatga

SEQ ID NO: 76422 - DNA, 83 bp, Homo sapiens
aatctaaatggaaaagtaccacggcatctctctcaccaggacttgaggcaattctatgcacgattgtgcagatgagagccaga

SEQ ID NO: 76423 - DNA, 86 bp, Homo sapiens
aaaagtaccacggcatctctctcaccaggacttgaggcaattctatgcacgattgtgcagatgagagccagacacagcatgaacac

SEQ ID NO: 76424 - DNA, 91 bp, Homo sapiens
gcatctctctcaccaggacttgaggcaattctatgcacgattgtgcagatgagagccagacacagcatgaacacgtgtacagggtacatca

SEQ ID NO: 76425 - DNA, 87 bp, Homo sapiens
acttgaggcaattctatgcacgattgtgcagatgagagccagacacagcatgaacacgtgtacagggtacatcattggaaatgagaa

SEQ ID NO: 76426 - DNA, 84 bp, Homo sapiens
aattctatgcacgattgtgcagatgagagccagacacagcatgaacacgtgtacagggtacatcattggaaatgagaaagggag

SEQ ID NO: 76427 - DNA, 82 bp, Homo sapiens
acgattgtgcagatgagagccagacacagcatgaacacgtgtacagggtacatcattggaaatgagaaagggaggaggtaca

SEQ ID NO: 76428 - DNA, 79 bp, Homo sapiens
acacagcatgaacacgtgtacagggtacatcattggaaatgagaaagggaggaggtacatgcagttgccggtggcctga

SEQ ID NO: 76429 - DNA, 77 bp, Homo sapiens
atgaacacgtgtacagggtacatcattggaaatgagaaagggaggaggtacatgcagttgccggtggcctgagacac

SEQ ID NO: 76430 - DNA, 77 bp, Homo sapiens
agggtacatcattggaaatgagaaagggaggaggtacatgcagttgccggtggcctgagacactcatctagaacaaa

SEQ ID NO: 76431 - DNA, 78 bp, Homo sapiens
atcattggaaatgagaaagggaggaggtacatgcagttgccggtggcctgagacactcatctagaacaaacaccctca

SEQ ID NO: 76432 - DNA, 79 bp, Homo sapiens
aaatgagaaagggaggaggtacatgcagttgccggtggcctgagacactcatctagaacaaacaccctcagcttgcaga

SEQ ID NO: 76433 - DNA, 84 bp, Homo sapiens
gaggtacatgcagttgccggtggcctgagacactcatctagaacaaacaccctcagcttgcagatgaagcaacagatccaggaa

SEQ ID NO: 76434 - DNA, 87 bp, Homo sapiens
atgcagttgccggtggcctgagacactcatctagaacaaacaccctcagcttgcagatgaagcaacagatccaggaaagcatcatga

SEQ ID NO: 76435 - DNA, 85 bp, Homo sapiens
agacactcatctagaacaaacaccctcagcttgcagatgaagcaacagatccaggaaagcatcatgatgagccccagggccagcc

SEQ ID NO: 76436 - DNA, 83 bp, Homo sapiens
atctagaacaaacaccctcagcttgcagatgaagcaacagatccaggaaagcatcatgatgagccccagggccagccccagcc

SEQ ID NO: 76437 - DNA, 83 bp, Homo sapiens
aacaccctcagcttgcagatgaagcaacagatccaggaaagcatcatgatgagccccagggccagccccagccttcttgtcca

SEQ ID NO: 76438 - DNA, 88 bp, Homo sapiens
cttgcagatgaagcaacagatccaggaaagcatcatgatgagccccagggccagccccagccttcttgtccatgctgcttctgctcgc

SEQ ID NO: 76439 - DNA, 82 bp, Homo sapiens
aacagatccaggaaagcatcatgatgagccccagggccagccccagccttcttgtccatgctgcttctgctcgcctttcaaa

SEQ ID NO: 76440 - DNA, 81 bp, Homo sapiens
aggaaagcatcatgatgagccccagggccagccccagccttcttgtccatgctgcttctgctcgcctttcaaagcctccaa

SEQ ID NO: 76441 - DNA, 79 bp, Homo sapiens
atgatgagccccagggccagccccagccttcttgtccatgctgcttctgctcgcctttcaaagcctccaacgcccaata

SEQ ID NO: 76442 - DNA, 78 bp, Homo sapiens
ccagggccagccccagccttcttgtccatgctgcttctgctcgcctttcaaagcctccaacgcccaatacatagccaa

SEQ ID NO: 76443 - DNA, 76 bp, Homo sapiens
ccccagccttcttgtccatgctgcttctgctcgcctttcaaagcctccaacgcccaatacatagccaaggaccgtg

SEQ ID NO: 76444 - DNA, 79 bp, Homo sapiens
cttcttgtccatgctgcttctgctcgcctttcaaagcctccaacgcccaatacatagccaaggaccgtgtgacactgaa

SEQ ID NO: 76445 - DNA, 78 bp, Homo sapiens
atgctgcttctgctcgcctttcaaagcctccaacgcccaatacatagccaaggaccgtgtgacactgaagcctgggtc

SEQ ID NO: 76446 - DNA, 75 bp, Homo sapiens
tttcaaagcctccaacgcccaatacatagccaaggaccgtgtgacactgaagcctgggtcccagaagggagcaga

SEQ ID NO: 76447 - DNA, 81 bp, Homo sapiens
aacgcccaatacatagccaaggaccgtgtgacactgaagcctgggtcccagaagggagcagatctgctggctgagatgcaa

SEQ ID NO: 76448 - DNA, 82 bp, Homo sapiens
aatacatagccaaggaccgtgtgacactgaagcctgggtcccagaagggagcagatctgctggctgagatgcaagcttcagg

SEQ ID NO: 76449 - DNA, 88 bp, Homo sapiens
actgaagcctgggtcccagaagggagcagatctgctggctgagatgcaagcttcaggttgcagcagacgtgagcagcaattgagcacc

SEQ ID NO: 76450 - DNA, 88 bp, Homo sapiens
tgggtcccagaagggagcagatctgctggctgagatgcaagcttcaggttgcagcagacgtgagcagcaattgagcacccatccgtcc

SEQ ID NO: 76451 - DNA, 85 bp, Homo sapiens
agatctgctggctgagatgcaagcttcaggttgcagcagacgtgagcagcaattgagcacccatccgtcccttcccctcccatcc

SEQ ID NO: 76452 - DNA, 82 bp, Homo sapiens
tgagatgcaagcttcaggttgcagcagacgtgagcagcaattgagcacccatccgtcccttcccctcccatccctggattct

SEQ ID NO: 76453 - DNA, 77 bp, Homo sapiens
cagcagacgtgagcagcaattgagcacccatccgtcccttcccctcccatccctggattctttctgcactaccaaaa

SEQ ID NO: 76454 - DNA, 73 bp, Homo sapiens
acgtgagcagcaattgagcacccatccgtcccttcccctcccatccctggattctttctgcactaccaaaaac

SEQ ID NO: 76455 - DNA, 69 bp, Homo sapiens
aattgagcacccatccgtcccttcccctcccatccctggattctttctgcactaccaaaaacccaccac

SEQ ID NO: 76456 - DNA, 67 bp, Homo sapiens
atccgtcccttcccctcccatccctggattctttctgcactaccaaaaacccaccacgcgccaaaag

SEQ ID NO: 76457 - DNA, 71 bp, Homo sapiens
ttcccctcccatccctggattctttctgcactaccaaaaacccaccacgcgccaaaaggcgagtgtgagcc

SEQ ID NO: 76458 - DNA, 73 bp, Homo sapiens
attctttctgcactaccaaaaacccaccacgcgccaaaaggcgagtgtgagccctaagaacagcttgtgggca

SEQ ID NO: 76459 - DNA, 73 bp, Homo sapiens
actaccaaaaacccaccacgcgccaaaaggcgagtgtgagccctaagaacagcttgtgggcacagctggcatt

SEQ ID NO: 76460 - DNA, 75 bp, Homo sapiens
aaacccaccacgcgccaaaaggcgagtgtgagccctaagaacagcttgtgggcacagctggcatttggaggagga

SEQ ID NO: 76461 - DNA, 79 bp, Homo sapiens
taagaacagcttgtgggcacagctggcatttggaggaggagcctggggaactgaaggaagcagcaagctggaagtggtc

SEQ ID NO: 76462 - DNA, 79 bp, Homo sapiens
ttgtgggcacagctggcatttggaggaggagcctggggaactgaaggaagcagcaagctggaagtggtcgtgcaaacaa

SEQ ID NO: 76463 - DNA, 77 bp, Homo sapiens
agctggcatttggaggaggagcctggggaactgaaggaagcagcaagctggaagtggtcgtgcaaacaagttgaaga

SEQ ID NO: 76464 - DNA, 73 bp, Homo sapiens
atttggaggaggagcctggggaactgaaggaagcagcaagctggaagtggtcgtgcaaacaagttgaagaccc

SEQ ID NO: 76465 - DNA, 73 bp, Homo sapiens
gcctggggaactgaaggaagcagcaagctggaagtggtcgtgcaaacaagttgaagaccctgggccaagaact

SEQ ID NO: 76466 - DNA, 73 bp, Homo sapiens
aactgaaggaagcagcaagctggaagtggtcgtgcaaacaagttgaagaccctgggccaagaacttccagggc

SEQ ID NO: 76467 - DNA, 74 bp, Homo sapiens
aagcagcaagctggaagtggtcgtgcaaacaagttgaagaccctgggccaagaacttccagggcgaaaggctca

SEQ ID NO: 76468 - DNA, 70 bp, Homo sapiens
gaagtggtcgtgcaaacaagttgaagaccctgggccaagaacttccagggcgaaaggctcagtgtaaaaa

SEQ ID NO: 76469 - DNA, 69 bp, Homo sapiens
ggtcgtgcaaacaagttgaagaccctgggccaagaacttccagggcgaaaggctcagtgtaaaaataaa

SEQ ID NO: 76470 - DNA, 70 bp, Homo sapiens
acaagttgaagaccctgggccaagaacttccagggcgaaaggctcagtgtaaaaataaagaagcagagta

SEQ ID NO: 76471 - DNA, 74 bp, Homo sapiens
tgggccaagaacttccagggcgaaaggctcagtgtaaaaataaagaagcagagtagtacgcccatgcaatgaaa

SEQ ID NO: 76472 - DNA, 73 bp, Homo sapiens
cgaaaggctcagtgtaaaaataaagaagcagagtagtacgcccatgcaatgaaatacttcccggcaaggagaa

SEQ ID NO: 76473 - DNA, 71 bp, Homo sapiens
agtgtaaaaataaagaagcagagtagtacgcccatgcaatgaaatacttcccggcaaggagaaggaacaaa

SEQ ID NO: 76474 - DNA, 71 bp, Homo sapiens
aaaaataaagaagcagagtagtacgcccatgcaatgaaatacttcccggcaaggagaaggaacaaaccaca

SEQ ID NO: 76475 - DNA, 79 bp, Homo sapiens
aagcagagtagtacgcccatgcaatgaaatacttcccggcaaggagaaggaacaaaccacacgcacacatcatgaatga

SEQ ID NO: 76476 - DNA, 77 bp, Homo sapiens
aatgaaatacttcccggcaaggagaaggaacaaaccacacgcacacatcatgaatgactcaaaagcattaagctgag

SEQ ID NO: 76477 - DNA, 79 bp, Homo sapiens
aggagaaggaacaaaccacacgcacacatcatgaatgactcaaaagcattaagctgagggaaagatgccagactcaaaa

SEQ ID NO: 76478 - DNA, 83 bp, Homo sapiens
acacatcatgaatgactcaaaagcattaagctgagggaaagatgccagactcaaaaggcgacatcagtgtgactccatttata

SEQ ID NO: 76479 - DNA, 82 bp, Homo sapiens
atgaatgactcaaaagcattaagctgagggaaagatgccagactcaaaaggcgacatcagtgtgactccatttatatgacat

SEQ ID NO: 76480 - DNA, 79 bp, Homo sapiens
aaaagcattaagctgagggaaagatgccagactcaaaaggcgacatcagtgtgactccatttatatgacattctagaaa

SEQ ID NO: 76481 - DNA, 76 bp, Homo sapiens
atatgacattctagaaaaggcaaaattataggatcagataatcaatcagggttgccagggaaagagggcaggagaa

SEQ ID NO: 76482 - DNA, 72 bp, Homo sapiens
tagaaaaggcaaaattataggatcagataatcaatcagggttgccagggaaagagggcaggagaagggaatt

SEQ ID NO: 76483 - DNA, 70 bp, Homo sapiens
aaggcaaaattataggatcagataatcaatcagggttgccagggaaagagggcaggagaagggaattttt

SEQ ID NO: 76484 - DNA, 69 bp, Homo sapiens
gatcagataatcaatcagggttgccagggaaagagggcaggagaagggaattttttggagggttaaaaa

SEQ ID NO: 76485 - DNA, 66 bp, Homo sapiens
ataatcaatcagggttgccagggaaagagggcaggagaagggaattttttggagggttaaaaacag

SEQ ID NO: 76486 - DNA, 68 bp, Homo sapiens
aaagagggcaggagaagggaattttttggagggttaaaaacaggttgatcttggtgatggtcacaaga

SEQ ID NO: 76487 - DNA, 68 bp, Homo sapiens
gagaagggaattttttggagggttaaaaacaggttgatcttggtgatggtcacaagacactaaatttg

SEQ ID NO: 76488 - DNA, 68 bp, Homo sapiens
gggaattttttggagggttaaaaacaggttgatcttggtgatggtcacaagacactaaatttgtcaaa

SEQ ID NO: 76489 - DNA, 74 bp, Homo sapiens
aaaacaggttgatcttggtgatggtcacaagacactaaatttgtcaaaattcacagagctgtatatttccaaag

SEQ ID NO: 76490 - DNA, 75 bp, Homo sapiens
gatcttggtgatggtcacaagacactaaatttgtcaaaattcacagagctgtatatttccaaagggtgaatttta

SEQ ID NO: 76491 - DNA, 76 bp, Homo sapiens
gtcacaagacactaaatttgtcaaaattcacagagctgtatatttccaaagggtgaattttactggatgtcaatca

SEQ ID NO: 76492 - DNA, 75 bp, Homo sapiens
ttgtcaaaattcacagagctgtatatttccaaagggtgaattttactggatgtcaatcatacctcaataaacctg

SEQ ID NO: 76493 - DNA, 71 bp, Homo sapiens
agagctgtatatttccaaagggtgaattttactggatgtcaatcatacctcaataaacctgggaaaaggtg

SEQ ID NO: 76494 - DNA, 71 bp, Homo sapiens
tatatttccaaagggtgaattttactggatgtcaatcatacctcaataaacctgggaaaaggtggtggcga

SEQ ID NO: 76495 - DNA, 71 bp, Homo sapiens
agggtgaattttactggatgtcaatcatacctcaataaacctgggaaaaggtggtggcgatgggccttgta

SEQ ID NO: 76496 - DNA, 73 bp, Homo sapiens
ttttactggatgtcaatcatacctcaataaacctgggaaaaggtggtggcgatgggccttgtagggatggcaa

SEQ ID NO: 76497 - DNA, 72 bp, Homo sapiens
gtcaatcatacctcaataaacctgggaaaaggtggtggcgatgggccttgtagggatggcaaggattatggg

SEQ ID NO: 76498 - DNA, 70 bp, Homo sapiens
aataaacctgggaaaaggtggtggcgatgggccttgtagggatggcaaggattatggggataagacgatg

SEQ ID NO: 76499 - DNA, 73 bp, Homo sapiens
ggaaaaggtggtggcgatgggccttgtagggatggcaaggattatggggataagacgatgtccaggctacgtg

SEQ ID NO: 76500 - DNA, 72 bp, Homo sapiens
aggtggtggcgatgggccttgtagggatggcaaggattatggggataagacgatgtccaggctacgtggggg

SEQ ID NO: 76501 - DNA, 73 bp, Homo sapiens
aggattatggggataagacgatgtccaggctacgtgggggggcagctgatctgtaccccacttaacattagaa

SEQ ID NO: 76502 - DNA, 76 bp, Homo sapiens
tacgtgggggggcagctgatctgtaccccacttaacattagaagtgctctctccgacctacacaaggaatgcatct

SEQ ID NO: 76503 - DNA, 78 bp, Homo sapiens
agctgatctgtaccccacttaacattagaagtgctctctccgacctacacaaggaatgcatcttgagccttctgttta

SEQ ID NO: 76504 - DNA, 77 bp, Homo sapiens
ttaacattagaagtgctctctccgacctacacaaggaatgcatcttgagccttctgtttaaacactccttgtcaaga

SEQ ID NO: 76505 - DNA, 79 bp, Homo sapiens
tagaagtgctctctccgacctacacaaggaatgcatcttgagccttctgtttaaacactccttgtcaagactacctgca

SEQ ID NO: 76506 - DNA, 76 bp, Homo sapiens
cgacctacacaaggaatgcatcttgagccttctgtttaaacactccttgtcaagactacctgcagctggaagtaaa

SEQ ID NO: 76507 - DNA, 75 bp, Homo sapiens
aaggaatgcatcttgagccttctgtttaaacactccttgtcaagactacctgcagctggaagtaaaatcacctaa

SEQ ID NO: 76508 - DNA, 74 bp, Homo sapiens
tcttgagccttctgtttaaacactccttgtcaagactacctgcagctggaagtaaaatcacctaaacaagccaa

SEQ ID NO: 76509 - DNA, 74 bp, Homo sapiens
ttctgtttaaacactccttgtcaagactacctgcagctggaagtaaaatcacctaaacaagccaaggtcgctga

SEQ ID NO: 76510 - DNA, 74 bp, Homo sapiens
ttaaacactccttgtcaagactacctgcagctggaagtaaaatcacctaaacaagccaaggtcgctgatgtcct

SEQ ID NO: 76511 - DNA, 76 bp, Homo sapiens
cttgtcaagactacctgcagctggaagtaaaatcacctaaacaagccaaggtcgctgatgtccttcgaatgttatg

SEQ ID NO: 76512 - DNA, 76 bp, Homo sapiens
tgcagctggaagtaaaatcacctaaacaagccaaggtcgctgatgtccttcgaatgttatggcttgtatttccaaa

SEQ ID NO: 76513 - DNA, 70 bp, Homo sapiens
aagtaaaatcacctaaacaagccaaggtcgctgatgtccttcgaatgttatggcttgtatttccaaaagg

SEQ ID NO: 76514 - DNA, 72 bp, Homo sapiens
ccaaggtcgctgatgtccttcgaatgttatggcttgtatttccaaaagggactttggctcagcccagatttt

SEQ ID NO: 76515 - DNA, 77 bp, Homo sapiens
gtcgctgatgtccttcgaatgttatggcttgtatttccaaaagggactttggctcagcccagatttttctgcatcca

SEQ ID NO: 76516 - DNA, 77 bp, Homo sapiens
ttatggcttgtatttccaaaagggactttggctcagcccagatttttctgcatccatccactcatctagtaattgat

SEQ ID NO: 76517 - DNA, 75 bp, Homo sapiens
actttggctcagcccagatttttctgcatccatccactcatctagtaattgattggttttcacaaagggtaggga

SEQ ID NO: 76518 - DNA, 72 bp, Homo sapiens
agcccagatttttctgcatccatccactcatctagtaattgattggttttcacaaagggtagggaaagaaac

SEQ ID NO: 76519 - DNA, 70 bp, Homo sapiens
atttttctgcatccatccactcatctagtaattgattggttttcacaaagggtagggaaagaaacccctg

SEQ ID NO: 76520 - DNA, 69 bp, Homo sapiens
catccactcatctagtaattgattggttttcacaaagggtagggaaagaaacccctggttggtgaattc

SEQ ID NO: 76521 - DNA, 64 bp, Homo sapiens
gttttcacaaagggtagggaaagaaacccctggttggtgaattcgttggtacactgtttcggtg

SEQ ID NO: 76522 - DNA, 71 bp, Homo sapiens
aagaaacccctggttggtgaattcgttggtacactgtttcggtgtgcccagctgtttatcaatcctgacta

SEQ ID NO: 76523 - DNA, 79 bp, Homo sapiens
tggttggtgaattcgttggtacactgtttcggtgtgcccagctgtttatcaatcctgactagcagagcactgcctccca

SEQ ID NO: 76524 - DNA, 78 bp, Homo sapiens
attcgttggtacactgtttcggtgtgcccagctgtttatcaatcctgactagcagagcactgcctcccaccgcagaaa

SEQ ID NO: 76525 - DNA, 79 bp, Homo sapiens
acactgtttcggtgtgcccagctgtttatcaatcctgactagcagagcactgcctcccaccgcagaaattctccttggc

SEQ ID NO: 76526 - DNA, 82 bp, Homo sapiens
tgcccagctgtttatcaatcctgactagcagagcactgcctcccaccgcagaaattctccttggccaacagggtgctgagtg

SEQ ID NO: 76527 - DNA, 80 bp, Homo sapiens
tttatcaatcctgactagcagagcactgcctcccaccgcagaaattctccttggccaacagggtgctgagtggaggtaga

SEQ ID NO: 76528 - DNA, 77 bp, Homo sapiens
aatcctgactagcagagcactgcctcccaccgcagaaattctccttggccaacagggtgctgagtggaggtagaaag

SEQ ID NO: 76529 - DNA, 74 bp, Homo sapiens
agagcactgcctcccaccgcagaaattctccttggccaacagggtgctgagtggaggtagaaaggaggcccagg

SEQ ID NO: 76530 - DNA, 72 bp, Homo sapiens
tcccaccgcagaaattctccttggccaacagggtgctgagtggaggtagaaaggaggcccagggtggtccca

SEQ ID NO: 76531 - DNA, 72 bp, Homo sapiens
aaattctccttggccaacagggtgctgagtggaggtagaaaggaggcccagggtggtcccactgacagaatc

SEQ ID NO: 76532 - DNA, 75 bp, Homo sapiens
ttggccaacagggtgctgagtggaggtagaaaggaggcccagggtggtcccactgacagaatctcagggccgcca

SEQ ID NO: 76533 - DNA, 73 bp, Homo sapiens
aacagggtgctgagtggaggtagaaaggaggcccagggtggtcccactgacagaatctcagggccgccatccc

SEQ ID NO: 76534 - DNA, 71 bp, Homo sapiens
agtggaggtagaaaggaggcccagggtggtcccactgacagaatctcagggccgccatccccacggtccaa

SEQ ID NO: 76535 - DNA, 71 bp, Homo sapiens
tagaaaggaggcccagggtggtcccactgacagaatctcagggccgccatccccacggtccaaggggccta

SEQ ID NO: 76536 - DNA, 75 bp, Homo sapiens
gggtggtcccactgacagaatctcagggccgccatccccacggtccaaggggcctatgtgttgccactgactgaa

SEQ ID NO: 76537 - DNA, 76 bp, Homo sapiens
actgacagaatctcagggccgccatccccacggtccaaggggcctatgtgttgccactgactgaaagcactagaaa

SEQ ID NO: 76538 - DNA, 75 bp, Homo sapiens
agaatctcagggccgccatccccacggtccaaggggcctatgtgttgccactgactgaaagcactagaaagaata

SEQ ID NO: 76539 - DNA, 73 bp, Homo sapiens
cgccatccccacggtccaaggggcctatgtgttgccactgactgaaagcactagaaagaatagagggtaacaa

SEQ ID NO: 76540 - DNA, 73 bp, Homo sapiens
acggtccaaggggcctatgtgttgccactgactgaaagcactagaaagaatagagggtaacaagtggctcttc

SEQ ID NO: 76541 - DNA, 77 bp, Homo sapiens
ggcctatgtgttgccactgactgaaagcactagaaagaatagagggtaacaagtggctcttcctggaggttgtcaca

SEQ ID NO: 76542 - DNA, 73 bp, Homo sapiens
actgaaagcactagaaagaatagagggtaacaagtggctcttcctggaggttgtcacagcaaccaacttggaa

SEQ ID NO: 76543 - DNA, 71 bp, Homo sapiens
actagaaagaatagagggtaacaagtggctcttcctggaggttgtcacagcaaccaacttggaacaccatt

SEQ ID NO: 76544 - DNA, 72 bp, Homo sapiens
agaatagagggtaacaagtggctcttcctggaggttgtcacagcaaccaacttggaacaccatttggcttaa

SEQ ID NO: 76545 - DNA, 70 bp, Homo sapiens
taacaagtggctcttcctggaggttgtcacagcaaccaacttggaacaccatttggcttaaggaattttt

SEQ ID NO: 76546 - DNA, 67 bp, Homo sapiens
ctcttcctggaggttgtcacagcaaccaacttggaacaccatttggcttaaggaattttttttttct

SEQ ID NO: 76547 - DNA, 73 bp, Homo sapiens
ttttttctttttaaatcaggctttcacaaacagatcttgtgcatcagtctcctgggtggaggcaggtagaagg

SEQ ID NO: 76548 - DNA, 76 bp, Homo sapiens
ttttaaatcaggctttcacaaacagatcttgtgcatcagtctcctgggtggaggcaggtagaaggggctgacttgt

SEQ ID NO: 76549 - DNA, 78 bp, Homo sapiens
ctttcacaaacagatcttgtgcatcagtctcctgggtggaggcaggtagaaggggctgacttgttctcagaaatggaa

SEQ ID NO: 76550 - DNA, 79 bp, Homo sapiens
tgtgcatcagtctcctgggtggaggcaggtagaaggggctgacttgttctcagaaatggaagggacattctcaagaata

SEQ ID NO: 76551 - DNA, 73 bp, Homo sapiens
ggcaggtagaaggggctgacttgttctcagaaatggaagggacattctcaagaatagcccagacccgcccact

SEQ ID NO: 76552 - DNA, 72 bp, Homo sapiens
aaggggctgacttgttctcagaaatggaagggacattctcaagaatagcccagacccgcccactttgaataa

SEQ ID NO: 76553 - DNA, 72 bp, Homo sapiens
ttgttctcagaaatggaagggacattctcaagaatagcccagacccgcccactttgaataaacccagctaag

SEQ ID NO: 76554 - DNA, 70 bp, Homo sapiens
aaatggaagggacattctcaagaatagcccagacccgcccactttgaataaacccagctaagtcctcacc

SEQ ID NO: 76555 - DNA, 74 bp, Homo sapiens
gacattctcaagaatagcccagacccgcccactttgaataaacccagctaagtcctcacctaagcaccaagaca

SEQ ID NO: 76556 - DNA, 70 bp, Homo sapiens
aagaatagcccagacccgcccactttgaataaacccagctaagtcctcacctaagcaccaagacataaaa

SEQ ID NO: 76557 - DNA, 69 bp, Homo sapiens
agcccagacccgcccactttgaataaacccagctaagtcctcacctaagcaccaagacataaaacaaaa

SEQ ID NO: 76558 - DNA, 69 bp, Homo sapiens
agacccgcccactttgaataaacccagctaagtcctcacctaagcaccaagacataaaacaaaacaaca

SEQ ID NO: 76559 - DNA, 73 bp, Homo sapiens
aacaaaacaacaacccggatagcgtgcttgcctctccaaagtgcagtcttttattttctcagttgcatcctaa

SEQ ID NO: 76560 - DNA, 74 bp, Homo sapiens
aacccggatagcgtgcttgcctctccaaagtgcagtcttttattttctcagttgcatcctaaccttgatttcaa

SEQ ID NO: 76561 - DNA, 75 bp, Homo sapiens
atagcgtgcttgcctctccaaagtgcagtcttttattttctcagttgcatcctaaccttgatttcaaccagaaac

SEQ ID NO: 76562 - DNA, 71 bp, Homo sapiens
tctccaaagtgcagtcttttattttctcagttgcatcctaaccttgatttcaaccagaaacgggcccctgt

SEQ ID NO: 76563 - DNA, 71 bp, Homo sapiens
cagtcttttattttctcagttgcatcctaaccttgatttcaaccagaaacgggcccctgttcatacggata

SEQ ID NO: 76564 - DNA, 69 bp, Homo sapiens
ttttattttctcagttgcatcctaaccttgatttcaaccagaaacgggcccctgttcatacggataggg

SEQ ID NO: 76565 - DNA, 69 bp, Homo sapiens
agttgcatcctaaccttgatttcaaccagaaacgggcccctgttcatacggataggggttctggactgt

SEQ ID NO: 76566 - DNA, 69 bp, Homo sapiens
cctaaccttgatttcaaccagaaacgggcccctgttcatacggataggggttctggactgttgactcta

SEQ ID NO: 76567 - DNA, 68 bp, Homo sapiens
aaccagaaacgggcccctgttcatacggataggggttctggactgttgactctagccctggtcttaat

SEQ ID NO: 76568 - DNA, 71 bp, Homo sapiens
aaacgggcccctgttcatacggataggggttctggactgttgactctagccctggtcttaattcactggca

SEQ ID NO: 76569 - DNA, 76 bp, Homo sapiens
cctgttcatacggataggggttctggactgttgactctagccctggtcttaattcactggcaatttcatagcctca

SEQ ID NO: 76570 - DNA, 73 bp, Homo sapiens
ataggggttctggactgttgactctagccctggtcttaattcactggcaatttcatagcctcactggttaccc

SEQ ID NO: 76571 - DNA, 76 bp, Homo sapiens
tggactgttgactctagccctggtcttaattcactggcaatttcatagcctcactggttacccttgagcttcactt

SEQ ID NO: 76572 - DNA, 73 bp, Homo sapiens
actctagccctggtcttaattcactggcaatttcatagcctcactggttacccttgagcttcactttcctatt

SEQ ID NO: 76573 - DNA, 74 bp, Homo sapiens
gtcttaattcactggcaatttcatagcctcactggttacccttgagcttcactttcctatttgcaaagagttat

SEQ ID NO: 76574 - DNA, 74 bp, Homo sapiens
ttaattcactggcaatttcatagcctcactggttacccttgagcttcactttcctatttgcaaagagttattta

SEQ ID NO: 76575 - DNA, 72 bp, Homo sapiens
actggcaatttcatagcctcactggttacccttgagcttcactttcctatttgcaaagagttatttataatt

SEQ ID NO: 76576 - DNA, 70 bp, Homo sapiens
caatttcatagcctcactggttacccttgagcttcactttcctatttgcaaagagttatttataattttt

SEQ ID NO: 76577 - DNA, 72 bp, Homo sapiens
catagcctcactggttacccttgagcttcactttcctatttgcaaagagttatttataatttttttgagatg

SEQ ID NO: 76578 - DNA, 67 bp, Homo sapiens
caccgtgcccgacccttatttgtaaagagttatttaaagcaaacagagaaatttctgaaattcgaat

SEQ ID NO: 76579 - DNA, 69 bp, Homo sapiens
gcccgacccttatttgtaaagagttatttaaagcaaacagagaaatttctgaaattcgaattggatatg

SEQ ID NO: 76580 - DNA, 70 bp, Homo sapiens
tttgtaaagagttatttaaagcaaacagagaaatttctgaaattcgaattggatatgggccgtgagggtc

SEQ ID NO: 76581 - DNA, 72 bp, Homo sapiens
atttaaagcaaacagagaaatttctgaaattcgaattggatatgggccgtgagggtctggtgaccaggtgat

SEQ ID NO: 76582 - DNA, 71 bp, Homo sapiens
aaacagagaaatttctgaaattcgaattggatatgggccgtgagggtctggtgaccaggtgattaaaatct

SEQ ID NO: 76583 - DNA, 74 bp, Homo sapiens
aatttctgaaattcgaattggatatgggccgtgagggtctggtgaccaggtgattaaaatcttgttgctgtcta

SEQ ID NO: 76584 - DNA, 73 bp, Homo sapiens
aaattcgaattggatatgggccgtgagggtctggtgaccaggtgattaaaatcttgttgctgtctaccttcca

SEQ ID NO: 76585 - DNA, 73 bp, Homo sapiens
atatgggccgtgagggtctggtgaccaggtgattaaaatcttgttgctgtctaccttccatccaacaggtaaa

SEQ ID NO: 76586 - DNA, 75 bp, Homo sapiens
cgtgagggtctggtgaccaggtgattaaaatcttgttgctgtctaccttccatccaacaggtaaatgcctcacga

SEQ ID NO: 76587 - DNA, 74 bp, Homo sapiens
tgaccaggtgattaaaatcttgttgctgtctaccttccatccaacaggtaaatgcctcacgacggtggtttata

SEQ ID NO: 76588 - DNA, 72 bp, Homo sapiens
attaaaatcttgttgctgtctaccttccatccaacaggtaaatgcctcacgacggtggtttatattataata

SEQ ID NO: 76589 - DNA, 72 bp, Homo sapiens
aatcttgttgctgtctaccttccatccaacaggtaaatgcctcacgacggtggtttatattataataaagaa

SEQ ID NO: 76590 - DNA, 70 bp, Homo sapiens
atccaacaggtaaatgcctcacgacggtggtttatattataataaagaatcccagagggttaagtgtgga

SEQ ID NO: 76591 - DNA, 69 bp, Homo sapiens
gacggtggtttatattataataaagaatcccagagggttaagtgtggagagggtacaatgttcttatta

SEQ ID NO: 76592 - DNA, 73 bp, Homo sapiens
tatattataataaagaatcccagagggttaagtgtggagagggtacaatgttcttattatactcttctcagtc

SEQ ID NO: 76593 - DNA, 74 bp, Homo sapiens
tataataaagaatcccagagggttaagtgtggagagggtacaatgttcttattatactcttctcagtcgacatg

SEQ ID NO: 76594 - DNA, 80 bp, Homo sapiens
agagggtacaatgttcttattatactcttctcagtcgacatggagaatagaggagagcagaggaatgcccatcttacata

SEQ ID NO: 76595 - DNA, 83 bp, Homo sapiens
attatactcttctcagtcgacatggagaatagaggagagcagaggaatgcccatcttacatacaactagagcgccgcttctca

SEQ ID NO: 76596 - DNA, 87 bp, Homo sapiens
tctcagtcgacatggagaatagaggagagcagaggaatgcccatcttacatacaactagagcgccgcttctcagcatgcctggcttg

SEQ ID NO: 76597 - DNA, 86 bp, Homo sapiens
atggagaatagaggagagcagaggaatgcccatcttacatacaactagagcgccgcttctcagcatgcctggcttgtcttgagcat

SEQ ID NO: 76598 - DNA, 90 bp, Homo sapiens
agagcagaggaatgcccatcttacatacaactagagcgccgcttctcagcatgcctggcttgtcttgagcattcgctgaatgaatgcaga

SEQ ID NO: 76599 - DNA, 89 bp, Homo sapiens
aatgcccatcttacatacaactagagcgccgcttctcagcatgcctggcttgtcttgagcattcgctgaatgaatgcagattaatcaga

SEQ ID NO: 76600 - DNA, 88 bp, Homo sapiens
atcttacatacaactagagcgccgcttctcagcatgcctggcttgtcttgagcattcgctgaatgaatgcagattaatcagaacaaca

SEQ ID NO: 76601 - DNA, 87 bp, Homo sapiens
tacaactagagcgccgcttctcagcatgcctggcttgtcttgagcattcgctgaatgaatgcagattaatcagaacaacagacttac

SEQ ID NO: 76602 - DNA, 85 bp, Homo sapiens
gcttctcagcatgcctggcttgtcttgagcattcgctgaatgaatgcagattaatcagaacaacagacttacctctgaaaactta

SEQ ID NO: 76603 - DNA, 80 bp, Homo sapiens
atgcctggcttgtcttgagcattcgctgaatgaatgcagattaatcagaacaacagacttacctctgaaaacttaaattc

SEQ ID NO: 76604 - DNA, 79 bp, Homo sapiens
cttgtcttgagcattcgctgaatgaatgcagattaatcagaacaacagacttacctctgaaaacttaaattctgtagag

SEQ ID NO: 76605 - DNA, 80 bp, Homo sapiens
attcgctgaatgaatgcagattaatcagaacaacagacttacctctgaaaacttaaattctgtagagtgcctatgtatca

SEQ ID NO: 76606 - DNA, 79 bp, Homo sapiens
aatgaatgcagattaatcagaacaacagacttacctctgaaaacttaaattctgtagagtgcctatgtatcaatgccaa

SEQ ID NO: 76607 - DNA, 77 bp, Homo sapiens
attaatcagaacaacagacttacctctgaaaacttaaattctgtagagtgcctatgtatcaatgccaaggttgctga

SEQ ID NO: 76608 - DNA, 74 bp, Homo sapiens
acaacagacttacctctgaaaacttaaattctgtagagtgcctatgtatcaatgccaaggttgctgaccggtaa

SEQ ID NO: 76609 - DNA, 72 bp, Homo sapiens
acttacctctgaaaacttaaattctgtagagtgcctatgtatcaatgccaaggttgctgaccggtaagaccc

SEQ ID NO: 76610 - DNA, 75 bp, Homo sapiens
attctgtagagtgcctatgtatcaatgccaaggttgctgaccggtaagacccctgaaaacgagcgatcacgggct

SEQ ID NO: 76611 - DNA, 72 bp, Homo sapiens
atgccaaggttgctgaccggtaagacccctgaaaacgagcgatcacgggcttccctgacgacagggccatta

SEQ ID NO: 76612 - DNA, 75 bp, Homo sapiens
taagacccctgaaaacgagcgatcacgggcttccctgacgacagggccattatagtgtcctcagattagatctta

SEQ ID NO: 76613 - DNA, 78 bp, Homo sapiens
tgaaaacgagcgatcacgggcttccctgacgacagggccattatagtgtcctcagattagatcttagcacaatggctt

SEQ ID NO: 76614 - DNA, 79 bp, Homo sapiens
gatcacgggcttccctgacgacagggccattatagtgtcctcagattagatcttagcacaatggctttaacctgcttga

SEQ ID NO: 76615 - DNA, 80 bp, Homo sapiens
cttccctgacgacagggccattatagtgtcctcagattagatcttagcacaatggctttaacctgcttgatgaatgaata

SEQ ID NO: 76616 - DNA, 79 bp, Homo sapiens
acagggccattatagtgtcctcagattagatcttagcacaatggctttaacctgcttgatgaatgaataacagagggaa

SEQ ID NO: 76617 - DNA, 78 bp, Homo sapiens
attatagtgtcctcagattagatcttagcacaatggctttaacctgcttgatgaatgaataacagagggaagaaagaa

SEQ ID NO: 76618 - DNA, 65 bp, Homo sapiens
aaagaaaggaagtacgtgaagggggtaaagagaaggaggtgaggggatgaggggggaaagagtga

SEQ ID NO: 76619 - DNA, 65 bp, Homo sapiens
aagtacgtgaagggggtaaagagaaggaggtgaggggatgaggggggaaagagtgacctccaaaa

SEQ ID NO: 76620 - DNA, 67 bp, Homo sapiens
gtgaagggggtaaagagaaggaggtgaggggatgaggggggaaagagtgacctccaaaaatggactg

SEQ ID NO: 76621 - DNA, 70 bp, Homo sapiens
tgaggggatgaggggggaaagagtgacctccaaaaatggactggcccaaactgggccaacctgagctacc

SEQ ID NO: 76622 - DNA, 69 bp, Homo sapiens
atgaggggggaaagagtgacctccaaaaatggactggcccaaactgggccaacctgagctaccctggaa

SEQ ID NO: 76623 - DNA, 70 bp, Homo sapiens
aaagagtgacctccaaaaatggactggcccaaactgggccaacctgagctaccctggaagacgcaagagg

SEQ ID NO: 76624 - DNA, 72 bp, Homo sapiens
aaaaatggactggcccaaactgggccaacctgagctaccctggaagacgcaagagggctcactctatcccag

SEQ ID NO: 76625 - DNA, 75 bp, Homo sapiens
actggcccaaactgggccaacctgagctaccctggaagacgcaagagggctcactctatcccagggatgaacaga

SEQ ID NO: 76626 - DNA, 75 bp, Homo sapiens
aaactgggccaacctgagctaccctggaagacgcaagagggctcactctatcccagggatgaacagaggactctg

SEQ ID NO: 76627 - DNA, 81 bp, Homo sapiens
tgagctaccctggaagacgcaagagggctcactctatcccagggatgaacagaggactctggaatcctcagatgtaatgga

SEQ ID NO: 76628 - DNA, 79 bp, Homo sapiens
tggaagacgcaagagggctcactctatcccagggatgaacagaggactctggaatcctcagatgtaatggaaaagtcaa

SEQ ID NO: 76629 - DNA, 79 bp, Homo sapiens
aagagggctcactctatcccagggatgaacagaggactctggaatcctcagatgtaatggaaaagtcaatgagccatat

SEQ ID NO: 76630 - DNA, 79 bp, Homo sapiens
actctatcccagggatgaacagaggactctggaatcctcagatgtaatggaaaagtcaatgagccatattgtactcaaa

SEQ ID NO: 76631 - DNA, 78 bp, Homo sapiens
agggatgaacagaggactctggaatcctcagatgtaatggaaaagtcaatgagccatattgtactcaaaatatcttgt

SEQ ID NO: 76632 - DNA, 77 bp, Homo sapiens
aacagaggactctggaatcctcagatgtaatggaaaagtcaatgagccatattgtactcaaaatatcttgttaataa

SEQ ID NO: 76633 - DNA, 78 bp, Homo sapiens
tctggaatcctcagatgtaatggaaaagtcaatgagccatattgtactcaaaatatcttgttaataacaaggctattg

SEQ ID NO: 76634 - DNA, 77 bp, Homo sapiens
cctcagatgtaatggaaaagtcaatgagccatattgtactcaaaatatcttgttaataacaaggctattggctttga

SEQ ID NO: 76635 - DNA, 74 bp, Homo sapiens
ggaaaagtcaatgagccatattgtactcaaaatatcttgttaataacaaggctattggctttgaatgtttggaa

SEQ ID NO: 76636 - DNA, 78 bp, Homo sapiens
caatgagccatattgtactcaaaatatcttgttaataacaaggctattggctttgaatgtttggaaatcatccacaga

SEQ ID NO: 76637 - DNA, 73 bp, Homo sapiens
gtactcaaaatatcttgttaataacaaggctattggctttgaatgtttggaaatcatccacagagtagtttac

SEQ ID NO: 76638 - DNA, 74 bp, Homo sapiens
tatcttgttaataacaaggctattggctttgaatgtttggaaatcatccacagagtagtttactaagccacaaa

SEQ ID NO: 76639 - DNA, 74 bp, Homo sapiens
tgttaataacaaggctattggctttgaatgtttggaaatcatccacagagtagtttactaagccacaaagcaat

SEQ ID NO: 76640 - DNA, 75 bp, Homo sapiens
tattggctttgaatgtttggaaatcatccacagagtagtttactaagccacaaagcaattaccactagcacccat

SEQ ID NO: 76641 - DNA, 74 bp, Homo sapiens
gaatgtttggaaatcatccacagagtagtttactaagccacaaagcaattaccactagcacccatttttcataa

SEQ ID NO: 76642 - DNA, 73 bp, Homo sapiens
tttggaaatcatccacagagtagtttactaagccacaaagcaattaccactagcacccatttttcataaagaa

SEQ ID NO: 76643 - DNA, 69 bp, Homo sapiens
agtttactaagccacaaagcaattaccactagcacccatttttcataaagaaaccaagaaataatattc

SEQ ID NO: 76644 - DNA, 69 bp, Homo sapiens
agccacaaagcaattaccactagcacccatttttcataaagaaaccaagaaataatattctaaaattgg

SEQ ID NO: 76645 - DNA, 71 bp, Homo sapiens
accactagcacccatttttcataaagaaaccaagaaataatattctaaaattggtagctggtgtcatgacc

SEQ ID NO: 76646 - DNA, 70 bp, Homo sapiens
agcacccatttttcataaagaaaccaagaaataatattctaaaattggtagctggtgtcatgacccaacc

SEQ ID NO: 76647 - DNA, 72 bp, Homo sapiens
ttttcataaagaaaccaagaaataatattctaaaattggtagctggtgtcatgacccaaccccagatctgga

SEQ ID NO: 76648 - DNA, 72 bp, Homo sapiens
aaaccaagaaataatattctaaaattggtagctggtgtcatgacccaaccccagatctggacagagtggttc

SEQ ID NO: 76649 - DNA, 78 bp, Homo sapiens
atattctaaaattggtagctggtgtcatgacccaaccccagatctggacagagtggttctccatcccatggacagatc

SEQ ID NO: 76650 - DNA, 78 bp, Homo sapiens
taaaattggtagctggtgtcatgacccaaccccagatctggacagagtggttctccatcccatggacagatcctacca

SEQ ID NO: 76651 - DNA, 78 bp, Homo sapiens
gtgtcatgacccaaccccagatctggacagagtggttctccatcccatggacagatcctaccaggaggtcttcacgta

SEQ ID NO: 76652 - DNA, 73 bp, Homo sapiens
agtggttctccatcccatggacagatcctaccaggaggtcttcacgtaggtgaaggcctttgtgctgaccttt

SEQ ID NO: 76653 - DNA, 73 bp, Homo sapiens
ttctccatcccatggacagatcctaccaggaggtcttcacgtaggtgaaggcctttgtgctgacctttttggt

SEQ ID NO: 76654 - DNA, 73 bp, Homo sapiens
acagatcctaccaggaggtcttcacgtaggtgaaggcctttgtgctgacctttttggttgcaatgtttcaaga

SEQ ID NO: 76655 - DNA, 72 bp, Homo sapiens
tcctaccaggaggtcttcacgtaggtgaaggcctttgtgctgacctttttggttgcaatgtttcaagaacaa

SEQ ID NO: 76656 - DNA, 70 bp, Homo sapiens
aggtcttcacgtaggtgaaggcctttgtgctgacctttttggttgcaatgtttcaagaacaagagaaaag

SEQ ID NO: 76657 - DNA, 67 bp, Homo sapiens
gacctttttggttgcaatgtttcaagaacaagagaaaagtgacaacgtttggtttactttagtatat

SEQ ID NO: 76658 - DNA, 69 bp, Homo sapiens
caagaacaagagaaaagtgacaacgtttggtttactttagtatattaggcatttttctaatgtgaacta

SEQ ID NO: 76659 - DNA, 70 bp, Homo sapiens
gagaaaagtgacaacgtttggtttactttagtatattaggcatttttctaatgtgaactatacgaaagca

SEQ ID NO: 76660 - DNA, 72 bp, Homo sapiens
gacaacgtttggtttactttagtatattaggcatttttctaatgtgaactatacgaaagcaattctcattca

SEQ ID NO: 76661 - DNA, 75 bp, Homo sapiens
tactttagtatattaggcatttttctaatgtgaactatacgaaagcaattctcattcaatgaaagaggcgccaaa

SEQ ID NO: 76662 - DNA, 75 bp, Homo sapiens
tattaggcatttttctaatgtgaactatacgaaagcaattctcattcaatgaaagaggcgccaaaaaattagaga

SEQ ID NO: 76663 - DNA, 74 bp, Homo sapiens
ggcatttttctaatgtgaactatacgaaagcaattctcattcaatgaaagaggcgccaaaaaattagagattaa

SEQ ID NO: 76664 - DNA, 73 bp, Homo sapiens
gtgaactatacgaaagcaattctcattcaatgaaagaggcgccaaaaaattagagattaataagtcatcggtt

SEQ ID NO: 76665 - DNA, 75 bp, Homo sapiens
tatacgaaagcaattctcattcaatgaaagaggcgccaaaaaattagagattaataagtcatcggtttctagcac

SEQ ID NO: 76666 - DNA, 74 bp, Homo sapiens
attctcattcaatgaaagaggcgccaaaaaattagagattaataagtcatcggtttctagcacgttgactgaaa

SEQ ID NO: 76667 - DNA, 76 bp, Homo sapiens
aaattagagattaataagtcatcggtttctagcacgttgactgaaagaccagtgagttgtgcttgttgaattctgc

SEQ ID NO: 76668 - DNA, 80 bp, Homo sapiens
ttaataagtcatcggtttctagcacgttgactgaaagaccagtgagttgtgcttgttgaattctgccctcactgcagatg

SEQ ID NO: 76669 - DNA, 80 bp, Homo sapiens
gttgactgaaagaccagtgagttgtgcttgttgaattctgccctcactgcagatgtgcaggtcaaacccaaagtggtcaa

SEQ ID NO: 76670 - DNA, 78 bp, Homo sapiens
aaagaccagtgagttgtgcttgttgaattctgccctcactgcagatgtgcaggtcaaacccaaagtggtcaatgggaa

SEQ ID NO: 76671 - DNA, 79 bp, Homo sapiens
ttctgccctcactgcagatgtgcaggtcaaacccaaagtggtcaatgggaaagatgaagaaagatggatttccagggca

SEQ ID NO: 76672 - DNA, 75 bp, Homo sapiens
agatgtgcaggtcaaacccaaagtggtcaatgggaaagatgaagaaagatggatttccagggcatgggctcccga

SEQ ID NO: 76673 - DNA, 73 bp, Homo sapiens
acccaaagtggtcaatgggaaagatgaagaaagatggatttccagggcatgggctcccgactagaatctgccc

SEQ ID NO: 76674 - DNA, 77 bp, Homo sapiens
aatgggaaagatgaagaaagatggatttccagggcatgggctcccgactagaatctgcccctcgctcatgcttctcc

SEQ ID NO: 76675 - DNA, 76 bp, Homo sapiens
aagatgaagaaagatggatttccagggcatgggctcccgactagaatctgcccctcgctcatgcttctcccggccc

SEQ ID NO: 76676 - DNA, 74 bp, Homo sapiens
tggatttccagggcatgggctcccgactagaatctgcccctcgctcatgcttctcccggcccctttagactctt

SEQ ID NO: 76677 - DNA, 76 bp, Homo sapiens
tcccgactagaatctgcccctcgctcatgcttctcccggcccctttagactctttagactgacatggtggagaatg

SEQ ID NO: 76678 - DNA, 77 bp, Homo sapiens
ctagaatctgcccctcgctcatgcttctcccggcccctttagactctttagactgacatggtggagaatgtgtttgc

SEQ ID NO: 76679 - DNA, 77 bp, Homo sapiens
ctcgctcatgcttctcccggcccctttagactctttagactgacatggtggagaatgtgtttgctgtggtagagaaa

SEQ ID NO: 76680 - DNA, 74 bp, Homo sapiens
atgcttctcccggcccctttagactctttagactgacatggtggagaatgtgtttgctgtggtagagaaaggga

SEQ ID NO: 76681 - DNA, 75 bp, Homo sapiens
ccctttagactctttagactgacatggtggagaatgtgtttgctgtggtagagaaagggagaaagtaatgagctg

SEQ ID NO: 76682 - DNA, 76 bp, Homo sapiens
actctttagactgacatggtggagaatgtgtttgctgtggtagagaaagggagaaagtaatgagctgggccaaaca

SEQ ID NO: 76683 - DNA, 79 bp, Homo sapiens
actgacatggtggagaatgtgtttgctgtggtagagaaagggagaaagtaatgagctgggccaaacagcagcactgaaa

SEQ ID NO: 76684 - DNA, 76 bp, Homo sapiens
agaatgtgtttgctgtggtagagaaagggagaaagtaatgagctgggccaaacagcagcactgaaagcttcccaag

SEQ ID NO: 76685 - DNA, 76 bp, Homo sapiens
aaagtaatgagctgggccaaacagcagcactgaaagcttcccaagtcacactcagaccagacttttccagggattg

SEQ ID NO: 76686 - DNA, 78 bp, Homo sapiens
aatgagctgggccaaacagcagcactgaaagcttcccaagtcacactcagaccagacttttccagggattggaagatg

SEQ ID NO: 76687 - DNA, 74 bp, Homo sapiens
agcactgaaagcttcccaagtcacactcagaccagacttttccagggattggaagatggagagagggaaaggag

SEQ ID NO: 76688 - DNA, 75 bp, Homo sapiens
ccaagtcacactcagaccagacttttccagggattggaagatggagagagggaaaggaggtgcagacaccaagta

SEQ ID NO: 76689 - DNA, 71 bp, Homo sapiens
actcagaccagacttttccagggattggaagatggagagagggaaaggaggtgcagacaccaagtaagggt

SEQ ID NO: 76690 - DNA, 69 bp, Homo sapiens
accagacttttccagggattggaagatggagagagggaaaggaggtgcagacaccaagtaagggtttgg

SEQ ID NO: 76691 - DNA, 74 bp, Homo sapiens
aagatggagagagggaaaggaggtgcagacaccaagtaagggtttggtgcagggctctggaatgtccagaagga

SEQ ID NO: 76692 - DNA, 73 bp, Homo sapiens
ggaaaggaggtgcagacaccaagtaagggtttggtgcagggctctggaatgtccagaaggagcgggaagcaaa

SEQ ID NO: 76693 - DNA, 73 bp, Homo sapiens
aggtgcagacaccaagtaagggtttggtgcagggctctggaatgtccagaaggagcgggaagcaaaggtggcg

SEQ ID NO: 76694 - DNA, 73 bp, Homo sapiens
aagtaagggtttggtgcagggctctggaatgtccagaaggagcgggaagcaaaggtggcgggacactgcctga

SEQ ID NO: 76695 - DNA, 75 bp, Homo sapiens
tttggtgcagggctctggaatgtccagaaggagcgggaagcaaaggtggcgggacactgcctgaaaggcgacaac

SEQ ID NO: 76696 - DNA, 79 bp, Homo sapiens
aagcaaaggtggcgggacactgcctgaaaggcgacaacctagtgtggccacaagagagtctgctatgcctgtccagtgc

SEQ ID NO: 76697 - DNA, 81 bp, Homo sapiens
ggacactgcctgaaaggcgacaacctagtgtggccacaagagagtctgctatgcctgtccagtgcccaccagtgacagaaa

SEQ ID NO: 76698 - DNA, 82 bp, Homo sapiens
tagtgtggccacaagagagtctgctatgcctgtccagtgcccaccagtgacagaaaactgtacaagggacagcagtcccagc

SEQ ID NO: 76699 - DNA, 81 bp, Homo sapiens
acaagagagtctgctatgcctgtccagtgcccaccagtgacagaaaactgtacaagggacagcagtcccagccctgccata

SEQ ID NO: 76700 - DNA, 79 bp, Homo sapiens
agtgacagaaaactgtacaagggacagcagtcccagccctgccatacacaagaagacagagccatctgggggatggcaa

SEQ ID NO: 76701 - DNA, 76 bp, Homo sapiens
aaaactgtacaagggacagcagtcccagccctgccatacacaagaagacagagccatctgggggatggcaaagact

SEQ ID NO: 76702 - DNA, 78 bp, Homo sapiens
tacaagggacagcagtcccagccctgccatacacaagaagacagagccatctgggggatggcaaagacttgccctaac

SEQ ID NO: 76703 - DNA, 79 bp, Homo sapiens
agtcccagccctgccatacacaagaagacagagccatctgggggatggcaaagacttgccctaacccatctcacatgta

SEQ ID NO: 76704 - DNA, 79 bp, Homo sapiens
tgccatacacaagaagacagagccatctgggggatggcaaagacttgccctaacccatctcacatgtaggactgacccg

SEQ ID NO: 76705 - DNA, 76 bp, Homo sapiens
acacaagaagacagagccatctgggggatggcaaagacttgccctaacccatctcacatgtaggactgacccggcc

SEQ ID NO: 76706 - DNA, 75 bp, Homo sapiens
acagagccatctgggggatggcaaagacttgccctaacccatctcacatgtaggactgacccggccccattaaga

SEQ ID NO: 76707 - DNA, 74 bp, Homo sapiens
ggatggcaaagacttgccctaacccatctcacatgtaggactgacccggccccattaagagcctgtggtgggcg

SEQ ID NO: 76708 - DNA, 71 bp, Homo sapiens
aaagacttgccctaacccatctcacatgtaggactgacccggccccattaagagcctgtggtgggcggccc

SEQ ID NO: 76709 - DNA, 71 bp, Homo sapiens
atctcacatgtaggactgacccggccccattaagagcctgtggtgggcggcccgggagagtgggggccagg

SEQ ID NO: 76710 - DNA, 70 bp, Homo sapiens
taggactgacccggccccattaagagcctgtggtgggcggcccgggagagtgggggccagggcagcccaa

SEQ ID NO: 76711 - DNA, 71 bp, Homo sapiens
cccattaagagcctgtggtgggcggcccgggagagtgggggccagggcagcccaaaggtgcacagggcacc

SEQ ID NO: 76712 - DNA, 77 bp, Homo sapiens
gagagtgggggccagggcagcccaaaggtgcacagggcaccgtggcggacaggccccagcttgctggcctctgagac

SEQ ID NO: 76713 - DNA, 78 bp, Homo sapiens
gccagggcagcccaaaggtgcacagggcaccgtggcggacaggccccagcttgctggcctctgagacgagctggtttg

SEQ ID NO: 76714 - DNA, 76 bp, Homo sapiens
agcccaaaggtgcacagggcaccgtggcggacaggccccagcttgctggcctctgagacgagctggtttgtttcca

SEQ ID NO: 76715 - DNA, 77 bp, Homo sapiens
aggtgcacagggcaccgtggcggacaggccccagcttgctggcctctgagacgagctggtttgtttccatccctgaa

SEQ ID NO: 76716 - DNA, 74 bp, Homo sapiens
accgtggcggacaggccccagcttgctggcctctgagacgagctggtttgtttccatccctgaagcctttggac

SEQ ID NO: 76717 - DNA, 80 bp, Homo sapiens
ttgctggcctctgagacgagctggtttgtttccatccctgaagcctttggacgagctggatgaggtcttgataactgaga

SEQ ID NO: 76718 - DNA, 77 bp, Homo sapiens
tctgagacgagctggtttgtttccatccctgaagcctttggacgagctggatgaggtcttgataactgagaactttg

SEQ ID NO: 76719 - DNA, 74 bp, Homo sapiens
acgagctggtttgtttccatccctgaagcctttggacgagctggatgaggtcttgataactgagaactttggaa

SEQ ID NO: 76720 - DNA, 76 bp, Homo sapiens
tttccatccctgaagcctttggacgagctggatgaggtcttgataactgagaactttggaaagcttcctctaatga

SEQ ID NO: 76721 - DNA, 74 bp, Homo sapiens
aagcctttggacgagctggatgaggtcttgataactgagaactttggaaagcttcctctaatgagactgggaag

SEQ ID NO: 76722 - DNA, 77 bp, Homo sapiens
tttggacgagctggatgaggtcttgataactgagaactttggaaagcttcctctaatgagactgggaagggctggca

SEQ ID NO: 76723 - DNA, 74 bp, Homo sapiens
ctggatgaggtcttgataactgagaactttggaaagcttcctctaatgagactgggaagggctggcagggtggg

SEQ ID NO: 76724 - DNA, 73 bp, Homo sapiens
tcttgataactgagaactttggaaagcttcctctaatgagactgggaagggctggcagggtgggggcaggggc

SEQ ID NO: 76725 - DNA, 69 bp, Homo sapiens
agaactttggaaagcttcctctaatgagactgggaagggctggcagggtgggggcaggggcctccccga

SEQ ID NO: 76726 - DNA, 72 bp, Homo sapiens
tctaatgagactgggaagggctggcagggtgggggcaggggcctccccgaggaagcagctgggggaaggatg

SEQ ID NO: 76727 - DNA, 71 bp, Homo sapiens
cagggtgggggcaggggcctccccgaggaagcagctgggggaaggatggattggcatttccagaggagact

SEQ ID NO: 76728 - DNA, 74 bp, Homo sapiens
gggcaggggcctccccgaggaagcagctgggggaaggatggattggcatttccagaggagactttacagatggc

SEQ ID NO: 76729 - DNA, 81 bp, Homo sapiens
aagcagctgggggaaggatggattggcatttccagaggagactttacagatggcgcctgatctcatgggacacgattcagc

SEQ ID NO: 76730 - DNA, 81 bp, Homo sapiens
gaaggatggattggcatttccagaggagactttacagatggcgcctgatctcatgggacacgattcagcgctcaatttggg

SEQ ID NO: 76731 - DNA, 81 bp, Homo sapiens
ttccagaggagactttacagatggcgcctgatctcatgggacacgattcagcgctcaatttggggctaatttgccgaatga

SEQ ID NO: 76732 - DNA, 78 bp, Homo sapiens
actttacagatggcgcctgatctcatgggacacgattcagcgctcaatttggggctaatttgccgaatgaggtagttc

SEQ ID NO: 76733 - DNA, 80 bp, Homo sapiens
agatggcgcctgatctcatgggacacgattcagcgctcaatttggggctaatttgccgaatgaggtagttccatcctgac

SEQ ID NO: 76734 - DNA, 79 bp, Homo sapiens
atctcatgggacacgattcagcgctcaatttggggctaatttgccgaatgaggtagttccatcctgacctctccaggca

SEQ ID NO: 76735 - DNA, 76 bp, Homo sapiens
acacgattcagcgctcaatttggggctaatttgccgaatgaggtagttccatcctgacctctccaggcatggtggg

SEQ ID NO: 76736 - DNA, 75 bp, Homo sapiens
ctcaatttggggctaatttgccgaatgaggtagttccatcctgacctctccaggcatggtgggtctgggaagaca

SEQ ID NO: 76737 - DNA, 76 bp, Homo sapiens
gggctaatttgccgaatgaggtagttccatcctgacctctccaggcatggtgggtctgggaagacaggagccaagc

SEQ ID NO: 76738 - DNA, 75 bp, Homo sapiens
atttgccgaatgaggtagttccatcctgacctctccaggcatggtgggtctgggaagacaggagccaagccttcc

SEQ ID NO: 76739 - DNA, 72 bp, Homo sapiens
aggtagttccatcctgacctctccaggcatggtgggtctgggaagacaggagccaagccttcctcctaaaac

SEQ ID NO: 76740 - DNA, 74 bp, Homo sapiens
ctgacctctccaggcatggtgggtctgggaagacaggagccaagccttcctcctaaaacccctggtgatgaaca

SEQ ID NO: 76741 - DNA, 75 bp, Homo sapiens
caggcatggtgggtctgggaagacaggagccaagccttcctcctaaaacccctggtgatgaacagtggctgagaa

SEQ ID NO: 76742 - DNA, 75 bp, Homo sapiens
ttcctcctaaaacccctggtgatgaacagtggctgagaaagccagatgtggactcccagaatgcaatgggaaaaa

SEQ ID NO: 76743 - DNA, 75 bp, Homo sapiens
ccctggtgatgaacagtggctgagaaagccagatgtggactcccagaatgcaatgggaaaaaaataaagaaggag

SEQ ID NO: 76744 - DNA, 75 bp, Homo sapiens
actcccagaatgcaatgggaaaaaaataaagaaggagggctgcaaaggattctgggtgcggctgtgagctgaatg

SEQ ID NO: 76745 - DNA, 78 bp, Homo sapiens
aaaataaagaaggagggctgcaaaggattctgggtgcggctgtgagctgaatggcaccttctacccatgattctgatc

SEQ ID NO: 76746 - DNA, 80 bp, Homo sapiens
aagaaggagggctgcaaaggattctgggtgcggctgtgagctgaatggcaccttctacccatgattctgatcctgacacc

SEQ ID NO: 76747 - DNA, 82 bp, Homo sapiens
attctgggtgcggctgtgagctgaatggcaccttctacccatgattctgatcctgacacctggcttagagacagagccctcc

SEQ ID NO: 76748 - DNA, 82 bp, Homo sapiens
tgtgagctgaatggcaccttctacccatgattctgatcctgacacctggcttagagacagagccctccctaccctgatcctc

SEQ ID NO: 76749 - DNA, 77 bp, Homo sapiens
aatggcaccttctacccatgattctgatcctgacacctggcttagagacagagccctccctaccctgatcctccaaa

SEQ ID NO: 76750 - DNA, 78 bp, Homo sapiens
ttctacccatgattctgatcctgacacctggcttagagacagagccctccctaccctgatcctccaaagccctggaga

SEQ ID NO: 76751 - DNA, 77 bp, Homo sapiens
atgattctgatcctgacacctggcttagagacagagccctccctaccctgatcctccaaagccctggagacaaggga

SEQ ID NO: 76752 - DNA, 75 bp, Homo sapiens
acacctggcttagagacagagccctccctaccctgatcctccaaagccctggagacaagggagccagctggagga

SEQ ID NO: 76753 - DNA, 75 bp, Homo sapiens
ttagagacagagccctccctaccctgatcctccaaagccctggagacaagggagccagctggaggaagagccttg

SEQ ID NO: 76754 - DNA, 72 bp, Homo sapiens
agagccctccctaccctgatcctccaaagccctggagacaagggagccagctggaggaagagccttggggct

SEQ ID NO: 76755 - DNA, 77 bp, Homo sapiens
atcctccaaagccctggagacaagggagccagctggaggaagagccttggggcttccagggcacaagcatgtgacag

SEQ ID NO: 76756 - DNA, 77 bp, Homo sapiens
tggagacaagggagccagctggaggaagagccttggggcttccagggcacaagcatgtgacagtgacccctacaaaa

SEQ ID NO: 76757 - DNA, 74 bp, Homo sapiens
aagggagccagctggaggaagagccttggggcttccagggcacaagcatgtgacagtgacccctacaaaactcg

SEQ ID NO: 76758 - DNA, 74 bp, Homo sapiens
ttccagggcacaagcatgtgacagtgacccctacaaaactcggcaaggaccacaaagttccagcctctgtttgt

SEQ ID NO: 76759 - DNA, 74 bp, Homo sapiens
acaagcatgtgacagtgacccctacaaaactcggcaaggaccacaaagttccagcctctgtttgtttcagagcg

SEQ ID NO: 76760 - DNA, 75 bp, Homo sapiens
agtgacccctacaaaactcggcaaggaccacaaagttccagcctctgtttgtttcagagcggcaagcacagcatg

SEQ ID NO: 76761 - DNA, 76 bp, Homo sapiens
ccctacaaaactcggcaaggaccacaaagttccagcctctgtttgtttcagagcggcaagcacagcatgggagtca

SEQ ID NO: 76762 - DNA, 75 bp, Homo sapiens
actcggcaaggaccacaaagttccagcctctgtttgtttcagagcggcaagcacagcatgggagtcagggggtct

SEQ ID NO: 76763 - DNA, 78 bp, Homo sapiens
acaaagttccagcctctgtttgtttcagagcggcaagcacagcatgggagtcagggggtcttcagcctcagagacaag

SEQ ID NO: 76764 - DNA, 80 bp, Homo sapiens
ttccagcctctgtttgtttcagagcggcaagcacagcatgggagtcagggggtcttcagcctcagagacaagggcagggc

SEQ ID NO: 76765 - DNA, 80 bp, Homo sapiens
tgtttgtttcagagcggcaagcacagcatgggagtcagggggtcttcagcctcagagacaagggcagggctgtgggtctg

SEQ ID NO: 76766 - DNA, 80 bp, Homo sapiens
agagcggcaagcacagcatgggagtcagggggtcttcagcctcagagacaagggcagggctgtgggtctgtcttctgggc

SEQ ID NO: 76767 - DNA, 77 bp, Homo sapiens
acagcatgggagtcagggggtcttcagcctcagagacaagggcagggctgtgggtctgtcttctgggcctgggaata

SEQ ID NO: 76768 - DNA, 74 bp, Homo sapiens
ggagtcagggggtcttcagcctcagagacaagggcagggctgtgggtctgtcttctgggcctgggaatatgggg

SEQ ID NO: 76769 - DNA, 76 bp, Homo sapiens
tcttcagcctcagagacaagggcagggctgtgggtctgtcttctgggcctgggaatatgggggagcccccagctag

SEQ ID NO: 76770 - DNA, 75 bp, Homo sapiens
tcagagacaagggcagggctgtgggtctgtcttctgggcctgggaatatgggggagcccccagctaggctgtccg

SEQ ID NO: 76771 - DNA, 70 bp, Homo sapiens
agggctgtgggtctgtcttctgggcctgggaatatgggggagcccccagctaggctgtccgggtcaccct

SEQ ID NO: 76772 - DNA, 73 bp, Homo sapiens
gtctgtcttctgggcctgggaatatgggggagcccccagctaggctgtccgggtcacccttctggaatcacca

SEQ ID NO: 76773 - DNA, 74 bp, Homo sapiens
ttctgggcctgggaatatgggggagcccccagctaggctgtccgggtcacccttctggaatcaccagctctctc

SEQ ID NO: 76774 - DNA, 73 bp, Homo sapiens
ctgggaatatgggggagcccccagctaggctgtccgggtcacccttctggaatcaccagctctctcccctctc

SEQ ID NO: 76775 - DNA, 75 bp, Homo sapiens
agctaggctgtccgggtcacccttctggaatcaccagctctctcccctctcctcagtggcccaggagagagggtg

SEQ ID NO: 76776 - DNA, 74 bp, Homo sapiens
tgtccgggtcacccttctggaatcaccagctctctcccctctcctcagtggcccaggagagagggtggggggca

SEQ ID NO: 76777 - DNA, 75 bp, Homo sapiens
acccttctggaatcaccagctctctcccctctcctcagtggcccaggagagagggtggggggcatccactcggca

SEQ ID NO: 76778 - DNA, 76 bp, Homo sapiens
aatcaccagctctctcccctctcctcagtggcccaggagagagggtggggggcatccactcggcatgggccccatg

SEQ ID NO: 76779 - DNA, 75 bp, Homo sapiens
tctcccctctcctcagtggcccaggagagagggtggggggcatccactcggcatgggccccatggtgggagccca

SEQ ID NO: 76780 - DNA, 72 bp, Homo sapiens
aggagagagggtggggggcatccactcggcatgggccccatggtgggagcccagcccccctccccagcagga

SEQ ID NO: 76781 - DNA, 69 bp, Homo sapiens
agggtggggggcatccactcggcatgggccccatggtgggagcccagcccccctccccagcaggacccc

SEQ ID NO: 76782 - DNA, 73 bp, Homo sapiens
atccactcggcatgggccccatggtgggagcccagcccccctccccagcaggaccccccgaagctgcacaggc

SEQ ID NO: 76783 - DNA, 76 bp, Homo sapiens
atggtgggagcccagcccccctccccagcaggaccccccgaagctgcacaggcccatctagatctccatgtccaca

SEQ ID NO: 76784 - DNA, 77 bp, Homo sapiens
cagcccccctccccagcaggaccccccgaagctgcacaggcccatctagatctccatgtccacagggcggatgttgc

SEQ ID NO: 76785 - DNA, 79 bp, Homo sapiens
tccccagcaggaccccccgaagctgcacaggcccatctagatctccatgtccacagggcggatgttgcccgtcttgtgc

SEQ ID NO: 76786 - DNA, 79 bp, Homo sapiens
aggaccccccgaagctgcacaggcccatctagatctccatgtccacagggcggatgttgcccgtcttgtgctctctgac

SEQ ID NO: 76787 - DNA, 83 bp, Homo sapiens
aagctgcacaggcccatctagatctccatgtccacagggcggatgttgcccgtcttgtgctctctgacccacagctccctgtc

SEQ ID NO: 76788 - DNA, 80 bp, Homo sapiens
acaggcccatctagatctccatgtccacagggcggatgttgcccgtcttgtgctctctgacccacagctccctgtctttg

SEQ ID NO: 76789 - DNA, 79 bp, Homo sapiens
tagatctccatgtccacagggcggatgttgcccgtcttgtgctctctgacccacagctccctgtctttggccgggtcca

SEQ ID NO: 76790 - DNA, 74 bp, Homo sapiens
cacagggcggatgttgcccgtcttgtgctctctgacccacagctccctgtctttggccgggtccacttttcgaa

SEQ ID NO: 76791 - DNA, 77 bp, Homo sapiens
atgttgcccgtcttgtgctctctgacccacagctccctgtctttggccgggtccacttttcgaagcagctgatccac

SEQ ID NO: 76792 - DNA, 78 bp, Homo sapiens
tcttgtgctctctgacccacagctccctgtctttggccgggtccacttttcgaagcagctgatccacgggctcgactg

SEQ ID NO: 76793 - DNA, 79 bp, Homo sapiens
tctgacccacagctccctgtctttggccgggtccacttttcgaagcagctgatccacgggctcgactgtctgcaagaga

SEQ ID NO: 76794 - DNA, 79 bp, Homo sapiens
cgggtccacttttcgaagcagctgatccacgggctcgactgtctgcaagagacagagaaaatgcgacactgttagagac

SEQ ID NO: 76795 - DNA, 71 bp, Homo sapiens
cccaggccccgtgtcgcccgggagccccgctgggctggaaactcacgctttggttgaacatgtctgtttca

SEQ ID NO: 76796 - DNA, 78 bp, Homo sapiens
gtgtcgcccgggagccccgctgggctggaaactcacgctttggttgaacatgtctgtttcatgccgcagctgcgtgta

SEQ ID NO: 76797 - DNA, 79 bp, Homo sapiens
gggagccccgctgggctggaaactcacgctttggttgaacatgtctgtttcatgccgcagctgcgtgtactggcacagg

SEQ ID NO: 76798 - DNA, 85 bp, Homo sapiens
tgggctggaaactcacgctttggttgaacatgtctgtttcatgccgcagctgcgtgtactggcacaggtgctgccggatcatctc

SEQ ID NO: 76799 - DNA, 82 bp, Homo sapiens
aaactcacgctttggttgaacatgtctgtttcatgccgcagctgcgtgtactggcacaggtgctgccggatcatctctaccc

SEQ ID NO: 76800 - DNA, 83 bp, Homo sapiens
ctttggttgaacatgtctgtttcatgccgcagctgcgtgtactggcacaggtgctgccggatcatctctaccctctccacctc

SEQ ID NO: 76801 - DNA, 85 bp, Homo sapiens
aacatgtctgtttcatgccgcagctgcgtgtactggcacaggtgctgccggatcatctctaccctctccacctccagccgctcta

SEQ ID NO: 76802 - DNA, 86 bp, Homo sapiens
tttcatgccgcagctgcgtgtactggcacaggtgctgccggatcatctctaccctctccacctccagccgctctagctcctgccga

SEQ ID NO: 76803 - DNA, 82 bp, Homo sapiens
ctgcgtgtactggcacaggtgctgccggatcatctctaccctctccacctccagccgctctagctcctgccgagaaagcaaa

SEQ ID NO: 76804 - DNA, 81 bp, Homo sapiens
gtactggcacaggtgctgccggatcatctctaccctctccacctccagccgctctagctcctgccgagaaagcaaaggcca

SEQ ID NO: 76805 - DNA, 79 bp, Homo sapiens
aggtgctgccggatcatctctaccctctccacctccagccgctctagctcctgccgagaaagcaaaggccagagaactc

SEQ ID NO: 76806 - DNA, 83 bp, Homo sapiens
gggctgctctgtgtcagcctctgtactgccatgtccacacatccctgcccgcttaccaatgtggtggtcaccatctcttcaaa

SEQ ID NO: 76807 - DNA, 81 bp, Homo sapiens
tgtgtcagcctctgtactgccatgtccacacatccctgcccgcttaccaatgtggtggtcaccatctcttcaaaccatttg

SEQ ID NO: 76808 - DNA, 78 bp, Homo sapiens
ctctgtactgccatgtccacacatccctgcccgcttaccaatgtggtggtcaccatctcttcaaaccatttggactgg

SEQ ID NO: 76809 - DNA, 75 bp, Homo sapiens
atgtccacacatccctgcccgcttaccaatgtggtggtcaccatctcttcaaaccatttggactgggcctggttg

SEQ ID NO: 76810 - DNA, 75 bp, Homo sapiens
acacatccctgcccgcttaccaatgtggtggtcaccatctcttcaaaccatttggactgggcctggttgtagaga

SEQ ID NO: 76811 - DNA, 79 bp, Homo sapiens
ccgcttaccaatgtggtggtcaccatctcttcaaaccatttggactgggcctggttgtagagatccacacagcgcatga

SEQ ID NO: 76812 - DNA, 79 bp, Homo sapiens
aatgtggtggtcaccatctcttcaaaccatttggactgggcctggttgtagagatccacacagcgcatgaggtcgtctc

SEQ ID NO: 76813 - DNA, 76 bp, Homo sapiens
accatctcttcaaaccatttggactgggcctggttgtagagatccacacagcgcatgaggtcgtctcctggaaaaa

SEQ ID NO: 76814 - DNA, 77 bp, Homo sapiens
tcttcaaaccatttggactgggcctggttgtagagatccacacagcgcatgaggtcgtctcctggaaaaagaccaca

SEQ ID NO: 76815 - DNA, 80 bp, Homo sapiens
atttggactgggcctggttgtagagatccacacagcgcatgaggtcgtctcctggaaaaagaccacagtcaccatcatga

SEQ ID NO: 76816 - DNA, 84 bp, Homo sapiens
tggttgtagagatccacacagcgcatgaggtcgtctcctggaaaaagaccacagtcaccatcatgaagcatcctatcctcacca

SEQ ID NO: 76817 - DNA, 79 bp, Homo sapiens
tccttctgtgtgcactgaccaggccaggcgggtgcccagcacttaccagcctgtgtggactttctccgcgccttcttga

SEQ ID NO: 76818 - DNA, 80 bp, Homo sapiens
tgtgtgcactgaccaggccaggcgggtgcccagcacttaccagcctgtgtggactttctccgcgccttcttgatgtcctc

SEQ ID NO: 76819 - DNA, 76 bp, Homo sapiens
aggccaggcgggtgcccagcacttaccagcctgtgtggactttctccgcgccttcttgatgtcctcctctgtcttg

SEQ ID NO: 76820 - DNA, 81 bp, Homo sapiens
ggtgcccagcacttaccagcctgtgtggactttctccgcgccttcttgatgtcctcctctgtcttgttgctcagcttgatc

SEQ ID NO: 76821 - DNA, 82 bp, Homo sapiens
acttaccagcctgtgtggactttctccgcgccttcttgatgtcctcctctgtcttgttgctcagcttgatctccagctgctg

SEQ ID NO: 76822 - DNA, 84 bp, Homo sapiens
ctgtgtggactttctccgcgccttcttgatgtcctcctctgtcttgttgctcagcttgatctccagctgctgggtcttcatctc

SEQ ID NO: 76823 - DNA, 82 bp, Homo sapiens
actttctccgcgccttcttgatgtcctcctctgtcttgttgctcagcttgatctccagctgctgggtcttcatctccaggtc

SEQ ID NO: 76824 - DNA, 87 bp, Homo sapiens
ccttcttgatgtcctcctctgtcttgttgctcagcttgatctccagctgctgggtcttcatctccaggtctctctgccgctctgtga

SEQ ID NO: 76825 - DNA, 85 bp, Homo sapiens
atgtcctcctctgtcttgttgctcagcttgatctccagctgctgggtcttcatctccaggtctctctgccgctctgtgagggctt

SEQ ID NO: 76826 - DNA, 84 bp, Homo sapiens
tgtcttgttgctcagcttgatctccagctgctgggtcttcatctccaggtctctctgccgctctgtgagggctttccgggcctg

SEQ ID NO: 76827 - DNA, 81 bp, Homo sapiens
tcagcttgatctccagctgctgggtcttcatctccaggtctctctgccgctctgtgagggctttccgggcctggggtccaa

SEQ ID NO: 76828 - DNA, 79 bp, Homo sapiens
ttgatctccagctgctgggtcttcatctccaggtctctctgccgctctgtgagggctttccgggcctggggtccaagga

SEQ ID NO: 76829 - DNA, 74 bp, Homo sapiens
ctgggtcttcatctccaggtctctctgccgctctgtgagggctttccgggcctggggtccaaggacacggagaa

SEQ ID NO: 76830 - DNA, 79 bp, Homo sapiens
ttcatctccaggtctctctgccgctctgtgagggctttccgggcctggggtccaaggacacggagaagctgctcataca

SEQ ID NO: 76831 - DNA, 78 bp, Homo sapiens
aggcagtcccccatgcacctgccctggcccagcgtcctgggcctctcaccttctccaccgaggcatagcggctggcga

SEQ ID NO: 76832 - DNA, 80 bp, Homo sapiens
atgcacctgccctggcccagcgtcctgggcctctcaccttctccaccgaggcatagcggctggcgagctgcttgcgaagg

SEQ ID NO: 76833 - DNA, 80 bp, Homo sapiens
ctggcccagcgtcctgggcctctcaccttctccaccgaggcatagcggctggcgagctgcttgcgaaggtcggcaatgtg

SEQ ID NO: 76834 - DNA, 79 bp, Homo sapiens
agcgtcctgggcctctcaccttctccaccgaggcatagcggctggcgagctgcttgcgaaggtcggcaatgtggtggtc

SEQ ID NO: 76835 - DNA, 82 bp, Homo sapiens
tctcaccttctccaccgaggcatagcggctggcgagctgcttgcgaaggtcggcaatgtggtggtcgcacttcttcatgtct

SEQ ID NO: 76836 - DNA, 80 bp, Homo sapiens
ccttctccaccgaggcatagcggctggcgagctgcttgcgaaggtcggcaatgtggtggtcgcacttcttcatgtctttc

SEQ ID NO: 76837 - DNA, 81 bp, Homo sapiens
aggcatagcggctggcgagctgcttgcgaaggtcggcaatgtggtggtcgcacttcttcatgtctttcttgaagttctcac

SEQ ID NO: 76838 - DNA, 81 bp, Homo sapiens
tggcgagctgcttgcgaaggtcggcaatgtggtggtcgcacttcttcatgtctttcttgaagttctcacggaagttcatca

SEQ ID NO: 76839 - DNA, 77 bp, Homo sapiens
ctgcttgcgaaggtcggcaatgtggtggtcgcacttcttcatgtctttcttgaagttctcacggaagttcatcaggg

SEQ ID NO: 76840 - DNA, 75 bp, Homo sapiens
aaggtcggcaatgtggtggtcgcacttcttcatgtctttcttgaagttctcacggaagttcatcaggggcttctc

SEQ ID NO: 76841 - DNA, 78 bp, Homo sapiens
atgtggtggtcgcacttcttcatgtctttcttgaagttctcacggaagttcatcaggggcttctccacctcgctgtga

SEQ ID NO: 76842 - DNA, 76 bp, Homo sapiens
acttcttcatgtctttcttgaagttctcacggaagttcatcaggggcttctccacctcgctgtgaagctgttggga

SEQ ID NO: 76843 - DNA, 77 bp, Homo sapiens
atgtctttcttgaagttctcacggaagttcatcaggggcttctccacctcgctgtgaagctgttgggagagtagaga

SEQ ID NO: 76844 - DNA, 79 bp, Homo sapiens
ttgaagttctcacggaagttcatcaggggcttctccacctcgctgtgaagctgttgggagagtagagacgcacactcag

SEQ ID NO: 76845 - DNA, 76 bp, Homo sapiens
acggaagttcatcaggggcttctccacctcgctgtgaagctgttgggagagtagagacgcacactcaggacccagg

SEQ ID NO: 76846 - DNA, 69 bp, Homo sapiens
taactattttttagtaccccagtgtgtaagaccaactgagggtggctgcagggaggggttaccttggca

SEQ ID NO: 76847 - DNA, 71 bp, Homo sapiens
ttagtaccccagtgtgtaagaccaactgagggtggctgcagggaggggttaccttggcagagaacttgagg

SEQ ID NO: 76848 - DNA, 73 bp, Homo sapiens
agtgtgtaagaccaactgagggtggctgcagggaggggttaccttggcagagaacttgaggtgaacttctgct

SEQ ID NO: 76849 - DNA, 73 bp, Homo sapiens
accaactgagggtggctgcagggaggggttaccttggcagagaacttgaggtgaacttctgcttcgtccgcca

SEQ ID NO: 76850 - DNA, 74 bp, Homo sapiens
ctgcagggaggggttaccttggcagagaacttgaggtgaacttctgcttcgtccgccaggctcttcttcacctg

SEQ ID NO: 76851 - DNA, 73 bp, Homo sapiens
gggttaccttggcagagaacttgaggtgaacttctgcttcgtccgccaggctcttcttcacctgggcccacgc

SEQ ID NO: 76852 - DNA, 74 bp, Homo sapiens
accttggcagagaacttgaggtgaacttctgcttcgtccgccaggctcttcttcacctgggcccacgcctctcc

SEQ ID NO: 76853 - DNA, 75 bp, Homo sapiens
aacttgaggtgaacttctgcttcgtccgccaggctcttcttcacctgggcccacgcctctcccaaggagctgcaa

SEQ ID NO: 76854 - DNA, 75 bp, Homo sapiens
aacttctgcttcgtccgccaggctcttcttcacctgggcccacgcctctcccaaggagctgcaacacaaagacca

SEQ ID NO: 76855 - DNA, 77 bp, Homo sapiens
cttcgtccgccaggctcttcttcacctgggcccacgcctctcccaaggagctgcaacacaaagaccatgagactcag

SEQ ID NO: 76856 - DNA, 78 bp, Homo sapiens
aggctcttcttcacctgggcccacgcctctcccaaggagctgcaacacaaagaccatgagactcaggtcacaagccaa

SEQ ID NO: 76857 - DNA, 77 bp, Homo sapiens
ttcacctgggcccacgcctctcccaaggagctgcaacacaaagaccatgagactcaggtcacaagccaaagcccttc

SEQ ID NO: 76858 - DNA, 68 bp, Homo sapiens
atttcccttcctcagtgaccccccatcctccccactcccacctctctcctacccactcacccttcctc

SEQ ID NO: 76859 - DNA, 72 bp, Homo sapiens
ttcctcagtgaccccccatcctccccactcccacctctctcctacccactcacccttcctcctgtgaagcca

SEQ ID NO: 76860 - DNA, 73 bp, Homo sapiens
cccatcctccccactcccacctctctcctacccactcacccttcctcctgtgaagccaaggagttctgagaga

SEQ ID NO: 76861 - DNA, 74 bp, Homo sapiens
ccactcccacctctctcctacccactcacccttcctcctgtgaagccaaggagttctgagagagcttagctaag

SEQ ID NO: 76862 - DNA, 76 bp, Homo sapiens
ctctctcctacccactcacccttcctcctgtgaagccaaggagttctgagagagcttagctaagttcttcgcatag

SEQ ID NO: 76863 - DNA, 77 bp, Homo sapiens
tacccactcacccttcctcctgtgaagccaaggagttctgagagagcttagctaagttcttcgcatagtcttcttca

SEQ ID NO: 76864 - DNA, 75 bp, Homo sapiens
acccttcctcctgtgaagccaaggagttctgagagagcttagctaagttcttcgcatagtcttcttcaatcttta

SEQ ID NO: 76865 - DNA, 79 bp, Homo sapiens
tgaagccaaggagttctgagagagcttagctaagttcttcgcatagtcttcttcaatctttatcctgcaaagagagaaa

SEQ ID NO: 76866 - DNA, 75 bp, Homo sapiens
aaggagttctgagagagcttagctaagttcttcgcatagtcttcttcaatctttatcctgcaaagagagaaaacc

SEQ ID NO: 76867 - DNA, 79 bp, Homo sapiens
ctgagagagcttagctaagttcttcgcatagtcttcttcaatctttatcctgcaaagagagaaaacccaacacacatca

SEQ ID NO: 76868 - DNA, 78 bp, Homo sapiens
ttagctaagttcttcgcatagtcttcttcaatctttatcctgcaaagagagaaaacccaacacacatcagctctccag

SEQ ID NO: 76869 - DNA, 81 bp, Homo sapiens
tcttcgcatagtcttcttcaatctttatcctgcaaagagagaaaacccaacacacatcagctctccagtgccagatcgtgg

SEQ ID NO: 76870 - DNA, 72 bp, Homo sapiens
gaacactggtgccaggccccagggctgggaggggcccaggcttcacctttcccggatgaattctgacatttc

SEQ ID NO: 76871 - DNA, 73 bp, Homo sapiens
tgccaggccccagggctgggaggggcccaggcttcacctttcccggatgaattctgacatttccttctgcatt

SEQ ID NO: 76872 - DNA, 71 bp, Homo sapiens
agggctgggaggggcccaggcttcacctttcccggatgaattctgacatttccttctgcatttgtttgccc

SEQ ID NO: 76873 - DNA, 72 bp, Homo sapiens
aggggcccaggcttcacctttcccggatgaattctgacatttccttctgcatttgtttgcccttcagctgtt

SEQ ID NO: 76874 - DNA, 75 bp, Homo sapiens
cttcacctttcccggatgaattctgacatttccttctgcatttgtttgcccttcagctgtttctggagcagtagt

SEQ ID NO: 76875 - DNA, 75 bp, Homo sapiens
cctttcccggatgaattctgacatttccttctgcatttgtttgcccttcagctgtttctggagcagtagttcaaa

SEQ ID NO: 76876 - DNA, 76 bp, Homo sapiens
atgaattctgacatttccttctgcatttgtttgcccttcagctgtttctggagcagtagttcaaacccagccacgg

SEQ ID NO: 76877 - DNA, 74 bp, Homo sapiens
tttccttctgcatttgtttgcccttcagctgtttctggagcagtagttcaaacccagccacggtgccgttgcct

SEQ ID NO: 76878 - DNA, 71 bp, Homo sapiens
atttgtttgcccttcagctgtttctggagcagtagttcaaacccagccacggtgccgttgccttgggggtc

SEQ ID NO: 76879 - DNA, 72 bp, Homo sapiens
cccttcagctgtttctggagcagtagttcaaacccagccacggtgccgttgccttgggggtccttcttatca

SEQ ID NO: 76880 - DNA, 72 bp, Homo sapiens
tgtttctggagcagtagttcaaacccagccacggtgccgttgccttgggggtccttcttatcagcctacaaa

SEQ ID NO: 76881 - DNA, 70 bp, Homo sapiens
agtagttcaaacccagccacggtgccgttgccttgggggtccttcttatcagcctacaaaggaagcagaa

SEQ ID NO: 76882 - DNA, 72 bp, Homo sapiens
cccagccacggtgccgttgccttgggggtccttcttatcagcctacaaaggaagcagaagcacaagagttta

SEQ ID NO: 76883 - DNA, 73 bp, Homo sapiens
tgtccactcccggtcaccggggtcacgctgtgggggaaactgaggcgctgcttacccagaagtagtcgcagta

SEQ ID NO: 76884 - DNA, 74 bp, Homo sapiens
tcaccggggtcacgctgtgggggaaactgaggcgctgcttacccagaagtagtcgcagtagctccactcggttg

SEQ ID NO: 76885 - DNA, 76 bp, Homo sapiens
ggtcacgctgtgggggaaactgaggcgctgcttacccagaagtagtcgcagtagctccactcggttggtttcagca

SEQ ID NO: 76886 - DNA, 79 bp, Homo sapiens
ggaaactgaggcgctgcttacccagaagtagtcgcagtagctccactcggttggtttcagcagctgctgttccggcatc

SEQ ID NO: 76887 - DNA, 79 bp, Homo sapiens
aggcgctgcttacccagaagtagtcgcagtagctccactcggttggtttcagcagctgctgttccggcatcgtgtctgg

SEQ ID NO: 76888 - DNA, 77 bp, Homo sapiens
cttacccagaagtagtcgcagtagctccactcggttggtttcagcagctgctgttccggcatcgtgtctgggtgagg

SEQ ID NO: 76889 - DNA, 78 bp, Homo sapiens
aagtagtcgcagtagctccactcggttggtttcagcagctgctgttccggcatcgtgtctgggtgagggaacgtcaca

SEQ ID NO: 76890 - DNA, 79 bp, Homo sapiens
tagctccactcggttggtttcagcagctgctgttccggcatcgtgtctgggtgagggaacgtcacacagtttatctgta

SEQ ID NO: 76891 - DNA, 79 bp, Homo sapiens
ttggtttcagcagctgctgttccggcatcgtgtctgggtgagggaacgtcacacagtttatctgtagggcacagaacaa

SEQ ID NO: 76892 - DNA, 78 bp, Homo sapiens
agcagctgctgttccggcatcgtgtctgggtgagggaacgtcacacagtttatctgtagggcacagaacaagaaagaa

SEQ ID NO: 76893 - DNA, 75 bp, Homo sapiens
ctgttccggcatcgtgtctgggtgagggaacgtcacacagtttatctgtagggcacagaacaagaaagaatgacc

SEQ ID NO: 76894 - DNA, 76 bp, Homo sapiens
acacgtcacatcacttgcgctgagcacagtccacccccttcaacccactcccgcacgcataccttcccctcctgcc

SEQ ID NO: 76895 - DNA, 72 bp, Homo sapiens
acttgcgctgagcacagtccacccccttcaacccactcccgcacgcataccttcccctcctgccctgaaaaa

SEQ ID NO: 76896 - DNA, 67 bp, Homo sapiens
acagtccacccccttcaacccactcccgcacgcataccttcccctcctgccctgaaaaaacggcttc

SEQ ID NO: 76897 - DNA, 73 bp, Homo sapiens
cccttcaacccactcccgcacgcataccttcccctcctgccctgaaaaaacggcttctgcatcatcccagcca

SEQ ID NO: 76898 - DNA, 73 bp, Homo sapiens
aacccactcccgcacgcataccttcccctcctgccctgaaaaaacggcttctgcatcatcccagccatcctcc

SEQ ID NO: 76899 - DNA, 74 bp, Homo sapiens
acgcataccttcccctcctgccctgaaaaaacggcttctgcatcatcccagccatcctccttccacttgttcac

SEQ ID NO: 76900 - DNA, 75 bp, Homo sapiens
ttcccctcctgccctgaaaaaacggcttctgcatcatcccagccatcctccttccacttgttcaccaggagagaa

SEQ ID NO: 76901 - DNA, 76 bp, Homo sapiens
cctgaaaaaacggcttctgcatcatcccagccatcctccttccacttgttcaccaggagagaagtgaaatgtgaaa

SEQ ID NO: 76902 - DNA, 77 bp, Homo sapiens
aaaaacggcttctgcatcatcccagccatcctccttccacttgttcaccaggagagaagtgaaatgtgaaattgaca

SEQ ID NO: 76903 - DNA, 75 bp, Homo sapiens
atcatcccagccatcctccttccacttgttcaccaggagagaagtgaaatgtgaaattgacaggagaaggggagg

SEQ ID NO: 76904 - DNA, 73 bp, Homo sapiens
agccatcctccttccacttgttcaccaggagagaagtgaaatgtgaaattgacaggagaaggggaggtgggag

SEQ ID NO: 76905 - DNA, 75 bp, Homo sapiens
ttccacttgttcaccaggagagaagtgaaatgtgaaattgacaggagaaggggaggtgggaggggcatgtggatg

SEQ ID NO: 76906 - DNA, 74 bp, Homo sapiens
cccagctcgcagcccaccctgagggcgcccctcgggagccacttactgtgatggtgttttccttgctctgcttt

SEQ ID NO: 76907 - DNA, 73 bp, Homo sapiens
agcccaccctgagggcgcccctcgggagccacttactgtgatggtgttttccttgctctgctttttgcttggc

SEQ ID NO: 76908 - DNA, 77 bp, Homo sapiens
tgagggcgcccctcgggagccacttactgtgatggtgttttccttgctctgctttttgcttggcgatgaggatccca

SEQ ID NO: 76909 - DNA, 75 bp, Homo sapiens
ccctcgggagccacttactgtgatggtgttttccttgctctgctttttgcttggcgatgaggatcccaggttctg

SEQ ID NO: 76910 - DNA, 76 bp, Homo sapiens
acttactgtgatggtgttttccttgctctgctttttgcttggcgatgaggatcccaggttctggggagagaggcaa

SEQ ID NO: 76911 - DNA, 75 bp, Homo sapiens
atggtgttttccttgctctgctttttgcttggcgatgaggatcccaggttctggggagagaggcaagaaacatcg

SEQ ID NO: 76912 - DNA, 75 bp, Homo sapiens
gttttccttgctctgctttttgcttggcgatgaggatcccaggttctggggagagaggcaagaaacatcgtcaaa

SEQ ID NO: 76913 - DNA, 76 bp, Homo sapiens
ctttttgcttggcgatgaggatcccaggttctggggagagaggcaagaaacatcgtcaaagctgttctccatattg

SEQ ID NO: 76914 - DNA, 76 bp, Homo sapiens
ttggcgatgaggatcccaggttctggggagagaggcaagaaacatcgtcaaagctgttctccatattggacatttt

SEQ ID NO: 76915 - DNA, 72 bp, Homo sapiens
aggatcccaggttctggggagagaggcaagaaacatcgtcaaagctgttctccatattggacattttttccc

SEQ ID NO: 76916 - DNA, 72 bp, Homo sapiens
ttctggggagagaggcaagaaacatcgtcaaagctgttctccatattggacattttttccccccattcaggt

SEQ ID NO: 76917 - DNA, 71 bp, Homo sapiens
agaggcaagaaacatcgtcaaagctgttctccatattggacattttttccccccattcaggttccctgagg

SEQ ID NO: 76918 - DNA, 70 bp, Homo sapiens
agaaacatcgtcaaagctgttctccatattggacattttttccccccattcaggttccctgagggtggag

SEQ ID NO: 76919 - DNA, 69 bp, Homo sapiens
aaagctgttctccatattggacattttttccccccattcaggttccctgagggtggaggcgctggggaa

SEQ ID NO: 76920 - DNA, 72 bp, Homo sapiens
atattggacattttttccccccattcaggttccctgagggtggaggcgctggggaatcagggatgctcagtc

SEQ ID NO: 76921 - DNA, 72 bp, Homo sapiens
ttttttccccccattcaggttccctgagggtggaggcgctggggaatcagggatgctcagtctgaatcctaa

SEQ ID NO: 76922 - DNA, 77 bp, Homo sapiens
cccattcaggttccctgagggtggaggcgctggggaatcagggatgctcagtctgaatcctaagtcaccatattctg

SEQ ID NO: 76923 - DNA, 76 bp, Homo sapiens
aggttccctgagggtggaggcgctggggaatcagggatgctcagtctgaatcctaagtcaccatattctgggccag

SEQ ID NO: 76924 - DNA, 77 bp, Homo sapiens
agggtggaggcgctggggaatcagggatgctcagtctgaatcctaagtcaccatattctgggccagggcaagcaggg

SEQ ID NO: 76925 - DNA, 77 bp, Homo sapiens
tggggaatcagggatgctcagtctgaatcctaagtcaccatattctgggccagggcaagcaggggtctccctgaccc

SEQ ID NO: 76926 - DNA, 76 bp, Homo sapiens
agggatgctcagtctgaatcctaagtcaccatattctgggccagggcaagcaggggtctccctgaccccacgctgt

SEQ ID NO: 76927 - DNA, 75 bp, Homo sapiens
ctcagtctgaatcctaagtcaccatattctgggccagggcaagcaggggtctccctgaccccacgctgttcccac

SEQ ID NO: 76928 - DNA, 74 bp, Homo sapiens
atcctaagtcaccatattctgggccagggcaagcaggggtctccctgaccccacgctgttcccacgcccagctc

SEQ ID NO: 76929 - DNA, 74 bp, Homo sapiens
atattctgggccagggcaagcaggggtctccctgaccccacgctgttcccacgcccagctctcgggctgaaggc

SEQ ID NO: 76930 - DNA, 72 bp, Homo sapiens
agggcaagcaggggtctccctgaccccacgctgttcccacgcccagctctcgggctgaaggcgaattaagga

SEQ ID NO: 76931 - DNA, 71 bp, Homo sapiens
aagcaggggtctccctgaccccacgctgttcccacgcccagctctcgggctgaaggcgaattaaggaagcc

SEQ ID NO: 76932 - DNA, 72 bp, Homo sapiens
tttcctaggcctgcagaagcagtgaccgctatacctccctcaacaggaccccttacctgggaatcaccggtg

SEQ ID NO: 76933 - DNA, 71 bp, Homo sapiens
cagaagcagtgaccgctatacctccctcaacaggaccccttacctgggaatcaccggtggattttcggaca

SEQ ID NO: 76934 - DNA, 70 bp, Homo sapiens
agtgaccgctatacctccctcaacaggaccccttacctgggaatcaccggtggattttcggacactcatg

SEQ ID NO: 76935 - DNA, 72 bp, Homo sapiens
tatacctccctcaacaggaccccttacctgggaatcaccggtggattttcggacactcatgtgggcagtctc

SEQ ID NO: 76936 - DNA, 73 bp, Homo sapiens
ctcaacaggaccccttacctgggaatcaccggtggattttcggacactcatgtgggcagtctctggagggtgc

SEQ ID NO: 76937 - DNA, 74 bp, Homo sapiens
cttacctgggaatcaccggtggattttcggacactcatgtgggcagtctctggagggtgcgctggggtccctga

SEQ ID NO: 76938 - DNA, 77 bp, Homo sapiens
aatcaccggtggattttcggacactcatgtgggcagtctctggagggtgcgctggggtccctgatgcgtggtatcca

SEQ ID NO: 76939 - DNA, 80 bp, Homo sapiens
attttcggacactcatgtgggcagtctctggagggtgcgctggggtccctgatgcgtggtatccattcactgcagggaca

SEQ ID NO: 76940 - DNA, 83 bp, Homo sapiens
actcatgtgggcagtctctggagggtgcgctggggtccctgatgcgtggtatccattcactgcagggacagagacacggctca

SEQ ID NO: 76941 - DNA, 85 bp, Homo sapiens
gcagtctctggagggtgcgctggggtccctgatgcgtggtatccattcactgcagggacagagacacggctcagatgctgtgtgg

SEQ ID NO: 76942 - DNA, 85 bp, Homo sapiens
tctggagggtgcgctggggtccctgatgcgtggtatccattcactgcagggacagagacacggctcagatgctgtgtgggccaca

SEQ ID NO: 76943 - DNA, 82 bp, Homo sapiens
tgtggcatcagggccctcccagttgccccaaagcagacagcggacattacctgttggaggcagagagctcctgtgagagcca

SEQ ID NO: 76944 - DNA, 80 bp, Homo sapiens
ctcccagttgccccaaagcagacagcggacattacctgttggaggcagagagctcctgtgagagccagggctggctggaa

SEQ ID NO: 76945 - DNA, 80 bp, Homo sapiens
agttgccccaaagcagacagcggacattacctgttggaggcagagagctcctgtgagagccagggctggctggaatccca

SEQ ID NO: 76946 - DNA, 82 bp, Homo sapiens
aagcagacagcggacattacctgttggaggcagagagctcctgtgagagccagggctggctggaatcccaggagaactgctg

SEQ ID NO: 76947 - DNA, 78 bp, Homo sapiens
attacctgttggaggcagagagctcctgtgagagccagggctggctggaatcccaggagaactgctgggacgttccca

SEQ ID NO: 76948 - DNA, 79 bp, Homo sapiens
ttggaggcagagagctcctgtgagagccagggctggctggaatcccaggagaactgctgggacgttcccaggtggtctc

SEQ ID NO: 76949 - DNA, 77 bp, Homo sapiens
agctcctgtgagagccagggctggctggaatcccaggagaactgctgggacgttcccaggtggtctctggtgaaaga

SEQ ID NO: 76950 - DNA, 75 bp, Homo sapiens
agagccagggctggctggaatcccaggagaactgctgggacgttcccaggtggtctctggtgaaagaagagcaaa

SEQ ID NO: 76951 - DNA, 73 bp, Homo sapiens
agggctggctggaatcccaggagaactgctgggacgttcccaggtggtctctggtgaaagaagagcaaagaaa

SEQ ID NO: 76952 - DNA, 73 bp, Homo sapiens
aatcccaggagaactgctgggacgttcccaggtggtctctggtgaaagaagagcaaagaaaatcactttgaga

SEQ ID NO: 76953 - DNA, 74 bp, Homo sapiens
agaactgctgggacgttcccaggtggtctctggtgaaagaagagcaaagaaaatcactttgagaatgtcacagg

SEQ ID NO: 76954 - DNA, 74 bp, Homo sapiens
acgttcccaggtggtctctggtgaaagaagagcaaagaaaatcactttgagaatgtcacagggcagaacctgag

SEQ ID NO: 76955 - DNA, 78 bp, Homo sapiens
aggtggtctctggtgaaagaagagcaaagaaaatcactttgagaatgtcacagggcagaacctgagtttcacagagca

SEQ ID NO: 76956 - DNA, 82 bp, Homo sapiens
gtgaaagaagagcaaagaaaatcactttgagaatgtcacagggcagaacctgagtttcacagagcagaaggagatgctcaga

SEQ ID NO: 76957 - DNA, 82 bp, Homo sapiens
agcaaagaaaatcactttgagaatgtcacagggcagaacctgagtttcacagagcagaaggagatgctcagagctggagaaa

SEQ ID NO: 76958 - DNA, 81 bp, Homo sapiens
aaaatcactttgagaatgtcacagggcagaacctgagtttcacagagcagaaggagatgctcagagctggagaaaaagaga

SEQ ID NO: 76959 - DNA, 85 bp, Homo sapiens
ttgagaatgtcacagggcagaacctgagtttcacagagcagaaggagatgctcagagctggagaaaaagagagacagccaatcgc

SEQ ID NO: 76960 - DNA, 81 bp, Homo sapiens
acagggcagaacctgagtttcacagagcagaaggagatgctcagagctggagaaaaagagagacagccaatcgccctcctc

SEQ ID NO: 76961 - DNA, 78 bp, Homo sapiens
aacctgagtttcacagagcagaaggagatgctcagagctggagaaaaagagagacagccaatcgccctcctccccaac

SEQ ID NO: 76962 - DNA, 79 bp, Homo sapiens
agagcagaaggagatgctcagagctggagaaaaagagagacagccaatcgccctcctccccaaccctggccagacagga

SEQ ID NO: 76963 - DNA, 76 bp, Homo sapiens
agatgctcagagctggagaaaaagagagacagccaatcgccctcctccccaaccctggccagacaggaccctgctt

SEQ ID NO: 76964 - DNA, 75 bp, Homo sapiens
agagctggagaaaaagagagacagccaatcgccctcctccccaaccctggccagacaggaccctgctttctgctc

SEQ ID NO: 76965 - DNA, 74 bp, Homo sapiens
aaaaagagagacagccaatcgccctcctccccaaccctggccagacaggaccctgctttctgctcccatatcca

SEQ ID NO: 76966 - DNA, 75 bp, Homo sapiens
acagccaatcgccctcctccccaaccctggccagacaggaccctgctttctgctcccatatccatccatctccct

SEQ ID NO: 76967 - DNA, 75 bp, Homo sapiens
atcgccctcctccccaaccctggccagacaggaccctgctttctgctcccatatccatccatctcccttcctggc

SEQ ID NO: 76968 - DNA, 76 bp, Homo sapiens
agacaggaccctgctttctgctcccatatccatccatctcccttcctggcccctgcccccttccaccatcccatga

SEQ ID NO: 76969 - DNA, 76 bp, Homo sapiens
ttctgctcccatatccatccatctcccttcctggcccctgcccccttccaccatcccatgaccacagagcttgttt

SEQ ID NO: 76970 - DNA, 74 bp, Homo sapiens
atatccatccatctcccttcctggcccctgcccccttccaccatcccatgaccacagagcttgtttttgctggg

SEQ ID NO: 76971 - DNA, 71 bp, Homo sapiens
ccttcctggcccctgcccccttccaccatcccatgaccacagagcttgtttttgctgggggcccttcttga

SEQ ID NO: 76972 - DNA, 77 bp, Homo sapiens
ttccaccatcccatgaccacagagcttgtttttgctgggggcccttcttgatgaggctggggccagaaggagatgga

SEQ ID NO: 76973 - DNA, 76 bp, Homo sapiens
agagcttgtttttgctgggggcccttcttgatgaggctggggccagaaggagatggacttcctgttgagatgtcaa

SEQ ID NO: 76974 - DNA, 77 bp, Homo sapiens
tttttgctgggggcccttcttgatgaggctggggccagaaggagatggacttcctgttgagatgtcaagatcctcta

SEQ ID NO: 76975 - DNA, 79 bp, Homo sapiens
tcttgatgaggctggggccagaaggagatggacttcctgttgagatgtcaagatcctctaaaatatcctctgccccaac

SEQ ID NO: 76976 - DNA, 79 bp, Homo sapiens
ggccagaaggagatggacttcctgttgagatgtcaagatcctctaaaatatcctctgccccaacctgcctcttcattca

SEQ ID NO: 76977 - DNA, 76 bp, Homo sapiens
aaggagatggacttcctgttgagatgtcaagatcctctaaaatatcctctgccccaacctgcctcttcattcaccc

SEQ ID NO: 76978 - DNA, 74 bp, Homo sapiens
acttcctgttgagatgtcaagatcctctaaaatatcctctgccccaacctgcctcttcattcacccctactttg

SEQ ID NO: 76979 - DNA, 74 bp, Homo sapiens
atgtcaagatcctctaaaatatcctctgccccaacctgcctcttcattcacccctactttgtctcggggctctg

SEQ ID NO: 76980 - DNA, 72 bp, Homo sapiens
atcctctaaaatatcctctgccccaacctgcctcttcattcacccctactttgtctcggggctctggactct

SEQ ID NO: 76981 - DNA, 73 bp, Homo sapiens
aaatatcctctgccccaacctgcctcttcattcacccctactttgtctcggggctctggactcttctcctgga

SEQ ID NO: 76982 - DNA, 73 bp, Homo sapiens
caacctgcctcttcattcacccctactttgtctcggggctctggactcttctcctggaaccctgaagttgcca

SEQ ID NO: 76983 - DNA, 72 bp, Homo sapiens
tcttcattcacccctactttgtctcggggctctggactcttctcctggaaccctgaagttgccaaccaggta

SEQ ID NO: 76984 - DNA, 69 bp, Homo sapiens
ccctactttgtctcggggctctggactcttctcctggaaccctgaagttgccaaccaggtatttctccc

SEQ ID NO: 76985 - DNA, 71 bp, Homo sapiens
tttgtctcggggctctggactcttctcctggaaccctgaagttgccaaccaggtatttctccccaaatgtc

SEQ ID NO: 76986 - DNA, 70 bp, Homo sapiens
tctcctggaaccctgaagttgccaaccaggtatttctccccaaatgtccactgttacctgaaactccaaa

SEQ ID NO: 76987 - DNA, 70 bp, Homo sapiens
aaccctgaagttgccaaccaggtatttctccccaaatgtccactgttacctgaaactccaaagcacagag

SEQ ID NO: 76988 - DNA, 75 bp, Homo sapiens
aaatgtccactgttacctgaaactccaaagcacagaggtgcaggagcctgtaaagagacaggggccctctgccac

SEQ ID NO: 76989 - DNA, 74 bp, Homo sapiens
aactccaaagcacagaggtgcaggagcctgtaaagagacaggggccctctgccacctggtggtgacttccaagt

SEQ ID NO: 76990 - DNA, 74 bp, Homo sapiens
aaagcacagaggtgcaggagcctgtaaagagacaggggccctctgccacctggtggtgacttccaagtttcttc

SEQ ID NO: 76991 - DNA, 73 bp, Homo sapiens
caggagcctgtaaagagacaggggccctctgccacctggtggtgacttccaagtttcttcctgatttcgcagt

SEQ ID NO: 76992 - DNA, 74 bp, Homo sapiens
taaagagacaggggccctctgccacctggtggtgacttccaagtttcttcctgatttcgcagttctaagtctca

SEQ ID NO: 76993 - DNA, 74 bp, Homo sapiens
agacaggggccctctgccacctggtggtgacttccaagtttcttcctgatttcgcagttctaagtctcatttga

SEQ ID NO: 76994 - DNA, 77 bp, Homo sapiens
tgccacctggtggtgacttccaagtttcttcctgatttcgcagttctaagtctcatttgagctgtaactgctgaatt

SEQ ID NO: 76995 - DNA, 78 bp, Homo sapiens
tggtgacttccaagtttcttcctgatttcgcagttctaagtctcatttgagctgtaactgctgaatttgcctggtcac

SEQ ID NO: 76996 - DNA, 77 bp, Homo sapiens
aagtttcttcctgatttcgcagttctaagtctcatttgagctgtaactgctgaatttgcctggtcacctctctctct

SEQ ID NO: 76997 - DNA, 81 bp, Homo sapiens
tcttcctgatttcgcagttctaagtctcatttgagctgtaactgctgaatttgcctggtcacctctctctcttccaatgcc

SEQ ID NO: 76998 - DNA, 81 bp, Homo sapiens
agttctaagtctcatttgagctgtaactgctgaatttgcctggtcacctctctctcttccaatgccctgctacaggctcta

SEQ ID NO: 76999 - DNA, 83 bp, Homo sapiens
tctcatttgagctgtaactgctgaatttgcctggtcacctctctctcttccaatgccctgctacaggctctaatcagaaataa

SEQ ID NO: 77000 - DNA, 80 bp, Homo sapiens
ttgagctgtaactgctgaatttgcctggtcacctctctctcttccaatgccctgctacaggctctaatcagaaataaaac

SEQ ID NO: 77001 - DNA, 77 bp, Homo sapiens
actgctgaatttgcctggtcacctctctctcttccaatgccctgctacaggctctaatcagaaataaaactggccgg

SEQ ID NO: 77002 - DNA, 73 bp, Homo sapiens
aaagagagaaaactaatactgcaagctatagtattgtcccccaaacactactttacccatttcactgccatga

SEQ ID NO: 77003 - DNA, 74 bp, Homo sapiens
aaaactaatactgcaagctatagtattgtcccccaaacactactttacccatttcactgccatgagcagagact

SEQ ID NO: 77004 - DNA, 77 bp, Homo sapiens
atactgcaagctatagtattgtcccccaaacactactttacccatttcactgccatgagcagagacttcttatgaag

SEQ ID NO: 77005 - DNA, 77 bp, Homo sapiens
tatagtattgtcccccaaacactactttacccatttcactgccatgagcagagacttcttatgaagttatctagtga

SEQ ID NO: 77006 - DNA, 75 bp, Homo sapiens
cccaaacactactttacccatttcactgccatgagcagagacttcttatgaagttatctagtgataaaaataata

SEQ ID NO: 77007 - DNA, 76 bp, Homo sapiens
ctactttacccatttcactgccatgagcagagacttcttatgaagttatctagtgataaaaataatactttctcac

SEQ ID NO: 77008 - DNA, 78 bp, Homo sapiens
cccatttcactgccatgagcagagacttcttatgaagttatctagtgataaaaataatactttctcactacatacaat

SEQ ID NO: 77009 - DNA, 81 bp, Homo sapiens
gccatgagcagagacttcttatgaagttatctagtgataaaaataatactttctcactacatacaatttgataatgcagga

SEQ ID NO: 77010 - DNA, 78 bp, Homo sapiens
gagcagagacttcttatgaagttatctagtgataaaaataatactttctcactacatacaatttgataatgcaggaaa

SEQ ID NO: 77011 - DNA, 76 bp, Homo sapiens
gagacttcttatgaagttatctagtgataaaaataatactttctcactacatacaatttgataatgcaggaaaaca

SEQ ID NO: 77012 - DNA, 76 bp, Homo sapiens
cttcttatgaagttatctagtgataaaaataatactttctcactacatacaatttgataatgcaggaaaacacaca

SEQ ID NO: 77013 - DNA, 75 bp, Homo sapiens
tatgaagttatctagtgataaaaataatactttctcactacatacaatttgataatgcaggaaaacacacaaaaa

SEQ ID NO: 77014 - DNA, 73 bp, Homo sapiens
agttatctagtgataaaaataatactttctcactacatacaatttgataatgcaggaaaacacacaaaaataa

SEQ ID NO: 77015 - DNA, 76 bp, Homo sapiens
tgataaaaataatactttctcactacatacaatttgataatgcaggaaaacacacaaaaataaatatcacccatca

SEQ ID NO: 77016 - DNA, 74 bp, Homo sapiens
aaaataatactttctcactacatacaatttgataatgcaggaaaacacacaaaaataaatatcacccatcatcc

SEQ ID NO: 77017 - DNA, 75 bp, Homo sapiens
aatactttctcactacatacaatttgataatgcaggaaaacacacaaaaataaatatcacccatcatcccaccat

SEQ ID NO: 77018 - DNA, 77 bp, Homo sapiens
tttctcactacatacaatttgataatgcaggaaaacacacaaaaataaatatcacccatcatcccaccattcagagg

SEQ ID NO: 77019 - DNA, 78 bp, Homo sapiens
actacatacaatttgataatgcaggaaaacacacaaaaataaatatcacccatcatcccaccattcagaggtcatcac

SEQ ID NO: 77020 - DNA, 78 bp, Homo sapiens
aatttgataatgcaggaaaacacacaaaaataaatatcacccatcatcccaccattcagaggtcatcaccatcaacat

SEQ ID NO: 77021 - DNA, 78 bp, Homo sapiens
gaaaacacacaaaaataaatatcacccatcatcccaccattcagaggtcatcaccatcaacattttggtatccatatg

SEQ ID NO: 77022 - DNA, 79 bp, Homo sapiens
taaatatcacccatcatcccaccattcagaggtcatcaccatcaacattttggtatccatatgttgatttgttttctaa

SEQ ID NO: 77023 - DNA, 78 bp, Homo sapiens
atcccaccattcagaggtcatcaccatcaacattttggtatccatatgttgatttgttttctaagcatatgtttctct

SEQ ID NO: 77024 - DNA, 77 bp, Homo sapiens
accattcagaggtcatcaccatcaacattttggtatccatatgttgatttgttttctaagcatatgtttctctttaa

SEQ ID NO: 77025 - DNA, 77 bp, Homo sapiens
ggtcatcaccatcaacattttggtatccatatgttgatttgttttctaagcatatgtttctctttaaaatgagacaa

SEQ ID NO: 77026 - DNA, 72 bp, Homo sapiens
gttgatttgttttctaagcatatgtttctctttaaaatgagacaaaatcaaactatagattctttttatgta

SEQ ID NO: 77027 - DNA, 73 bp, Homo sapiens
tctaagcatatgtttctctttaaaatgagacaaaatcaaactatagattctttttatgtataaatttttgtga

SEQ ID NO: 77028 - DNA, 68 bp, Homo sapiens
gtttctctttaaaatgagacaaaatcaaactatagattctttttatgtataaatttttgtgaatacct

SEQ ID NO: 77029 - DNA, 68 bp, Homo sapiens
aaaatgagacaaaatcaaactatagattctttttatgtataaatttttgtgaatacctttccaaaatc

SEQ ID NO: 77030 - DNA, 71 bp, Homo sapiens
caaaatcaaactatagattctttttatgtataaatttttgtgaatacctttccaaaatctgtccaggcaca

SEQ ID NO: 77031 - DNA, 70 bp, Homo sapiens
caaactatagattctttttatgtataaatttttgtgaatacctttccaaaatctgtccaggcacagtggt

SEQ ID NO: 77032 - DNA, 65 bp, Homo sapiens
ataaattttaaaaactttccaaaatcactgaagggggcggtatagcaaagtagttaggctctgtt

SEQ ID NO: 77033 - DNA, 67 bp, Homo sapiens
ttttaaaaactttccaaaatcactgaagggggcggtatagcaaagtagttaggctctgtttagtgtg

SEQ ID NO: 77034 - DNA, 72 bp, Homo sapiens
tttccaaaatcactgaagggggcggtatagcaaagtagttaggctctgtttagtgtggtgattctagaccca

SEQ ID NO: 77035 - DNA, 72 bp, Homo sapiens
actgaagggggcggtatagcaaagtagttaggctctgtttagtgtggtgattctagacccagactgcctggg

SEQ ID NO: 77036 - DNA, 75 bp, Homo sapiens
cggtatagcaaagtagttaggctctgtttagtgtggtgattctagacccagactgcctgggttggaatccagctc

SEQ ID NO: 77037 - DNA, 76 bp, Homo sapiens
aaagtagttaggctctgtttagtgtggtgattctagacccagactgcctgggttggaatccagctctgcctctcac

SEQ ID NO: 77038 - DNA, 78 bp, Homo sapiens
ctctgtttagtgtggtgattctagacccagactgcctgggttggaatccagctctgcctctcaccaccactatccttg

SEQ ID NO: 77039 - DNA, 79 bp, Homo sapiens
tggtgattctagacccagactgcctgggttggaatccagctctgcctctcaccaccactatccttggccaagctactta

SEQ ID NO: 77040 - DNA, 77 bp, Homo sapiens
attctagacccagactgcctgggttggaatccagctctgcctctcaccaccactatccttggccaagctacttattc

SEQ ID NO: 77041 - DNA, 78 bp, Homo sapiens
tgcctgggttggaatccagctctgcctctcaccaccactatccttggccaagctacttattctctgtgactccctttc

SEQ ID NO: 77042 - DNA, 79 bp, Homo sapiens
tggaatccagctctgcctctcaccaccactatccttggccaagctacttattctctgtgactccctttcctcctatgta

SEQ ID NO: 77043 - DNA, 76 bp, Homo sapiens
tctgcctctcaccaccactatccttggccaagctacttattctctgtgactccctttcctcctatgtaaaatgagt

SEQ ID NO: 77044 - DNA, 73 bp, Homo sapiens
accaccactatccttggccaagctacttattctctgtgactccctttcctcctatgtaaaatgagttcaataa

SEQ ID NO: 77045 - DNA, 73 bp, Homo sapiens
actatccttggccaagctacttattctctgtgactccctttcctcctatgtaaaatgagttcaataaggtgtc

SEQ ID NO: 77046 - DNA, 71 bp, Homo sapiens
aagctacttattctctgtgactccctttcctcctatgtaaaatgagttcaataaggtgtccacccaaggga

SEQ ID NO: 77047 - DNA, 72 bp, Homo sapiens
tacttattctctgtgactccctttcctcctatgtaaaatgagttcaataaggtgtccacccaagggagatac

SEQ ID NO: 77048 - DNA, 73 bp, Homo sapiens
ttattctctgtgactccctttcctcctatgtaaaatgagttcaataaggtgtccacccaagggagatactgta

SEQ ID NO: 77049 - DNA, 73 bp, Homo sapiens
tctgtgactccctttcctcctatgtaaaatgagttcaataaggtgtccacccaagggagatactgtaccaata

SEQ ID NO: 77050 - DNA, 72 bp, Homo sapiens
cctatgtaaaatgagttcaataaggtgtccacccaagggagatactgtaccaataccaaaggcccacataca

SEQ ID NO: 77051 - DNA, 74 bp, Homo sapiens
taaaatgagttcaataaggtgtccacccaagggagatactgtaccaataccaaaggcccacatacatgcctcta

SEQ ID NO: 77052 - DNA, 76 bp, Homo sapiens
ttcaataaggtgtccacccaagggagatactgtaccaataccaaaggcccacatacatgcctctagcgctaagtca

SEQ ID NO: 77053 - DNA, 74 bp, Homo sapiens
aataaggtgtccacccaagggagatactgtaccaataccaaaggcccacatacatgcctctagcgctaagtcat

SEQ ID NO: 77054 - DNA, 74 bp, Homo sapiens
gtgtccacccaagggagatactgtaccaataccaaaggcccacatacatgcctctagcgctaagtcatttttaa

SEQ ID NO: 77055 - DNA, 76 bp, Homo sapiens
aataccaaaggcccacatacatgcctctagcgctaagtcatttttaaagttagtctgatatgaggatataacatta

SEQ ID NO: 77056 - DNA, 76 bp, Homo sapiens
ggcccacatacatgcctctagcgctaagtcatttttaaagttagtctgatatgaggatataacattatttagttaa

SEQ ID NO: 77057 - DNA, 74 bp, Homo sapiens
catgcctctagcgctaagtcatttttaaagttagtctgatatgaggatataacattatttagttaaaaattcca

SEQ ID NO: 77058 - DNA, 72 bp, Homo sapiens
gcgctaagtcatttttaaagttagtctgatatgaggatataacattatttagttaaaaattccattactgaa

SEQ ID NO: 77059 - DNA, 72 bp, Homo sapiens
ttagtctgatatgaggatataacattatttagttaaaaattccattactgaaaattcaattgtttcaaacaa

SEQ ID NO: 77060 - DNA, 69 bp, Homo sapiens
tgaggatataacattatttagttaaaaattccattactgaaaattcaattgtttcaaacaataaaaaca

SEQ ID NO: 77061 - DNA, 65 bp, Homo sapiens
cattatttagttaaaaattccattactgaaaattcaattgtttcaaacaataaaaacaaaactgg

SEQ ID NO: 77062 - DNA, 66 bp, Homo sapiens
aaaattccattactgaaaattcaattgtttcaaacaataaaaacaaaactgggttcttgactcaac

SEQ ID NO: 77063 - DNA, 69 bp, Homo sapiens
tccattactgaaaattcaattgtttcaaacaataaaaacaaaactgggttcttgactcaactttgctcc

SEQ ID NO: 77064 - DNA, 70 bp, Homo sapiens
tcaattgtttcaaacaataaaaacaaaactgggttcttgactcaactttgctcctaaactaccgtgcagc

SEQ ID NO: 77065 - DNA, 69 bp, Homo sapiens
tgtttcaaacaataaaaacaaaactgggttcttgactcaactttgctcctaaactaccgtgcagcccta

SEQ ID NO: 77066 - DNA, 70 bp, Homo sapiens
aaaacaaaactgggttcttgactcaactttgctcctaaactaccgtgcagccctaggcaaatcgcaccac

SEQ ID NO: 77067 - DNA, 71 bp, Homo sapiens
aaactgggttcttgactcaactttgctcctaaactaccgtgcagccctaggcaaatcgcaccacccttctg

SEQ ID NO: 77068 - DNA, 78 bp, Homo sapiens
ttgactcaactttgctcctaaactaccgtgcagccctaggcaaatcgcaccacccttctggtcctctgatgcttcatc

SEQ ID NO: 77069 - DNA, 76 bp, Homo sapiens
tttgctcctaaactaccgtgcagccctaggcaaatcgcaccacccttctggtcctctgatgcttcatccaaaataa

SEQ ID NO: 77070 - DNA, 73 bp, Homo sapiens
aaactaccgtgcagccctaggcaaatcgcaccacccttctggtcctctgatgcttcatccaaaataaagaggt

SEQ ID NO: 77071 - DNA, 71 bp, Homo sapiens
acccttctggtcctctgatgcttcatccaaaataaagaggttcggctacttggtctcgtaggccccaatac

SEQ ID NO: 77072 - DNA, 70 bp, Homo sapiens
aaataaagaggttcggctacttggtctcgtaggccccaatactcccgctctctaggtgtgattggtggtc

SEQ ID NO: 77073 - DNA, 73 bp, Homo sapiens
ttcggctacttggtctcgtaggccccaatactcccgctctctaggtgtgattggtggtctcaaggcccatggt

SEQ ID NO: 77074 - DNA, 71 bp, Homo sapiens
ttggtctcgtaggccccaatactcccgctctctaggtgtgattggtggtctcaaggcccatggtttgggtt

SEQ ID NO: 77075 - DNA, 71 bp, Homo sapiens
cccaatactcccgctctctaggtgtgattggtggtctcaaggcccatggtttgggtttcaggaagggtgaa

SEQ ID NO: 77076 - DNA, 72 bp, Homo sapiens
tactcccgctctctaggtgtgattggtggtctcaaggcccatggtttgggtttcaggaagggtgaacctgga

SEQ ID NO: 77077 - DNA, 70 bp, Homo sapiens
ctctaggtgtgattggtggtctcaaggcccatggtttgggtttcaggaagggtgaacctggactccaggg

SEQ ID NO: 77078 - DNA, 71 bp, Homo sapiens
attggtggtctcaaggcccatggtttgggtttcaggaagggtgaacctggactccaggggcaggcataaca

SEQ ID NO: 77079 - DNA, 68 bp, Homo sapiens
aaggcccatggtttgggtttcaggaagggtgaacctggactccaggggcaggcataacaggggtaata

SEQ ID NO: 77080 - DNA, 70 bp, Homo sapiens
tttgggtttcaggaagggtgaacctggactccaggggcaggcataacaggggtaatatggtcccttcatg

SEQ ID NO: 77081 - DNA, 71 bp, Homo sapiens
tttcaggaagggtgaacctggactccaggggcaggcataacaggggtaatatggtcccttcatgtcttaag

SEQ ID NO: 77082 - DNA, 71 bp, Homo sapiens
ggtgaacctggactccaggggcaggcataacaggggtaatatggtcccttcatgtcttaagggagagaaaa

SEQ ID NO: 77083 - DNA, 71 bp, Homo sapiens
actccaggggcaggcataacaggggtaatatggtcccttcatgtcttaagggagagaaaacagaattgagg

SEQ ID NO: 77084 - DNA, 72 bp, Homo sapiens
aggcataacaggggtaatatggtcccttcatgtcttaagggagagaaaacagaattgagggtgatctggaaa

SEQ ID NO: 77085 - DNA, 75 bp, Homo sapiens
gtaatatggtcccttcatgtcttaagggagagaaaacagaattgagggtgatctggaaagcagagacggtgtgaa

SEQ ID NO: 77086 - DNA, 75 bp, Homo sapiens
tcccttcatgtcttaagggagagaaaacagaattgagggtgatctggaaagcagagacggtgtgaacataaacca

SEQ ID NO: 77087 - DNA, 75 bp, Homo sapiens
tcttaagggagagaaaacagaattgagggtgatctggaaagcagagacggtgtgaacataaaccagacagtagta

SEQ ID NO: 77088 - DNA, 75 bp, Homo sapiens
atctggaaagcagagacggtgtgaacataaaccagacagtagtagggtcttttatgaggagtgacaaggagagag

SEQ ID NO: 77089 - DNA, 76 bp, Homo sapiens
aaagcagagacggtgtgaacataaaccagacagtagtagggtcttttatgaggagtgacaaggagagaggctgcca

SEQ ID NO: 77090 - DNA, 76 bp, Homo sapiens
acggtgtgaacataaaccagacagtagtagggtcttttatgaggagtgacaaggagagaggctgccagcaggctta

SEQ ID NO: 77091 - DNA, 75 bp, Homo sapiens
acagtagtagggtcttttatgaggagtgacaaggagagaggctgccagcaggcttaggagcttctccaagggacc

SEQ ID NO: 77092 - DNA, 79 bp, Homo sapiens
gtcttttatgaggagtgacaaggagagaggctgccagcaggcttaggagcttctccaagggacccactggctggcaaga

SEQ ID NO: 77093 - DNA, 78 bp, Homo sapiens
agagaggctgccagcaggcttaggagcttctccaagggacccactggctggcaagagcaggaagccttggagaactta

SEQ ID NO: 77094 - DNA, 76 bp, Homo sapiens
cagcaggcttaggagcttctccaagggacccactggctggcaagagcaggaagccttggagaacttacttcaaaga

SEQ ID NO: 77095 - DNA, 75 bp, Homo sapiens
ttctccaagggacccactggctggcaagagcaggaagccttggagaacttacttcaaagaccactgccctgctta

SEQ ID NO: 77096 - DNA, 76 bp, Homo sapiens
cactggctggcaagagcaggaagccttggagaacttacttcaaagaccactgccctgcttagggcccacgtcataa

SEQ ID NO: 77097 - DNA, 76 bp, Homo sapiens
caagagcaggaagccttggagaacttacttcaaagaccactgccctgcttagggcccacgtcataagccattcata

SEQ ID NO: 77098 - DNA, 76 bp, Homo sapiens
aagccttggagaacttacttcaaagaccactgccctgcttagggcccacgtcataagccattcatacgctgagtga

SEQ ID NO: 77099 - DNA, 76 bp, Homo sapiens
agaacttacttcaaagaccactgccctgcttagggcccacgtcataagccattcatacgctgagtgacctctggaa

SEQ ID NO: 77100 - DNA, 80 bp, Homo sapiens
actgccctgcttagggcccacgtcataagccattcatacgctgagtgacctctggaatcatctgaactctatattctgtt

SEQ ID NO: 77101 - DNA, 79 bp, Homo sapiens
ccacgtcataagccattcatacgctgagtgacctctggaatcatctgaactctatattctgtttttctcaactataaaa

SEQ ID NO: 77102 - DNA, 76 bp, Homo sapiens
tgagtgacctctggaatcatctgaactctatattctgtttttctcaactataaaatggggatgaaaatggtaccta

SEQ ID NO: 77103 - DNA, 74 bp, Homo sapiens
tggaatcatctgaactctatattctgtttttctcaactataaaatggggatgaaaatggtacctaagtaggctg

SEQ ID NO: 77104 - DNA, 70 bp, Homo sapiens
ctgaactctatattctgtttttctcaactataaaatggggatgaaaatggtacctaagtaggctgggaaa

SEQ ID NO: 77105 - DNA, 71 bp, Homo sapiens
ctatattctgtttttctcaactataaaatggggatgaaaatggtacctaagtaggctgggaaagagcatta

SEQ ID NO: 77106 - DNA, 68 bp, Homo sapiens
tttttctcaactataaaatggggatgaaaatggtacctaagtaggctgggaaagagcattaattgggt

SEQ ID NO: 77107 - DNA, 71 bp, Homo sapiens
atgaaaatggtacctaagtaggctgggaaagagcattaattgggttcacctgtacaaagcacttaggataa

SEQ ID NO: 77108 - DNA, 71 bp, Homo sapiens
atggtacctaagtaggctgggaaagagcattaattgggttcacctgtacaaagcacttaggataacatcgg

SEQ ID NO: 77109 - DNA, 76 bp, Homo sapiens
taggctgggaaagagcattaattgggttcacctgtacaaagcacttaggataacatcgggcacatggtatgtgctt

SEQ ID NO: 77110 - DNA, 78 bp, Homo sapiens
agcattaattgggttcacctgtacaaagcacttaggataacatcgggcacatggtatgtgctttctcagcactaaata

SEQ ID NO: 77111 - DNA, 76 bp, Homo sapiens
taattgggttcacctgtacaaagcacttaggataacatcgggcacatggtatgtgctttctcagcactaaataaaa

SEQ ID NO: 77112 - DNA, 78 bp, Homo sapiens
acctgtacaaagcacttaggataacatcgggcacatggtatgtgctttctcagcactaaataaaacagacagacaagc

SEQ ID NO: 77113 - DNA, 77 bp, Homo sapiens
aagcacttaggataacatcgggcacatggtatgtgctttctcagcactaaataaaacagacagacaagcccggtgga

SEQ ID NO: 77114 - DNA, 80 bp, Homo sapiens
taacatcgggcacatggtatgtgctttctcagcactaaataaaacagacagacaagcccggtggagcttcgatgagcaaa

SEQ ID NO: 77115 - DNA, 79 bp, Homo sapiens
atggtatgtgctttctcagcactaaataaaacagacagacaagcccggtggagcttcgatgagcaaaagcagcgaggtg

SEQ ID NO: 77116 - DNA, 80 bp, Homo sapiens
atgtgctttctcagcactaaataaaacagacagacaagcccggtggagcttcgatgagcaaaagcagcgaggtgggcatc

SEQ ID NO: 77117 - DNA, 77 bp, Homo sapiens
actaaataaaacagacagacaagcccggtggagcttcgatgagcaaaagcagcgaggtgggcatccccaggagcaga

SEQ ID NO: 77118 - DNA, 83 bp, Homo sapiens
agacaagcccggtggagcttcgatgagcaaaagcagcgaggtgggcatccccaggagcagatgcaccatccagcctcaggctc

SEQ ID NO: 77119 - DNA, 83 bp, Homo sapiens
atgagcaaaagcagcgaggtgggcatccccaggagcagatgcaccatccagcctcaggctccttcctaggcaggcttctcttc

SEQ ID NO: 77120 - DNA, 81 bp, Homo sapiens
aaagcagcgaggtgggcatccccaggagcagatgcaccatccagcctcaggctccttcctaggcaggcttctcttctctcc

SEQ ID NO: 77121 - DNA, 83 bp, Homo sapiens
tgggcatccccaggagcagatgcaccatccagcctcaggctccttcctaggcaggcttctcttctctcctgcccgttgaatca

SEQ ID NO: 77122 - DNA, 82 bp, Homo sapiens
aggagcagatgcaccatccagcctcaggctccttcctaggcaggcttctcttctctcctgcccgttgaatcagccctgcctg

SEQ ID NO: 77123 - DNA, 80 bp, Homo sapiens
atgcaccatccagcctcaggctccttcctaggcaggcttctcttctctcctgcccgttgaatcagccctgcctggaggcc

SEQ ID NO: 77124 - DNA, 78 bp, Homo sapiens
ctcaggctccttcctaggcaggcttctcttctctcctgcccgttgaatcagccctgcctggaggccgcactgttgcct

SEQ ID NO: 77125 - DNA, 80 bp, Homo sapiens
aggcttctcttctctcctgcccgttgaatcagccctgcctggaggccgcactgttgccttcacatccacagagtcaagac

SEQ ID NO: 77126 - DNA, 79 bp, Homo sapiens
ttctctcctgcccgttgaatcagccctgcctggaggccgcactgttgccttcacatccacagagtcaagaccgggctcc

SEQ ID NO: 77127 - DNA, 79 bp, Homo sapiens
tgcccgttgaatcagccctgcctggaggccgcactgttgccttcacatccacagagtcaagaccgggctcccctctcca

SEQ ID NO: 77128 - DNA, 76 bp, Homo sapiens
ctggaggccgcactgttgccttcacatccacagagtcaagaccgggctcccctctccaccctctcctccgagtctc

SEQ ID NO: 77129 - DNA, 73 bp, Homo sapiens
actgttgccttcacatccacagagtcaagaccgggctcccctctccaccctctcctccgagtctcctgggttc

SEQ ID NO: 77130 - DNA, 72 bp, Homo sapiens
ccttcacatccacagagtcaagaccgggctcccctctccaccctctcctccgagtctcctgggttccctggc

SEQ ID NO: 77131 - DNA, 69 bp, Homo sapiens
agagtcaagaccgggctcccctctccaccctctcctccgagtctcctgggttccctggcccctggacaa

SEQ ID NO: 77132 - DNA, 67 bp, Homo sapiens
agaccgggctcccctctccaccctctcctccgagtctcctgggttccctggcccctggacaaccagg

SEQ ID NO: 77133 - DNA, 74 bp, Homo sapiens
tctccaccctctcctccgagtctcctgggttccctggcccctggacaaccagggacagggctcactcaccatca

SEQ ID NO: 77134 - DNA, 75 bp, Homo sapiens
ctctcctccgagtctcctgggttccctggcccctggacaaccagggacagggctcactcaccatcaccagctcca

SEQ ID NO: 77135 - DNA, 74 bp, Homo sapiens
agtctcctgggttccctggcccctggacaaccagggacagggctcactcaccatcaccagctccaccctatgtc

SEQ ID NO: 77136 - DNA, 78 bp, Homo sapiens
tccctggcccctggacaaccagggacagggctcactcaccatcaccagctccaccctatgtcccatccctcatatcta

SEQ ID NO: 77137 - DNA, 78 bp, Homo sapiens
tggacaaccagggacagggctcactcaccatcaccagctccaccctatgtcccatccctcatatctaattggttccca

SEQ ID NO: 77138 - DNA, 78 bp, Homo sapiens
agggctcactcaccatcaccagctccaccctatgtcccatccctcatatctaattggttcccagggcctggagatgcc

SEQ ID NO: 77139 - DNA, 76 bp, Homo sapiens
atcaccagctccaccctatgtcccatccctcatatctaattggttcccagggcctggagatgcccctccatcacgt

SEQ ID NO: 77140 - DNA, 75 bp, Homo sapiens
caccctatgtcccatccctcatatctaattggttcccagggcctggagatgcccctccatcacgttcctcttgtc

SEQ ID NO: 77141 - DNA, 78 bp, Homo sapiens
atatctaattggttcccagggcctggagatgcccctccatcacgttcctcttgtcttctccatgtcactccagagcca

SEQ ID NO: 77142 - DNA, 78 bp, Homo sapiens
taattggttcccagggcctggagatgcccctccatcacgttcctcttgtcttctccatgtcactccagagccagtctc

SEQ ID NO: 77143 - DNA, 79 bp, Homo sapiens
gcctggagatgcccctccatcacgttcctcttgtcttctccatgtcactccagagccagtctccctgccttttgaaatc

SEQ ID NO: 77144 - DNA, 77 bp, Homo sapiens
atgcccctccatcacgttcctcttgtcttctccatgtcactccagagccagtctccctgccttttgaaatccgtcca

SEQ ID NO: 77145 - DNA, 78 bp, Homo sapiens
atcacgttcctcttgtcttctccatgtcactccagagccagtctccctgccttttgaaatccgtccactcacagctag

SEQ ID NO: 77146 - DNA, 80 bp, Homo sapiens
tcttgtcttctccatgtcactccagagccagtctccctgccttttgaaatccgtccactcacagctagtggaccactcac

SEQ ID NO: 77147 - DNA, 79 bp, Homo sapiens
ttctccatgtcactccagagccagtctccctgccttttgaaatccgtccactcacagctagtggaccactcaccctaga

SEQ ID NO: 77148 - DNA, 77 bp, Homo sapiens
tccagagccagtctccctgccttttgaaatccgtccactcacagctagtggaccactcaccctagagcccagctttc

SEQ ID NO: 77149 - DNA, 73 bp, Homo sapiens
ctccctgccttttgaaatccgtccactcacagctagtggaccactcaccctagagcccagctttcgccggagg

SEQ ID NO: 77150 - DNA, 75 bp, Homo sapiens
cttttgaaatccgtccactcacagctagtggaccactcaccctagagcccagctttcgccggaggtcacttcaca

SEQ ID NO: 77151 - DNA, 75 bp, Homo sapiens
aatccgtccactcacagctagtggaccactcaccctagagcccagctttcgccggaggtcacttcacagcgaaaa

SEQ ID NO: 77152 - DNA, 76 bp, Homo sapiens
acagctagtggaccactcaccctagagcccagctttcgccggaggtcacttcacagcgaaaatccctggctagctc

SEQ ID NO: 77153 - DNA, 73 bp, Homo sapiens
accactcaccctagagcccagctttcgccggaggtcacttcacagcgaaaatccctggctagctcctttccaa

SEQ ID NO: 77154 - DNA, 75 bp, Homo sapiens
agctttcgccggaggtcacttcacagcgaaaatccctggctagctcctttccaacatggcacacggaatcaattc

SEQ ID NO: 77155 - DNA, 73 bp, Homo sapiens
aaaatccctggctagctcctttccaacatggcacacggaatcaattccgaagtccactggcctcctggcaaag

SEQ ID NO: 77156 - DNA, 78 bp, Homo sapiens
aacatggcacacggaatcaattccgaagtccactggcctcctggcaaagtgctccaggatcccaaccctgactgcatc

SEQ ID NO: 77157 - DNA, 79 bp, Homo sapiens
atcaattccgaagtccactggcctcctggcaaagtgctccaggatcccaaccctgactgcatccagactgacatcccac

SEQ ID NO: 77158 - DNA, 80 bp, Homo sapiens
tcctggcaaagtgctccaggatcccaaccctgactgcatccagactgacatcccactggcttcacttcaggcccagttaa

SEQ ID NO: 77159 - DNA, 78 bp, Homo sapiens
aaagtgctccaggatcccaaccctgactgcatccagactgacatcccactggcttcacttcaggcccagttaacttgc

SEQ ID NO: 77160 - DNA, 79 bp, Homo sapiens
tcccaaccctgactgcatccagactgacatcccactggcttcacttcaggcccagttaacttgcctcgccgatctctaa

SEQ ID NO: 77161 - DNA, 77 bp, Homo sapiens
actgcatccagactgacatcccactggcttcacttcaggcccagttaacttgcctcgccgatctctaaatacgcctt

SEQ ID NO: 77162 - DNA, 74 bp, Homo sapiens
gactgacatcccactggcttcacttcaggcccagttaacttgcctcgccgatctctaaatacgcctttcccgta

SEQ ID NO: 77163 - DNA, 72 bp, Homo sapiens
ccactggcttcacttcaggcccagttaacttgcctcgccgatctctaaatacgcctttcccgtattgttcac

SEQ ID NO: 77164 - DNA, 70 bp, Homo sapiens
cccagttaacttgcctcgccgatctctaaatacgcctttcccgtattgttcacccatacctgccgcctcc

SEQ ID NO: 77165 - DNA, 72 bp, Homo sapiens
taacttgcctcgccgatctctaaatacgcctttcccgtattgttcacccatacctgccgcctcctgctcccc

SEQ ID NO: 77166 - DNA, 74 bp, Homo sapiens
atctctaaatacgcctttcccgtattgttcacccatacctgccgcctcctgctcccccatccctggatatcaca

SEQ ID NO: 77167 - DNA, 72 bp, Homo sapiens
taaatacgcctttcccgtattgttcacccatacctgccgcctcctgctcccccatccctggatatcacaacc

SEQ ID NO: 77168 - DNA, 77 bp, Homo sapiens
tacctgccgcctcctgctcccccatccctggatatcacaaccttgttcactcatcaagtctcaactaaaatgtctct

SEQ ID NO: 77169 - DNA, 82 bp, Homo sapiens
tgctcccccatccctggatatcacaaccttgttcactcatcaagtctcaactaaaatgtctcttccaccatgcagcctatca

SEQ ID NO: 77170 - DNA, 82 bp, Homo sapiens
atccctggatatcacaaccttgttcactcatcaagtctcaactaaaatgtctcttccaccatgcagcctatcaagattgctc

SEQ ID NO: 77171 - DNA, 81 bp, Homo sapiens
atatcacaaccttgttcactcatcaagtctcaactaaaatgtctcttccaccatgcagcctatcaagattgctcttcttcc

SEQ ID NO: 77172 - DNA, 78 bp, Homo sapiens
atcaagtctcaactaaaatgtctcttccaccatgcagcctatcaagattgctcttcttccctgcaaagagttcttccc

SEQ ID NO: 77173 - DNA, 78 bp, Homo sapiens
actaaaatgtctcttccaccatgcagcctatcaagattgctcttcttccctgcaaagagttcttccccagactctcta

SEQ ID NO: 77174 - DNA, 81 bp, Homo sapiens
tcttccaccatgcagcctatcaagattgctcttcttccctgcaaagagttcttccccagactctctagagtgggtgctgta

SEQ ID NO: 77175 - DNA, 81 bp, Homo sapiens
accatgcagcctatcaagattgctcttcttccctgcaaagagttcttccccagactctctagagtgggtgctgtagtgcac

SEQ ID NO: 77176 - DNA, 78 bp, Homo sapiens
tatcaagattgctcttcttccctgcaaagagttcttccccagactctctagagtgggtgctgtagtgcaccacccaaa

SEQ ID NO: 77177 - DNA, 80 bp, Homo sapiens
ttcttccctgcaaagagttcttccccagactctctagagtgggtgctgtagtgcaccacccaaatctctctagctgcaga

SEQ ID NO: 77178 - DNA, 83 bp, Homo sapiens
caaagagttcttccccagactctctagagtgggtgctgtagtgcaccacccaaatctctctagctgcagaggctcatagctga

SEQ ID NO: 77179 - DNA, 82 bp, Homo sapiens
agttcttccccagactctctagagtgggtgctgtagtgcaccacccaaatctctctagctgcagaggctcatagctgagtcc

SEQ ID NO: 77180 - DNA, 83 bp, Homo sapiens
agactctctagagtgggtgctgtagtgcaccacccaaatctctctagctgcagaggctcatagctgagtccctctcagggaac

SEQ ID NO: 77181 - DNA, 80 bp, Homo sapiens
agtgggtgctgtagtgcaccacccaaatctctctagctgcagaggctcatagctgagtccctctcagggaaccgccctta

SEQ ID NO: 77182 - DNA, 81 bp, Homo sapiens
tgtagtgcaccacccaaatctctctagctgcagaggctcatagctgagtccctctcagggaaccgcccttagccaaagaga

SEQ ID NO: 77183 - DNA, 80 bp, Homo sapiens
acccaaatctctctagctgcagaggctcatagctgagtccctctcagggaaccgcccttagccaaagagagctgccgtgc

SEQ ID NO: 77184 - DNA, 82 bp, Homo sapiens
tagctgcagaggctcatagctgagtccctctcagggaaccgcccttagccaaagagagctgccgtgcccaaggctatgccta

SEQ ID NO: 77185 - DNA, 75 bp, Homo sapiens
atagctgagtccctctcagggaaccgcccttagccaaagagagctgccgtgcccaaggctatgcctagagtaggg

SEQ ID NO: 77186 - DNA, 78 bp, Homo sapiens
tcagggaaccgcccttagccaaagagagctgccgtgcccaaggctatgcctagagtaggggtgcagggtgcacatcta

SEQ ID NO: 77187 - DNA, 80 bp, Homo sapiens
tagccaaagagagctgccgtgcccaaggctatgcctagagtaggggtgcagggtgcacatctaatgactggggtgagagg

SEQ ID NO: 77188 - DNA, 78 bp, Homo sapiens
agctgccgtgcccaaggctatgcctagagtaggggtgcagggtgcacatctaatgactggggtgagaggggatcaacg

SEQ ID NO: 77189 - DNA, 76 bp, Homo sapiens
aaggctatgcctagagtaggggtgcagggtgcacatctaatgactggggtgagaggggatcaacggcccaccaatc

SEQ ID NO: 77190 - DNA, 76 bp, Homo sapiens
tagagtaggggtgcagggtgcacatctaatgactggggtgagaggggatcaacggcccaccaatccccttgtctca

SEQ ID NO: 77191 - DNA, 76 bp, Homo sapiens
gtgcagggtgcacatctaatgactggggtgagaggggatcaacggcccaccaatccccttgtctcaaatcaaacaa

SEQ ID NO: 77192 - DNA, 72 bp, Homo sapiens
ctaatgactggggtgagaggggatcaacggcccaccaatccccttgtctcaaatcaaacaattctgaaggcc

SEQ ID NO: 77193 - DNA, 71 bp, Homo sapiens
gggtgagaggggatcaacggcccaccaatccccttgtctcaaatcaaacaattctgaaggcccctcccagc

SEQ ID NO: 77194 - DNA, 73 bp, Homo sapiens
atcaacggcccaccaatccccttgtctcaaatcaaacaattctgaaggcccctcccagctcagagctccccac

SEQ ID NO: 77195 - DNA, 74 bp, Homo sapiens
accaatccccttgtctcaaatcaaacaattctgaaggcccctcccagctcagagctccccacggcgctgccgag

SEQ ID NO: 77196 - DNA, 76 bp, Homo sapiens
ttgtctcaaatcaaacaattctgaaggcccctcccagctcagagctccccacggcgctgccgaggcctccttggtg

SEQ ID NO: 77197 - DNA, 76 bp, Homo sapiens
aaacaattctgaaggcccctcccagctcagagctccccacggcgctgccgaggcctccttggtggccgcattgcaa

SEQ ID NO: 77198 - DNA, 78 bp, Homo sapiens
ccctcccagctcagagctccccacggcgctgccgaggcctccttggtggccgcattgcaatgctgcttccttccttcc

SEQ ID NO: 77199 - DNA, 73 bp, Homo sapiens
acggcgctgccgaggcctccttggtggccgcattgcaatgctgcttccttccttccccgggggttgctcccag

SEQ ID NO: 77200 - DNA, 73 bp, Homo sapiens
aggcctccttggtggccgcattgcaatgctgcttccttccttccccgggggttgctcccaggagcacacaccc

SEQ ID NO: 77201 - DNA, 74 bp, Homo sapiens
cttggtggccgcattgcaatgctgcttccttccttccccgggggttgctcccaggagcacacaccctactgaaa

SEQ ID NO: 77202 - DNA, 75 bp, Homo sapiens
ttgcaatgctgcttccttccttccccgggggttgctcccaggagcacacaccctactgaaactcctgcatgtaaa

SEQ ID NO: 77203 - DNA, 74 bp, Homo sapiens
gcttccttccttccccgggggttgctcccaggagcacacaccctactgaaactcctgcatgtaaatctgcctca

SEQ ID NO: 77204 - DNA, 73 bp, Homo sapiens
ttccttccccgggggttgctcccaggagcacacaccctactgaaactcctgcatgtaaatctgcctcaagtct

SEQ ID NO: 77205 - DNA, 78 bp, Homo sapiens
gttgctcccaggagcacacaccctactgaaactcctgcatgtaaatctgcctcaagtcttcttgagaacctgacctaa

SEQ ID NO: 77206 - DNA, 78 bp, Homo sapiens
aggagcacacaccctactgaaactcctgcatgtaaatctgcctcaagtcttcttgagaacctgacctaagtcctgcaa

SEQ ID NO: 77207 - DNA, 78 bp, Homo sapiens
acacaccctactgaaactcctgcatgtaaatctgcctcaagtcttcttgagaacctgacctaagtcctgcaacacaca

SEQ ID NO: 77208 - DNA, 79 bp, Homo sapiens
aaactcctgcatgtaaatctgcctcaagtcttcttgagaacctgacctaagtcctgcaacacacacattccatccagct

SEQ ID NO: 77209 - DNA, 77 bp, Homo sapiens
atgtaaatctgcctcaagtcttcttgagaacctgacctaagtcctgcaacacacacattccatccagcttttttcta

SEQ ID NO: 77210 - DNA, 78 bp, Homo sapiens
tctgcctcaagtcttcttgagaacctgacctaagtcctgcaacacacacattccatccagcttttttctaggaaatca

SEQ ID NO: 77211 - DNA, 77 bp, Homo sapiens
ttcttgagaacctgacctaagtcctgcaacacacacattccatccagcttttttctaggaaatcagcactttgtcca

SEQ ID NO: 77212 - DNA, 76 bp, Homo sapiens
aacctgacctaagtcctgcaacacacacattccatccagcttttttctaggaaatcagcactttgtccatccctca

SEQ ID NO: 77213 - DNA, 81 bp, Homo sapiens
tcctgcaacacacacattccatccagcttttttctaggaaatcagcactttgtccatccctcagacagctcagatcctaac

SEQ ID NO: 77214 - DNA, 79 bp, Homo sapiens
acacacattccatccagcttttttctaggaaatcagcactttgtccatccctcagacagctcagatcctaaccttgaca

SEQ ID NO: 77215 - DNA, 77 bp, Homo sapiens
atccagcttttttctaggaaatcagcactttgtccatccctcagacagctcagatcctaaccttgacaccttatctc

SEQ ID NO: 77216 - DNA, 76 bp, Homo sapiens
tttttctaggaaatcagcactttgtccatccctcagacagctcagatcctaaccttgacaccttatctccttgagg

SEQ ID NO: 77217 - DNA, 77 bp, Homo sapiens
aaatcagcactttgtccatccctcagacagctcagatcctaaccttgacaccttatctccttgagggtcgaagccac

SEQ ID NO: 77218 - DNA, 76 bp, Homo sapiens
tttgtccatccctcagacagctcagatcctaaccttgacaccttatctccttgagggtcgaagccacggctggttc

SEQ ID NO: 77219 - DNA, 72 bp, Homo sapiens
taaccttgacaccttatctccttgagggtcgaagccacggctggttcgccctctcaaatacggcacctggcc

SEQ ID NO: 77220 - DNA, 74 bp, Homo sapiens
accttatctccttgagggtcgaagccacggctggttcgccctctcaaatacggcacctggcctgaaggatgcaa

SEQ ID NO: 77221 - DNA, 75 bp, Homo sapiens
ccttgagggtcgaagccacggctggttcgccctctcaaatacggcacctggcctgaaggatgcaaggacagatgg

SEQ ID NO: 77222 - DNA, 76 bp, Homo sapiens
aagccacggctggttcgccctctcaaatacggcacctggcctgaaggatgcaaggacagatgggccaacagaaaga

SEQ ID NO: 77223 - DNA, 78 bp, Homo sapiens
gttcgccctctcaaatacggcacctggcctgaaggatgcaaggacagatgggccaacagaaagacggacattgtgaca

SEQ ID NO: 77224 - DNA, 81 bp, Homo sapiens
tcaaatacggcacctggcctgaaggatgcaaggacagatgggccaacagaaagacggacattgtgacagcacaagagagat

SEQ ID NO: 77225 - DNA, 82 bp, Homo sapiens
aaggatgcaaggacagatgggccaacagaaagacggacattgtgacagcacaagagagattcccacctgatgtgctctccag

SEQ ID NO: 77226 - DNA, 80 bp, Homo sapiens
gccaacagaaagacggacattgtgacagcacaagagagattcccacctgatgtgctctccaggaataaacagcagggaaa

SEQ ID NO: 77227 - DNA, 77 bp, Homo sapiens
agaaagacggacattgtgacagcacaagagagattcccacctgatgtgctctccaggaataaacagcagggaaaagg

SEQ ID NO: 77228 - DNA, 77 bp, Homo sapiens
acattgtgacagcacaagagagattcccacctgatgtgctctccaggaataaacagcagggaaaaggtcccagaaaa

SEQ ID NO: 77229 - DNA, 71 bp, Homo sapiens
acaagagagattcccacctgatgtgctctccaggaataaacagcagggaaaaggtcccagaaaactttccc

SEQ ID NO: 77230 - DNA, 71 bp, Homo sapiens
agattcccacctgatgtgctctccaggaataaacagcagggaaaaggtcccagaaaactttccctttgtgc

SEQ ID NO: 77231 - DNA, 67 bp, Homo sapiens
aggaataaacagcagggaaaaggtcccagaaaactttccctttgtgctgctgccaccacccctttgg

SEQ ID NO: 77232 - DNA, 71 bp, Homo sapiens
taaacagcagggaaaaggtcccagaaaactttccctttgtgctgctgccaccacccctttggtggctgaca

SEQ ID NO: 77233 - DNA, 70 bp, Homo sapiens
aggtcccagaaaactttccctttgtgctgctgccaccacccctttggtggctgacaccattgaccttatt

SEQ ID NO: 77234 - DNA, 69 bp, Homo sapiens
agaaaactttccctttgtgctgctgccaccacccctttggtggctgacaccattgaccttattttaaaa

SEQ ID NO: 77235 - DNA, 71 bp, Homo sapiens
ttccctttgtgctgctgccaccacccctttggtggctgacaccattgaccttattttaaaaggaagtccca

SEQ ID NO: 77236 - DNA, 75 bp, Homo sapiens
tgccaccacccctttggtggctgacaccattgaccttattttaaaaggaagtcccaccagctgatgtgcagacac

SEQ ID NO: 77237 - DNA, 74 bp, Homo sapiens
cctttggtggctgacaccattgaccttattttaaaaggaagtcccaccagctgatgtgcagacaccacctttga

SEQ ID NO: 77238 - DNA, 75 bp, Homo sapiens
ctgacaccattgaccttattttaaaaggaagtcccaccagctgatgtgcagacaccacctttgatcttctggttg

SEQ ID NO: 77239 - DNA, 81 bp, Homo sapiens
aagtcccaccagctgatgtgcagacaccacctttgatcttctggttggggcagagggtcacaattcatgcactgactactc

SEQ ID NO: 77240 - DNA, 78 bp, Homo sapiens
gacaccacctttgatcttctggttggggcagagggtcacaattcatgcactgactactccttccatccttgcacccat

SEQ ID NO: 77241 - DNA, 79 bp, Homo sapiens
acctttgatcttctggttggggcagagggtcacaattcatgcactgactactccttccatccttgcacccattcatcca

SEQ ID NO: 77242 - DNA, 82 bp, Homo sapiens
tctggttggggcagagggtcacaattcatgcactgactactccttccatccttgcacccattcatccatcactgtttgccta

SEQ ID NO: 77243 - DNA, 82 bp, Homo sapiens
agagggtcacaattcatgcactgactactccttccatccttgcacccattcatccatcactgtttgcctactacctgcgagc

SEQ ID NO: 77244 - DNA, 83 bp, Homo sapiens
acaattcatgcactgactactccttccatccttgcacccattcatccatcactgtttgcctactacctgcgagccatcaccaa

SEQ ID NO: 77245 - DNA, 80 bp, Homo sapiens
ttgcacccattcatccatcactgtttgcctactacctgcgagccatcaccaaccactgcggacccaaaataacatctgga

SEQ ID NO: 77246 - DNA, 78 bp, Homo sapiens
atccatcactgtttgcctactacctgcgagccatcaccaaccactgcggacccaaaataacatctggactattgaaca

SEQ ID NO: 77247 - DNA, 76 bp, Homo sapiens
actgtttgcctactacctgcgagccatcaccaaccactgcggacccaaaataacatctggactattgaacagagaa

SEQ ID NO: 77248 - DNA, 78 bp, Homo sapiens
cctactacctgcgagccatcaccaaccactgcggacccaaaataacatctggactattgaacagagaagctgctggtc

SEQ ID NO: 77249 - DNA, 75 bp, Homo sapiens
ccatcaccaaccactgcggacccaaaataacatctggactattgaacagagaagctgctggtccccgttcctctc

SEQ ID NO: 77250 - DNA, 72 bp, Homo sapiens
accaaccactgcggacccaaaataacatctggactattgaacagagaagctgctggtccccgttcctctccc

SEQ ID NO: 77251 - DNA, 74 bp, Homo sapiens
aataacatctggactattgaacagagaagctgctggtccccgttcctctccccatcccccatccttgagccctc

SEQ ID NO: 77252 - DNA, 74 bp, Homo sapiens
tattgaacagagaagctgctggtccccgttcctctccccatcccccatccttgagccctccatgaagggaacta

SEQ ID NO: 77253 - DNA, 73 bp, Homo sapiens
tggtccccgttcctctccccatcccccatccttgagccctccatgaagggaactaccagtacagaggcaatca

SEQ ID NO: 77254 - DNA, 77 bp, Homo sapiens
gttcctctccccatcccccatccttgagccctccatgaagggaactaccagtacagaggcaatcagaacagcagcca

SEQ ID NO: 77255 - DNA, 78 bp, Homo sapiens
ccatcccccatccttgagccctccatgaagggaactaccagtacagaggcaatcagaacagcagccagcagctccggg

SEQ ID NO: 77256 - DNA, 80 bp, Homo sapiens
atccttgagccctccatgaagggaactaccagtacagaggcaatcagaacagcagccagcagctccgggggctgcaggag

SEQ ID NO: 77257 - DNA, 79 bp, Homo sapiens
atgaagggaactaccagtacagaggcaatcagaacagcagccagcagctccgggggctgcaggaggctctgaaacccta

SEQ ID NO: 77258 - DNA, 78 bp, Homo sapiens
aactaccagtacagaggcaatcagaacagcagccagcagctccgggggctgcaggaggctctgaaaccctaggtggac

SEQ ID NO: 77259 - DNA, 82 bp, Homo sapiens
agtacagaggcaatcagaacagcagccagcagctccgggggctgcaggaggctctgaaaccctaggtggacgctggcctgca

SEQ ID NO: 77260 - DNA, 84 bp, Homo sapiens
aatcagaacagcagccagcagctccgggggctgcaggaggctctgaaaccctaggtggacgctggcctgcagtctgaatgctgc

SEQ ID NO: 77261 - DNA, 83 bp, Homo sapiens
agccagcagctccgggggctgcaggaggctctgaaaccctaggtggacgctggcctgcagtctgaatgctgctgtccatgtgg

SEQ ID NO: 77262 - DNA, 80 bp, Homo sapiens
agctccgggggctgcaggaggctctgaaaccctaggtggacgctggcctgcagtctgaatgctgctgtccatgtggggac

SEQ ID NO: 77263 - DNA, 78 bp, Homo sapiens
aggaggctctgaaaccctaggtggacgctggcctgcagtctgaatgctgctgtccatgtggggacccgatgggaggcc

SEQ ID NO: 77264 - DNA, 77 bp, Homo sapiens
tctgaaaccctaggtggacgctggcctgcagtctgaatgctgctgtccatgtggggacccgatgggaggcccctttc

SEQ ID NO: 77265 - DNA, 76 bp, Homo sapiens
cctaggtggacgctggcctgcagtctgaatgctgctgtccatgtggggacccgatgggaggcccctttccctgccc

SEQ ID NO: 77266 - DNA, 79 bp, Homo sapiens
tggcctgcagtctgaatgctgctgtccatgtggggacccgatgggaggcccctttccctgccctcactggcctggtcaa

SEQ ID NO: 77267 - DNA, 77 bp, Homo sapiens
tctgaatgctgctgtccatgtggggacccgatgggaggcccctttccctgccctcactggcctggtcaactcccaga

SEQ ID NO: 77268 - DNA, 72 bp, Homo sapiens
ctgctgtccatgtggggacccgatgggaggcccctttccctgccctcactggcctggtcaactcccagaccc

SEQ ID NO: 77269 - DNA, 69 bp, Homo sapiens
gggacccgatgggaggcccctttccctgccctcactggcctggtcaactcccagaccccccacaagcta

SEQ ID NO: 77270 - DNA, 71 bp, Homo sapiens
tgggaggcccctttccctgccctcactggcctggtcaactcccagaccccccacaagctagagtctccgta

SEQ ID NO: 77271 - DNA, 72 bp, Homo sapiens
tttccctgccctcactggcctggtcaactcccagaccccccacaagctagagtctccgtaagtaccatatcc

SEQ ID NO: 77272 - DNA, 70 bp, Homo sapiens
tggtcaactcccagaccccccacaagctagagtctccgtaagtaccatatccctcccctctaacctccaa

SEQ ID NO: 77273 - DNA, 68 bp, Homo sapiens
aactcccagaccccccacaagctagagtctccgtaagtaccatatccctcccctctaacctccaaatg

SEQ ID NO: 77274 - DNA, 74 bp, Homo sapiens
cacaagctagagtctccgtaagtaccatatccctcccctctaacctccaaatgggccccatcagggacgatgca

SEQ ID NO: 77275 - DNA, 74 bp, Homo sapiens
agtctccgtaagtaccatatccctcccctctaacctccaaatgggccccatcagggacgatgcagctgcctgaa

SEQ ID NO: 77276 - DNA, 75 bp, Homo sapiens
cgtaagtaccatatccctcccctctaacctccaaatgggccccatcagggacgatgcagctgcctgaaggattca

SEQ ID NO: 77277 - DNA, 77 bp, Homo sapiens
atatccctcccctctaacctccaaatgggccccatcagggacgatgcagctgcctgaaggattcagcccagtccatc

SEQ ID NO: 77278 - DNA, 81 bp, Homo sapiens
aaatgggccccatcagggacgatgcagctgcctgaaggattcagcccagtccatctccttgtcttggcgagatctgaccaa

SEQ ID NO: 77279 - DNA, 82 bp, Homo sapiens
atcagggacgatgcagctgcctgaaggattcagcccagtccatctccttgtcttggcgagatctgaccaacccataacacaa

SEQ ID NO: 77280 - DNA, 83 bp, Homo sapiens
atgcagctgcctgaaggattcagcccagtccatctccttgtcttggcgagatctgaccaacccataacacaaagacactgtga

SEQ ID NO: 77281 - DNA, 79 bp, Homo sapiens
cctgaaggattcagcccagtccatctccttgtcttggcgagatctgaccaacccataacacaaagacactgtgagcctg

SEQ ID NO: 77282 - DNA, 78 bp, Homo sapiens
attcagcccagtccatctccttgtcttggcgagatctgaccaacccataacacaaagacactgtgagcctggggcagg

SEQ ID NO: 77283 - DNA, 80 bp, Homo sapiens
agtccatctccttgtcttggcgagatctgaccaacccataacacaaagacactgtgagcctggggcagggatggtgctga

SEQ ID NO: 77284 - DNA, 80 bp, Homo sapiens
cttgtcttggcgagatctgaccaacccataacacaaagacactgtgagcctggggcagggatggtgctgagccaggccag

SEQ ID NO: 77285 - DNA, 80 bp, Homo sapiens
cgagatctgaccaacccataacacaaagacactgtgagcctggggcagggatggtgctgagccaggccaggccaggccag

SEQ ID NO: 77286 - DNA, 84 bp, Homo sapiens
acacaaagacactgtgagcctggggcagggatggtgctgagccaggccaggccaggccaggcagacatctggagagagccactg

SEQ ID NO: 77287 - DNA, 84 bp, Homo sapiens
actgtgagcctggggcagggatggtgctgagccaggccaggccaggccaggcagacatctggagagagccactggggctctggc

SEQ ID NO: 77288 - DNA, 84 bp, Homo sapiens
cagggatggtgctgagccaggccaggccaggccaggcagacatctggagagagccactggggctctggctgggtgacctcacca

SEQ ID NO: 77289 - DNA, 83 bp, Homo sapiens
gccaggccaggccaggcagacatctggagagagccactggggctctggctgggtgacctcaccagcagcaggacaagtcaccc

SEQ ID NO: 77290 - DNA, 81 bp, Homo sapiens
agacatctggagagagccactggggctctggctgggtgacctcaccagcagcaggacaagtcaccccagaggaccatacta

SEQ ID NO: 77291 - DNA, 78 bp, Homo sapiens
agagagccactggggctctggctgggtgacctcaccagcagcaggacaagtcaccccagaggaccatactacccacag

SEQ ID NO: 77292 - DNA, 76 bp, Homo sapiens
ggctctggctgggtgacctcaccagcagcaggacaagtcaccccagaggaccatactacccacagggaggaagccg

SEQ ID NO: 77293 - DNA, 73 bp, Homo sapiens
accagcagcaggacaagtcaccccagaggaccatactacccacagggaggaagccgtgtccaggtcttttcca

SEQ ID NO: 77294 - DNA, 70 bp, Homo sapiens
aggacaagtcaccccagaggaccatactacccacagggaggaagccgtgtccaggtcttttccaatacaa

SEQ ID NO: 77295 - DNA, 69 bp, Homo sapiens
accccagaggaccatactacccacagggaggaagccgtgtccaggtcttttccaatacaagattcccta

SEQ ID NO: 77296 - DNA, 71 bp, Homo sapiens
accatactacccacagggaggaagccgtgtccaggtcttttccaatacaagattccctaatctgcttacaa

SEQ ID NO: 77297 - DNA, 74 bp, Homo sapiens
cacagggaggaagccgtgtccaggtcttttccaatacaagattccctaatctgcttacaacacatctggctcct

SEQ ID NO: 77298 - DNA, 74 bp, Homo sapiens
aggaagccgtgtccaggtcttttccaatacaagattccctaatctgcttacaacacatctggctccttgaccaa

SEQ ID NO: 77299 - DNA, 77 bp, Homo sapiens
caggtcttttccaatacaagattccctaatctgcttacaacacatctggctccttgaccaagtcacagtaagactga

SEQ ID NO: 77300 - DNA, 81 bp, Homo sapiens
aacacatctggctccttgaccaagtcacagtaagactgaagcggcagctccaggcctcaagagatgctggattgagaccct

SEQ ID NO: 77301 - DNA, 84 bp, Homo sapiens
tccttgaccaagtcacagtaagactgaagcggcagctccaggcctcaagagatgctggattgagacccttctgcattctctgga

SEQ ID NO: 77302 - DNA, 83 bp, Homo sapiens
aagtcacagtaagactgaagcggcagctccaggcctcaagagatgctggattgagacccttctgcattctctggacgtccatc

SEQ ID NO: 77303 - DNA, 82 bp, Homo sapiens
ggcagctccaggcctcaagagatgctggattgagacccttctgcattctctggacgtccatccctgtggtcttaggtcatcc

SEQ ID NO: 77304 - DNA, 80 bp, Homo sapiens
aggcctcaagagatgctggattgagacccttctgcattctctggacgtccatccctgtggtcttaggtcatcccggatga

SEQ ID NO: 77305 - DNA, 81 bp, Homo sapiens
agagatgctggattgagacccttctgcattctctggacgtccatccctgtggtcttaggtcatcccggatgactgcccaca

SEQ ID NO: 77306 - DNA, 78 bp, Homo sapiens
ttgagacccttctgcattctctggacgtccatccctgtggtcttaggtcatcccggatgactgcccacactctactaa

SEQ ID NO: 77307 - DNA, 80 bp, Homo sapiens
cttctgcattctctggacgtccatccctgtggtcttaggtcatcccggatgactgcccacactctactaacagagccatg

SEQ ID NO: 77308 - DNA, 80 bp, Homo sapiens
ttctctggacgtccatccctgtggtcttaggtcatcccggatgactgcccacactctactaacagagccatggccacaca

SEQ ID NO: 77309 - DNA, 79 bp, Homo sapiens
gtccatccctgtggtcttaggtcatcccggatgactgcccacactctactaacagagccatggccacacaggccccaga

SEQ ID NO: 77310 - DNA, 78 bp, Homo sapiens
tggtcttaggtcatcccggatgactgcccacactctactaacagagccatggccacacaggccccagaggttctagga

SEQ ID NO: 77311 - DNA, 77 bp, Homo sapiens
atcccggatgactgcccacactctactaacagagccatggccacacaggccccagaggttctaggaggaacagtgcg

SEQ ID NO: 77312 - DNA, 79 bp, Homo sapiens
atgactgcccacactctactaacagagccatggccacacaggccccagaggttctaggaggaacagtgcggtcagagtg

SEQ ID NO: 77313 - DNA, 77 bp, Homo sapiens
actctactaacagagccatggccacacaggccccagaggttctaggaggaacagtgcggtcagagtggaagaagtga

SEQ ID NO: 77314 - DNA, 78 bp, Homo sapiens
aacagagccatggccacacaggccccagaggttctaggaggaacagtgcggtcagagtggaagaagtgagatgtgccc

SEQ ID NO: 77315 - DNA, 74 bp, Homo sapiens
acacaggccccagaggttctaggaggaacagtgcggtcagagtggaagaagtgagatgtgccccggggagcctc

SEQ ID NO: 77316 - DNA, 73 bp, Homo sapiens
cccagaggttctaggaggaacagtgcggtcagagtggaagaagtgagatgtgccccggggagcctcttcccac

SEQ ID NO: 77317 - DNA, 72 bp, Homo sapiens
taggaggaacagtgcggtcagagtggaagaagtgagatgtgccccggggagcctcttcccaccccacctaat

SEQ ID NO: 77318 - DNA, 72 bp, Homo sapiens
agtgcggtcagagtggaagaagtgagatgtgccccggggagcctcttcccaccccacctaattcacacaaaa

SEQ ID NO: 77319 - DNA, 70 bp, Homo sapiens
aagaagtgagatgtgccccggggagcctcttcccaccccacctaattcacacaaaacacatattttccta

SEQ ID NO: 77320 - DNA, 67 bp, Homo sapiens
ccccggggagcctcttcccaccccacctaattcacacaaaacacatattttcctagtggtaactaga

SEQ ID NO: 77321 - DNA, 70 bp, Homo sapiens
cctcttcccaccccacctaattcacacaaaacacatattttcctagtggtaactagaactccattcagac

SEQ ID NO: 77322 - DNA, 71 bp, Homo sapiens
tcccaccccacctaattcacacaaaacacatattttcctagtggtaactagaactccattcagacctcttc

SEQ ID NO: 77323 - DNA, 75 bp, Homo sapiens
taattcacacaaaacacatattttcctagtggtaactagaactccattcagacctcttccgctgagacccagaga

SEQ ID NO: 77324 - DNA, 74 bp, Homo sapiens
aaaacacatattttcctagtggtaactagaactccattcagacctcttccgctgagacccagagagccatatac

SEQ ID NO: 77325 - DNA, 79 bp, Homo sapiens
tattttcctagtggtaactagaactccattcagacctcttccgctgagacccagagagccatatactggccatggatga

SEQ ID NO: 77326 - DNA, 79 bp, Homo sapiens
tggtaactagaactccattcagacctcttccgctgagacccagagagccatatactggccatggatgaaaccagtctaa

SEQ ID NO: 77327 - DNA, 77 bp, Homo sapiens
ctcttccgctgagacccagagagccatatactggccatggatgaaaccagtctaagggaggtactattttagcatta

SEQ ID NO: 77328 - DNA, 78 bp, Homo sapiens
gagacccagagagccatatactggccatggatgaaaccagtctaagggaggtactattttagcattaatgctaagagc

SEQ ID NO: 77329 - DNA, 77 bp, Homo sapiens
agagagccatatactggccatggatgaaaccagtctaagggaggtactattttagcattaatgctaagagccaaaga

SEQ ID NO: 77330 - DNA, 75 bp, Homo sapiens
atatactggccatggatgaaaccagtctaagggaggtactattttagcattaatgctaagagccaaagatgttaa

SEQ ID NO: 77331 - DNA, 75 bp, Homo sapiens
atggatgaaaccagtctaagggaggtactattttagcattaatgctaagagccaaagatgttaatcttctcctca

SEQ ID NO: 77332 - DNA, 78 bp, Homo sapiens
tctaagggaggtactattttagcattaatgctaagagccaaagatgttaatcttctcctcagcgaatgccagtgtcta

SEQ ID NO: 77333 - DNA, 76 bp, Homo sapiens
gggaggtactattttagcattaatgctaagagccaaagatgttaatcttctcctcagcgaatgccagtgtctaccc

SEQ ID NO: 77334 - DNA, 78 bp, Homo sapiens
ttttagcattaatgctaagagccaaagatgttaatcttctcctcagcgaatgccagtgtctaccccacatagaataaa

SEQ ID NO: 77335 - DNA, 77 bp, Homo sapiens
taatgctaagagccaaagatgttaatcttctcctcagcgaatgccagtgtctaccccacatagaataaaacttataa

SEQ ID NO: 77336 - DNA, 76 bp, Homo sapiens
agccaaagatgttaatcttctcctcagcgaatgccagtgtctaccccacatagaataaaacttataaagacagctg

SEQ ID NO: 77337 - DNA, 79 bp, Homo sapiens
aaatgaatggatgagtgagtgaatgaataatttgtaaagtgagagaccagttgaaagcttgaagactatgtaaatctga

SEQ ID NO: 77338 - DNA, 79 bp, Homo sapiens
tgagtgagtgaatgaataatttgtaaagtgagagaccagttgaaagcttgaagactatgtaaatctgagtttcaaagca

SEQ ID NO: 77339 - DNA, 77 bp, Homo sapiens
aatgaataatttgtaaagtgagagaccagttgaaagcttgaagactatgtaaatctgagtttcaaagcacagatgcc

SEQ ID NO: 77340 - DNA, 75 bp, Homo sapiens
ataatttgtaaagtgagagaccagttgaaagcttgaagactatgtaaatctgagtttcaaagcacagatgcccct

SEQ ID NO: 77341 - DNA, 76 bp, Homo sapiens
aagtgagagaccagttgaaagcttgaagactatgtaaatctgagtttcaaagcacagatgccccttcttcaaaata

SEQ ID NO: 77342 - DNA, 66 bp, Homo sapiens
aattttaaaaacagtgagctaggcggaagttattaattttaaatagtcacttccgggcttcatttc

SEQ ID NO: 77343 - DNA, 67 bp, Homo sapiens
aacagtgagctaggcggaagttattaattttaaatagtcacttccgggcttcatttccccttgttaa

SEQ ID NO: 77344 - DNA, 67 bp, Homo sapiens
acagtgagctaggcggaagttattaattttaaatagtcacttccgggcttcatttccccttgttaag

SEQ ID NO: 77345 - DNA, 69 bp, Homo sapiens
agctaggcggaagttattaattttaaatagtcacttccgggcttcatttccccttgttaaggctgcatc

SEQ ID NO: 77346 - DNA, 72 bp, Homo sapiens
gaagttattaattttaaatagtcacttccgggcttcatttccccttgttaaggctgcatcctgcctgcatta

SEQ ID NO: 77347 - DNA, 74 bp, Homo sapiens
tattaattttaaatagtcacttccgggcttcatttccccttgttaaggctgcatcctgcctgcattagcaatat

SEQ ID NO: 77348 - DNA, 74 bp, Homo sapiens
attttaaatagtcacttccgggcttcatttccccttgttaaggctgcatcctgcctgcattagcaatattgggc

SEQ ID NO: 77349 - DNA, 76 bp, Homo sapiens
aaatagtcacttccgggcttcatttccccttgttaaggctgcatcctgcctgcattagcaatattgggctccagtg

SEQ ID NO: 77350 - DNA, 76 bp, Homo sapiens
gtcacttccgggcttcatttccccttgttaaggctgcatcctgcctgcattagcaatattgggctccagtgggaaa

SEQ ID NO: 77351 - DNA, 77 bp, Homo sapiens
ttcatttccccttgttaaggctgcatcctgcctgcattagcaatattgggctccagtgggaaagccacaaggagccc

SEQ ID NO: 77352 - DNA, 75 bp, Homo sapiens
atttccccttgttaaggctgcatcctgcctgcattagcaatattgggctccagtgggaaagccacaaggagcccc

SEQ ID NO: 77353 - DNA, 76 bp, Homo sapiens
atcctgcctgcattagcaatattgggctccagtgggaaagccacaaggagcccctggacctaagccactggttatg

SEQ ID NO: 77354 - DNA, 74 bp, Homo sapiens
attagcaatattgggctccagtgggaaagccacaaggagcccctggacctaagccactggttatggtgactggc

SEQ ID NO: 77355 - DNA, 72 bp, Homo sapiens
agtgggaaagccacaaggagcccctggacctaagccactggttatggtgactggccatgggcccacctacaa

SEQ ID NO: 77356 - DNA, 73 bp, Homo sapiens
ccctggacctaagccactggttatggtgactggccatgggcccacctacaagcctctggcccccagtggcctc

SEQ ID NO: 77357 - DNA, 74 bp, Homo sapiens
ttatggtgactggccatgggcccacctacaagcctctggcccccagtggcctcctgctggggctcgtccacttt

SEQ ID NO: 77358 - DNA, 76 bp, Homo sapiens
cacctacaagcctctggcccccagtggcctcctgctggggctcgtccacttttcttggcttgtgccggctctctgc

SEQ ID NO: 77359 - DNA, 76 bp, Homo sapiens
acaagcctctggcccccagtggcctcctgctggggctcgtccacttttcttggcttgtgccggctctctgctgccc

SEQ ID NO: 77360 - DNA, 76 bp, Homo sapiens
ccagtggcctcctgctggggctcgtccacttttcttggcttgtgccggctctctgctgccccctgtggttatcagg

SEQ ID NO: 77361 - DNA, 75 bp, Homo sapiens
tcctgctggggctcgtccacttttcttggcttgtgccggctctctgctgccccctgtggttatcaggtaaaataa

SEQ ID NO: 77362 - DNA, 74 bp, Homo sapiens
ctcgtccacttttcttggcttgtgccggctctctgctgccccctgtggttatcaggtaaaataaccacagatac

SEQ ID NO: 77363 - DNA, 77 bp, Homo sapiens
ttgtgccggctctctgctgccccctgtggttatcaggtaaaataaccacagataccagagcagaaggaaatggactc

SEQ ID NO: 77364 - DNA, 75 bp, Homo sapiens
cggctctctgctgccccctgtggttatcaggtaaaataaccacagataccagagcagaaggaaatggactctggg

SEQ ID NO: 77365 - DNA, 73 bp, Homo sapiens
ccctgtggttatcaggtaaaataaccacagataccagagcagaaggaaatggactctggggtcttgactttga

SEQ ID NO: 77366 - DNA, 76 bp, Homo sapiens
ttatcaggtaaaataaccacagataccagagcagaaggaaatggactctggggtcttgactttgatctgagattcc

SEQ ID NO: 77367 - DNA, 76 bp, Homo sapiens
agaaggaaatggactctggggtcttgactttgatctgagattcctgcagtcttctcctctttgcctctctttatac

SEQ ID NO: 77368 - DNA, 76 bp, Homo sapiens
aatggactctggggtcttgactttgatctgagattcctgcagtcttctcctctttgcctctctttatactcaccct

SEQ ID NO: 77369 - DNA, 81 bp, Homo sapiens
gtcttgactttgatctgagattcctgcagtcttctcctctttgcctctctttatactcacccttctgtgctacttgctcta

SEQ ID NO: 77370 - DNA, 80 bp, Homo sapiens
actttgatctgagattcctgcagtcttctcctctttgcctctctttatactcacccttctgtgctacttgctctatctcc

SEQ ID NO: 77371 - DNA, 77 bp, Homo sapiens
agattcctgcagtcttctcctctttgcctctctttatactcacccttctgtgctacttgctctatctcctcctcccc

SEQ ID NO: 77372 - DNA, 75 bp, Homo sapiens
tcttctcctctttgcctctctttatactcacccttctgtgctacttgctctatctcctcctcccccaccaccaaa

SEQ ID NO: 77373 - DNA, 72 bp, Homo sapiens
tctctttatactcacccttctgtgctacttgctctatctcctcctcccccaccaccaaattttctttcttcc

SEQ ID NO: 77374 - DNA, 70 bp, Homo sapiens
ccttctgtgctacttgctctatctcctcctcccccaccaccaaattttctttcttccttgccctggtttg

SEQ ID NO: 77375 - DNA, 70 bp, Homo sapiens
tacttgctctatctcctcctcccccaccaccaaattttctttcttccttgccctggtttggcggtctctc

SEQ ID NO: 77376 - DNA, 69 bp, Homo sapiens
tatctcctcctcccccaccaccaaattttctttcttccttgccctggtttggcggtctctctacccatg

SEQ ID NO: 77377 - DNA, 69 bp, Homo sapiens
tcccccaccaccaaattttctttcttccttgccctggtttggcggtctctctacccatggcttctctcc

SEQ ID NO: 77378 - DNA, 70 bp, Homo sapiens
accaaattttctttcttccttgccctggtttggcggtctctctacccatggcttctctccttgccctgta

SEQ ID NO: 77379 - DNA, 73 bp, Homo sapiens
tttcttccttgccctggtttggcggtctctctacccatggcttctctccttgccctgtagtcctcacaaggag

SEQ ID NO: 77380 - DNA, 75 bp, Homo sapiens
ttgccctggtttggcggtctctctacccatggcttctctccttgccctgtagtcctcacaaggagggtctgccta

SEQ ID NO: 77381 - DNA, 77 bp, Homo sapiens
gtttggcggtctctctacccatggcttctctccttgccctgtagtcctcacaaggagggtctgcctagctatggcca

SEQ ID NO: 77382 - DNA, 76 bp, Homo sapiens
tctctacccatggcttctctccttgccctgtagtcctcacaaggagggtctgcctagctatggccaggtttttcta

SEQ ID NO: 77383 - DNA, 77 bp, Homo sapiens
ttctctccttgccctgtagtcctcacaaggagggtctgcctagctatggccaggtttttctagtcagatggcagccc

SEQ ID NO: 77384 - DNA, 78 bp, Homo sapiens
tagtcctcacaaggagggtctgcctagctatggccaggtttttctagtcagatggcagccctgccactccgtttctca

SEQ ID NO: 77385 - DNA, 75 bp, Homo sapiens
aaggagggtctgcctagctatggccaggtttttctagtcagatggcagccctgccactccgtttctcagcccttc

SEQ ID NO: 77386 - DNA, 74 bp, Homo sapiens
cctagctatggccaggtttttctagtcagatggcagccctgccactccgtttctcagcccttctcccttcctac

SEQ ID NO: 77387 - DNA, 76 bp, Homo sapiens
agatggcagccctgccactccgtttctcagcccttctcccttcctacccagaagctggcttgcccccaggctatgc

SEQ ID NO: 77388 - DNA, 75 bp, Homo sapiens
cactccgtttctcagcccttctcccttcctacccagaagctggcttgcccccaggctatgctgccctgtcctcca

SEQ ID NO: 77389 - DNA, 75 bp, Homo sapiens
cgtttctcagcccttctcccttcctacccagaagctggcttgcccccaggctatgctgccctgtcctccaagcga

SEQ ID NO: 77390 - DNA, 76 bp, Homo sapiens
ttctcccttcctacccagaagctggcttgcccccaggctatgctgccctgtcctccaagcgagccccattgccttg

SEQ ID NO: 77391 - DNA, 78 bp, Homo sapiens
ttcctacccagaagctggcttgcccccaggctatgctgccctgtcctccaagcgagccccattgccttggtccaggca

SEQ ID NO: 77392 - DNA, 83 bp, Homo sapiens
ctggcttgcccccaggctatgctgccctgtcctccaagcgagccccattgccttggtccaggcagatgcagaatttgcaatca

SEQ ID NO: 77393 - DNA, 84 bp, Homo sapiens
ccaggctatgctgccctgtcctccaagcgagccccattgccttggtccaggcagatgcagaatttgcaatcaggccacattctc

SEQ ID NO: 77394 - DNA, 84 bp, Homo sapiens
ctatgctgccctgtcctccaagcgagccccattgccttggtccaggcagatgcagaatttgcaatcaggccacattctcctgga

SEQ ID NO: 77395 - DNA, 81 bp, Homo sapiens
ctccaagcgagccccattgccttggtccaggcagatgcagaatttgcaatcaggccacattctcctggaggcccctgctta

SEQ ID NO: 77396 - DNA, 79 bp, Homo sapiens
agccccattgccttggtccaggcagatgcagaatttgcaatcaggccacattctcctggaggcccctgcttatctccct

SEQ ID NO: 77397 - DNA, 80 bp, Homo sapiens
cttggtccaggcagatgcagaatttgcaatcaggccacattctcctggaggcccctgcttatctcccttggccaatacaa

SEQ ID NO: 77398 - DNA, 83 bp, Homo sapiens
gcagatgcagaatttgcaatcaggccacattctcctggaggcccctgcttatctcccttggccaatacaaaagcagcagttca

SEQ ID NO: 77399 - DNA, 79 bp, Homo sapiens
agaatttgcaatcaggccacattctcctggaggcccctgcttatctcccttggccaatacaaaagcagcagttcacaga

SEQ ID NO: 77400 - DNA, 77 bp, Homo sapiens
atcaggccacattctcctggaggcccctgcttatctcccttggccaatacaaaagcagcagttcacagagacctggt

SEQ ID NO: 77401 - DNA, 75 bp, Homo sapiens
acattctcctggaggcccctgcttatctcccttggccaatacaaaagcagcagttcacagagacctggttccctc

SEQ ID NO: 77402 - DNA, 76 bp, Homo sapiens
gcccctgcttatctcccttggccaatacaaaagcagcagttcacagagacctggttccctcctgcgcaccagagtt

SEQ ID NO: 77403 - DNA, 77 bp, Homo sapiens
ttatctcccttggccaatacaaaagcagcagttcacagagacctggttccctcctgcgcaccagagtttcctccatc

SEQ ID NO: 77404 - DNA, 76 bp, Homo sapiens
ttggccaatacaaaagcagcagttcacagagacctggttccctcctgcgcaccagagtttcctccatctctggttt

SEQ ID NO: 77405 - DNA, 75 bp, Homo sapiens
aaaagcagcagttcacagagacctggttccctcctgcgcaccagagtttcctccatctctggtttttcaatgcct

SEQ ID NO: 77406 - DNA, 75 bp, Homo sapiens
agttcacagagacctggttccctcctgcgcaccagagtttcctccatctctggtttttcaatgccttccagtaca

SEQ ID NO: 77407 - DNA, 77 bp, Homo sapiens
ctggttccctcctgcgcaccagagtttcctccatctctggtttttcaatgccttccagtacagccattgctacaaga

SEQ ID NO: 77408 - DNA, 78 bp, Homo sapiens
tcctgcgcaccagagtttcctccatctctggtttttcaatgccttccagtacagccattgctacaagacatttgaaat

SEQ ID NO: 77409 - DNA, 74 bp, Homo sapiens
agagtttcctccatctctggtttttcaatgccttccagtacagccattgctacaagacatttgaaattccctct

SEQ ID NO: 77410 - DNA, 74 bp, Homo sapiens
tccatctctggtttttcaatgccttccagtacagccattgctacaagacatttgaaattccctcttaaaagtaa

SEQ ID NO: 77411 - DNA, 74 bp, Homo sapiens
tggtttttcaatgccttccagtacagccattgctacaagacatttgaaattccctcttaaaagtaaatggctga

SEQ ID NO: 77412 - DNA, 71 bp, Homo sapiens
aaaattaaatgatatttaaatcacaaccacagtttctctgcaggaaagaaactactctctgaagaaccatt

SEQ ID NO: 77413 - DNA, 73 bp, Homo sapiens
aaatgatatttaaatcacaaccacagtttctctgcaggaaagaaactactctctgaagaaccatttacgcctg

SEQ ID NO: 77414 - DNA, 74 bp, Homo sapiens
ttaaatcacaaccacagtttctctgcaggaaagaaactactctctgaagaaccatttacgcctggtcacgccaa

SEQ ID NO: 77415 - DNA, 74 bp, Homo sapiens
agtttctctgcaggaaagaaactactctctgaagaaccatttacgcctggtcacgccaagcccctccacatctg

SEQ ID NO: 77416 - DNA, 76 bp, Homo sapiens
ctctgcaggaaagaaactactctctgaagaaccatttacgcctggtcacgccaagcccctccacatctggcatccc

SEQ ID NO: 77417 - DNA, 75 bp, Homo sapiens
aaactactctctgaagaaccatttacgcctggtcacgccaagcccctccacatctggcatccccttcagcggtca

SEQ ID NO: 77418 - DNA, 75 bp, Homo sapiens
tgaagaaccatttacgcctggtcacgccaagcccctccacatctggcatccccttcagcggtcacaaaacaccta

SEQ ID NO: 77419 - DNA, 73 bp, Homo sapiens
aagaaccatttacgcctggtcacgccaagcccctccacatctggcatccccttcagcggtcacaaaacaccta

SEQ ID NO: 77420 - DNA, 76 bp, Homo sapiens
accatttacgcctggtcacgccaagcccctccacatctggcatccccttcagcggtcacaaaacacctatgagata

SEQ ID NO: 77421 - DNA, 78 bp, Homo sapiens
cctggtcacgccaagcccctccacatctggcatccccttcagcggtcacaaaacacctatgagataggtgctgtcatt

SEQ ID NO: 77422 - DNA, 78 bp, Homo sapiens
tcacgccaagcccctccacatctggcatccccttcagcggtcacaaaacacctatgagataggtgctgtcatttcctt

SEQ ID NO: 77423 - DNA, 75 bp, Homo sapiens
ccaagcccctccacatctggcatccccttcagcggtcacaaaacacctatgagataggtgctgtcatttcctttt

SEQ ID NO: 77424 - DNA, 74 bp, Homo sapiens
aagcccctccacatctggcatccccttcagcggtcacaaaacacctatgagataggtgctgtcatttccttttt

SEQ ID NO: 77425 - DNA, 73 bp, Homo sapiens
ccctccacatctggcatccccttcagcggtcacaaaacacctatgagataggtgctgtcatttcctttttttt

SEQ ID NO: 77426 - DNA, 74 bp, Homo sapiens
agtgctgggactacgcgcccggcccatttccacttttaatggaaggaactgaggcctcagtgagaagtggcatc

SEQ ID NO: 77427 - DNA, 73 bp, Homo sapiens
actacgcgcccggcccatttccacttttaatggaaggaactgaggcctcagtgagaagtggcatctctggaac

SEQ ID NO: 77428 - DNA, 77 bp, Homo sapiens
ccatttccacttttaatggaaggaactgaggcctcagtgagaagtggcatctctggaactcagtctgacaacaaaga

SEQ ID NO: 77429 - DNA, 76 bp, Homo sapiens
ttttaatggaaggaactgaggcctcagtgagaagtggcatctctggaactcagtctgacaacaaagaccaccattt

SEQ ID NO: 77430 - DNA, 80 bp, Homo sapiens
aggaactgaggcctcagtgagaagtggcatctctggaactcagtctgacaacaaagaccaccattttctggccacactca

SEQ ID NO: 77431 - DNA, 79 bp, Homo sapiens
aactgaggcctcagtgagaagtggcatctctggaactcagtctgacaacaaagaccaccattttctggccacactcacc

SEQ ID NO: 77432 - DNA, 81 bp, Homo sapiens
ggcctcagtgagaagtggcatctctggaactcagtctgacaacaaagaccaccattttctggccacactcaccgtgtctga

SEQ ID NO: 77433 - DNA, 80 bp, Homo sapiens
aagtggcatctctggaactcagtctgacaacaaagaccaccattttctggccacactcaccgtgtctgagctctaggctg

SEQ ID NO: 77434 - DNA, 79 bp, Homo sapiens
atctctggaactcagtctgacaacaaagaccaccattttctggccacactcaccgtgtctgagctctaggctgggactc

SEQ ID NO: 77435 - DNA, 79 bp, Homo sapiens
ctctggaactcagtctgacaacaaagaccaccattttctggccacactcaccgtgtctgagctctaggctgggactctg

SEQ ID NO: 77436 - DNA, 78 bp, Homo sapiens
aactcagtctgacaacaaagaccaccattttctggccacactcaccgtgtctgagctctaggctgggactctgggagc

SEQ ID NO: 77437 - DNA, 81 bp, Homo sapiens
tctgacaacaaagaccaccattttctggccacactcaccgtgtctgagctctaggctgggactctgggagctgcagcaaaa

SEQ ID NO: 77438 - DNA, 79 bp, Homo sapiens
acaacaaagaccaccattttctggccacactcaccgtgtctgagctctaggctgggactctgggagctgcagcaaaaca

SEQ ID NO: 77439 - DNA, 79 bp, Homo sapiens
agaccaccattttctggccacactcaccgtgtctgagctctaggctgggactctgggagctgcagcaaaacagtgtatt

SEQ ID NO: 77440 - DNA, 79 bp, Homo sapiens
attttctggccacactcaccgtgtctgagctctaggctgggactctgggagctgcagcaaaacagtgtattttaatcta

SEQ ID NO: 77441 - DNA, 77 bp, Homo sapiens
acactcaccgtgtctgagctctaggctgggactctgggagctgcagcaaaacagtgtattttaatctataaacaacc

SEQ ID NO: 77442 - DNA, 77 bp, Homo sapiens
tctgagctctaggctgggactctgggagctgcagcaaaacagtgtattttaatctataaacaaccctttatttgaga

SEQ ID NO: 77443 - DNA, 76 bp, Homo sapiens
tctaggctgggactctgggagctgcagcaaaacagtgtattttaatctataaacaaccctttatttgagaatcatc

SEQ ID NO: 77444 - DNA, 76 bp, Homo sapiens
actctgggagctgcagcaaaacagtgtattttaatctataaacaaccctttatttgagaatcatcctcaatatgaa

SEQ ID NO: 77445 - DNA, 77 bp, Homo sapiens
gagctgcagcaaaacagtgtattttaatctataaacaaccctttatttgagaatcatcctcaatatgaatattatta

SEQ ID NO: 77446 - DNA, 71 bp, Homo sapiens
aaaacagtgtattttaatctataaacaaccctttatttgagaatcatcctcaatatgaatattattattat

SEQ ID NO: 77447 - DNA, 77 bp, Homo sapiens
taatctataaacaaccctttatttgagaatcatcctcaatatgaatattattattattcattcaacacatatttgag

SEQ ID NO: 77448 - DNA, 77 bp, Homo sapiens
caaccctttatttgagaatcatcctcaatatgaatattattattattcattcaacacatatttgagggcctattctg

SEQ ID NO: 77449 - DNA, 82 bp, Homo sapiens
ttatttgagaatcatcctcaatatgaatattattattattcattcaacacatatttgagggcctattctgtgtcaggcactg

SEQ ID NO: 77450 - DNA, 79 bp, Homo sapiens
attattattattcattcaacacatatttgagggcctattctgtgtcaggcactgtgctggacacggggttatattgcag

SEQ ID NO: 77451 - DNA, 80 bp, Homo sapiens
tattcattcaacacatatttgagggcctattctgtgtcaggcactgtgctggacacggggttatattgcaggaaatataa

SEQ ID NO: 77452 - DNA, 76 bp, Homo sapiens
acatatttgagggcctattctgtgtcaggcactgtgctggacacggggttatattgcaggaaatataagtggttaa

SEQ ID NO: 77453 - DNA, 75 bp, Homo sapiens
atatttgagggcctattctgtgtcaggcactgtgctggacacggggttatattgcaggaaatataagtggttaaa

SEQ ID NO: 77454 - DNA, 75 bp, Homo sapiens
tttgagggcctattctgtgtcaggcactgtgctggacacggggttatattgcaggaaatataagtggttaaactc

SEQ ID NO: 77455 - DNA, 76 bp, Homo sapiens
tattctgtgtcaggcactgtgctggacacggggttatattgcaggaaatataagtggttaaactcctcctccttca

SEQ ID NO: 77456 - DNA, 71 bp, Homo sapiens
actgtgctggacacggggttatattgcaggaaatataagtggttaaactcctcctccttcagcttaaattc

SEQ ID NO: 77457 - DNA, 72 bp, Homo sapiens
ctgtgctggacacggggttatattgcaggaaatataagtggttaaactcctcctccttcagcttaaattcta

SEQ ID NO: 77458 - DNA, 70 bp, Homo sapiens
acacggggttatattgcaggaaatataagtggttaaactcctcctccttcagcttaaattctagtggtca

SEQ ID NO: 77459 - DNA, 73 bp, Homo sapiens
gggttatattgcaggaaatataagtggttaaactcctcctccttcagcttaaattctagtggtcattatgcca

SEQ ID NO: 77460 - DNA, 75 bp, Homo sapiens
ttatattgcaggaaatataagtggttaaactcctcctccttcagcttaaattctagtggtcattatgccattcca

SEQ ID NO: 77461 - DNA, 75 bp, Homo sapiens
tgcaggaaatataagtggttaaactcctcctccttcagcttaaattctagtggtcattatgccattccatcttta

SEQ ID NO: 77462 - DNA, 71 bp, Homo sapiens
ggttaaactcctcctccttcagcttaaattctagtggtcattatgccattccatctttagttaattttaga

SEQ ID NO: 77463 - DNA, 72 bp, Homo sapiens
tgcacatgtgtataaaatgtgtatgtgtataaaattttccataagtgaaaacttaaaaattttctaatggga

SEQ ID NO: 77464 - DNA, 67 bp, Homo sapiens
tataaaatgtgtatgtgtataaaattttccataagtgaaaacttaaaaattttctaatgggattggg

SEQ ID NO: 77465 - DNA, 65 bp, Homo sapiens
gtatgtgtataaaattttccataagtgaaaacttaaaaattttctaatgggattgggggagggag

SEQ ID NO: 77466 - DNA, 64 bp, Homo sapiens
aaaattttccataagtgaaaacttaaaaattttctaatgggattgggggagggagttgtgccag

SEQ ID NO: 77467 - DNA, 67 bp, Homo sapiens
tccataagtgaaaacttaaaaattttctaatgggattgggggagggagttgtgccaggagacaaaaa

SEQ ID NO: 77468 - DNA, 65 bp, Homo sapiens
aaacttaaaaattttctaatgggattgggggagggagttgtgccaggagacaaaaaataagcaaa

SEQ ID NO: 77469 - DNA, 69 bp, Homo sapiens
aattttctaatgggattgggggagggagttgtgccaggagacaaaaaataagcaaaacatatcaggtta

SEQ ID NO: 77470 - DNA, 73 bp, Homo sapiens
gattgggggagggagttgtgccaggagacaaaaaataagcaaaacatatcaggttagctcttggtacacacta

SEQ ID NO: 77471 - DNA, 73 bp, Homo sapiens
agggagttgtgccaggagacaaaaaataagcaaaacatatcaggttagctcttggtacacactaaggagaata

SEQ ID NO: 77472 - DNA, 72 bp, Homo sapiens
ccaggagacaaaaaataagcaaaacatatcaggttagctcttggtacacactaaggagaataaagcaaggaa

SEQ ID NO: 77473 - DNA, 70 bp, Homo sapiens
agacaaaaaataagcaaaacatatcaggttagctcttggtacacactaaggagaataaagcaaggaaggg

SEQ ID NO: 77474 - DNA, 72 bp, Homo sapiens
atatcaggttagctcttggtacacactaaggagaataaagcaaggaagggggatagaaagtgttatgagaac

SEQ ID NO: 77475 - DNA, 71 bp, Homo sapiens
ttggtacacactaaggagaataaagcaaggaagggggatagaaagtgttatgagaacgaagctgtaattta

SEQ ID NO: 77476 - DNA, 70 bp, Homo sapiens
acacactaaggagaataaagcaaggaagggggatagaaagtgttatgagaacgaagctgtaatttaagaa

SEQ ID NO: 77477 - DNA, 70 bp, Homo sapiens
aagggggatagaaagtgttatgagaacgaagctgtaatttaagaatggccagggaaggcctcaccaagaa

SEQ ID NO: 77478 - DNA, 72 bp, Homo sapiens
atagaaagtgttatgagaacgaagctgtaatttaagaatggccagggaaggcctcaccaagaaaggaacaca

SEQ ID NO: 77479 - DNA, 76 bp, Homo sapiens
ttatgagaacgaagctgtaatttaagaatggccagggaaggcctcaccaagaaaggaacacagaatgaagatctga

SEQ ID NO: 77480 - DNA, 76 bp, Homo sapiens
gctgtaatttaagaatggccagggaaggcctcaccaagaaaggaacacagaatgaagatctgagagaaatgtatta

SEQ ID NO: 77481 - DNA, 75 bp, Homo sapiens
aatttaagaatggccagggaaggcctcaccaagaaaggaacacagaatgaagatctgagagaaatgtattatgta

SEQ ID NO: 77482 - DNA, 78 bp, Homo sapiens
agggaaggcctcaccaagaaaggaacacagaatgaagatctgagagaaatgtattatgtatctattgttacatcgcaa

SEQ ID NO: 77483 - DNA, 78 bp, Homo sapiens
aggcctcaccaagaaaggaacacagaatgaagatctgagagaaatgtattatgtatctattgttacatcgcaaattac

SEQ ID NO: 77484 - DNA, 76 bp, Homo sapiens
aggaacacagaatgaagatctgagagaaatgtattatgtatctattgttacatcgcaaattacccccaatttaaca

SEQ ID NO: 77485 - DNA, 74 bp, Homo sapiens
ctgagagaaatgtattatgtatctattgttacatcgcaaattacccccaatttaacagttggaaacatcaaaca

SEQ ID NO: 77486 - DNA, 73 bp, Homo sapiens
gaaatgtattatgtatctattgttacatcgcaaattacccccaatttaacagttggaaacatcaaacattcat

SEQ ID NO: 77487 - DNA, 74 bp, Homo sapiens
tgtatctattgttacatcgcaaattacccccaatttaacagttggaaacatcaaacattcattatttcatattg

SEQ ID NO: 77488 - DNA, 74 bp, Homo sapiens
catcgcaaattacccccaatttaacagttggaaacatcaaacattcattatttcatattgttttagcacatcag

SEQ ID NO: 77489 - DNA, 75 bp, Homo sapiens
tacccccaatttaacagttggaaacatcaaacattcattatttcatattgttttagcacatcaggaatcagagag

SEQ ID NO: 77490 - DNA, 78 bp, Homo sapiens
caatttaacagttggaaacatcaaacattcattatttcatattgttttagcacatcaggaatcagagagtggcttagc

SEQ ID NO: 77491 - DNA, 79 bp, Homo sapiens
agttggaaacatcaaacattcattatttcatattgttttagcacatcaggaatcagagagtggcttagctgggcaattg

SEQ ID NO: 77492 - DNA, 81 bp, Homo sapiens
atcaaacattcattatttcatattgttttagcacatcaggaatcagagagtggcttagctgggcaattgtgcctcaggttc

SEQ ID NO: 77493 - DNA, 80 bp, Homo sapiens
ttatttcatattgttttagcacatcaggaatcagagagtggcttagctgggcaattgtgcctcaggttcccccatgagct

SEQ ID NO: 77494 - DNA, 80 bp, Homo sapiens
tattgttttagcacatcaggaatcagagagtggcttagctgggcaattgtgcctcaggttcccccatgagcttggggtca

SEQ ID NO: 77495 - DNA, 79 bp, Homo sapiens
aatcagagagtggcttagctgggcaattgtgcctcaggttcccccatgagcttggggtcaggaagtcagtgggtgctgc

SEQ ID NO: 77496 - DNA, 77 bp, Homo sapiens
cttagctgggcaattgtgcctcaggttcccccatgagcttggggtcaggaagtcagtgggtgctgcctcatttgaag

SEQ ID NO: 77497 - DNA, 78 bp, Homo sapiens
ggcaattgtgcctcaggttcccccatgagcttggggtcaggaagtcagtgggtgctgcctcatttgaaggcttgactg

SEQ ID NO: 77498 - DNA, 76 bp, Homo sapiens
cctcaggttcccccatgagcttggggtcaggaagtcagtgggtgctgcctcatttgaaggcttgactggggctgga

SEQ ID NO: 77499 - DNA, 78 bp, Homo sapiens
atgagcttggggtcaggaagtcagtgggtgctgcctcatttgaaggcttgactggggctggaggagctacttgtaaga

SEQ ID NO: 77500 - DNA, 77 bp, Homo sapiens
ggtcaggaagtcagtgggtgctgcctcatttgaaggcttgactggggctggaggagctacttgtaagaaagctcacc

SEQ ID NO: 77501 - DNA, 76 bp, Homo sapiens
aagtcagtgggtgctgcctcatttgaaggcttgactggggctggaggagctacttgtaagaaagctcaccctggcc

SEQ ID NO: 77502 - DNA, 76 bp, Homo sapiens
gggtgctgcctcatttgaaggcttgactggggctggaggagctacttgtaagaaagctcaccctggccgggcatgg

SEQ ID NO: 77503 - DNA, 76 bp, Homo sapiens
gaaaaaagaagaaagctcgccctacggatgctggcaggagccaaagttccttgccacgggctctgcacaatatggc

SEQ ID NO: 77504 - DNA, 79 bp, Homo sapiens
aagaagaaagctcgccctacggatgctggcaggagccaaagttccttgccacgggctctgcacaatatggctgctgact

SEQ ID NO: 77505 - DNA, 82 bp, Homo sapiens
ctcgccctacggatgctggcaggagccaaagttccttgccacgggctctgcacaatatggctgctgacttcgcccagagcga

SEQ ID NO: 77506 - DNA, 83 bp, Homo sapiens
ggatgctggcaggagccaaagttccttgccacgggctctgcacaatatggctgctgacttcgcccagagcgagcgagccaggg

SEQ ID NO: 77507 - DNA, 79 bp, Homo sapiens
agccaaagttccttgccacgggctctgcacaatatggctgctgacttcgcccagagcgagcgagccaggggaaagcaag

SEQ ID NO: 77508 - DNA, 80 bp, Homo sapiens
ttgccacgggctctgcacaatatggctgctgacttcgcccagagcgagcgagccaggggaaagcaaggcaaagggtacaa

SEQ ID NO: 77509 - DNA, 81 bp, Homo sapiens
ctctgcacaatatggctgctgacttcgcccagagcgagcgagccaggggaaagcaaggcaaagggtacaatgtctgttaca

SEQ ID NO: 77510 - DNA, 77 bp, Homo sapiens
atatggctgctgacttcgcccagagcgagcgagccaggggaaagcaaggcaaagggtacaatgtctgttacaaccta

SEQ ID NO: 77511 - DNA, 75 bp, Homo sapiens
tgacttcgcccagagcgagcgagccaggggaaagcaaggcaaagggtacaatgtctgttacaacctagtctcaaa

SEQ ID NO: 77512 - DNA, 74 bp, Homo sapiens
agagcgagcgagccaggggaaagcaaggcaaagggtacaatgtctgttacaacctagtctcaaaagtgacactc

SEQ ID NO: 77513 - DNA, 76 bp, Homo sapiens
agcgagccaggggaaagcaaggcaaagggtacaatgtctgttacaacctagtctcaaaagtgacactccatcatga

SEQ ID NO: 77514 - DNA, 78 bp, Homo sapiens
aagcaaggcaaagggtacaatgtctgttacaacctagtctcaaaagtgacactccatcatgactgccacaatctatta

SEQ ID NO: 77515 - DNA, 77 bp, Homo sapiens
aaagggtacaatgtctgttacaacctagtctcaaaagtgacactccatcatgactgccacaatctattagtctcagg

SEQ ID NO: 77516 - DNA, 80 bp, Homo sapiens
tacaatgtctgttacaacctagtctcaaaagtgacactccatcatgactgccacaatctattagtctcagggaccaccca

SEQ ID NO: 77517 - DNA, 77 bp, Homo sapiens
ttacaacctagtctcaaaagtgacactccatcatgactgccacaatctattagtctcagggaccacccaggagggaa

SEQ ID NO: 77518 - DNA, 76 bp, Homo sapiens
agtctcaaaagtgacactccatcatgactgccacaatctattagtctcagggaccacccaggagggaaggtagaaa

SEQ ID NO: 77519 - DNA, 77 bp, Homo sapiens
acactccatcatgactgccacaatctattagtctcagggaccacccaggagggaaggtagaaagggatgacacagga

SEQ ID NO: 77520 - DNA, 78 bp, Homo sapiens
atcatgactgccacaatctattagtctcagggaccacccaggagggaaggtagaaagggatgacacaggagtgtatca

SEQ ID NO: 77521 - DNA, 74 bp, Homo sapiens
acaatctattagtctcagggaccacccaggagggaaggtagaaagggatgacacaggagtgtatcaggaggtga

SEQ ID NO: 77522 - DNA, 74 bp, Homo sapiens
ttagtctcagggaccacccaggagggaaggtagaaagggatgacacaggagtgtatcaggaggtgagtgtgttg

SEQ ID NO: 77523 - DNA, 72 bp, Homo sapiens
accacccaggagggaaggtagaaagggatgacacaggagtgtatcaggaggtgagtgtgttgggggccatct

SEQ ID NO: 77524 - DNA, 77 bp, Homo sapiens
gaaggtagaaagggatgacacaggagtgtatcaggaggtgagtgtgttgggggccatcttggaaggctcctatcaca

SEQ ID NO: 77525 - DNA, 76 bp, Homo sapiens
aaagggatgacacaggagtgtatcaggaggtgagtgtgttgggggccatcttggaaggctcctatcacagagggaa

SEQ ID NO: 77526 - DNA, 82 bp, Homo sapiens
tgtatcaggaggtgagtgtgttgggggccatcttggaaggctcctatcacagagggaaggagcaagccacacacatatctga

SEQ ID NO: 77527 - DNA, 78 bp, Homo sapiens
agtgtgttgggggccatcttggaaggctcctatcacagagggaaggagcaagccacacacatatctgagggaagagaa

SEQ ID NO: 77528 - DNA, 79 bp, Homo sapiens
gggccatcttggaaggctcctatcacagagggaaggagcaagccacacacatatctgagggaagagaatcccaaatgaa

SEQ ID NO: 77529 - DNA, 79 bp, Homo sapiens
tggaaggctcctatcacagagggaaggagcaagccacacacatatctgagggaagagaatcccaaatgaagggaacata

SEQ ID NO: 77530 - DNA, 76 bp, Homo sapiens
tatcacagagggaaggagcaagccacacacatatctgagggaagagaatcccaaatgaagggaacataaaataaaa

SEQ ID NO: 77531 - DNA, 73 bp, Homo sapiens
agagggaaggagcaagccacacacatatctgagggaagagaatcccaaatgaagggaacataaaataaaaatg

SEQ ID NO: 77532 - DNA, 77 bp, Homo sapiens
atatctgagggaagagaatcccaaatgaagggaacataaaataaaaatgttctgaggcagaagcatgtccttcatca

SEQ ID NO: 77533 - DNA, 76 bp, Homo sapiens
agggaagagaatcccaaatgaagggaacataaaataaaaatgttctgaggcagaagcatgtccttcatcatagaga

SEQ ID NO: 77534 - DNA, 78 bp, Homo sapiens
aatcccaaatgaagggaacataaaataaaaatgttctgaggcagaagcatgtccttcatcatagagagcagcaaggag

SEQ ID NO: 77535 - DNA, 81 bp, Homo sapiens
agggaacataaaataaaaatgttctgaggcagaagcatgtccttcatcatagagagcagcaaggaggatagtgtggctgaa

SEQ ID NO: 77536 - DNA, 82 bp, Homo sapiens
aataaaaatgttctgaggcagaagcatgtccttcatcatagagagcagcaaggaggatagtgtggctgaagaggaattgtgg

SEQ ID NO: 77537 - DNA, 82 bp, Homo sapiens
aatgttctgaggcagaagcatgtccttcatcatagagagcagcaaggaggatagtgtggctgaagaggaattgtggggaagg

SEQ ID NO: 77538 - DNA, 79 bp, Homo sapiens
agaagcatgtccttcatcatagagagcagcaaggaggatagtgtggctgaagaggaattgtggggaagggaaaatagaa

SEQ ID NO: 77539 - DNA, 80 bp, Homo sapiens
tccttcatcatagagagcagcaaggaggatagtgtggctgaagaggaattgtggggaagggaaaatagaagatgagttca

SEQ ID NO: 77540 - DNA, 77 bp, Homo sapiens
atagagagcagcaaggaggatagtgtggctgaagaggaattgtggggaagggaaaatagaagatgagttcagaggta

SEQ ID NO: 77541 - DNA, 73 bp, Homo sapiens
atagtgtggctgaagaggaattgtggggaagggaaaatagaagatgagttcagaggtaatgggggccagattg

SEQ ID NO: 77542 - DNA, 72 bp, Homo sapiens
aagaggaattgtggggaagggaaaatagaagatgagttcagaggtaatgggggccagattggatcatccagg

SEQ ID NO: 77543 - DNA, 75 bp, Homo sapiens
aaaatagaagatgagttcagaggtaatgggggccagattggatcatccagggcagtagttctcaaagtatggttc

SEQ ID NO: 77544 - DNA, 74 bp, Homo sapiens
aagatgagttcagaggtaatgggggccagattggatcatccagggcagtagttctcaaagtatggttcccggac

SEQ ID NO: 77545 - DNA, 78 bp, Homo sapiens
gtaatgggggccagattggatcatccagggcagtagttctcaaagtatggttcccggaccagcaacatcagcattatc

SEQ ID NO: 77546 - DNA, 80 bp, Homo sapiens
ccagattggatcatccagggcagtagttctcaaagtatggttcccggaccagcaacatcagcattatctggaacctgctg

SEQ ID NO: 77547 - DNA, 80 bp, Homo sapiens
ttggatcatccagggcagtagttctcaaagtatggttcccggaccagcaacatcagcattatctggaacctgctgggtgc

SEQ ID NO: 77548 - DNA, 77 bp, Homo sapiens
cagtagttctcaaagtatggttcccggaccagcaacatcagcattatctggaacctgctgggtgccctctgggtgat

SEQ ID NO: 77549 - DNA, 78 bp, Homo sapiens
tcaaagtatggttcccggaccagcaacatcagcattatctggaacctgctgggtgccctctgggtgattgtggtatac

SEQ ID NO: 77550 - DNA, 78 bp, Homo sapiens
tatggttcccggaccagcaacatcagcattatctggaacctgctgggtgccctctgggtgattgtggtatactctaag

SEQ ID NO: 77551 - DNA, 79 bp, Homo sapiens
agcaacatcagcattatctggaacctgctgggtgccctctgggtgattgtggtatactctaaggtctgagaatccgtta

SEQ ID NO: 77552 - DNA, 76 bp, Homo sapiens
agcattatctggaacctgctgggtgccctctgggtgattgtggtatactctaaggtctgagaatccgttattaaga

SEQ ID NO: 77553 - DNA, 79 bp, Homo sapiens
ggtgccctctgggtgattgtggtatactctaaggtctgagaatccgttattaagagctctggcgctggcatcttacaga

SEQ ID NO: 77554 - DNA, 80 bp, Homo sapiens
tctaaggtctgagaatccgttattaagagctctggcgctggcatcttacagacagatgttcaaaaatcccagatctattc

SEQ ID NO: 77555 - DNA, 77 bp, Homo sapiens
ttattaagagctctggcgctggcatcttacagacagatgttcaaaaatcccagatctattccttttaacaaggacca

SEQ ID NO: 77556 - DNA, 76 bp, Homo sapiens
ctctggcgctggcatcttacagacagatgttcaaaaatcccagatctattccttttaacaaggaccatgttatttg

SEQ ID NO: 77557 - DNA, 68 bp, Homo sapiens
agatgttcaaaaatcccagatctattccttttaacaaggaccatgttatttggcctcggtttccctgt

SEQ ID NO: 77558 - DNA, 67 bp, Homo sapiens
agatctattccttttaacaaggaccatgttatttggcctcggtttccctgttgtaaagtacgggata

SEQ ID NO: 77559 - DNA, 67 bp, Homo sapiens
ttttaacaaggaccatgttatttggcctcggtttccctgttgtaaagtacgggatagcagtataggg

SEQ ID NO: 77560 - DNA, 68 bp, Homo sapiens
accatgttatttggcctcggtttccctgttgtaaagtacgggatagcagtataggggtcccagcttcc

SEQ ID NO: 77561 - DNA, 68 bp, Homo sapiens
ttatttggcctcggtttccctgttgtaaagtacgggatagcagtataggggtcccagcttcctggtgt

SEQ ID NO: 77562 - DNA, 71 bp, Homo sapiens
ggtttccctgttgtaaagtacgggatagcagtataggggtcccagcttcctggtgttgaggacaggactca

SEQ ID NO: 77563 - DNA, 75 bp, Homo sapiens
tgttgtaaagtacgggatagcagtataggggtcccagcttcctggtgttgaggacaggactcagtgaggtacata

SEQ ID NO: 77564 - DNA, 79 bp, Homo sapiens
tacgggatagcagtataggggtcccagcttcctggtgttgaggacaggactcagtgaggtacatacagctcttagcaca

SEQ ID NO: 77565 - DNA, 78 bp, Homo sapiens
agtataggggtcccagcttcctggtgttgaggacaggactcagtgaggtacatacagctcttagcacagtttctgaca

SEQ ID NO: 77566 - DNA, 83 bp, Homo sapiens
agcttcctggtgttgaggacaggactcagtgaggtacatacagctcttagcacagtttctgacacagagtaagcactcacaga

SEQ ID NO: 77567 - DNA, 84 bp, Homo sapiens
tgttgaggacaggactcagtgaggtacatacagctcttagcacagtttctgacacagagtaagcactcacagacactaagaaca

SEQ ID NO: 77568 - DNA, 81 bp, Homo sapiens
aggactcagtgaggtacatacagctcttagcacagtttctgacacagagtaagcactcacagacactaagaacaacaataa

SEQ ID NO: 77569 - DNA, 80 bp, Homo sapiens
agtgaggtacatacagctcttagcacagtttctgacacagagtaagcactcacagacactaagaacaacaataagacaaa

SEQ ID NO: 77570 - DNA, 78 bp, Homo sapiens
acatacagctcttagcacagtttctgacacagagtaagcactcacagacactaagaacaacaataagacaaaacaaaa

SEQ ID NO: 77571 - DNA, 74 bp, Homo sapiens
cttagcacagtttctgacacagagtaagcactcacagacactaagaacaacaataagacaaaacaaaaaactaa

SEQ ID NO: 77572 - DNA, 69 bp, Homo sapiens
ttccttccttcctcttctttgcttcccaacttctaccccagaagctggatccctgcctcacccctcctt

SEQ ID NO: 77573 - DNA, 73 bp, Homo sapiens
tcctcttctttgcttcccaacttctaccccagaagctggatccctgcctcacccctccttttgatgcctacaa

SEQ ID NO: 77574 - DNA, 75 bp, Homo sapiens
tttgcttcccaacttctaccccagaagctggatccctgcctcacccctccttttgatgcctacaaggagcacatc

SEQ ID NO: 77575 - DNA, 73 bp, Homo sapiens
aacttctaccccagaagctggatccctgcctcacccctccttttgatgcctacaaggagcacatctcccaaaa

SEQ ID NO: 77576 - DNA, 74 bp, Homo sapiens
agaagctggatccctgcctcacccctccttttgatgcctacaaggagcacatctcccaaaagaggggtgctagg

SEQ ID NO: 77577 - DNA, 72 bp, Homo sapiens
atccctgcctcacccctccttttgatgcctacaaggagcacatctcccaaaagaggggtgctaggggtgaag

SEQ ID NO: 77578 - DNA, 69 bp, Homo sapiens
cctcacccctccttttgatgcctacaaggagcacatctcccaaaagaggggtgctaggggtgaaggggg

SEQ ID NO: 77579 - DNA, 75 bp, Homo sapiens
atctcccaaaagaggggtgctaggggtgaaggggggctagaatgccttctttagcattgctgcagtgtcaggcta

SEQ ID NO: 77580 - DNA, 74 bp, Homo sapiens
aaagaggggtgctaggggtgaaggggggctagaatgccttctttagcattgctgcagtgtcaggctatccctta

SEQ ID NO: 77581 - DNA, 74 bp, Homo sapiens
taggggtgaaggggggctagaatgccttctttagcattgctgcagtgtcaggctatcccttagttaaccaggga

SEQ ID NO: 77582 - DNA, 76 bp, Homo sapiens
ttctttagcattgctgcagtgtcaggctatcccttagttaaccagggaaacatcactatgagtggtccccaacttc

SEQ ID NO: 77583 - DNA, 75 bp, Homo sapiens
ggaaacatcactatgagtggtccccaacttcccactcacagctgcttacaaaattcttagggcagccctacaatc

SEQ ID NO: 77584 - DNA, 75 bp, Homo sapiens
atcactatgagtggtccccaacttcccactcacagctgcttacaaaattcttagggcagccctacaatcttggtg

SEQ ID NO: 77585 - DNA, 73 bp, Homo sapiens
agtggtccccaacttcccactcacagctgcttacaaaattcttagggcagccctacaatcttggtggggagca

SEQ ID NO: 77586 - DNA, 73 bp, Homo sapiens
aacttcccactcacagctgcttacaaaattcttagggcagccctacaatcttggtggggagcaggggctcctg

SEQ ID NO: 77587 - DNA, 76 bp, Homo sapiens
acagctgcttacaaaattcttagggcagccctacaatcttggtggggagcaggggctcctgtgcccatttcacaga

SEQ ID NO: 77588 - DNA, 75 bp, Homo sapiens
aaaattcttagggcagccctacaatcttggtggggagcaggggctcctgtgcccatttcacagatgatacagaaa

SEQ ID NO: 77589 - DNA, 77 bp, Homo sapiens
cttagggcagccctacaatcttggtggggagcaggggctcctgtgcccatttcacagatgatacagaaactgtgtta

SEQ ID NO: 77590 - DNA, 82 bp, Homo sapiens
tacaatcttggtggggagcaggggctcctgtgcccatttcacagatgatacagaaactgtgttactgatgggatgaagcaga

SEQ ID NO: 77591 - DNA, 80 bp, Homo sapiens
ttggtggggagcaggggctcctgtgcccatttcacagatgatacagaaactgtgttactgatgggatgaagcagaggccc

SEQ ID NO: 77592 - DNA, 81 bp, Homo sapiens
ggctcctgtgcccatttcacagatgatacagaaactgtgttactgatgggatgaagcagaggccccgtcagtgtcctggcc

SEQ ID NO: 77593 - DNA, 79 bp, Homo sapiens
cccatttcacagatgatacagaaactgtgttactgatgggatgaagcagaggccccgtcagtgtcctggccctttgata

SEQ ID NO: 77594 - DNA, 79 bp, Homo sapiens
tgtgttactgatgggatgaagcagaggccccgtcagtgtcctggccctttgatatttgccagaaccaagctctggtctg

SEQ ID NO: 77595 - DNA, 78 bp, Homo sapiens
atgggatgaagcagaggccccgtcagtgtcctggccctttgatatttgccagaaccaagctctggtctggctccagcc

SEQ ID NO: 77596 - DNA, 78 bp, Homo sapiens
agaggccccgtcagtgtcctggccctttgatatttgccagaaccaagctctggtctggctccagcctgcacagagggc

SEQ ID NO: 77597 - DNA, 80 bp, Homo sapiens
agtgtcctggccctttgatatttgccagaaccaagctctggtctggctccagcctgcacagagggcctgtgaaagagcag

SEQ ID NO: 77598 - DNA, 80 bp, Homo sapiens
cctttgatatttgccagaaccaagctctggtctggctccagcctgcacagagggcctgtgaaagagcagggccaggaatc

SEQ ID NO: 77599 - DNA, 78 bp, Homo sapiens
tctggctccagcctgcacagagggcctgtgaaagagcagggccaggaatccaggaatagccaaggaattcgaagggtc

SEQ ID NO: 77600 - DNA, 76 bp, Homo sapiens
agcctgcacagagggcctgtgaaagagcagggccaggaatccaggaatagccaaggaattcgaagggtcgcaggga

SEQ ID NO: 77601 - DNA, 73 bp, Homo sapiens
acagagggcctgtgaaagagcagggccaggaatccaggaatagccaaggaattcgaagggtcgcagggagtag

SEQ ID NO: 77602 - DNA, 72 bp, Homo sapiens
aaagagcagggccaggaatccaggaatagccaaggaattcgaagggtcgcagggagtagggggtgctgcctg

SEQ ID NO: 77603 - DNA, 74 bp, Homo sapiens
ggccaggaatccaggaatagccaaggaattcgaagggtcgcagggagtagggggtgctgcctggagctgtccaa

SEQ ID NO: 77604 - DNA, 74 bp, Homo sapiens
aatccaggaatagccaaggaattcgaagggtcgcagggagtagggggtgctgcctggagctgtccaagcctgtc

SEQ ID NO: 77605 - DNA, 75 bp, Homo sapiens
atagccaaggaattcgaagggtcgcagggagtagggggtgctgcctggagctgtccaagcctgtctctcaatccc

SEQ ID NO: 77606 - DNA, 75 bp, Homo sapiens
aattcgaagggtcgcagggagtagggggtgctgcctggagctgtccaagcctgtctctcaatccccattaggatc

SEQ ID NO: 77607 - DNA, 77 bp, Homo sapiens
agggagtagggggtgctgcctggagctgtccaagcctgtctctcaatccccattaggatccctgatctaccagcctc

SEQ ID NO: 77608 - DNA, 80 bp, Homo sapiens
gggtgctgcctggagctgtccaagcctgtctctcaatccccattaggatccctgatctaccagcctccttacagagcgta

SEQ ID NO: 77609 - DNA, 80 bp, Homo sapiens
tggagctgtccaagcctgtctctcaatccccattaggatccctgatctaccagcctccttacagagcgtagacccgtgca

SEQ ID NO: 77610 - DNA, 75 bp, Homo sapiens
tctcaatccccattaggatccctgatctaccagcctccttacagagcgtagacccgtgcaaacacaccgggaatc

SEQ ID NO: 77611 - DNA, 77 bp, Homo sapiens
cattaggatccctgatctaccagcctccttacagagcgtagacccgtgcaaacacaccgggaatctgtgagcattta

SEQ ID NO: 77612 - DNA, 77 bp, Homo sapiens
tctaccagcctccttacagagcgtagacccgtgcaaacacaccgggaatctgtgagcatttaaaagacgatcactga

SEQ ID NO: 77613 - DNA, 73 bp, Homo sapiens
cttacagagcgtagacccgtgcaaacacaccgggaatctgtgagcatttaaaagacgatcactgacccaaact

SEQ ID NO: 77614 - DNA, 72 bp, Homo sapiens
gtagacccgtgcaaacacaccgggaatctgtgagcatttaaaagacgatcactgacccaaacttgggttgaa

SEQ ID NO: 77615 - DNA, 70 bp, Homo sapiens
aaacacaccgggaatctgtgagcatttaaaagacgatcactgacccaaacttgggttgaagggcaaggaa

SEQ ID NO: 77616 - DNA, 72 bp, Homo sapiens
agcatttaaaagacgatcactgacccaaacttgggttgaagggcaaggaaggttgactgcaatgttggagaa

SEQ ID NO: 77617 - DNA, 74 bp, Homo sapiens
tgacccaaacttgggttgaagggcaaggaaggttgactgcaatgttggagaaatatgtcttgtcaccgagacaa

SEQ ID NO: 77618 - DNA, 72 bp, Homo sapiens
aaacttgggttgaagggcaaggaaggttgactgcaatgttggagaaatatgtcttgtcaccgagacaacagg

SEQ ID NO: 77619 - DNA, 74 bp, Homo sapiens
aagggcaaggaaggttgactgcaatgttggagaaatatgtcttgtcaccgagacaacaggtgctggtaacccac

SEQ ID NO: 77620 - DNA, 80 bp, Homo sapiens
aaggttgactgcaatgttggagaaatatgtcttgtcaccgagacaacaggtgctggtaacccactgccagctcacgcata

SEQ ID NO: 77621 - DNA, 81 bp, Homo sapiens
atgttggagaaatatgtcttgtcaccgagacaacaggtgctggtaacccactgccagctcacgcatatgactcccatctta

SEQ ID NO: 77622 - DNA, 81 bp, Homo sapiens
aaatatgtcttgtcaccgagacaacaggtgctggtaacccactgccagctcacgcatatgactcccatcttatggttgaga

SEQ ID NO: 77623 - DNA, 81 bp, Homo sapiens
ttgtcaccgagacaacaggtgctggtaacccactgccagctcacgcatatgactcccatcttatggttgagaaactgagaa

SEQ ID NO: 77624 - DNA, 79 bp, Homo sapiens
acaacaggtgctggtaacccactgccagctcacgcatatgactcccatcttatggttgagaaactgagaagacacctta

SEQ ID NO: 77625 - DNA, 79 bp, Homo sapiens
tggtaacccactgccagctcacgcatatgactcccatcttatggttgagaaactgagaagacaccttatcgaatccaaa

SEQ ID NO: 77626 - DNA, 79 bp, Homo sapiens
acccactgccagctcacgcatatgactcccatcttatggttgagaaactgagaagacaccttatcgaatccaaagcctg

SEQ ID NO: 77627 - DNA, 81 bp, Homo sapiens
acgcatatgactcccatcttatggttgagaaactgagaagacaccttatcgaatccaaagcctggatgctccagatccaga

SEQ ID NO: 77628 - DNA, 77 bp, Homo sapiens
actcccatcttatggttgagaaactgagaagacaccttatcgaatccaaagcctggatgctccagatccagaaccta

SEQ ID NO: 77629 - DNA, 78 bp, Homo sapiens
atcttatggttgagaaactgagaagacaccttatcgaatccaaagcctggatgctccagatccagaacctaagcacag

SEQ ID NO: 77630 - DNA, 77 bp, Homo sapiens
agaagacaccttatcgaatccaaagcctggatgctccagatccagaacctaagcacaggtgtttggcaaagctctgg

SEQ ID NO: 77631 - DNA, 79 bp, Homo sapiens
ttatcgaatccaaagcctggatgctccagatccagaacctaagcacaggtgtttggcaaagctctggtctcatttccca

SEQ ID NO: 77632 - DNA, 77 bp, Homo sapiens
aaagcctggatgctccagatccagaacctaagcacaggtgtttggcaaagctctggtctcatttcccaatccagtta

SEQ ID NO: 77633 - DNA, 75 bp, Homo sapiens
caggtgtttggcaaagctctggtctcatttcccaatccagttactcaccagaactactggagccacttgttagaa

SEQ ID NO: 77634 - DNA, 75 bp, Homo sapiens
tttggcaaagctctggtctcatttcccaatccagttactcaccagaactactggagccacttgttagaaatactg

SEQ ID NO: 77635 - DNA, 73 bp, Homo sapiens
atttcccaatccagttactcaccagaactactggagccacttgttagaaatactggtgcccagacctcacacc

SEQ ID NO: 77636 - DNA, 74 bp, Homo sapiens
agttactcaccagaactactggagccacttgttagaaatactggtgcccagacctcacacctggagcttctggt

SEQ ID NO: 77637 - DNA, 75 bp, Homo sapiens
agaactactggagccacttgttagaaatactggtgcccagacctcacacctggagcttctggttgagtaggctgg

SEQ ID NO: 77638 - DNA, 75 bp, Homo sapiens
agccacttgttagaaatactggtgcccagacctcacacctggagcttctggttgagtaggctgggaggaactcaa

SEQ ID NO: 77639 - DNA, 76 bp, Homo sapiens
ttagaaatactggtgcccagacctcacacctggagcttctggttgagtaggctgggaggaactcaactcatcattt

SEQ ID NO: 77640 - DNA, 77 bp, Homo sapiens
atactggtgcccagacctcacacctggagcttctggttgagtaggctgggaggaactcaactcatcatttttatcaa

SEQ ID NO: 77641 - DNA, 79 bp, Homo sapiens
cctcacacctggagcttctggttgagtaggctgggaggaactcaactcatcatttttatcaagcgatctcagtgactaa

SEQ ID NO: 77642 - DNA, 78 bp, Homo sapiens
acctggagcttctggttgagtaggctgggaggaactcaactcatcatttttatcaagcgatctcagtgactaaccaca

SEQ ID NO: 77643 - DNA, 77 bp, Homo sapiens
taggctgggaggaactcaactcatcatttttatcaagcgatctcagtgactaaccacatgtcgggaaaactagtata

SEQ ID NO: 77644 - DNA, 78 bp, Homo sapiens
aactcaactcatcatttttatcaagcgatctcagtgactaaccacatgtcgggaaaactagtatagtccatagcagga

SEQ ID NO: 77645 - DNA, 76 bp, Homo sapiens
ttatcaagcgatctcagtgactaaccacatgtcgggaaaactagtatagtccatagcaggacggtcacggaaccca

SEQ ID NO: 77646 - DNA, 74 bp, Homo sapiens
atctcagtgactaaccacatgtcgggaaaactagtatagtccatagcaggacggtcacggaacccagccaagga

SEQ ID NO: 77647 - DNA, 73 bp, Homo sapiens
taaccacatgtcgggaaaactagtatagtccatagcaggacggtcacggaacccagccaaggatcaggaggta

SEQ ID NO: 77648 - DNA, 73 bp, Homo sapiens
gaaaactagtatagtccatagcaggacggtcacggaacccagccaaggatcaggaggtacctgggcccagaca

SEQ ID NO: 77649 - DNA, 70 bp, Homo sapiens
atagcaggacggtcacggaacccagccaaggatcaggaggtacctgggcccagacaaaagccccagggag

SEQ ID NO: 77650 - DNA, 69 bp, Homo sapiens
tcacggaacccagccaaggatcaggaggtacctgggcccagacaaaagccccagggagtgggttagact

SEQ ID NO: 77651 - DNA, 71 bp, Homo sapiens
agccaaggatcaggaggtacctgggcccagacaaaagccccagggagtgggttagacttaggatcaggcaa

SEQ ID NO: 77652 - DNA, 71 bp, Homo sapiens
atcaggaggtacctgggcccagacaaaagccccagggagtgggttagacttaggatcaggcaaggtacatg

SEQ ID NO: 77653 - DNA, 73 bp, Homo sapiens
tacctgggcccagacaaaagccccagggagtgggttagacttaggatcaggcaaggtacatggtagcaatgta

SEQ ID NO: 77654 - DNA, 71 bp, Homo sapiens
acaaaagccccagggagtgggttagacttaggatcaggcaaggtacatggtagcaatgtagagtaatttaa

SEQ ID NO: 77655 - DNA, 70 bp, Homo sapiens
cccagggagtgggttagacttaggatcaggcaaggtacatggtagcaatgtagagtaatttaaggaaccc

SEQ ID NO: 77656 - DNA, 72 bp, Homo sapiens
tgggttagacttaggatcaggcaaggtacatggtagcaatgtagagtaatttaaggaaccccccagatgtta

SEQ ID NO: 77657 - DNA, 70 bp, Homo sapiens
acttaggatcaggcaaggtacatggtagcaatgtagagtaatttaaggaaccccccagatgttaccccaa

SEQ ID NO: 77658 - DNA, 68 bp, Homo sapiens
aaggtacatggtagcaatgtagagtaatttaaggaaccccccagatgttaccccaaccttctaagagc

SEQ ID NO: 77659 - DNA, 70 bp, Homo sapiens
tagcaatgtagagtaatttaaggaaccccccagatgttaccccaaccttctaagagccgcggctttgaca

SEQ ID NO: 77660 - DNA, 68 bp, Homo sapiens
atgtagagtaatttaaggaaccccccagatgttaccccaaccttctaagagccgcggctttgacatgg

SEQ ID NO: 77661 - DNA, 68 bp, Homo sapiens
atttaaggaaccccccagatgttaccccaaccttctaagagccgcggctttgacatgggtctttgcta

SEQ ID NO: 77662 - DNA, 71 bp, Homo sapiens
cccagatgttaccccaaccttctaagagccgcggctttgacatgggtctttgctacctacttgagttccca

SEQ ID NO: 77663 - DNA, 73 bp, Homo sapiens
cccaaccttctaagagccgcggctttgacatgggtctttgctacctacttgagttcccaggggtgctatatga

SEQ ID NO: 77664 - DNA, 75 bp, Homo sapiens
cggctttgacatgggtctttgctacctacttgagttcccaggggtgctatatgaattagaagagattgccacaaa

SEQ ID NO: 77665 - DNA, 77 bp, Homo sapiens
acatgggtctttgctacctacttgagttcccaggggtgctatatgaattagaagagattgccacaaacccatgagca

SEQ ID NO: 77666 - DNA, 79 bp, Homo sapiens
tttgctacctacttgagttcccaggggtgctatatgaattagaagagattgccacaaacccatgagcatgactgagtcc

SEQ ID NO: 77667 - DNA, 81 bp, Homo sapiens
ttgagttcccaggggtgctatatgaattagaagagattgccacaaacccatgagcatgactgagtcctcagagtctttcta

SEQ ID NO: 77668 - DNA, 82 bp, Homo sapiens
gggtgctatatgaattagaagagattgccacaaacccatgagcatgactgagtcctcagagtctttctagaataggtgaaga

SEQ ID NO: 77669 - DNA, 84 bp, Homo sapiens
tatatgaattagaagagattgccacaaacccatgagcatgactgagtcctcagagtctttctagaataggtgaagatgaggaga

SEQ ID NO: 77670 - DNA, 82 bp, Homo sapiens
tagaagagattgccacaaacccatgagcatgactgagtcctcagagtctttctagaataggtgaagatgaggagaaaggaga

SEQ ID NO: 77671 - DNA, 78 bp, Homo sapiens
acaaacccatgagcatgactgagtcctcagagtctttctagaataggtgaagatgaggagaaaggagaaggcacaaaa

SEQ ID NO: 77672 - DNA, 85 bp, Homo sapiens
atgagcatgactgagtcctcagagtctttctagaataggtgaagatgaggagaaaggagaaggcacaaaagcagtgagtgctgca

SEQ ID NO: 77673 - DNA, 81 bp, Homo sapiens
actgagtcctcagagtctttctagaataggtgaagatgaggagaaaggagaaggcacaaaagcagtgagtgctgcagtgag

SEQ ID NO: 77674 - DNA, 78 bp, Homo sapiens
agagtctttctagaataggtgaagatgaggagaaaggagaaggcacaaaagcagtgagtgctgcagtgagggaagccc

SEQ ID NO: 77675 - DNA, 75 bp, Homo sapiens
aataggtgaagatgaggagaaaggagaaggcacaaaagcagtgagtgctgcagtgagggaagcccggagggaaaa

SEQ ID NO: 77676 - DNA, 73 bp, Homo sapiens
aagatgaggagaaaggagaaggcacaaaagcagtgagtgctgcagtgagggaagcccggagggaaaaggttcc

SEQ ID NO: 77677 - DNA, 70 bp, Homo sapiens
aaaggagaaggcacaaaagcagtgagtgctgcagtgagggaagcccggagggaaaaggttccggggagaa

SEQ ID NO: 77678 - DNA, 70 bp, Homo sapiens
aaggcacaaaagcagtgagtgctgcagtgagggaagcccggagggaaaaggttccggggagaaggttcca

SEQ ID NO: 77679 - DNA, 72 bp, Homo sapiens
aagcagtgagtgctgcagtgagggaagcccggagggaaaaggttccggggagaaggttccagtgtgtgggca

SEQ ID NO: 77680 - DNA, 70 bp, Homo sapiens
cagtgagggaagcccggagggaaaaggttccggggagaaggttccagtgtgtgggcacaggcagcaggag

SEQ ID NO: 77681 - DNA, 68 bp, Homo sapiens
agggaagcccggagggaaaaggttccggggagaaggttccagtgtgtgggcacaggcagcaggagtcg

SEQ ID NO: 77682 - DNA, 69 bp, Homo sapiens
gggaaaaggttccggggagaaggttccagtgtgtgggcacaggcagcaggagtcggggaggtgtttcta

SEQ ID NO: 77683 - DNA, 73 bp, Homo sapiens
aaggttccagtgtgtgggcacaggcagcaggagtcggggaggtgtttctagcagggcctggcctccttcccaa

SEQ ID NO: 77684 - DNA, 72 bp, Homo sapiens
tgtgtgggcacaggcagcaggagtcggggaggtgtttctagcagggcctggcctccttcccaaagtcttttt

SEQ ID NO: 77685 - DNA, 67 bp, Homo sapiens
acaggcagcaggagtcggggaggtgtttctagcagggcctggcctccttcccaaagtcttttttttt

SEQ ID NO: 77686 - DNA, 67 bp, Homo sapiens
aaacaaacaaccccttcccaaagtcttatcttaagcccctgagggccaagtcctgagttagagggca

SEQ ID NO: 77687 - DNA, 67 bp, Homo sapiens
aacaaccccttcccaaagtcttatcttaagcccctgagggccaagtcctgagttagagggcaggaaa

SEQ ID NO: 77688 - DNA, 71 bp, Homo sapiens
aaagtcttatcttaagcccctgagggccaagtcctgagttagagggcaggaaagacaagtttcaagcaatc

SEQ ID NO: 77689 - DNA, 72 bp, Homo sapiens
ttatcttaagcccctgagggccaagtcctgagttagagggcaggaaagacaagtttcaagcaatcctgttcc

SEQ ID NO: 77690 - DNA, 72 bp, Homo sapiens
cctgagggccaagtcctgagttagagggcaggaaagacaagtttcaagcaatcctgttcccaggtgtttgga

SEQ ID NO: 77691 - DNA, 73 bp, Homo sapiens
aagtcctgagttagagggcaggaaagacaagtttcaagcaatcctgttcccaggtgtttggagctgacaggga

SEQ ID NO: 77692 - DNA, 72 bp, Homo sapiens
agttagagggcaggaaagacaagtttcaagcaatcctgttcccaggtgtttggagctgacagggaaagtgag

SEQ ID NO: 77693 - DNA, 76 bp, Homo sapiens
aaagacaagtttcaagcaatcctgttcccaggtgtttggagctgacagggaaagtgaggcagccagctattctcac

SEQ ID NO: 77694 - DNA, 76 bp, Homo sapiens
aagtttcaagcaatcctgttcccaggtgtttggagctgacagggaaagtgaggcagccagctattctcaccgtgac

SEQ ID NO: 77695 - DNA, 76 bp, Homo sapiens
atcctgttcccaggtgtttggagctgacagggaaagtgaggcagccagctattctcaccgtgacgtggcaacggaa

SEQ ID NO: 77696 - DNA, 76 bp, Homo sapiens
aggtgtttggagctgacagggaaagtgaggcagccagctattctcaccgtgacgtggcaacggaagagtccaggtg

SEQ ID NO: 77697 - DNA, 77 bp, Homo sapiens
ctgacagggaaagtgaggcagccagctattctcaccgtgacgtggcaacggaagagtccaggtggcctaacagtcca

SEQ ID NO: 77698 - DNA, 75 bp, Homo sapiens
aaagtgaggcagccagctattctcaccgtgacgtggcaacggaagagtccaggtggcctaacagtccagtccctg

SEQ ID NO: 77699 - DNA, 77 bp, Homo sapiens
agccagctattctcaccgtgacgtggcaacggaagagtccaggtggcctaacagtccagtccctgtgctccttgtca

SEQ ID NO: 77700 - DNA, 76 bp, Homo sapiens
tattctcaccgtgacgtggcaacggaagagtccaggtggcctaacagtccagtccctgtgctccttgtcaattcat

SEQ ID NO: 77701 - DNA, 76 bp, Homo sapiens
aacggaagagtccaggtggcctaacagtccagtccctgtgctccttgtcaattcattcagactttctgagcactgg

SEQ ID NO: 77702 - DNA, 79 bp, Homo sapiens
gtccaggtggcctaacagtccagtccctgtgctccttgtcaattcattcagactttctgagcactggggagcagcaggg

SEQ ID NO: 77703 - DNA, 81 bp, Homo sapiens
taacagtccagtccctgtgctccttgtcaattcattcagactttctgagcactggggagcagcaggggggctcacagtatc

SEQ ID NO: 77704 - DNA, 82 bp, Homo sapiens
tccctgtgctccttgtcaattcattcagactttctgagcactggggagcagcaggggggctcacagtatcgtctctgcccta

SEQ ID NO: 77705 - DNA, 81 bp, Homo sapiens
ttgtcaattcattcagactttctgagcactggggagcagcaggggggctcacagtatcgtctctgccctagggagctaaca

SEQ ID NO: 77706 - DNA, 79 bp, Homo sapiens
aattcattcagactttctgagcactggggagcagcaggggggctcacagtatcgtctctgccctagggagctaacaggc

SEQ ID NO: 77707 - DNA, 80 bp, Homo sapiens
tttctgagcactggggagcagcaggggggctcacagtatcgtctctgccctagggagctaacaggctggctggaagaaga

SEQ ID NO: 77708 - DNA, 77 bp, Homo sapiens
ggggagcagcaggggggctcacagtatcgtctctgccctagggagctaacaggctggctggaagaagaatctctttc

SEQ ID NO: 77709 - DNA, 78 bp, Homo sapiens
aggggggctcacagtatcgtctctgccctagggagctaacaggctggctggaagaagaatctctttctgcctcagcta

SEQ ID NO: 77710 - DNA, 80 bp, Homo sapiens
atcgtctctgccctagggagctaacaggctggctggaagaagaatctctttctgcctcagctacatcccctgctttcata

SEQ ID NO: 77711 - DNA, 78 bp, Homo sapiens
ctagggagctaacaggctggctggaagaagaatctctttctgcctcagctacatcccctgctttcatacctatccctc

SEQ ID NO: 77712 - DNA, 78 bp, Homo sapiens
aggctggctggaagaagaatctctttctgcctcagctacatcccctgctttcatacctatccctcccaccagatgtat

SEQ ID NO: 77713 - DNA, 77 bp, Homo sapiens
gaagaagaatctctttctgcctcagctacatcccctgctttcatacctatccctcccaccagatgtattctgagggt

SEQ ID NO: 77714 - DNA, 79 bp, Homo sapiens
tctctttctgcctcagctacatcccctgctttcatacctatccctcccaccagatgtattctgagggttgtgactgtat

SEQ ID NO: 77715 - DNA, 77 bp, Homo sapiens
cctcagctacatcccctgctttcatacctatccctcccaccagatgtattctgagggttgtgactgtattgaataaa

SEQ ID NO: 77716 - DNA, 77 bp, Homo sapiens
ctacatcccctgctttcatacctatccctcccaccagatgtattctgagggttgtgactgtattgaataaatgtgga

SEQ ID NO: 77717 - DNA, 76 bp, Homo sapiens
ctttcatacctatccctcccaccagatgtattctgagggttgtgactgtattgaataaatgtggacctgtctcctg

SEQ ID NO: 77718 - DNA, 77 bp, Homo sapiens
tatccctcccaccagatgtattctgagggttgtgactgtattgaataaatgtggacctgtctcctgggcaccaagga

SEQ ID NO: 77719 - DNA, 78 bp, Homo sapiens
agatgtattctgagggttgtgactgtattgaataaatgtggacctgtctcctgggcaccaaggacactcagtaattga

SEQ ID NO: 77720 - DNA, 77 bp, Homo sapiens
tattctgagggttgtgactgtattgaataaatgtggacctgtctcctgggcaccaaggacactcagtaattgataaa

SEQ ID NO: 77721 - DNA, 77 bp, Homo sapiens
gacctgtctcctgggcaccaaggacactcagtaattgataaatgaaggaagactcagctcaaatcaactattagaat

SEQ ID NO: 77722 - DNA, 78 bp, Homo sapiens
ctgggcaccaaggacactcagtaattgataaatgaaggaagactcagctcaaatcaactattagaattatgttcagta

SEQ ID NO: 77723 - DNA, 77 bp, Homo sapiens
accaaggacactcagtaattgataaatgaaggaagactcagctcaaatcaactattagaattatgttcagtaacatg

SEQ ID NO: 77724 - DNA, 79 bp, Homo sapiens
gtaattgataaatgaaggaagactcagctcaaatcaactattagaattatgttcagtaacatggctgatggctgatttt

SEQ ID NO: 77725 - DNA, 79 bp, Homo sapiens
gataaatgaaggaagactcagctcaaatcaactattagaattatgttcagtaacatggctgatggctgatttttaaaga

SEQ ID NO: 77726 - DNA, 80 bp, Homo sapiens
aggaagactcagctcaaatcaactattagaattatgttcagtaacatggctgatggctgatttttaaagatacatgtgta

SEQ ID NO: 77727 - DNA, 84 bp, Homo sapiens
agctcaaatcaactattagaattatgttcagtaacatggctgatggctgatttttaaagatacatgtgtatatgcatgtagata

SEQ ID NO: 77728 - DNA, 80 bp, Homo sapiens
aactattagaattatgttcagtaacatggctgatggctgatttttaaagatacatgtgtatatgcatgtagataaaaaga

SEQ ID NO: 77729 - DNA, 81 bp, Homo sapiens
tgttcagtaacatggctgatggctgatttttaaagatacatgtgtatatgcatgtagataaaaagaaagataaagagacga

SEQ ID NO: 77730 - DNA, 78 bp, Homo sapiens
atggctgatggctgatttttaaagatacatgtgtatatgcatgtagataaaaagaaagataaagagacgagggaaaga

SEQ ID NO: 77731 - DNA, 72 bp, Homo sapiens
ttttaaagatacatgtgtatatgcatgtagataaaaagaaagataaagagacgagggaaagaccaagaaggg

SEQ ID NO: 77732 - DNA, 73 bp, Homo sapiens
atgtgtatatgcatgtagataaaaagaaagataaagagacgagggaaagaccaagaagggggccagggagaca

SEQ ID NO: 77733 - DNA, 72 bp, Homo sapiens
tatgcatgtagataaaaagaaagataaagagacgagggaaagaccaagaagggggccagggagacagataaa

SEQ ID NO: 77734 - DNA, 68 bp, Homo sapiens
aaaagaaagataaagagacgagggaaagaccaagaagggggccagggagacagataaagcctctattc

SEQ ID NO: 77735 - DNA, 68 bp, Homo sapiens
aagataaagagacgagggaaagaccaagaagggggccagggagacagataaagcctctattccctttg

SEQ ID NO: 77736 - DNA, 69 bp, Homo sapiens
agggaaagaccaagaagggggccagggagacagataaagcctctattccctttgtgtggtatgaactac

SEQ ID NO: 77737 - DNA, 73 bp, Homo sapiens
agaccaagaagggggccagggagacagataaagcctctattccctttgtgtggtatgaactacctatcagtga

SEQ ID NO: 77738 - DNA, 74 bp, Homo sapiens
ccagggagacagataaagcctctattccctttgtgtggtatgaactacctatcagtgagcagcccagtttaaaa

SEQ ID NO: 77739 - DNA, 75 bp, Homo sapiens
agacagataaagcctctattccctttgtgtggtatgaactacctatcagtgagcagcccagtttaaaaagagcaa

SEQ ID NO: 77740 - DNA, 75 bp, Homo sapiens
agcctctattccctttgtgtggtatgaactacctatcagtgagcagcccagtttaaaaagagcaaagaacatata

SEQ ID NO: 77741 - DNA, 77 bp, Homo sapiens
ttgtgtggtatgaactacctatcagtgagcagcccagtttaaaaagagcaaagaacatatacaggtgatttacagaa

SEQ ID NO: 77742 - DNA, 75 bp, Homo sapiens
tacctatcagtgagcagcccagtttaaaaagagcaaagaacatatacaggtgatttacagaaaaaacaattgcaa

SEQ ID NO: 77743 - DNA, 71 bp, Homo sapiens
gtttaaaaagagcaaagaacatatacaggtgatttacagaaaaaacaattgcaaatgatcaataacaaaaa

SEQ ID NO: 77744 - DNA, 71 bp, Homo sapiens
aaaaaaaagatactcattctcattcaaaattggagaaatacaagttaagactgtaagatactatgttttca

SEQ ID NO: 77745 - DNA, 73 bp, Homo sapiens
aagatactcattctcattcaaaattggagaaatacaagttaagactgtaagatactatgttttcacccatggg

SEQ ID NO: 77746 - DNA, 69 bp, Homo sapiens
cattcaaaattggagaaatacaagttaagactgtaagatactatgttttcacccatggggaaaataacc

SEQ ID NO: 77747 - DNA, 70 bp, Homo sapiens
ttggagaaatacaagttaagactgtaagatactatgttttcacccatggggaaaataacctcctttgtga

SEQ ID NO: 77748 - DNA, 70 bp, Homo sapiens
atacaagttaagactgtaagatactatgttttcacccatggggaaaataacctcctttgtgactgataac

SEQ ID NO: 77749 - DNA, 71 bp, Homo sapiens
taagactgtaagatactatgttttcacccatggggaaaataacctcctttgtgactgataacccctatcta

SEQ ID NO: 77750 - DNA, 70 bp, Homo sapiens
agatactatgttttcacccatggggaaaataacctcctttgtgactgataacccctatctaaccaggatc

SEQ ID NO: 77751 - DNA, 70 bp, Homo sapiens
ttttcacccatggggaaaataacctcctttgtgactgataacccctatctaaccaggatctgcaaaaaca

SEQ ID NO: 77752 - DNA, 73 bp, Homo sapiens
aaaataacctcctttgtgactgataacccctatctaaccaggatctgcaaaaacaggtgagaatgcctgtctg

SEQ ID NO: 77753 - DNA, 75 bp, Homo sapiens
actgataacccctatctaaccaggatctgcaaaaacaggtgagaatgcctgtctgtgaaaggtaatttggagata

SEQ ID NO: 77754 - DNA, 76 bp, Homo sapiens
ccctatctaaccaggatctgcaaaaacaggtgagaatgcctgtctgtgaaaggtaatttggagatatccatcaaaa

SEQ ID NO: 77755 - DNA, 75 bp, Homo sapiens
aaccaggatctgcaaaaacaggtgagaatgcctgtctgtgaaaggtaatttggagatatccatcaaaagcccaaa

SEQ ID NO: 77756 - DNA, 74 bp, Homo sapiens
aaaacaggtgagaatgcctgtctgtgaaaggtaatttggagatatccatcaaaagcccaaatgcacgtgtcttt

SEQ ID NO: 77757 - DNA, 76 bp, Homo sapiens
gaatgcctgtctgtgaaaggtaatttggagatatccatcaaaagcccaaatgcacgtgtcttttgacctaacaata

SEQ ID NO: 77758 - DNA, 76 bp, Homo sapiens
taatttggagatatccatcaaaagcccaaatgcacgtgtcttttgacctaacaatagctttaggtgtgcaataatg

SEQ ID NO: 77759 - DNA, 76 bp, Homo sapiens
atatccatcaaaagcccaaatgcacgtgtcttttgacctaacaatagctttaggtgtgcaataatgtaagtatgaa

SEQ ID NO: 77760 - DNA, 72 bp, Homo sapiens
aaagcccaaatgcacgtgtcttttgacctaacaatagctttaggtgtgcaataatgtaagtatgaaggtatt

SEQ ID NO: 77761 - DNA, 74 bp, Homo sapiens
gtgtcttttgacctaacaatagctttaggtgtgcaataatgtaagtatgaaggtattttgtggagcacttttca

SEQ ID NO: 77762 - DNA, 73 bp, Homo sapiens
acctaacaatagctttaggtgtgcaataatgtaagtatgaaggtattttgtggagcacttttcattagaggga

SEQ ID NO: 77763 - DNA, 72 bp, Homo sapiens
agctttaggtgtgcaataatgtaagtatgaaggtattttgtggagcacttttcattagagggaaaagactct

SEQ ID NO: 77764 - DNA, 71 bp, Homo sapiens
ataatgtaagtatgaaggtattttgtggagcacttttcattagagggaaaagactcttgggaagtgaccta

SEQ ID NO: 77765 - DNA, 70 bp, Homo sapiens
taagtatgaaggtattttgtggagcacttttcattagagggaaaagactcttgggaagtgacctaaatgt

SEQ ID NO: 77766 - DNA, 70 bp, Homo sapiens
aggtattttgtggagcacttttcattagagggaaaagactcttgggaagtgacctaaatgttcaccaaca

SEQ ID NO: 77767 - DNA, 72 bp, Homo sapiens
cacttttcattagagggaaaagactcttgggaagtgacctaaatgttcaccaacaggggacaatgatgtatc

SEQ ID NO: 77768 - DNA, 71 bp, Homo sapiens
attagagggaaaagactcttgggaagtgacctaaatgttcaccaacaggggacaatgatgtatcgacaggg

SEQ ID NO: 77769 - DNA, 74 bp, Homo sapiens
aaaagactcttgggaagtgacctaaatgttcaccaacaggggacaatgatgtatcgacagggtggcatcctgtg

SEQ ID NO: 77770 - DNA, 81 bp, Homo sapiens
ttgggaagtgacctaaatgttcaccaacaggggacaatgatgtatcgacagggtggcatcctgtggagctgctgaagtgca

SEQ ID NO: 77771 - DNA, 85 bp, Homo sapiens
taaatgttcaccaacaggggacaatgatgtatcgacagggtggcatcctgtggagctgctgaagtgcatgagtgctggagtgaaa

SEQ ID NO: 77772 - DNA, 84 bp, Homo sapiens
acaatgatgtatcgacagggtggcatcctgtggagctgctgaagtgcatgagtgctggagtgaaaggctccaaaacacactacg

SEQ ID NO: 77773 - DNA, 83 bp, Homo sapiens
tatcgacagggtggcatcctgtggagctgctgaagtgcatgagtgctggagtgaaaggctccaaaacacactacgtgtacaaa

SEQ ID NO: 77774 - DNA, 82 bp, Homo sapiens
tggcatcctgtggagctgctgaagtgcatgagtgctggagtgaaaggctccaaaacacactacgtgtacaaaaggttctcac

SEQ ID NO: 77775 - DNA, 79 bp, Homo sapiens
tggagctgctgaagtgcatgagtgctggagtgaaaggctccaaaacacactacgtgtacaaaaggttctcactttaaca

SEQ ID NO: 77776 - DNA, 72 bp, Homo sapiens
aagtgcatgagtgctggagtgaaaggctccaaaacacactacgtgtacaaaaggttctcactttaacaaaag

SEQ ID NO: 77777 - DNA, 70 bp, Homo sapiens
agtgctggagtgaaaggctccaaaacacactacgtgtacaaaaggttctcactttaacaaaagggcataa

SEQ ID NO: 77778 - DNA, 68 bp, Homo sapiens
gagtgaaaggctccaaaacacactacgtgtacaaaaggttctcactttaacaaaagggcataaataaa

SEQ ID NO: 77779 - DNA, 69 bp, Homo sapiens
ctccaaaacacactacgtgtacaaaaggttctcactttaacaaaagggcataaataaaatgtctgtgct

SEQ ID NO: 77780 - DNA, 72 bp, Homo sapiens
acactacgtgtacaaaaggttctcactttaacaaaagggcataaataaaatgtctgtgcttgtatatgcaag

SEQ ID NO: 77781 - DNA, 73 bp, Homo sapiens
aaaggttctcactttaacaaaagggcataaataaaatgtctgtgcttgtatatgcaaggcaaatgtgccgaaa

SEQ ID NO: 77782 - DNA, 76 bp, Homo sapiens
actttaacaaaagggcataaataaaatgtctgtgcttgtatatgcaaggcaaatgtgccgaaagaatacacatgaa

SEQ ID NO: 77783 - DNA, 81 bp, Homo sapiens
aaaagggcataaataaaatgtctgtgcttgtatatgcaaggcaaatgtgccgaaagaatacacatgaagcatttgatgctg

SEQ ID NO: 77784 - DNA, 81 bp, Homo sapiens
ataaaatgtctgtgcttgtatatgcaaggcaaatgtgccgaaagaatacacatgaagcatttgatgctggttctttcttaa

SEQ ID NO: 77785 - DNA, 81 bp, Homo sapiens
tctgtgcttgtatatgcaaggcaaatgtgccgaaagaatacacatgaagcatttgatgctggttctttcttaaaaatgaaa

SEQ ID NO: 77786 - DNA, 78 bp, Homo sapiens
tgtatatgcaaggcaaatgtgccgaaagaatacacatgaagcatttgatgctggttctttcttaaaaatgaaaccaaa

SEQ ID NO: 77787 - DNA, 75 bp, Homo sapiens
gcaaatgtgccgaaagaatacacatgaagcatttgatgctggttctttcttaaaaatgaaaccaaagtaagaaga

SEQ ID NO: 77788 - DNA, 73 bp, Homo sapiens
gccgaaagaatacacatgaagcatttgatgctggttctttcttaaaaatgaaaccaaagtaagaagactataa

SEQ ID NO: 77789 - DNA, 76 bp, Homo sapiens
acacatgaagcatttgatgctggttctttcttaaaaatgaaaccaaagtaagaagactataaccatgctgctataa

SEQ ID NO: 77790 - DNA, 77 bp, Homo sapiens
gccaccgcgccaggccagaagactatatttttatagtatatcccatttgaatctatgagaaatttccatgatagaaa

SEQ ID NO: 77791 - DNA, 77 bp, Homo sapiens
cgccaggccagaagactatatttttatagtatatcccatttgaatctatgagaaatttccatgatagaaaacagaca

SEQ ID NO: 77792 - DNA, 74 bp, Homo sapiens
gactatatttttatagtatatcccatttgaatctatgagaaatttccatgatagaaaacagacaaaacttggtg

SEQ ID NO: 77793 - DNA, 76 bp, Homo sapiens
ttatagtatatcccatttgaatctatgagaaatttccatgatagaaaacagacaaaacttggtgtaggaacagaga

SEQ ID NO: 77794 - DNA, 76 bp, Homo sapiens
agtatatcccatttgaatctatgagaaatttccatgatagaaaacagacaaaacttggtgtaggaacagagagaca

SEQ ID NO: 77795 - DNA, 77 bp, Homo sapiens
gtatatcccatttgaatctatgagaaatttccatgatagaaaacagacaaaacttggtgtaggaacagagagacaga

SEQ ID NO: 77796 - DNA, 74 bp, Homo sapiens
atttgaatctatgagaaatttccatgatagaaaacagacaaaacttggtgtaggaacagagagacagaccaagg

SEQ ID NO: 77797 - DNA, 74 bp, Homo sapiens
tttgaatctatgagaaatttccatgatagaaaacagacaaaacttggtgtaggaacagagagacagaccaaggg

SEQ ID NO: 77798 - DNA, 70 bp, Homo sapiens
agaaatttccatgatagaaaacagacaaaacttggtgtaggaacagagagacagaccaaggggaaaaaga

SEQ ID NO: 77799 - DNA, 70 bp, Homo sapiens
aatttccatgatagaaaacagacaaaacttggtgtaggaacagagagacagaccaaggggaaaaagacca

SEQ ID NO: 77800 - DNA, 71 bp, Homo sapiens
atgatagaaaacagacaaaacttggtgtaggaacagagagacagaccaaggggaaaaagaccagaaacaga

SEQ ID NO: 77801 - DNA, 69 bp, Homo sapiens
atagaaaacagacaaaacttggtgtaggaacagagagacagaccaaggggaaaaagaccagaaacagac

SEQ ID NO: 77802 - DNA, 71 bp, Homo sapiens
aaacagacaaaacttggtgtaggaacagagagacagaccaaggggaaaaagaccagaaacagactcagcca

SEQ ID NO: 77803 - DNA, 71 bp, Homo sapiens
aacttggtgtaggaacagagagacagaccaaggggaaaaagaccagaaacagactcagccagactagttta

SEQ ID NO: 77804 - DNA, 73 bp, Homo sapiens
taggaacagagagacagaccaaggggaaaaagaccagaaacagactcagccagactagtttagcgtatggtaa

SEQ ID NO: 77805 - DNA, 71 bp, Homo sapiens
agacagaccaaggggaaaaagaccagaaacagactcagccagactagtttagcgtatggtaaagaggtgct

SEQ ID NO: 77806 - DNA, 74 bp, Homo sapiens
aaaagaccagaaacagactcagccagactagtttagcgtatggtaaagaggtgcttctcaaggcaatggtgaaa

SEQ ID NO: 77807 - DNA, 80 bp, Homo sapiens
agactcagccagactagtttagcgtatggtaaagaggtgcttctcaaggcaatggtgaaaggctgaatcagtcaatgcta

SEQ ID NO: 77808 - DNA, 77 bp, Homo sapiens
agactagtttagcgtatggtaaagaggtgcttctcaaggcaatggtgaaaggctgaatcagtcaatgctatttgaac

SEQ ID NO: 77809 - DNA, 77 bp, Homo sapiens
agtttagcgtatggtaaagaggtgcttctcaaggcaatggtgaaaggctgaatcagtcaatgctatttgaacgatgg

SEQ ID NO: 77810 - DNA, 77 bp, Homo sapiens
ggtgcttctcaaggcaatggtgaaaggctgaatcagtcaatgctatttgaacgatgggagaactacttgaaaaatat

SEQ ID NO: 77811 - DNA, 74 bp, Homo sapiens
aatggtgaaaggctgaatcagtcaatgctatttgaacgatgggagaactacttgaaaaatattgaggtaggtcc

SEQ ID NO: 77812 - DNA, 73 bp, Homo sapiens
aatcagtcaatgctatttgaacgatgggagaactacttgaaaaatattgaggtaggtccctttctcattcatt

SEQ ID NO: 77813 - DNA, 71 bp, Homo sapiens
gctatttgaacgatgggagaactacttgaaaaatattgaggtaggtccctttctcattcattttcagaaat

SEQ ID NO: 77814 - DNA, 70 bp, Homo sapiens
cgatgggagaactacttgaaaaatattgaggtaggtccctttctcattcattttcagaaattaaattcca

SEQ ID NO: 77815 - DNA, 71 bp, Homo sapiens
ctacttgaaaaatattgaggtaggtccctttctcattcattttcagaaattaaattccatatggcttaata

SEQ ID NO: 77816 - DNA, 69 bp, Homo sapiens
tattgaggtaggtccctttctcattcattttcagaaattaaattccatatggcttaatattttaaaggg

SEQ ID NO: 77817 - DNA, 68 bp, Homo sapiens
taggtccctttctcattcattttcagaaattaaattccatatggcttaatattttaaaggggccgggc

SEQ ID NO: 77818 - DNA, 67 bp, Homo sapiens
tttctcattcattttcagaaattaaattccatatggcttaatattttaaaggggccgggcgggtggg

SEQ ID NO: 77819 - DNA, 63 bp, Homo sapiens
attttcagaaattaaattccatatggcttaatattttaaaggggccgggcgggtgggggcggg

SEQ ID NO: 77820 - DNA, 63 bp, Homo sapiens
ttaaattccatatggcttaatattttaaaggggccgggcgggtgggggcgggggcggtggaaa

SEQ ID NO: 77821 - DNA, 64 bp, Homo sapiens
atatggcttaatattttaaaggggccgggcgggtgggggcgggggcggtggaaacagtccataa

SEQ ID NO: 77822 - DNA, 67 bp, Homo sapiens
cgggcgggtgggggcgggggcggtggaaacagtccataagactgctagaagaaaatattaccatctt

SEQ ID NO: 77823 - DNA, 68 bp, Homo sapiens
ggggcgggggcggtggaaacagtccataagactgctagaagaaaatattaccatcttttattggtaaa

SEQ ID NO: 77824 - DNA, 69 bp, Homo sapiens
actgctagaagaaaatattaccatcttttattggtaaagaccttttaaagtgtggcctcaaagggcaga

SEQ ID NO: 77825 - DNA, 69 bp, Homo sapiens
gaagaaaatattaccatcttttattggtaaagaccttttaaagtgtggcctcaaagggcagaaatcaca

SEQ ID NO: 77826 - DNA, 67 bp, Homo sapiens
attaccatcttttattggtaaagaccttttaaagtgtggcctcaaagggcagaaatcacaaaaggaa

SEQ ID NO: 77827 - DNA, 69 bp, Homo sapiens
tttattggtaaagaccttttaaagtgtggcctcaaagggcagaaatcacaaaaggaaaagattggcata

SEQ ID NO: 77828 - DNA, 70 bp, Homo sapiens
gaccttttaaagtgtggcctcaaagggcagaaatcacaaaaggaaaagattggcatatttatctattaag

SEQ ID NO: 77829 - DNA, 70 bp, Homo sapiens
aaagtgtggcctcaaagggcagaaatcacaaaaggaaaagattggcatatttatctattaagtggagttt

SEQ ID NO: 77830 - DNA, 70 bp, Homo sapiens
cctcaaagggcagaaatcacaaaaggaaaagattggcatatttatctattaagtggagttttaaaaatca

SEQ ID NO: 77831 - DNA, 72 bp, Homo sapiens
cagaaatcacaaaaggaaaagattggcatatttatctattaagtggagttttaaaaatcacagtcagaataa

SEQ ID NO: 77832 - DNA, 69 bp, Homo sapiens
aaaaggaaaagattggcatatttatctattaagtggagttttaaaaatcacagtcagaataataaaaca

SEQ ID NO: 77833 - DNA, 72 bp, Homo sapiens
tggcatatttatctattaagtggagttttaaaaatcacagtcagaataataaaacataaaaaatgacaacca

SEQ ID NO: 77834 - DNA, 72 bp, Homo sapiens
tctattaagtggagttttaaaaatcacagtcagaataataaaacataaaaaatgacaaccatttgctacatc

SEQ ID NO: 77835 - DNA, 74 bp, Homo sapiens
gagttttaaaaatcacagtcagaataataaaacataaaaaatgacaaccatttgctacatctgataacatagga

SEQ ID NO: 77836 - DNA, 72 bp, Homo sapiens
aaaaatcacagtcagaataataaaacataaaaaatgacaaccatttgctacatctgataacataggaaaaac

SEQ ID NO: 77837 - DNA, 72 bp, Homo sapiens
cagtcagaataataaaacataaaaaatgacaaccatttgctacatctgataacataggaaaaactaaactgt

SEQ ID NO: 77838 - DNA, 72 bp, Homo sapiens
aacataaaaaatgacaaccatttgctacatctgataacataggaaaaactaaactgtttctcctactctcta

SEQ ID NO: 77839 - DNA, 74 bp, Homo sapiens
atttgctacatctgataacataggaaaaactaaactgtttctcctactctctacccaacatcactcaacacttc

SEQ ID NO: 77840 - DNA, 77 bp, Homo sapiens
tacatctgataacataggaaaaactaaactgtttctcctactctctacccaacatcactcaacacttctgacatcag

SEQ ID NO: 77841 - DNA, 74 bp, Homo sapiens
aacataggaaaaactaaactgtttctcctactctctacccaacatcactcaacacttctgacatcaggtatatg

SEQ ID NO: 77842 - DNA, 79 bp, Homo sapiens
acatcactcaacacttctgacatcaggtatatgggagttttccccgccatactagccagcaagtctccagcggacacaa

SEQ ID NO: 77843 - DNA, 80 bp, Homo sapiens
ttctgacatcaggtatatgggagttttccccgccatactagccagcaagtctccagcggacacaagcagagtgtcctaca

SEQ ID NO: 77844 - DNA, 75 bp, Homo sapiens
aggtatatgggagttttccccgccatactagccagcaagtctccagcggacacaagcagagtgtcctacaactta

SEQ ID NO: 77845 - DNA, 77 bp, Homo sapiens
gagttttccccgccatactagccagcaagtctccagcggacacaagcagagtgtcctacaacttaaatcgattctga

SEQ ID NO: 77846 - DNA, 79 bp, Homo sapiens
cccgccatactagccagcaagtctccagcggacacaagcagagtgtcctacaacttaaatcgattctgatactatctac

SEQ ID NO: 77847 - DNA, 81 bp, Homo sapiens
tactagccagcaagtctccagcggacacaagcagagtgtcctacaacttaaatcgattctgatactatctacctggagata

SEQ ID NO: 77848 - DNA, 81 bp, Homo sapiens
aagtctccagcggacacaagcagagtgtcctacaacttaaatcgattctgatactatctacctggagatagcatcagatcc

SEQ ID NO: 77849 - DNA, 83 bp, Homo sapiens
tgatactatctacctggagatagcatcagatcccacaggctgaaggctcattcccacaagactactccccacttcagacacca

SEQ ID NO: 77850 - DNA, 81 bp, Homo sapiens
ctacctggagatagcatcagatcccacaggctgaaggctcattcccacaagactactccccacttcagacaccaatcacaa

SEQ ID NO: 77851 - DNA, 83 bp, Homo sapiens
agcatcagatcccacaggctgaaggctcattcccacaagactactccccacttcagacaccaatcacaagcagcaggttgtca

SEQ ID NO: 77852 - DNA, 83 bp, Homo sapiens
tgaaggctcattcccacaagactactccccacttcagacaccaatcacaagcagcaggttgtcacctacacatctgacagata

SEQ ID NO: 77853 - DNA, 80 bp, Homo sapiens
aagactactccccacttcagacaccaatcacaagcagcaggttgtcacctacacatctgacagataggctataaatcagg

SEQ ID NO: 77854 - DNA, 81 bp, Homo sapiens
acttcagacaccaatcacaagcagcaggttgtcacctacacatctgacagataggctataaatcagggattctgtaactcc

SEQ ID NO: 77855 - DNA, 76 bp, Homo sapiens
tcacctacacatctgacagataggctataaatcagggattctgtaactccctccacgggttcgattcctttgcaaa

SEQ ID NO: 77856 - DNA, 77 bp, Homo sapiens
tacacatctgacagataggctataaatcagggattctgtaactccctccacgggttcgattcctttgcaaaagcagc

SEQ ID NO: 77857 - DNA, 72 bp, Homo sapiens
tctgtaactccctccacgggttcgattcctttgcaaaagcagctcactgaactcacggaaacgctttactaa

SEQ ID NO: 77858 - DNA, 70 bp, Homo sapiens
tccctccacgggttcgattcctttgcaaaagcagctcactgaactcacggaaacgctttactaaccttta

SEQ ID NO: 77859 - DNA, 71 bp, Homo sapiens
ttcgattcctttgcaaaagcagctcactgaactcacggaaacgctttactaacctttacccacttattaca

SEQ ID NO: 77860 - DNA, 70 bp, Homo sapiens
attcctttgcaaaagcagctcactgaactcacggaaacgctttactaacctttacccacttattacacag

SEQ ID NO: 77861 - DNA, 74 bp, Homo sapiens
tgcaaaagcagctcactgaactcacggaaacgctttactaacctttacccacttattacacaggctatgacaaa

SEQ ID NO: 77862 - DNA, 71 bp, Homo sapiens
aaaagcagctcactgaactcacggaaacgctttactaacctttacccacttattacacaggctatgacaaa

SEQ ID NO: 77863 - DNA, 72 bp, Homo sapiens
agctcactgaactcacggaaacgctttactaacctttacccacttattacacaggctatgacaaaggataca

SEQ ID NO: 77864 - DNA, 72 bp, Homo sapiens
ctcactgaactcacggaaacgctttactaacctttacccacttattacacaggctatgacaaaggatacaga

SEQ ID NO: 77865 - DNA, 78 bp, Homo sapiens
ctttactaacctttacccacttattacacaggctatgacaaaggatacagatgaagaggcagatggaagagatgcaca

SEQ ID NO: 77866 - DNA, 79 bp, Homo sapiens
acttattacacaggctatgacaaaggatacagatgaagaggcagatggaagagatgcacagggccagggatgggggaag

SEQ ID NO: 77867 - DNA, 80 bp, Homo sapiens
tatgacaaaggatacagatgaagaggcagatggaagagatgcacagggccagggatgggggaaggggcacagggcttcca

SEQ ID NO: 77868 - DNA, 79 bp, Homo sapiens
aggatacagatgaagaggcagatggaagagatgcacagggccagggatgggggaaggggcacagggcttccatgccctc

SEQ ID NO: 77869 - DNA, 76 bp, Homo sapiens
agatggaagagatgcacagggccagggatgggggaaggggcacagggcttccatgccctctcctggcaccactccc

SEQ ID NO: 77870 - DNA, 76 bp, Homo sapiens
agatgcacagggccagggatgggggaaggggcacagggcttccatgccctctcctggcaccactccccaggctcca

SEQ ID NO: 77871 - DNA, 75 bp, Homo sapiens
agggatgggggaaggggcacagggcttccatgccctctcctggcaccactccccaggctccatgtggtcagttga

SEQ ID NO: 77872 - DNA, 79 bp, Homo sapiens
gaaggggcacagggcttccatgccctctcctggcaccactccccaggctccatgtggtcagttgaccagaagctctcta

SEQ ID NO: 77873 - DNA, 77 bp, Homo sapiens
agggcttccatgccctctcctggcaccactccccaggctccatgtggtcagttgaccagaagctctctacaccctgt

SEQ ID NO: 77874 - DNA, 76 bp, Homo sapiens
atgccctctcctggcaccactccccaggctccatgtggtcagttgaccagaagctctctacaccctgtttttctag

SEQ ID NO: 77875 - DNA, 71 bp, Homo sapiens
ccactccccaggctccatgtggtcagttgaccagaagctctctacaccctgtttttctaggttcttacggg

SEQ ID NO: 77876 - DNA, 74 bp, Homo sapiens
tccatgtggtcagttgaccagaagctctctacaccctgtttttctaggttcttacgggggcttcagtacataga

SEQ ID NO: 77877 - DNA, 72 bp, Homo sapiens
agttgaccagaagctctctacaccctgtttttctaggttcttacgggggcttcagtacatagacacgattga

SEQ ID NO: 77878 - DNA, 75 bp, Homo sapiens
agaagctctctacaccctgtttttctaggttcttacgggggcttcagtacatagacacgattgatgtcatcactg

SEQ ID NO: 77879 - DNA, 73 bp, Homo sapiens
accctgtttttctaggttcttacgggggcttcagtacatagacacgattgatgtcatcactgggaattgataa

SEQ ID NO: 77880 - DNA, 76 bp, Homo sapiens
ttttctaggttcttacgggggcttcagtacatagacacgattgatgtcatcactgggaattgataatcagcctctt

SEQ ID NO: 77881 - DNA, 77 bp, Homo sapiens
acatagacacgattgatgtcatcactgggaattgataatcagcctctttcctctccccagaggtttgtggggtaggc

SEQ ID NO: 77882 - DNA, 76 bp, Homo sapiens
attgatgtcatcactgggaattgataatcagcctctttcctctccccagaggtttgtggggtaggcgctgaagttc

SEQ ID NO: 77883 - DNA, 72 bp, Homo sapiens
tgggaattgataatcagcctctttcctctccccagaggtttgtggggtaggcgctgaagttccaaccttcta

SEQ ID NO: 77884 - DNA, 70 bp, Homo sapiens
ctttcctctccccagaggtttgtggggtaggcgctgaagttccaaccttctaagcatgccttggtctttc

SEQ ID NO: 77885 - DNA, 74 bp, Homo sapiens
cccagaggtttgtggggtaggcgctgaagttccaaccttctaagcatgccttggtctttcctgtgaccagctgc

SEQ ID NO: 77886 - DNA, 76 bp, Homo sapiens
gtttgtggggtaggcgctgaagttccaaccttctaagcatgccttggtctttcctgtgaccagctgccatcctgaa

SEQ ID NO: 77887 - DNA, 78 bp, Homo sapiens
ggtaggcgctgaagttccaaccttctaagcatgccttggtctttcctgtgaccagctgccatcctgaagctgcctagg

SEQ ID NO: 77888 - DNA, 77 bp, Homo sapiens
aagttccaaccttctaagcatgccttggtctttcctgtgaccagctgccatcctgaagctgcctaggggatcccaga

SEQ ID NO: 77889 - DNA, 83 bp, Homo sapiens
ttctaagcatgccttggtctttcctgtgaccagctgccatcctgaagctgcctaggggatcccagacacccatcatctcatta

SEQ ID NO: 77890 - DNA, 82 bp, Homo sapiens
ttggtctttcctgtgaccagctgccatcctgaagctgcctaggggatcccagacacccatcatctcattagcaaacaagaga

SEQ ID NO: 77891 - DNA, 82 bp, Homo sapiens
ctgccatcctgaagctgcctaggggatcccagacacccatcatctcattagcaaacaagagactaacattctggagattcca

SEQ ID NO: 77892 - DNA, 78 bp, Homo sapiens
tgaagctgcctaggggatcccagacacccatcatctcattagcaaacaagagactaacattctggagattccaaggtt

SEQ ID NO: 77893 - DNA, 77 bp, Homo sapiens
taggggatcccagacacccatcatctcattagcaaacaagagactaacattctggagattccaaggtttatgccagg

SEQ ID NO: 77894 - DNA, 79 bp, Homo sapiens
agacacccatcatctcattagcaaacaagagactaacattctggagattccaaggtttatgccagggagctggatggaa

SEQ ID NO: 77895 - DNA, 79 bp, Homo sapiens
tcatctcattagcaaacaagagactaacattctggagattccaaggtttatgccagggagctggatggaagaccaaata

SEQ ID NO: 77896 - DNA, 76 bp, Homo sapiens
attagcaaacaagagactaacattctggagattccaaggtttatgccagggagctggatggaagaccaaatatata

SEQ ID NO: 77897 - DNA, 76 bp, Homo sapiens
aagagactaacattctggagattccaaggtttatgccagggagctggatggaagaccaaatatatatttcacaata

SEQ ID NO: 77898 - DNA, 77 bp, Homo sapiens
attctggagattccaaggtttatgccagggagctggatggaagaccaaatatatatttcacaatatccaactacaca

SEQ ID NO: 77899 - DNA, 77 bp, Homo sapiens
attccaaggtttatgccagggagctggatggaagaccaaatatatatttcacaatatccaactacacatgttcaaga

SEQ ID NO: 77900 - DNA, 79 bp, Homo sapiens
tttatgccagggagctggatggaagaccaaatatatatttcacaatatccaactacacatgttcaagactcttctctaa

SEQ ID NO: 77901 - DNA, 74 bp, Homo sapiens
accaaatatatatttcacaatatccaactacacatgttcaagactcttctctaagaactgcccaaatcccagtt

SEQ ID NO: 77902 - DNA, 79 bp, Homo sapiens
tatttcacaatatccaactacacatgttcaagactcttctctaagaactgcccaaatcccagtttggatacacatgcta

SEQ ID NO: 77903 - DNA, 79 bp, Homo sapiens
ttcaagactcttctctaagaactgcccaaatcccagtttggatacacatgctatgggcgtgactacttggctactgcta

SEQ ID NO: 77904 - DNA, 79 bp, Homo sapiens
tctaagaactgcccaaatcccagtttggatacacatgctatgggcgtgactacttggctactgctactggacctgccaa

SEQ ID NO: 77905 - DNA, 78 bp, Homo sapiens
cccaaatcccagtttggatacacatgctatgggcgtgactacttggctactgctactggacctgccaagagttgtata

SEQ ID NO: 77906 - DNA, 78 bp, Homo sapiens
agtttggatacacatgctatgggcgtgactacttggctactgctactggacctgccaagagttgtatagaacaggact

SEQ ID NO: 77907 - DNA, 75 bp, Homo sapiens
actacttggctactgctactggacctgccaagagttgtatagaacaggacttggggtggtcctcttccacgatga

SEQ ID NO: 77908 - DNA, 76 bp, Homo sapiens
tactgctactggacctgccaagagttgtatagaacaggacttggggtggtcctcttccacgatgagtggccacttc

SEQ ID NO: 77909 - DNA, 76 bp, Homo sapiens
tggacctgccaagagttgtatagaacaggacttggggtggtcctcttccacgatgagtggccacttctgccaaatg

SEQ ID NO: 77910 - DNA, 77 bp, Homo sapiens
aagagttgtatagaacaggacttggggtggtcctcttccacgatgagtggccacttctgccaaatggctgctgaaga

SEQ ID NO: 77911 - DNA, 78 bp, Homo sapiens
gggtggtcctcttccacgatgagtggccacttctgccaaatggctgctgaagaagaaaaggcaagactgcggagagaa

SEQ ID NO: 77912 - DNA, 84 bp, Homo sapiens
tcttccacgatgagtggccacttctgccaaatggctgctgaagaagaaaaggcaagactgcggagagaaagatgcatgaagaga

SEQ ID NO: 77913 - DNA, 82 bp, Homo sapiens
atgagtggccacttctgccaaatggctgctgaagaagaaaaggcaagactgcggagagaaagatgcatgaagagaacccaga

SEQ ID NO: 77914 - DNA, 80 bp, Homo sapiens
acttctgccaaatggctgctgaagaagaaaaggcaagactgcggagagaaagatgcatgaagagaacccagagaaagatc

SEQ ID NO: 77915 - DNA, 78 bp, Homo sapiens
aaatggctgctgaagaagaaaaggcaagactgcggagagaaagatgcatgaagagaacccagagaaagatcgcgcccg

SEQ ID NO: 77916 - DNA, 77 bp, Homo sapiens
aagaagaaaaggcaagactgcggagagaaagatgcatgaagagaacccagagaaagatcgcgcccgtgatcctagaa

SEQ ID NO: 77917 - DNA, 76 bp, Homo sapiens
aaaaggcaagactgcggagagaaagatgcatgaagagaacccagagaaagatcgcgcccgtgatcctagaactttg

SEQ ID NO: 77918 - DNA, 75 bp, Homo sapiens
gaagggaaggaaaagaagtagcatcagacatcaccaggtcccacagttaggacaatcaatcttggcacctgattt

SEQ ID NO: 77919 - DNA, 76 bp, Homo sapiens
aaaagaagtagcatcagacatcaccaggtcccacagttaggacaatcaatcttggcacctgattttcccatcctta

SEQ ID NO: 77920 - DNA, 79 bp, Homo sapiens
agtagcatcagacatcaccaggtcccacagttaggacaatcaatcttggcacctgattttcccatccttacgcctgcat

SEQ ID NO: 77921 - DNA, 78 bp, Homo sapiens
agacatcaccaggtcccacagttaggacaatcaatcttggcacctgattttcccatccttacgcctgcattcctgtga

SEQ ID NO: 77922 - DNA, 76 bp, Homo sapiens
aggtcccacagttaggacaatcaatcttggcacctgattttcccatccttacgcctgcattcctgtgagatgcccc

SEQ ID NO: 77923 - DNA, 78 bp, Homo sapiens
gacaatcaatcttggcacctgattttcccatccttacgcctgcattcctgtgagatgcccccatatccctctaataaa

SEQ ID NO: 77924 - DNA, 76 bp, Homo sapiens
aatcttggcacctgattttcccatccttacgcctgcattcctgtgagatgcccccatatccctctaataaatgccc

SEQ ID NO: 77925 - DNA, 72 bp, Homo sapiens
acctgattttcccatccttacgcctgcattcctgtgagatgcccccatatccctctaataaatgcccttttt

SEQ ID NO: 77926 - DNA, 75 bp, Homo sapiens
atccttacgcctgcattcctgtgagatgcccccatatccctctaataaatgcccttttttcataagttagtatga

SEQ ID NO: 77927 - DNA, 75 bp, Homo sapiens
tgcattcctgtgagatgcccccatatccctctaataaatgcccttttttcataagttagtatgagcgggtttcta

SEQ ID NO: 77928 - DNA, 73 bp, Homo sapiens
tgagatgcccccatatccctctaataaatgcccttttttcataagttagtatgagcgggtttctagtcctata

SEQ ID NO: 77929 - DNA, 71 bp, Homo sapiens
ccatatccctctaataaatgcccttttttcataagttagtatgagcgggtttctagtcctataacaagaca

SEQ ID NO: 77930 - DNA, 69 bp, Homo sapiens
aaatgcccttttttcataagttagtatgagcgggtttctagtcctataacaagacactccctgcccaag

SEQ ID NO: 77931 - DNA, 75 bp, Homo sapiens
ttttcataagttagtatgagcgggtttctagtcctataacaagacactccctgcccaaggacatccatcaaagca

SEQ ID NO: 77932 - DNA, 76 bp, Homo sapiens
ggtttctagtcctataacaagacactccctgcccaaggacatccatcaaagcacactgccctgtaaatggcaaaca

SEQ ID NO: 77933 - DNA, 78 bp, Homo sapiens
gtcctataacaagacactccctgcccaaggacatccatcaaagcacactgccctgtaaatggcaaacacaggcccaga

SEQ ID NO: 77934 - DNA, 78 bp, Homo sapiens
aagacactccctgcccaaggacatccatcaaagcacactgccctgtaaatggcaaacacaggcccagaggccattaga

SEQ ID NO: 77935 - DNA, 79 bp, Homo sapiens
caaggacatccatcaaagcacactgccctgtaaatggcaaacacaggcccagaggccattagactgacatctggaaaat

SEQ ID NO: 77936 - DNA, 79 bp, Homo sapiens
acatccatcaaagcacactgccctgtaaatggcaaacacaggcccagaggccattagactgacatctggaaaattcttc

SEQ ID NO: 77937 - DNA, 76 bp, Homo sapiens
acactgccctgtaaatggcaaacacaggcccagaggccattagactgacatctggaaaattcttcggtgaccatgt

SEQ ID NO: 77938 - DNA, 77 bp, Homo sapiens
ctgtaaatggcaaacacaggcccagaggccattagactgacatctggaaaattcttcggtgaccatgttgaactgta

SEQ ID NO: 77939 - DNA, 74 bp, Homo sapiens
aaacacaggcccagaggccattagactgacatctggaaaattcttcggtgaccatgttgaactgtagcttttta

SEQ ID NO: 77940 - DNA, 76 bp, Homo sapiens
agaggccattagactgacatctggaaaattcttcggtgaccatgttgaactgtagctttttaacaggctccaagca

SEQ ID NO: 77941 - DNA, 76 bp, Homo sapiens
attagactgacatctggaaaattcttcggtgaccatgttgaactgtagctttttaacaggctccaagcagtgcttc

SEQ ID NO: 77942 - DNA, 76 bp, Homo sapiens
atctggaaaattcttcggtgaccatgttgaactgtagctttttaacaggctccaagcagtgcttccataatctctc

SEQ ID NO: 77943 - DNA, 76 bp, Homo sapiens
aaattcttcggtgaccatgttgaactgtagctttttaacaggctccaagcagtgcttccataatctctccatggaa

SEQ ID NO: 77944 - DNA, 78 bp, Homo sapiens
accatgttgaactgtagctttttaacaggctccaagcagtgcttccataatctctccatggaaaatcataccacacaa

SEQ ID NO: 77945 - DNA, 78 bp, Homo sapiens
tgtagctttttaacaggctccaagcagtgcttccataatctctccatggaaaatcataccacacaactgcttcgaaac

SEQ ID NO: 77946 - DNA, 78 bp, Homo sapiens
caagcagtgcttccataatctctccatggaaaatcataccacacaactgcttcgaaacttctcccataaatggcattt

SEQ ID NO: 77947 - DNA, 76 bp, Homo sapiens
agtgcttccataatctctccatggaaaatcataccacacaactgcttcgaaacttctcccataaatggcatttttc

SEQ ID NO: 77948 - DNA, 77 bp, Homo sapiens
tctccatggaaaatcataccacacaactgcttcgaaacttctcccataaatggcatttttccgcttatgcatcaact

SEQ ID NO: 77949 - DNA, 74 bp, Homo sapiens
ataccacacaactgcttcgaaacttctcccataaatggcatttttccgcttatgcatcaactttttgttgctgt

SEQ ID NO: 77950 - DNA, 73 bp, Homo sapiens
tctcccataaatggcatttttccgcttatgcatcaactttttgttgctgttttctgagaaactcggcctttat

SEQ ID NO: 77951 - DNA, 70 bp, Homo sapiens
aaatggcatttttccgcttatgcatcaactttttgttgctgttttctgagaaactcggcctttattaact

SEQ ID NO: 77952 - DNA, 72 bp, Homo sapiens
tttttccgcttatgcatcaactttttgttgctgttttctgagaaactcggcctttattaacttcaattgctc

SEQ ID NO: 77953 - DNA, 74 bp, Homo sapiens
catcaactttttgttgctgttttctgagaaactcggcctttattaacttcaattgctcgcataactaatctgta

SEQ ID NO: 77954 - DNA, 75 bp, Homo sapiens
tgttgctgttttctgagaaactcggcctttattaacttcaattgctcgcataactaatctgtatatagaagactt

SEQ ID NO: 77955 - DNA, 74 bp, Homo sapiens
tttctgagaaactcggcctttattaacttcaattgctcgcataactaatctgtatatagaagactttccagtaa

SEQ ID NO: 77956 - DNA, 71 bp, Homo sapiens
gaaactcggcctttattaacttcaattgctcgcataactaatctgtatatagaagactttccagtaaaagg

SEQ ID NO: 77957 - DNA, 75 bp, Homo sapiens
attaacttcaattgctcgcataactaatctgtatatagaagactttccagtaaaaggtgtgactttatgtgtata

SEQ ID NO: 77958 - DNA, 77 bp, Homo sapiens
ttcaattgctcgcataactaatctgtatatagaagactttccagtaaaaggtgtgactttatgtgtataaattatgc

SEQ ID NO: 77959 - DNA, 74 bp, Homo sapiens
cgcataactaatctgtatatagaagactttccagtaaaaggtgtgactttatgtgtataaattatgctaaaggc

SEQ ID NO: 77960 - DNA, 72 bp, Homo sapiens
atctgtatatagaagactttccagtaaaaggtgtgactttatgtgtataaattatgctaaaggccaggtacg

SEQ ID NO: 77961 - DNA, 71 bp, Homo sapiens
aaaaaaattatgctcaaaatcactgagtattgcttttcacaggacttgggggaaatagaaagaggtgaggc

SEQ ID NO: 77962 - DNA, 75 bp, Homo sapiens
tgctcaaaatcactgagtattgcttttcacaggacttgggggaaatagaaagaggtgaggctattctggaaaata

SEQ ID NO: 77963 - DNA, 72 bp, Homo sapiens
aaaatcactgagtattgcttttcacaggacttgggggaaatagaaagaggtgaggctattctggaaaataga

SEQ ID NO: 77964 - DNA, 73 bp, Homo sapiens
agtattgcttttcacaggacttgggggaaatagaaagaggtgaggctattctggaaaatagaaatcagcaata

SEQ ID NO: 77965 - DNA, 74 bp, Homo sapiens
cttttcacaggacttgggggaaatagaaagaggtgaggctattctggaaaatagaaatcagcaataatctctca

SEQ ID NO: 77966 - DNA, 75 bp, Homo sapiens
ttcacaggacttgggggaaatagaaagaggtgaggctattctggaaaatagaaatcagcaataatctctcaggtg

SEQ ID NO: 77967 - DNA, 75 bp, Homo sapiens
ttgggggaaatagaaagaggtgaggctattctggaaaatagaaatcagcaataatctctcaggtgtggccacaaa

SEQ ID NO: 77968 - DNA, 76 bp, Homo sapiens
ggaaatagaaagaggtgaggctattctggaaaatagaaatcagcaataatctctcaggtgtggccacaaagccact

SEQ ID NO: 77969 - DNA, 77 bp, Homo sapiens
tagaaagaggtgaggctattctggaaaatagaaatcagcaataatctctcaggtgtggccacaaagccacttgtaaa

SEQ ID NO: 77970 - DNA, 77 bp, Homo sapiens
ctattctggaaaatagaaatcagcaataatctctcaggtgtggccacaaagccacttgtaaacttgctggattccca

SEQ ID NO: 77971 - DNA, 75 bp, Homo sapiens
aaatagaaatcagcaataatctctcaggtgtggccacaaagccacttgtaaacttgctggattcccaaggaagag

SEQ ID NO: 77972 - DNA, 76 bp, Homo sapiens
agcaataatctctcaggtgtggccacaaagccacttgtaaacttgctggattcccaaggaagaggatggccattta

SEQ ID NO: 77973 - DNA, 74 bp, Homo sapiens
tctcaggtgtggccacaaagccacttgtaaacttgctggattcccaaggaagaggatggccatttagccccacg

SEQ ID NO: 77974 - DNA, 73 bp, Homo sapiens
acaaagccacttgtaaacttgctggattcccaaggaagaggatggccatttagccccacggctccttcaggca

SEQ ID NO: 77975 - DNA, 73 bp, Homo sapiens
ttgtaaacttgctggattcccaaggaagaggatggccatttagccccacggctccttcaggcacacagaaaaa

SEQ ID NO: 77976 - DNA, 75 bp, Homo sapiens
ttgctggattcccaaggaagaggatggccatttagccccacggctccttcaggcacacagaaaaagtccttatca

SEQ ID NO: 77977 - DNA, 77 bp, Homo sapiens
gatggccatttagccccacggctccttcaggcacacagaaaaagtccttatcatgaaccagcactgtaaaacatgta

SEQ ID NO: 77978 - DNA, 75 bp, Homo sapiens
atttagccccacggctccttcaggcacacagaaaaagtccttatcatgaaccagcactgtaaaacatgtatagaa

SEQ ID NO: 77979 - DNA, 75 bp, Homo sapiens
gcacacagaaaaagtccttatcatgaaccagcactgtaaaacatgtatagaaattctgggcaaaaaaagctattc

SEQ ID NO: 77980 - DNA, 72 bp, Homo sapiens
aaagtccttatcatgaaccagcactgtaaaacatgtatagaaattctgggcaaaaaaagctattctcaaacg

SEQ ID NO: 77981 - DNA, 76 bp, Homo sapiens
tatcatgaaccagcactgtaaaacatgtatagaaattctgggcaaaaaaagctattctcaaacgtcaaaaatggca

SEQ ID NO: 77982 - DNA, 75 bp, Homo sapiens
gcactgtaaaacatgtatagaaattctgggcaaaaaaagctattctcaaacgtcaaaaatggcattcaggataga

SEQ ID NO: 77983 - DNA, 76 bp, Homo sapiens
aacatgtatagaaattctgggcaaaaaaagctattctcaaacgtcaaaaatggcattcaggatagagaagatcaca

SEQ ID NO: 77984 - DNA, 76 bp, Homo sapiens
tagaaattctgggcaaaaaaagctattctcaaacgtcaaaaatggcattcaggatagagaagatcacacaaaatga

SEQ ID NO: 77985 - DNA, 77 bp, Homo sapiens
caaaaaaagctattctcaaacgtcaaaaatggcattcaggatagagaagatcacacaaaatgaagcagaactaggca

SEQ ID NO: 77986 - DNA, 82 bp, Homo sapiens
tattctcaaacgtcaaaaatggcattcaggatagagaagatcacacaaaatgaagcagaactaggcagcatcttatagttga

SEQ ID NO: 77987 - DNA, 79 bp, Homo sapiens
aaacgtcaaaaatggcattcaggatagagaagatcacacaaaatgaagcagaactaggcagcatcttatagttgaagga

SEQ ID NO: 77988 - DNA, 79 bp, Homo sapiens
aaaatggcattcaggatagagaagatcacacaaaatgaagcagaactaggcagcatcttatagttgaaggaaataagga

SEQ ID NO: 77989 - DNA, 76 bp, Homo sapiens
atagagaagatcacacaaaatgaagcagaactaggcagcatcttatagttgaaggaaataaggaaataagattcct

SEQ ID NO: 77990 - DNA, 74 bp, Homo sapiens
tcacacaaaatgaagcagaactaggcagcatcttatagttgaaggaaataaggaaataagattccttgggaaat

SEQ ID NO: 77991 - DNA, 73 bp, Homo sapiens
aaaatgaagcagaactaggcagcatcttatagttgaaggaaataaggaaataagattccttgggaaattgcag

SEQ ID NO: 77992 - DNA, 70 bp, Homo sapiens
aactaggcagcatcttatagttgaaggaaataaggaaataagattccttgggaaattgcaggaggtttaa

SEQ ID NO: 77993 - DNA, 68 bp, Homo sapiens
cagcatcttatagttgaaggaaataaggaaataagattccttgggaaattgcaggaggtttaaaaacc

SEQ ID NO: 77994 - DNA, 67 bp, Homo sapiens
ttgaaggaaataaggaaataagattccttgggaaattgcaggaggtttaaaaacctccctgcaaaga

SEQ ID NO: 77995 - DNA, 67 bp, Homo sapiens
taaggaaataagattccttgggaaattgcaggaggtttaaaaacctccctgcaaagaggactgaaaa

SEQ ID NO: 77996 - DNA, 69 bp, Homo sapiens
ataagattccttgggaaattgcaggaggtttaaaaacctccctgcaaagaggactgaaaacttcatcca

SEQ ID NO: 77997 - DNA, 72 bp, Homo sapiens
aaattgcaggaggtttaaaaacctccctgcaaagaggactgaaaacttcatccatgcagaggaatggtaaga

SEQ ID NO: 77998 - DNA, 73 bp, Homo sapiens
aggtttaaaaacctccctgcaaagaggactgaaaacttcatccatgcagaggaatggtaagatgctaggaaca

SEQ ID NO: 77999 - DNA, 76 bp, Homo sapiens
taaaaacctccctgcaaagaggactgaaaacttcatccatgcagaggaatggtaagatgctaggaacaggggcagc

SEQ ID NO: 78000 - DNA, 75 bp, Homo sapiens
aaagaggactgaaaacttcatccatgcagaggaatggtaagatgctaggaacaggggcagccttaaaggagcgct

SEQ ID NO: 78001 - DNA, 77 bp, Homo sapiens
gaaaacttcatccatgcagaggaatggtaagatgctaggaacaggggcagccttaaaggagcgcttctcaaacgtca

SEQ ID NO: 78002 - DNA, 83 bp, Homo sapiens
tccatgcagaggaatggtaagatgctaggaacaggggcagccttaaaggagcgcttctcaaacgtcagagcgcatcagaatca

SEQ ID NO: 78003 - DNA, 78 bp, Homo sapiens
agaggaatggtaagatgctaggaacaggggcagccttaaaggagcgcttctcaaacgtcagagcgcatcagaatcact

SEQ ID NO: 78004 - DNA, 79 bp, Homo sapiens
gatgctaggaacaggggcagccttaaaggagcgcttctcaaacgtcagagcgcatcagaatcacttgaaggactggtta

SEQ ID NO: 78005 - DNA, 75 bp, Homo sapiens
aacaggggcagccttaaaggagcgcttctcaaacgtcagagcgcatcagaatcacttgaaggactggttaaaaca

SEQ ID NO: 78006 - DNA, 78 bp, Homo sapiens
ccttaaaggagcgcttctcaaacgtcagagcgcatcagaatcacttgaaggactggttaaaacagattgcagctgtta

SEQ ID NO: 78007 - DNA, 81 bp, Homo sapiens
agcgcttctcaaacgtcagagcgcatcagaatcacttgaaggactggttaaaacagattgcagctgttaggcactgactaa

SEQ ID NO: 78008 - DNA, 81 bp, Homo sapiens
tctcaaacgtcagagcgcatcagaatcacttgaaggactggttaaaacagattgcagctgttaggcactgactaagacttg

SEQ ID NO: 78009 - DNA, 80 bp, Homo sapiens
agcgcatcagaatcacttgaaggactggttaaaacagattgcagctgttaggcactgactaagacttggtctgtttcata

SEQ ID NO: 78010 - DNA, 74 bp, Homo sapiens
aaggactggttaaaacagattgcagctgttaggcactgactaagacttggtctgtttcatagacttggtctgtt

SEQ ID NO: 78011 - DNA, 80 bp, Homo sapiens
attgcagctgttaggcactgactaagacttggtctgtttcatagacttggtctgtttcatactgagatggtcagtttcaa

SEQ ID NO: 78012 - DNA, 79 bp, Homo sapiens
taggcactgactaagacttggtctgtttcatagacttggtctgtttcatactgagatggtcagtttcaagccagtccta

SEQ ID NO: 78013 - DNA, 86 bp, Homo sapiens
tgtttcatagacttggtctgtttcatactgagatggtcagtttcaagccagtcctatgatgctgtgtgatataagcatcacagtcc

SEQ ID NO: 78014 - DNA, 86 bp, Homo sapiens
atagacttggtctgtttcatactgagatggtcagtttcaagccagtcctatgatgctgtgtgatataagcatcacagtcctctgga

SEQ ID NO: 78015 - DNA, 86 bp, Homo sapiens
actgagatggtcagtttcaagccagtcctatgatgctgtgtgatataagcatcacagtcctctggaggcagcattaaaatgcaaat

SEQ ID NO: 78016 - DNA, 83 bp, Homo sapiens
agtttcaagccagtcctatgatgctgtgtgatataagcatcacagtcctctggaggcagcattaaaatgcaaatttctgggtc

SEQ ID NO: 78017 - DNA, 83 bp, Homo sapiens
agtcctatgatgctgtgtgatataagcatcacagtcctctggaggcagcattaaaatgcaaatttctgggtctcacccctaga

SEQ ID NO: 78018 - DNA, 80 bp, Homo sapiens
ctgtgtgatataagcatcacagtcctctggaggcagcattaaaatgcaaatttctgggtctcacccctagagtttctgat

SEQ ID NO: 78019 - DNA, 77 bp, Homo sapiens
atataagcatcacagtcctctggaggcagcattaaaatgcaaatttctgggtctcacccctagagtttctgatttag

SEQ ID NO: 78020 - DNA, 75 bp, Homo sapiens
atcacagtcctctggaggcagcattaaaatgcaaatttctgggtctcacccctagagtttctgatttagtaggtc

SEQ ID NO: 78021 - DNA, 73 bp, Homo sapiens
tctggaggcagcattaaaatgcaaatttctgggtctcacccctagagtttctgatttagtaggtctggggtag

SEQ ID NO: 78022 - DNA, 70 bp, Homo sapiens
attaaaatgcaaatttctgggtctcacccctagagtttctgatttagtaggtctggggtagggcctgaga

SEQ ID NO: 78023 - DNA, 72 bp, Homo sapiens
atttctgggtctcacccctagagtttctgatttagtaggtctggggtagggcctgagaaattgcacatctaa

SEQ ID NO: 78024 - DNA, 72 bp, Homo sapiens
gtctcacccctagagtttctgatttagtaggtctggggtagggcctgagaaattgcacatctaacaagttcc

SEQ ID NO: 78025 - DNA, 72 bp, Homo sapiens
agtttctgatttagtaggtctggggtagggcctgagaaattgcacatctaacaagttcccaggtaacgctga

SEQ ID NO: 78026 - DNA, 76 bp, Homo sapiens
ctgatttagtaggtctggggtagggcctgagaaattgcacatctaacaagttcccaggtaacgctgatgctgctgg

SEQ ID NO: 78027 - DNA, 76 bp, Homo sapiens
ttcccaggtaacgctgatgctgctggtctggggaccacacttcgagaaacactggtctagaaggcaacaaagggca

SEQ ID NO: 78028 - DNA, 74 bp, Homo sapiens
taacgctgatgctgctggtctggggaccacacttcgagaaacactggtctagaaggcaacaaagggcagggttt

SEQ ID NO: 78029 - DNA, 72 bp, Homo sapiens
acttcgagaaacactggtctagaaggcaacaaagggcagggttttctctgcaccaggtgctacctttatcca

SEQ ID NO: 78030 - DNA, 71 bp, Homo sapiens
aaacactggtctagaaggcaacaaagggcagggttttctctgcaccaggtgctacctttatccaggtgttg

SEQ ID NO: 78031 - DNA, 72 bp, Homo sapiens
tctagaaggcaacaaagggcagggttttctctgcaccaggtgctacctttatccaggtgttggaggtaggac

SEQ ID NO: 78032 - DNA, 67 bp, Homo sapiens
aagggcagggttttctctgcaccaggtgctacctttatccaggtgttggaggtaggaccctttaaaa

SEQ ID NO: 78033 - DNA, 66 bp, Homo sapiens
agggttttctctgcaccaggtgctacctttatccaggtgttggaggtaggaccctttaaaagaaag

SEQ ID NO: 78034 - DNA, 67 bp, Homo sapiens
accaggtgctacctttatccaggtgttggaggtaggaccctttaaaagaaaggcataagaatcaaaa

SEQ ID NO: 78035 - DNA, 67 bp, Homo sapiens
aggtgctacctttatccaggtgttggaggtaggaccctttaaaagaaaggcataagaatcaaaacaa

SEQ ID NO: 78036 - DNA, 66 bp, Homo sapiens
tacctttatccaggtgttggaggtaggaccctttaaaagaaaggcataagaatcaaaacaacccac

SEQ ID NO: 78037 - DNA, 65 bp, Homo sapiens
aggtgttggaggtaggaccctttaaaagaaaggcataagaatcaaaacaacccaccaattactct

SEQ ID NO: 78038 - DNA, 67 bp, Homo sapiens
gaggtaggaccctttaaaagaaaggcataagaatcaaaacaacccaccaattactcttgacttgaaa

SEQ ID NO: 78039 - DNA, 68 bp, Homo sapiens
gtaggaccctttaaaagaaaggcataagaatcaaaacaacccaccaattactcttgacttgaaagcac

SEQ ID NO: 78040 - DNA, 67 bp, Homo sapiens
accctttaaaagaaaggcataagaatcaaaacaacccaccaattactcttgacttgaaagcaccctc

SEQ ID NO: 78041 - DNA, 72 bp, Homo sapiens
aaagaaaggcataagaatcaaaacaacccaccaattactcttgacttgaaagcaccctctgcctgcaccatt

SEQ ID NO: 78042 - DNA, 70 bp, Homo sapiens
aacaacccaccaattactcttgacttgaaagcaccctctgcctgcaccatttcctccaaacgggtggtaa

SEQ ID NO: 78043 - DNA, 73 bp, Homo sapiens
aattactcttgacttgaaagcaccctctgcctgcaccatttcctccaaacgggtggtaatgatgaaaactaca

SEQ ID NO: 78044 - DNA, 77 bp, Homo sapiens
ttgacttgaaagcaccctctgcctgcaccatttcctccaaacgggtggtaatgatgaaaactacagaaatgacatca

SEQ ID NO: 78045 - DNA, 74 bp, Homo sapiens
aaacgggtggtaatgatgaaaactacagaaatgacatcaggttggtcagagagatctaggaaaagaagagtgaa

SEQ ID NO: 78046 - DNA, 79 bp, Homo sapiens
taatgatgaaaactacagaaatgacatcaggttggtcagagagatctaggaaaagaagagtgaacgcaacagggcagat

SEQ ID NO: 78047 - DNA, 81 bp, Homo sapiens
agagatctaggaaaagaagagtgaacgcaacagggcagattcactgagagtcatgaaatcagccaggttcccagatactca

SEQ ID NO: 78048 - DNA, 81 bp, Homo sapiens
aagaagagtgaacgcaacagggcagattcactgagagtcatgaaatcagccaggttcccagatactcaggtcgtcatgaaa

SEQ ID NO: 78049 - DNA, 80 bp, Homo sapiens
aacgcaacagggcagattcactgagagtcatgaaatcagccaggttcccagatactcaggtcgtcatgaaagttccttga

SEQ ID NO: 78050 - DNA, 82 bp, Homo sapiens
cagattcactgagagtcatgaaatcagccaggttcccagatactcaggtcgtcatgaaagttccttgagattttcatctctg

SEQ ID NO: 78051 - DNA, 81 bp, Homo sapiens
tgagagtcatgaaatcagccaggttcccagatactcaggtcgtcatgaaagttccttgagattttcatctctgtctctaaa

SEQ ID NO: 78052 - DNA, 78 bp, Homo sapiens
aaatcagccaggttcccagatactcaggtcgtcatgaaagttccttgagattttcatctctgtctctaaattctgcta

SEQ ID NO: 78053 - DNA, 77 bp, Homo sapiens
aggttcccagatactcaggtcgtcatgaaagttccttgagattttcatctctgtctctaaattctgctagtgaagaa

SEQ ID NO: 78054 - DNA, 78 bp, Homo sapiens
gtcatgaaagttccttgagattttcatctctgtctctaaattctgctagtgaagaaagttctgcgtttgcacaccttg

SEQ ID NO: 78055 - DNA, 77 bp, Homo sapiens
ttccttgagattttcatctctgtctctaaattctgctagtgaagaaagttctgcgtttgcacaccttgttataagaa

SEQ ID NO: 78056 - DNA, 76 bp, Homo sapiens
attttcatctctgtctctaaattctgctagtgaagaaagttctgcgtttgcacaccttgttataagaatctactct

SEQ ID NO: 78057 - DNA, 76 bp, Homo sapiens
taaattctgctagtgaagaaagttctgcgtttgcacaccttgttataagaatctactcttcatacgaaagagtgga

SEQ ID NO: 78058 - DNA, 76 bp, Homo sapiens
tagtgaagaaagttctgcgtttgcacaccttgttataagaatctactcttcatacgaaagagtggagccagctagg

SEQ ID NO: 78059 - DNA, 76 bp, Homo sapiens
atacgaaagagtggagccagctaggtgggatcgcagcattcaaaaatcaccatgtgcccctggccctttctgttct

SEQ ID NO: 78060 - DNA, 77 bp, Homo sapiens
tggagccagctaggtgggatcgcagcattcaaaaatcaccatgtgcccctggccctttctgttcttccgcttcccaa

SEQ ID NO: 78061 - DNA, 73 bp, Homo sapiens
ctaggtgggatcgcagcattcaaaaatcaccatgtgcccctggccctttctgttcttccgcttcccaaggctt

SEQ ID NO: 78062 - DNA, 76 bp, Homo sapiens
cagcattcaaaaatcaccatgtgcccctggccctttctgttcttccgcttcccaaggctttgcgtctgctctgtct

SEQ ID NO: 78063 - DNA, 75 bp, Homo sapiens
ttcaaaaatcaccatgtgcccctggccctttctgttcttccgcttcccaaggctttgcgtctgctctgtcttctc

SEQ ID NO: 78064 - DNA, 72 bp, Homo sapiens
atgtgcccctggccctttctgttcttccgcttcccaaggctttgcgtctgctctgtcttctccgtacctttc

SEQ ID NO: 78065 - DNA, 74 bp, Homo sapiens
ccctttctgttcttccgcttcccaaggctttgcgtctgctctgtcttctccgtacctttctgcagtggcaccca

SEQ ID NO: 78066 - DNA, 77 bp, Homo sapiens
ttcttccgcttcccaaggctttgcgtctgctctgtcttctccgtacctttctgcagtggcacccatctacccaatca

SEQ ID NO: 78067 - DNA, 79 bp, Homo sapiens
tcccaaggctttgcgtctgctctgtcttctccgtacctttctgcagtggcacccatctacccaatcagcacataccatt

SEQ ID NO: 78068 - DNA, 81 bp, Homo sapiens
tttgcgtctgctctgtcttctccgtacctttctgcagtggcacccatctacccaatcagcacataccatttgtatatacca

SEQ ID NO: 78069 - DNA, 80 bp, Homo sapiens
tctgtcttctccgtacctttctgcagtggcacccatctacccaatcagcacataccatttgtatataccaggagcagaaa

SEQ ID NO: 78070 - DNA, 80 bp, Homo sapiens
ttctccgtacctttctgcagtggcacccatctacccaatcagcacataccatttgtatataccaggagcagaaagcaagc

SEQ ID NO: 78071 - DNA, 79 bp, Homo sapiens
acccatctacccaatcagcacataccatttgtatataccaggagcagaaagcaagcgaagtcttggtctgagacaagga

SEQ ID NO: 78072 - DNA, 80 bp, Homo sapiens
atttgtatataccaggagcagaaagcaagcgaagtcttggtctgagacaaggagtcatcatctccttgccttccagcctg

SEQ ID NO: 78073 - DNA, 81 bp, Homo sapiens
aggagcagaaagcaagcgaagtcttggtctgagacaaggagtcatcatctccttgccttccagcctggcacactccttctc

SEQ ID NO: 78074 - DNA, 81 bp, Homo sapiens
aaagcaagcgaagtcttggtctgagacaaggagtcatcatctccttgccttccagcctggcacactccttctccagtggca

SEQ ID NO: 78075 - DNA, 82 bp, Homo sapiens
aagtcttggtctgagacaaggagtcatcatctccttgccttccagcctggcacactccttctccagtggcagagagcacacg

SEQ ID NO: 78076 - DNA, 82 bp, Homo sapiens
agacaaggagtcatcatctccttgccttccagcctggcacactccttctccagtggcagagagcacacgggctgggcattgt

SEQ ID NO: 78077 - DNA, 85 bp, Homo sapiens
tcatcatctccttgccttccagcctggcacactccttctccagtggcagagagcacacgggctgggcattgttggatgctccttg

SEQ ID NO: 78078 - DNA, 84 bp, Homo sapiens
ttgccttccagcctggcacactccttctccagtggcagagagcacacgggctgggcattgttggatgctccttgtatcatataa

SEQ ID NO: 78079 - DNA, 81 bp, Homo sapiens
agcctggcacactccttctccagtggcagagagcacacgggctgggcattgttggatgctccttgtatcatataaaaacaa

SEQ ID NO: 78080 - DNA, 78 bp, Homo sapiens
acactccttctccagtggcagagagcacacgggctgggcattgttggatgctccttgtatcatataaaaacaaacaaa

SEQ ID NO: 78081 - DNA, 70 bp, Homo sapiens
acaaacaaacaaagccctgggccttttcaggctcaggttcacgttcacacagcttggccctggaacaaac

SEQ ID NO: 78082 - DNA, 70 bp, Homo sapiens
aaacaaagccctgggccttttcaggctcaggttcacgttcacacagcttggccctggaacaaacccctga

SEQ ID NO: 78083 - DNA, 75 bp, Homo sapiens
gccttttcaggctcaggttcacgttcacacagcttggccctggaacaaacccctgatggccagaacataagacca

SEQ ID NO: 78084 - DNA, 74 bp, Homo sapiens
gctcaggttcacgttcacacagcttggccctggaacaaacccctgatggccagaacataagaccacttgtttaa

SEQ ID NO: 78085 - DNA, 70 bp, Homo sapiens
tggaacaaacccctgatggccagaacataagaccacttgtttaacgtagcaacaccccaaaatacaacta

SEQ ID NO: 78086 - DNA, 73 bp, Homo sapiens
ccctgatggccagaacataagaccacttgtttaacgtagcaacaccccaaaatacaactagaagattcgagca

SEQ ID NO: 78087 - DNA, 71 bp, Homo sapiens
cagaacataagaccacttgtttaacgtagcaacaccccaaaatacaactagaagattcgagcaggaaagag

SEQ ID NO: 78088 - DNA, 69 bp, Homo sapiens
ataagaccacttgtttaacgtagcaacaccccaaaatacaactagaagattcgagcaggaaagagggaa

SEQ ID NO: 78089 - DNA, 70 bp, Homo sapiens
tttaacgtagcaacaccccaaaatacaactagaagattcgagcaggaaagagggaagaggacacgaataa

SEQ ID NO: 78090 - DNA, 68 bp, Homo sapiens
aacaccccaaaatacaactagaagattcgagcaggaaagagggaagaggacacgaataaaaacagaaa

SEQ ID NO: 78091 - DNA, 71 bp, Homo sapiens
aaaatacaactagaagattcgagcaggaaagagggaagaggacacgaataaaaacagaaatctgagaaaga

SEQ ID NO: 78092 - DNA, 73 bp, Homo sapiens
aactagaagattcgagcaggaaagagggaagaggacacgaataaaaacagaaatctgagaaagatcaagagaa

SEQ ID NO: 78093 - DNA, 75 bp, Homo sapiens
ttcgagcaggaaagagggaagaggacacgaataaaaacagaaatctgagaaagatcaagagaaacagaggagcaa

SEQ ID NO: 78094 - DNA, 72 bp, Homo sapiens
aagagggaagaggacacgaataaaaacagaaatctgagaaagatcaagagaaacagaggagcaagagggtta

SEQ ID NO: 78095 - DNA, 74 bp, Homo sapiens
aggacacgaataaaaacagaaatctgagaaagatcaagagaaacagaggagcaagagggttatgctagggaatg

SEQ ID NO: 78096 - DNA, 73 bp, Homo sapiens
aaaaacagaaatctgagaaagatcaagagaaacagaggagcaagagggttatgctagggaatgggaagcaaaa

SEQ ID NO: 78097 - DNA, 73 bp, Homo sapiens
aaatctgagaaagatcaagagaaacagaggagcaagagggttatgctagggaatgggaagcaaaagaaagtct

SEQ ID NO: 78098 - DNA, 74 bp, Homo sapiens
aagatcaagagaaacagaggagcaagagggttatgctagggaatgggaagcaaaagaaagtcttggtgctaagc

SEQ ID NO: 78099 - DNA, 73 bp, Homo sapiens
aaacagaggagcaagagggttatgctagggaatgggaagcaaaagaaagtcttggtgctaagctccagccctc

SEQ ID NO: 78100 - DNA, 73 bp, Homo sapiens
aagagggttatgctagggaatgggaagcaaaagaaagtcttggtgctaagctccagccctctcctctatttca

SEQ ID NO: 78101 - DNA, 75 bp, Homo sapiens
ttatgctagggaatgggaagcaaaagaaagtcttggtgctaagctccagccctctcctctatttcagagaaatta

SEQ ID NO: 78102 - DNA, 72 bp, Homo sapiens
aatgggaagcaaaagaaagtcttggtgctaagctccagccctctcctctatttcagagaaattatttttatc

SEQ ID NO: 78103 - DNA, 71 bp, Homo sapiens
aagaaagtcttggtgctaagctccagccctctcctctatttcagagaaattatttttatcctacttataaa

SEQ ID NO: 78104 - DNA, 70 bp, Homo sapiens
tccagccctctcctctatttcagagaaattatttttatcctacttataaacgtaatacaggtccagggaa

SEQ ID NO: 78105 - DNA, 65 bp, Homo sapiens
cctacttataaacgtaatacaggtccagggaagaaacactggaaaacagaaaagtaaaaagagga

SEQ ID NO: 78106 - DNA, 63 bp, Homo sapiens
cgtaatacaggtccagggaagaaacactggaaaacagaaaagtaaaaagaggaaataaaaccc

SEQ ID NO: 78107 - DNA, 62 bp, Homo sapiens
aggtccagggaagaaacactggaaaacagaaaagtaaaaagaggaaataaaaccctccctaa

SEQ ID NO: 78108 - DNA, 64 bp, Homo sapiens
aaacactggaaaacagaaaagtaaaaagaggaaataaaaccctccctaatcccatgccttggaa

SEQ ID NO: 78109 - DNA, 65 bp, Homo sapiens
aaaacagaaaagtaaaaagaggaaataaaaccctccctaatcccatgccttggaaagaagcactg

SEQ ID NO: 78110 - DNA, 68 bp, Homo sapiens
aaaagtaaaaagaggaaataaaaccctccctaatcccatgccttggaaagaagcactgtgaacaagca

SEQ ID NO: 78111 - DNA, 71 bp, Homo sapiens
gaaataaaaccctccctaatcccatgccttggaaagaagcactgtgaacaagcaccttctccccaacttga

SEQ ID NO: 78112 - DNA, 77 bp, Homo sapiens
taatcccatgccttggaaagaagcactgtgaacaagcaccttctccccaacttgatgaggtgtcgtctcactgccgg

SEQ ID NO: 78113 - DNA, 76 bp, Homo sapiens
cttggaaagaagcactgtgaacaagcaccttctccccaacttgatgaggtgtcgtctcactgccgggagacaccca

SEQ ID NO: 78114 - DNA, 72 bp, Homo sapiens
ttctccccaacttgatgaggtgtcgtctcactgccgggagacacccagccagcaggaatcggggaaaaaagg

SEQ ID NO: 78115 - DNA, 72 bp, Homo sapiens
acttgatgaggtgtcgtctcactgccgggagacacccagccagcaggaatcggggaaaaaagggaagtggag

SEQ ID NO: 78116 - DNA, 75 bp, Homo sapiens
gtgtcgtctcactgccgggagacacccagccagcaggaatcggggaaaaaagggaagtggaggcaggagctgagc

SEQ ID NO: 78117 - DNA, 72 bp, Homo sapiens
actgccgggagacacccagccagcaggaatcggggaaaaaagggaagtggaggcaggagctgagcgctcccc

SEQ ID NO: 78118 - DNA, 75 bp, Homo sapiens
ccagccagcaggaatcggggaaaaaagggaagtggaggcaggagctgagcgctcccctgcagcggccatcagggt

SEQ ID NO: 78119 - DNA, 75 bp, Homo sapiens
aggaatcggggaaaaaagggaagtggaggcaggagctgagcgctcccctgcagcggccatcagggttgtctctca

SEQ ID NO: 78120 - DNA, 75 bp, Homo sapiens
aaaaaagggaagtggaggcaggagctgagcgctcccctgcagcggccatcagggttgtctctcaggggaaataca

SEQ ID NO: 78121 - DNA, 78 bp, Homo sapiens
agtggaggcaggagctgagcgctcccctgcagcggccatcagggttgtctctcaggggaaatacagagcctgaaaggt

SEQ ID NO: 78122 - DNA, 75 bp, Homo sapiens
aggagctgagcgctcccctgcagcggccatcagggttgtctctcaggggaaatacagagcctgaaaggttttaaa

SEQ ID NO: 78123 - DNA, 72 bp, Homo sapiens
agcgctcccctgcagcggccatcagggttgtctctcaggggaaatacagagcctgaaaggttttaaaaacta

SEQ ID NO: 78124 - DNA, 70 bp, Homo sapiens
agcggccatcagggttgtctctcaggggaaatacagagcctgaaaggttttaaaaactagcccaactctc

SEQ ID NO: 78125 - DNA, 67 bp, Homo sapiens
agggttgtctctcaggggaaatacagagcctgaaaggttttaaaaactagcccaactctctctttta

SEQ ID NO: 78126 - DNA, 70 bp, Homo sapiens
tgtctctcaggggaaatacagagcctgaaaggttttaaaaactagcccaactctctcttttagagatggg

SEQ ID NO: 78127 - DNA, 68 bp, Homo sapiens
aatacagagcctgaaaggttttaaaaactagcccaactctctcttttagagatgggggaattgcaatt

SEQ ID NO: 78128 - DNA, 70 bp, Homo sapiens
tgaaaggttttaaaaactagcccaactctctcttttagagatgggggaattgcaatttcaggattctgga

SEQ ID NO: 78129 - DNA, 71 bp, Homo sapiens
gttttaaaaactagcccaactctctcttttagagatgggggaattgcaatttcaggattctggaaatgcaa

SEQ ID NO: 78130 - DNA, 80 bp, Homo sapiens
tagagatgggggaattgcaatttcaggattctggaaatgcaaggaagagcttaacataaccaggaaacagcacagctgca

SEQ ID NO: 78131 - DNA, 79 bp, Homo sapiens
tttcaggattctggaaatgcaaggaagagcttaacataaccaggaaacagcacagctgcaggcaagaccttcagccaag

SEQ ID NO: 78132 - DNA, 78 bp, Homo sapiens
aaggaagagcttaacataaccaggaaacagcacagctgcaggcaagaccttcagccaagtcctctctggtatggttca

SEQ ID NO: 78133 - DNA, 82 bp, Homo sapiens
ttaacataaccaggaaacagcacagctgcaggcaagaccttcagccaagtcctctctggtatggttcagagcagccaagaga

SEQ ID NO: 78134 - DNA, 81 bp, Homo sapiens
aacagcacagctgcaggcaagaccttcagccaagtcctctctggtatggttcagagcagccaagagaaggatcaaaagtat

SEQ ID NO: 78135 - DNA, 74 bp, Homo sapiens
aagaccttcagccaagtcctctctggtatggttcagagcagccaagagaaggatcaaaagtatttggaaattaa

SEQ ID NO: 78136 - DNA, 71 bp, Homo sapiens
ccaagtcctctctggtatggttcagagcagccaagagaaggatcaaaagtatttggaaattaattgttttt

SEQ ID NO: 78137 - DNA, 71 bp, Homo sapiens
cctctctggtatggttcagagcagccaagagaaggatcaaaagtatttggaaattaattgttttttaagtc

SEQ ID NO: 78138 - DNA, 71 bp, Homo sapiens
gttcagagcagccaagagaaggatcaaaagtatttggaaattaattgttttttaagtccctcttttctgca

SEQ ID NO: 78139 - DNA, 71 bp, Homo sapiens
gcagccaagagaaggatcaaaagtatttggaaattaattgttttttaagtccctcttttctgcagcttgta

SEQ ID NO: 78140 - DNA, 67 bp, Homo sapiens
gaaggatcaaaagtatttggaaattaattgttttttaagtccctcttttctgcagcttgtaccaaaa

SEQ ID NO: 78141 - DNA, 64 bp, Homo sapiens
aagtatttggaaattaattgttttttaagtccctcttttctgcagcttgtaccaaaaaacaaaa

SEQ ID NO: 78142 - DNA, 72 bp, Homo sapiens
aacaaaaacacataattttaaaaaaatccatctctcttggaactgccaccaagacagctcttctaagcaaga

SEQ ID NO: 78143 - DNA, 74 bp, Homo sapiens
aattttaaaaaaatccatctctcttggaactgccaccaagacagctcttctaagcaagagcctgcaccccacat

SEQ ID NO: 78144 - DNA, 78 bp, Homo sapiens
aaaaatccatctctcttggaactgccaccaagacagctcttctaagcaagagcctgcaccccacattcaccgatggcc

SEQ ID NO: 78145 - DNA, 81 bp, Homo sapiens
atctctcttggaactgccaccaagacagctcttctaagcaagagcctgcaccccacattcaccgatggcctggcaaggcaa

SEQ ID NO: 78146 - DNA, 78 bp, Homo sapiens
aactgccaccaagacagctcttctaagcaagagcctgcaccccacattcaccgatggcctggcaaggcaatgggaaaa

SEQ ID NO: 78147 - DNA, 77 bp, Homo sapiens
aagacagctcttctaagcaagagcctgcaccccacattcaccgatggcctggcaaggcaatgggaaaacaagccacc

SEQ ID NO: 78148 - DNA, 79 bp, Homo sapiens
acattcaccgatggcctggcaaggcaatgggaaaacaagccacccttcctgctgctcatgccacctgaacctcatgccg

SEQ ID NO: 78149 - DNA, 78 bp, Homo sapiens
atggcctggcaaggcaatgggaaaacaagccacccttcctgctgctcatgccacctgaacctcatgccgggtattgaa

SEQ ID NO: 78150 - DNA, 78 bp, Homo sapiens
gaaaacaagccacccttcctgctgctcatgccacctgaacctcatgccgggtattgaaatgtaggggacagattgcaa

SEQ ID NO: 78151 - DNA, 78 bp, Homo sapiens
cacccttcctgctgctcatgccacctgaacctcatgccgggtattgaaatgtaggggacagattgcaacctgtttaca

SEQ ID NO: 78152 - DNA, 81 bp, Homo sapiens
ttcctgctgctcatgccacctgaacctcatgccgggtattgaaatgtaggggacagattgcaacctgtttacagcatccta

SEQ ID NO: 78153 - DNA, 76 bp, Homo sapiens
ccacctgaacctcatgccgggtattgaaatgtaggggacagattgcaacctgtttacagcatcctagcggacacga

SEQ ID NO: 78154 - DNA, 76 bp, Homo sapiens
acctgaacctcatgccgggtattgaaatgtaggggacagattgcaacctgtttacagcatcctagcggacacgata

SEQ ID NO: 78155 - DNA, 78 bp, Homo sapiens
ctcatgccgggtattgaaatgtaggggacagattgcaacctgtttacagcatcctagcggacacgataccactgctta

SEQ ID NO: 78156 - DNA, 81 bp, Homo sapiens
ttgaaatgtaggggacagattgcaacctgtttacagcatcctagcggacacgataccactgcttagctatcagtgctcaaa

SEQ ID NO: 78157 - DNA, 81 bp, Homo sapiens
aatgtaggggacagattgcaacctgtttacagcatcctagcggacacgataccactgcttagctatcagtgctcaaagata

SEQ ID NO: 78158 - DNA, 81 bp, Homo sapiens
gggacagattgcaacctgtttacagcatcctagcggacacgataccactgcttagctatcagtgctcaaagataaccacta

SEQ ID NO: 78159 - DNA, 81 bp, Homo sapiens
acagattgcaacctgtttacagcatcctagcggacacgataccactgcttagctatcagtgctcaaagataaccactagtg

SEQ ID NO: 78160 - DNA, 80 bp, Homo sapiens
attgcaacctgtttacagcatcctagcggacacgataccactgcttagctatcagtgctcaaagataaccactagtgtgg

SEQ ID NO: 78161 - DNA, 78 bp, Homo sapiens
aacctgtttacagcatcctagcggacacgataccactgcttagctatcagtgctcaaagataaccactagtgtggggc

SEQ ID NO: 78162 - DNA, 78 bp, Homo sapiens
tgtttacagcatcctagcggacacgataccactgcttagctatcagtgctcaaagataaccactagtgtggggcgggg

SEQ ID NO: 78163 - DNA, 77 bp, Homo sapiens
tagcggacacgataccactgcttagctatcagtgctcaaagataaccactagtgtggggcgggggaagtgtgtcagt

SEQ ID NO: 78164 - DNA, 76 bp, Homo sapiens
acacgataccactgcttagctatcagtgctcaaagataaccactagtgtggggcgggggaagtgtgtcagtttcca

SEQ ID NO: 78165 - DNA, 74 bp, Homo sapiens
tatcagtgctcaaagataaccactagtgtggggcgggggaagtgtgtcagtttccagggggctgctataacaaa

SEQ ID NO: 78166 - DNA, 72 bp, Homo sapiens
tataacaaaatgccacattactgggtggcttaaagaacagaaacgtattgttacagttctggaagccagaaa

SEQ ID NO: 78167 - DNA, 72 bp, Homo sapiens
aaaatgccacattactgggtggcttaaagaacagaaacgtattgttacagttctggaagccagaaatctgaa

SEQ ID NO: 78168 - DNA, 74 bp, Homo sapiens
ctgggtggcttaaagaacagaaacgtattgttacagttctggaagccagaaatctgaaatcaagatactggcag

SEQ ID NO: 78169 - DNA, 74 bp, Homo sapiens
ttaaagaacagaaacgtattgttacagttctggaagccagaaatctgaaatcaagatactggcagggttggctc

SEQ ID NO: 78170 - DNA, 73 bp, Homo sapiens
aaacgtattgttacagttctggaagccagaaatctgaaatcaagatactggcagggttggctccttccaagaa

SEQ ID NO: 78171 - DNA, 77 bp, Homo sapiens
tattgttacagttctggaagccagaaatctgaaatcaagatactggcagggttggctccttccaagaatctgtccca

SEQ ID NO: 78172 - DNA, 78 bp, Homo sapiens
tctggaagccagaaatctgaaatcaagatactggcagggttggctccttccaagaatctgtcccaggcctctctccta

SEQ ID NO: 78173 - DNA, 76 bp, Homo sapiens
aaatctgaaatcaagatactggcagggttggctccttccaagaatctgtcccaggcctctctcctagcttgtggtg

SEQ ID NO: 78174 - DNA, 75 bp, Homo sapiens
aaatcaagatactggcagggttggctccttccaagaatctgtcccaggcctctctcctagcttgtggtggccttg

SEQ ID NO: 78175 - DNA, 75 bp, Homo sapiens
tactggcagggttggctccttccaagaatctgtcccaggcctctctcctagcttgtggtggccttgggcattcct

SEQ ID NO: 78176 - DNA, 77 bp, Homo sapiens
ttggctccttccaagaatctgtcccaggcctctctcctagcttgtggtggccttgggcattccttggctcgtagatg

SEQ ID NO: 78177 - DNA, 77 bp, Homo sapiens
tccaagaatctgtcccaggcctctctcctagcttgtggtggccttgggcattccttggctcgtagatggctttctcc

SEQ ID NO: 78178 - DNA, 78 bp, Homo sapiens
tctctcctagcttgtggtggccttgggcattccttggctcgtagatggctttctccctgtgccttcgcagcgtcttcc

SEQ ID NO: 78179 - DNA, 81 bp, Homo sapiens
gggcattccttggctcgtagatggctttctccctgtgccttcgcagcgtcttccctccatgagtgtctgtctctgagtcca

SEQ ID NO: 78180 - DNA, 80 bp, Homo sapiens
ttccttggctcgtagatggctttctccctgtgccttcgcagcgtcttccctccatgagtgtctgtctctgagtccacatt

SEQ ID NO: 78181 - DNA, 83 bp, Homo sapiens
tagatggctttctccctgtgccttcgcagcgtcttccctccatgagtgtctgtctctgagtccacatttcctccttgtgatga

SEQ ID NO: 78182 - DNA, 80 bp, Homo sapiens
tttctccctgtgccttcgcagcgtcttccctccatgagtgtctgtctctgagtccacatttcctccttgtgatgaggacc

SEQ ID NO: 78183 - DNA, 82 bp, Homo sapiens
tcgcagcgtcttccctccatgagtgtctgtctctgagtccacatttcctccttgtgatgaggaccccaacatattggatata

SEQ ID NO: 78184 - DNA, 80 bp, Homo sapiens
atgagtgtctgtctctgagtccacatttcctccttgtgatgaggaccccaacatattggatataggtccactatactcca

SEQ ID NO: 78185 - DNA, 78 bp, Homo sapiens
tgtctctgagtccacatttcctccttgtgatgaggaccccaacatattggatataggtccactatactccaggaagac

SEQ ID NO: 78186 - DNA, 74 bp, Homo sapiens
acatttcctccttgtgatgaggaccccaacatattggatataggtccactatactccaggaagaccacatcttt

SEQ ID NO: 78187 - DNA, 73 bp, Homo sapiens
ctccttgtgatgaggaccccaacatattggatataggtccactatactccaggaagaccacatctttttattt

SEQ ID NO: 78188 - DNA, 77 bp, Homo sapiens
aattgccacactggaagaccacatcttaacttgatcatttgcaaagatcttatttccaaataagatcacattcccag

SEQ ID NO: 78189 - DNA, 78 bp, Homo sapiens
tggaagaccacatcttaacttgatcatttgcaaagatcttatttccaaataagatcacattcccaggcactggcgaat

SEQ ID NO: 78190 - DNA, 76 bp, Homo sapiens
atcttaacttgatcatttgcaaagatcttatttccaaataagatcacattcccaggcactggcgaattagaacttg

SEQ ID NO: 78191 - DNA, 77 bp, Homo sapiens
ttgatcatttgcaaagatcttatttccaaataagatcacattcccaggcactggcgaattagaacttggacatcttt

SEQ ID NO: 78192 - DNA, 75 bp, Homo sapiens
tttgcaaagatcttatttccaaataagatcacattcccaggcactggcgaattagaacttggacatcttttgtgg

SEQ ID NO: 78193 - DNA, 75 bp, Homo sapiens
ttatttccaaataagatcacattcccaggcactggcgaattagaacttggacatcttttgtgggacacaactcaa

SEQ ID NO: 78194 - DNA, 74 bp, Homo sapiens
ataagatcacattcccaggcactggcgaattagaacttggacatcttttgtgggacacaactcaacccgtaaca

SEQ ID NO: 78195 - DNA, 74 bp, Homo sapiens
attcccaggcactggcgaattagaacttggacatcttttgtgggacacaactcaacccgtaacatgaagcagaa

SEQ ID NO: 78196 - DNA, 73 bp, Homo sapiens
actggcgaattagaacttggacatcttttgtgggacacaactcaacccgtaacatgaagcagaaggctggggc

SEQ ID NO: 78197 - DNA, 73 bp, Homo sapiens
attagaacttggacatcttttgtgggacacaactcaacccgtaacatgaagcagaaggctggggctggctggg

SEQ ID NO: 78198 - DNA, 73 bp, Homo sapiens
atcttttgtgggacacaactcaacccgtaacatgaagcagaaggctggggctggctgggggtgataggaggct

SEQ ID NO: 78199 - DNA, 76 bp, Homo sapiens
gacacaactcaacccgtaacatgaagcagaaggctggggctggctgggggtgataggaggcttggatagaggtcca

SEQ ID NO: 78200 - DNA, 73 bp, Homo sapiens
aacccgtaacatgaagcagaaggctggggctggctgggggtgataggaggcttggatagaggtccacctaaca

SEQ ID NO: 78201 - DNA, 75 bp, Homo sapiens
atgaagcagaaggctggggctggctgggggtgataggaggcttggatagaggtccacctaacacctggaagttga

SEQ ID NO: 78202 - DNA, 72 bp, Homo sapiens
aaggctggggctggctgggggtgataggaggcttggatagaggtccacctaacacctggaagttgatctggg

SEQ ID NO: 78203 - DNA, 75 bp, Homo sapiens
tggctgggggtgataggaggcttggatagaggtccacctaacacctggaagttgatctggggatgagaaagtctg

SEQ ID NO: 78204 - DNA, 77 bp, Homo sapiens
tgataggaggcttggatagaggtccacctaacacctggaagttgatctggggatgagaaagtctggacaaatgagaa

SEQ ID NO: 78205 - DNA, 75 bp, Homo sapiens
ggaggcttggatagaggtccacctaacacctggaagttgatctggggatgagaaagtctggacaaatgagaaaca

SEQ ID NO: 78206 - DNA, 75 bp, Homo sapiens
atagaggtccacctaacacctggaagttgatctggggatgagaaagtctggacaaatgagaaacagaggagcctg

SEQ ID NO: 78207 - DNA, 72 bp, Homo sapiens
acctaacacctggaagttgatctggggatgagaaagtctggacaaatgagaaacagaggagcctgggggttc

SEQ ID NO: 78208 - DNA, 76 bp, Homo sapiens
aagttgatctggggatgagaaagtctggacaaatgagaaacagaggagcctgggggttccgcagcagagaccgcag

SEQ ID NO: 78209 - DNA, 79 bp, Homo sapiens
gggatgagaaagtctggacaaatgagaaacagaggagcctgggggttccgcagcagagaccgcaggtgtctggcatggc

SEQ ID NO: 78210 - DNA, 78 bp, Homo sapiens
agaaagtctggacaaatgagaaacagaggagcctgggggttccgcagcagagaccgcaggtgtctggcatggcccaga

SEQ ID NO: 78211 - DNA, 76 bp, Homo sapiens
aaacagaggagcctgggggttccgcagcagagaccgcaggtgtctggcatggcccagaggggcagtaaagaaagca

SEQ ID NO: 78212 - DNA, 79 bp, Homo sapiens
ggggttccgcagcagagaccgcaggtgtctggcatggcccagaggggcagtaaagaaagcacaggatagccatactcca

SEQ ID NO: 78213 - DNA, 79 bp, Homo sapiens
agaccgcaggtgtctggcatggcccagaggggcagtaaagaaagcacaggatagccatactccaaccacagcacaagtc

SEQ ID NO: 78214 - DNA, 83 bp, Homo sapiens
tgtctggcatggcccagaggggcagtaaagaaagcacaggatagccatactccaaccacagcacaagtccatgcaggtgttca

SEQ ID NO: 78215 - DNA, 77 bp, Homo sapiens
agaggggcagtaaagaaagcacaggatagccatactccaaccacagcacaagtccatgcaggtgttcacccaaagcc

SEQ ID NO: 78216 - DNA, 80 bp, Homo sapiens
taaagaaagcacaggatagccatactccaaccacagcacaagtccatgcaggtgttcacccaaagcccatgagtacagta

SEQ ID NO: 78217 - DNA, 79 bp, Homo sapiens
acaagtccatgcaggtgttcacccaaagcccatgagtacagtaatattgattatgaaaacagtgacattgtctgtacca

SEQ ID NO: 78218 - DNA, 75 bp, Homo sapiens
aggtgttcacccaaagcccatgagtacagtaatattgattatgaaaacagtgacattgtctgtaccagttggaaa

SEQ ID NO: 78219 - DNA, 74 bp, Homo sapiens
acccaaagcccatgagtacagtaatattgattatgaaaacagtgacattgtctgtaccagttggaaaactgctt

SEQ ID NO: 78220 - DNA, 75 bp, Homo sapiens
atgagtacagtaatattgattatgaaaacagtgacattgtctgtaccagttggaaaactgcttttgctccgacct

SEQ ID NO: 78221 - DNA, 73 bp, Homo sapiens
agtaatattgattatgaaaacagtgacattgtctgtaccagttggaaaactgcttttgctccgaccttcccac

SEQ ID NO: 78222 - DNA, 75 bp, Homo sapiens
attatgaaaacagtgacattgtctgtaccagttggaaaactgcttttgctccgaccttcccactccatatgtcac

SEQ ID NO: 78223 - DNA, 76 bp, Homo sapiens
acagtgacattgtctgtaccagttggaaaactgcttttgctccgaccttcccactccatatgtcaccagccaccaa

SEQ ID NO: 78224 - DNA, 73 bp, Homo sapiens
tgtctgtaccagttggaaaactgcttttgctccgaccttcccactccatatgtcaccagccaccaaggccccc

SEQ ID NO: 78225 - DNA, 70 bp, Homo sapiens
agttggaaaactgcttttgctccgaccttcccactccatatgtcaccagccaccaaggccccccatgggg

SEQ ID NO: 78226 - DNA, 73 bp, Homo sapiens
ctgcttttgctccgaccttcccactccatatgtcaccagccaccaaggccccccatggggtccccacaatctg

SEQ ID NO: 78227 - DNA, 75 bp, Homo sapiens
actccatatgtcaccagccaccaaggccccccatggggtccccacaatctggccaagctttcagagtgggagcag

SEQ ID NO: 78228 - DNA, 73 bp, Homo sapiens
atggggtccccacaatctggccaagctttcagagtgggagcaggaccctatcccaacatattactccaatagt

SEQ ID NO: 78229 - DNA, 78 bp, Homo sapiens
acaatctggccaagctttcagagtgggagcaggaccctatcccaacatattactccaatagttcatccctctggcaga

SEQ ID NO: 78230 - DNA, 78 bp, Homo sapiens
caagctttcagagtgggagcaggaccctatcccaacatattactccaatagttcatccctctggcagaccactcaata

SEQ ID NO: 78231 - DNA, 77 bp, Homo sapiens
tttcagagtgggagcaggaccctatcccaacatattactccaatagttcatccctctggcagaccactcaataaatg

SEQ ID NO: 78232 - DNA, 79 bp, Homo sapiens
tatcccaacatattactccaatagttcatccctctggcagaccactcaataaatggcttggctttcgactgacctcaca

SEQ ID NO: 78233 - DNA, 78 bp, Homo sapiens
atattactccaatagttcatccctctggcagaccactcaataaatggcttggctttcgactgacctcacagaagcgac

SEQ ID NO: 78234 - DNA, 76 bp, Homo sapiens
aatagttcatccctctggcagaccactcaataaatggcttggctttcgactgacctcacagaagcgactcttttgg

SEQ ID NO: 78235 - DNA, 74 bp, Homo sapiens
actcaataaatggcttggctttcgactgacctcacagaagcgactcttttggggctgagggtatctttgggcac

SEQ ID NO: 78236 - DNA, 76 bp, Homo sapiens
ataaatggcttggctttcgactgacctcacagaagcgactcttttggggctgagggtatctttgggcacgcagata

SEQ ID NO: 78237 - DNA, 76 bp, Homo sapiens
ctttcgactgacctcacagaagcgactcttttggggctgagggtatctttgggcacgcagataggcattaaccaca

SEQ ID NO: 78238 - DNA, 77 bp, Homo sapiens
acctcacagaagcgactcttttggggctgagggtatctttgggcacgcagataggcattaaccacagctggcaagag

SEQ ID NO: 78239 - DNA, 77 bp, Homo sapiens
agaagcgactcttttggggctgagggtatctttgggcacgcagataggcattaaccacagctggcaagagggcagaa

SEQ ID NO: 78240 - DNA, 81 bp, Homo sapiens
ttttggggctgagggtatctttgggcacgcagataggcattaaccacagctggcaagagggcagaagcttcatgccacaga

SEQ ID NO: 78241 - DNA, 83 bp, Homo sapiens
tttgggcacgcagataggcattaaccacagctggcaagagggcagaagcttcatgccacagaaatatccagggtgcctgctac

SEQ ID NO: 78242 - DNA, 86 bp, Homo sapiens
aagagggcagaagcttcatgccacagaaatatccagggtgcctgctacctgcacagcacggcgcatcatctgtccaaggatgacaa

SEQ ID NO: 78243 - DNA, 86 bp, Homo sapiens
agaagcttcatgccacagaaatatccagggtgcctgctacctgcacagcacggcgcatcatctgtccaaggatgacaagaccctca

SEQ ID NO: 78244 - DNA, 88 bp, Homo sapiens
atgccacagaaatatccagggtgcctgctacctgcacagcacggcgcatcatctgtccaaggatgacaagaccctcatgccatctcag

SEQ ID NO: 78245 - DNA, 85 bp, Homo sapiens
aaatatccagggtgcctgctacctgcacagcacggcgcatcatctgtccaaggatgacaagaccctcatgccatctcagtgcccc

SEQ ID NO: 78246 - DNA, 86 bp, Homo sapiens
gggtgcctgctacctgcacagcacggcgcatcatctgtccaaggatgacaagaccctcatgccatctcagtgccccttctgctccc

SEQ ID NO: 78247 - DNA, 87 bp, Homo sapiens
tacctgcacagcacggcgcatcatctgtccaaggatgacaagaccctcatgccatctcagtgccccttctgctccccttctgcgcca

SEQ ID NO: 78248 - DNA, 84 bp, Homo sapiens
acggcgcatcatctgtccaaggatgacaagaccctcatgccatctcagtgccccttctgctccccttctgcgccactgggcaca

SEQ ID NO: 78249 - DNA, 84 bp, Homo sapiens
atctgtccaaggatgacaagaccctcatgccatctcagtgccccttctgctccccttctgcgccactgggcacagtgctcacag

SEQ ID NO: 78250 - DNA, 82 bp, Homo sapiens
aaggatgacaagaccctcatgccatctcagtgccccttctgctccccttctgcgccactgggcacagtgctcacagggagtg

SEQ ID NO: 78251 - DNA, 82 bp, Homo sapiens
cttctgctccccttctgcgccactgggcacagtgctcacagggagtgggcaggtagtaaacaacagcatcctgcatgactaa

SEQ ID NO: 78252 - DNA, 81 bp, Homo sapiens
cccttctgcgccactgggcacagtgctcacagggagtgggcaggtagtaaacaacagcatcctgcatgactaacttctcac

SEQ ID NO: 78253 - DNA, 79 bp, Homo sapiens
cactgggcacagtgctcacagggagtgggcaggtagtaaacaacagcatcctgcatgactaacttctcaccccattttc

SEQ ID NO: 78254 - DNA, 77 bp, Homo sapiens
acagtgctcacagggagtgggcaggtagtaaacaacagcatcctgcatgactaacttctcaccccattttcctcctc

SEQ ID NO: 78255 - DNA, 74 bp, Homo sapiens
acagggagtgggcaggtagtaaacaacagcatcctgcatgactaacttctcaccccattttcctcctcctacac

SEQ ID NO: 78256 - DNA, 77 bp, Homo sapiens
taaacaacagcatcctgcatgactaacttctcaccccattttcctcctcctacacctcttggatgagtgctacctac

SEQ ID NO: 78257 - DNA, 75 bp, Homo sapiens
atcctgcatgactaacttctcaccccattttcctcctcctacacctcttggatgagtgctacctactttggaatc

SEQ ID NO: 78258 - DNA, 73 bp, Homo sapiens
taacttctcaccccattttcctcctcctacacctcttggatgagtgctacctactttggaatccaactcagaa

SEQ ID NO: 78259 - DNA, 73 bp, Homo sapiens
cccattttcctcctcctacacctcttggatgagtgctacctactttggaatccaactcagaatgaagtaacaa

SEQ ID NO: 78260 - DNA, 74 bp, Homo sapiens
tcctcctacacctcttggatgagtgctacctactttggaatccaactcagaatgaagtaacaaaaaagctatta

SEQ ID NO: 78261 - DNA, 72 bp, Homo sapiens
ctacacctcttggatgagtgctacctactttggaatccaactcagaatgaagtaacaaaaaagctattaccc

SEQ ID NO: 78262 - DNA, 71 bp, Homo sapiens
atgagtgctacctactttggaatccaactcagaatgaagtaacaaaaaagctattaccccactccaaggtc

SEQ ID NO: 78263 - DNA, 70 bp, Homo sapiens
tactttggaatccaactcagaatgaagtaacaaaaaagctattaccccactccaaggtcttcctccaaca

SEQ ID NO: 78264 - DNA, 69 bp, Homo sapiens
aatccaactcagaatgaagtaacaaaaaagctattaccccactccaaggtcttcctccaacaataacaa

SEQ ID NO: 78265 - DNA, 71 bp, Homo sapiens
aatgaagtaacaaaaaagctattaccccactccaaggtcttcctccaacaataacaatctcatcgatggga

SEQ ID NO: 78266 - DNA, 77 bp, Homo sapiens
aagctattaccccactccaaggtcttcctccaacaataacaatctcatcgatgggacctcatgccagctttgcatag

SEQ ID NO: 78267 - DNA, 79 bp, Homo sapiens
tccaaggtcttcctccaacaataacaatctcatcgatgggacctcatgccagctttgcatagggaggcaccgtctcaaa

SEQ ID NO: 78268 - DNA, 80 bp, Homo sapiens
tcttcctccaacaataacaatctcatcgatgggacctcatgccagctttgcatagggaggcaccgtctcaaacactggtg

SEQ ID NO: 78269 - DNA, 81 bp, Homo sapiens
aacaataacaatctcatcgatgggacctcatgccagctttgcatagggaggcaccgtctcaaacactggtgggtgatgagc

SEQ ID NO: 78270 - DNA, 81 bp, Homo sapiens
aatctcatcgatgggacctcatgccagctttgcatagggaggcaccgtctcaaacactggtgggtgatgagctcgtaggag

SEQ ID NO: 78271 - DNA, 81 bp, Homo sapiens
atgggacctcatgccagctttgcatagggaggcaccgtctcaaacactggtgggtgatgagctcgtaggagtggcaactca

SEQ ID NO: 78272 - DNA, 78 bp, Homo sapiens
agctttgcatagggaggcaccgtctcaaacactggtgggtgatgagctcgtaggagtggcaactcacagcctcgtagg

SEQ ID NO: 78273 - DNA, 76 bp, Homo sapiens
tagggaggcaccgtctcaaacactggtgggtgatgagctcgtaggagtggcaactcacagcctcgtagggtgttta

SEQ ID NO: 78274 - DNA, 75 bp, Homo sapiens
cgtctcaaacactggtgggtgatgagctcgtaggagtggcaactcacagcctcgtagggtgtttagaggtggaaa

SEQ ID NO: 78275 - DNA, 73 bp, Homo sapiens
aaacactggtgggtgatgagctcgtaggagtggcaactcacagcctcgtagggtgtttagaggtggaaaggac

SEQ ID NO: 78276 - DNA, 75 bp, Homo sapiens
taggagtggcaactcacagcctcgtagggtgtttagaggtggaaaggactttcagcacaatactcaggcaggaaa

SEQ ID NO: 78277 - DNA, 73 bp, Homo sapiens
aactcacagcctcgtagggtgtttagaggtggaaaggactttcagcacaatactcaggcaggaaaggaaatga

SEQ ID NO: 78278 - DNA, 71 bp, Homo sapiens
tgtttagaggtggaaaggactttcagcacaatactcaggcaggaaaggaaatgaactccaacccaaaggaa

SEQ ID NO: 78279 - DNA, 71 bp, Homo sapiens
tggaaaggactttcagcacaatactcaggcaggaaaggaaatgaactccaacccaaaggaaagtctcattt

SEQ ID NO: 78280 - DNA, 74 bp, Homo sapiens
tttcagcacaatactcaggcaggaaaggaaatgaactccaacccaaaggaaagtctcattttaacaatctcata

SEQ ID NO: 78281 - DNA, 71 bp, Homo sapiens
aatactcaggcaggaaaggaaatgaactccaacccaaaggaaagtctcattttaacaatctcatatccact

SEQ ID NO: 78282 - DNA, 75 bp, Homo sapiens
aaatgaactccaacccaaaggaaagtctcattttaacaatctcatatccacttcaggaagcattctgtctttgca

SEQ ID NO: 78283 - DNA, 78 bp, Homo sapiens
aaagtctcattttaacaatctcatatccacttcaggaagcattctgtctttgcaaacaagaagccattcgcattgtgt

SEQ ID NO: 78284 - DNA, 79 bp, Homo sapiens
attttaacaatctcatatccacttcaggaagcattctgtctttgcaaacaagaagccattcgcattgtgttcgcccaca

SEQ ID NO: 78285 - DNA, 78 bp, Homo sapiens
atctcatatccacttcaggaagcattctgtctttgcaaacaagaagccattcgcattgtgttcgcccacaccaccccc

SEQ ID NO: 78286 - DNA, 76 bp, Homo sapiens
tctgtctttgcaaacaagaagccattcgcattgtgttcgcccacaccacccccgcaagaagccatccaagtggtta

SEQ ID NO: 78287 - DNA, 74 bp, Homo sapiens
tttgcaaacaagaagccattcgcattgtgttcgcccacaccacccccgcaagaagccatccaagtggttaatta

SEQ ID NO: 78288 - DNA, 75 bp, Homo sapiens
aagaagccattcgcattgtgttcgcccacaccacccccgcaagaagccatccaagtggttaattagagcccagca

SEQ ID NO: 78289 - DNA, 72 bp, Homo sapiens
attgtgttcgcccacaccacccccgcaagaagccatccaagtggttaattagagcccagcacagggaaggta

SEQ ID NO: 78290 - DNA, 72 bp, Homo sapiens
ccacaccacccccgcaagaagccatccaagtggttaattagagcccagcacagggaaggtatttagcaaata

SEQ ID NO: 78291 - DNA, 71 bp, Homo sapiens
cccgcaagaagccatccaagtggttaattagagcccagcacagggaaggtatttagcaaatacttgttact

SEQ ID NO: 78292 - DNA, 73 bp, Homo sapiens
aagccatccaagtggttaattagagcccagcacagggaaggtatttagcaaatacttgttacttgataatcaa

SEQ ID NO: 78293 - DNA, 75 bp, Homo sapiens
aattagagcccagcacagggaaggtatttagcaaatacttgttacttgataatcaattcacatggtccttgccca

SEQ ID NO: 78294 - DNA, 74 bp, Homo sapiens
cagggaaggtatttagcaaatacttgttacttgataatcaattcacatggtccttgcccactcacttattagaa

SEQ ID NO: 78295 - DNA, 79 bp, Homo sapiens
aatcaattcacatggtccttgcccactcacttattagaatataacctacagatcatttcaatgcatactaggagtttca

SEQ ID NO: 78296 - DNA, 79 bp, Homo sapiens
atggtccttgcccactcacttattagaatataacctacagatcatttcaatgcatactaggagtttcactgactcgctg

SEQ ID NO: 78297 - DNA, 76 bp, Homo sapiens
actcacttattagaatataacctacagatcatttcaatgcatactaggagtttcactgactcgctgggacctaacc

SEQ ID NO: 78298 - DNA, 74 bp, Homo sapiens
tagaatataacctacagatcatttcaatgcatactaggagtttcactgactcgctgggacctaaccctttaaaa

SEQ ID NO: 78299 - DNA, 74 bp, Homo sapiens
ataacctacagatcatttcaatgcatactaggagtttcactgactcgctgggacctaaccctttaaaagctcac

SEQ ID NO: 78300 - DNA, 74 bp, Homo sapiens
atttcaatgcatactaggagtttcactgactcgctgggacctaaccctttaaaagctcactctggttatgtcca

SEQ ID NO: 78301 - DNA, 74 bp, Homo sapiens
atactaggagtttcactgactcgctgggacctaaccctttaaaagctcactctggttatgtccatccagacaga

SEQ ID NO: 78302 - DNA, 75 bp, Homo sapiens
tttcactgactcgctgggacctaaccctttaaaagctcactctggttatgtccatccagacagatcctccctgta

SEQ ID NO: 78303 - DNA, 73 bp, Homo sapiens
tcgctgggacctaaccctttaaaagctcactctggttatgtccatccagacagatcctccctgtagcccaaaa

SEQ ID NO: 78304 - DNA, 70 bp, Homo sapiens
acctaaccctttaaaagctcactctggttatgtccatccagacagatcctccctgtagcccaaaacttcc

SEQ ID NO: 78305 - DNA, 73 bp, Homo sapiens
actctggttatgtccatccagacagatcctccctgtagcccaaaacttcccgccgcaccacaggttcccattc

SEQ ID NO: 78306 - DNA, 73 bp, Homo sapiens
tatgtccatccagacagatcctccctgtagcccaaaacttcccgccgcaccacaggttcccattcccacaccc

SEQ ID NO: 78307 - DNA, 69 bp, Homo sapiens
agacagatcctccctgtagcccaaaacttcccgccgcaccacaggttcccattcccacaccccacccca

SEQ ID NO: 78308 - DNA, 70 bp, Homo sapiens
ctgtagcccaaaacttcccgccgcaccacaggttcccattcccacaccccaccccacaggctccacacaa

SEQ ID NO: 78309 - DNA, 75 bp, Homo sapiens
ccgcaccacaggttcccattcccacaccccaccccacaggctccacacaagccccagaatggcagagcttcctgc

SEQ ID NO: 78310 - DNA, 76 bp, Homo sapiens
gttcccattcccacaccccaccccacaggctccacacaagccccagaatggcagagcttcctgcgctaatgttgga

SEQ ID NO: 78311 - DNA, 77 bp, Homo sapiens
ccacaccccaccccacaggctccacacaagccccagaatggcagagcttcctgcgctaatgttggacacacataaaa

SEQ ID NO: 78312 - DNA, 77 bp, Homo sapiens
accccacaggctccacacaagccccagaatggcagagcttcctgcgctaatgttggacacacataaaagccccagaa

SEQ ID NO: 78313 - DNA, 75 bp, Homo sapiens
acaagccccagaatggcagagcttcctgcgctaatgttggacacacataaaagccccagaaaaaaaggcagagta

SEQ ID NO: 78314 - DNA, 73 bp, Homo sapiens
gcagagcttcctgcgctaatgttggacacacataaaagccccagaaaaaaaggcagagtaggatgggttttaa

SEQ ID NO: 78315 - DNA, 71 bp, Homo sapiens
cttcctgcgctaatgttggacacacataaaagccccagaaaaaaaggcagagtaggatgggttttaagatc

SEQ ID NO: 78316 - DNA, 70 bp, Homo sapiens
taatgttggacacacataaaagccccagaaaaaaaggcagagtaggatgggttttaagatccctctcgaa

SEQ ID NO: 78317 - DNA, 70 bp, Homo sapiens
cataaaagccccagaaaaaaaggcagagtaggatgggttttaagatccctctcgaaactggtgcttcata

SEQ ID NO: 78318 - DNA, 71 bp, Homo sapiens
ccagaaaaaaaggcagagtaggatgggttttaagatccctctcgaaactggtgcttcatacctgttgacta

SEQ ID NO: 78319 - DNA, 70 bp, Homo sapiens
aaaaaggcagagtaggatgggttttaagatccctctcgaaactggtgcttcatacctgttgactaataag

SEQ ID NO: 78320 - DNA, 73 bp, Homo sapiens
ggatgggttttaagatccctctcgaaactggtgcttcatacctgttgactaataagtctgctcgccctagatt

SEQ ID NO: 78321 - DNA, 71 bp, Homo sapiens
ggttttaagatccctctcgaaactggtgcttcatacctgttgactaataagtctgctcgccctagattttt

SEQ ID NO: 78322 - DNA, 75 bp, Homo sapiens
tccctctcgaaactggtgcttcatacctgttgactaataagtctgctcgccctagattttttattctcttgcttg

SEQ ID NO: 78323 - DNA, 75 bp, Homo sapiens
gtgcttcatacctgttgactaataagtctgctcgccctagattttttattctcttgcttggtccccttcataatc

SEQ ID NO: 78324 - DNA, 74 bp, Homo sapiens
atacctgttgactaataagtctgctcgccctagattttttattctcttgcttggtccccttcataatctctcat

SEQ ID NO: 78325 - DNA, 74 bp, Homo sapiens
taataagtctgctcgccctagattttttattctcttgcttggtccccttcataatctctcatttccaacttcat

SEQ ID NO: 78326 - DNA, 75 bp, Homo sapiens
tctgctcgccctagattttttattctcttgcttggtccccttcataatctctcatttccaacttcattcataaaa

SEQ ID NO: 78327 - DNA, 73 bp, Homo sapiens
ctagattttttattctcttgcttggtccccttcataatctctcatttccaacttcattcataaaatgtcttcc

SEQ ID NO: 78328 - DNA, 76 bp, Homo sapiens
ttattctcttgcttggtccccttcataatctctcatttccaacttcattcataaaatgtcttcctaggctgggcac

SEQ ID NO: 78329 - DNA, 79 bp, Homo sapiens
atatatatatatcttcctgactttgtgtctgatgccaccctcacccgcaatacttgatgtaaaatcaccaggcaccctc

SEQ ID NO: 78330 - DNA, 77 bp, Homo sapiens
tatatatcttcctgactttgtgtctgatgccaccctcacccgcaatacttgatgtaaaatcaccaggcaccctcttt

SEQ ID NO: 78331 - DNA, 75 bp, Homo sapiens
ctttgtgtctgatgccaccctcacccgcaatacttgatgtaaaatcaccaggcaccctcttttcatcgggcccaa

SEQ ID NO: 78332 - DNA, 77 bp, Homo sapiens
tgtctgatgccaccctcacccgcaatacttgatgtaaaatcaccaggcaccctcttttcatcgggcccaaactcaga

SEQ ID NO: 78333 - DNA, 72 bp, Homo sapiens
accctcacccgcaatacttgatgtaaaatcaccaggcaccctcttttcatcgggcccaaactcagacaccca

SEQ ID NO: 78334 - DNA, 72 bp, Homo sapiens
aatacttgatgtaaaatcaccaggcaccctcttttcatcgggcccaaactcagacacccacagaactaaaca

SEQ ID NO: 78335 - DNA, 69 bp, Homo sapiens
aaaatcaccaggcaccctcttttcatcgggcccaaactcagacacccacagaactaaacacggaaaaca

SEQ ID NO: 78336 - DNA, 73 bp, Homo sapiens
accaggcaccctcttttcatcgggcccaaactcagacacccacagaactaaacacggaaaacacatgcatgaa

SEQ ID NO: 78337 - DNA, 75 bp, Homo sapiens
tttcatcgggcccaaactcagacacccacagaactaaacacggaaaacacatgcatgaagcccagttgagtatta

SEQ ID NO: 78338 - DNA, 72 bp, Homo sapiens
gggcccaaactcagacacccacagaactaaacacggaaaacacatgcatgaagcccagttgagtattaaaaa

SEQ ID NO: 78339 - DNA, 72 bp, Homo sapiens
agacacccacagaactaaacacggaaaacacatgcatgaagcccagttgagtattaaaaaaaatggcaggta

SEQ ID NO: 78340 - DNA, 71 bp, Homo sapiens
acagaactaaacacggaaaacacatgcatgaagcccagttgagtattaaaaaaaatggcaggtagtggtaa

SEQ ID NO: 78341 - DNA, 71 bp, Homo sapiens
aaacacggaaaacacatgcatgaagcccagttgagtattaaaaaaaatggcaggtagtggtaaccttctca

SEQ ID NO: 78342 - DNA, 73 bp, Homo sapiens
aacacatgcatgaagcccagttgagtattaaaaaaaatggcaggtagtggtaaccttctcagccccaaccagc

SEQ ID NO: 78343 - DNA, 73 bp, Homo sapiens
aagcccagttgagtattaaaaaaaatggcaggtagtggtaaccttctcagccccaaccagctgtgttcatgca

SEQ ID NO: 78344 - DNA, 71 bp, Homo sapiens
agtattaaaaaaaatggcaggtagtggtaaccttctcagccccaaccagctgtgttcatgcaggaaggtgg

SEQ ID NO: 78345 - DNA, 72 bp, Homo sapiens
aaaaatggcaggtagtggtaaccttctcagccccaaccagctgtgttcatgcaggaaggtggggctggtggg

SEQ ID NO: 78346 - DNA, 75 bp, Homo sapiens
tagtggtaaccttctcagccccaaccagctgtgttcatgcaggaaggtggggctggtggggccacacctcacgat

SEQ ID NO: 78347 - DNA, 78 bp, Homo sapiens
caaccagctgtgttcatgcaggaaggtggggctggtggggccacacctcacgattttctgaaagaagatagatatcca

SEQ ID NO: 78348 - DNA, 72 bp, Homo sapiens
ggaaggtggggctggtggggccacacctcacgattttctgaaagaagatagatatccagatgtttacgaaaa

SEQ ID NO: 78349 - DNA, 72 bp, Homo sapiens
gctggtggggccacacctcacgattttctgaaagaagatagatatccagatgtttacgaaaaaaactcccaa

SEQ ID NO: 78350 - DNA, 71 bp, Homo sapiens
gccacacctcacgattttctgaaagaagatagatatccagatgtttacgaaaaaaactcccaatttttcaa

SEQ ID NO: 78351 - DNA, 71 bp, Homo sapiens
cctcacgattttctgaaagaagatagatatccagatgtttacgaaaaaaactcccaatttttcaatgttga

SEQ ID NO: 78352 - DNA, 69 bp, Homo sapiens
ctgaaagaagatagatatccagatgtttacgaaaaaaactcccaatttttcaatgttgaaaactaacaa

SEQ ID NO: 78353 - DNA, 66 bp, Homo sapiens
ccagatgtttacgaaaaaaactcccaatttttcaatgttgaaaactaacaacatttttaagcactg

SEQ ID NO: 78354 - DNA, 73 bp, Homo sapiens
ccaatttttcaatgttgaaaactaacaacatttttaagcactgtgttcacagaatggaagcttctgttgacag

SEQ ID NO: 78355 - DNA, 76 bp, Homo sapiens
aaaactaacaacatttttaagcactgtgttcacagaatggaagcttctgttgacagtctctagtctaatgacaatc

SEQ ID NO: 78356 - DNA, 81 bp, Homo sapiens
atttttaagcactgtgttcacagaatggaagcttctgttgacagtctctagtctaatgacaatccagcaagtgacatctac

SEQ ID NO: 78357 - DNA, 81 bp, Homo sapiens
actgtgttcacagaatggaagcttctgttgacagtctctagtctaatgacaatccagcaagtgacatctaccctccctgtg

SEQ ID NO: 78358 - DNA, 81 bp, Homo sapiens
aatggaagcttctgttgacagtctctagtctaatgacaatccagcaagtgacatctaccctccctgtgtctttgcaagaca

SEQ ID NO: 78359 - DNA, 82 bp, Homo sapiens
aagcttctgttgacagtctctagtctaatgacaatccagcaagtgacatctaccctccctgtgtctttgcaagacagctctc

SEQ ID NO: 78360 - DNA, 82 bp, Homo sapiens
acagtctctagtctaatgacaatccagcaagtgacatctaccctccctgtgtctttgcaagacagctctcctggattccaga

SEQ ID NO: 78361 - DNA, 79 bp, Homo sapiens
acaatccagcaagtgacatctaccctccctgtgtctttgcaagacagctctcctggattccagaggtcctgaccttgcc

SEQ ID NO: 78362 - DNA, 79 bp, Homo sapiens
aagtgacatctaccctccctgtgtctttgcaagacagctctcctggattccagaggtcctgaccttgcctgcctgccac

SEQ ID NO: 78363 - DNA, 79 bp, Homo sapiens
taccctccctgtgtctttgcaagacagctctcctggattccagaggtcctgaccttgcctgcctgccacctccctgcca

SEQ ID NO: 78364 - DNA, 78 bp, Homo sapiens
tttgcaagacagctctcctggattccagaggtcctgaccttgcctgcctgccacctccctgccatccccaaaacatta

SEQ ID NO: 78365 - DNA, 76 bp, Homo sapiens
aagacagctctcctggattccagaggtcctgaccttgcctgcctgccacctccctgccatccccaaaacattataa

SEQ ID NO: 78366 - DNA, 76 bp, Homo sapiens
tggattccagaggtcctgaccttgcctgcctgccacctccctgccatccccaaaacattataatgccatttcccta

SEQ ID NO: 78367 - DNA, 75 bp, Homo sapiens
gtcctgaccttgcctgcctgccacctccctgccatccccaaaacattataatgccatttccctaggagtccagta

SEQ ID NO: 78368 - DNA, 77 bp, Homo sapiens
ttgcctgcctgccacctccctgccatccccaaaacattataatgccatttccctaggagtccagtaatcacagacca

SEQ ID NO: 78369 - DNA, 73 bp, Homo sapiens
ccacctccctgccatccccaaaacattataatgccatttccctaggagtccagtaatcacagaccagcacttt

SEQ ID NO: 78370 - DNA, 73 bp, Homo sapiens
cctgccatccccaaaacattataatgccatttccctaggagtccagtaatcacagaccagcacttttcaaaaa

SEQ ID NO: 78371 - DNA, 73 bp, Homo sapiens
aaacattataatgccatttccctaggagtccagtaatcacagaccagcacttttcaaaaagagttcaaatcaa

SEQ ID NO: 78372 - DNA, 74 bp, Homo sapiens
ttataatgccatttccctaggagtccagtaatcacagaccagcacttttcaaaaagagttcaaatcaagcaaaa

SEQ ID NO: 78373 - DNA, 78 bp, Homo sapiens
atcacagaccagcacttttcaaaaagagttcaaatcaagcaaaagtcattcctgataggtacacaatgcacagtggac

SEQ ID NO: 78374 - DNA, 74 bp, Homo sapiens
ttttcaaaaagagttcaaatcaagcaaaagtcattcctgataggtacacaatgcacagtggacctgtacttcct

SEQ ID NO: 78375 - DNA, 74 bp, Homo sapiens
aaaaagagttcaaatcaagcaaaagtcattcctgataggtacacaatgcacagtggacctgtacttcctttggc

SEQ ID NO: 78376 - DNA, 74 bp, Homo sapiens
aaatcaagcaaaagtcattcctgataggtacacaatgcacagtggacctgtacttcctttggcctgtaattaac

SEQ ID NO: 78377 - DNA, 73 bp, Homo sapiens
aaaagtcattcctgataggtacacaatgcacagtggacctgtacttcctttggcctgtaattaacgagtactg

SEQ ID NO: 78378 - DNA, 75 bp, Homo sapiens
ataggtacacaatgcacagtggacctgtacttcctttggcctgtaattaacgagtactggttgatctaatgactg

SEQ ID NO: 78379 - DNA, 76 bp, Homo sapiens
acaatgcacagtggacctgtacttcctttggcctgtaattaacgagtactggttgatctaatgactggtagagatc

SEQ ID NO: 78380 - DNA, 75 bp, Homo sapiens
gacctgtacttcctttggcctgtaattaacgagtactggttgatctaatgactggtagagatcctgctatgggat

SEQ ID NO: 78381 - DNA, 76 bp, Homo sapiens
gtacttcctttggcctgtaattaacgagtactggttgatctaatgactggtagagatcctgctatgggattagtgc

SEQ ID NO: 78382 - DNA, 77 bp, Homo sapiens
cctgtaattaacgagtactggttgatctaatgactggtagagatcctgctatgggattagtgcctggactccactaa

SEQ ID NO: 78383 - DNA, 78 bp, Homo sapiens
ttaacgagtactggttgatctaatgactggtagagatcctgctatgggattagtgcctggactccactaagccactgg

SEQ ID NO: 78384 - DNA, 84 bp, Homo sapiens
ttgatctaatgactggtagagatcctgctatgggattagtgcctggactccactaagccactgggctctgccatgtaatgaatg

SEQ ID NO: 78385 - DNA, 82 bp, Homo sapiens
taatgactggtagagatcctgctatgggattagtgcctggactccactaagccactgggctctgccatgtaatgaatggtaa

SEQ ID NO: 78386 - DNA, 81 bp, Homo sapiens
tagagatcctgctatgggattagtgcctggactccactaagccactgggctctgccatgtaatgaatggtaaagagacaag

SEQ ID NO: 78387 - DNA, 80 bp, Homo sapiens
tgggattagtgcctggactccactaagccactgggctctgccatgtaatgaatggtaaagagacaagtgactacaggcca

SEQ ID NO: 78388 - DNA, 79 bp, Homo sapiens
actaagccactgggctctgccatgtaatgaatggtaaagagacaagtgactacaggccagcacactcatcctaaccaaa

SEQ ID NO: 78389 - DNA, 77 bp, Homo sapiens
ccatgtaatgaatggtaaagagacaagtgactacaggccagcacactcatcctaaccaaagtagaggcaaattagga

SEQ ID NO: 78390 - DNA, 76 bp, Homo sapiens
aatgaatggtaaagagacaagtgactacaggccagcacactcatcctaaccaaagtagaggcaaattaggatgccc

SEQ ID NO: 78391 - DNA, 75 bp, Homo sapiens
aaagagacaagtgactacaggccagcacactcatcctaaccaaagtagaggcaaattaggatgccccagtctaaa

SEQ ID NO: 78392 - DNA, 78 bp, Homo sapiens
tacaggccagcacactcatcctaaccaaagtagaggcaaattaggatgccccagtctaaagatctccatagaagagaa

SEQ ID NO: 78393 - DNA, 75 bp, Homo sapiens
ccagcacactcatcctaaccaaagtagaggcaaattaggatgccccagtctaaagatctccatagaagagaaaaa

SEQ ID NO: 78394 - DNA, 72 bp, Homo sapiens
atcctaaccaaagtagaggcaaattaggatgccccagtctaaagatctccatagaagagaaaaatgaaagaa

SEQ ID NO: 78395 - DNA, 70 bp, Homo sapiens
aaagtagaggcaaattaggatgccccagtctaaagatctccatagaagagaaaaatgaaagaagaaactt

SEQ ID NO: 78396 - DNA, 70 bp, Homo sapiens
aaattaggatgccccagtctaaagatctccatagaagagaaaaatgaaagaagaaactttacaactcctc

SEQ ID NO: 78397 - DNA, 69 bp, Homo sapiens
cccagtctaaagatctccatagaagagaaaaatgaaagaagaaactttacaactcctccaaacctccaa

SEQ ID NO: 78398 - DNA, 70 bp, Homo sapiens
taaagatctccatagaagagaaaaatgaaagaagaaactttacaactcctccaaacctccaaggcctgaa

SEQ ID NO: 78399 - DNA, 72 bp, Homo sapiens
atagaagagaaaaatgaaagaagaaactttacaactcctccaaacctccaaggcctgaactgctgcacacga

SEQ ID NO: 78400 - DNA, 72 bp, Homo sapiens
aatgaaagaagaaactttacaactcctccaaacctccaaggcctgaactgctgcacacgagactctaggttc

SEQ ID NO: 78401 - DNA, 71 bp, Homo sapiens
aagaaactttacaactcctccaaacctccaaggcctgaactgctgcacacgagactctaggttccttgaag

SEQ ID NO: 78402 - DNA, 76 bp, Homo sapiens
ttacaactcctccaaacctccaaggcctgaactgctgcacacgagactctaggttccttgaaggcaggaatgctgt

SEQ ID NO: 78403 - DNA, 77 bp, Homo sapiens
aaacctccaaggcctgaactgctgcacacgagactctaggttccttgaaggcaggaatgctgttcatcttgtccgga

SEQ ID NO: 78404 - DNA, 82 bp, Homo sapiens
cctgaactgctgcacacgagactctaggttccttgaaggcaggaatgctgttcatcttgtccggatgccagggtgctaagca

SEQ ID NO: 78405 - DNA, 82 bp, Homo sapiens
tgcacacgagactctaggttccttgaaggcaggaatgctgttcatcttgtccggatgccagggtgctaagcagaatgtacaa

SEQ ID NO: 78406 - DNA, 78 bp, Homo sapiens
actctaggttccttgaaggcaggaatgctgttcatcttgtccggatgccagggtgctaagcagaatgtacaaatgaaa

SEQ ID NO: 78407 - DNA, 79 bp, Homo sapiens
ttccttgaaggcaggaatgctgttcatcttgtccggatgccagggtgctaagcagaatgtacaaatgaaaacagtacaa

SEQ ID NO: 78408 - DNA, 78 bp, Homo sapiens
aggaatgctgttcatcttgtccggatgccagggtgctaagcagaatgtacaaatgaaaacagtacaagccccagattc

SEQ ID NO: 78409 - DNA, 75 bp, Homo sapiens
tgttcatcttgtccggatgccagggtgctaagcagaatgtacaaatgaaaacagtacaagccccagattcttttt

SEQ ID NO: 78410 - DNA, 71 bp, Homo sapiens
cttgtccggatgccagggtgctaagcagaatgtacaaatgaaaacagtacaagccccagattctttttttt

SEQ ID NO: 78411 - DNA, 72 bp, Homo sapiens
accgtgcccggccgccccaaattctttgacttagcctcagctaagttgaaagcagagtgcatgcgtattttt

SEQ ID NO: 78412 - DNA, 72 bp, Homo sapiens
cggccgccccaaattctttgacttagcctcagctaagttgaaagcagagtgcatgcgtatttttttttaata

SEQ ID NO: 78413 - DNA, 76 bp, Homo sapiens
aattctttgacttagcctcagctaagttgaaagcagagtgcatgcgtatttttttttaatagcaaaaatgctgaga

SEQ ID NO: 78414 - DNA, 76 bp, Homo sapiens
ttagcctcagctaagttgaaagcagagtgcatgcgtatttttttttaatagcaaaaatgctgagatccaaacaatt

SEQ ID NO: 78415 - DNA, 75 bp, Homo sapiens
agctaagttgaaagcagagtgcatgcgtatttttttttaatagcaaaaatgctgagatccaaacaatttttgagc

SEQ ID NO: 78416 - DNA, 74 bp, Homo sapiens
aaagcagagtgcatgcgtatttttttttaatagcaaaaatgctgagatccaaacaatttttgagctattgacct

SEQ ID NO: 78417 - DNA, 72 bp, Homo sapiens
gcatgcgtatttttttttaatagcaaaaatgctgagatccaaacaatttttgagctattgaccttaaagctt

SEQ ID NO: 78418 - DNA, 72 bp, Homo sapiens
tttaatagcaaaaatgctgagatccaaacaatttttgagctattgaccttaaagctttgaaattataagacc

SEQ ID NO: 78419 - DNA, 75 bp, Homo sapiens
gcaaaaatgctgagatccaaacaatttttgagctattgaccttaaagctttgaaattataagacctgccattaca

SEQ ID NO: 78420 - DNA, 75 bp, Homo sapiens
gctgagatccaaacaatttttgagctattgaccttaaagctttgaaattataagacctgccattacatcctctta

SEQ ID NO: 78421 - DNA, 74 bp, Homo sapiens
acaatttttgagctattgaccttaaagctttgaaattataagacctgccattacatcctcttatacagacagga

SEQ ID NO: 78422 - DNA, 74 bp, Homo sapiens
tattgaccttaaagctttgaaattataagacctgccattacatcctcttatacagacaggaataaaggctggaa

SEQ ID NO: 78423 - DNA, 71 bp, Homo sapiens
accttaaagctttgaaattataagacctgccattacatcctcttatacagacaggaataaaggctggaaaa

SEQ ID NO: 78424 - DNA, 76 bp, Homo sapiens
tttgaaattataagacctgccattacatcctcttatacagacaggaataaaggctggaaaatatacacaagtcagc

SEQ ID NO: 78425 - DNA, 79 bp, Homo sapiens
acctgccattacatcctcttatacagacaggaataaaggctggaaaatatacacaagtcagccacgctgatgacactta

SEQ ID NO: 78426 - DNA, 78 bp, Homo sapiens
attacatcctcttatacagacaggaataaaggctggaaaatatacacaagtcagccacgctgatgacacttaagaata

SEQ ID NO: 78427 - DNA, 78 bp, Homo sapiens
tcttatacagacaggaataaaggctggaaaatatacacaagtcagccacgctgatgacacttaagaatataaacactg

SEQ ID NO: 78428 - DNA, 76 bp, Homo sapiens
aggaataaaggctggaaaatatacacaagtcagccacgctgatgacacttaagaatataaacactggccaggtgaa

SEQ ID NO: 78429 - DNA, 75 bp, Homo sapiens
ggaaaatatacacaagtcagccacgctgatgacacttaagaatataaacactggccaggtgaagggcctttcttg

SEQ ID NO: 78430 - DNA, 72 bp, Homo sapiens
atgacacttaagaatataaacactggccaggtgaagggcctttcttggcagttttatactcattctaagtct

SEQ ID NO: 78431 - DNA, 72 bp, Homo sapiens
aatataaacactggccaggtgaagggcctttcttggcagttttatactcattctaagtcttgtcaccataaa

SEQ ID NO: 78432 - DNA, 72 bp, Homo sapiens
aaacactggccaggtgaagggcctttcttggcagttttatactcattctaagtcttgtcaccataaaattga

SEQ ID NO: 78433 - DNA, 73 bp, Homo sapiens
tgaagggcctttcttggcagttttatactcattctaagtcttgtcaccataaaattgagttgtttgtcttcaa

SEQ ID NO: 78434 - DNA, 75 bp, Homo sapiens
tttcttggcagttttatactcattctaagtcttgtcaccataaaattgagttgtttgtcttcaatagctccacca

SEQ ID NO: 78435 - DNA, 77 bp, Homo sapiens
gttttatactcattctaagtcttgtcaccataaaattgagttgtttgtcttcaatagctccaccatgagattctaca

SEQ ID NO: 78436 - DNA, 78 bp, Homo sapiens
agtcttgtcaccataaaattgagttgtttgtcttcaatagctccaccatgagattctacaattgtttatgattatata

SEQ ID NO: 78437 - DNA, 73 bp, Homo sapiens
gagttgtttgtcttcaatagctccaccatgagattctacaattgtttatgattatataacctttaaccttggg

SEQ ID NO: 78438 - DNA, 75 bp, Homo sapiens
tcaatagctccaccatgagattctacaattgtttatgattatataacctttaaccttggggctacgatacatgtt

SEQ ID NO: 78439 - DNA, 72 bp, Homo sapiens
ccaccatgagattctacaattgtttatgattatataacctttaaccttggggctacgatacatgtttaccta

SEQ ID NO: 78440 - DNA, 69 bp, Homo sapiens
agattctacaattgtttatgattatataacctttaaccttggggctacgatacatgtttacctatttaa

SEQ ID NO: 78441 - DNA, 67 bp, Homo sapiens
gtttatgattatataacctttaaccttggggctacgatacatgtttacctatttaaagaagttgtgt

SEQ ID NO: 78442 - DNA, 67 bp, Homo sapiens
ttatataacctttaaccttggggctacgatacatgtttacctatttaaagaagttgtgttttctcat

SEQ ID NO: 78443 - DNA, 66 bp, Homo sapiens
ctttaaccttggggctacgatacatgtttacctatttaaagaagttgtgttttctcattaaatttc

SEQ ID NO: 78444 - DNA, 69 bp, Homo sapiens
ggctacgatacatgtttacctatttaaagaagttgtgttttctcattaaatttctataagaggaaattg

SEQ ID NO: 78445 - DNA, 67 bp, Homo sapiens
catgtttacctatttaaagaagttgtgttttctcattaaatttctataagaggaaattggatttaaa

SEQ ID NO: 78446 - DNA, 66 bp, Homo sapiens
cctatttaaagaagttgtgttttctcattaaatttctataagaggaaattggatttaaatttgttc

SEQ ID NO: 78447 - DNA, 69 bp, Homo sapiens
gaagttgtgttttctcattaaatttctataagaggaaattggatttaaatttgttcttcaacttaatca

SEQ ID NO: 78448 - DNA, 72 bp, Homo sapiens
cattaaatttctataagaggaaattggatttaaatttgttcttcaacttaatcatatttgactatgcctcca

SEQ ID NO: 78449 - DNA, 72 bp, Homo sapiens
ttctataagaggaaattggatttaaatttgttcttcaacttaatcatatttgactatgcctccaccatttta

SEQ ID NO: 78450 - DNA, 72 bp, Homo sapiens
gaggaaattggatttaaatttgttcttcaacttaatcatatttgactatgcctccaccattttattattaca

SEQ ID NO: 78451 - DNA, 74 bp, Homo sapiens
ttgttcttcaacttaatcatatttgactatgcctccaccattttattattacacagtgtccttgcaaataaaaa

SEQ ID NO: 78452 - DNA, 75 bp, Homo sapiens
atcatatttgactatgcctccaccattttattattacacagtgtccttgcaaataaaaataggtggtgactgtta

SEQ ID NO: 78453 - DNA, 71 bp, Homo sapiens
actatgcctccaccattttattattacacagtgtccttgcaaataaaaataggtggtgactgttagaaaac

SEQ ID NO: 78454 - DNA, 71 bp, Homo sapiens
gcctccaccattttattattacacagtgtccttgcaaataaaaataggtggtgactgttagaaaactttga

SEQ ID NO: 78455 - DNA, 69 bp, Homo sapiens
tattattacacagtgtccttgcaaataaaaataggtggtgactgttagaaaactttgaaaaatataaag

SEQ ID NO: 78456 - DNA, 69 bp, Homo sapiens
acacagtgtccttgcaaataaaaataggtggtgactgttagaaaactttgaaaaatataaagttgacat

SEQ ID NO: 78457 - DNA, 73 bp, Homo sapiens
ctttgaaaaatataaagttgacattttttctctttccaaatagattctgaaggtctgtgatagaatctgcgta

SEQ ID NO: 78458 - DNA, 73 bp, Homo sapiens
tataaagttgacattttttctctttccaaatagattctgaaggtctgtgatagaatctgcgtattgttttgtt

SEQ ID NO: 78459 - DNA, 71 bp, Homo sapiens
agttgacattttttctctttccaaatagattctgaaggtctgtgatagaatctgcgtattgttttgttttt

SEQ ID NO: 78460 - DNA, 67 bp, Homo sapiens
gttttgttttttaaacaaactcaatttccgaggtatttctgacacccaccaaagtttggcaatcaga

SEQ ID NO: 78461 - DNA, 69 bp, Homo sapiens
tttttaaacaaactcaatttccgaggtatttctgacacccaccaaagtttggcaatcagacagaaagac

SEQ ID NO: 78462 - DNA, 70 bp, Homo sapiens
aaactcaatttccgaggtatttctgacacccaccaaagtttggcaatcagacagaaagactccctaacca

SEQ ID NO: 78463 - DNA, 70 bp, Homo sapiens
aggtatttctgacacccaccaaagtttggcaatcagacagaaagactccctaaccaagacgtctaaagaa

SEQ ID NO: 78464 - DNA, 70 bp, Homo sapiens
tttctgacacccaccaaagtttggcaatcagacagaaagactccctaaccaagacgtctaaagaatggtt

SEQ ID NO: 78465 - DNA, 68 bp, Homo sapiens
accaaagtttggcaatcagacagaaagactccctaaccaagacgtctaaagaatggtttctaggccgg

SEQ ID NO: 78466 - DNA, 69 bp, Homo sapiens
aaaaaaagaacagtttctaaaggatgccaagaaagtcataaacgcccaccatgcccacacaagcctgtt

SEQ ID NO: 78467 - DNA, 72 bp, Homo sapiens
aagaacagtttctaaaggatgccaagaaagtcataaacgcccaccatgcccacacaagcctgtttttaatga

SEQ ID NO: 78468 - DNA, 74 bp, Homo sapiens
taaaggatgccaagaaagtcataaacgcccaccatgcccacacaagcctgtttttaatgacacttttattgcaa

SEQ ID NO: 78469 - DNA, 74 bp, Homo sapiens
aagaaagtcataaacgcccaccatgcccacacaagcctgtttttaatgacacttttattgcaatataattcaca

SEQ ID NO: 78470 - DNA, 78 bp, Homo sapiens
tcataaacgcccaccatgcccacacaagcctgtttttaatgacacttttattgcaatataattcacatatcattatat

SEQ ID NO: 78471 - DNA, 78 bp, Homo sapiens
caccatgcccacacaagcctgtttttaatgacacttttattgcaatataattcacatatcattatattctccctctaa

SEQ ID NO: 78472 - DNA, 78 bp, Homo sapiens
cacacaagcctgtttttaatgacacttttattgcaatataattcacatatcattatattctccctctaaaagcatata

SEQ ID NO: 78473 - DNA, 77 bp, Homo sapiens
tgtttttaatgacacttttattgcaatataattcacatatcattatattctccctctaaaagcatataatataatgg

SEQ ID NO: 78474 - DNA, 76 bp, Homo sapiens
gacacttttattgcaatataattcacatatcattatattctccctctaaaagcatataatataatggtttttggtg

SEQ ID NO: 78475 - DNA, 78 bp, Homo sapiens
gcaatataattcacatatcattatattctccctctaaaagcatataatataatggtttttggtgtagttgcagagttg

SEQ ID NO: 78476 - DNA, 77 bp, Homo sapiens
catatcattatattctccctctaaaagcatataatataatggtttttggtgtagttgcagagttgtataacctgcac

SEQ ID NO: 78477 - DNA, 75 bp, Homo sapiens
tatattctccctctaaaagcatataatataatggtttttggtgtagttgcagagttgtataacctgcaccactac

SEQ ID NO: 78478 - DNA, 73 bp, Homo sapiens
tccctctaaaagcatataatataatggtttttggtgtagttgcagagttgtataacctgcaccactacctaat

SEQ ID NO: 78479 - DNA, 72 bp, Homo sapiens
ctaaaagcatataatataatggtttttggtgtagttgcagagttgtataacctgcaccactacctaatttta

SEQ ID NO: 78480 - DNA, 72 bp, Homo sapiens
agcatataatataatggtttttggtgtagttgcagagttgtataacctgcaccactacctaattttaaaaca

SEQ ID NO: 78481 - DNA, 69 bp, Homo sapiens
ataatataatggtttttggtgtagttgcagagttgtataacctgcaccactacctaattttaaaacatt

SEQ ID NO: 78482 - DNA, 70 bp, Homo sapiens
gaaaccctgtacccatcagcagtcactcgccattaattccagctcccccccgcaaccaccagggtggttt

SEQ ID NO: 78483 - DNA, 71 bp, Homo sapiens
agtcactcgccattaattccagctcccccccgcaaccaccagggtggttttctgtggatttctctattcta

SEQ ID NO: 78484 - DNA, 70 bp, Homo sapiens
cattaattccagctcccccccgcaaccaccagggtggttttctgtggatttctctattctaggcgtttca

SEQ ID NO: 78485 - DNA, 70 bp, Homo sapiens
ttccagctcccccccgcaaccaccagggtggttttctgtggatttctctattctaggcgtttcatataaa

SEQ ID NO: 78486 - DNA, 75 bp, Homo sapiens
cccgcaaccaccagggtggttttctgtggatttctctattctaggcgtttcatataaacagaatcatatggcaca

SEQ ID NO: 78487 - DNA, 73 bp, Homo sapiens
agggtggttttctgtggatttctctattctaggcgtttcatataaacagaatcatatggcacacggctttttg

SEQ ID NO: 78488 - DNA, 76 bp, Homo sapiens
gttttctgtggatttctctattctaggcgtttcatataaacagaatcatatggcacacggctttttgtgtctagct

SEQ ID NO: 78489 - DNA, 76 bp, Homo sapiens
atttctctattctaggcgtttcatataaacagaatcatatggcacacggctttttgtgtctagcttctttgactta

SEQ ID NO: 78490 - DNA, 78 bp, Homo sapiens
taggcgtttcatataaacagaatcatatggcacacggctttttgtgtctagcttctttgacttactgtgatgttttca

SEQ ID NO: 78491 - DNA, 76 bp, Homo sapiens
tttcatataaacagaatcatatggcacacggctttttgtgtctagcttctttgacttactgtgatgttttcaaggt

SEQ ID NO: 78492 - DNA, 86 bp, Homo sapiens
ccattcatcagttgatgggcattttggttgctgctggccataataaataatgctcctctgaactgagcatgcatgcacactttttg

SEQ ID NO: 78493 - DNA, 84 bp, Homo sapiens
agttgatgggcattttggttgctgctggccataataaataatgctcctctgaactgagcatgcatgcacactttttgtgtggac

SEQ ID NO: 78494 - DNA, 82 bp, Homo sapiens
attttggttgctgctggccataataaataatgctcctctgaactgagcatgcatgcacactttttgtgtggacgtgtgtttc

SEQ ID NO: 78495 - DNA, 82 bp, Homo sapiens
gttgctgctggccataataaataatgctcctctgaactgagcatgcatgcacactttttgtgtggacgtgtgtttctaattt

SEQ ID NO: 78496 - DNA, 81 bp, Homo sapiens
ctgctggccataataaataatgctcctctgaactgagcatgcatgcacactttttgtgtggacgtgtgtttctaattttct

SEQ ID NO: 78497 - DNA, 78 bp, Homo sapiens
ataataaataatgctcctctgaactgagcatgcatgcacactttttgtgtggacgtgtgtttctaattttcttgggta

SEQ ID NO: 78498 - DNA, 79 bp, Homo sapiens
taataaataatgctcctctgaactgagcatgcatgcacactttttgtgtggacgtgtgtttctaattttcttgggtata

SEQ ID NO: 78499 - DNA, 80 bp, Homo sapiens
aataatgctcctctgaactgagcatgcatgcacactttttgtgtggacgtgtgtttctaattttcttgggtatacagcta

SEQ ID NO: 78500 - DNA, 79 bp, Homo sapiens
ctctgaactgagcatgcatgcacactttttgtgtggacgtgtgtttctaattttcttgggtatacagctaggagtggaa

SEQ ID NO: 78501 - DNA, 77 bp, Homo sapiens
aactgagcatgcatgcacactttttgtgtggacgtgtgtttctaattttcttgggtatacagctaggagtggaatat

SEQ ID NO: 78502 - DNA, 75 bp, Homo sapiens
atgcatgcacactttttgtgtggacgtgtgtttctaattttcttgggtatacagctaggagtggaatattctggg

SEQ ID NO: 78503 - DNA, 74 bp, Homo sapiens
atgcacactttttgtgtggacgtgtgtttctaattttcttgggtatacagctaggagtggaatattctgggtca

SEQ ID NO: 78504 - DNA, 72 bp, Homo sapiens
actttttgtgtggacgtgtgtttctaattttcttgggtatacagctaggagtggaatattctgggtcactga

SEQ ID NO: 78505 - DNA, 73 bp, Homo sapiens
ttttgtgtggacgtgtgtttctaattttcttgggtatacagctaggagtggaatattctgggtcactgaatat

SEQ ID NO: 78506 - DNA, 74 bp, Homo sapiens
gtgtttctaattttcttgggtatacagctaggagtggaatattctgggtcactgaatattctagaagatttctg

SEQ ID NO: 78507 - DNA, 76 bp, Homo sapiens
ttttcttgggtatacagctaggagtggaatattctgggtcactgaatattctagaagatttctggatcctattcta

SEQ ID NO: 78508 - DNA, 74 bp, Homo sapiens
ctaggagtggaatattctgggtcactgaatattctagaagatttctggatcctattctacacatttgtttttgt

SEQ ID NO: 78509 - DNA, 77 bp, Homo sapiens
actgaatattctagaagatttctggatcctattctacacatttgtttttgttccacttccatatctgaaccacatgc

SEQ ID NO: 78510 - DNA, 78 bp, Homo sapiens
atattctagaagatttctggatcctattctacacatttgtttttgttccacttccatatctgaaccacatgctgctaa

SEQ ID NO: 78511 - DNA, 80 bp, Homo sapiens
agatttctggatcctattctacacatttgtttttgttccacttccatatctgaaccacatgctgctaatcactgactcca

SEQ ID NO: 78512 - DNA, 80 bp, Homo sapiens
atttgtttttgttccacttccatatctgaaccacatgctgctaatcactgactccagctaacagacagtgaggaacgctc

SEQ ID NO: 78513 - DNA, 84 bp, Homo sapiens
ttgttccacttccatatctgaaccacatgctgctaatcactgactccagctaacagacagtgaggaacgctctcacactgttta

SEQ ID NO: 78514 - DNA, 83 bp, Homo sapiens
ttccatatctgaaccacatgctgctaatcactgactccagctaacagacagtgaggaacgctctcacactgtttaccagtaaa

SEQ ID NO: 78515 - DNA, 82 bp, Homo sapiens
aaccacatgctgctaatcactgactccagctaacagacagtgaggaacgctctcacactgtttaccagtaaacagtcttgca

SEQ ID NO: 78516 - DNA, 79 bp, Homo sapiens
taatcactgactccagctaacagacagtgaggaacgctctcacactgtttaccagtaaacagtcttgcaaagtaactca

SEQ ID NO: 78517 - DNA, 75 bp, Homo sapiens
actccagctaacagacagtgaggaacgctctcacactgtttaccagtaaacagtcttgcaaagtaactcaacttc

SEQ ID NO: 78518 - DNA, 75 bp, Homo sapiens
taacagacagtgaggaacgctctcacactgtttaccagtaaacagtcttgcaaagtaactcaacttcctagaata

SEQ ID NO: 78519 - DNA, 73 bp, Homo sapiens
aggaacgctctcacactgtttaccagtaaacagtcttgcaaagtaactcaacttcctagaatagagcaaacaa

SEQ ID NO: 78520 - DNA, 71 bp, Homo sapiens
gtttaccagtaaacagtcttgcaaagtaactcaacttcctagaatagagcaaacaacaaaatctgtctctt

SEQ ID NO: 78521 - DNA, 70 bp, Homo sapiens
aaacagtcttgcaaagtaactcaacttcctagaatagagcaaacaacaaaatctgtctcttttgtctttt

SEQ ID NO: 78522 - DNA, 70 bp, Homo sapiens
caacttcctagaatagagcaaacaacaaaatctgtctcttttgtctttttacttgtgtgggtcttcaact

SEQ ID NO: 78523 - DNA, 74 bp, Homo sapiens
tagaatagagcaaacaacaaaatctgtctcttttgtctttttacttgtgtgggtcttcaacttcatactagcag

SEQ ID NO: 78524 - DNA, 73 bp, Homo sapiens
aacaaaatctgtctcttttgtctttttacttgtgtgggtcttcaacttcatactagcagtgtgactgacttta

SEQ ID NO: 78525 - DNA, 74 bp, Homo sapiens
atctgtctcttttgtctttttacttgtgtgggtcttcaacttcatactagcagtgtgactgactttaagccact

SEQ ID NO: 78526 - DNA, 78 bp, Homo sapiens
ttgtgtgggtcttcaacttcatactagcagtgtgactgactttaagccacttggcatttgccacaaatgggagattat

SEQ ID NO: 78527 - DNA, 77 bp, Homo sapiens
ttcaacttcatactagcagtgtgactgactttaagccacttggcatttgccacaaatgggagattattggccttaaa

SEQ ID NO: 78528 - DNA, 77 bp, Homo sapiens
ttcatactagcagtgtgactgactttaagccacttggcatttgccacaaatgggagattattggccttaaacactgg

SEQ ID NO: 78529 - DNA, 74 bp, Homo sapiens
ttggcatttgccacaaatgggagattattggccttaaacactggtgaaaaatgaggggtgtgttatgcacgtaa

SEQ ID NO: 78530 - DNA, 73 bp, Homo sapiens
ttgccacaaatgggagattattggccttaaacactggtgaaaaatgaggggtgtgttatgcacgtaagtatta

SEQ ID NO: 78531 - DNA, 70 bp, Homo sapiens
agattattggccttaaacactggtgaaaaatgaggggtgtgttatgcacgtaagtattacctaaacatta

SEQ ID NO: 78532 - DNA, 70 bp, Homo sapiens
ccttaaacactggtgaaaaatgaggggtgtgttatgcacgtaagtattacctaaacattacatgttagaa

SEQ ID NO: 78533 - DNA, 71 bp, Homo sapiens
aacactggtgaaaaatgaggggtgtgttatgcacgtaagtattacctaaacattacatgttagaacggata

SEQ ID NO: 78534 - DNA, 71 bp, Homo sapiens
aaaaatgaggggtgtgttatgcacgtaagtattacctaaacattacatgttagaacggatatcctggaaga

SEQ ID NO: 78535 - DNA, 71 bp, Homo sapiens
ggtgtgttatgcacgtaagtattacctaaacattacatgttagaacggatatcctggaagagaaaacaaaa

SEQ ID NO: 78536 - DNA, 68 bp, Homo sapiens
acgtaagtattacctaaacattacatgttagaacggatatcctggaagagaaaacaaaacccacacca

SEQ ID NO: 78537 - DNA, 69 bp, Homo sapiens
ctaaacattacatgttagaacggatatcctggaagagaaaacaaaacccacaccaaagcggattaatag

SEQ ID NO: 78538 - DNA, 70 bp, Homo sapiens
tacatgttagaacggatatcctggaagagaaaacaaaacccacaccaaagcggattaataggaagcttta

SEQ ID NO: 78539 - DNA, 68 bp, Homo sapiens
aacggatatcctggaagagaaaacaaaacccacaccaaagcggattaataggaagctttaagctctaa

SEQ ID NO: 78540 - DNA, 70 bp, Homo sapiens
acaaaacccacaccaaagcggattaataggaagctttaagctctaacagccttccactaagaatccatta

SEQ ID NO: 78541 - DNA, 70 bp, Homo sapiens
gcggattaataggaagctttaagctctaacagccttccactaagaatccattaaagaaaaataataaagc

SEQ ID NO: 78542 - DNA, 69 bp, Homo sapiens
gaagctttaagctctaacagccttccactaagaatccattaaagaaaaataataaagccaaaattaggc

SEQ ID NO: 78543 - DNA, 69 bp, Homo sapiens
agctctaacagccttccactaagaatccattaaagaaaaataataaagccaaaattaggctttatataa

SEQ ID NO: 78544 - DNA, 68 bp, Homo sapiens
cagccttccactaagaatccattaaagaaaaataataaagccaaaattaggctttatataaattaggc

SEQ ID NO: 78545 - DNA, 71 bp, Homo sapiens
agaatccattaaagaaaaataataaagccaaaattaggctttatataaattaggctggcgctctctctctc

SEQ ID NO: 78546 - DNA, 78 bp, Homo sapiens
cacgcacacacgcacacgcacgcaaccctaatttaatcaaccaaatgtaccacatgcacatctttttagtctcacatt

SEQ ID NO: 78547 - DNA, 78 bp, Homo sapiens
acgcacacgcacgcaaccctaatttaatcaaccaaatgtaccacatgcacatctttttagtctcacatttgctcaaca

SEQ ID NO: 78548 - DNA, 78 bp, Homo sapiens
acgcaaccctaatttaatcaaccaaatgtaccacatgcacatctttttagtctcacatttgctcaacacagatggaca

SEQ ID NO: 78549 - DNA, 77 bp, Homo sapiens
cctaatttaatcaaccaaatgtaccacatgcacatctttttagtctcacatttgctcaacacagatggacagaaaaa

SEQ ID NO: 78550 - DNA, 78 bp, Homo sapiens
aaccaaatgtaccacatgcacatctttttagtctcacatttgctcaacacagatggacagaaaaaaatagatgtatgt

SEQ ID NO: 78551 - DNA, 78 bp, Homo sapiens
taccacatgcacatctttttagtctcacatttgctcaacacagatggacagaaaaaaatagatgtatgtttttgggta

SEQ ID NO: 78552 - DNA, 75 bp, Homo sapiens
cacatctttttagtctcacatttgctcaacacagatggacagaaaaaaatagatgtatgtttttgggtacagaac

SEQ ID NO: 78553 - DNA, 76 bp, Homo sapiens
ttagtctcacatttgctcaacacagatggacagaaaaaaatagatgtatgtttttgggtacagaaccttctcagag

SEQ ID NO: 78554 - DNA, 71 bp, Homo sapiens
ctcaacacagatggacagaaaaaaatagatgtatgtttttgggtacagaaccttctcagaggaacttttat

SEQ ID NO: 78555 - DNA, 69 bp, Homo sapiens
gatggacagaaaaaaatagatgtatgtttttgggtacagaaccttctcagaggaacttttattaacacg

SEQ ID NO: 78556 - DNA, 68 bp, Homo sapiens
aaaaatagatgtatgtttttgggtacagaaccttctcagaggaacttttattaacacggaattatcag

SEQ ID NO: 78557 - DNA, 70 bp, Homo sapiens
atgtatgtttttgggtacagaaccttctcagaggaacttttattaacacggaattatcagggccattcat

SEQ ID NO: 78558 - DNA, 69 bp, Homo sapiens
tttttgggtacagaaccttctcagaggaacttttattaacacggaattatcagggccattcattctatt

SEQ ID NO: 78559 - DNA, 69 bp, Homo sapiens
aaccttctcagaggaacttttattaacacggaattatcagggccattcattctatttggggagttagaa

SEQ ID NO: 78560 - DNA, 68 bp, Homo sapiens
ggaacttttattaacacggaattatcagggccattcattctatttggggagttagaaaaggatccaat

SEQ ID NO: 78561 - DNA, 70 bp, Homo sapiens
attaacacggaattatcagggccattcattctatttggggagttagaaaaggatccaattatttgtaaca

SEQ ID NO: 78562 - DNA, 69 bp, Homo sapiens
acggaattatcagggccattcattctatttggggagttagaaaaggatccaattatttgtaacaaagaa

SEQ ID NO: 78563 - DNA, 68 bp, Homo sapiens
attatcagggccattcattctatttggggagttagaaaaggatccaattatttgtaacaaagaaaagt

SEQ ID NO: 78564 - DNA, 67 bp, Homo sapiens
cagggccattcattctatttggggagttagaaaaggatccaattatttgtaacaaagaaaagttaaa

SEQ ID NO: 78565 - DNA, 66 bp, Homo sapiens
ccattcattctatttggggagttagaaaaggatccaattatttgtaacaaagaaaagttaaaagtg

SEQ ID NO: 78566 - DNA, 65 bp, Homo sapiens
tatttggggagttagaaaaggatccaattatttgtaacaaagaaaagttaaaagtgttctactgg

SEQ ID NO: 78567 - DNA, 64 bp, Homo sapiens
tttggggagttagaaaaggatccaattatttgtaacaaagaaaagttaaaagtgttctactggg

SEQ ID NO: 78568 - DNA, 64 bp, Homo sapiens
agttagaaaaggatccaattatttgtaacaaagaaaagttaaaagtgttctactggggccgggc

SEQ ID NO: 78569 - DNA, 65 bp, Homo sapiens
gttagaaaaggatccaattatttgtaacaaagaaaagttaaaagtgttctactggggccgggcgc

SEQ ID NO: 78570 - DNA, 67 bp, Homo sapiens
aaaaaaaagtgttctactggaaaacttatccagaaactcacattagttcctggcataataaagttaa

SEQ ID NO: 78571 - DNA, 71 bp, Homo sapiens
agtgttctactggaaaacttatccagaaactcacattagttcctggcataataaagttaaatgggaatcca

SEQ ID NO: 78572 - DNA, 71 bp, Homo sapiens
actggaaaacttatccagaaactcacattagttcctggcataataaagttaaatgggaatccactcattta

SEQ ID NO: 78573 - DNA, 70 bp, Homo sapiens
ttatccagaaactcacattagttcctggcataataaagttaaatgggaatccactcatttaaagaaaaat

SEQ ID NO: 78574 - DNA, 70 bp, Homo sapiens
actcacattagttcctggcataataaagttaaatgggaatccactcatttaaagaaaaattaaagcaaga

SEQ ID NO: 78575 - DNA, 69 bp, Homo sapiens
gttcctggcataataaagttaaatgggaatccactcatttaaagaaaaattaaagcaagaaatcaagaa

SEQ ID NO: 78576 - DNA, 66 bp, Homo sapiens
aagttaaatgggaatccactcatttaaagaaaaattaaagcaagaaatcaagaaaattactatttg

SEQ ID NO: 78577 - DNA, 69 bp, Homo sapiens
tgggaatccactcatttaaagaaaaattaaagcaagaaatcaagaaaattactatttggcaaaggaatc

SEQ ID NO: 78578 - DNA, 69 bp, Homo sapiens
catttaaagaaaaattaaagcaagaaatcaagaaaattactatttggcaaaggaatccaaaagctcaca

SEQ ID NO: 78579 - DNA, 69 bp, Homo sapiens
gaaaaattaaagcaagaaatcaagaaaattactatttggcaaaggaatccaaaagctcacatcctggtt

SEQ ID NO: 78580 - DNA, 71 bp, Homo sapiens
aagcaagaaatcaagaaaattactatttggcaaaggaatccaaaagctcacatcctggtttagtcctccaa

SEQ ID NO: 78581 - DNA, 72 bp, Homo sapiens
agaaaattactatttggcaaaggaatccaaaagctcacatcctggtttagtcctccaagcttcgctcacaaa

SEQ ID NO: 78582 - DNA, 74 bp, Homo sapiens
attactatttggcaaaggaatccaaaagctcacatcctggtttagtcctccaagcttcgctcacaaacataaca

SEQ ID NO: 78583 - DNA, 75 bp, Homo sapiens
aaaggaatccaaaagctcacatcctggtttagtcctccaagcttcgctcacaaacataacacatttatagatata

SEQ ID NO: 78584 - DNA, 78 bp, Homo sapiens
aaagctcacatcctggtttagtcctccaagcttcgctcacaaacataacacatttatagatatagatctataaatcta

SEQ ID NO: 78585 - DNA, 77 bp, Homo sapiens
cctggtttagtcctccaagcttcgctcacaaacataacacatttatagatatagatctataaatctatagagcttaa

SEQ ID NO: 78586 - DNA, 79 bp, Homo sapiens
ttagtcctccaagcttcgctcacaaacataacacatttatagatatagatctataaatctatagagcttaaaagcctga

SEQ ID NO: 78587 - DNA, 78 bp, Homo sapiens
aagcttcgctcacaaacataacacatttatagatatagatctataaatctatagagcttaaaagcctgagtgtggtac

SEQ ID NO: 78588 - DNA, 81 bp, Homo sapiens
tcacaaacataacacatttatagatatagatctataaatctatagagcttaaaagcctgagtgtggtactcatgcctgtaa

SEQ ID NO: 78589 - DNA, 64 bp, Homo sapiens
aataaaataaaaaagcttaaaaacaattttcaactctcctggacttgggttcatgctttaaaaa

SEQ ID NO: 78590 - DNA, 68 bp, Homo sapiens
aaaagcttaaaaacaattttcaactctcctggacttgggttcatgctttaaaaagatgcataggtttc

SEQ ID NO: 78591 - DNA, 67 bp, Homo sapiens
aaacaattttcaactctcctggacttgggttcatgctttaaaaagatgcataggtttcccttaaaaa

SEQ ID NO: 78592 - DNA, 67 bp, Homo sapiens
attttcaactctcctggacttgggttcatgctttaaaaagatgcataggtttcccttaaaaaattgt

SEQ ID NO: 78593 - DNA, 69 bp, Homo sapiens
ctcctggacttgggttcatgctttaaaaagatgcataggtttcccttaaaaaattgttatttcagatta

SEQ ID NO: 78594 - DNA, 67 bp, Homo sapiens
tgggttcatgctttaaaaagatgcataggtttcccttaaaaaattgttatttcagattatttttctt

SEQ ID NO: 78595 - DNA, 68 bp, Homo sapiens
aaaagatgcataggtttcccttaaaaaattgttatttcagattatttttctttatctactaatccaca

SEQ ID NO: 78596 - DNA, 69 bp, Homo sapiens
tgcataggtttcccttaaaaaattgttatttcagattatttttctttatctactaatccacaaactcag

SEQ ID NO: 78597 - DNA, 70 bp, Homo sapiens
cttaaaaaattgttatttcagattatttttctttatctactaatccacaaactcagttattctcattcca

SEQ ID NO: 78598 - DNA, 74 bp, Homo sapiens
tgttatttcagattatttttctttatctactaatccacaaactcagttattctcattccaacttaagtcactgc

SEQ ID NO: 78599 - DNA, 73 bp, Homo sapiens
attatttttctttatctactaatccacaaactcagttattctcattccaacttaagtcactgccacccatgcc

SEQ ID NO: 78600 - DNA, 75 bp, Homo sapiens
tttatctactaatccacaaactcagttattctcattccaacttaagtcactgccacccatgcccattcctccaaa

SEQ ID NO: 78601 - DNA, 76 bp, Homo sapiens
ctactaatccacaaactcagttattctcattccaacttaagtcactgccacccatgcccattcctccaaatactga

SEQ ID NO: 78602 - DNA, 74 bp, Homo sapiens
acaaactcagttattctcattccaacttaagtcactgccacccatgcccattcctccaaatactgaggcaaaaa

SEQ ID NO: 78603 - DNA, 73 bp, Homo sapiens
ttattctcattccaacttaagtcactgccacccatgcccattcctccaaatactgaggcaaaaaagaaaagat

SEQ ID NO: 78604 - DNA, 71 bp, Homo sapiens
aacttaagtcactgccacccatgcccattcctccaaatactgaggcaaaaaagaaaagattagaagactgg

SEQ ID NO: 78605 - DNA, 75 bp, Homo sapiens
actgccacccatgcccattcctccaaatactgaggcaaaaaagaaaagattagaagactgggcagtctggtcaca

SEQ ID NO: 78606 - DNA, 76 bp, Homo sapiens
tgcccattcctccaaatactgaggcaaaaaagaaaagattagaagactgggcagtctggtcacagcttggcttata

SEQ ID NO: 78607 - DNA, 75 bp, Homo sapiens
ttcctccaaatactgaggcaaaaaagaaaagattagaagactgggcagtctggtcacagcttggcttataaatga

SEQ ID NO: 78608 - DNA, 77 bp, Homo sapiens
aggcaaaaaagaaaagattagaagactgggcagtctggtcacagcttggcttataaatgaccagatagcttggatca

SEQ ID NO: 78609 - DNA, 77 bp, Homo sapiens
gaaaagattagaagactgggcagtctggtcacagcttggcttataaatgaccagatagcttggatcaagtcccttta

SEQ ID NO: 78610 - DNA, 79 bp, Homo sapiens
attagaagactgggcagtctggtcacagcttggcttataaatgaccagatagcttggatcaagtccctttaccatgcag

SEQ ID NO: 78611 - DNA, 79 bp, Homo sapiens
cagtctggtcacagcttggcttataaatgaccagatagcttggatcaagtccctttaccatgcagggacttcatttcta

SEQ ID NO: 78612 - DNA, 78 bp, Homo sapiens
acagcttggcttataaatgaccagatagcttggatcaagtccctttaccatgcagggacttcatttctatatatgtaa

SEQ ID NO: 78613 - DNA, 75 bp, Homo sapiens
cttataaatgaccagatagcttggatcaagtccctttaccatgcagggacttcatttctatatatgtaaaacaaa

SEQ ID NO: 78614 - DNA, 74 bp, Homo sapiens
aatgaccagatagcttggatcaagtccctttaccatgcagggacttcatttctatatatgtaaaacaaacaggt

SEQ ID NO: 78615 - DNA, 71 bp, Homo sapiens
cttggatcaagtccctttaccatgcagggacttcatttctatatatgtaaaacaaacaggttctatttctt

SEQ ID NO: 78616 - DNA, 68 bp, Homo sapiens
caagtccctttaccatgcagggacttcatttctatatatgtaaaacaaacaggttctatttctttttt

SEQ ID NO: 78617 - DNA, 69 bp, Homo sapiens
accgcgcccagcctgattctatttcttaaaccaggtattgtcaaactttttctgttaagggtcagagag

SEQ ID NO: 78618 - DNA, 69 bp, Homo sapiens
cccagcctgattctatttcttaaaccaggtattgtcaaactttttctgttaagggtcagagagtaaata

SEQ ID NO: 78619 - DNA, 67 bp, Homo sapiens
ttctatttcttaaaccaggtattgtcaaactttttctgttaagggtcagagagtaaatattttcact

SEQ ID NO: 78620 - DNA, 69 bp, Homo sapiens
taaaccaggtattgtcaaactttttctgttaagggtcagagagtaaatattttcactttgtgagccacg

SEQ ID NO: 78621 - DNA, 75 bp, Homo sapiens
tattgtcaaactttttctgttaagggtcagagagtaaatattttcactttgtgagccacgtggtctctgctgcaa

SEQ ID NO: 78622 - DNA, 75 bp, Homo sapiens
tttttctgttaagggtcagagagtaaatattttcactttgtgagccacgtggtctctgctgcaactacagatacc

SEQ ID NO: 78623 - DNA, 78 bp, Homo sapiens
taagggtcagagagtaaatattttcactttgtgagccacgtggtctctgctgcaactacagataccctcaacttatga

SEQ ID NO: 78624 - DNA, 79 bp, Homo sapiens
aaatattttcactttgtgagccacgtggtctctgctgcaactacagataccctcaacttatgacagggctatatactga

SEQ ID NO: 78625 - DNA, 79 bp, Homo sapiens
ttttcactttgtgagccacgtggtctctgctgcaactacagataccctcaacttatgacagggctatatactgagaaac

SEQ ID NO: 78626 - DNA, 77 bp, Homo sapiens
agccacgtggtctctgctgcaactacagataccctcaacttatgacagggctatatactgagaaacccattgtaact

SEQ ID NO: 78627 - DNA, 80 bp, Homo sapiens
tctgctgcaactacagataccctcaacttatgacagggctatatactgagaaacccattgtaacttgcaaatattgtatg

SEQ ID NO: 78628 - DNA, 76 bp, Homo sapiens
aactacagataccctcaacttatgacagggctatatactgagaaacccattgtaacttgcaaatattgtatgtcaa

SEQ ID NO: 78629 - DNA, 77 bp, Homo sapiens
ataccctcaacttatgacagggctatatactgagaaacccattgtaacttgcaaatattgtatgtcaaaaatgcatg

SEQ ID NO: 78630 - DNA, 78 bp, Homo sapiens
cttatgacagggctatatactgagaaacccattgtaacttgcaaatattgtatgtcaaaaatgcatgtattacaccta

SEQ ID NO: 78631 - DNA, 75 bp, Homo sapiens
gggctatatactgagaaacccattgtaacttgcaaatattgtatgtcaaaaatgcatgtattacacctaaactac

SEQ ID NO: 78632 - DNA, 77 bp, Homo sapiens
tgagaaacccattgtaacttgcaaatattgtatgtcaaaaatgcatgtattacacctaaactactgaatactatagc

SEQ ID NO: 78633 - DNA, 77 bp, Homo sapiens
taacttgcaaatattgtatgtcaaaaatgcatgtattacacctaaactactgaatactatagcttcgcctcacctac

SEQ ID NO: 78634 - DNA, 75 bp, Homo sapiens
aatattgtatgtcaaaaatgcatgtattacacctaaactactgaatactatagcttcgcctcacctaccttagac

SEQ ID NO: 78635 - DNA, 76 bp, Homo sapiens
tcaaaaatgcatgtattacacctaaactactgaatactatagcttcgcctcacctaccttagacgtgcccagaaca

SEQ ID NO: 78636 - DNA, 75 bp, Homo sapiens
aatgcatgtattacacctaaactactgaatactatagcttcgcctcacctaccttagacgtgcccagaacacttc

SEQ ID NO: 78637 - DNA, 71 bp, Homo sapiens
acctaaactactgaatactatagcttcgcctcacctaccttagacgtgcccagaacacttccgttagccta

SEQ ID NO: 78638 - DNA, 72 bp, Homo sapiens
actactgaatactatagcttcgcctcacctaccttagacgtgcccagaacacttccgttagcctacagttgg

SEQ ID NO: 78639 - DNA, 76 bp, Homo sapiens
gggcaaaatcatctatcataaagcctattttgtagtgaagtgttatacatctcttgtaatttattgaatactgaac

SEQ ID NO: 78640 - DNA, 75 bp, Homo sapiens
tctatcataaagcctattttgtagtgaagtgttatacatctcttgtaatttattgaatactgaactaaagtacag

SEQ ID NO: 78641 - DNA, 74 bp, Homo sapiens
gcctattttgtagtgaagtgttatacatctcttgtaatttattgaatactgaactaaagtacagtttctagtga

SEQ ID NO: 78642 - DNA, 77 bp, Homo sapiens
tgtagtgaagtgttatacatctcttgtaatttattgaatactgaactaaagtacagtttctagtgaatgagtatcac

SEQ ID NO: 78643 - DNA, 74 bp, Homo sapiens
tacatctcttgtaatttattgaatactgaactaaagtacagtttctagtgaatgagtatcacttttacaccaag

SEQ ID NO: 78644 - DNA, 73 bp, Homo sapiens
gtaatttattgaatactgaactaaagtacagtttctagtgaatgagtatcacttttacaccaagtcagatcgt

SEQ ID NO: 78645 - DNA, 74 bp, Homo sapiens
tgaatactgaactaaagtacagtttctagtgaatgagtatcacttttacaccaagtcagatcgttaagtccaac

SEQ ID NO: 78646 - DNA, 71 bp, Homo sapiens
gaactaaagtacagtttctagtgaatgagtatcacttttacaccaagtcagatcgttaagtccaaccattt

SEQ ID NO: 78647 - DNA, 72 bp, Homo sapiens
gtacagtttctagtgaatgagtatcacttttacaccaagtcagatcgttaagtccaaccattttaagttgga

SEQ ID NO: 78648 - DNA, 74 bp, Homo sapiens
tagtgaatgagtatcacttttacaccaagtcagatcgttaagtccaaccattttaagttggagacagcttgtac

SEQ ID NO: 78649 - DNA, 73 bp, Homo sapiens
acttttacaccaagtcagatcgttaagtccaaccattttaagttggagacagcttgtactcagctctacaatc

SEQ ID NO: 78650 - DNA, 75 bp, Homo sapiens
atcgttaagtccaaccattttaagttggagacagcttgtactcagctctacaatctccgtgcaaaaccagccata

SEQ ID NO: 78651 - DNA, 77 bp, Homo sapiens
agtccaaccattttaagttggagacagcttgtactcagctctacaatctccgtgcaaaaccagccatagacaatatg

SEQ ID NO: 78652 - DNA, 79 bp, Homo sapiens
agacagcttgtactcagctctacaatctccgtgcaaaaccagccatagacaatatgtaaacaaaagggcatggctgtgt

SEQ ID NO: 78653 - DNA, 75 bp, Homo sapiens
tgtgttccaataaagaaagcttcatttacaaaaacagctgtgagttgaatttggcccataggccacagtttgcca

SEQ ID NO: 78654 - DNA, 71 bp, Homo sapiens
aataaagaaagcttcatttacaaaaacagctgtgagttgaatttggcccataggccacagtttgccaaccc

SEQ ID NO: 78655 - DNA, 72 bp, Homo sapiens
aaagcttcatttacaaaaacagctgtgagttgaatttggcccataggccacagtttgccaacccctgagtta

SEQ ID NO: 78656 - DNA, 73 bp, Homo sapiens
ttacaaaaacagctgtgagttgaatttggcccataggccacagtttgccaacccctgagttagaggatttaga

SEQ ID NO: 78657 - DNA, 72 bp, Homo sapiens
tgtgagttgaatttggcccataggccacagtttgccaacccctgagttagaggatttagaagtttcctccta

SEQ ID NO: 78658 - DNA, 71 bp, Homo sapiens
atttggcccataggccacagtttgccaacccctgagttagaggatttagaagtttcctcctaggatgatta

SEQ ID NO: 78659 - DNA, 72 bp, Homo sapiens
ataggccacagtttgccaacccctgagttagaggatttagaagtttcctcctaggatgattatgaagcaaaa

SEQ ID NO: 78660 - DNA, 76 bp, Homo sapiens
ttgccaacccctgagttagaggatttagaagtttcctcctaggatgattatgaagcaaaatcactagcctctgcaa

SEQ ID NO: 78661 - DNA, 76 bp, Homo sapiens
gatttagaagtttcctcctaggatgattatgaagcaaaatcactagcctctgcaacccacttttatgaaagatcaa

SEQ ID NO: 78662 - DNA, 76 bp, Homo sapiens
agtttcctcctaggatgattatgaagcaaaatcactagcctctgcaacccacttttatgaaagatcaagttatcaa

SEQ ID NO: 78663 - DNA, 78 bp, Homo sapiens
taggatgattatgaagcaaaatcactagcctctgcaacccacttttatgaaagatcaagttatcaaggtctgagggtg

SEQ ID NO: 78664 - DNA, 75 bp, Homo sapiens
attatgaagcaaaatcactagcctctgcaacccacttttatgaaagatcaagttatcaaggtctgagggtggaaa

SEQ ID NO: 78665 - DNA, 78 bp, Homo sapiens
tgcaacccacttttatgaaagatcaagttatcaaggtctgagggtggaaacagatgttcaccacagcactcagttcta

SEQ ID NO: 78666 - DNA, 76 bp, Homo sapiens
acttttatgaaagatcaagttatcaaggtctgagggtggaaacagatgttcaccacagcactcagttctaggagag

SEQ ID NO: 78667 - DNA, 78 bp, Homo sapiens
aaagatcaagttatcaaggtctgagggtggaaacagatgttcaccacagcactcagttctaggagagtctctgcctag

SEQ ID NO: 78668 - DNA, 80 bp, Homo sapiens
agggtggaaacagatgttcaccacagcactcagttctaggagagtctctgcctagggacacaggcactggactcttcata

SEQ ID NO: 78669 - DNA, 82 bp, Homo sapiens
aacagatgttcaccacagcactcagttctaggagagtctctgcctagggacacaggcactggactcttcatagttccatcaa

SEQ ID NO: 78670 - DNA, 80 bp, Homo sapiens
accacagcactcagttctaggagagtctctgcctagggacacaggcactggactcttcatagttccatcaacagccacct

SEQ ID NO: 78671 - DNA, 79 bp, Homo sapiens
taggagagtctctgcctagggacacaggcactggactcttcatagttccatcaacagccaccttctgttttgcttggta

SEQ ID NO: 78672 - DNA, 79 bp, Homo sapiens
cctagggacacaggcactggactcttcatagttccatcaacagccaccttctgttttgcttggtacctcactcatgctc

SEQ ID NO: 78673 - DNA, 82 bp, Homo sapiens
acacaggcactggactcttcatagttccatcaacagccaccttctgttttgcttggtacctcactcatgctctgctgaccac

SEQ ID NO: 78674 - DNA, 81 bp, Homo sapiens
actggactcttcatagttccatcaacagccaccttctgttttgcttggtacctcactcatgctctgctgaccactgccttg

SEQ ID NO: 78675 - DNA, 86 bp, Homo sapiens
atcaacagccaccttctgttttgcttggtacctcactcatgctctgctgaccactgccttgggcttggatgaagcatcactctgca

SEQ ID NO: 78676 - DNA, 89 bp, Homo sapiens
ttgcttggtacctcactcatgctctgctgaccactgccttgggcttggatgaagcatcactctgcatggtggaatctggctttctgaga

SEQ ID NO: 78677 - DNA, 87 bp, Homo sapiens
actcatgctctgctgaccactgccttgggcttggatgaagcatcactctgcatggtggaatctggctttctgagagcttggtaggag

SEQ ID NO: 78678 - DNA, 83 bp, Homo sapiens
actgccttgggcttggatgaagcatcactctgcatggtggaatctggctttctgagagcttggtaggagtcagatggtacaaa

SEQ ID NO: 78679 - DNA, 79 bp, Homo sapiens
atcactctgcatggtggaatctggctttctgagagcttggtaggagtcagatggtacaaaccaaatgtgtagggaaata

SEQ ID NO: 78680 - DNA, 78 bp, Homo sapiens
atggtggaatctggctttctgagagcttggtaggagtcagatggtacaaaccaaatgtgtagggaaatagctgtgcaa

SEQ ID NO: 78681 - DNA, 76 bp, Homo sapiens
ggaatctggctttctgagagcttggtaggagtcagatggtacaaaccaaatgtgtagggaaatagctgtgcaaggg

SEQ ID NO: 78682 - DNA, 74 bp, Homo sapiens
tttctgagagcttggtaggagtcagatggtacaaaccaaatgtgtagggaaatagctgtgcaaggggaggggct

SEQ ID NO: 78683 - DNA, 73 bp, Homo sapiens
atggtacaaaccaaatgtgtagggaaatagctgtgcaaggggaggggcttggccagtgtgaaataggagacaa

SEQ ID NO: 78684 - DNA, 74 bp, Homo sapiens
acaaaccaaatgtgtagggaaatagctgtgcaaggggaggggcttggccagtgtgaaataggagacaagacaga

SEQ ID NO: 78685 - DNA, 75 bp, Homo sapiens
tagggaaatagctgtgcaaggggaggggcttggccagtgtgaaataggagacaagacagaggtgagtagataaaa

SEQ ID NO: 78686 - DNA, 78 bp, Homo sapiens
aatagctgtgcaaggggaggggcttggccagtgtgaaataggagacaagacagaggtgagtagataaaacatctctgc

SEQ ID NO: 78687 - DNA, 78 bp, Homo sapiens
ggaggggcttggccagtgtgaaataggagacaagacagaggtgagtagataaaacatctctgctttcctgcagactac

SEQ ID NO: 78688 - DNA, 80 bp, Homo sapiens
ttggccagtgtgaaataggagacaagacagaggtgagtagataaaacatctctgctttcctgcagactactccaggctac

SEQ ID NO: 78689 - DNA, 77 bp, Homo sapiens
aaataggagacaagacagaggtgagtagataaaacatctctgctttcctgcagactactccaggctacggctcctcc

SEQ ID NO: 78690 - DNA, 78 bp, Homo sapiens
acaagacagaggtgagtagataaaacatctctgctttcctgcagactactccaggctacggctcctccttgcagccct

SEQ ID NO: 78691 - DNA, 79 bp, Homo sapiens
gtgagtagataaaacatctctgctttcctgcagactactccaggctacggctcctccttgcagcccttccagaagtgaa

SEQ ID NO: 78692 - DNA, 80 bp, Homo sapiens
tagataaaacatctctgctttcctgcagactactccaggctacggctcctccttgcagcccttccagaagtgaacatatc

SEQ ID NO: 78693 - DNA, 80 bp, Homo sapiens
atctctgctttcctgcagactactccaggctacggctcctccttgcagcccttccagaagtgaacatatccactaagtga

SEQ ID NO: 78694 - DNA, 76 bp, Homo sapiens
cagactactccaggctacggctcctccttgcagcccttccagaagtgaacatatccactaagtgaccggctgggac

SEQ ID NO: 78695 - DNA, 78 bp, Homo sapiens
tactccaggctacggctcctccttgcagcccttccagaagtgaacatatccactaagtgaccggctgggactctgcat

SEQ ID NO: 78696 - DNA, 78 bp, Homo sapiens
ctcctccttgcagcccttccagaagtgaacatatccactaagtgaccggctgggactctgcatttcactgtcaaacac

SEQ ID NO: 78697 - DNA, 79 bp, Homo sapiens
ccttgcagcccttccagaagtgaacatatccactaagtgaccggctgggactctgcatttcactgtcaaacaccagcca

SEQ ID NO: 78698 - DNA, 81 bp, Homo sapiens
agaagtgaacatatccactaagtgaccggctgggactctgcatttcactgtcaaacaccagccagcatcacttggcattgt

SEQ ID NO: 78699 - DNA, 80 bp, Homo sapiens
aacatatccactaagtgaccggctgggactctgcatttcactgtcaaacaccagccagcatcacttggcattgttctttg

SEQ ID NO: 78700 - DNA, 80 bp, Homo sapiens
tgggactctgcatttcactgtcaaacaccagccagcatcacttggcattgttctttggctttccttcccttgcataccta

SEQ ID NO: 78701 - DNA, 77 bp, Homo sapiens
catttcactgtcaaacaccagccagcatcacttggcattgttctttggctttccttcccttgcatacctaccctcac

SEQ ID NO: 78702 - DNA, 76 bp, Homo sapiens
tcaaacaccagccagcatcacttggcattgttctttggctttccttcccttgcatacctaccctcaccactttgta

SEQ ID NO: 78703 - DNA, 76 bp, Homo sapiens
accagccagcatcacttggcattgttctttggctttccttcccttgcatacctaccctcaccactttgtactgata

SEQ ID NO: 78704 - DNA, 71 bp, Homo sapiens
cttggcattgttctttggctttccttcccttgcatacctaccctcaccactttgtactgatacctcctaaa

SEQ ID NO: 78705 - DNA, 69 bp, Homo sapiens
attgttctttggctttccttcccttgcatacctaccctcaccactttgtactgatacctcctaaataag

SEQ ID NO: 78706 - DNA, 70 bp, Homo sapiens
tttccttcccttgcatacctaccctcaccactttgtactgatacctcctaaataaggtgttaacactcaa

SEQ ID NO: 78707 - DNA, 75 bp, Homo sapiens
tcccttgcatacctaccctcaccactttgtactgatacctcctaaataaggtgttaacactcaatccttgcatca

SEQ ID NO: 78708 - DNA, 76 bp, Homo sapiens
taccctcaccactttgtactgatacctcctaaataaggtgttaacactcaatccttgcatcaggctctgctttata

SEQ ID NO: 78709 - DNA, 74 bp, Homo sapiens
accactttgtactgatacctcctaaataaggtgttaacactcaatccttgcatcaggctctgctttatagtggg

SEQ ID NO: 78710 - DNA, 72 bp, Homo sapiens
tacctcctaaataaggtgttaacactcaatccttgcatcaggctctgctttatagtgggggagaaagggtta

SEQ ID NO: 78711 - DNA, 73 bp, Homo sapiens
taaataaggtgttaacactcaatccttgcatcaggctctgctttatagtgggggagaaagggttaagatacca

SEQ ID NO: 78712 - DNA, 75 bp, Homo sapiens
tgttaacactcaatccttgcatcaggctctgctttatagtgggggagaaagggttaagataccatctcaaggccg

SEQ ID NO: 78713 - DNA, 66 bp, Homo sapiens
aaaaaaaaagaatggcacagataaaactactggatttagagtataaaaagattaataaataagaag

SEQ ID NO: 78714 - DNA, 70 bp, Homo sapiens
agaatggcacagataaaactactggatttagagtataaaaagattaataaataagaagtaaaatcttgac

SEQ ID NO: 78715 - DNA, 70 bp, Homo sapiens
cacagataaaactactggatttagagtataaaaagattaataaataagaagtaaaatcttgactaataca

SEQ ID NO: 78716 - DNA, 68 bp, Homo sapiens
actactggatttagagtataaaaagattaataaataagaagtaaaatcttgactaatacattaaacta

SEQ ID NO: 78717 - DNA, 68 bp, Homo sapiens
gtataaaaagattaataaataagaagtaaaatcttgactaatacattaaactaaactaatcttggcca

SEQ ID NO: 78718 - DNA, 72 bp, Homo sapiens
gattaataaataagaagtaaaatcttgactaatacattaaactaaactaatcttggccatctatctatactg

SEQ ID NO: 78719 - DNA, 73 bp, Homo sapiens
aagaagtaaaatcttgactaatacattaaactaaactaatcttggccatctatctatactggcttcaaatatc

SEQ ID NO: 78720 - DNA, 75 bp, Homo sapiens
atcttgactaatacattaaactaaactaatcttggccatctatctatactggcttcaaatatccctaatgtccaa

SEQ ID NO: 78721 - DNA, 74 bp, Homo sapiens
gactaatacattaaactaaactaatcttggccatctatctatactggcttcaaatatccctaatgtccaaatgg

SEQ ID NO: 78722 - DNA, 73 bp, Homo sapiens
aactaaactaatcttggccatctatctatactggcttcaaatatccctaatgtccaaatggtaaaatgtatcc

SEQ ID NO: 78723 - DNA, 76 bp, Homo sapiens
ctaatcttggccatctatctatactggcttcaaatatccctaatgtccaaatggtaaaatgtatcctaaacatatc

SEQ ID NO: 78724 - DNA, 75 bp, Homo sapiens
ctatctatactggcttcaaatatccctaatgtccaaatggtaaaatgtatcctaaacatatctaaaaggtcagca

SEQ ID NO: 78725 - DNA, 75 bp, Homo sapiens
tggcttcaaatatccctaatgtccaaatggtaaaatgtatcctaaacatatctaaaaggtcagcatctctccaaa

SEQ ID NO: 78726 - DNA, 72 bp, Homo sapiens
atatccctaatgtccaaatggtaaaatgtatcctaaacatatctaaaaggtcagcatctctccaaaaagagg

SEQ ID NO: 78727 - DNA, 74 bp, Homo sapiens
taatgtccaaatggtaaaatgtatcctaaacatatctaaaaggtcagcatctctccaaaaagagggcctgaata

SEQ ID NO: 78728 - DNA, 73 bp, Homo sapiens
aaatggtaaaatgtatcctaaacatatctaaaaggtcagcatctctccaaaaagagggcctgaatacctatga

SEQ ID NO: 78729 - DNA, 74 bp, Homo sapiens
gtaaaatgtatcctaaacatatctaaaaggtcagcatctctccaaaaagagggcctgaatacctatgactatat

SEQ ID NO: 78730 - DNA, 74 bp, Homo sapiens
aatgtatcctaaacatatctaaaaggtcagcatctctccaaaaagagggcctgaatacctatgactatattaag

SEQ ID NO: 78731 - DNA, 76 bp, Homo sapiens
tatcctaaacatatctaaaaggtcagcatctctccaaaaagagggcctgaatacctatgactatattaagtgaaga

SEQ ID NO: 78732 - DNA, 78 bp, Homo sapiens
aaacatatctaaaaggtcagcatctctccaaaaagagggcctgaatacctatgactatattaagtgaagaagcatgca

SEQ ID NO: 78733 - DNA, 80 bp, Homo sapiens
atatctaaaaggtcagcatctctccaaaaagagggcctgaatacctatgactatattaagtgaagaagcatgcatgcctg

SEQ ID NO: 78734 - DNA, 79 bp, Homo sapiens
taaaaggtcagcatctctccaaaaagagggcctgaatacctatgactatattaagtgaagaagcatgcatgcctggcct

SEQ ID NO: 78735 - DNA, 82 bp, Homo sapiens
tcagcatctctccaaaaagagggcctgaatacctatgactatattaagtgaagaagcatgcatgcctggccttccagttata

SEQ ID NO: 78736 - DNA, 78 bp, Homo sapiens
tctctccaaaaagagggcctgaatacctatgactatattaagtgaagaagcatgcatgcctggccttccagttatatt

SEQ ID NO: 78737 - DNA, 75 bp, Homo sapiens
aaaaagagggcctgaatacctatgactatattaagtgaagaagcatgcatgcctggccttccagttatattttta

SEQ ID NO: 78738 - DNA, 74 bp, Homo sapiens
accacacccagccgacctttcaatcataaatggagcaaaaaatgttgtgctatatctcttgaaatataattatt

SEQ ID NO: 78739 - DNA, 74 bp, Homo sapiens
acccagccgacctttcaatcataaatggagcaaaaaatgttgtgctatatctcttgaaatataattatttgttg

SEQ ID NO: 78740 - DNA, 76 bp, Homo sapiens
tcaatcataaatggagcaaaaaatgttgtgctatatctcttgaaatataattatttgttgtataaataagaggtcc

SEQ ID NO: 78741 - DNA, 74 bp, Homo sapiens
atggagcaaaaaatgttgtgctatatctcttgaaatataattatttgttgtataaataagaggtccctgtcgtg

SEQ ID NO: 78742 - DNA, 74 bp, Homo sapiens
tggagcaaaaaatgttgtgctatatctcttgaaatataattatttgttgtataaataagaggtccctgtcgtgg

SEQ ID NO: 78743 - DNA, 74 bp, Homo sapiens
aaatgttgtgctatatctcttgaaatataattatttgttgtataaataagaggtccctgtcgtggtctgaatgt

SEQ ID NO: 78744 - DNA, 72 bp, Homo sapiens
tgtttgtgtcccctccaaattcacgtgttgaaacctaattccccatgtgccagtatgaagcggcggcacttt

SEQ ID NO: 78745 - DNA, 72 bp, Homo sapiens
ccctccaaattcacgtgttgaaacctaattccccatgtgccagtatgaagcggcggcacttttaggaggtga

SEQ ID NO: 78746 - DNA, 71 bp, Homo sapiens
aaattcacgtgttgaaacctaattccccatgtgccagtatgaagcggcggcacttttaggaggtgactaag

SEQ ID NO: 78747 - DNA, 77 bp, Homo sapiens
aaacctaattccccatgtgccagtatgaagcggcggcacttttaggaggtgactaagtcatgcaggctccaccatca

SEQ ID NO: 78748 - DNA, 78 bp, Homo sapiens
attccccatgtgccagtatgaagcggcggcacttttaggaggtgactaagtcatgcaggctccaccatcatggggtta

SEQ ID NO: 78749 - DNA, 77 bp, Homo sapiens
cagtatgaagcggcggcacttttaggaggtgactaagtcatgcaggctccaccatcatggggttagtgccattaaaa

SEQ ID NO: 78750 - DNA, 75 bp, Homo sapiens
aagcggcggcacttttaggaggtgactaagtcatgcaggctccaccatcatggggttagtgccattaaaagagaa

SEQ ID NO: 78751 - DNA, 74 bp, Homo sapiens
acttttaggaggtgactaagtcatgcaggctccaccatcatggggttagtgccattaaaagagaaacccaggca

SEQ ID NO: 78752 - DNA, 75 bp, Homo sapiens
tttaggaggtgactaagtcatgcaggctccaccatcatggggttagtgccattaaaagagaaacccaggcagggc

SEQ ID NO: 78753 - DNA, 75 bp, Homo sapiens
aggtgactaagtcatgcaggctccaccatcatggggttagtgccattaaaagagaaacccaggcagggcgcggtg

SEQ ID NO: 78754 - DNA, 70 bp, Homo sapiens
aaattaaaaaaagagaaacccagaggatcttgtttgtcctttccaccacgtcagaatgcagctgttctta

SEQ ID NO: 78755 - DNA, 73 bp, Homo sapiens
aaaagagaaacccagaggatcttgtttgtcctttccaccacgtcagaatgcagctgttcttatgaaccagaaa

SEQ ID NO: 78756 - DNA, 75 bp, Homo sapiens
aaacccagaggatcttgtttgtcctttccaccacgtcagaatgcagctgttcttatgaaccagaaagcaggccca

SEQ ID NO: 78757 - DNA, 75 bp, Homo sapiens
ttgtttgtcctttccaccacgtcagaatgcagctgttcttatgaaccagaaagcaggcccacacccgacaccaaa

SEQ ID NO: 78758 - DNA, 79 bp, Homo sapiens
gtcctttccaccacgtcagaatgcagctgttcttatgaaccagaaagcaggcccacacccgacaccaaatctgccagca

SEQ ID NO: 78759 - DNA, 75 bp, Homo sapiens
agcaccttgatcctggacttcccatcctcctgaactgtgataaataaatttccattgtttataagtcatccagtc

SEQ ID NO: 78760 - DNA, 74 bp, Homo sapiens
tcctggacttcccatcctcctgaactgtgataaataaatttccattgtttataagtcatccagtctatggcttt

SEQ ID NO: 78761 - DNA, 72 bp, Homo sapiens
acttcccatcctcctgaactgtgataaataaatttccattgtttataagtcatccagtctatggctttttgt

SEQ ID NO: 78762 - DNA, 79 bp, Homo sapiens
tgaactgtgataaataaatttccattgtttataagtcatccagtctatggctttttgttagtgcagcctgcacagacta

SEQ ID NO: 78763 - DNA, 76 bp, Homo sapiens
ataaataaatttccattgtttataagtcatccagtctatggctttttgttagtgcagcctgcacagactaagacag

SEQ ID NO: 78764 - DNA, 79 bp, Homo sapiens
tttataagtcatccagtctatggctttttgttagtgcagcctgcacagactaagacagtctccttaacactagctgagg

SEQ ID NO: 78765 - DNA, 79 bp, Homo sapiens
atccagtctatggctttttgttagtgcagcctgcacagactaagacagtctccttaacactagctgaggtccctggatg

SEQ ID NO: 78766 - DNA, 77 bp, Homo sapiens
tatggctttttgttagtgcagcctgcacagactaagacagtctccttaacactagctgaggtccctggatggggtag

SEQ ID NO: 78767 - DNA, 80 bp, Homo sapiens
tgttagtgcagcctgcacagactaagacagtctccttaacactagctgaggtccctggatggggtaggctattgataata

SEQ ID NO: 78768 - DNA, 78 bp, Homo sapiens
cacagactaagacagtctccttaacactagctgaggtccctggatggggtaggctattgataatagctcactatccca

SEQ ID NO: 78769 - DNA, 75 bp, Homo sapiens
actaagacagtctccttaacactagctgaggtccctggatggggtaggctattgataatagctcactatcccaaa

SEQ ID NO: 78770 - DNA, 75 bp, Homo sapiens
ttaacactagctgaggtccctggatggggtaggctattgataatagctcactatcccaaaccgttagcaacacag

SEQ ID NO: 78771 - DNA, 73 bp, Homo sapiens
ctgaggtccctggatggggtaggctattgataatagctcactatcccaaaccgttagcaacacaggcaacttt

SEQ ID NO: 78772 - DNA, 73 bp, Homo sapiens
ctggatggggtaggctattgataatagctcactatcccaaaccgttagcaacacaggcaacttttggtgggaa

SEQ ID NO: 78773 - DNA, 74 bp, Homo sapiens
attgataatagctcactatcccaaaccgttagcaacacaggcaacttttggtgggaatggagagcttccctgga

SEQ ID NO: 78774 - DNA, 73 bp, Homo sapiens
actatcccaaaccgttagcaacacaggcaacttttggtgggaatggagagcttccctggacagcacaagacaa

SEQ ID NO: 78775 - DNA, 73 bp, Homo sapiens
aaaccgttagcaacacaggcaacttttggtgggaatggagagcttccctggacagcacaagacaagcaatttc

SEQ ID NO: 78776 - DNA, 77 bp, Homo sapiens
ctgataccaaaaccctgggagttcctggggctgaactgaaggccactctgcatgatgaaatttccagagagccacaa

SEQ ID NO: 78777 - DNA, 75 bp, Homo sapiens
aaaaccctgggagttcctggggctgaactgaaggccactctgcatgatgaaatttccagagagccacaagaaaga

SEQ ID NO: 78778 - DNA, 77 bp, Homo sapiens
gttcctggggctgaactgaaggccactctgcatgatgaaatttccagagagccacaagaaagatggggacttcccaa

SEQ ID NO: 78779 - DNA, 77 bp, Homo sapiens
ctgaactgaaggccactctgcatgatgaaatttccagagagccacaagaaagatggggacttcccaaagtccacgga

SEQ ID NO: 78780 - DNA, 80 bp, Homo sapiens
aaggccactctgcatgatgaaatttccagagagccacaagaaagatggggacttcccaaagtccacggagcatgctctga

SEQ ID NO: 78781 - DNA, 81 bp, Homo sapiens
catgatgaaatttccagagagccacaagaaagatggggacttcccaaagtccacggagcatgctctgatggcattggcaag

SEQ ID NO: 78782 - DNA, 78 bp, Homo sapiens
atttccagagagccacaagaaagatggggacttcccaaagtccacggagcatgctctgatggcattggcaagtttata

SEQ ID NO: 78783 - DNA, 79 bp, Homo sapiens
agagccacaagaaagatggggacttcccaaagtccacggagcatgctctgatggcattggcaagtttatatgaaagcaa

SEQ ID NO: 78784 - DNA, 78 bp, Homo sapiens
agaaagatggggacttcccaaagtccacggagcatgctctgatggcattggcaagtttatatgaaagcaacggcatta

SEQ ID NO: 78785 - DNA, 81 bp, Homo sapiens
ttcccaaagtccacggagcatgctctgatggcattggcaagtttatatgaaagcaacggcattactgcattaaccactgaa

SEQ ID NO: 78786 - DNA, 79 bp, Homo sapiens
aaagtccacggagcatgctctgatggcattggcaagtttatatgaaagcaacggcattactgcattaaccactgaaact

SEQ ID NO: 78787 - DNA, 81 bp, Homo sapiens
atgctctgatggcattggcaagtttatatgaaagcaacggcattactgcattaaccactgaaacttcctgttagccatctg

SEQ ID NO: 78788 - DNA, 78 bp, Homo sapiens
atggcattggcaagtttatatgaaagcaacggcattactgcattaaccactgaaacttcctgttagccatctggccca

SEQ ID NO: 78789 - DNA, 73 bp, Homo sapiens
gtttatatgaaagcaacggcattactgcattaaccactgaaacttcctgttagccatctggcccaacgccgtt

SEQ ID NO: 78790 - DNA, 72 bp, Homo sapiens
aagcaacggcattactgcattaaccactgaaacttcctgttagccatctggcccaacgccgtttactaaata

SEQ ID NO: 78791 - DNA, 72 bp, Homo sapiens
attactgcattaaccactgaaacttcctgttagccatctggcccaacgccgtttactaaataatccatgctt

SEQ ID NO: 78792 - DNA, 70 bp, Homo sapiens
attaaccactgaaacttcctgttagccatctggcccaacgccgtttactaaataatccatgctttcccca

SEQ ID NO: 78793 - DNA, 69 bp, Homo sapiens
aaacttcctgttagccatctggcccaacgccgtttactaaataatccatgctttccccagtgatttaaa

SEQ ID NO: 78794 - DNA, 71 bp, Homo sapiens
ttagccatctggcccaacgccgtttactaaataatccatgctttccccagtgatttaaaacaacactctta

SEQ ID NO: 78795 - DNA, 71 bp, Homo sapiens
atctggcccaacgccgtttactaaataatccatgctttccccagtgatttaaaacaacactcttatcataa

SEQ ID NO: 78796 - DNA, 74 bp, Homo sapiens
aataatccatgctttccccagtgatttaaaacaacactcttatcataaacctgatctatatttcagtctgtccc

SEQ ID NO: 78797 - DNA, 73 bp, Homo sapiens
gatttaaaacaacactcttatcataaacctgatctatatttcagtctgtccctgactacccctccctatctat

SEQ ID NO: 78798 - DNA, 77 bp, Homo sapiens
tcttatcataaacctgatctatatttcagtctgtccctgactacccctccctatctattctcccttgcctttgatga

SEQ ID NO: 78799 - DNA, 74 bp, Homo sapiens
aacctgatctatatttcagtctgtccctgactacccctccctatctattctcccttgcctttgatgacattacc

SEQ ID NO: 78800 - DNA, 74 bp, Homo sapiens
tatttcagtctgtccctgactacccctccctatctattctcccttgcctttgatgacattaccttctcctggat

SEQ ID NO: 78801 - DNA, 75 bp, Homo sapiens
cctgactacccctccctatctattctcccttgcctttgatgacattaccttctcctggattccttgtatctctga

SEQ ID NO: 78802 - DNA, 76 bp, Homo sapiens
cctccctatctattctcccttgcctttgatgacattaccttctcctggattccttgtatctctgacaattccttca

SEQ ID NO: 78803 - DNA, 77 bp, Homo sapiens
tatctattctcccttgcctttgatgacattaccttctcctggattccttgtatctctgacaattccttcaaggtctc

SEQ ID NO: 78804 - DNA, 79 bp, Homo sapiens
tgcctttgatgacattaccttctcctggattccttgtatctctgacaattccttcaaggtctccttggctgctgcctta

SEQ ID NO: 78805 - DNA, 77 bp, Homo sapiens
atgacattaccttctcctggattccttgtatctctgacaattccttcaaggtctccttggctgctgccttacacctg

SEQ ID NO: 78806 - DNA, 79 bp, Homo sapiens
taccttctcctggattccttgtatctctgacaattccttcaaggtctccttggctgctgccttacacctgtgctgcaag

SEQ ID NO: 78807 - DNA, 80 bp, Homo sapiens
tatctctgacaattccttcaaggtctccttggctgctgccttacacctgtgctgcaaggccccgggtgatcttctacatc

SEQ ID NO: 78808 - DNA, 79 bp, Homo sapiens
aaggtctccttggctgctgccttacacctgtgctgcaaggccccgggtgatcttctacatcctcatcacttcacctctc

SEQ ID NO: 78809 - DNA, 84 bp, Homo sapiens
tgctgccttacacctgtgctgcaaggccccgggtgatcttctacatcctcatcacttcacctctctgctgatgaaacacaaatc

SEQ ID NO: 78810 - DNA, 81 bp, Homo sapiens
cttacacctgtgctgcaaggccccgggtgatcttctacatcctcatcacttcacctctctgctgatgaaacacaaatcctg

SEQ ID NO: 78811 - DNA, 81 bp, Homo sapiens
ggtgatcttctacatcctcatcacttcacctctctgctgatgaaacacaaatcctgggccaccctctgtggctgggcaggt

SEQ ID NO: 78812 - DNA, 82 bp, Homo sapiens
tcttctacatcctcatcacttcacctctctgctgatgaaacacaaatcctgggccaccctctgtggctgggcaggttggtca

SEQ ID NO: 78813 - DNA, 81 bp, Homo sapiens
atcacttcacctctctgctgatgaaacacaaatcctgggccaccctctgtggctgggcaggttggtcactgcgcaacagtg

SEQ ID NO: 78814 - DNA, 83 bp, Homo sapiens
tctctgctgatgaaacacaaatcctgggccaccctctgtggctgggcaggttggtcactgcgcaacagtggccaggccatgta

SEQ ID NO: 78815 - DNA, 78 bp, Homo sapiens
atgaaacacaaatcctgggccaccctctgtggctgggcaggttggtcactgcgcaacagtggccaggccatgtaccca

SEQ ID NO: 78816 - DNA, 80 bp, Homo sapiens
acaaatcctgggccaccctctgtggctgggcaggttggtcactgcgcaacagtggccaggccatgtacccacatggctca

SEQ ID NO: 78817 - DNA, 82 bp, Homo sapiens
gctgggcaggttggtcactgcgcaacagtggccaggccatgtacccacatggctcaccaagttcccatctctagctcagaag

SEQ ID NO: 78818 - DNA, 81 bp, Homo sapiens
gttggtcactgcgcaacagtggccaggccatgtacccacatggctcaccaagttcccatctctagctcagaagtcctctaa

SEQ ID NO: 78819 - DNA, 80 bp, Homo sapiens
gccaggccatgtacccacatggctcaccaagttcccatctctagctcagaagtcctctaagtcacaccgtagccatccaa

SEQ ID NO: 78820 - DNA, 80 bp, Homo sapiens
ccatgtacccacatggctcaccaagttcccatctctagctcagaagtcctctaagtcacaccgtagccatccaaatgcca

SEQ ID NO: 78821 - DNA, 78 bp, Homo sapiens
accaagttcccatctctagctcagaagtcctctaagtcacaccgtagccatccaaatgccagccatctctcccagaac

SEQ ID NO: 78822 - DNA, 76 bp, Homo sapiens
agaagtcctctaagtcacaccgtagccatccaaatgccagccatctctcccagaacgcaccccagggaaccacaca

SEQ ID NO: 78823 - DNA, 81 bp, Homo sapiens
taagtcacaccgtagccatccaaatgccagccatctctcccagaacgcaccccagggaaccacacactcagcatggactca

SEQ ID NO: 78824 - DNA, 78 bp, Homo sapiens
gtagccatccaaatgccagccatctctcccagaacgcaccccagggaaccacacactcagcatggactcatttttctt

SEQ ID NO: 78825 - DNA, 71 bp, Homo sapiens
aacgcaccccagggaaccacacactcagcatggactcatttttctttcttcctaacctgttcctcccttga

SEQ ID NO: 78826 - DNA, 71 bp, Homo sapiens
agggaaccacacactcagcatggactcatttttctttcttcctaacctgttcctcccttgaataccctata

SEQ ID NO: 78827 - DNA, 74 bp, Homo sapiens
acacactcagcatggactcatttttctttcttcctaacctgttcctcccttgaataccctatactcactgtatg

SEQ ID NO: 78828 - DNA, 73 bp, Homo sapiens
tttctttcttcctaacctgttcctcccttgaataccctatactcactgtatggtcccatcacacaaggcagaa

SEQ ID NO: 78829 - DNA, 72 bp, Homo sapiens
ttcttcctaacctgttcctcccttgaataccctatactcactgtatggtcccatcacacaaggcagaaaacc

SEQ ID NO: 78830 - DNA, 73 bp, Homo sapiens
tgttcctcccttgaataccctatactcactgtatggtcccatcacacaaggcagaaaacccggaggaatccag

SEQ ID NO: 78831 - DNA, 75 bp, Homo sapiens
ttgaataccctatactcactgtatggtcccatcacacaaggcagaaaacccggaggaatccaggcacttccaatc

SEQ ID NO: 78832 - DNA, 74 bp, Homo sapiens
cctatactcactgtatggtcccatcacacaaggcagaaaacccggaggaatccaggcacttccaatccctgacc

SEQ ID NO: 78833 - DNA, 78 bp, Homo sapiens
tgtatggtcccatcacacaaggcagaaaacccggaggaatccaggcacttccaatccctgacctgccacagccacatc

SEQ ID NO: 78834 - DNA, 77 bp, Homo sapiens
acacaaggcagaaaacccggaggaatccaggcacttccaatccctgacctgccacagccacatcctgtctgacagat

SEQ ID NO: 78835 - DNA, 83 bp, Homo sapiens
gcacttccaatccctgacctgccacagccacatcctgtctgacagattctacctcctcctctccagccactgctgtagaattg

SEQ ID NO: 78836 - DNA, 80 bp, Homo sapiens
aatccctgacctgccacagccacatcctgtctgacagattctacctcctcctctccagccactgctgtagaattggtgtt

SEQ ID NO: 78837 - DNA, 82 bp, Homo sapiens
tgccacagccacatcctgtctgacagattctacctcctcctctccagccactgctgtagaattggtgtttgacctcattatt

SEQ ID NO: 78838 - DNA, 79 bp, Homo sapiens
acatcctgtctgacagattctacctcctcctctccagccactgctgtagaattggtgtttgacctcattatttctcctc

SEQ ID NO: 78839 - DNA, 77 bp, Homo sapiens
attctacctcctcctctccagccactgctgtagaattggtgtttgacctcattatttctcctctcatttagtctgtc

SEQ ID NO: 78840 - DNA, 72 bp, Homo sapiens
tagaattggtgtttgacctcattatttctcctctcatttagtctgtcggcctccacgcttaccggccttaaa

SEQ ID NO: 78841 - DNA, 72 bp, Homo sapiens
gtttgacctcattatttctcctctcatttagtctgtcggcctccacgcttaccggccttaaagccttcgctc

SEQ ID NO: 78842 - DNA, 77 bp, Homo sapiens
ttctcctctcatttagtctgtcggcctccacgcttaccggccttaaagccttcgctctgccgcacaagcagccttgc

SEQ ID NO: 78843 - DNA, 75 bp, Homo sapiens
atttagtctgtcggcctccacgcttaccggccttaaagccttcgctctgccgcacaagcagccttgccacaatat

SEQ ID NO: 78844 - DNA, 82 bp, Homo sapiens
tctgtcggcctccacgcttaccggccttaaagccttcgctctgccgcacaagcagccttgccacaatattctgatcatgtca

SEQ ID NO: 78845 - DNA, 80 bp, Homo sapiens
ctccacgcttaccggccttaaagccttcgctctgccgcacaagcagccttgccacaatattctgatcatgtcacgccacc

SEQ ID NO: 78846 - DNA, 79 bp, Homo sapiens
ccttaaagccttcgctctgccgcacaagcagccttgccacaatattctgatcatgtcacgccaccgcctggaaatttcc

SEQ ID NO: 78847 - DNA, 81 bp, Homo sapiens
aagccttcgctctgccgcacaagcagccttgccacaatattctgatcatgtcacgccaccgcctggaaatttcccatggat

SEQ ID NO: 78848 - DNA, 81 bp, Homo sapiens
ccgcacaagcagccttgccacaatattctgatcatgtcacgccaccgcctggaaatttcccatggattcccgctgcctaca

SEQ ID NO: 78849 - DNA, 78 bp, Homo sapiens
agccttgccacaatattctgatcatgtcacgccaccgcctggaaatttcccatggattcccgctgcctacaggataaa

SEQ ID NO: 78850 - DNA, 75 bp, Homo sapiens
atcatgtcacgccaccgcctggaaatttcccatggattcccgctgcctacaggataaagacctgactcctcaaaa

SEQ ID NO: 78851 - DNA, 72 bp, Homo sapiens
acgccaccgcctggaaatttcccatggattcccgctgcctacaggataaagacctgactcctcaaaatgccc

SEQ ID NO: 78852 - DNA, 71 bp, Homo sapiens
cctggaaatttcccatggattcccgctgcctacaggataaagacctgactcctcaaaatgccccaaggccc

SEQ ID NO: 78853 - DNA, 75 bp, Homo sapiens
ttcccatggattcccgctgcctacaggataaagacctgactcctcaaaatgccccaaggcccctgactctctctc

SEQ ID NO: 78854 - DNA, 74 bp, Homo sapiens
ttcccgctgcctacaggataaagacctgactcctcaaaatgccccaaggcccctgactctctctctcacctctt

SEQ ID NO: 78855 - DNA, 73 bp, Homo sapiens
tacaggataaagacctgactcctcaaaatgccccaaggcccctgactctctctctcacctctttcttccttaa

SEQ ID NO: 78856 - DNA, 72 bp, Homo sapiens
acctgactcctcaaaatgccccaaggcccctgactctctctctcacctctttcttccttaaccaatgccaaa

SEQ ID NO: 78857 - DNA, 72 bp, Homo sapiens
aaaatgccccaaggcccctgactctctctctcacctctttcttccttaaccaatgccaaacacatccgctgt

SEQ ID NO: 78858 - DNA, 72 bp, Homo sapiens
aaggcccctgactctctctctcacctctttcttccttaaccaatgccaaacacatccgctgtttttctctcc

SEQ ID NO: 78859 - DNA, 73 bp, Homo sapiens
actctctctctcacctctttcttccttaaccaatgccaaacacatccgctgtttttctctcctgcctggtctt

SEQ ID NO: 78860 - DNA, 76 bp, Homo sapiens
tcacctctttcttccttaaccaatgccaaacacatccgctgtttttctctcctgcctggtctttactcatgctgta

SEQ ID NO: 78861 - DNA, 73 bp, Homo sapiens
tttcttccttaaccaatgccaaacacatccgctgtttttctctcctgcctggtctttactcatgctgtaacct

SEQ ID NO: 78862 - DNA, 75 bp, Homo sapiens
ttaaccaatgccaaacacatccgctgtttttctctcctgcctggtctttactcatgctgtaaccttggcttggaa

SEQ ID NO: 78863 - DNA, 76 bp, Homo sapiens
aaacacatccgctgtttttctctcctgcctggtctttactcatgctgtaaccttggcttggaatgcctgagtcaag

SEQ ID NO: 78864 - DNA, 75 bp, Homo sapiens
ccgctgtttttctctcctgcctggtctttactcatgctgtaaccttggcttggaatgcctgagtcaaggccgccc

SEQ ID NO: 78865 - DNA, 75 bp, Homo sapiens
tcctgcctggtctttactcatgctgtaaccttggcttggaatgcctgagtcaaggccgccccctccccctgcaaa

SEQ ID NO: 78866 - DNA, 73 bp, Homo sapiens
tctttactcatgctgtaaccttggcttggaatgcctgagtcaaggccgccccctccccctgcaaagacttggt

SEQ ID NO: 78867 - DNA, 71 bp, Homo sapiens
atgctgtaaccttggcttggaatgcctgagtcaaggccgccccctccccctgcaaagacttggttaatacc

SEQ ID NO: 78868 - DNA, 71 bp, Homo sapiens
accttggcttggaatgcctgagtcaaggccgccccctccccctgcaaagacttggttaatacccagatcaa

SEQ ID NO: 78869 - DNA, 72 bp, Homo sapiens
atgcctgagtcaaggccgccccctccccctgcaaagacttggttaatacccagatcaagctgactactccct

SEQ ID NO: 78870 - DNA, 70 bp, Homo sapiens
agtcaaggccgccccctccccctgcaaagacttggttaatacccagatcaagctgactactcccttcctc

SEQ ID NO: 78871 - DNA, 73 bp, Homo sapiens
ttggttaatacccagatcaagctgactactcccttcctcgagcccccagatttccacacgaatacctgtaaca

SEQ ID NO: 78872 - DNA, 72 bp, Homo sapiens
agatcaagctgactactcccttcctcgagcccccagatttccacacgaatacctgtaacacttataggttta

SEQ ID NO: 78873 - DNA, 71 bp, Homo sapiens
aagctgactactcccttcctcgagcccccagatttccacacgaatacctgtaacacttataggtttatatg

SEQ ID NO: 78874 - DNA, 73 bp, Homo sapiens
ttcctcgagcccccagatttccacacgaatacctgtaacacttataggtttatatgtgtctctggccctatta

SEQ ID NO: 78875 - DNA, 75 bp, Homo sapiens
atttccacacgaatacctgtaacacttataggtttatatgtgtctctggccctattagaactgcaggttctgaga

SEQ ID NO: 78876 - DNA, 80 bp, Homo sapiens
aatacctgtaacacttataggtttatatgtgtctctggccctattagaactgcaggttctgagatcacagacagcatcta

SEQ ID NO: 78877 - DNA, 80 bp, Homo sapiens
taacacttataggtttatatgtgtctctggccctattagaactgcaggttctgagatcacagacagcatctagtttgatt

SEQ ID NO: 78878 - DNA, 79 bp, Homo sapiens
aggtttatatgtgtctctggccctattagaactgcaggttctgagatcacagacagcatctagtttgattttggatccc

SEQ ID NO: 78879 - DNA, 82 bp, Homo sapiens
tgtctctggccctattagaactgcaggttctgagatcacagacagcatctagtttgattttggatccccagagcccggctca

SEQ ID NO: 78880 - DNA, 83 bp, Homo sapiens
ctattagaactgcaggttctgagatcacagacagcatctagtttgattttggatccccagagcccggctcagtggctagcaca

SEQ ID NO: 78881 - DNA, 82 bp, Homo sapiens
aggttctgagatcacagacagcatctagtttgattttggatccccagagcccggctcagtggctagcacagtgacaacctca

SEQ ID NO: 78882 - DNA, 81 bp, Homo sapiens
atcacagacagcatctagtttgattttggatccccagagcccggctcagtggctagcacagtgacaacctcatccataaaa

SEQ ID NO: 78883 - DNA, 78 bp, Homo sapiens
agcatctagtttgattttggatccccagagcccggctcagtggctagcacagtgacaacctcatccataaaatcctaa

SEQ ID NO: 78884 - DNA, 77 bp, Homo sapiens
tagtttgattttggatccccagagcccggctcagtggctagcacagtgacaacctcatccataaaatcctaaatgga

SEQ ID NO: 78885 - DNA, 78 bp, Homo sapiens
ttggatccccagagcccggctcagtggctagcacagtgacaacctcatccataaaatcctaaatggatgtgaaaataa

SEQ ID NO: 78886 - DNA, 80 bp, Homo sapiens
agagcccggctcagtggctagcacagtgacaacctcatccataaaatcctaaatggatgtgaaaataagcagattagcca

SEQ ID NO: 78887 - DNA, 79 bp, Homo sapiens
agtggctagcacagtgacaacctcatccataaaatcctaaatggatgtgaaaataagcagattagccagccaggtgcgg

SEQ ID NO: 78888 - DNA, 79 bp, Homo sapiens
acagtgacaacctcatccataaaatcctaaatggatgtgaaaataagcagattagccagccaggtgcggtgactcacgc

SEQ ID NO: 78889 - DNA, 70 bp, Homo sapiens
gaaaagaaaagaagcagattagccaaggcaaggtaatacaaatgtaaattagactttcaactggttatag

SEQ ID NO: 78890 - DNA, 71 bp, Homo sapiens
gaagcagattagccaaggcaaggtaatacaaatgtaaattagactttcaactggttataggtgtaaaaatg

SEQ ID NO: 78891 - DNA, 68 bp, Homo sapiens
agattagccaaggcaaggtaatacaaatgtaaattagactttcaactggttataggtgtaaaaatggg

SEQ ID NO: 78892 - DNA, 68 bp, Homo sapiens
ggcaaggtaatacaaatgtaaattagactttcaactggttataggtgtaaaaatggggacagaacacc

SEQ ID NO: 78893 - DNA, 68 bp, Homo sapiens
atacaaatgtaaattagactttcaactggttataggtgtaaaaatggggacagaacacctattatccc

SEQ ID NO: 78894 - DNA, 67 bp, Homo sapiens
aaattagactttcaactggttataggtgtaaaaatggggacagaacacctattatccccaggcaccc

SEQ ID NO: 78895 - DNA, 69 bp, Homo sapiens
ttcaactggttataggtgtaaaaatggggacagaacacctattatccccaggcaccctctggaaaagaa

SEQ ID NO: 78896 - DNA, 69 bp, Homo sapiens
gtgtaaaaatggggacagaacacctattatccccaggcaccctctggaaaagaagagattagggattaa

SEQ ID NO: 78897 - DNA, 68 bp, Homo sapiens
aaaatggggacagaacacctattatccccaggcaccctctggaaaagaagagattagggattaaggga

SEQ ID NO: 78898 - DNA, 69 bp, Homo sapiens
agaacacctattatccccaggcaccctctggaaaagaagagattagggattaagggagaaagactagaa

SEQ ID NO: 78899 - DNA, 70 bp, Homo sapiens
attatccccaggcaccctctggaaaagaagagattagggattaagggagaaagactagaagcgtctggaa

SEQ ID NO: 78900 - DNA, 69 bp, Homo sapiens
aaaagaagagattagggattaagggagaaagactagaagcgtctggaagaaaggtagacagacaaagag

SEQ ID NO: 78901 - DNA, 73 bp, Homo sapiens
ttaagggagaaagactagaagcgtctggaagaaaggtagacagacaaagaggaagagaagaatggcctgctta

SEQ ID NO: 78902 - DNA, 72 bp, Homo sapiens
aagactagaagcgtctggaagaaaggtagacagacaaagaggaagagaagaatggcctgcttagaaccggga

SEQ ID NO: 78903 - DNA, 73 bp, Homo sapiens
cgtctggaagaaaggtagacagacaaagaggaagagaagaatggcctgcttagaaccgggactgcactttctg

SEQ ID NO: 78904 - DNA, 74 bp, Homo sapiens
aaggtagacagacaaagaggaagagaagaatggcctgcttagaaccgggactgcactttctgggcactgggcta

SEQ ID NO: 78905 - DNA, 77 bp, Homo sapiens
acaaagaggaagagaagaatggcctgcttagaaccgggactgcactttctgggcactgggctagcatgtggatgaaa

SEQ ID NO: 78906 - DNA, 79 bp, Homo sapiens
aagagaagaatggcctgcttagaaccgggactgcactttctgggcactgggctagcatgtggatgaaatgccacctgga

SEQ ID NO: 78907 - DNA, 81 bp, Homo sapiens
aatggcctgcttagaaccgggactgcactttctgggcactgggctagcatgtggatgaaatgccacctggagagcgacaga

SEQ ID NO: 78908 - DNA, 81 bp, Homo sapiens
aaccgggactgcactttctgggcactgggctagcatgtggatgaaatgccacctggagagcgacagagcaaagatgcttaa

SEQ ID NO: 78909 - DNA, 83 bp, Homo sapiens
actgcactttctgggcactgggctagcatgtggatgaaatgccacctggagagcgacagagcaaagatgcttaagcaaggggc

SEQ ID NO: 78910 - DNA, 84 bp, Homo sapiens
tctgggcactgggctagcatgtggatgaaatgccacctggagagcgacagagcaaagatgcttaagcaaggggccaggcagaaa

SEQ ID NO: 78911 - DNA, 88 bp, Homo sapiens
tagcatgtggatgaaatgccacctggagagcgacagagcaaagatgcttaagcaaggggccaggcagaaaggcagatagatgcagctg

SEQ ID NO: 78912 - DNA, 86 bp, Homo sapiens
tggatgaaatgccacctggagagcgacagagcaaagatgcttaagcaaggggccaggcagaaaggcagatagatgcagctggccca

SEQ ID NO: 78913 - DNA, 84 bp, Homo sapiens
aaagatgcttaagcaaggggccaggcagaaaggcagatagatgcagctggcccagcagtgaggaggcacaagctcaggtgcctc

SEQ ID NO: 78914 - DNA, 81 bp, Homo sapiens
aaaggcagatagatgcagctggcccagcagtgaggaggcacaagctcaggtgcctccaggagtcaggaggtaagaaaaaca

SEQ ID NO: 78915 - DNA, 83 bp, Homo sapiens
tagatgcagctggcccagcagtgaggaggcacaagctcaggtgcctccaggagtcaggaggtaagaaaaacatgagtggctat

SEQ ID NO: 78916 - DNA, 82 bp, Homo sapiens
cagcagtgaggaggcacaagctcaggtgcctccaggagtcaggaggtaagaaaaacatgagtggctattctcatagatgcct

SEQ ID NO: 78917 - DNA, 82 bp, Homo sapiens
gaggcacaagctcaggtgcctccaggagtcaggaggtaagaaaaacatgagtggctattctcatagatgccttcctgcagaa

SEQ ID NO: 78918 - DNA, 79 bp, Homo sapiens
acaagctcaggtgcctccaggagtcaggaggtaagaaaaacatgagtggctattctcatagatgccttcctgcagaaag

SEQ ID NO: 78919 - DNA, 79 bp, Homo sapiens
tccaggagtcaggaggtaagaaaaacatgagtggctattctcatagatgccttcctgcagaaaggcaggcagattaaaa

SEQ ID NO: 78920 - DNA, 78 bp, Homo sapiens
agtcaggaggtaagaaaaacatgagtggctattctcatagatgccttcctgcagaaaggcaggcagattaaaatatat

SEQ ID NO: 78921 - DNA, 77 bp, Homo sapiens
gtaagaaaaacatgagtggctattctcatagatgccttcctgcagaaaggcaggcagattaaaatatatttaaaaca

SEQ ID NO: 78922 - DNA, 77 bp, Homo sapiens
agtggctattctcatagatgccttcctgcagaaaggcaggcagattaaaatatatttaaaacatccctacagccaaa

SEQ ID NO: 78923 - DNA, 76 bp, Homo sapiens
tattctcatagatgccttcctgcagaaaggcaggcagattaaaatatatttaaaacatccctacagccaaacaaaa

SEQ ID NO: 78924 - DNA, 72 bp, Homo sapiens
cttcctgcagaaaggcaggcagattaaaatatatttaaaacatccctacagccaaacaaaacaagtctaaga

SEQ ID NO: 78925 - DNA, 71 bp, Homo sapiens
gcagaaaggcaggcagattaaaatatatttaaaacatccctacagccaaacaaaacaagtctaagaaacga

SEQ ID NO: 78926 - DNA, 70 bp, Homo sapiens
ggcagattaaaatatatttaaaacatccctacagccaaacaaaacaagtctaagaaacgattccagagga

SEQ ID NO: 78927 - DNA, 73 bp, Homo sapiens
taaaacatccctacagccaaacaaaacaagtctaagaaacgattccagaggagaatcagaaagatagctgctt

SEQ ID NO: 78928 - DNA, 73 bp, Homo sapiens
aaaacaagtctaagaaacgattccagaggagaatcagaaagatagctgctttccttctcccttagactgccga

SEQ ID NO: 78929 - DNA, 78 bp, Homo sapiens
attccagaggagaatcagaaagatagctgctttccttctcccttagactgccgagcaaaattattaatatgatgttca

SEQ ID NO: 78930 - DNA, 80 bp, Homo sapiens
atagctgctttccttctcccttagactgccgagcaaaattattaatatgatgttcatgggctgcatgatccctacaaaca

SEQ ID NO: 78931 - DNA, 84 bp, Homo sapiens
ttagactgccgagcaaaattattaatatgatgttcatgggctgcatgatccctacaaacacagctgactctttgccatcagtaa

SEQ ID NO: 78932 - DNA, 82 bp, Homo sapiens
attattaatatgatgttcatgggctgcatgatccctacaaacacagctgactctttgccatcagtaagacactccccatccc

SEQ ID NO: 78933 - DNA, 80 bp, Homo sapiens
atgttcatgggctgcatgatccctacaaacacagctgactctttgccatcagtaagacactccccatcccctagcccttc

SEQ ID NO: 78934 - DNA, 76 bp, Homo sapiens
tgcatgatccctacaaacacagctgactctttgccatcagtaagacactccccatcccctagcccttccttaccct

SEQ ID NO: 78935 - DNA, 72 bp, Homo sapiens
atccctacaaacacagctgactctttgccatcagtaagacactccccatcccctagcccttccttacccttc

SEQ ID NO: 78936 - DNA, 75 bp, Homo sapiens
acacagctgactctttgccatcagtaagacactccccatcccctagcccttccttacccttcccatcctgcagct

SEQ ID NO: 78937 - DNA, 73 bp, Homo sapiens
ctctttgccatcagtaagacactccccatcccctagcccttccttacccttcccatcctgcagcttccttctc

SEQ ID NO: 78938 - DNA, 70 bp, Homo sapiens
agtaagacactccccatcccctagcccttccttacccttcccatcctgcagcttccttctccaggaagcc

SEQ ID NO: 78939 - DNA, 77 bp, Homo sapiens
tacccttcccatcctgcagcttccttctccaggaagcctcccctgattccccagggtctctctgtgacatgctctta

SEQ ID NO: 78940 - DNA, 75 bp, Homo sapiens
atcctgcagcttccttctccaggaagcctcccctgattccccagggtctctctgtgacatgctcttaaaacaccc

SEQ ID NO: 78941 - DNA, 73 bp, Homo sapiens
ttccttctccaggaagcctcccctgattccccagggtctctctgtgacatgctcttaaaacaccctggactcc

SEQ ID NO: 78942 - DNA, 74 bp, Homo sapiens
aggaagcctcccctgattccccagggtctctctgtgacatgctcttaaaacaccctggactcctgcttcacaac

SEQ ID NO: 78943 - DNA, 74 bp, Homo sapiens
cctgattccccagggtctctctgtgacatgctcttaaaacaccctggactcctgcttcacaaccctttcctgat

SEQ ID NO: 78944 - DNA, 76 bp, Homo sapiens
cagggtctctctgtgacatgctcttaaaacaccctggactcctgcttcacaaccctttcctgattgatcaaatagg

SEQ ID NO: 78945 - DNA, 75 bp, Homo sapiens
tctgtgacatgctcttaaaacaccctggactcctgcttcacaaccctttcctgattgatcaaataggttttcact

SEQ ID NO: 78946 - DNA, 69 bp, Homo sapiens
ctcttaaaacaccctggactcctgcttcacaaccctttcctgattgatcaaataggttttcacttaaaa

SEQ ID NO: 78947 - DNA, 74 bp, Homo sapiens
tttcctgattgatcaaataggttttcacttaaaatctgttcccactataagaagataaacacttgcagggcaga

SEQ ID NO: 78948 - DNA, 70 bp, Homo sapiens
aaataggttttcacttaaaatctgttcccactataagaagataaacacttgcagggcagagactttgttc

SEQ ID NO: 78949 - DNA, 72 bp, Homo sapiens
ttcacttaaaatctgttcccactataagaagataaacacttgcagggcagagactttgttcttattaaatcc

SEQ ID NO: 78950 - DNA, 71 bp, Homo sapiens
aaaatctgttcccactataagaagataaacacttgcagggcagagactttgttcttattaaatccccagta

SEQ ID NO: 78951 - DNA, 73 bp, Homo sapiens
actataagaagataaacacttgcagggcagagactttgttcttattaaatccccagtatcccaagactcactc

SEQ ID NO: 78952 - DNA, 75 bp, Homo sapiens
ataaacacttgcagggcagagactttgttcttattaaatccccagtatcccaagactcactctgcctggtacata

SEQ ID NO: 78953 - DNA, 75 bp, Homo sapiens
acttgcagggcagagactttgttcttattaaatccccagtatcccaagactcactctgcctggtacatatttgag

SEQ ID NO: 78954 - DNA, 74 bp, Homo sapiens
actttgttcttattaaatccccagtatcccaagactcactctgcctggtacatatttgaggctcaaactatgtg

SEQ ID NO: 78955 - DNA, 76 bp, Homo sapiens
ttcttattaaatccccagtatcccaagactcactctgcctggtacatatttgaggctcaaactatgtgttgaagga

SEQ ID NO: 78956 - DNA, 80 bp, Homo sapiens
ccagtatcccaagactcactctgcctggtacatatttgaggctcaaactatgtgttgaaggaatgattcaatcaaacaga

SEQ ID NO: 78957 - DNA, 79 bp, Homo sapiens
aagactcactctgcctggtacatatttgaggctcaaactatgtgttgaaggaatgattcaatcaaacagataaacaata

SEQ ID NO: 78958 - DNA, 77 bp, Homo sapiens
actctgcctggtacatatttgaggctcaaactatgtgttgaaggaatgattcaatcaaacagataaacaataagtta

SEQ ID NO: 78959 - DNA, 76 bp, Homo sapiens
tacatatttgaggctcaaactatgtgttgaaggaatgattcaatcaaacagataaacaataagttaaggtcgggca

SEQ ID NO: 78960 - DNA, 74 bp, Homo sapiens
ttgaggctcaaactatgtgttgaaggaatgattcaatcaaacagataaacaataagttaaggtcgggcacggtg

SEQ ID NO: 78961 - DNA, 67 bp, Homo sapiens
aaaaaaaaaagagttaaacaagtaatgaataaaactggcatatatctagaatgtaagaccaaggtag

SEQ ID NO: 78962 - DNA, 72 bp, Homo sapiens
aaagagttaaacaagtaatgaataaaactggcatatatctagaatgtaagaccaaggtaggtgctggaatta

SEQ ID NO: 78963 - DNA, 73 bp, Homo sapiens
aaacaagtaatgaataaaactggcatatatctagaatgtaagaccaaggtaggtgctggaattatttttagca

SEQ ID NO: 78964 - DNA, 75 bp, Homo sapiens
tgaataaaactggcatatatctagaatgtaagaccaaggtaggtgctggaattatttttagcataaaagaggaga

SEQ ID NO: 78965 - DNA, 74 bp, Homo sapiens
atatatctagaatgtaagaccaaggtaggtgctggaattatttttagcataaaagaggagagagccgagcacgg

SEQ ID NO: 78966 - DNA, 75 bp, Homo sapiens
ctagaatgtaagaccaaggtaggtgctggaattatttttagcataaaagaggagagagccgagcacggtggctca

SEQ ID NO: 78967 - DNA, 74 bp, Homo sapiens
taaataaataaagagaggaagggcaaataggacaagtccttgtggagccaacagacagcctgaagcagggacca

SEQ ID NO: 78968 - DNA, 76 bp, Homo sapiens
aaataaagagaggaagggcaaataggacaagtccttgtggagccaacagacagcctgaagcagggaccagcagcta

SEQ ID NO: 78969 - DNA, 76 bp, Homo sapiens
aagggcaaataggacaagtccttgtggagccaacagacagcctgaagcagggaccagcagctatggtccaagggac

SEQ ID NO: 78970 - DNA, 78 bp, Homo sapiens
taggacaagtccttgtggagccaacagacagcctgaagcagggaccagcagctatggtccaagggaccaactggtcaa

SEQ ID NO: 78971 - DNA, 79 bp, Homo sapiens
ttgtggagccaacagacagcctgaagcagggaccagcagctatggtccaagggaccaactggtcaaaccaactatcata

SEQ ID NO: 78972 - DNA, 77 bp, Homo sapiens
aacagacagcctgaagcagggaccagcagctatggtccaagggaccaactggtcaaaccaactatcatatggcccag

SEQ ID NO: 78973 - DNA, 78 bp, Homo sapiens
tgaagcagggaccagcagctatggtccaagggaccaactggtcaaaccaactatcatatggcccagtgaacttgccaa

SEQ ID NO: 78974 - DNA, 74 bp, Homo sapiens
accagcagctatggtccaagggaccaactggtcaaaccaactatcatatggcccagtgaacttgccaacgaaaa

SEQ ID NO: 78975 - DNA, 75 bp, Homo sapiens
tatggtccaagggaccaactggtcaaaccaactatcatatggcccagtgaacttgccaacgaaaatcatcttcca

SEQ ID NO: 78976 - DNA, 71 bp, Homo sapiens
aagggaccaactggtcaaaccaactatcatatggcccagtgaacttgccaacgaaaatcatcttccacttt

SEQ ID NO: 78977 - DNA, 69 bp, Homo sapiens
aactggtcaaaccaactatcatatggcccagtgaacttgccaacgaaaatcatcttccacttttttttt

SEQ ID NO: 78978 - DNA, 77 bp, Homo sapiens
atgcctggccagaacgatgatattttataacacacacaagtcatctgaaattcctattttcggatccatagataaag

SEQ ID NO: 78979 - DNA, 76 bp, Homo sapiens
ggccagaacgatgatattttataacacacacaagtcatctgaaattcctattttcggatccatagataaagtctta

SEQ ID NO: 78980 - DNA, 77 bp, Homo sapiens
gatgatattttataacacacacaagtcatctgaaattcctattttcggatccatagataaagtcttattggaacaca

SEQ ID NO: 78981 - DNA, 78 bp, Homo sapiens
tataacacacacaagtcatctgaaattcctattttcggatccatagataaagtcttattggaacacagctacactcat

SEQ ID NO: 78982 - DNA, 77 bp, Homo sapiens
tcatctgaaattcctattttcggatccatagataaagtcttattggaacacagctacactcatttgtttacctatca

SEQ ID NO: 78983 - DNA, 76 bp, Homo sapiens
tgaaattcctattttcggatccatagataaagtcttattggaacacagctacactcatttgtttacctatcatcca

SEQ ID NO: 78984 - DNA, 75 bp, Homo sapiens
attttcggatccatagataaagtcttattggaacacagctacactcatttgtttacctatcatccagggctgctt

SEQ ID NO: 78985 - DNA, 79 bp, Homo sapiens
atagataaagtcttattggaacacagctacactcatttgtttacctatcatccagggctgctttcatgctgaaacagta

SEQ ID NO: 78986 - DNA, 81 bp, Homo sapiens
tattggaacacagctacactcatttgtttacctatcatccagggctgctttcatgctgaaacagtaaagctgagtggctgg

SEQ ID NO: 78987 - DNA, 81 bp, Homo sapiens
aacacagctacactcatttgtttacctatcatccagggctgctttcatgctgaaacagtaaagctgagtggctgggatgga

SEQ ID NO: 78988 - DNA, 81 bp, Homo sapiens
actcatttgtttacctatcatccagggctgctttcatgctgaaacagtaaagctgagtggctgggatggagaccatgtgac

SEQ ID NO: 78989 - DNA, 80 bp, Homo sapiens
gtttacctatcatccagggctgctttcatgctgaaacagtaaagctgagtggctgggatggagaccatgtgaccctcaaa

SEQ ID NO: 78990 - DNA, 81 bp, Homo sapiens
agggctgctttcatgctgaaacagtaaagctgagtggctgggatggagaccatgtgaccctcaaagcctacatactgacta

SEQ ID NO: 78991 - DNA, 80 bp, Homo sapiens
tttcatgctgaaacagtaaagctgagtggctgggatggagaccatgtgaccctcaaagcctacatactgactacttggcc

SEQ ID NO: 78992 - DNA, 75 bp, Homo sapiens
aaacagtaaagctgagtggctgggatggagaccatgtgaccctcaaagcctacatactgactacttggcccttta

SEQ ID NO: 78993 - DNA, 75 bp, Homo sapiens
aaagctgagtggctgggatggagaccatgtgaccctcaaagcctacatactgactacttggccctttacagaaaa

SEQ ID NO: 78994 - DNA, 75 bp, Homo sapiens
gccctttacagaaaaagttcactgacccctggcctggagcctctgtgggatcacaatatctcaggacccataaga

SEQ ID NO: 78995 - DNA, 76 bp, Homo sapiens
ttacagaaaaagttcactgacccctggcctggagcctctgtgggatcacaatatctcaggacccataagaaagctg

SEQ ID NO: 78996 - DNA, 83 bp, Homo sapiens
tggcctggagcctctgtgggatcacaatatctcaggacccataagaaagctgtcaccagtggcatctgctaaagtctgagtcc

SEQ ID NO: 78997 - DNA, 80 bp, Homo sapiens
ctctgtgggatcacaatatctcaggacccataagaaagctgtcaccagtggcatctgctaaagtctgagtcccagaaaaa

SEQ ID NO: 78998 - DNA, 81 bp, Homo sapiens
atcacaatatctcaggacccataagaaagctgtcaccagtggcatctgctaaagtctgagtcccagaaaaaagctgccaga

SEQ ID NO: 78999 - DNA, 80 bp, Homo sapiens
atatctcaggacccataagaaagctgtcaccagtggcatctgctaaagtctgagtcccagaaaaaagctgccagacactg

SEQ ID NO: 79000 - DNA, 80 bp, Homo sapiens
ataagaaagctgtcaccagtggcatctgctaaagtctgagtcccagaaaaaagctgccagacactgtctattgatataaa

SEQ ID NO: 79001 - DNA, 79 bp, Homo sapiens
tggcatctgctaaagtctgagtcccagaaaaaagctgccagacactgtctattgatataaaatatgacttaaattaata

SEQ ID NO: 79002 - DNA, 76 bp, Homo sapiens
aaagtctgagtcccagaaaaaagctgccagacactgtctattgatataaaatatgacttaaattaatagagtgcag

SEQ ID NO: 79003 - DNA, 76 bp, Homo sapiens
gagtcccagaaaaaagctgccagacactgtctattgatataaaatatgacttaaattaatagagtgcaggtgaaat

SEQ ID NO: 79004 - DNA, 80 bp, Homo sapiens
aagctgccagacactgtctattgatataaaatatgacttaaattaatagagtgcaggtgaaattaatagcatacccatgc

SEQ ID NO: 79005 - DNA, 80 bp, Homo sapiens
ccagacactgtctattgatataaaatatgacttaaattaatagagtgcaggtgaaattaatagcatacccatgcgatgga

SEQ ID NO: 79006 - DNA, 80 bp, Homo sapiens
tgatataaaatatgacttaaattaatagagtgcaggtgaaattaatagcatacccatgcgatggattactacacagctgt

SEQ ID NO: 79007 - DNA, 78 bp, Homo sapiens
tatgacttaaattaatagagtgcaggtgaaattaatagcatacccatgcgatggattactacacagctgtttaaaaga

SEQ ID NO: 79008 - DNA, 76 bp, Homo sapiens
gacttaaattaatagagtgcaggtgaaattaatagcatacccatgcgatggattactacacagctgtttaaaagaa

SEQ ID NO: 79009 - DNA, 76 bp, Homo sapiens
attaatagagtgcaggtgaaattaatagcatacccatgcgatggattactacacagctgtttaaaagaatgggtta

SEQ ID NO: 79010 - DNA, 78 bp, Homo sapiens
tgcaggtgaaattaatagcatacccatgcgatggattactacacagctgtttaaaagaatgggttagactgaaatgta

SEQ ID NO: 79011 - DNA, 76 bp, Homo sapiens
gtgaaattaatagcatacccatgcgatggattactacacagctgtttaaaagaatgggttagactgaaatgtacaa

SEQ ID NO: 79012 - DNA, 76 bp, Homo sapiens
tgaaattaatagcatacccatgcgatggattactacacagctgtttaaaagaatgggttagactgaaatgtacaaa

SEQ ID NO: 79013 - DNA, 75 bp, Homo sapiens
attaatagcatacccatgcgatggattactacacagctgtttaaaagaatgggttagactgaaatgtacaaagta

SEQ ID NO: 79014 - DNA, 75 bp, Homo sapiens
tacccatgcgatggattactacacagctgtttaaaagaatgggttagactgaaatgtacaaagtatagaaagatg

SEQ ID NO: 79015 - DNA, 76 bp, Homo sapiens
ttactacacagctgtttaaaagaatgggttagactgaaatgtacaaagtatagaaagatgtccacatacactgtca

SEQ ID NO: 79016 - DNA, 73 bp, Homo sapiens
gctgtttaaaagaatgggttagactgaaatgtacaaagtatagaaagatgtccacatacactgtcaaagtaac

SEQ ID NO: 79017 - DNA, 73 bp, Homo sapiens
agaatgggttagactgaaatgtacaaagtatagaaagatgtccacatacactgtcaaagtaacttaaaggaca

SEQ ID NO: 79018 - DNA, 73 bp, Homo sapiens
gtacaaagtatagaaagatgtccacatacactgtcaaagtaacttaaaggacaacatagacaatattttccaa

SEQ ID NO: 79019 - DNA, 70 bp, Homo sapiens
agatgtccacatacactgtcaaagtaacttaaaggacaacatagacaatattttccaatttattttaaaa

SEQ ID NO: 79020 - DNA, 67 bp, Homo sapiens
tagacaatattttccaatttattttaaaagaataagtatacatatgtttaaaaggtgagaccgggga

SEQ ID NO: 79021 - DNA, 64 bp, Homo sapiens
ttccaatttattttaaaagaataagtatacatatgtttaaaaggtgagaccggggattattttt

SEQ ID NO: 79022 - DNA, 66 bp, Homo sapiens
ttttaaaagaataagtatacatatgtttaaaaggtgagaccggggattattttttatttgaaatca

SEQ ID NO: 79023 - DNA, 68 bp, Homo sapiens
agtatacatatgtttaaaaggtgagaccggggattattttttatttgaaatcattttgtacttactga

SEQ ID NO: 79024 - DNA, 66 bp, Homo sapiens
catatgtttaaaaggtgagaccggggattattttttatttgaaatcattttgtacttactgaattt

SEQ ID NO: 79025 - DNA, 65 bp, Homo sapiens
aaggtgagaccggggattattttttatttgaaatcattttgtacttactgaattttttaccgtga

SEQ ID NO: 79026 - DNA, 66 bp, Homo sapiens
ttatttgaaatcattttgtacttactgaattttttaccgtgaaaacaaactagtctctaacttaaa

SEQ ID NO: 79027 - DNA, 64 bp, Homo sapiens
gaaatcattttgtacttactgaattttttaccgtgaaaacaaactagtctctaacttaaaaaaa

SEQ ID NO: 79028 - DNA, 67 bp, Homo sapiens
gtacttactgaattttttaccgtgaaaacaaactagtctctaacttaaaaaaagataaagatgctga

SEQ ID NO: 79029 - DNA, 68 bp, Homo sapiens
tttttaccgtgaaaacaaactagtctctaacttaaaaaaagataaagatgctgaaattcagaaagcca

SEQ ID NO: 79030 - DNA, 68 bp, Homo sapiens
ccgtgaaaacaaactagtctctaacttaaaaaaagataaagatgctgaaattcagaaagccatttccc

SEQ ID NO: 79031 - DNA, 68 bp, Homo sapiens
aaactagtctctaacttaaaaaaagataaagatgctgaaattcagaaagccatttccccccatgcccc

SEQ ID NO: 79032 - DNA, 72 bp, Homo sapiens
aaaaagataaagatgctgaaattcagaaagccatttccccccatgcccctttgcaatagagtagcttatttg

SEQ ID NO: 79033 - DNA, 70 bp, Homo sapiens
gaaagccatttccccccatgcccctttgcaatagagtagcttatttgggacaataacggatccaaattat

SEQ ID NO: 79034 - DNA, 71 bp, Homo sapiens
atttccccccatgcccctttgcaatagagtagcttatttgggacaataacggatccaaattattcatatcc

SEQ ID NO: 79035 - DNA, 74 bp, Homo sapiens
atgcccctttgcaatagagtagcttatttgggacaataacggatccaaattattcatatcccctagcaacctga

SEQ ID NO: 79036 - DNA, 72 bp, Homo sapiens
atagagtagcttatttgggacaataacggatccaaattattcatatcccctagcaacctgaccttccaataa

SEQ ID NO: 79037 - DNA, 72 bp, Homo sapiens
ttatttgggacaataacggatccaaattattcatatcccctagcaacctgaccttccaataatttggatcca

SEQ ID NO: 79038 - DNA, 73 bp, Homo sapiens
atccaaattattcatatcccctagcaacctgaccttccaataatttggatccaatgttgtcccaaataattga

SEQ ID NO: 79039 - DNA, 78 bp, Homo sapiens
attattcatatcccctagcaacctgaccttccaataatttggatccaatgttgtcccaaataattgatgatctcatga

SEQ ID NO: 79040 - DNA, 75 bp, Homo sapiens
accttccaataatttggatccaatgttgtcccaaataattgatgatctcatgatcctacggtccaaattctgtgt

SEQ ID NO: 79041 - DNA, 78 bp, Homo sapiens
aataatttggatccaatgttgtcccaaataattgatgatctcatgatcctacggtccaaattctgtgtttggcagatg

SEQ ID NO: 79042 - DNA, 82 bp, Homo sapiens
tccaatgttgtcccaaataattgatgatctcatgatcctacggtccaaattctgtgtttggcagatgggtgttgcatacata

SEQ ID NO: 79043 - DNA, 84 bp, Homo sapiens
taattgatgatctcatgatcctacggtccaaattctgtgtttggcagatgggtgttgcatacatagacacactctcctctgaaa

SEQ ID NO: 79044 - DNA, 79 bp, Homo sapiens
atgatcctacggtccaaattctgtgtttggcagatgggtgttgcatacatagacacactctcctctgaaatttcaagtc

SEQ ID NO: 79045 - DNA, 78 bp, Homo sapiens
gtccaaattctgtgtttggcagatgggtgttgcatacatagacacactctcctctgaaatttcaagtctccggtaaca

SEQ ID NO: 79046 - DNA, 79 bp, Homo sapiens
attctgtgtttggcagatgggtgttgcatacatagacacactctcctctgaaatttcaagtctccggtaacagtgcaaa

SEQ ID NO: 79047 - DNA, 79 bp, Homo sapiens
agatgggtgttgcatacatagacacactctcctctgaaatttcaagtctccggtaacagtgcaaagctgttcatgtgtt

SEQ ID NO: 79048 - DNA, 76 bp, Homo sapiens
acatagacacactctcctctgaaatttcaagtctccggtaacagtgcaaagctgttcatgtgtttgttttgaggaa

SEQ ID NO: 79049 - DNA, 75 bp, Homo sapiens
tcctctgaaatttcaagtctccggtaacagtgcaaagctgttcatgtgtttgttttgaggaagtgtaagattaga

SEQ ID NO: 79050 - DNA, 71 bp, Homo sapiens
aaatttcaagtctccggtaacagtgcaaagctgttcatgtgtttgttttgaggaagtgtaagattagaacg

SEQ ID NO: 79051 - DNA, 70 bp, Homo sapiens
tcatgtgtttgttttgaggaagtgtaagattagaacggtcagaaatagtcctacttcccttttcctagaa

SEQ ID NO: 79052 - DNA, 68 bp, Homo sapiens
tgttttgaggaagtgtaagattagaacggtcagaaatagtcctacttcccttttcctagaaacttcat

SEQ ID NO: 79053 - DNA, 67 bp, Homo sapiens
aggaagtgtaagattagaacggtcagaaatagtcctacttcccttttcctagaaacttcattacctc

SEQ ID NO: 79054 - DNA, 69 bp, Homo sapiens
aagattagaacggtcagaaatagtcctacttcccttttcctagaaacttcattacctcttgcgctagaa

SEQ ID NO: 79055 - DNA, 70 bp, Homo sapiens
ggtcagaaatagtcctacttcccttttcctagaaacttcattacctcttgcgctagaacacccctcttga

SEQ ID NO: 79056 - DNA, 71 bp, Homo sapiens
tagtcctacttcccttttcctagaaacttcattacctcttgcgctagaacacccctcttgagcctgtggaa

SEQ ID NO: 79057 - DNA, 72 bp, Homo sapiens
ttttcctagaaacttcattacctcttgcgctagaacacccctcttgagcctgtggaaggtcaggttgccagg

SEQ ID NO: 79058 - DNA, 73 bp, Homo sapiens
acttcattacctcttgcgctagaacacccctcttgagcctgtggaaggtcaggttgccaggggatacgaataa

SEQ ID NO: 79059 - DNA, 72 bp, Homo sapiens
attacctcttgcgctagaacacccctcttgagcctgtggaaggtcaggttgccaggggatacgaataaacca

SEQ ID NO: 79060 - DNA, 73 bp, Homo sapiens
tagaacacccctcttgagcctgtggaaggtcaggttgccaggggatacgaataaaccagctgccttctttgtg

SEQ ID NO: 79061 - DNA, 76 bp, Homo sapiens
tcttgagcctgtggaaggtcaggttgccaggggatacgaataaaccagctgccttctttgtgtctctgctaaacag

SEQ ID NO: 79062 - DNA, 75 bp, Homo sapiens
cctgtggaaggtcaggttgccaggggatacgaataaaccagctgccttctttgtgtctctgctaaacagtagctg

SEQ ID NO: 79063 - DNA, 75 bp, Homo sapiens
aggttgccaggggatacgaataaaccagctgccttctttgtgtctctgctaaacagtagctggctcccctgtcac

SEQ ID NO: 79064 - DNA, 74 bp, Homo sapiens
aggggatacgaataaaccagctgccttctttgtgtctctgctaaacagtagctggctcccctgtcactaggacc

SEQ ID NO: 79065 - DNA, 73 bp, Homo sapiens
acgaataaaccagctgccttctttgtgtctctgctaaacagtagctggctcccctgtcactaggaccccctcc

SEQ ID NO: 79066 - DNA, 79 bp, Homo sapiens
ttgtgtctctgctaaacagtagctggctcccctgtcactaggaccccctcctggtgcaggcttataaacatcagctgta

SEQ ID NO: 79067 - DNA, 74 bp, Homo sapiens
gtagctggctcccctgtcactaggaccccctcctggtgcaggcttataaacatcagctgtagtaacgatacccc

SEQ ID NO: 79068 - DNA, 70 bp, Homo sapiens
taggaccccctcctggtgcaggcttataaacatcagctgtagtaacgatacccccaggtgggaaggggtg

SEQ ID NO: 79069 - DNA, 76 bp, Homo sapiens
tcctggtgcaggcttataaacatcagctgtagtaacgatacccccaggtgggaaggggtggtcatgtagtcaggca

SEQ ID NO: 79070 - DNA, 75 bp, Homo sapiens
cttataaacatcagctgtagtaacgatacccccaggtgggaaggggtggtcatgtagtcaggcaggcacagagga

SEQ ID NO: 79071 - DNA, 77 bp, Homo sapiens
atcagctgtagtaacgatacccccaggtgggaaggggtggtcatgtagtcaggcaggcacagaggagtgagaggcca

SEQ ID NO: 79072 - DNA, 75 bp, Homo sapiens
agtaacgatacccccaggtgggaaggggtggtcatgtagtcaggcaggcacagaggagtgagaggccaaggctga

SEQ ID NO: 79073 - DNA, 78 bp, Homo sapiens
aggtgggaaggggtggtcatgtagtcaggcaggcacagaggagtgagaggccaaggctgagccagcagtggacttggg

SEQ ID NO: 79074 - DNA, 81 bp, Homo sapiens
gggtggtcatgtagtcaggcaggcacagaggagtgagaggccaaggctgagccagcagtggacttgggtacgattttcatc

SEQ ID NO: 79075 - DNA, 80 bp, Homo sapiens
atgtagtcaggcaggcacagaggagtgagaggccaaggctgagccagcagtggacttgggtacgattttcatcttttgcc

SEQ ID NO: 79076 - DNA, 78 bp, Homo sapiens
aggcacagaggagtgagaggccaaggctgagccagcagtggacttgggtacgattttcatcttttgccttggaacgca

SEQ ID NO: 79077 - DNA, 80 bp, Homo sapiens
gagtgagaggccaaggctgagccagcagtggacttgggtacgattttcatcttttgccttggaacgcatgtctgtgattc

SEQ ID NO: 79078 - DNA, 74 bp, Homo sapiens
atgtctgtgattcccactaaatctaactttccttggtttaaatcctctcagttctctcatggcaatttctctgg

SEQ ID NO: 79079 - DNA, 76 bp, Homo sapiens
ttccttggtttaaatcctctcagttctctcatggcaatttctctggggagtcacggaggtcaagacacagctctgt

SEQ ID NO: 79080 - DNA, 79 bp, Homo sapiens
taaatcctctcagttctctcatggcaatttctctggggagtcacggaggtcaagacacagctctgttcagctggtttac

SEQ ID NO: 79081 - DNA, 78 bp, Homo sapiens
agttctctcatggcaatttctctggggagtcacggaggtcaagacacagctctgttcagctggtttaccctgtcctgc

SEQ ID NO: 79082 - DNA, 75 bp, Homo sapiens
aatttctctggggagtcacggaggtcaagacacagctctgttcagctggtttaccctgtcctgccctgcccaaga

SEQ ID NO: 79083 - DNA, 78 bp, Homo sapiens
gggagtcacggaggtcaagacacagctctgttcagctggtttaccctgtcctgccctgcccaagaccacagcctgcaa

SEQ ID NO: 79084 - DNA, 78 bp, Homo sapiens
gaggtcaagacacagctctgttcagctggtttaccctgtcctgccctgcccaagaccacagcctgcaacagtgccctt

SEQ ID NO: 79085 - DNA, 79 bp, Homo sapiens
aagacacagctctgttcagctggtttaccctgtcctgccctgcccaagaccacagcctgcaacagtgccctttgctcac

SEQ ID NO: 79086 - DNA, 74 bp, Homo sapiens
ctggtttaccctgtcctgccctgcccaagaccacagcctgcaacagtgccctttgctcaccttgttacagaacc

SEQ ID NO: 79087 - DNA, 76 bp, Homo sapiens
caagaccacagcctgcaacagtgccctttgctcaccttgttacagaacctgccacgtggtgcatccccttttataa

SEQ ID NO: 79088 - DNA, 74 bp, Homo sapiens
aacagtgccctttgctcaccttgttacagaacctgccacgtggtgcatccccttttataaaccatccacagcaa

SEQ ID NO: 79089 - DNA, 73 bp, Homo sapiens
ctttgctcaccttgttacagaacctgccacgtggtgcatccccttttataaaccatccacagcaaacttctgg

SEQ ID NO: 79090 - DNA, 72 bp, Homo sapiens
aacctgccacgtggtgcatccccttttataaaccatccacagcaaacttctggggatcctggggtcatttga

SEQ ID NO: 79091 - DNA, 72 bp, Homo sapiens
gtggtgcatccccttttataaaccatccacagcaaacttctggggatcctggggtcatttgaaggcctggga

SEQ ID NO: 79092 - DNA, 70 bp, Homo sapiens
ttataaaccatccacagcaaacttctggggatcctggggtcatttgaaggcctgggaggtccctaattat

SEQ ID NO: 79093 - DNA, 76 bp, Homo sapiens
catttgaaggcctgggaggtccctaattattggggtcattgaggtgtggtcctattcaactcagatgcacatggaa

SEQ ID NO: 79094 - DNA, 76 bp, Homo sapiens
aggtccctaattattggggtcattgaggtgtggtcctattcaactcagatgcacatggaacctgtactatttgatg

SEQ ID NO: 79095 - DNA, 77 bp, Homo sapiens
attattggggtcattgaggtgtggtcctattcaactcagatgcacatggaacctgtactatttgatgggataaataa

SEQ ID NO: 79096 - DNA, 77 bp, Homo sapiens
attgaggtgtggtcctattcaactcagatgcacatggaacctgtactatttgatgggataaataacccataagcacc

SEQ ID NO: 79097 - DNA, 76 bp, Homo sapiens
tcctattcaactcagatgcacatggaacctgtactatttgatgggataaataacccataagcacccccggcatttc

SEQ ID NO: 79098 - DNA, 73 bp, Homo sapiens
actcagatgcacatggaacctgtactatttgatgggataaataacccataagcacccccggcatttcccaaaa

SEQ ID NO: 79099 - DNA, 69 bp, Homo sapiens
acatggaacctgtactatttgatgggataaataacccataagcacccccggcatttcccaaaaaacatc

SEQ ID NO: 79100 - DNA, 69 bp, Homo sapiens
acctgtactatttgatgggataaataacccataagcacccccggcatttcccaaaaaacatctggagaa

SEQ ID NO: 79101 - DNA, 72 bp, Homo sapiens
taaataacccataagcacccccggcatttcccaaaaaacatctggagaaatgccagccagtgagatacttaa

SEQ ID NO: 79102 - DNA, 71 bp, Homo sapiens
ataagcacccccggcatttcccaaaaaacatctggagaaatgccagccagtgagatacttaaggaaaaaga

SEQ ID NO: 79103 - DNA, 72 bp, Homo sapiens
aaaacatctggagaaatgccagccagtgagatacttaaggaaaaagatgacgttgtagtgaaattagggaaa

SEQ ID NO: 79104 - DNA, 74 bp, Homo sapiens
agaaatgccagccagtgagatacttaaggaaaaagatgacgttgtagtgaaattagggaaacctcgcatttgca

SEQ ID NO: 79105 - DNA, 71 bp, Homo sapiens
ccagccagtgagatacttaaggaaaaagatgacgttgtagtgaaattagggaaacctcgcatttgcaaccc

SEQ ID NO: 79106 - DNA, 69 bp, Homo sapiens
atacttaaggaaaaagatgacgttgtagtgaaattagggaaacctcgcatttgcaacccctgtattgaa

SEQ ID NO: 79107 - DNA, 72 bp, Homo sapiens
aaaaagatgacgttgtagtgaaattagggaaacctcgcatttgcaacccctgtattgaagcttcaagatcat

SEQ ID NO: 79108 - DNA, 72 bp, Homo sapiens
atgacgttgtagtgaaattagggaaacctcgcatttgcaacccctgtattgaagcttcaagatcattaaaac

SEQ ID NO: 79109 - DNA, 69 bp, Homo sapiens
aaattagggaaacctcgcatttgcaacccctgtattgaagcttcaagatcattaaaaccttcaaaattc

SEQ ID NO: 79110 - DNA, 75 bp, Homo sapiens
aaacctcgcatttgcaacccctgtattgaagcttcaagatcattaaaaccttcaaaattccaagacatcatgcag

SEQ ID NO: 79111 - DNA, 76 bp, Homo sapiens
atttgcaacccctgtattgaagcttcaagatcattaaaaccttcaaaattccaagacatcatgcagtgactttgcc

SEQ ID NO: 79112 - DNA, 76 bp, Homo sapiens
gtattgaagcttcaagatcattaaaaccttcaaaattccaagacatcatgcagtgactttgcctcgttcattttat

SEQ ID NO: 79113 - DNA, 76 bp, Homo sapiens
aagcttcaagatcattaaaaccttcaaaattccaagacatcatgcagtgactttgcctcgttcattttattcaagc

SEQ ID NO: 79114 - DNA, 77 bp, Homo sapiens
ttaaaaccttcaaaattccaagacatcatgcagtgactttgcctcgttcattttattcaagccagctgttgaccata

SEQ ID NO: 79115 - DNA, 77 bp, Homo sapiens
ttcaaaattccaagacatcatgcagtgactttgcctcgttcattttattcaagccagctgttgaccatagaaccttt

SEQ ID NO: 79116 - DNA, 77 bp, Homo sapiens
aagacatcatgcagtgactttgcctcgttcattttattcaagccagctgttgaccatagaaccttttgagacaccct

SEQ ID NO: 79117 - DNA, 74 bp, Homo sapiens
cagtgactttgcctcgttcattttattcaagccagctgttgaccatagaaccttttgagacacccttcagaaaa

SEQ ID NO: 79118 - DNA, 71 bp, Homo sapiens
attttattcaagccagctgttgaccatagaaccttttgagacacccttcagaaaacccagccccagacgaa

SEQ ID NO: 79119 - DNA, 72 bp, Homo sapiens
ttcaagccagctgttgaccatagaaccttttgagacacccttcagaaaacccagccccagacgaacaggttg

SEQ ID NO: 79120 - DNA, 67 bp, Homo sapiens
agacacccttcagaaaacccagccccagacgaacaggttgggtttaacacagatacccagggtggac

SEQ ID NO: 79121 - DNA, 66 bp, Homo sapiens
aaaacccagccccagacgaacaggttgggtttaacacagatacccagggtggacgtcagggtccaa

SEQ ID NO: 79122 - DNA, 67 bp, Homo sapiens
aacaggttgggtttaacacagatacccagggtggacgtcagggtccaaggaagactcaaaccataaa

SEQ ID NO: 79123 - DNA, 69 bp, Homo sapiens
tttaacacagatacccagggtggacgtcagggtccaaggaagactcaaaccataaagggcagccttcct

SEQ ID NO: 79124 - DNA, 72 bp, Homo sapiens
tggacgtcagggtccaaggaagactcaaaccataaagggcagccttccttccaagatactcccagaactaca

SEQ ID NO: 79125 - DNA, 71 bp, Homo sapiens
gtccaaggaagactcaaaccataaagggcagccttccttccaagatactcccagaactacagacccagact

SEQ ID NO: 79126 - DNA, 72 bp, Homo sapiens
aggaagactcaaaccataaagggcagccttccttccaagatactcccagaactacagacccagacttgcacc

SEQ ID NO: 79127 - DNA, 70 bp, Homo sapiens
aaaccataaagggcagccttccttccaagatactcccagaactacagacccagacttgcacccctaccac

SEQ ID NO: 79128 - DNA, 73 bp, Homo sapiens
agccttccttccaagatactcccagaactacagacccagacttgcacccctaccacccagcacagtgggagga

SEQ ID NO: 79129 - DNA, 73 bp, Homo sapiens
caagatactcccagaactacagacccagacttgcacccctaccacccagcacagtgggaggagtaagacttta

SEQ ID NO: 79130 - DNA, 74 bp, Homo sapiens
agacccagacttgcacccctaccacccagcacagtgggaggagtaagactttactgtagcccctgagcatagac

SEQ ID NO: 79131 - DNA, 74 bp, Homo sapiens
ttgcacccctaccacccagcacagtgggaggagtaagactttactgtagcccctgagcatagacttaagaagaa

SEQ ID NO: 79132 - DNA, 71 bp, Homo sapiens
ccctaccacccagcacagtgggaggagtaagactttactgtagcccctgagcatagacttaagaagaaaaa

SEQ ID NO: 79133 - DNA, 69 bp, Homo sapiens
agcacagtgggaggagtaagactttactgtagcccctgagcatagacttaagaagaaaaaacccccaaa

SEQ ID NO: 79134 - DNA, 70 bp, Homo sapiens
gagtaagactttactgtagcccctgagcatagacttaagaagaaaaaacccccaaacagagaggcgaaga

SEQ ID NO: 79135 - DNA, 67 bp, Homo sapiens
ccctgagcatagacttaagaagaaaaaacccccaaacagagaggcgaagaagggagaaaaaacgtgc

SEQ ID NO: 79136 - DNA, 65 bp, Homo sapiens
tagacttaagaagaaaaaacccccaaacagagaggcgaagaagggagaaaaaacgtgcccctcta

SEQ ID NO: 79137 - DNA, 67 bp, Homo sapiens
taagaagaaaaaacccccaaacagagaggcgaagaagggagaaaaaacgtgcccctctagagagcca

SEQ ID NO: 79138 - DNA, 68 bp, Homo sapiens
aaacccccaaacagagaggcgaagaagggagaaaaaacgtgcccctctagagagccagaatgccaggg

SEQ ID NO: 79139 - DNA, 70 bp, Homo sapiens
aagggagaaaaaacgtgcccctctagagagccagaatgccagggggttggtgcaggattctcccccgagc

SEQ ID NO: 79140 - DNA, 71 bp, Homo sapiens
aaaaacgtgcccctctagagagccagaatgccagggggttggtgcaggattctcccccgagcgggactcac

SEQ ID NO: 79141 - DNA, 76 bp, Homo sapiens
tctagagagccagaatgccagggggttggtgcaggattctcccccgagcgggactcaccattggtggtcgtgttga

SEQ ID NO: 79142 - DNA, 74 bp, Homo sapiens
cagaatgccagggggttggtgcaggattctcccccgagcgggactcaccattggtggtcgtgttgacatagtac

SEQ ID NO: 79143 - DNA, 70 bp, Homo sapiens
agggggttggtgcaggattctcccccgagcgggactcaccattggtggtcgtgttgacatagtaccgccg

SEQ ID NO: 79144 - DNA, 75 bp, Homo sapiens
gtgcaggattctcccccgagcgggactcaccattggtggtcgtgttgacatagtaccgccggccctgaggcgaca

SEQ ID NO: 79145 - DNA, 72 bp, Homo sapiens
attctcccccgagcgggactcaccattggtggtcgtgttgacatagtaccgccggccctgaggcgacaggta

SEQ ID NO: 79146 - DNA, 76 bp, Homo sapiens
agcgggactcaccattggtggtcgtgttgacatagtaccgccggccctgaggcgacaggtagctctgccagccagg

SEQ ID NO: 79147 - DNA, 77 bp, Homo sapiens
tgttgacatagtaccgccggccctgaggcgacaggtagctctgccagccaggtggaaggatgaccgtctggctttct

SEQ ID NO: 79148 - DNA, 74 bp, Homo sapiens
ccggccctgaggcgacaggtagctctgccagccaggtggaaggatgaccgtctggctttcttctcccggcggag

SEQ ID NO: 79149 - DNA, 73 bp, Homo sapiens
tctgccagccaggtggaaggatgaccgtctggctttcttctcccggcggaggggggaccattccaggcttctg

SEQ ID NO: 79150 - DNA, 70 bp, Homo sapiens
ggtggaaggatgaccgtctggctttcttctcccggcggaggggggaccattccaggcttctgttggagaa

SEQ ID NO: 79151 - DNA, 69 bp, Homo sapiens
aaggatgaccgtctggctttcttctcccggcggaggggggaccattccaggcttctgttggagaagaaa

SEQ ID NO: 79152 - DNA, 68 bp, Homo sapiens
ttctcccggcggaggggggaccattccaggcttctgttggagaagaaagaaaaggtcacacccatttg

SEQ ID NO: 79153 - DNA, 70 bp, Homo sapiens
gggggaccattccaggcttctgttggagaagaaagaaaaggtcacacccatttggcatttttgcaagagt

SEQ ID NO: 79154 - DNA, 68 bp, Homo sapiens
cttctgttggagaagaaagaaaaggtcacacccatttggcatttttgcaagagtttttaaaccaggaa

SEQ ID NO: 79155 - DNA, 72 bp, Homo sapiens
tttttgcaagagtttttaaaccaggaaggcaaaggctgatgaattcaccctacagtagcgtgacattgggaa

SEQ ID NO: 79156 - DNA, 74 bp, Homo sapiens
ttttaaaccaggaaggcaaaggctgatgaattcaccctacagtagcgtgacattgggaagtctgcggcccataa

SEQ ID NO: 79157 - DNA, 73 bp, Homo sapiens
aaccaggaaggcaaaggctgatgaattcaccctacagtagcgtgacattgggaagtctgcggcccataaaccc

SEQ ID NO: 79158 - DNA, 76 bp, Homo sapiens
aaaggctgatgaattcaccctacagtagcgtgacattgggaagtctgcggcccataaacccctgaggtcagaggca

SEQ ID NO: 79159 - DNA, 77 bp, Homo sapiens
aattcaccctacagtagcgtgacattgggaagtctgcggcccataaacccctgaggtcagaggcagcacacacgtga

SEQ ID NO: 79160 - DNA, 76 bp, Homo sapiens
tacagtagcgtgacattgggaagtctgcggcccataaacccctgaggtcagaggcagcacacacgtgacctccggg

SEQ ID NO: 79161 - DNA, 78 bp, Homo sapiens
cattgggaagtctgcggcccataaacccctgaggtcagaggcagcacacacgtgacctccggggttgcgtgagcatga

SEQ ID NO: 79162 - DNA, 80 bp, Homo sapiens
aagtctgcggcccataaacccctgaggtcagaggcagcacacacgtgacctccggggttgcgtgagcatgagcagtgaga

SEQ ID NO: 79163 - DNA, 83 bp, Homo sapiens
ataaacccctgaggtcagaggcagcacacacgtgacctccggggttgcgtgagcatgagcagtgagaagcacctgagcattca

SEQ ID NO: 79164 - DNA, 89 bp, Homo sapiens
tgaggtcagaggcagcacacacgtgacctccggggttgcgtgagcatgagcagtgagaagcacctgagcattcagagcccctgcacaga

SEQ ID NO: 79165 - DNA, 87 bp, Homo sapiens
agaggcagcacacacgtgacctccggggttgcgtgagcatgagcagtgagaagcacctgagcattcagagcccctgcacagaggaca

SEQ ID NO: 79166 - DNA, 85 bp, Homo sapiens
acacacgtgacctccggggttgcgtgagcatgagcagtgagaagcacctgagcattcagagcccctgcacagaggacagctcctc

SEQ ID NO: 79167 - DNA, 87 bp, Homo sapiens
cctccggggttgcgtgagcatgagcagtgagaagcacctgagcattcagagcccctgcacagaggacagctcctctgggagcagaga

SEQ ID NO: 79168 - DNA, 92 bp, Homo sapiens
tgagcatgagcagtgagaagcacctgagcattcagagcccctgcacagaggacagctcctctgggagcagagaggaaaatgccattcagcta

SEQ ID NO: 79169 - DNA, 86 bp, Homo sapiens
agtgagaagcacctgagcattcagagcccctgcacagaggacagctcctctgggagcagagaggaaaatgccattcagctaatgga

SEQ ID NO: 79170 - DNA, 83 bp, Homo sapiens
attcagagcccctgcacagaggacagctcctctgggagcagagaggaaaatgccattcagctaatggagctagactttctcca

SEQ ID NO: 79171 - DNA, 76 bp, Homo sapiens
tgggagcagagaggaaaatgccattcagctaatggagctagactttctccacggccccctagaaaatcactcacgg

SEQ ID NO: 79172 - DNA, 75 bp, Homo sapiens
agaggaaaatgccattcagctaatggagctagactttctccacggccccctagaaaatcactcacggggtgctga

SEQ ID NO: 79173 - DNA, 77 bp, Homo sapiens
aaatgccattcagctaatggagctagactttctccacggccccctagaaaatcactcacggggtgctgagcttgcaa

SEQ ID NO: 79174 - DNA, 73 bp, Homo sapiens
agctaatggagctagactttctccacggccccctagaaaatcactcacggggtgctgagcttgcaagggggcc

SEQ ID NO: 79175 - DNA, 73 bp, Homo sapiens
agctagactttctccacggccccctagaaaatcactcacggggtgctgagcttgcaagggggccctgtcactc

SEQ ID NO: 79176 - DNA, 73 bp, Homo sapiens
tctccacggccccctagaaaatcactcacggggtgctgagcttgcaagggggccctgtcactccaccacctcc

SEQ ID NO: 79177 - DNA, 76 bp, Homo sapiens
ctagaaaatcactcacggggtgctgagcttgcaagggggccctgtcactccaccacctcccattgtgaaatctgaa

SEQ ID NO: 79178 - DNA, 77 bp, Homo sapiens
atcactcacggggtgctgagcttgcaagggggccctgtcactccaccacctcccattgtgaaatctgaagcctgaaa

SEQ ID NO: 79179 - DNA, 76 bp, Homo sapiens
ctgagcttgcaagggggccctgtcactccaccacctcccattgtgaaatctgaagcctgaaattcccagaccacga

SEQ ID NO: 79180 - DNA, 76 bp, Homo sapiens
ttgcaagggggccctgtcactccaccacctcccattgtgaaatctgaagcctgaaattcccagaccacgaagcaca

SEQ ID NO: 79181 - DNA, 79 bp, Homo sapiens
ggccctgtcactccaccacctcccattgtgaaatctgaagcctgaaattcccagaccacgaagcacagcagcagacaag

SEQ ID NO: 79182 - DNA, 78 bp, Homo sapiens
accacctcccattgtgaaatctgaagcctgaaattcccagaccacgaagcacagcagcagacaaggccccaggcttgc

SEQ ID NO: 79183 - DNA, 80 bp, Homo sapiens
attgtgaaatctgaagcctgaaattcccagaccacgaagcacagcagcagacaaggccccaggcttgctgtgcaaaccta

SEQ ID NO: 79184 - DNA, 79 bp, Homo sapiens
aaattcccagaccacgaagcacagcagcagacaaggccccaggcttgctgtgcaaacctagcagaagtaattaatgcaa

SEQ ID NO: 79185 - DNA, 82 bp, Homo sapiens
agaccacgaagcacagcagcagacaaggccccaggcttgctgtgcaaacctagcagaagtaattaatgcaagtcatcccaca

SEQ ID NO: 79186 - DNA, 83 bp, Homo sapiens
acagcagcagacaaggccccaggcttgctgtgcaaacctagcagaagtaattaatgcaagtcatcccacagccagatgcaaaa

SEQ ID NO: 79187 - DNA, 87 bp, Homo sapiens
tagcagaagtaattaatgcaagtcatcccacagccagatgcaaaacattctataataatgctgagaatccatgaagagctggatgga

SEQ ID NO: 79188 - DNA, 87 bp, Homo sapiens
taattaatgcaagtcatcccacagccagatgcaaaacattctataataatgctgagaatccatgaagagctggatggagcttctctc

SEQ ID NO: 79189 - DNA, 84 bp, Homo sapiens
aagtcatcccacagccagatgcaaaacattctataataatgctgagaatccatgaagagctggatggagcttctctcgccaagg

SEQ ID NO: 79190 - DNA, 85 bp, Homo sapiens
ccagatgcaaaacattctataataatgctgagaatccatgaagagctggatggagcttctctcgccaagggtccagatcactctg

SEQ ID NO: 79191 - DNA, 82 bp, Homo sapiens
aacattctataataatgctgagaatccatgaagagctggatggagcttctctcgccaagggtccagatcactctggcaaaaa

SEQ ID NO: 79192 - DNA, 83 bp, Homo sapiens
tctataataatgctgagaatccatgaagagctggatggagcttctctcgccaagggtccagatcactctggcaaaaagaacga

SEQ ID NO: 79193 - DNA, 79 bp, Homo sapiens
agaatccatgaagagctggatggagcttctctcgccaagggtccagatcactctggcaaaaagaacgaggactcggaga

SEQ ID NO: 79194 - DNA, 81 bp, Homo sapiens
atgaagagctggatggagcttctctcgccaagggtccagatcactctggcaaaaagaacgaggactcggagacagagcaga

SEQ ID NO: 79195 - DNA, 79 bp, Homo sapiens
atggagcttctctcgccaagggtccagatcactctggcaaaaagaacgaggactcggagacagagcagacgctgacttc

SEQ ID NO: 79196 - DNA, 78 bp, Homo sapiens
aagggtccagatcactctggcaaaaagaacgaggactcggagacagagcagacgctgacttcccattgtatgcattta

SEQ ID NO: 79197 - DNA, 80 bp, Homo sapiens
atcactctggcaaaaagaacgaggactcggagacagagcagacgctgacttcccattgtatgcatttatgtgcaattaat

SEQ ID NO: 79198 - DNA, 79 bp, Homo sapiens
actcggagacagagcagacgctgacttcccattgtatgcatttatgtgcaattaattcttttaaccatgtatagaatta

SEQ ID NO: 79199 - DNA, 77 bp, Homo sapiens
agacagagcagacgctgacttcccattgtatgcatttatgtgcaattaattcttttaaccatgtatagaattacttt

SEQ ID NO: 79200 - DNA, 74 bp, Homo sapiens
agacgctgacttcccattgtatgcatttatgtgcaattaattcttttaaccatgtatagaattacttttcgtta

SEQ ID NO: 79201 - DNA, 70 bp, Homo sapiens
cccattgtatgcatttatgtgcaattaattcttttaaccatgtatagaattacttttcgttaaaaaacaa

SEQ ID NO: 79202 - DNA, 71 bp, Homo sapiens
atgcatttatgtgcaattaattcttttaaccatgtatagaattacttttcgttaaaaaacaaatcagagaa

SEQ ID NO: 79203 - DNA, 68 bp, Homo sapiens
gtgcaattaattcttttaaccatgtatagaattacttttcgttaaaaaacaaatcagagaaaaatgta

SEQ ID NO: 79204 - DNA, 70 bp, Homo sapiens
ttcttttaaccatgtatagaattacttttcgttaaaaaacaaatcagagaaaaatgtatatgacatacaa

SEQ ID NO: 79205 - DNA, 71 bp, Homo sapiens
gtatagaattacttttcgttaaaaaacaaatcagagaaaaatgtatatgacatacaaagaaactagatatc

SEQ ID NO: 79206 - DNA, 74 bp, Homo sapiens
cttttcgttaaaaaacaaatcagagaaaaatgtatatgacatacaaagaaactagatatctagtagacagatgc

SEQ ID NO: 79207 - DNA, 74 bp, Homo sapiens
gttaaaaaacaaatcagagaaaaatgtatatgacatacaaagaaactagatatctagtagacagatgctaaaaa

SEQ ID NO: 79208 - DNA, 73 bp, Homo sapiens
aaatcagagaaaaatgtatatgacatacaaagaaactagatatctagtagacagatgctaaaaaaaaaacaac

SEQ ID NO: 79209 - DNA, 73 bp, Homo sapiens
aaatgtatatgacatacaaagaaactagatatctagtagacagatgctaaaaaaaaaacaaccatggccgggc

SEQ ID NO: 79210 - DNA, 72 bp, Homo sapiens
tgggattacaggcaattattatactctcctttctacatatctgttccccctaaattttctcccataaacaca

SEQ ID NO: 79211 - DNA, 71 bp, Homo sapiens
ttacaggcaattattatactctcctttctacatatctgttccccctaaattttctcccataaacacagaaa

SEQ ID NO: 79212 - DNA, 69 bp, Homo sapiens
tattatactctcctttctacatatctgttccccctaaattttctcccataaacacagaaataaaagttg

SEQ ID NO: 79213 - DNA, 68 bp, Homo sapiens
ctcctttctacatatctgttccccctaaattttctcccataaacacagaaataaaagttgttagctaa

SEQ ID NO: 79214 - DNA, 64 bp, Homo sapiens
ccctaaattttctcccataaacacagaaataaaagttgttagctaaagaacattttaaaattag

SEQ ID NO: 79215 - DNA, 69 bp, Homo sapiens
tctcccataaacacagaaataaaagttgttagctaaagaacattttaaaattaggacagagagtccaaa

SEQ ID NO: 79216 - DNA, 68 bp, Homo sapiens
cacagaaataaaagttgttagctaaagaacattttaaaattaggacagagagtccaaattagcccgta

SEQ ID NO: 79217 - DNA, 70 bp, Homo sapiens
tttaaaattaggacagagagtccaaattagcccgtaagattgctgtgccttttgaagtaaattgattaaa

SEQ ID NO: 79218 - DNA, 72 bp, Homo sapiens
aattaggacagagagtccaaattagcccgtaagattgctgtgccttttgaagtaaattgattaaaatcagaa

SEQ ID NO: 79219 - DNA, 74 bp, Homo sapiens
tccaaattagcccgtaagattgctgtgccttttgaagtaaattgattaaaatcagaattgtagccatacgaaga

SEQ ID NO: 79220 - DNA, 74 bp, Homo sapiens
attagcccgtaagattgctgtgccttttgaagtaaattgattaaaatcagaattgtagccatacgaagagagta

SEQ ID NO: 79221 - DNA, 76 bp, Homo sapiens
aagattgctgtgccttttgaagtaaattgattaaaatcagaattgtagccatacgaagagagtagccatgaatttc

SEQ ID NO: 79222 - DNA, 77 bp, Homo sapiens
aaattgattaaaatcagaattgtagccatacgaagagagtagccatgaatttctcagcaaagccaggggactgttca

SEQ ID NO: 79223 - DNA, 77 bp, Homo sapiens
aaatcagaattgtagccatacgaagagagtagccatgaatttctcagcaaagccaggggactgttcacaaacagtaa

SEQ ID NO: 79224 - DNA, 75 bp, Homo sapiens
aattgtagccatacgaagagagtagccatgaatttctcagcaaagccaggggactgttcacaaacagtaaaggta

SEQ ID NO: 79225 - DNA, 74 bp, Homo sapiens
atacgaagagagtagccatgaatttctcagcaaagccaggggactgttcacaaacagtaaaggtaatcggctcc

SEQ ID NO: 79226 - DNA, 73 bp, Homo sapiens
aagagagtagccatgaatttctcagcaaagccaggggactgttcacaaacagtaaaggtaatcggctcccaaa

SEQ ID NO: 79227 - DNA, 73 bp, Homo sapiens
agtagccatgaatttctcagcaaagccaggggactgttcacaaacagtaaaggtaatcggctcccaaatgtcc

SEQ ID NO: 79228 - DNA, 74 bp, Homo sapiens
atgaatttctcagcaaagccaggggactgttcacaaacagtaaaggtaatcggctcccaaatgtcctcagtatc

SEQ ID NO: 79229 - DNA, 72 bp, Homo sapiens
aatttctcagcaaagccaggggactgttcacaaacagtaaaggtaatcggctcccaaatgtcctcagtatcc

SEQ ID NO: 79230 - DNA, 74 bp, Homo sapiens
ggactgttcacaaacagtaaaggtaatcggctcccaaatgtcctcagtatcccccagctgtgcccatagtggtg

SEQ ID NO: 79231 - DNA, 73 bp, Homo sapiens
actgttcacaaacagtaaaggtaatcggctcccaaatgtcctcagtatcccccagctgtgcccatagtggtgg

SEQ ID NO: 79232 - DNA, 71 bp, Homo sapiens
ctcccaaatgtcctcagtatcccccagctgtgcccatagtggtggtccctggtgacccccgcttaggaaaa

SEQ ID NO: 79233 - DNA, 71 bp, Homo sapiens
aaatgtcctcagtatcccccagctgtgcccatagtggtggtccctggtgacccccgcttaggaaaacaaga

SEQ ID NO: 79234 - DNA, 72 bp, Homo sapiens
tatcccccagctgtgcccatagtggtggtccctggtgacccccgcttaggaaaacaagataacagaatgaaa

SEQ ID NO: 79235 - DNA, 76 bp, Homo sapiens
agctgtgcccatagtggtggtccctggtgacccccgcttaggaaaacaagataacagaatgaaagagagcagcaga

SEQ ID NO: 79236 - DNA, 76 bp, Homo sapiens
atagtggtggtccctggtgacccccgcttaggaaaacaagataacagaatgaaagagagcagcagagacacacagc

SEQ ID NO: 79237 - DNA, 79 bp, Homo sapiens
ctggtgacccccgcttaggaaaacaagataacagaatgaaagagagcagcagagacacacagctcccaggctactctca

SEQ ID NO: 79238 - DNA, 80 bp, Homo sapiens
ccgcttaggaaaacaagataacagaatgaaagagagcagcagagacacacagctcccaggctactctcacgctttgtgaa

SEQ ID NO: 79239 - DNA, 80 bp, Homo sapiens
aaacaagataacagaatgaaagagagcagcagagacacacagctcccaggctactctcacgctttgtgaaggttgcaaaa

SEQ ID NO: 79240 - DNA, 81 bp, Homo sapiens
ataacagaatgaaagagagcagcagagacacacagctcccaggctactctcacgctttgtgaaggttgcaaaaccacgtgc

SEQ ID NO: 79241 - DNA, 79 bp, Homo sapiens
aaagagagcagcagagacacacagctcccaggctactctcacgctttgtgaaggttgcaaaaccacgtgccgtggcttc

SEQ ID NO: 79242 - DNA, 75 bp, Homo sapiens
agacacacagctcccaggctactctcacgctttgtgaaggttgcaaaaccacgtgccgtggcttcccgtagtgcc

SEQ ID NO: 79243 - DNA, 76 bp, Homo sapiens
ctcccaggctactctcacgctttgtgaaggttgcaaaaccacgtgccgtggcttcccgtagtgccctgcatgtcat

SEQ ID NO: 79244 - DNA, 73 bp, Homo sapiens
tttgtgaaggttgcaaaaccacgtgccgtggcttcccgtagtgccctgcatgtcattggagggaacgagtaaa

SEQ ID NO: 79245 - DNA, 74 bp, Homo sapiens
aaggttgcaaaaccacgtgccgtggcttcccgtagtgccctgcatgtcattggagggaacgagtaaatctgagc

SEQ ID NO: 79246 - DNA, 76 bp, Homo sapiens
acgtgccgtggcttcccgtagtgccctgcatgtcattggagggaacgagtaaatctgagctgctcggggactttga

SEQ ID NO: 79247 - DNA, 76 bp, Homo sapiens
gtggcttcccgtagtgccctgcatgtcattggagggaacgagtaaatctgagctgctcggggactttgagtaaaca

SEQ ID NO: 79248 - DNA, 77 bp, Homo sapiens
tagtgccctgcatgtcattggagggaacgagtaaatctgagctgctcggggactttgagtaaacacagcctcccttc

SEQ ID NO: 79249 - DNA, 77 bp, Homo sapiens
ctgcatgtcattggagggaacgagtaaatctgagctgctcggggactttgagtaaacacagcctcccttctgccctc

SEQ ID NO: 79250 - DNA, 75 bp, Homo sapiens
ttggagggaacgagtaaatctgagctgctcggggactttgagtaaacacagcctcccttctgccctctgcgtagc

SEQ ID NO: 79251 - DNA, 77 bp, Homo sapiens
taaatctgagctgctcggggactttgagtaaacacagcctcccttctgccctctgcgtagctgcggtgtaagtttca

SEQ ID NO: 79252 - DNA, 74 bp, Homo sapiens
ctctgcgtagctgcggtgtaagtttcacaatgcattttcacaacttaattaaaagctttcccctatgccctgga

SEQ ID NO: 79253 - DNA, 74 bp, Homo sapiens
tagctgcggtgtaagtttcacaatgcattttcacaacttaattaaaagctttcccctatgccctggacgctcca

SEQ ID NO: 79254 - DNA, 72 bp, Homo sapiens
aatgcattttcacaacttaattaaaagctttcccctatgccctggacgctccatctcctacacctgctaacc

SEQ ID NO: 79255 - DNA, 71 bp, Homo sapiens
aacttaattaaaagctttcccctatgccctggacgctccatctcctacacctgctaacctgcagtgcccgt

SEQ ID NO: 79256 - DNA, 73 bp, Homo sapiens
aaaagctttcccctatgccctggacgctccatctcctacacctgctaacctgcagtgcccgtttgattccgta

SEQ ID NO: 79257 - DNA, 76 bp, Homo sapiens
ccctatgccctggacgctccatctcctacacctgctaacctgcagtgcccgtttgattccgtatggaagactgtct

SEQ ID NO: 79258 - DNA, 77 bp, Homo sapiens
cctggacgctccatctcctacacctgctaacctgcagtgcccgtttgattccgtatggaagactgtcttctaagaca

SEQ ID NO: 79259 - DNA, 79 bp, Homo sapiens
atctcctacacctgctaacctgcagtgcccgtttgattccgtatggaagactgtcttctaagacagcaggagacagtga

SEQ ID NO: 79260 - DNA, 79 bp, Homo sapiens
tacacctgctaacctgcagtgcccgtttgattccgtatggaagactgtcttctaagacagcaggagacagtgaggtgga

SEQ ID NO: 79261 - DNA, 83 bp, Homo sapiens
tgcagtgcccgtttgattccgtatggaagactgtcttctaagacagcaggagacagtgaggtggacagcagccaggatcaaca

SEQ ID NO: 79262 - DNA, 80 bp, Homo sapiens
gtttgattccgtatggaagactgtcttctaagacagcaggagacagtgaggtggacagcagccaggatcaacacggtgtg

SEQ ID NO: 79263 - DNA, 82 bp, Homo sapiens
ttccgtatggaagactgtcttctaagacagcaggagacagtgaggtggacagcagccaggatcaacacggtgtggcatccca

SEQ ID NO: 79264 - DNA, 80 bp, Homo sapiens
aagactgtcttctaagacagcaggagacagtgaggtggacagcagccaggatcaacacggtgtggcatcccaccagggtc

SEQ ID NO: 79265 - DNA, 84 bp, Homo sapiens
taagacagcaggagacagtgaggtggacagcagccaggatcaacacggtgtggcatcccaccagggtcgcaggttgctgtctca

SEQ ID NO: 79266 - DNA, 84 bp, Homo sapiens
agacagtgaggtggacagcagccaggatcaacacggtgtggcatcccaccagggtcgcaggttgctgtctcaccagcatgtcca

SEQ ID NO: 79267 - DNA, 83 bp, Homo sapiens
atcaacacggtgtggcatcccaccagggtcgcaggttgctgtctcaccagcatgtccagtaagcacaagcccacatctgggca

SEQ ID NO: 79268 - DNA, 79 bp, Homo sapiens
catcccaccagggtcgcaggttgctgtctcaccagcatgtccagtaagcacaagcccacatctgggcaggtttacctgg

SEQ ID NO: 79269 - DNA, 79 bp, Homo sapiens
agggtcgcaggttgctgtctcaccagcatgtccagtaagcacaagcccacatctgggcaggtttacctgggccctctca

SEQ ID NO: 79270 - DNA, 79 bp, Homo sapiens
aggttgctgtctcaccagcatgtccagtaagcacaagcccacatctgggcaggtttacctgggccctctcactgctttg

SEQ ID NO: 79271 - DNA, 78 bp, Homo sapiens
accagcatgtccagtaagcacaagcccacatctgggcaggtttacctgggccctctcactgctttggactctccagga

SEQ ID NO: 79272 - DNA, 75 bp, Homo sapiens
acaagcccacatctgggcaggtttacctgggccctctcactgctttggactctccaggattggaagatagccaaa

SEQ ID NO: 79273 - DNA, 77 bp, Homo sapiens
acatctgggcaggtttacctgggccctctcactgctttggactctccaggattggaagatagccaaaatatatgcaa

SEQ ID NO: 79274 - DNA, 76 bp, Homo sapiens
tttacctgggccctctcactgctttggactctccaggattggaagatagccaaaatatatgcaagacaaataggat

SEQ ID NO: 79275 - DNA, 76 bp, Homo sapiens
ccctctcactgctttggactctccaggattggaagatagccaaaatatatgcaagacaaataggattataacaacg

SEQ ID NO: 79276 - DNA, 80 bp, Homo sapiens
actgctttggactctccaggattggaagatagccaaaatatatgcaagacaaataggattataacaacgtgcatgtgtgc

SEQ ID NO: 79277 - DNA, 89 bp, Homo sapiens
tgtgtgcgtgtgcatgcgcgcgtgcatgttgagagaaagagaagtatcccatgcacaggagatgaacattctgtccaataggattagaa

SEQ ID NO: 79278 - DNA, 86 bp, Homo sapiens
tgtgcatgcgcgcgtgcatgttgagagaaagagaagtatcccatgcacaggagatgaacattctgtccaataggattagaaataaa

SEQ ID NO: 79279 - DNA, 81 bp, Homo sapiens
cgtgcatgttgagagaaagagaagtatcccatgcacaggagatgaacattctgtccaataggattagaaataaagtcggca

SEQ ID NO: 79280 - DNA, 79 bp, Homo sapiens
atgttgagagaaagagaagtatcccatgcacaggagatgaacattctgtccaataggattagaaataaagtcggcatgg

SEQ ID NO: 79281 - DNA, 75 bp, Homo sapiens
aaagagaagtatcccatgcacaggagatgaacattctgtccaataggattagaaataaagtcggcatgggtgggg

SEQ ID NO: 79282 - DNA, 74 bp, Homo sapiens
atgcacaggagatgaacattctgtccaataggattagaaataaagtcggcatgggtggggggtcaggggattaa

SEQ ID NO: 79283 - DNA, 71 bp, Homo sapiens
agatgaacattctgtccaataggattagaaataaagtcggcatgggtggggggtcaggggattaaaactga

SEQ ID NO: 79284 - DNA, 68 bp, Homo sapiens
ttctgtccaataggattagaaataaagtcggcatgggtggggggtcaggggattaaaactgagggtta

SEQ ID NO: 79285 - DNA, 66 bp, Homo sapiens
aataggattagaaataaagtcggcatgggtggggggtcaggggattaaaactgagggttagggcca

SEQ ID NO: 79286 - DNA, 69 bp, Homo sapiens
aaataaagtcggcatgggtggggggtcaggggattaaaactgagggttagggccaggtgcaatgtctca

SEQ ID NO: 79287 - DNA, 74 bp, Homo sapiens
tgtctcaaaacaaagaacaaaaaaatacaactacaggcatgagtgtttgatgaaagagattctagaaccagagg

SEQ ID NO: 79288 - DNA, 73 bp, Homo sapiens
aacaaagaacaaaaaaatacaactacaggcatgagtgtttgatgaaagagattctagaaccagaggggcaaga

SEQ ID NO: 79289 - DNA, 76 bp, Homo sapiens
aaaaatacaactacaggcatgagtgtttgatgaaagagattctagaaccagaggggcaagatgccaggtgtcctcc

SEQ ID NO: 79290 - DNA, 79 bp, Homo sapiens
tacaggcatgagtgtttgatgaaagagattctagaaccagaggggcaagatgccaggtgtcctccccttgagtgaaata

SEQ ID NO: 79291 - DNA, 77 bp, Homo sapiens
atgagtgtttgatgaaagagattctagaaccagaggggcaagatgccaggtgtcctccccttgagtgaaatattcta

SEQ ID NO: 79292 - DNA, 76 bp, Homo sapiens
ttgatgaaagagattctagaaccagaggggcaagatgccaggtgtcctccccttgagtgaaatattctagtttctc

SEQ ID NO: 79293 - DNA, 74 bp, Homo sapiens
ttctagaaccagaggggcaagatgccaggtgtcctccccttgagtgaaatattctagtttctccttcaatcaaa

SEQ ID NO: 79294 - DNA, 73 bp, Homo sapiens
agaggggcaagatgccaggtgtcctccccttgagtgaaatattctagtttctccttcaatcaaacatgggaaa

SEQ ID NO: 79295 - DNA, 74 bp, Homo sapiens
atgccaggtgtcctccccttgagtgaaatattctagtttctccttcaatcaaacatgggaaagccatattggta

SEQ ID NO: 79296 - DNA, 72 bp, Homo sapiens
cctccccttgagtgaaatattctagtttctccttcaatcaaacatgggaaagccatattggtacttatccaa

SEQ ID NO: 79297 - DNA, 72 bp, Homo sapiens
gagtgaaatattctagtttctccttcaatcaaacatgggaaagccatattggtacttatccaaataacttgg

SEQ ID NO: 79298 - DNA, 70 bp, Homo sapiens
attctagtttctccttcaatcaaacatgggaaagccatattggtacttatccaaataacttgggaggaaa

SEQ ID NO: 79299 - DNA, 70 bp, Homo sapiens
tttctccttcaatcaaacatgggaaagccatattggtacttatccaaataacttgggaggaaataggaag

SEQ ID NO: 79300 - DNA, 71 bp, Homo sapiens
aaacatgggaaagccatattggtacttatccaaataacttgggaggaaataggaaggatcaaatattgaca

SEQ ID NO: 79301 - DNA, 72 bp, Homo sapiens
aaagccatattggtacttatccaaataacttgggaggaaataggaaggatcaaatattgacatggtcagaaa

SEQ ID NO: 79302 - DNA, 70 bp, Homo sapiens
tattggtacttatccaaataacttgggaggaaataggaaggatcaaatattgacatggtcagaaaagggg

SEQ ID NO: 79303 - DNA, 71 bp, Homo sapiens
aaataacttgggaggaaataggaaggatcaaatattgacatggtcagaaaaggggtgcaggagacaggaac

SEQ ID NO: 79304 - DNA, 72 bp, Homo sapiens
acttgggaggaaataggaaggatcaaatattgacatggtcagaaaaggggtgcaggagacaggaacccacag

SEQ ID NO: 79305 - DNA, 74 bp, Homo sapiens
aaataggaaggatcaaatattgacatggtcagaaaaggggtgcaggagacaggaacccacaggcacagcgaaaa

SEQ ID NO: 79306 - DNA, 76 bp, Homo sapiens
aatattgacatggtcagaaaaggggtgcaggagacaggaacccacaggcacagcgaaaacagccctcaggctcaaa

SEQ ID NO: 79307 - DNA, 75 bp, Homo sapiens
aaaaggggtgcaggagacaggaacccacaggcacagcgaaaacagccctcaggctcaaacagccttcagtgccaa

SEQ ID NO: 79308 - DNA, 77 bp, Homo sapiens
aggagacaggaacccacaggcacagcgaaaacagccctcaggctcaaacagccttcagtgccaatcctgcctggacc

SEQ ID NO: 79309 - DNA, 82 bp, Homo sapiens
aggcacagcgaaaacagccctcaggctcaaacagccttcagtgccaatcctgcctggaccgcttgacagccatgtgaccaca

SEQ ID NO: 79310 - DNA, 83 bp, Homo sapiens
ctcaaacagccttcagtgccaatcctgcctggaccgcttgacagccatgtgaccacaggctactgactcaccaggctattctc

SEQ ID NO: 79311 - DNA, 84 bp, Homo sapiens
cttcagtgccaatcctgcctggaccgcttgacagccatgtgaccacaggctactgactcaccaggctattctcgaatctgtgaa

SEQ ID NO: 79312 - DNA, 80 bp, Homo sapiens
aatcctgcctggaccgcttgacagccatgtgaccacaggctactgactcaccaggctattctcgaatctgtgaaacgaag

SEQ ID NO: 79313 - DNA, 81 bp, Homo sapiens
tggaccgcttgacagccatgtgaccacaggctactgactcaccaggctattctcgaatctgtgaaacgaagggtgataata

SEQ ID NO: 79314 - DNA, 80 bp, Homo sapiens
acagccatgtgaccacaggctactgactcaccaggctattctcgaatctgtgaaacgaagggtgataatatgagcccagt

SEQ ID NO: 79315 - DNA, 80 bp, Homo sapiens
tgtgaccacaggctactgactcaccaggctattctcgaatctgtgaaacgaagggtgataatatgagcccagttgtggaa

SEQ ID NO: 79316 - DNA, 78 bp, Homo sapiens
tactgactcaccaggctattctcgaatctgtgaaacgaagggtgataatatgagcccagttgtggaagacgacggaga

SEQ ID NO: 79317 - DNA, 74 bp, Homo sapiens
ccaggctattctcgaatctgtgaaacgaagggtgataatatgagcccagttgtggaagacgacggagagggtaa

SEQ ID NO: 79318 - DNA, 74 bp, Homo sapiens
ctattctcgaatctgtgaaacgaagggtgataatatgagcccagttgtggaagacgacggagagggtaacaata

SEQ ID NO: 79319 - DNA, 73 bp, Homo sapiens
atctgtgaaacgaagggtgataatatgagcccagttgtggaagacgacggagagggtaacaatacgtaactca

SEQ ID NO: 79320 - DNA, 73 bp, Homo sapiens
aagggtgataatatgagcccagttgtggaagacgacggagagggtaacaatacgtaactcagcacctagggca

SEQ ID NO: 79321 - DNA, 78 bp, Homo sapiens
ttgtggaagacgacggagagggtaacaatacgtaactcagcacctagggcagcgcctgtcctgagggatgcgcaatga

SEQ ID NO: 79322 - DNA, 76 bp, Homo sapiens
aagacgacggagagggtaacaatacgtaactcagcacctagggcagcgcctgtcctgagggatgcgcaatgaatgg

SEQ ID NO: 79323 - DNA, 75 bp, Homo sapiens
aatacgtaactcagcacctagggcagcgcctgtcctgagggatgcgcaatgaatggggttttccactggaagggc

SEQ ID NO: 79324 - DNA, 75 bp, Homo sapiens
acctagggcagcgcctgtcctgagggatgcgcaatgaatggggttttccactggaagggcttcacacagtccgtc

SEQ ID NO: 79325 - DNA, 76 bp, Homo sapiens
agcgcctgtcctgagggatgcgcaatgaatggggttttccactggaagggcttcacacagtccgtctacggcgata

SEQ ID NO: 79326 - DNA, 75 bp, Homo sapiens
tgagggatgcgcaatgaatggggttttccactggaagggcttcacacagtccgtctacggcgatacggacctcca

SEQ ID NO: 79327 - DNA, 71 bp, Homo sapiens
cgcaatgaatggggttttccactggaagggcttcacacagtccgtctacggcgatacggacctccacccta

SEQ ID NO: 79328 - DNA, 74 bp, Homo sapiens
actggaagggcttcacacagtccgtctacggcgatacggacctccaccctagcctcaccatccctctgtctgaa

SEQ ID NO: 79329 - DNA, 79 bp, Homo sapiens
cttcacacagtccgtctacggcgatacggacctccaccctagcctcaccatccctctgtctgaaatgtcagcatcaaca

SEQ ID NO: 79330 - DNA, 77 bp, Homo sapiens
agtccgtctacggcgatacggacctccaccctagcctcaccatccctctgtctgaaatgtcagcatcaacagtcact

SEQ ID NO: 79331 - DNA, 79 bp, Homo sapiens
cgatacggacctccaccctagcctcaccatccctctgtctgaaatgtcagcatcaacagtcacttctctgaggtttctg

SEQ ID NO: 79332 - DNA, 79 bp, Homo sapiens
cctccaccctagcctcaccatccctctgtctgaaatgtcagcatcaacagtcacttctctgaggtttctgtttccaata

SEQ ID NO: 79333 - DNA, 79 bp, Homo sapiens
tagcctcaccatccctctgtctgaaatgtcagcatcaacagtcacttctctgaggtttctgtttccaatactacccgac

SEQ ID NO: 79334 - DNA, 77 bp, Homo sapiens
accatccctctgtctgaaatgtcagcatcaacagtcacttctctgaggtttctgtttccaatactacccgacttgaa

SEQ ID NO: 79335 - DNA, 75 bp, Homo sapiens
gtcagcatcaacagtcacttctctgaggtttctgtttccaatactacccgacttgaacggcaaacacctgctggg

SEQ ID NO: 79336 - DNA, 70 bp, Homo sapiens
aggtttctgtttccaatactacccgacttgaacggcaaacacctgctggggaggttaacagcctgagagc

SEQ ID NO: 79337 - DNA, 75 bp, Homo sapiens
atactacccgacttgaacggcaaacacctgctggggaggttaacagcctgagagctggccagtgcgttctggtga

SEQ ID NO: 79338 - DNA, 77 bp, Homo sapiens
acttgaacggcaaacacctgctggggaggttaacagcctgagagctggccagtgcgttctggtgagagggctgggca

SEQ ID NO: 79339 - DNA, 78 bp, Homo sapiens
aaacacctgctggggaggttaacagcctgagagctggccagtgcgttctggtgagagggctgggcagtgaggagacca

SEQ ID NO: 79340 - DNA, 83 bp, Homo sapiens
taacagcctgagagctggccagtgcgttctggtgagagggctgggcagtgaggagaccactccttacaggagctggagagcca

SEQ ID NO: 79341 - DNA, 79 bp, Homo sapiens
ctggccagtgcgttctggtgagagggctgggcagtgaggagaccactccttacaggagctggagagccagtggacccaa

SEQ ID NO: 79342 - DNA, 77 bp, Homo sapiens
agagggctgggcagtgaggagaccactccttacaggagctggagagccagtggacccaacctgtgaacctcagtgtc

SEQ ID NO: 79343 - DNA, 76 bp, Homo sapiens
cagtgaggagaccactccttacaggagctggagagccagtggacccaacctgtgaacctcagtgtcccacccagga

SEQ ID NO: 79344 - DNA, 73 bp, Homo sapiens
aggagaccactccttacaggagctggagagccagtggacccaacctgtgaacctcagtgtcccacccaggaaa

SEQ ID NO: 79345 - DNA, 78 bp, Homo sapiens
tccttacaggagctggagagccagtggacccaacctgtgaacctcagtgtcccacccaggaaagagcaataatgatgc

SEQ ID NO: 79346 - DNA, 76 bp, Homo sapiens
tggagagccagtggacccaacctgtgaacctcagtgtcccacccaggaaagagcaataatgatgccgtcccttctc

SEQ ID NO: 79347 - DNA, 73 bp, Homo sapiens
agtggacccaacctgtgaacctcagtgtcccacccaggaaagagcaataatgatgccgtcccttctccgcaag

SEQ ID NO: 79348 - DNA, 77 bp, Homo sapiens
aacctgtgaacctcagtgtcccacccaggaaagagcaataatgatgccgtcccttctccgcaaggcactgatgacca

SEQ ID NO: 79349 - DNA, 77 bp, Homo sapiens
acctcagtgtcccacccaggaaagagcaataatgatgccgtcccttctccgcaaggcactgatgaccacgaggtctc

SEQ ID NO: 79350 - DNA, 76 bp, Homo sapiens
ccaggaaagagcaataatgatgccgtcccttctccgcaaggcactgatgaccacgaggtctcccgcaacgaggaaa

SEQ ID NO: 79351 - DNA, 76 bp, Homo sapiens
aaagagcaataatgatgccgtcccttctccgcaaggcactgatgaccacgaggtctcccgcaacgaggaaattcag

SEQ ID NO: 79352 - DNA, 75 bp, Homo sapiens
aatgatgccgtcccttctccgcaaggcactgatgaccacgaggtctcccgcaacgaggaaattcaggaccttaca

SEQ ID NO: 79353 - DNA, 74 bp, Homo sapiens
aggcactgatgaccacgaggtctcccgcaacgaggaaattcaggaccttacagaaggtgggaggcaccctgata

SEQ ID NO: 79354 - DNA, 77 bp, Homo sapiens
ttacagaaggtgggaggcaccctgatactgagccgtgaagggccatgagatgctgaaagaggtggggaggagggcac

SEQ ID NO: 79355 - DNA, 78 bp, Homo sapiens
tgggaggcaccctgatactgagccgtgaagggccatgagatgctgaaagaggtggggaggagggcactggggccacca

SEQ ID NO: 79356 - DNA, 80 bp, Homo sapiens
tgaagggccatgagatgctgaaagaggtggggaggagggcactggggccaccaggcccatctcctaatgtggctgatgtg

SEQ ID NO: 79357 - DNA, 80 bp, Homo sapiens
atgagatgctgaaagaggtggggaggagggcactggggccaccaggcccatctcctaatgtggctgatgtggcaaagatg

SEQ ID NO: 79358 - DNA, 76 bp, Homo sapiens
aaagaggtggggaggagggcactggggccaccaggcccatctcctaatgtggctgatgtggcaaagatggtctcca

SEQ ID NO: 79359 - DNA, 81 bp, Homo sapiens
ggaggagggcactggggccaccaggcccatctcctaatgtggctgatgtggcaaagatggtctccacatctccctcctgca

SEQ ID NO: 79360 - DNA, 80 bp, Homo sapiens
actggggccaccaggcccatctcctaatgtggctgatgtggcaaagatggtctccacatctccctcctgcagggccgcac

SEQ ID NO: 79361 - DNA, 83 bp, Homo sapiens
accaggcccatctcctaatgtggctgatgtggcaaagatggtctccacatctccctcctgcagggccgcactctgcctccatc

SEQ ID NO: 79362 - DNA, 84 bp, Homo sapiens
aatgtggctgatgtggcaaagatggtctccacatctccctcctgcagggccgcactctgcctccatctcccgaggcagccacag

SEQ ID NO: 79363 - DNA, 81 bp, Homo sapiens
gcaaagatggtctccacatctccctcctgcagggccgcactctgcctccatctcccgaggcagccacagtcccatcacctt

SEQ ID NO: 79364 - DNA, 81 bp, Homo sapiens
tctccacatctccctcctgcagggccgcactctgcctccatctcccgaggcagccacagtcccatcacctttctgttctct

SEQ ID NO: 79365 - DNA, 79 bp, Homo sapiens
tctgcctccatctcccgaggcagccacagtcccatcacctttctgttctcttagaaaggagttcctcctgatggctgac

SEQ ID NO: 79366 - DNA, 75 bp, Homo sapiens
atctcccgaggcagccacagtcccatcacctttctgttctcttagaaaggagttcctcctgatggctgactttaa

SEQ ID NO: 79367 - DNA, 73 bp, Homo sapiens
cagccacagtcccatcacctttctgttctcttagaaaggagttcctcctgatggctgactttaaaagtcaaaa

SEQ ID NO: 79368 - DNA, 73 bp, Homo sapiens
ttctgttctcttagaaaggagttcctcctgatggctgactttaaaagtcaaaagacatggagacaaccaggta

SEQ ID NO: 79369 - DNA, 73 bp, Homo sapiens
ttagaaaggagttcctcctgatggctgactttaaaagtcaaaagacatggagacaaccaggtatagacacaaa

SEQ ID NO: 79370 - DNA, 73 bp, Homo sapiens
agttcctcctgatggctgactttaaaagtcaaaagacatggagacaaccaggtatagacacaaacacctagaa

SEQ ID NO: 79371 - DNA, 72 bp, Homo sapiens
tttaaaagtcaaaagacatggagacaaccaggtatagacacaaacacctagaaacaagcagtcagacaaaaa

SEQ ID NO: 79372 - DNA, 74 bp, Homo sapiens
aaaagacatggagacaaccaggtatagacacaaacacctagaaacaagcagtcagacaaaaattggtacatgga

SEQ ID NO: 79373 - DNA, 80 bp, Homo sapiens
agacaaccaggtatagacacaaacacctagaaacaagcagtcagacaaaaattggtacatggatgctcacagcaatatca

SEQ ID NO: 79374 - DNA, 79 bp, Homo sapiens
aggtatagacacaaacacctagaaacaagcagtcagacaaaaattggtacatggatgctcacagcaatatcattcgtaa

SEQ ID NO: 79375 - DNA, 77 bp, Homo sapiens
aaacacctagaaacaagcagtcagacaaaaattggtacatggatgctcacagcaatatcattcgtaatggccaaaaa

SEQ ID NO: 79376 - DNA, 78 bp, Homo sapiens
cctagaaacaagcagtcagacaaaaattggtacatggatgctcacagcaatatcattcgtaatggccaaaaagtagaa

SEQ ID NO: 79377 - DNA, 77 bp, Homo sapiens
agtcagacaaaaattggtacatggatgctcacagcaatatcattcgtaatggccaaaaagtagaaacaactcaaatc

SEQ ID NO: 79378 - DNA, 74 bp, Homo sapiens
aaaaattggtacatggatgctcacagcaatatcattcgtaatggccaaaaagtagaaacaactcaaatccccca

SEQ ID NO: 79379 - DNA, 80 bp, Homo sapiens
atggatgctcacagcaatatcattcgtaatggccaaaaagtagaaacaactcaaatcccccatcaacagatggatggata

SEQ ID NO: 79380 - DNA, 76 bp, Homo sapiens
agcaatatcattcgtaatggccaaaaagtagaaacaactcaaatcccccatcaacagatggatggatagtgtagta

SEQ ID NO: 79381 - DNA, 75 bp, Homo sapiens
attcgtaatggccaaaaagtagaaacaactcaaatcccccatcaacagatggatggatagtgtagtacagccata

SEQ ID NO: 79382 - DNA, 76 bp, Homo sapiens
aatggccaaaaagtagaaacaactcaaatcccccatcaacagatggatggatagtgtagtacagccatacaatgga

SEQ ID NO: 79383 - DNA, 84 bp, Homo sapiens
tattgtatgatttcatgcatatgaaatgcccagaatgggcagagccatagagacagaaacagatttgtcttttccagaggcctg

SEQ ID NO: 79384 - DNA, 83 bp, Homo sapiens
tatgatttcatgcatatgaaatgcccagaatgggcagagccatagagacagaaacagatttgtcttttccagaggcctgggga

SEQ ID NO: 79385 - DNA, 77 bp, Homo sapiens
tatgaaatgcccagaatgggcagagccatagagacagaaacagatttgtcttttccagaggcctggggaggggagaa

SEQ ID NO: 79386 - DNA, 75 bp, Homo sapiens
cagaatgggcagagccatagagacagaaacagatttgtcttttccagaggcctggggaggggagaatgggtacac

SEQ ID NO: 79387 - DNA, 71 bp, Homo sapiens
agagccatagagacagaaacagatttgtcttttccagaggcctggggaggggagaatgggtacacgttttc

SEQ ID NO: 79388 - DNA, 67 bp, Homo sapiens
agacagaaacagatttgtcttttccagaggcctggggaggggagaatgggtacacgttttccctttg

SEQ ID NO: 79389 - DNA, 66 bp, Homo sapiens
agatttgtcttttccagaggcctggggaggggagaatgggtacacgttttccctttggggtaatga

SEQ ID NO: 79390 - DNA, 67 bp, Homo sapiens
tcttttccagaggcctggggaggggagaatgggtacacgttttccctttggggtaatgacactgttc

SEQ ID NO: 79391 - DNA, 66 bp, Homo sapiens
cctggggaggggagaatgggtacacgttttccctttggggtaatgacactgttccggaactggatc

SEQ ID NO: 79392 - DNA, 67 bp, Homo sapiens
ggagaatgggtacacgttttccctttggggtaatgacactgttccggaactggatcgtggtaatggt

SEQ ID NO: 79393 - DNA, 73 bp, Homo sapiens
tacacgttttccctttggggtaatgacactgttccggaactggatcgtggtaatggttgcacaatatcatgaa

SEQ ID NO: 79394 - DNA, 74 bp, Homo sapiens
ttttccctttggggtaatgacactgttccggaactggatcgtggtaatggttgcacaatatcatgaatacataa

SEQ ID NO: 79395 - DNA, 81 bp, Homo sapiens
taatgacactgttccggaactggatcgtggtaatggttgcacaatatcatgaatacataaatatatcactgatggtaaata

SEQ ID NO: 79396 - DNA, 77 bp, Homo sapiens
actgttccggaactggatcgtggtaatggttgcacaatatcatgaatacataaatatatcactgatggtaaatattt

SEQ ID NO: 79397 - DNA, 81 bp, Homo sapiens
ggaactggatcgtggtaatggttgcacaatatcatgaatacataaatatatcactgatggtaaatattttgtcatgtgtat

SEQ ID NO: 79398 - DNA, 81 bp, Homo sapiens
cgtggtaatggttgcacaatatcatgaatacataaatatatcactgatggtaaatattttgtcatgtgtattgtaccacaa

SEQ ID NO: 79399 - DNA, 79 bp, Homo sapiens
gttgcacaatatcatgaatacataaatatatcactgatggtaaatattttgtcatgtgtattgtaccacaattaaaaaa

SEQ ID NO: 79400 - DNA, 65 bp, Homo sapiens
aaaataaaaaaacttttttctgccttctgcgaaggcagaagttagaccttcctaccttcaagtct

SEQ ID NO: 79401 - DNA, 67 bp, Homo sapiens
aaaaacttttttctgccttctgcgaaggcagaagttagaccttcctaccttcaagtcttcacttaag

SEQ ID NO: 79402 - DNA, 73 bp, Homo sapiens
ttttctgccttctgcgaaggcagaagttagaccttcctaccttcaagtcttcacttaagggccaacagcacca

SEQ ID NO: 79403 - DNA, 75 bp, Homo sapiens
tctgcgaaggcagaagttagaccttcctaccttcaagtcttcacttaagggccaacagcaccagcattacctcac

SEQ ID NO: 79404 - DNA, 73 bp, Homo sapiens
cagaagttagaccttcctaccttcaagtcttcacttaagggccaacagcaccagcattacctcacccttcatg

SEQ ID NO: 79405 - DNA, 72 bp, Homo sapiens
agaagttagaccttcctaccttcaagtcttcacttaagggccaacagcaccagcattacctcacccttcatg

SEQ ID NO: 79406 - DNA, 75 bp, Homo sapiens
ttagaccttcctaccttcaagtcttcacttaagggccaacagcaccagcattacctcacccttcatggccacaga

SEQ ID NO: 79407 - DNA, 73 bp, Homo sapiens
accttcctaccttcaagtcttcacttaagggccaacagcaccagcattacctcacccttcatggccacagagg

SEQ ID NO: 79408 - DNA, 75 bp, Homo sapiens
cctaccttcaagtcttcacttaagggccaacagcaccagcattacctcacccttcatggccacagaggggcaaga

SEQ ID NO: 79409 - DNA, 77 bp, Homo sapiens
cttcaagtcttcacttaagggccaacagcaccagcattacctcacccttcatggccacagaggggcaagagcagccg

SEQ ID NO: 79410 - DNA, 76 bp, Homo sapiens
agtcttcacttaagggccaacagcaccagcattacctcacccttcatggccacagaggggcaagagcagccggccc

SEQ ID NO: 79411 - DNA, 79 bp, Homo sapiens
taagggccaacagcaccagcattacctcacccttcatggccacagaggggcaagagcagccggcccccaggcatccaga

SEQ ID NO: 79412 - DNA, 81 bp, Homo sapiens
accagcattacctcacccttcatggccacagaggggcaagagcagccggcccccaggcatccagaggacacagtgtgcata

SEQ ID NO: 79413 - DNA, 79 bp, Homo sapiens
attacctcacccttcatggccacagaggggcaagagcagccggcccccaggcatccagaggacacagtgtgcataacca

SEQ ID NO: 79414 - DNA, 77 bp, Homo sapiens
aggggcaagagcagccggcccccaggcatccagaggacacagtgtgcataaccacccaataattaaggtctctctca

SEQ ID NO: 79415 - DNA, 74 bp, Homo sapiens
cagaggacacagtgtgcataaccacccaataattaaggtctctctcaatcttattcttctaattagtttccttc

SEQ ID NO: 79416 - DNA, 71 bp, Homo sapiens
acagtgtgcataaccacccaataattaaggtctctctcaatcttattcttctaattagtttccttccaagt

SEQ ID NO: 79417 - DNA, 69 bp, Homo sapiens
gtctctctcaatcttattcttctaattagtttccttccaagttaaatccttcccttctcttccttagtc

SEQ ID NO: 79418 - DNA, 67 bp, Homo sapiens
tcttattcttctaattagtttccttccaagttaaatccttcccttctcttccttagtcctgtggctt

SEQ ID NO: 79419 - DNA, 66 bp, Homo sapiens
taattagtttccttccaagttaaatccttcccttctcttccttagtcctgtggctttttcccttca

SEQ ID NO: 79420 - DNA, 66 bp, Homo sapiens
gtttccttccaagttaaatccttcccttctcttccttagtcctgtggctttttcccttcaattctg

SEQ ID NO: 79421 - DNA, 68 bp, Homo sapiens
aagttaaatccttcccttctcttccttagtcctgtggctttttcccttcaattctgtcagcactttcc

SEQ ID NO: 79422 - DNA, 71 bp, Homo sapiens
cttctcttccttagtcctgtggctttttcccttcaattctgtcagcactttcccgtgggaactgtactgga

SEQ ID NO: 79423 - DNA, 72 bp, Homo sapiens
cttccttagtcctgtggctttttcccttcaattctgtcagcactttcccgtgggaactgtactggaagcaga

SEQ ID NO: 79424 - DNA, 74 bp, Homo sapiens
tgtggctttttcccttcaattctgtcagcactttcccgtgggaactgtactggaagcagaggtgacacaggccc

SEQ ID NO: 79425 - DNA, 68 bp, Homo sapiens
actttcccgtgggaactgtactggaagcagaggtgacacaggcccgggggctggggacagaccccacc

SEQ ID NO: 79426 - DNA, 72 bp, Homo sapiens
aactgtactggaagcagaggtgacacaggcccgggggctggggacagaccccacctggaaggaacaagatca

SEQ ID NO: 79427 - DNA, 73 bp, Homo sapiens
aagcagaggtgacacaggcccgggggctggggacagaccccacctggaaggaacaagatcagaggtagcagga

SEQ ID NO: 79428 - DNA, 71 bp, Homo sapiens
aggtgacacaggcccgggggctggggacagaccccacctggaaggaacaagatcagaggtagcaggatttg

SEQ ID NO: 79429 - DNA, 68 bp, Homo sapiens
aggcccgggggctggggacagaccccacctggaaggaacaagatcagaggtagcaggatttggggtgg

SEQ ID NO: 79430 - DNA, 68 bp, Homo sapiens
ggacagaccccacctggaaggaacaagatcagaggtagcaggatttggggtgggggaaaacgaaggaa

SEQ ID NO: 79431 - DNA, 68 bp, Homo sapiens
cacctggaaggaacaagatcagaggtagcaggatttggggtgggggaaaacgaaggaagttctttcta

SEQ ID NO: 79432 - DNA, 64 bp, Homo sapiens
aggatttggggtgggggaaaacgaaggaagttctttctaactcagaaattctttacctaataca

SEQ ID NO: 79433 - DNA, 67 bp, Homo sapiens
gaaaacgaaggaagttctttctaactcagaaattctttacctaatacagggtgtctttgtgggaata

SEQ ID NO: 79434 - DNA, 67 bp, Homo sapiens
agttctttctaactcagaaattctttacctaatacagggtgtctttgtgggaataataaaacgcggc

SEQ ID NO: 79435 - DNA, 69 bp, Homo sapiens
taactcagaaattctttacctaatacagggtgtctttgtgggaataataaaacgcggcctcttcctctg

SEQ ID NO: 79436 - DNA, 67 bp, Homo sapiens
aattctttacctaatacagggtgtctttgtgggaataataaaacgcggcctcttcctctggaaggga

SEQ ID NO: 79437 - DNA, 70 bp, Homo sapiens
taatacagggtgtctttgtgggaataataaaacgcggcctcttcctctggaagggaccatcccttggcca

SEQ ID NO: 79438 - DNA, 73 bp, Homo sapiens
tgtctttgtgggaataataaaacgcggcctcttcctctggaagggaccatcccttggccagattgcaaggaca

SEQ ID NO: 79439 - DNA, 72 bp, Homo sapiens
aataataaaacgcggcctcttcctctggaagggaccatcccttggccagattgcaaggacaggcttcagtcc

SEQ ID NO: 79440 - DNA, 74 bp, Homo sapiens
aaacgcggcctcttcctctggaagggaccatcccttggccagattgcaaggacaggcttcagtccctctccatc

SEQ ID NO: 79441 - DNA, 76 bp, Homo sapiens
ggaccatcccttggccagattgcaaggacaggcttcagtccctctccatccaccctcacctgggcctccttgttca

SEQ ID NO: 79442 - DNA, 76 bp, Homo sapiens
ccttggccagattgcaaggacaggcttcagtccctctccatccaccctcacctgggcctccttgttcagtaggcaa

SEQ ID NO: 79443 - DNA, 80 bp, Homo sapiens
tgcaaggacaggcttcagtccctctccatccaccctcacctgggcctccttgttcagtaggcaacctgctcaatgatata

SEQ ID NO: 79444 - DNA, 78 bp, Homo sapiens
aggcttcagtccctctccatccaccctcacctgggcctccttgttcagtaggcaacctgctcaatgatatatatggaa

SEQ ID NO: 79445 - DNA, 79 bp, Homo sapiens
ctctccatccaccctcacctgggcctccttgttcagtaggcaacctgctcaatgatatatatggaaagagcatccttta

SEQ ID NO: 79446 - DNA, 77 bp, Homo sapiens
acctgggcctccttgttcagtaggcaacctgctcaatgatatatatggaaagagcatcctttaagaatctgaggaag

SEQ ID NO: 79447 - DNA, 82 bp, Homo sapiens
ttgttcagtaggcaacctgctcaatgatatatatggaaagagcatcctttaagaatctgaggaaggctatggatcttctgtc

SEQ ID NO: 79448 - DNA, 78 bp, Homo sapiens
caacctgctcaatgatatatatggaaagagcatcctttaagaatctgaggaaggctatggatcttctgtcccctaaaa

SEQ ID NO: 79449 - DNA, 78 bp, Homo sapiens
atatatggaaagagcatcctttaagaatctgaggaaggctatggatcttctgtcccctaaaatgggtgcacatacaca

SEQ ID NO: 79450 - DNA, 74 bp, Homo sapiens
acatacacacacacgctatttcataagtaatatcaggaggtttctacactacttcagaaccctactctagaaag

SEQ ID NO: 79451 - DNA, 73 bp, Homo sapiens
acacacgctatttcataagtaatatcaggaggtttctacactacttcagaaccctactctagaaaggactcga

SEQ ID NO: 79452 - DNA, 74 bp, Homo sapiens
tttcataagtaatatcaggaggtttctacactacttcagaaccctactctagaaaggactcgagaaatatctga

SEQ ID NO: 79453 - DNA, 73 bp, Homo sapiens
agtaatatcaggaggtttctacactacttcagaaccctactctagaaaggactcgagaaatatctgagcccag

SEQ ID NO: 79454 - DNA, 73 bp, Homo sapiens
aggtttctacactacttcagaaccctactctagaaaggactcgagaaatatctgagcccaggtccatctgtac

SEQ ID NO: 79455 - DNA, 76 bp, Homo sapiens
tacttcagaaccctactctagaaaggactcgagaaatatctgagcccaggtccatctgtacccatcgataatgact

SEQ ID NO: 79456 - DNA, 73 bp, Homo sapiens
aaccctactctagaaaggactcgagaaatatctgagcccaggtccatctgtacccatcgataatgacttttta

SEQ ID NO: 79457 - DNA, 74 bp, Homo sapiens
aaaggactcgagaaatatctgagcccaggtccatctgtacccatcgataatgactttttaccagtcaccaaata

SEQ ID NO: 79458 - DNA, 82 bp, Homo sapiens
tatctgagcccaggtccatctgtacccatcgataatgactttttaccagtcaccaaatatctataatgcatgccagactgga

SEQ ID NO: 79459 - DNA, 80 bp, Homo sapiens
tccatctgtacccatcgataatgactttttaccagtcaccaaatatctataatgcatgccagactggactgggtgcttta

SEQ ID NO: 79460 - DNA, 79 bp, Homo sapiens
ataatgactttttaccagtcaccaaatatctataatgcatgccagactggactgggtgctttagacaatcagctactcg

SEQ ID NO: 79461 - DNA, 81 bp, Homo sapiens
ttttaccagtcaccaaatatctataatgcatgccagactggactgggtgctttagacaatcagctactcgtcacaacaagc

SEQ ID NO: 79462 - DNA, 85 bp, Homo sapiens
aatatctataatgcatgccagactggactgggtgctttagacaatcagctactcgtcacaacaagcctgcctcatagatggcatt

SEQ ID NO: 79463 - DNA, 85 bp, Homo sapiens
tataatgcatgccagactggactgggtgctttagacaatcagctactcgtcacaacaagcctgcctcatagatggcatttatccc

SEQ ID NO: 79464 - DNA, 79 bp, Homo sapiens
gactggactgggtgctttagacaatcagctactcgtcacaacaagcctgcctcatagatggcatttatccccgctttaa

SEQ ID NO: 79465 - DNA, 78 bp, Homo sapiens
gactgggtgctttagacaatcagctactcgtcacaacaagcctgcctcatagatggcatttatccccgctttaaaaca

SEQ ID NO: 79466 - DNA, 77 bp, Homo sapiens
ctgggtgctttagacaatcagctactcgtcacaacaagcctgcctcatagatggcatttatccccgctttaaaacaa

SEQ ID NO: 79467 - DNA, 80 bp, Homo sapiens
tttagacaatcagctactcgtcacaacaagcctgcctcatagatggcatttatccccgctttaaaacaaggcatctgaga

SEQ ID NO: 79468 - DNA, 81 bp, Homo sapiens
acaatcagctactcgtcacaacaagcctgcctcatagatggcatttatccccgctttaaaacaaggcatctgagacgcaga

SEQ ID NO: 79469 - DNA, 79 bp, Homo sapiens
tactcgtcacaacaagcctgcctcatagatggcatttatccccgctttaaaacaaggcatctgagacgcagagagttta

SEQ ID NO: 79470 - DNA, 78 bp, Homo sapiens
gtcacaacaagcctgcctcatagatggcatttatccccgctttaaaacaaggcatctgagacgcagagagtttaataa

SEQ ID NO: 79471 - DNA, 75 bp, Homo sapiens
aacaagcctgcctcatagatggcatttatccccgctttaaaacaaggcatctgagacgcagagagtttaataact

SEQ ID NO: 79472 - DNA, 77 bp, Homo sapiens
acaagcctgcctcatagatggcatttatccccgctttaaaacaaggcatctgagacgcagagagtttaataacttgc

SEQ ID NO: 79473 - DNA, 76 bp, Homo sapiens
atagatggcatttatccccgctttaaaacaaggcatctgagacgcagagagtttaataacttgcccagtgtggcac

SEQ ID NO: 79474 - DNA, 72 bp, Homo sapiens
tttaaaacaaggcatctgagacgcagagagtttaataacttgcccagtgtggcacggttaatggtaaaaaca

SEQ ID NO: 79475 - DNA, 73 bp, Homo sapiens
gcatctgagacgcagagagtttaataacttgcccagtgtggcacggttaatggtaaaaacaaactgcttaaaa

SEQ ID NO: 79476 - DNA, 69 bp, Homo sapiens
agacgcagagagtttaataacttgcccagtgtggcacggttaatggtaaaaacaaactgcttaaaaata

SEQ ID NO: 79477 - DNA, 70 bp, Homo sapiens
agtttaataacttgcccagtgtggcacggttaatggtaaaaacaaactgcttaaaaatatcagctggcga

SEQ ID NO: 79478 - DNA, 76 bp, Homo sapiens
aacttgcccagtgtggcacggttaatggtaaaaacaaactgcttaaaaatatcagctggcgagatgcagtgactca

SEQ ID NO: 79479 - DNA, 70 bp, Homo sapiens
ttaattaattaaaataatagctttgttctagagacttctatccagttaccttaaagttgggccacatctc

SEQ ID NO: 79480 - DNA, 70 bp, Homo sapiens
aattaaaataatagctttgttctagagacttctatccagttaccttaaagttgggccacatctctcccca

SEQ ID NO: 79481 - DNA, 72 bp, Homo sapiens
aatagctttgttctagagacttctatccagttaccttaaagttgggccacatctctccccagctacacctac

SEQ ID NO: 79482 - DNA, 75 bp, Homo sapiens
ttctagagacttctatccagttaccttaaagttgggccacatctctccccagctacacctactcagctccatttc

SEQ ID NO: 79483 - DNA, 76 bp, Homo sapiens
ttctatccagttaccttaaagttgggccacatctctccccagctacacctactcagctccatttcctcactgagac

SEQ ID NO: 79484 - DNA, 76 bp, Homo sapiens
ttaccttaaagttgggccacatctctccccagctacacctactcagctccatttcctcactgagaccacctgacac

SEQ ID NO: 79485 - DNA, 78 bp, Homo sapiens
gttgggccacatctctccccagctacacctactcagctccatttcctcactgagaccacctgacaccccagctccttc

SEQ ID NO: 79486 - DNA, 76 bp, Homo sapiens
atctctccccagctacacctactcagctccatttcctcactgagaccacctgacaccccagctccttcccaaggag

SEQ ID NO: 79487 - DNA, 77 bp, Homo sapiens
ctacacctactcagctccatttcctcactgagaccacctgacaccccagctccttcccaaggaggatgacaactcaa

SEQ ID NO: 79488 - DNA, 77 bp, Homo sapiens
agctccatttcctcactgagaccacctgacaccccagctccttcccaaggaggatgacaactcaagcctgatcctcc

SEQ ID NO: 79489 - DNA, 77 bp, Homo sapiens
atttcctcactgagaccacctgacaccccagctccttcccaaggaggatgacaactcaagcctgatcctcctgtctc

SEQ ID NO: 79490 - DNA, 76 bp, Homo sapiens
actgagaccacctgacaccccagctccttcccaaggaggatgacaactcaagcctgatcctcctgtctcccagtcc

SEQ ID NO: 79491 - DNA, 74 bp, Homo sapiens
accacctgacaccccagctccttcccaaggaggatgacaactcaagcctgatcctcctgtctcccagtccccaa

SEQ ID NO: 79492 - DNA, 80 bp, Homo sapiens
tgacaccccagctccttcccaaggaggatgacaactcaagcctgatcctcctgtctcccagtccccaagtgagcatatga

SEQ ID NO: 79493 - DNA, 78 bp, Homo sapiens
accccagctccttcccaaggaggatgacaactcaagcctgatcctcctgtctcccagtccccaagtgagcatatgatg

SEQ ID NO: 79494 - DNA, 80 bp, Homo sapiens
agctccttcccaaggaggatgacaactcaagcctgatcctcctgtctcccagtccccaagtgagcatatgatgtgcaaaa

SEQ ID NO: 79495 - DNA, 81 bp, Homo sapiens
ttcccaaggaggatgacaactcaagcctgatcctcctgtctcccagtccccaagtgagcatatgatgtgcaaaaatatcac

SEQ ID NO: 79496 - DNA, 80 bp, Homo sapiens
aaggaggatgacaactcaagcctgatcctcctgtctcccagtccccaagtgagcatatgatgtgcaaaaatatcaccgcc

SEQ ID NO: 79497 - DNA, 81 bp, Homo sapiens
atgacaactcaagcctgatcctcctgtctcccagtccccaagtgagcatatgatgtgcaaaaatatcaccgcccgcgtcca

SEQ ID NO: 79498 - DNA, 79 bp, Homo sapiens
acaactcaagcctgatcctcctgtctcccagtccccaagtgagcatatgatgtgcaaaaatatcaccgcccgcgtccag

SEQ ID NO: 79499 - DNA, 79 bp, Homo sapiens
aagcctgatcctcctgtctcccagtccccaagtgagcatatgatgtgcaaaaatatcaccgcccgcgtccaggccgtca

SEQ ID NO: 79500 - DNA, 77 bp, Homo sapiens
tcctgtctcccagtccccaagtgagcatatgatgtgcaaaaatatcaccgcccgcgtccaggccgtcacgttcccta

SEQ ID NO: 79501 - DNA, 77 bp, Homo sapiens
aagtgagcatatgatgtgcaaaaatatcaccgcccgcgtccaggccgtcacgttccctagctgtaggctgacttcct

SEQ ID NO: 79502 - DNA, 76 bp, Homo sapiens
tatgatgtgcaaaaatatcaccgcccgcgtccaggccgtcacgttccctagctgtaggctgacttccttgtctctt

SEQ ID NO: 79503 - DNA, 70 bp, Homo sapiens
aaaaatatcaccgcccgcgtccaggccgtcacgttccctagctgtaggctgacttccttgtctctttatt

SEQ ID NO: 79504 - DNA, 68 bp, Homo sapiens
ccgcccgcgtccaggccgtcacgttccctagctgtaggctgacttccttgtctctttatttaaaaaaa

SEQ ID NO: 79505 - DNA, 67 bp, Homo sapiens
aggccgtcacgttccctagctgtaggctgacttccttgtctctttatttaaaaaaacaacgcaaccc

SEQ ID NO: 79506 - DNA, 65 bp, Homo sapiens
ttccctagctgtaggctgacttccttgtctctttatttaaaaaaacaacgcaacccccaaaattt

SEQ ID NO: 79507 - DNA, 63 bp, Homo sapiens
gtaggctgacttccttgtctctttatttaaaaaaacaacgcaacccccaaaattttcccctta

SEQ ID NO: 79508 - DNA, 63 bp, Homo sapiens
tccttgtctctttatttaaaaaaacaacgcaacccccaaaattttccccttaatggtggctac

SEQ ID NO: 79509 - DNA, 63 bp, Homo sapiens
ttatttaaaaaaacaacgcaacccccaaaattttccccttaatggtggctactgattcctcct

SEQ ID NO: 79510 - DNA, 62 bp, Homo sapiens
aaaaacaacgcaacccccaaaattttccccttaatggtggctactgattcctcctttaaaaa

SEQ ID NO: 79511 - DNA, 71 bp, Homo sapiens
aaaaaaaaagcaggcaagcaaagtcacccagagattacagagatcaaaaacaaatccccccacagcagtgt

SEQ ID NO: 79512 - DNA, 73 bp, Homo sapiens
aaaagcaggcaagcaaagtcacccagagattacagagatcaaaaacaaatccccccacagcagtgtttttcaa

SEQ ID NO: 79513 - DNA, 71 bp, Homo sapiens
agagattacagagatcaaaaacaaatccccccacagcagtgtttttcaaagtatggtcaccgtgggccacc

SEQ ID NO: 79514 - DNA, 72 bp, Homo sapiens
agagatcaaaaacaaatccccccacagcagtgtttttcaaagtatggtcaccgtgggccaccccagcagtca

SEQ ID NO: 79515 - DNA, 78 bp, Homo sapiens
cacagcagtgtttttcaaagtatggtcaccgtgggccaccccagcagtcacctgggatgtgagttcaagtgcacactc

SEQ ID NO: 79516 - DNA, 75 bp, Homo sapiens
agtgtttttcaaagtatggtcaccgtgggccaccccagcagtcacctgggatgtgagttcaagtgcacactctgg

SEQ ID NO: 79517 - DNA, 77 bp, Homo sapiens
aaagtatggtcaccgtgggccaccccagcagtcacctgggatgtgagttcaagtgcacactctggggcctgactcaa

SEQ ID NO: 79518 - DNA, 80 bp, Homo sapiens
accgtgggccaccccagcagtcacctgggatgtgagttcaagtgcacactctggggcctgactcaatctccagagcagcc

SEQ ID NO: 79519 - DNA, 86 bp, Homo sapiens
ccagcagtcacctgggatgtgagttcaagtgcacactctggggcctgactcaatctccagagcagcctgggaggctgcatttgtca

SEQ ID NO: 79520 - DNA, 85 bp, Homo sapiens
acctgggatgtgagttcaagtgcacactctggggcctgactcaatctccagagcagcctgggaggctgcatttgtcacagtgatc

SEQ ID NO: 79521 - DNA, 86 bp, Homo sapiens
atgtgagttcaagtgcacactctggggcctgactcaatctccagagcagcctgggaggctgcatttgtcacagtgatcctgggtga

SEQ ID NO: 79522 - DNA, 84 bp, Homo sapiens
gggcctgactcaatctccagagcagcctgggaggctgcatttgtcacagtgatcctgggtgagtcctgtgctctaaagccactc

SEQ ID NO: 79523 - DNA, 86 bp, Homo sapiens
tcaatctccagagcagcctgggaggctgcatttgtcacagtgatcctgggtgagtcctgtgctctaaagccactccgttgcagcat

SEQ ID NO: 79524 - DNA, 85 bp, Homo sapiens
agagcagcctgggaggctgcatttgtcacagtgatcctgggtgagtcctgtgctctaaagccactccgttgcagcattagaggca

SEQ ID NO: 79525 - DNA, 85 bp, Homo sapiens
gaggctgcatttgtcacagtgatcctgggtgagtcctgtgctctaaagccactccgttgcagcattagaggcagcaactgagaaa

SEQ ID NO: 79526 - DNA, 80 bp, Homo sapiens
atttgtcacagtgatcctgggtgagtcctgtgctctaaagccactccgttgcagcattagaggcagcaactgagaaaaaa

SEQ ID NO: 79527 - DNA, 82 bp, Homo sapiens
tgatcctgggtgagtcctgtgctctaaagccactccgttgcagcattagaggcagcaactgagaaaaaacatcacttctgaa

SEQ ID NO: 79528 - DNA, 80 bp, Homo sapiens
gtgagtcctgtgctctaaagccactccgttgcagcattagaggcagcaactgagaaaaaacatcacttctgaaatgaaaa

SEQ ID NO: 79529 - DNA, 81 bp, Homo sapiens
ctctaaagccactccgttgcagcattagaggcagcaactgagaaaaaacatcacttctgaaatgaaaactgagatcataga

SEQ ID NO: 79530 - DNA, 82 bp, Homo sapiens
ttgcagcattagaggcagcaactgagaaaaaacatcacttctgaaatgaaaactgagatcatagaatttttataagcatgat

SEQ ID NO: 79531 - DNA, 79 bp, Homo sapiens
tagaggcagcaactgagaaaaaacatcacttctgaaatgaaaactgagatcatagaatttttataagcatgatttgtaa

SEQ ID NO: 79532 - DNA, 78 bp, Homo sapiens
atcacttctgaaatgaaaactgagatcatagaatttttataagcatgatttgtaaaaagacagtgttgggctgcacag

SEQ ID NO: 79533 - DNA, 76 bp, Homo sapiens
aaactgagatcatagaatttttataagcatgatttgtaaaaagacagtgttgggctgcacagtgacttattaaaga

SEQ ID NO: 79534 - DNA, 76 bp, Homo sapiens
ttataagcatgatttgtaaaaagacagtgttgggctgcacagtgacttattaaagaaaaagattctgttccattgc

SEQ ID NO: 79535 - DNA, 71 bp, Homo sapiens
atttgtaaaaagacagtgttgggctgcacagtgacttattaaagaaaaagattctgttccattgccccaaa

SEQ ID NO: 79536 - DNA, 70 bp, Homo sapiens
agtgttgggctgcacagtgacttattaaagaaaaagattctgttccattgccccaaacccttcaaataaa

SEQ ID NO: 79537 - DNA, 70 bp, Homo sapiens
ggctgcacagtgacttattaaagaaaaagattctgttccattgccccaaacccttcaaataaactattta

SEQ ID NO: 79538 - DNA, 65 bp, Homo sapiens
cttattaaagaaaaagattctgttccattgccccaaacccttcaaataaactatttaacagacgg

SEQ ID NO: 79539 - DNA, 65 bp, Homo sapiens
aagaaaaagattctgttccattgccccaaacccttcaaataaactatttaacagacggtggaggt

SEQ ID NO: 79540 - DNA, 71 bp, Homo sapiens
attctgttccattgccccaaacccttcaaataaactatttaacagacggtggaggttgtctctgcagcctc

SEQ ID NO: 79541 - DNA, 72 bp, Homo sapiens
attgccccaaacccttcaaataaactatttaacagacggtggaggttgtctctgcagcctccaggcagtaca

SEQ ID NO: 79542 - DNA, 73 bp, Homo sapiens
aacccttcaaataaactatttaacagacggtggaggttgtctctgcagcctccaggcagtacagaccctgcta

SEQ ID NO: 79543 - DNA, 75 bp, Homo sapiens
ataaactatttaacagacggtggaggttgtctctgcagcctccaggcagtacagaccctgctactccgctcccta

SEQ ID NO: 79544 - DNA, 77 bp, Homo sapiens
taacagacggtggaggttgtctctgcagcctccaggcagtacagaccctgctactccgctccctaccgctcccacca

SEQ ID NO: 79545 - DNA, 81 bp, Homo sapiens
gttgtctctgcagcctccaggcagtacagaccctgctactccgctccctaccgctcccaccatgcttcaagctcaagttca

SEQ ID NO: 79546 - DNA, 76 bp, Homo sapiens
cagcctccaggcagtacagaccctgctactccgctccctaccgctcccaccatgcttcaagctcaagttcaacccg

SEQ ID NO: 79547 - DNA, 76 bp, Homo sapiens
aggcagtacagaccctgctactccgctccctaccgctcccaccatgcttcaagctcaagttcaacccggatgccac

SEQ ID NO: 79548 - DNA, 75 bp, Homo sapiens
acagaccctgctactccgctccctaccgctcccaccatgcttcaagctcaagttcaacccggatgccacctccac

SEQ ID NO: 79549 - DNA, 73 bp, Homo sapiens
ctactccgctccctaccgctcccaccatgcttcaagctcaagttcaacccggatgccacctccacctccggga

SEQ ID NO: 79550 - DNA, 72 bp, Homo sapiens
ccctaccgctcccaccatgcttcaagctcaagttcaacccggatgccacctccacctccgggactctctccc

SEQ ID NO: 79551 - DNA, 69 bp, Homo sapiens
agttcaacccggatgccacctccacctccgggactctctccccctccggaggtttctgagaacacctga

SEQ ID NO: 79552 - DNA, 68 bp, Homo sapiens
ccacctccacctccgggactctctccccctccggaggtttctgagaacacctgactcttaccttatcc

SEQ ID NO: 79553 - DNA, 67 bp, Homo sapiens
acctccgggactctctccccctccggaggtttctgagaacacctgactcttaccttatcctaaagcc

SEQ ID NO: 79554 - DNA, 71 bp, Homo sapiens
tctctccccctccggaggtttctgagaacacctgactcttaccttatcctaaagccgtgagcaaacgctac

SEQ ID NO: 79555 - DNA, 73 bp, Homo sapiens
tttctgagaacacctgactcttaccttatcctaaagccgtgagcaaacgctactcgctggtgttaatgggtgg

SEQ ID NO: 79556 - DNA, 73 bp, Homo sapiens
aacacctgactcttaccttatcctaaagccgtgagcaaacgctactcgctggtgttaatgggtggtcgtcaga

SEQ ID NO: 79557 - DNA, 75 bp, Homo sapiens
ttaccttatcctaaagccgtgagcaaacgctactcgctggtgttaatgggtggtcgtcagacactcgctttagca

SEQ ID NO: 79558 - DNA, 79 bp, Homo sapiens
tcctaaagccgtgagcaaacgctactcgctggtgttaatgggtggtcgtcagacactcgctttagcagccagatcagac

SEQ ID NO: 79559 - DNA, 75 bp, Homo sapiens
agcaaacgctactcgctggtgttaatgggtggtcgtcagacactcgctttagcagccagatcagacggttttaag

SEQ ID NO: 79560 - DNA, 75 bp, Homo sapiens
ctactcgctggtgttaatgggtggtcgtcagacactcgctttagcagccagatcagacggttttaaggtctccca

SEQ ID NO: 79561 - DNA, 76 bp, Homo sapiens
ggtgttaatgggtggtcgtcagacactcgctttagcagccagatcagacggttttaaggtctcccactctgcatcc

SEQ ID NO: 79562 - DNA, 78 bp, Homo sapiens
tggtcgtcagacactcgctttagcagccagatcagacggttttaaggtctcccactctgcatcctctcacaccccaaa

SEQ ID NO: 79563 - DNA, 75 bp, Homo sapiens
acactcgctttagcagccagatcagacggttttaaggtctcccactctgcatcctctcacaccccaaacccagaa

SEQ ID NO: 79564 - DNA, 76 bp, Homo sapiens
tttagcagccagatcagacggttttaaggtctcccactctgcatcctctcacaccccaaacccagaagcaatagga

SEQ ID NO: 79565 - DNA, 72 bp, Homo sapiens
agacggttttaaggtctcccactctgcatcctctcacaccccaaacccagaagcaataggagctctaaagaa

SEQ ID NO: 79566 - DNA, 76 bp, Homo sapiens
ctcccactctgcatcctctcacaccccaaacccagaagcaataggagctctaaagaaaagcatatccacagggccc

SEQ ID NO: 79567 - DNA, 72 bp, Homo sapiens
aagcaataggagctctaaagaaaagcatatccacagggccccacacccccactccccccacacccagatcta

SEQ ID NO: 79568 - DNA, 73 bp, Homo sapiens
ataggagctctaaagaaaagcatatccacagggccccacacccccactccccccacacccagatctatatata

SEQ ID NO: 79569 - DNA, 74 bp, Homo sapiens
taaagaaaagcatatccacagggccccacacccccactccccccacacccagatctatatataacagctctgaa

SEQ ID NO: 79570 - DNA, 75 bp, Homo sapiens
tatccacagggccccacacccccactccccccacacccagatctatatataacagctctgaagttgtcagcctaa

SEQ ID NO: 79571 - DNA, 74 bp, Homo sapiens
ccacacccccactccccccacacccagatctatatataacagctctgaagttgtcagcctaacgagccactttc

SEQ ID NO: 79572 - DNA, 75 bp, Homo sapiens
actccccccacacccagatctatatataacagctctgaagttgtcagcctaacgagccactttctggcagacccg

SEQ ID NO: 79573 - DNA, 81 bp, Homo sapiens
cacccagatctatatataacagctctgaagttgtcagcctaacgagccactttctggcagacccgttgctatggcaatgct

SEQ ID NO: 79574 - DNA, 83 bp, Homo sapiens
atctatatataacagctctgaagttgtcagcctaacgagccactttctggcagacccgttgctatggcaatgcttgctaatga

SEQ ID NO: 79575 - DNA, 81 bp, Homo sapiens
ataacagctctgaagttgtcagcctaacgagccactttctggcagacccgttgctatggcaatgcttgctaatgagcccag

SEQ ID NO: 79576 - DNA, 80 bp, Homo sapiens
aagttgtcagcctaacgagccactttctggcagacccgttgctatggcaatgcttgctaatgagcccagtgccgtgattg

SEQ ID NO: 79577 - DNA, 82 bp, Homo sapiens
cctaacgagccactttctggcagacccgttgctatggcaatgcttgctaatgagcccagtgccgtgattggcactgcttgaa

SEQ ID NO: 79578 - DNA, 83 bp, Homo sapiens
tttctggcagacccgttgctatggcaatgcttgctaatgagcccagtgccgtgattggcactgcttgaaggctcctccacaaa

SEQ ID NO: 79579 - DNA, 84 bp, Homo sapiens
ttgctatggcaatgcttgctaatgagcccagtgccgtgattggcactgcttgaaggctcctccacaaaggactctccagcaagt

SEQ ID NO: 79580 - DNA, 81 bp, Homo sapiens
aatgcttgctaatgagcccagtgccgtgattggcactgcttgaaggctcctccacaaaggactctccagcaagttctctct

SEQ ID NO: 79581 - DNA, 75 bp, Homo sapiens
actgcttgaaggctcctccacaaaggactctccagcaagttctctcttccccaaccacggaggcagctggacacc

SEQ ID NO: 79582 - DNA, 76 bp, Homo sapiens
caaccacggaggcagctggacacccagaagcagccagggcatggctgggcacgcctgggaaggttgagtcccggag

SEQ ID NO: 79583 - DNA, 77 bp, Homo sapiens
aggcagctggacacccagaagcagccagggcatggctgggcacgcctgggaaggttgagtcccggagtagtcctgga

SEQ ID NO: 79584 - DNA, 78 bp, Homo sapiens
acacccagaagcagccagggcatggctgggcacgcctgggaaggttgagtcccggagtagtcctggactcagcagcca

SEQ ID NO: 79585 - DNA, 78 bp, Homo sapiens
agaagcagccagggcatggctgggcacgcctgggaaggttgagtcccggagtagtcctggactcagcagccaggagtg

SEQ ID NO: 79586 - DNA, 77 bp, Homo sapiens
atggctgggcacgcctgggaaggttgagtcccggagtagtcctggactcagcagccaggagtggccccactgccagc

SEQ ID NO: 79587 - DNA, 77 bp, Homo sapiens
acgcctgggaaggttgagtcccggagtagtcctggactcagcagccaggagtggccccactgccagctctgcactcc

SEQ ID NO: 79588 - DNA, 79 bp, Homo sapiens
aaggttgagtcccggagtagtcctggactcagcagccaggagtggccccactgccagctctgcactcctcagggagtca

SEQ ID NO: 79589 - DNA, 79 bp, Homo sapiens
ccggagtagtcctggactcagcagccaggagtggccccactgccagctctgcactcctcagggagtcaaccaattacta

SEQ ID NO: 79590 - DNA, 79 bp, Homo sapiens
gtagtcctggactcagcagccaggagtggccccactgccagctctgcactcctcagggagtcaaccaattactaatggg

SEQ ID NO: 79591 - DNA, 81 bp, Homo sapiens
actcagcagccaggagtggccccactgccagctctgcactcctcagggagtcaaccaattactaatggggctgccagagcc

SEQ ID NO: 79592 - DNA, 78 bp, Homo sapiens
agtggccccactgccagctctgcactcctcagggagtcaaccaattactaatggggctgccagagcccaccaggaaga

SEQ ID NO: 79593 - DNA, 79 bp, Homo sapiens
actgccagctctgcactcctcagggagtcaaccaattactaatggggctgccagagcccaccaggaagatcaagaccca

SEQ ID NO: 79594 - DNA, 79 bp, Homo sapiens
tctgcactcctcagggagtcaaccaattactaatggggctgccagagcccaccaggaagatcaagacccagcagggctg

SEQ ID NO: 79595 - DNA, 77 bp, Homo sapiens
ctcagggagtcaaccaattactaatggggctgccagagcccaccaggaagatcaagacccagcagggctggagactg

SEQ ID NO: 79596 - DNA, 77 bp, Homo sapiens
aaccaattactaatggggctgccagagcccaccaggaagatcaagacccagcagggctggagactggcaattcactc

SEQ ID NO: 79597 - DNA, 80 bp, Homo sapiens
taatggggctgccagagcccaccaggaagatcaagacccagcagggctggagactggcaattcactcccacgtcatgcct

SEQ ID NO: 79598 - DNA, 79 bp, Homo sapiens
agagcccaccaggaagatcaagacccagcagggctggagactggcaattcactcccacgtcatgccttcctggtggaca

SEQ ID NO: 79599 - DNA, 77 bp, Homo sapiens
aggaagatcaagacccagcagggctggagactggcaattcactcccacgtcatgccttcctggtggacacctgttta

SEQ ID NO: 79600 - DNA, 76 bp, Homo sapiens
atcaagacccagcagggctggagactggcaattcactcccacgtcatgccttcctggtggacacctgtttaggtgg

SEQ ID NO: 79601 - DNA, 76 bp, Homo sapiens
agggctggagactggcaattcactcccacgtcatgccttcctggtggacacctgtttaggtgggcagactcctaca

SEQ ID NO: 79602 - DNA, 77 bp, Homo sapiens
agactggcaattcactcccacgtcatgccttcctggtggacacctgtttaggtgggcagactcctacacagagctgg

SEQ ID NO: 79603 - DNA, 77 bp, Homo sapiens
attcactcccacgtcatgccttcctggtggacacctgtttaggtgggcagactcctacacagagctgggaacagcta

SEQ ID NO: 79604 - DNA, 77 bp, Homo sapiens
tcatgccttcctggtggacacctgtttaggtgggcagactcctacacagagctgggaacagctacccgagaaggata

SEQ ID NO: 79605 - DNA, 75 bp, Homo sapiens
ttcctggtggacacctgtttaggtgggcagactcctacacagagctgggaacagctacccgagaaggatactctc

SEQ ID NO: 79606 - DNA, 76 bp, Homo sapiens
acacctgtttaggtgggcagactcctacacagagctgggaacagctacccgagaaggatactctcctccagctctg

SEQ ID NO: 79607 - DNA, 77 bp, Homo sapiens
tgggcagactcctacacagagctgggaacagctacccgagaaggatactctcctccagctctgggttaagacacaaa

SEQ ID NO: 79608 - DNA, 78 bp, Homo sapiens
actcctacacagagctgggaacagctacccgagaaggatactctcctccagctctgggttaagacacaaatcatgcaa

SEQ ID NO: 79609 - DNA, 79 bp, Homo sapiens
aacagctacccgagaaggatactctcctccagctctgggttaagacacaaatcatgcaacagtgacatcaccagcccca

SEQ ID NO: 79610 - DNA, 81 bp, Homo sapiens
agaaggatactctcctccagctctgggttaagacacaaatcatgcaacagtgacatcaccagccccagagtctgtctctaa

SEQ ID NO: 79611 - DNA, 81 bp, Homo sapiens
actctcctccagctctgggttaagacacaaatcatgcaacagtgacatcaccagccccagagtctgtctctaagaatactg

SEQ ID NO: 79612 - DNA, 81 bp, Homo sapiens
tgggttaagacacaaatcatgcaacagtgacatcaccagccccagagtctgtctctaagaatactgggcgcatttcctgtc

SEQ ID NO: 79613 - DNA, 82 bp, Homo sapiens
atcatgcaacagtgacatcaccagccccagagtctgtctctaagaatactgggcgcatttcctgtctcacaggtgaaagtat

SEQ ID NO: 79614 - DNA, 80 bp, Homo sapiens
agtgacatcaccagccccagagtctgtctctaagaatactgggcgcatttcctgtctcacaggtgaaagtattgcgctcc

SEQ ID NO: 79615 - DNA, 79 bp, Homo sapiens
tctgtctctaagaatactgggcgcatttcctgtctcacaggtgaaagtattgcgctccccaactccagcagcctttcta

SEQ ID NO: 79616 - DNA, 78 bp, Homo sapiens
taagaatactgggcgcatttcctgtctcacaggtgaaagtattgcgctccccaactccagcagcctttctagccatac

SEQ ID NO: 79617 - DNA, 80 bp, Homo sapiens
catttcctgtctcacaggtgaaagtattgcgctccccaactccagcagcctttctagccatactcagaaatttcagtgca

SEQ ID NO: 79618 - DNA, 80 bp, Homo sapiens
tctcacaggtgaaagtattgcgctccccaactccagcagcctttctagccatactcagaaatttcagtgcacagaaaata

SEQ ID NO: 79619 - DNA, 77 bp, Homo sapiens
aggtgaaagtattgcgctccccaactccagcagcctttctagccatactcagaaatttcagtgcacagaaaatagta

SEQ ID NO: 79620 - DNA, 75 bp, Homo sapiens
attgcgctccccaactccagcagcctttctagccatactcagaaatttcagtgcacagaaaatagtaggggaccc

SEQ ID NO: 79621 - DNA, 77 bp, Homo sapiens
tccagcagcctttctagccatactcagaaatttcagtgcacagaaaatagtaggggacccctggcaacgtcacaaca

SEQ ID NO: 79622 - DNA, 77 bp, Homo sapiens
tactcagaaatttcagtgcacagaaaatagtaggggacccctggcaacgtcacaacacatcctgaggactgcagtct

SEQ ID NO: 79623 - DNA, 76 bp, Homo sapiens
agaaatttcagtgcacagaaaatagtaggggacccctggcaacgtcacaacacatcctgaggactgcagtcttcac

SEQ ID NO: 79624 - DNA, 76 bp, Homo sapiens
cagaaaatagtaggggacccctggcaacgtcacaacacatcctgaggactgcagtcttcacccagtagttatgcag

SEQ ID NO: 79625 - DNA, 77 bp, Homo sapiens
aatagtaggggacccctggcaacgtcacaacacatcctgaggactgcagtcttcacccagtagttatgcaggagaca

SEQ ID NO: 79626 - DNA, 80 bp, Homo sapiens
ctggcaacgtcacaacacatcctgaggactgcagtcttcacccagtagttatgcaggagacaggctggaccccggcagag

SEQ ID NO: 79627 - DNA, 80 bp, Homo sapiens
tcacaacacatcctgaggactgcagtcttcacccagtagttatgcaggagacaggctggaccccggcagagtcttcattt

SEQ ID NO: 79628 - DNA, 78 bp, Homo sapiens
acatcctgaggactgcagtcttcacccagtagttatgcaggagacaggctggaccccggcagagtcttcattttcttc

SEQ ID NO: 79629 - DNA, 77 bp, Homo sapiens
ttcacccagtagttatgcaggagacaggctggaccccggcagagtcttcattttcttctaaaggtcagagattcaga

SEQ ID NO: 79630 - DNA, 77 bp, Homo sapiens
tagttatgcaggagacaggctggaccccggcagagtcttcattttcttctaaaggtcagagattcagagacttggcc

SEQ ID NO: 79631 - DNA, 74 bp, Homo sapiens
agacaggctggaccccggcagagtcttcattttcttctaaaggtcagagattcagagacttggcctggaaggag

SEQ ID NO: 79632 - DNA, 73 bp, Homo sapiens
cccggcagagtcttcattttcttctaaaggtcagagattcagagacttggcctggaaggaggaggttgggaga

SEQ ID NO: 79633 - DNA, 75 bp, Homo sapiens
attcagagacttggcctggaaggaggaggttgggagagctgccatatcaacaaagaaacagactataagattcgg

SEQ ID NO: 79634 - DNA, 74 bp, Homo sapiens
ttggcctggaaggaggaggttgggagagctgccatatcaacaaagaaacagactataagattcgggaagacagg

SEQ ID NO: 79635 - DNA, 76 bp, Homo sapiens
agagctgccatatcaacaaagaaacagactataagattcgggaagacagggccatgtccctatccctcttttcaca

SEQ ID NO: 79636 - DNA, 73 bp, Homo sapiens
tatcaacaaagaaacagactataagattcgggaagacagggccatgtccctatccctcttttcacagctttaa

SEQ ID NO: 79637 - DNA, 73 bp, Homo sapiens
acaaagaaacagactataagattcgggaagacagggccatgtccctatccctcttttcacagctttaatctca

SEQ ID NO: 79638 - DNA, 76 bp, Homo sapiens
actataagattcgggaagacagggccatgtccctatccctcttttcacagctttaatctcagcacagtgcccagaa

SEQ ID NO: 79639 - DNA, 78 bp, Homo sapiens
attcgggaagacagggccatgtccctatccctcttttcacagctttaatctcagcacagtgcccagaacaatgaatga

SEQ ID NO: 79640 - DNA, 72 bp, Homo sapiens
agaattatagtaggaactaggcttcagaaatatttgaggaggctattttaccaaataagcagacagggaatg

SEQ ID NO: 79641 - DNA, 73 bp, Homo sapiens
tatagtaggaactaggcttcagaaatatttgaggaggctattttaccaaataagcagacagggaatgggagtg

SEQ ID NO: 79642 - DNA, 73 bp, Homo sapiens
taggcttcagaaatatttgaggaggctattttaccaaataagcagacagggaatgggagtgggagttagagaa

SEQ ID NO: 79643 - DNA, 71 bp, Homo sapiens
aaatatttgaggaggctattttaccaaataagcagacagggaatgggagtgggagttagagaaagtgtgtg

SEQ ID NO: 79644 - DNA, 74 bp, Homo sapiens
aggctattttaccaaataagcagacagggaatgggagtgggagttagagaaagtgtgtgtgccccatctgtgaa

SEQ ID NO: 79645 - DNA, 74 bp, Homo sapiens
ttttaccaaataagcagacagggaatgggagtgggagttagagaaagtgtgtgtgccccatctgtgaacaaatc

SEQ ID NO: 79646 - DNA, 77 bp, Homo sapiens
taagcagacagggaatgggagtgggagttagagaaagtgtgtgtgccccatctgtgaacaaatcccagctcttaatg

SEQ ID NO: 79647 - DNA, 77 bp, Homo sapiens
aatgggagtgggagttagagaaagtgtgtgtgccccatctgtgaacaaatcccagctcttaatggatctattgaatg

SEQ ID NO: 79648 - DNA, 79 bp, Homo sapiens
agttagagaaagtgtgtgtgccccatctgtgaacaaatcccagctcttaatggatctattgaatggactctgctatggt

SEQ ID NO: 79649 - DNA, 79 bp, Homo sapiens
gttagagaaagtgtgtgtgccccatctgtgaacaaatcccagctcttaatggatctattgaatggactctgctatggtt

SEQ ID NO: 79650 - DNA, 80 bp, Homo sapiens
agaaagtgtgtgtgccccatctgtgaacaaatcccagctcttaatggatctattgaatggactctgctatggtttgaatg

SEQ ID NO: 79651 - DNA, 73 bp, Homo sapiens
ccctccaaaactcaggcgttggcaacatggtaggattaagaggtgggacctttaagaggtgatcagcccatga

SEQ ID NO: 79652 - DNA, 73 bp, Homo sapiens
aaaactcaggcgttggcaacatggtaggattaagaggtgggacctttaagaggtgatcagcccatgagggcgc

SEQ ID NO: 79653 - DNA, 75 bp, Homo sapiens
ttggcaacatggtaggattaagaggtgggacctttaagaggtgatcagcccatgagggcgcctccttcagtggga

SEQ ID NO: 79654 - DNA, 75 bp, Homo sapiens
taggattaagaggtgggacctttaagaggtgatcagcccatgagggcgcctccttcagtgggattgaggctctta

SEQ ID NO: 79655 - DNA, 75 bp, Homo sapiens
ttaagaggtgggacctttaagaggtgatcagcccatgagggcgcctccttcagtgggattgaggctcttatcaaa

SEQ ID NO: 79656 - DNA, 80 bp, Homo sapiens
tttaagaggtgatcagcccatgagggcgcctccttcagtgggattgaggctcttatcaaagcagcttcacgcggtattca

SEQ ID NO: 79657 - DNA, 82 bp, Homo sapiens
tgatcagcccatgagggcgcctccttcagtgggattgaggctcttatcaaagcagcttcacgcggtattcactagcttgtcc

SEQ ID NO: 79658 - DNA, 78 bp, Homo sapiens
cccatgagggcgcctccttcagtgggattgaggctcttatcaaagcagcttcacgcggtattcactagcttgtccttc

SEQ ID NO: 79659 - DNA, 78 bp, Homo sapiens
cgcctccttcagtgggattgaggctcttatcaaagcagcttcacgcggtattcactagcttgtccttctgccttccac

SEQ ID NO: 79660 - DNA, 84 bp, Homo sapiens
ccaccatgtgaggacacgctattcctttatctggcagacacagcaacatggtgccatcttggaggcagacaacagtcctcacca

SEQ ID NO: 79661 - DNA, 84 bp, Homo sapiens
atgtgaggacacgctattcctttatctggcagacacagcaacatggtgccatcttggaggcagacaacagtcctcaccagacaa

SEQ ID NO: 79662 - DNA, 81 bp, Homo sapiens
acgctattcctttatctggcagacacagcaacatggtgccatcttggaggcagacaacagtcctcaccagacaacagaacc

SEQ ID NO: 79663 - DNA, 82 bp, Homo sapiens
tttatctggcagacacagcaacatggtgccatcttggaggcagacaacagtcctcaccagacaacagaacctgccgacacct

SEQ ID NO: 79664 - DNA, 74 bp, Homo sapiens
aaataaatacattcctgttcctcatacattatctggtctcaggtattttgtaagagctgcacaaatggggaagg

SEQ ID NO: 79665 - DNA, 76 bp, Homo sapiens
atacattcctgttcctcatacattatctggtctcaggtattttgtaagagctgcacaaatggggaagggggaggca

SEQ ID NO: 79666 - DNA, 77 bp, Homo sapiens
tcatacattatctggtctcaggtattttgtaagagctgcacaaatggggaagggggaggcaagataatatgtattgt

SEQ ID NO: 79667 - DNA, 74 bp, Homo sapiens
attatctggtctcaggtattttgtaagagctgcacaaatggggaagggggaggcaagataatatgtattgttta

SEQ ID NO: 79668 - DNA, 73 bp, Homo sapiens
aggtattttgtaagagctgcacaaatggggaagggggaggcaagataatatgtattgtttattttattgcaga

SEQ ID NO: 79669 - DNA, 75 bp, Homo sapiens
ttgtaagagctgcacaaatggggaagggggaggcaagataatatgtattgtttattttattgcagaaaatagata

SEQ ID NO: 79670 - DNA, 74 bp, Homo sapiens
tgcacaaatggggaagggggaggcaagataatatgtattgtttattttattgcagaaaatagatagaggaagaa

SEQ ID NO: 79671 - DNA, 74 bp, Homo sapiens
agggggaggcaagataatatgtattgtttattttattgcagaaaatagatagaggaagaacatccagaagccta

SEQ ID NO: 79672 - DNA, 78 bp, Homo sapiens
gcaagataatatgtattgtttattttattgcagaaaatagatagaggaagaacatccagaagcctagaagcctcaaga

SEQ ID NO: 79673 - DNA, 75 bp, Homo sapiens
gtattgtttattttattgcagaaaatagatagaggaagaacatccagaagcctagaagcctcaagagaaacacaa

SEQ ID NO: 79674 - DNA, 74 bp, Homo sapiens
tttattttattgcagaaaatagatagaggaagaacatccagaagcctagaagcctcaagagaaacacaaacttc

SEQ ID NO: 79675 - DNA, 79 bp, Homo sapiens
agaaaatagatagaggaagaacatccagaagcctagaagcctcaagagaaacacaaacttctcatcaggatctcacata

SEQ ID NO: 79676 - DNA, 80 bp, Homo sapiens
atagaggaagaacatccagaagcctagaagcctcaagagaaacacaaacttctcatcaggatctcacatagtatccagaa

SEQ ID NO: 79677 - DNA, 79 bp, Homo sapiens
aagaacatccagaagcctagaagcctcaagagaaacacaaacttctcatcaggatctcacatagtatccagaagaaaca

SEQ ID NO: 79678 - DNA, 79 bp, Homo sapiens
agaagcctagaagcctcaagagaaacacaaacttctcatcaggatctcacatagtatccagaagaaacatctcagaaaa

SEQ ID NO: 79679 - DNA, 81 bp, Homo sapiens
tcaagagaaacacaaacttctcatcaggatctcacatagtatccagaagaaacatctcagaaaagtatctagcaacctcaa

SEQ ID NO: 79680 - DNA, 78 bp, Homo sapiens
aaacacaaacttctcatcaggatctcacatagtatccagaagaaacatctcagaaaagtatctagcaacctcaacaaa

SEQ ID NO: 79681 - DNA, 79 bp, Homo sapiens
acttctcatcaggatctcacatagtatccagaagaaacatctcagaaaagtatctagcaacctcaacaaagggcaggaa

SEQ ID NO: 79682 - DNA, 82 bp, Homo sapiens
tctcacatagtatccagaagaaacatctcagaaaagtatctagcaacctcaacaaagggcaggaagatatgacattatgata

SEQ ID NO: 79683 - DNA, 79 bp, Homo sapiens
atagtatccagaagaaacatctcagaaaagtatctagcaacctcaacaaagggcaggaagatatgacattatgatacaa

SEQ ID NO: 79684 - DNA, 77 bp, Homo sapiens
gaagaaacatctcagaaaagtatctagcaacctcaacaaagggcaggaagatatgacattatgatacaagaacaaaa

SEQ ID NO: 79685 - DNA, 76 bp, Homo sapiens
aagaaacatctcagaaaagtatctagcaacctcaacaaagggcaggaagatatgacattatgatacaagaacaaaa

SEQ ID NO: 79686 - DNA, 77 bp, Homo sapiens
atctcagaaaagtatctagcaacctcaacaaagggcaggaagatatgacattatgatacaagaacaaaaactcataa

SEQ ID NO: 79687 - DNA, 76 bp, Homo sapiens
aaagtatctagcaacctcaacaaagggcaggaagatatgacattatgatacaagaacaaaaactcataagaagaga

SEQ ID NO: 79688 - DNA, 76 bp, Homo sapiens
atctagcaacctcaacaaagggcaggaagatatgacattatgatacaagaacaaaaactcataagaagagaacaaa

SEQ ID NO: 79689 - DNA, 75 bp, Homo sapiens
agcaacctcaacaaagggcaggaagatatgacattatgatacaagaacaaaaactcataagaagagaacaaaaca

SEQ ID NO: 79690 - DNA, 75 bp, Homo sapiens
ctcaacaaagggcaggaagatatgacattatgatacaagaacaaaaactcataagaagagaacaaaacaaggcaa

SEQ ID NO: 79691 - DNA, 73 bp, Homo sapiens
ggaagatatgacattatgatacaagaacaaaaactcataagaagagaacaaaacaaggcaagttggtttgaaa

SEQ ID NO: 79692 - DNA, 68 bp, Homo sapiens
acattatgatacaagaacaaaaactcataagaagagaacaaaacaaggcaagttggtttgaaaaaaaa

SEQ ID NO: 79693 - DNA, 63 bp, Homo sapiens
aaaaaaccaaaatgatataaaaaaggaacaggaaatgataaaaattatagggaagtttgaaag

SEQ ID NO: 79694 - DNA, 66 bp, Homo sapiens
aatgatataaaaaaggaacaggaaatgataaaaattatagggaagtttgaaaggttgtaacagaag

SEQ ID NO: 79695 - DNA, 67 bp, Homo sapiens
aaaaggaacaggaaatgataaaaattatagggaagtttgaaaggttgtaacagaaggaaaatgcaca

SEQ ID NO: 79696 - DNA, 71 bp, Homo sapiens
gaacaggaaatgataaaaattatagggaagtttgaaaggttgtaacagaaggaaaatgcacattggttgca

SEQ ID NO: 79697 - DNA, 75 bp, Homo sapiens
tatagggaagtttgaaaggttgtaacagaaggaaaatgcacattggttgcaataaaacatggaatcaatactgca

SEQ ID NO: 79698 - DNA, 75 bp, Homo sapiens
ttgaaaggttgtaacagaaggaaaatgcacattggttgcaataaaacatggaatcaatactgcaaaacaaagtga

SEQ ID NO: 79699 - DNA, 77 bp, Homo sapiens
cagaaggaaaatgcacattggttgcaataaaacatggaatcaatactgcaaaacaaagtgaattcgttatgtacaga

SEQ ID NO: 79700 - DNA, 73 bp, Homo sapiens
ggttgcaataaaacatggaatcaatactgcaaaacaaagtgaattcgttatgtacagaacaaacgagaattgt

SEQ ID NO: 79701 - DNA, 70 bp, Homo sapiens
ataaaacatggaatcaatactgcaaaacaaagtgaattcgttatgtacagaacaaacgagaattgttttt

SEQ ID NO: 79702 - DNA, 70 bp, Homo sapiens
ggaatcaatactgcaaaacaaagtgaattcgttatgtacagaacaaacgagaattgttttttccccagaa

SEQ ID NO: 79703 - DNA, 70 bp, Homo sapiens
ctgcaaaacaaagtgaattcgttatgtacagaacaaacgagaattgttttttccccagaatgcaaaggaa

SEQ ID NO: 79704 - DNA, 68 bp, Homo sapiens
aagtgaattcgttatgtacagaacaaacgagaattgttttttccccagaatgcaaaggaaatgggaaa

SEQ ID NO: 79705 - DNA, 70 bp, Homo sapiens
ttatgtacagaacaaacgagaattgttttttccccagaatgcaaaggaaatgggaaaaatgcaaacgtga

SEQ ID NO: 79706 - DNA, 68 bp, Homo sapiens
aacaaacgagaattgttttttccccagaatgcaaaggaaatgggaaaaatgcaaacgtgaggacagaa

SEQ ID NO: 79707 - DNA, 75 bp, Homo sapiens
cagaatgcaaaggaaatgggaaaaatgcaaacgtgaggacagaacagcaaaccaagacatggatactgggtgttc

SEQ ID NO: 79708 - DNA, 72 bp, Homo sapiens
aaaggaaatgggaaaaatgcaaacgtgaggacagaacagcaaaccaagacatggatactgggtgttcctgaa

SEQ ID NO: 79709 - DNA, 76 bp, Homo sapiens
aaaaatgcaaacgtgaggacagaacagcaaaccaagacatggatactgggtgttcctgaagaggagaccagcagaa

SEQ ID NO: 79710 - DNA, 76 bp, Homo sapiens
aaacgtgaggacagaacagcaaaccaagacatggatactgggtgttcctgaagaggagaccagcagaaaagctcta

SEQ ID NO: 79711 - DNA, 75 bp, Homo sapiens
agaacagcaaaccaagacatggatactgggtgttcctgaagaggagaccagcagaaaagctctaacagaaaagaa

SEQ ID NO: 79712 - DNA, 73 bp, Homo sapiens
aaaccaagacatggatactgggtgttcctgaagaggagaccagcagaaaagctctaacagaaaagaaagaata

SEQ ID NO: 79713 - DNA, 72 bp, Homo sapiens
acatggatactgggtgttcctgaagaggagaccagcagaaaagctctaacagaaaagaaagaataaacaaag

SEQ ID NO: 79714 - DNA, 71 bp, Homo sapiens
tgggtgttcctgaagaggagaccagcagaaaagctctaacagaaaagaaagaataaacaaaggttgatggg

SEQ ID NO: 79715 - DNA, 68 bp, Homo sapiens
aagaggagaccagcagaaaagctctaacagaaaagaaagaataaacaaaggttgatggggaggaaagt

SEQ ID NO: 79716 - DNA, 70 bp, Homo sapiens
accagcagaaaagctctaacagaaaagaaagaataaacaaaggttgatggggaggaaagttccagagctg

SEQ ID NO: 79717 - DNA, 69 bp, Homo sapiens
aaagctctaacagaaaagaaagaataaacaaaggttgatggggaggaaagttccagagctgggccacac

SEQ ID NO: 79718 - DNA, 67 bp, Homo sapiens
aaagaaagaataaacaaaggttgatggggaggaaagttccagagctgggccacacgggacgtcctac

SEQ ID NO: 79719 - DNA, 70 bp, Homo sapiens
agaataaacaaaggttgatggggaggaaagttccagagctgggccacacgggacgtcctacgctgttcaa

SEQ ID NO: 79720 - DNA, 73 bp, Homo sapiens
ttgatggggaggaaagttccagagctgggccacacgggacgtcctacgctgttcaaggcaaagtggatttcaa

SEQ ID NO: 79721 - DNA, 70 bp, Homo sapiens
gggaggaaagttccagagctgggccacacgggacgtcctacgctgttcaaggcaaagtggatttcaaaaa

SEQ ID NO: 79722 - DNA, 73 bp, Homo sapiens
agagctgggccacacgggacgtcctacgctgttcaaggcaaagtggatttcaaaaaaccaaccagcagacata

SEQ ID NO: 79723 - DNA, 70 bp, Homo sapiens
acacgggacgtcctacgctgttcaaggcaaagtggatttcaaaaaaccaaccagcagacataccctaaca

SEQ ID NO: 79724 - DNA, 71 bp, Homo sapiens
caaaaaaccaaccagcagacataccctaacaacatatttacacagcaaagataaggataaaagtcctgtaa

SEQ ID NO: 79725 - DNA, 71 bp, Homo sapiens
ataccctaacaacatatttacacagcaaagataaggataaaagtcctgtaatcatttacgtgggaagacca

SEQ ID NO: 79726 - DNA, 74 bp, Homo sapiens
caacatatttacacagcaaagataaggataaaagtcctgtaatcatttacgtgggaagaccagtgcaagaataa

SEQ ID NO: 79727 - DNA, 72 bp, Homo sapiens
tttacacagcaaagataaggataaaagtcctgtaatcatttacgtgggaagaccagtgcaagaataaaaaga

SEQ ID NO: 79728 - DNA, 69 bp, Homo sapiens
aaagataaggataaaagtcctgtaatcatttacgtgggaagaccagtgcaagaataaaaagaaggctgg

SEQ ID NO: 79729 - DNA, 77 bp, Homo sapiens
ctcaaacttctctgtagccacatctcaaaagacatctccggtgcatgatggggaaaataccacgaccttcattgtac

SEQ ID NO: 79730 - DNA, 77 bp, Homo sapiens
acttctctgtagccacatctcaaaagacatctccggtgcatgatggggaaaataccacgaccttcattgtacttcaa

SEQ ID NO: 79731 - DNA, 76 bp, Homo sapiens
acatctcaaaagacatctccggtgcatgatggggaaaataccacgaccttcattgtacttcaaggtagccaagctg

SEQ ID NO: 79732 - DNA, 73 bp, Homo sapiens
aaaagacatctccggtgcatgatggggaaaataccacgaccttcattgtacttcaaggtagccaagctgtctt

SEQ ID NO: 79733 - DNA, 74 bp, Homo sapiens
tccggtgcatgatggggaaaataccacgaccttcattgtacttcaaggtagccaagctgtctttcacaagggaa

SEQ ID NO: 79734 - DNA, 71 bp, Homo sapiens
gggaaaataccacgaccttcattgtacttcaaggtagccaagctgtctttcacaagggaaggcaacagaaa

SEQ ID NO: 79735 - DNA, 73 bp, Homo sapiens
aataccacgaccttcattgtacttcaaggtagccaagctgtctttcacaagggaaggcaacagaaacatattc

SEQ ID NO: 79736 - DNA, 76 bp, Homo sapiens
ttcattgtacttcaaggtagccaagctgtctttcacaagggaaggcaacagaaacatattcttctagagacaagta

SEQ ID NO: 79737 - DNA, 77 bp, Homo sapiens
agctgtctttcacaagggaaggcaacagaaacatattcttctagagacaagtactcatgtcctccttagcagaagta

SEQ ID NO: 79738 - DNA, 75 bp, Homo sapiens
tttcacaagggaaggcaacagaaacatattcttctagagacaagtactcatgtcctccttagcagaagtacttaa

SEQ ID NO: 79739 - DNA, 77 bp, Homo sapiens
aggcaacagaaacatattcttctagagacaagtactcatgtcctccttagcagaagtacttaagagatgtacttcaa

SEQ ID NO: 79740 - DNA, 77 bp, Homo sapiens
aacatattcttctagagacaagtactcatgtcctccttagcagaagtacttaagagatgtacttcaactgcctgaaa

SEQ ID NO: 79741 - DNA, 79 bp, Homo sapiens
ttcttctagagacaagtactcatgtcctccttagcagaagtacttaagagatgtacttcaactgcctgaaagagcaaga

SEQ ID NO: 79742 - DNA, 76 bp, Homo sapiens
acaagtactcatgtcctccttagcagaagtacttaagagatgtacttcaactgcctgaaagagcaagacaaataaa

SEQ ID NO: 79743 - DNA, 75 bp, Homo sapiens
atgtcctccttagcagaagtacttaagagatgtacttcaactgcctgaaagagcaagacaaataaaggtgaagaa

SEQ ID NO: 79744 - DNA, 77 bp, Homo sapiens
ttagcagaagtacttaagagatgtacttcaactgcctgaaagagcaagacaaataaaggtgaagaatgacgaaatca

SEQ ID NO: 79745 - DNA, 76 bp, Homo sapiens
tacttaagagatgtacttcaactgcctgaaagagcaagacaaataaaggtgaagaatgacgaaatcacggcacaaa

SEQ ID NO: 79746 - DNA, 75 bp, Homo sapiens
atgtacttcaactgcctgaaagagcaagacaaataaaggtgaagaatgacgaaatcacggcacaaaaggatccag

SEQ ID NO: 79747 - DNA, 76 bp, Homo sapiens
cttcaactgcctgaaagagcaagacaaataaaggtgaagaatgacgaaatcacggcacaaaaggatccaggctgaa

SEQ ID NO: 79748 - DNA, 75 bp, Homo sapiens
cctgaaagagcaagacaaataaaggtgaagaatgacgaaatcacggcacaaaaggatccaggctgaacgctgaaa

SEQ ID NO: 79749 - DNA, 77 bp, Homo sapiens
agagcaagacaaataaaggtgaagaatgacgaaatcacggcacaaaaggatccaggctgaacgctgaaagcagctta

SEQ ID NO: 79750 - DNA, 76 bp, Homo sapiens
aagacaaataaaggtgaagaatgacgaaatcacggcacaaaaggatccaggctgaacgctgaaagcagcttacaga

SEQ ID NO: 79751 - DNA, 75 bp, Homo sapiens
acaaataaaggtgaagaatgacgaaatcacggcacaaaaggatccaggctgaacgctgaaagcagcttacagaaa

SEQ ID NO: 79752 - DNA, 78 bp, Homo sapiens
aataaaggtgaagaatgacgaaatcacggcacaaaaggatccaggctgaacgctgaaagcagcttacagaaatgcata

SEQ ID NO: 79753 - DNA, 79 bp, Homo sapiens
gtgaagaatgacgaaatcacggcacaaaaggatccaggctgaacgctgaaagcagcttacagaaatgcatacgtaatta

SEQ ID NO: 79754 - DNA, 79 bp, Homo sapiens
aatgacgaaatcacggcacaaaaggatccaggctgaacgctgaaagcagcttacagaaatgcatacgtaattatgcatt

SEQ ID NO: 79755 - DNA, 80 bp, Homo sapiens
atgacgaaatcacggcacaaaaggatccaggctgaacgctgaaagcagcttacagaaatgcatacgtaattatgcatttc

SEQ ID NO: 79756 - DNA, 78 bp, Homo sapiens
aaatcacggcacaaaaggatccaggctgaacgctgaaagcagcttacagaaatgcatacgtaattatgcatttctagt

SEQ ID NO: 79757 - DNA, 79 bp, Homo sapiens
acggcacaaaaggatccaggctgaacgctgaaagcagcttacagaaatgcatacgtaattatgcatttctagttataca

SEQ ID NO: 79758 - DNA, 82 bp, Homo sapiens
aaggatccaggctgaacgctgaaagcagcttacagaaatgcatacgtaattatgcatttctagttatacaatcatgtataca

SEQ ID NO: 79759 - DNA, 83 bp, Homo sapiens
aacgctgaaagcagcttacagaaatgcatacgtaattatgcatttctagttatacaatcatgtatacatgttgctattctcaa

SEQ ID NO: 79760 - DNA, 84 bp, Homo sapiens
gaaagcagcttacagaaatgcatacgtaattatgcatttctagttatacaatcatgtatacatgttgctattctcaatatatac

SEQ ID NO: 79761 - DNA, 81 bp, Homo sapiens
acagaaatgcatacgtaattatgcatttctagttatacaatcatgtatacatgttgctattctcaatatatactgtaaaaa

SEQ ID NO: 79762 - DNA, 79 bp, Homo sapiens
catacgtaattatgcatttctagttatacaatcatgtatacatgttgctattctcaatatatactgtaaaaaaatgaaa

SEQ ID NO: 79763 - DNA, 79 bp, Homo sapiens
tgcatttctagttatacaatcatgtatacatgttgctattctcaatatatactgtaaaaaaatgaaattataacctgag

SEQ ID NO: 79764 - DNA, 79 bp, Homo sapiens
atacaatcatgtatacatgttgctattctcaatatatactgtaaaaaaatgaaattataacctgagtctcaaatataga

SEQ ID NO: 79765 - DNA, 79 bp, Homo sapiens
tcatgtatacatgttgctattctcaatatatactgtaaaaaaatgaaattataacctgagtctcaaatatagacagtac

SEQ ID NO: 79766 - DNA, 71 bp, Homo sapiens
caatatatactgtaaaaaaatgaaattataacctgagtctcaaatatagacagtactagaaaagggctggg

SEQ ID NO: 79767 - DNA, 75 bp, Homo sapiens
aaaatgaaattataacctgagtctcaaatatagacagtactagaaaagggctgggtgcggtgcctcatgcctata

SEQ ID NO: 79768 - DNA, 79 bp, Homo sapiens
aataataattataattatatatactagaagagatcaagaggcaggaggaacactgagatcatgagaacaccgagggaga

SEQ ID NO: 79769 - DNA, 79 bp, Homo sapiens
ataattatatatactagaagagatcaagaggcaggaggaacactgagatcatgagaacaccgagggagatggaaacaaa

SEQ ID NO: 79770 - DNA, 81 bp, Homo sapiens
tatatatactagaagagatcaagaggcaggaggaacactgagatcatgagaacaccgagggagatggaaacaaaacgctga

SEQ ID NO: 79771 - DNA, 77 bp, Homo sapiens
aagagatcaagaggcaggaggaacactgagatcatgagaacaccgagggagatggaaacaaaacgctgaccttcctc

SEQ ID NO: 79772 - DNA, 73 bp, Homo sapiens
aggcaggaggaacactgagatcatgagaacaccgagggagatggaaacaaaacgctgaccttcctcccgtccc

SEQ ID NO: 79773 - DNA, 75 bp, Homo sapiens
aacactgagatcatgagaacaccgagggagatggaaacaaaacgctgaccttcctcccgtccccatagtgaagca

SEQ ID NO: 79774 - DNA, 74 bp, Homo sapiens
atcatgagaacaccgagggagatggaaacaaaacgctgaccttcctcccgtccccatagtgaagcatccgtgtc

SEQ ID NO: 79775 - DNA, 70 bp, Homo sapiens
aacaccgagggagatggaaacaaaacgctgaccttcctcccgtccccatagtgaagcatccgtgtcctgt

SEQ ID NO: 79776 - DNA, 72 bp, Homo sapiens
atggaaacaaaacgctgaccttcctcccgtccccatagtgaagcatccgtgtcctgttgtccctcctgccaa

SEQ ID NO: 79777 - DNA, 73 bp, Homo sapiens
aaacgctgaccttcctcccgtccccatagtgaagcatccgtgtcctgttgtccctcctgccaaatatcaggta

SEQ ID NO: 79778 - DNA, 73 bp, Homo sapiens
accttcctcccgtccccatagtgaagcatccgtgtcctgttgtccctcctgccaaatatcaggtatcaggtac

SEQ ID NO: 79779 - DNA, 80 bp, Homo sapiens
gtgaagcatccgtgtcctgttgtccctcctgccaaatatcaggtatcaggtacctgaccagttggcatccatcctctgtc

SEQ ID NO: 79780 - DNA, 81 bp, Homo sapiens
tgtcctgttgtccctcctgccaaatatcaggtatcaggtacctgaccagttggcatccatcctctgtccttgcttctcatg

SEQ ID NO: 79781 - DNA, 81 bp, Homo sapiens
ctcctgccaaatatcaggtatcaggtacctgaccagttggcatccatcctctgtccttgcttctcatgtccactcttgtct

SEQ ID NO: 79782 - DNA, 78 bp, Homo sapiens
aaatatcaggtatcaggtacctgaccagttggcatccatcctctgtccttgcttctcatgtccactcttgtcttttcc

SEQ ID NO: 79783 - DNA, 77 bp, Homo sapiens
aggtatcaggtacctgaccagttggcatccatcctctgtccttgcttctcatgtccactcttgtcttttcctagaaa

SEQ ID NO: 79784 - DNA, 79 bp, Homo sapiens
ctgaccagttggcatccatcctctgtccttgcttctcatgtccactcttgtcttttcctagaaactgacaggttctcaa

SEQ ID NO: 79785 - DNA, 77 bp, Homo sapiens
catccatcctctgtccttgcttctcatgtccactcttgtcttttcctagaaactgacaggttctcaacctgaaggaa

SEQ ID NO: 79786 - DNA, 77 bp, Homo sapiens
tctgtccttgcttctcatgtccactcttgtcttttcctagaaactgacaggttctcaacctgaaggaacacaacaga

SEQ ID NO: 79787 - DNA, 75 bp, Homo sapiens
ttgcttctcatgtccactcttgtcttttcctagaaactgacaggttctcaacctgaaggaacacaacagagggaa

SEQ ID NO: 79788 - DNA, 70 bp, Homo sapiens
ttgtcttttcctagaaactgacaggttctcaacctgaaggaacacaacagagggaaggggccttggagac

SEQ ID NO: 79789 - DNA, 70 bp, Homo sapiens
tagaaactgacaggttctcaacctgaaggaacacaacagagggaaggggccttggagacccaaatccctg

SEQ ID NO: 79790 - DNA, 71 bp, Homo sapiens
ttctcaacctgaaggaacacaacagagggaaggggccttggagacccaaatccctggtgctgtgagtcttt

SEQ ID NO: 79791 - DNA, 71 bp, Homo sapiens
aacacaacagagggaaggggccttggagacccaaatccctggtgctgtgagtcttttgagtcttacctcta

SEQ ID NO: 79792 - DNA, 70 bp, Homo sapiens
ttggagacccaaatccctggtgctgtgagtcttttgagtcttacctctaccgggttgtattggccccgag

SEQ ID NO: 79793 - DNA, 70 bp, Homo sapiens
aaatccctggtgctgtgagtcttttgagtcttacctctaccgggttgtattggccccgagggggcagtca

SEQ ID NO: 79794 - DNA, 69 bp, Homo sapiens
ttttgagtcttacctctaccgggttgtattggccccgagggggcagtcagcttccagggggaatcctga

SEQ ID NO: 79795 - DNA, 73 bp, Homo sapiens
gttgtattggccccgagggggcagtcagcttccagggggaatcctgagccctggaatccattcaggtggatag

SEQ ID NO: 79796 - DNA, 72 bp, Homo sapiens
attggccccgagggggcagtcagcttccagggggaatcctgagccctggaatccattcaggtggataggttg

SEQ ID NO: 79797 - DNA, 73 bp, Homo sapiens
gcagtcagcttccagggggaatcctgagccctggaatccattcaggtggataggttgggaccaaagtactttg

SEQ ID NO: 79798 - DNA, 72 bp, Homo sapiens
aatcctgagccctggaatccattcaggtggataggttgggaccaaagtactttgtggatgaaggaaaaatca

SEQ ID NO: 79799 - DNA, 70 bp, Homo sapiens
ctggaatccattcaggtggataggttgggaccaaagtactttgtggatgaaggaaaaatcagtaggaacc

SEQ ID NO: 79800 - DNA, 69 bp, Homo sapiens
atccattcaggtggataggttgggaccaaagtactttgtggatgaaggaaaaatcagtaggaacccagg

SEQ ID NO: 79801 - DNA, 69 bp, Homo sapiens
accaaagtactttgtggatgaaggaaaaatcagtaggaacccagggctttccaaagacctcatctgaaa

SEQ ID NO: 79802 - DNA, 70 bp, Homo sapiens
aaatcagtaggaacccagggctttccaaagacctcatctgaaacacctgtttggctttgtaagccttcaa

SEQ ID NO: 79803 - DNA, 70 bp, Homo sapiens
tttccaaagacctcatctgaaacacctgtttggctttgtaagccttcaaagggttctcagggccaaaata

SEQ ID NO: 79804 - DNA, 73 bp, Homo sapiens
acctcatctgaaacacctgtttggctttgtaagccttcaaagggttctcagggccaaaatacagagaagagca

SEQ ID NO: 79805 - DNA, 73 bp, Homo sapiens
ttggctttgtaagccttcaaagggttctcagggccaaaatacagagaagagcatgcggctaatttcgggcctg

SEQ ID NO: 79806 - DNA, 76 bp, Homo sapiens
aagccttcaaagggttctcagggccaaaatacagagaagagcatgcggctaatttcgggcctgggcctgagcatga

SEQ ID NO: 79807 - DNA, 80 bp, Homo sapiens
ttctcagggccaaaatacagagaagagcatgcggctaatttcgggcctgggcctgagcatgaccatgtcctgtggaactg

SEQ ID NO: 79808 - DNA, 78 bp, Homo sapiens
aaaatacagagaagagcatgcggctaatttcgggcctgggcctgagcatgaccatgtcctgtggaactgtggttggac

SEQ ID NO: 79809 - DNA, 78 bp, Homo sapiens
agaagagcatgcggctaatttcgggcctgggcctgagcatgaccatgtcctgtggaactgtggttggacccgtgtgaa

SEQ ID NO: 79810 - DNA, 72 bp, Homo sapiens
aatttcgggcctgggcctgagcatgaccatgtcctgtggaactgtggttggacccgtgtgaaaagggggtca

SEQ ID NO: 79811 - DNA, 79 bp, Homo sapiens
cctgagcatgaccatgtcctgtggaactgtggttggacccgtgtgaaaagggggtcaggtgcatgaggcacacctgcag

SEQ ID NO: 79812 - DNA, 78 bp, Homo sapiens
atgaccatgtcctgtggaactgtggttggacccgtgtgaaaagggggtcaggtgcatgaggcacacctgcagttctca

SEQ ID NO: 79813 - DNA, 77 bp, Homo sapiens
ctgtggaactgtggttggacccgtgtgaaaagggggtcaggtgcatgaggcacacctgcagttctcaccagcaagaa

SEQ ID NO: 79814 - DNA, 77 bp, Homo sapiens
actgtggttggacccgtgtgaaaagggggtcaggtgcatgaggcacacctgcagttctcaccagcaagaagccacaa

SEQ ID NO: 79815 - DNA, 77 bp, Homo sapiens
acccgtgtgaaaagggggtcaggtgcatgaggcacacctgcagttctcaccagcaagaagccacaagagccaggagg

SEQ ID NO: 79816 - DNA, 79 bp, Homo sapiens
ggggtcaggtgcatgaggcacacctgcagttctcaccagcaagaagccacaagagccaggagggtcgccttcctttctc

SEQ ID NO: 79817 - DNA, 73 bp, Homo sapiens
acacctgcagttctcaccagcaagaagccacaagagccaggagggtcgccttcctttctcccagttttctatt

SEQ ID NO: 79818 - DNA, 72 bp, Homo sapiens
ttctcaccagcaagaagccacaagagccaggagggtcgccttcctttctcccagttttctatttgcaaaatt

SEQ ID NO: 79819 - DNA, 69 bp, Homo sapiens
aagaagccacaagagccaggagggtcgccttcctttctcccagttttctatttgcaaaatttgtcggag

SEQ ID NO: 79820 - DNA, 68 bp, Homo sapiens
aagagccaggagggtcgccttcctttctcccagttttctatttgcaaaatttgtcggaggtattacca

SEQ ID NO: 79821 - DNA, 72 bp, Homo sapiens
tcctttctcccagttttctatttgcaaaatttgtcggaggtattaccagagtcctctgtgtgtcacctcaaa

SEQ ID NO: 79822 - DNA, 71 bp, Homo sapiens
cagttttctatttgcaaaatttgtcggaggtattaccagagtcctctgtgtgtcacctcaaacccttctta

SEQ ID NO: 79823 - DNA, 72 bp, Homo sapiens
atttgcaaaatttgtcggaggtattaccagagtcctctgtgtgtcacctcaaacccttcttattagaaatca

SEQ ID NO: 79824 - DNA, 70 bp, Homo sapiens
aaaatttgtcggaggtattaccagagtcctctgtgtgtcacctcaaacccttcttattagaaatcaccta

SEQ ID NO: 79825 - DNA, 75 bp, Homo sapiens
aggtattaccagagtcctctgtgtgtcacctcaaacccttcttattagaaatcacctagtgagcagggctgcctc

SEQ ID NO: 79826 - DNA, 75 bp, Homo sapiens
gtcctctgtgtgtcacctcaaacccttcttattagaaatcacctagtgagcagggctgcctccttgagtccctaa

SEQ ID NO: 79827 - DNA, 70 bp, Homo sapiens
aaacccttcttattagaaatcacctagtgagcagggctgcctccttgagtccctaaaagaaacttctcaa

SEQ ID NO: 79828 - DNA, 74 bp, Homo sapiens
tattagaaatcacctagtgagcagggctgcctccttgagtccctaaaagaaacttctcaaatgaggctttagta

SEQ ID NO: 79829 - DNA, 75 bp, Homo sapiens
aaatcacctagtgagcagggctgcctccttgagtccctaaaagaaacttctcaaatgaggctttagtagatgcaa

SEQ ID NO: 79830 - DNA, 72 bp, Homo sapiens
tccttgagtccctaaaagaaacttctcaaatgaggctttagtagatgcaaatgtcctccggcctcttccaaa

SEQ ID NO: 79831 - DNA, 70 bp, Homo sapiens
agtccctaaaagaaacttctcaaatgaggctttagtagatgcaaatgtcctccggcctcttccaaacctg

SEQ ID NO: 79832 - DNA, 74 bp, Homo sapiens
aaacttctcaaatgaggctttagtagatgcaaatgtcctccggcctcttccaaacctggcactatccaagtgtc

SEQ ID NO: 79833 - DNA, 75 bp, Homo sapiens
ctttagtagatgcaaatgtcctccggcctcttccaaacctggcactatccaagtgtcctcaggcctcactacttg

SEQ ID NO: 79834 - DNA, 76 bp, Homo sapiens
aaatgtcctccggcctcttccaaacctggcactatccaagtgtcctcaggcctcactacttggtgtagatagatga

SEQ ID NO: 79835 - DNA, 78 bp, Homo sapiens
gcctcttccaaacctggcactatccaagtgtcctcaggcctcactacttggtgtagatagatgaatggggtgacaatg

SEQ ID NO: 79836 - DNA, 79 bp, Homo sapiens
ttccaaacctggcactatccaagtgtcctcaggcctcactacttggtgtagatagatgaatggggtgacaatgtatgtg

SEQ ID NO: 79837 - DNA, 87 bp, Homo sapiens
tcctcaggcctcactacttggtgtagatagatgaatggggtgacaatgtatgtggcagcaatcatcagcacctcgctggcttgaata

SEQ ID NO: 79838 - DNA, 85 bp, Homo sapiens
ctcactacttggtgtagatagatgaatggggtgacaatgtatgtggcagcaatcatcagcacctcgctggcttgaatatcccact

SEQ ID NO: 79839 - DNA, 87 bp, Homo sapiens
acttggtgtagatagatgaatggggtgacaatgtatgtggcagcaatcatcagcacctcgctggcttgaatatcccacttgctcaca

SEQ ID NO: 79840 - DNA, 88 bp, Homo sapiens
atagatgaatggggtgacaatgtatgtggcagcaatcatcagcacctcgctggcttgaatatcccacttgctcacatcagacgcccac

SEQ ID NO: 79841 - DNA, 84 bp, Homo sapiens
atgtatgtggcagcaatcatcagcacctcgctggcttgaatatcccacttgctcacatcagacgcccacccccaccagcctcct

SEQ ID NO: 79842 - DNA, 80 bp, Homo sapiens
aatcatcagcacctcgctggcttgaatatcccacttgctcacatcagacgcccacccccaccagcctccttggacgaatc

SEQ ID NO: 79843 - DNA, 76 bp, Homo sapiens
tatcccacttgctcacatcagacgcccacccccaccagcctccttggacgaatccaaaagtgactcgcttgggctc

SEQ ID NO: 79844 - DNA, 73 bp, Homo sapiens
ctcacatcagacgcccacccccaccagcctccttggacgaatccaaaagtgactcgcttgggctccccaacca

SEQ ID NO: 79845 - DNA, 70 bp, Homo sapiens
ccacccccaccagcctccttggacgaatccaaaagtgactcgcttgggctccccaaccaggttgcaactc

SEQ ID NO: 79846 - DNA, 75 bp, Homo sapiens
aaaagtgactcgcttgggctccccaaccaggttgcaactccagtcgccatggagtgtccggcatactcttcttca

SEQ ID NO: 79847 - DNA, 80 bp, Homo sapiens
ctcgcttgggctccccaaccaggttgcaactccagtcgccatggagtgtccggcatactcttcttcatctgcattagcta

SEQ ID NO: 79848 - DNA, 78 bp, Homo sapiens
ctccccaaccaggttgcaactccagtcgccatggagtgtccggcatactcttcttcatctgcattagctacttcctcc

SEQ ID NO: 79849 - DNA, 79 bp, Homo sapiens
aactccagtcgccatggagtgtccggcatactcttcttcatctgcattagctacttcctccccaacaccatcactgtcc

SEQ ID NO: 79850 - DNA, 79 bp, Homo sapiens
atggagtgtccggcatactcttcttcatctgcattagctacttcctccccaacaccatcactgtcctctgtccacgaag

SEQ ID NO: 79851 - DNA, 80 bp, Homo sapiens
ggcatactcttcttcatctgcattagctacttcctccccaacaccatcactgtcctctgtccacgaagtggcaagaggaa

SEQ ID NO: 79852 - DNA, 81 bp, Homo sapiens
tcttcttcatctgcattagctacttcctccccaacaccatcactgtcctctgtccacgaagtggcaagaggaagcctcaca

SEQ ID NO: 79853 - DNA, 79 bp, Homo sapiens
attagctacttcctccccaacaccatcactgtcctctgtccacgaagtggcaagaggaagcctcacactgtggctgtca

SEQ ID NO: 79854 - DNA, 80 bp, Homo sapiens
ctacttcctccccaacaccatcactgtcctctgtccacgaagtggcaagaggaagcctcacactgtggctgtcactggca

SEQ ID NO: 79855 - DNA, 82 bp, Homo sapiens
acaccatcactgtcctctgtccacgaagtggcaagaggaagcctcacactgtggctgtcactggcacccatcataagaggta

SEQ ID NO: 79856 - DNA, 81 bp, Homo sapiens
actgtcctctgtccacgaagtggcaagaggaagcctcacactgtggctgtcactggcacccatcataagaggtagacatta

SEQ ID NO: 79857 - DNA, 78 bp, Homo sapiens
caagaggaagcctcacactgtggctgtcactggcacccatcataagaggtagacattagggccatgggagttttctcc

SEQ ID NO: 79858 - DNA, 79 bp, Homo sapiens
aagcctcacactgtggctgtcactggcacccatcataagaggtagacattagggccatgggagttttctcccagccatg

SEQ ID NO: 79859 - DNA, 76 bp, Homo sapiens
actggcacccatcataagaggtagacattagggccatgggagttttctcccagccatgggcctgaaggctgaacca

SEQ ID NO: 79860 - DNA, 75 bp, Homo sapiens
atcataagaggtagacattagggccatgggagttttctcccagccatgggcctgaaggctgaaccacttgggaca

SEQ ID NO: 79861 - DNA, 75 bp, Homo sapiens
ttagggccatgggagttttctcccagccatgggcctgaaggctgaaccacttgggacactccagacctatccagc

SEQ ID NO: 79862 - DNA, 74 bp, Homo sapiens
agttttctcccagccatgggcctgaaggctgaaccacttgggacactccagacctatccagctcctggtaggct

SEQ ID NO: 79863 - DNA, 77 bp, Homo sapiens
agccatgggcctgaaggctgaaccacttgggacactccagacctatccagctcctggtaggcttggcaagggtcaca

SEQ ID NO: 79864 - DNA, 73 bp, Homo sapiens
aaccacttgggacactccagacctatccagctcctggtaggcttggcaagggtcacagccaccctgcaaaccc

SEQ ID NO: 79865 - DNA, 77 bp, Homo sapiens
ttgggacactccagacctatccagctcctggtaggcttggcaagggtcacagccaccctgcaaacccccagcacatc

SEQ ID NO: 79866 - DNA, 76 bp, Homo sapiens
agacctatccagctcctggtaggcttggcaagggtcacagccaccctgcaaacccccagcacatccctgagggcca

SEQ ID NO: 79867 - DNA, 76 bp, Homo sapiens
agctcctggtaggcttggcaagggtcacagccaccctgcaaacccccagcacatccctgagggccagtcaattcat

SEQ ID NO: 79868 - DNA, 75 bp, Homo sapiens
cttggcaagggtcacagccaccctgcaaacccccagcacatccctgagggccagtcaattcattgggtatgtttg

SEQ ID NO: 79869 - DNA, 75 bp, Homo sapiens
aagggtcacagccaccctgcaaacccccagcacatccctgagggccagtcaattcattgggtatgtttgtcaaga

SEQ ID NO: 79870 - DNA, 75 bp, Homo sapiens
accctgcaaacccccagcacatccctgagggccagtcaattcattgggtatgtttgtcaagactgggcagggaga

SEQ ID NO: 79871 - DNA, 77 bp, Homo sapiens
ccccagcacatccctgagggccagtcaattcattgggtatgtttgtcaagactgggcagggagaggacacagaacaa

SEQ ID NO: 79872 - DNA, 78 bp, Homo sapiens
tccctgagggccagtcaattcattgggtatgtttgtcaagactgggcagggagaggacacagaacaatagactctgta

SEQ ID NO: 79873 - DNA, 75 bp, Homo sapiens
agggccagtcaattcattgggtatgtttgtcaagactgggcagggagaggacacagaacaatagactctgtattt

SEQ ID NO: 79874 - DNA, 76 bp, Homo sapiens
attcattgggtatgtttgtcaagactgggcagggagaggacacagaacaatagactctgtattttctgaccctgta

SEQ ID NO: 79875 - DNA, 76 bp, Homo sapiens
tatgtttgtcaagactgggcagggagaggacacagaacaatagactctgtattttctgaccctgtaaagaaatgga

SEQ ID NO: 79876 - DNA, 73 bp, Homo sapiens
agaacaatagactctgtattttctgaccctgtaaagaaatggagtgatctggttaaccaggaattttgatgaa

SEQ ID NO: 79877 - DNA, 73 bp, Homo sapiens
tattttctgaccctgtaaagaaatggagtgatctggttaaccaggaattttgatgaacataattacaacgcag

SEQ ID NO: 79878 - DNA, 76 bp, Homo sapiens
aggaattttgatgaacataattacaacgcagtccctgcagcaaggatacaggaagttcacccatcaaccctcacag

SEQ ID NO: 79879 - DNA, 76 bp, Homo sapiens
ttgatgaacataattacaacgcagtccctgcagcaaggatacaggaagttcacccatcaaccctcacagggaaact

SEQ ID NO: 79880 - DNA, 76 bp, Homo sapiens
taattacaacgcagtccctgcagcaaggatacaggaagttcacccatcaaccctcacagggaaacttgccaagctg

SEQ ID NO: 79881 - DNA, 75 bp, Homo sapiens
agtccctgcagcaaggatacaggaagttcacccatcaaccctcacagggaaacttgccaagctggaaatatggag

SEQ ID NO: 79882 - DNA, 71 bp, Homo sapiens
aaggatacaggaagttcacccatcaaccctcacagggaaacttgccaagctggaaatatggagtctccggg

SEQ ID NO: 79883 - DNA, 70 bp, Homo sapiens
aagttcacccatcaaccctcacagggaaacttgccaagctggaaatatggagtctccggggggacaagga

SEQ ID NO: 79884 - DNA, 72 bp, Homo sapiens
atcaaccctcacagggaaacttgccaagctggaaatatggagtctccggggggacaaggattgatgaaaaga

SEQ ID NO: 79885 - DNA, 73 bp, Homo sapiens
cctcacagggaaacttgccaagctggaaatatggagtctccggggggacaaggattgatgaaaagatttgcaa

SEQ ID NO: 79886 - DNA, 75 bp, Homo sapiens
aaacttgccaagctggaaatatggagtctccggggggacaaggattgatgaaaagatttgcaaatgatcctgcaa

SEQ ID NO: 79887 - DNA, 77 bp, Homo sapiens
gggacaaggattgatgaaaagatttgcaaatgatcctgcaaactgcaaggatgagttggacggcccctcctgggtca

SEQ ID NO: 79888 - DNA, 78 bp, Homo sapiens
aaagatttgcaaatgatcctgcaaactgcaaggatgagttggacggcccctcctgggtcagaagtcatgtcacagcct

SEQ ID NO: 79889 - DNA, 82 bp, Homo sapiens
atgagttggacggcccctcctgggtcagaagtcatgtcacagccttgcagcatctgagaatcaagctgtcggcagagggtag

SEQ ID NO: 79890 - DNA, 81 bp, Homo sapiens
ttggacggcccctcctgggtcagaagtcatgtcacagccttgcagcatctgagaatcaagctgtcggcagagggtaggaaa

SEQ ID NO: 79891 - DNA, 83 bp, Homo sapiens
tgggtcagaagtcatgtcacagccttgcagcatctgagaatcaagctgtcggcagagggtaggaaagaaatgccttccacgtg

SEQ ID NO: 79892 - DNA, 80 bp, Homo sapiens
aagtcatgtcacagccttgcagcatctgagaatcaagctgtcggcagagggtaggaaagaaatgccttccacgtgggcct

SEQ ID NO: 79893 - DNA, 79 bp, Homo sapiens
acagccttgcagcatctgagaatcaagctgtcggcagagggtaggaaagaaatgccttccacgtgggccttgcagaacc

SEQ ID NO: 79894 - DNA, 76 bp, Homo sapiens
agcatctgagaatcaagctgtcggcagagggtaggaaagaaatgccttccacgtgggccttgcagaacccctattc

SEQ ID NO: 79895 - DNA, 76 bp, Homo sapiens
agaatcaagctgtcggcagagggtaggaaagaaatgccttccacgtgggccttgcagaacccctattcctgcatga

SEQ ID NO: 79896 - DNA, 73 bp, Homo sapiens
ctgtcggcagagggtaggaaagaaatgccttccacgtgggccttgcagaacccctattcctgcatgacccttc

SEQ ID NO: 79897 - DNA, 72 bp, Homo sapiens
agggtaggaaagaaatgccttccacgtgggccttgcagaacccctattcctgcatgacccttcctcctctga

SEQ ID NO: 79898 - DNA, 76 bp, Homo sapiens
aaatgccttccacgtgggccttgcagaacccctattcctgcatgacccttcctcctctgactctggagaatgagat

SEQ ID NO: 79899 - DNA, 75 bp, Homo sapiens
gtgggccttgcagaacccctattcctgcatgacccttcctcctctgactctggagaatgagatttttatggtcgt

SEQ ID NO: 79900 - DNA, 78 bp, Homo sapiens
cagaacccctattcctgcatgacccttcctcctctgactctggagaatgagatttttatggtcgttgcacctgctgta

SEQ ID NO: 79901 - DNA, 80 bp, Homo sapiens
tattcctgcatgacccttcctcctctgactctggagaatgagatttttatggtcgttgcacctgctgtacgaatgtaaga

SEQ ID NO: 79902 - DNA, 78 bp, Homo sapiens
tcctctgactctggagaatgagatttttatggtcgttgcacctgctgtacgaatgtaagacagaagggccagttaata

SEQ ID NO: 79903 - DNA, 75 bp, Homo sapiens
tggagaatgagatttttatggtcgttgcacctgctgtacgaatgtaagacagaagggccagttaatagggttcca

SEQ ID NO: 79904 - DNA, 73 bp, Homo sapiens
agatttttatggtcgttgcacctgctgtacgaatgtaagacagaagggccagttaatagggttccagaggaga

SEQ ID NO: 79905 - DNA, 77 bp, Homo sapiens
ttatggtcgttgcacctgctgtacgaatgtaagacagaagggccagttaatagggttccagaggagacaatgcaaga

SEQ ID NO: 79906 - DNA, 75 bp, Homo sapiens
agaagggccagttaatagggttccagaggagacaatgcaagaaatgaggaaaactctgaatgtgagcatgtttct

SEQ ID NO: 79907 - DNA, 81 bp, Homo sapiens
ccagttaatagggttccagaggagacaatgcaagaaatgaggaaaactctgaatgtgagcatgtttcttgcatctgagatg

SEQ ID NO: 79908 - DNA, 81 bp, Homo sapiens
ttccagaggagacaatgcaagaaatgaggaaaactctgaatgtgagcatgtttcttgcatctgagatggcccgtccttttc

SEQ ID NO: 79909 - DNA, 79 bp, Homo sapiens
agacaatgcaagaaatgaggaaaactctgaatgtgagcatgtttcttgcatctgagatggcccgtccttttcgttggtg

SEQ ID NO: 79910 - DNA, 78 bp, Homo sapiens
agaaatgaggaaaactctgaatgtgagcatgtttcttgcatctgagatggcccgtccttttcgttggtggcatctccc

SEQ ID NO: 79911 - DNA, 82 bp, Homo sapiens
aatgtgagcatgtttcttgcatctgagatggcccgtccttttcgttggtggcatctccccagcggcgccatacggcatgatg

SEQ ID NO: 79912 - DNA, 81 bp, Homo sapiens
tttcttgcatctgagatggcccgtccttttcgttggtggcatctccccagcggcgccatacggcatgatggggatctgaga

SEQ ID NO: 79913 - DNA, 79 bp, Homo sapiens
atctgagatggcccgtccttttcgttggtggcatctccccagcggcgccatacggcatgatggggatctgagagacgcc

SEQ ID NO: 79914 - DNA, 77 bp, Homo sapiens
cccgtccttttcgttggtggcatctccccagcggcgccatacggcatgatggggatctgagagacgcccactcttca

SEQ ID NO: 79915 - DNA, 79 bp, Homo sapiens
cttttcgttggtggcatctccccagcggcgccatacggcatgatggggatctgagagacgcccactcttcagcatgttt

SEQ ID NO: 79916 - DNA, 81 bp, Homo sapiens
atctccccagcggcgccatacggcatgatggggatctgagagacgcccactcttcagcatgttttggaagaatctcggcat

SEQ ID NO: 79917 - DNA, 81 bp, Homo sapiens
agcggcgccatacggcatgatggggatctgagagacgcccactcttcagcatgttttggaagaatctcggcattgacgaac

SEQ ID NO: 79918 - DNA, 81 bp, Homo sapiens
agacgcccactcttcagcatgttttggaagaatctcggcattgacgaaccagcataattgtgccaccaaatatcagagtca

SEQ ID NO: 79919 - DNA, 79 bp, Homo sapiens
actcttcagcatgttttggaagaatctcggcattgacgaaccagcataattgtgccaccaaatatcagagtcactcttt

SEQ ID NO: 79920 - DNA, 79 bp, Homo sapiens
gttttggaagaatctcggcattgacgaaccagcataattgtgccaccaaatatcagagtcactcttttggcctctgata

SEQ ID NO: 79921 - DNA, 77 bp, Homo sapiens
aatctcggcattgacgaaccagcataattgtgccaccaaatatcagagtcactcttttggcctctgatagacgggtt

SEQ ID NO: 79922 - DNA, 77 bp, Homo sapiens
attgacgaaccagcataattgtgccaccaaatatcagagtcactcttttggcctctgatagacgggtttggagcagg

SEQ ID NO: 79923 - DNA, 75 bp, Homo sapiens
attgtgccaccaaatatcagagtcactcttttggcctctgatagacgggtttggagcaggtgcctaaaggcctta

SEQ ID NO: 79924 - DNA, 74 bp, Homo sapiens
aaatatcagagtcactcttttggcctctgatagacgggtttggagcaggtgcctaaaggccttatgactgtgtt

SEQ ID NO: 79925 - DNA, 72 bp, Homo sapiens
actcttttggcctctgatagacgggtttggagcaggtgcctaaaggccttatgactgtgttttagaaccaca

SEQ ID NO: 79926 - DNA, 74 bp, Homo sapiens
tttggcctctgatagacgggtttggagcaggtgcctaaaggccttatgactgtgttttagaaccacaggatctg

SEQ ID NO: 79927 - DNA, 71 bp, Homo sapiens
atagacgggtttggagcaggtgcctaaaggccttatgactgtgttttagaaccacaggatctggggtggag

SEQ ID NO: 79928 - DNA, 74 bp, Homo sapiens
gtgcctaaaggccttatgactgtgttttagaaccacaggatctggggtggaggacctggagtgtcatcccacaa

SEQ ID NO: 79929 - DNA, 75 bp, Homo sapiens
ttatgactgtgttttagaaccacaggatctggggtggaggacctggagtgtcatcccacaagcacccctgaaata

SEQ ID NO: 79930 - DNA, 75 bp, Homo sapiens
tgtgttttagaaccacaggatctggggtggaggacctggagtgtcatcccacaagcacccctgaaatacagagaa

SEQ ID NO: 79931 - DNA, 76 bp, Homo sapiens
acaggatctggggtggaggacctggagtgtcatcccacaagcacccctgaaatacagagaacagctccagaaataa

SEQ ID NO: 79932 - DNA, 74 bp, Homo sapiens
gggtggaggacctggagtgtcatcccacaagcacccctgaaatacagagaacagctccagaaataacaagggaa

SEQ ID NO: 79933 - DNA, 75 bp, Homo sapiens
aggacctggagtgtcatcccacaagcacccctgaaatacagagaacagctccagaaataacaagggaagcaggga

SEQ ID NO: 79934 - DNA, 75 bp, Homo sapiens
gtgtcatcccacaagcacccctgaaatacagagaacagctccagaaataacaagggaagcagggactgcttcccc

SEQ ID NO: 79935 - DNA, 73 bp, Homo sapiens
acaagcacccctgaaatacagagaacagctccagaaataacaagggaagcagggactgcttccccgccttgaa

SEQ ID NO: 79936 - DNA, 69 bp, Homo sapiens
aacagctccagaaataacaagggaagcagggactgcttccccgccttgaagcctggaggggttggggaa

SEQ ID NO: 79937 - DNA, 67 bp, Homo sapiens
aataacaagggaagcagggactgcttccccgccttgaagcctggaggggttggggaacctcagaaaa

SEQ ID NO: 79938 - DNA, 65 bp, Homo sapiens
aagggaagcagggactgcttccccgccttgaagcctggaggggttggggaacctcagaaaaaaaa

SEQ ID NO: 79939 - DNA, 69 bp, Homo sapiens
aaaaaaaccctacattttgttccatttcaaggtctctctggtcctgatgtttcagcacaattaaaaatg

SEQ ID NO: 79940 - DNA, 71 bp, Homo sapiens
aaccctacattttgttccatttcaaggtctctctggtcctgatgtttcagcacaattaaaaatgtaattat

SEQ ID NO: 79941 - DNA, 75 bp, Homo sapiens
tccatttcaaggtctctctggtcctgatgtttcagcacaattaaaaatgtaattattaaatgacaaggtagactc

SEQ ID NO: 79942 - DNA, 74 bp, Homo sapiens
ggtctctctggtcctgatgtttcagcacaattaaaaatgtaattattaaatgacaaggtagactcctcccaata

SEQ ID NO: 79943 - DNA, 72 bp, Homo sapiens
gtcctgatgtttcagcacaattaaaaatgtaattattaaatgacaaggtagactcctcccaatagccggttc

SEQ ID NO: 79944 - DNA, 73 bp, Homo sapiens
tgatgtttcagcacaattaaaaatgtaattattaaatgacaaggtagactcctcccaatagccggttccagct

SEQ ID NO: 79945 - DNA, 71 bp, Homo sapiens
atgtttcagcacaattaaaaatgtaattattaaatgacaaggtagactcctcccaatagccggttccagct

SEQ ID NO: 79946 - DNA, 71 bp, Homo sapiens
agcacaattaaaaatgtaattattaaatgacaaggtagactcctcccaatagccggttccagcttctggat

SEQ ID NO: 79947 - DNA, 72 bp, Homo sapiens
aatgtaattattaaatgacaaggtagactcctcccaatagccggttccagcttctggattccaagccagaaa

SEQ ID NO: 79948 - DNA, 72 bp, Homo sapiens
atgtaattattaaatgacaaggtagactcctcccaatagccggttccagcttctggattccaagccagaaaa

SEQ ID NO: 79949 - DNA, 73 bp, Homo sapiens
ttaaatgacaaggtagactcctcccaatagccggttccagcttctggattccaagccagaaaacctgaatgac

SEQ ID NO: 79950 - DNA, 75 bp, Homo sapiens
aaggtagactcctcccaatagccggttccagcttctggattccaagccagaaaacctgaatgactgtgctcgctg

SEQ ID NO: 79951 - DNA, 76 bp, Homo sapiens
ctcccaatagccggttccagcttctggattccaagccagaaaacctgaatgactgtgctcgctggcttttgattaa

SEQ ID NO: 79952 - DNA, 77 bp, Homo sapiens
agcttctggattccaagccagaaaacctgaatgactgtgctcgctggcttttgattaacagagacattttattcaaa

SEQ ID NO: 79953 - DNA, 76 bp, Homo sapiens
attccaagccagaaaacctgaatgactgtgctcgctggcttttgattaacagagacattttattcaaactctccat

SEQ ID NO: 79954 - DNA, 77 bp, Homo sapiens
agaaaacctgaatgactgtgctcgctggcttttgattaacagagacattttattcaaactctccatttcctgatgaa

SEQ ID NO: 79955 - DNA, 75 bp, Homo sapiens
ttttgattaacagagacattttattcaaactctccatttcctgatgaactgttgaggaatgttgcttctttcctc

SEQ ID NO: 79956 - DNA, 72 bp, Homo sapiens
agagacattttattcaaactctccatttcctgatgaactgttgaggaatgttgcttctttcctcctccccct

SEQ ID NO: 79957 - DNA, 73 bp, Homo sapiens
tttattcaaactctccatttcctgatgaactgttgaggaatgttgcttctttcctcctcccccttccctagca

SEQ ID NO: 79958 - DNA, 72 bp, Homo sapiens
aggaatgttgcttctttcctcctcccccttccctagcagaataaaaatagtgtgggccattctgatatccta

SEQ ID NO: 79959 - DNA, 72 bp, Homo sapiens
ttgcttctttcctcctcccccttccctagcagaataaaaatagtgtgggccattctgatatcctagccccaa

SEQ ID NO: 79960 - DNA, 73 bp, Homo sapiens
cctcccccttccctagcagaataaaaatagtgtgggccattctgatatcctagccccaactcaggatgacaaa

SEQ ID NO: 79961 - DNA, 77 bp, Homo sapiens
ttccctagcagaataaaaatagtgtgggccattctgatatcctagccccaactcaggatgacaaaagcattaggaga

SEQ ID NO: 79962 - DNA, 76 bp, Homo sapiens
aataaaaatagtgtgggccattctgatatcctagccccaactcaggatgacaaaagcattaggagacagcacaaag

SEQ ID NO: 79963 - DNA, 80 bp, Homo sapiens
tgtgggccattctgatatcctagccccaactcaggatgacaaaagcattaggagacagcacaaaggcctaggcataaaga

SEQ ID NO: 79964 - DNA, 79 bp, Homo sapiens
attctgatatcctagccccaactcaggatgacaaaagcattaggagacagcacaaaggcctaggcataaagaggtgctg

SEQ ID NO: 79965 - DNA, 78 bp, Homo sapiens
tatcctagccccaactcaggatgacaaaagcattaggagacagcacaaaggcctaggcataaagaggtgctgtgttcc

SEQ ID NO: 79966 - DNA, 80 bp, Homo sapiens
aactcaggatgacaaaagcattaggagacagcacaaaggcctaggcataaagaggtgctgtgttcccagacagcaagctg

SEQ ID NO: 79967 - DNA, 82 bp, Homo sapiens
aaaagcattaggagacagcacaaaggcctaggcataaagaggtgctgtgttcccagacagcaagctgtgatgtgtgcaatta

SEQ ID NO: 79968 - DNA, 83 bp, Homo sapiens
attaggagacagcacaaaggcctaggcataaagaggtgctgtgttcccagacagcaagctgtgatgtgtgcaattatcttagc

SEQ ID NO: 79969 - DNA, 82 bp, Homo sapiens
cctaggcataaagaggtgctgtgttcccagacagcaagctgtgatgtgtgcaattatcttagcctctctgggcctctgtttc

SEQ ID NO: 79970 - DNA, 76 bp, Homo sapiens
catctgtgaaatggggggattgctagccttgaggtcctataacccatgcatgggacggcttttgtaacacagccta

SEQ ID NO: 79971 - DNA, 72 bp, Homo sapiens
attgctagccttgaggtcctataacccatgcatgggacggcttttgtaacacagcctaaaaccacaaggaaa

SEQ ID NO: 79972 - DNA, 71 bp, Homo sapiens
ccttgaggtcctataacccatgcatgggacggcttttgtaacacagcctaaaaccacaaggaaaatatcaa

SEQ ID NO: 79973 - DNA, 72 bp, Homo sapiens
tataacccatgcatgggacggcttttgtaacacagcctaaaaccacaaggaaaatatcaaggcagttaaatg

SEQ ID NO: 79974 - DNA, 72 bp, Homo sapiens
atgggacggcttttgtaacacagcctaaaaccacaaggaaaatatcaaggcagttaaatgtccagctcagct

SEQ ID NO: 79975 - DNA, 72 bp, Homo sapiens
ttttgtaacacagcctaaaaccacaaggaaaatatcaaggcagttaaatgtccagctcagcttccaaaaaca

SEQ ID NO: 79976 - DNA, 74 bp, Homo sapiens
agcctaaaaccacaaggaaaatatcaaggcagttaaatgtccagctcagcttccaaaaacagcagccacataaa

SEQ ID NO: 79977 - DNA, 73 bp, Homo sapiens
aaaccacaaggaaaatatcaaggcagttaaatgtccagctcagcttccaaaaacagcagccacataaacaaaa

SEQ ID NO: 79978 - DNA, 77 bp, Homo sapiens
agttaaatgtccagctcagcttccaaaaacagcagccacataaacaaaagagacgacagaggcctgacaagacacaa

SEQ ID NO: 79979 - DNA, 77 bp, Homo sapiens
ttccaaaaacagcagccacataaacaaaagagacgacagaggcctgacaagacacaaatcttgatgaaatattgctt

SEQ ID NO: 79980 - DNA, 79 bp, Homo sapiens
aaaacagcagccacataaacaaaagagacgacagaggcctgacaagacacaaatcttgatgaaatattgctttgctcgc

SEQ ID NO: 79981 - DNA, 79 bp, Homo sapiens
ataaacaaaagagacgacagaggcctgacaagacacaaatcttgatgaaatattgctttgctcgctgcaagcttccctc

SEQ ID NO: 79982 - DNA, 78 bp, Homo sapiens
aggcctgacaagacacaaatcttgatgaaatattgctttgctcgctgcaagcttccctccaaacacttttgggctcta

SEQ ID NO: 79983 - DNA, 76 bp, Homo sapiens
aagacacaaatcttgatgaaatattgctttgctcgctgcaagcttccctccaaacacttttgggctctaaagagaa

SEQ ID NO: 79984 - DNA, 74 bp, Homo sapiens
aaatcttgatgaaatattgctttgctcgctgcaagcttccctccaaacacttttgggctctaaagagaaagagg

SEQ ID NO: 79985 - DNA, 73 bp, Homo sapiens
aatattgctttgctcgctgcaagcttccctccaaacacttttgggctctaaagagaaagaggtctcaaactct

SEQ ID NO: 79986 - DNA, 68 bp, Homo sapiens
aagcttccctccaaacacttttgggctctaaagagaaagaggtctcaaactcttttggtctagatacc

SEQ ID NO: 79987 - DNA, 67 bp, Homo sapiens
aaacacttttgggctctaaagagaaagaggtctcaaactcttttggtctagataccctttcatttac

SEQ ID NO: 79988 - DNA, 69 bp, Homo sapiens
ttttgggctctaaagagaaagaggtctcaaactcttttggtctagataccctttcatttactcaaccaa

SEQ ID NO: 79989 - DNA, 70 bp, Homo sapiens
aagagaaagaggtctcaaactcttttggtctagataccctttcatttactcaaccaaatctgacttagaa

SEQ ID NO: 79990 - DNA, 70 bp, Homo sapiens
ctcaaactcttttggtctagataccctttcatttactcaaccaaatctgacttagaatcggtgggaaaga

SEQ ID NO: 79991 - DNA, 68 bp, Homo sapiens
actcttttggtctagataccctttcatttactcaaccaaatctgacttagaatcggtgggaaagaaag

SEQ ID NO: 79992 - DNA, 71 bp, Homo sapiens
ataccctttcatttactcaaccaaatctgacttagaatcggtgggaaagaaaggcttgtctgagacaccaa

SEQ ID NO: 79993 - DNA, 73 bp, Homo sapiens
ccaaatctgacttagaatcggtgggaaagaaaggcttgtctgagacaccaacaaagcgaagtgatataccaaa

SEQ ID NO: 79994 - DNA, 71 bp, Homo sapiens
acttagaatcggtgggaaagaaaggcttgtctgagacaccaacaaagcgaagtgatataccaaaaattgga

SEQ ID NO: 79995 - DNA, 71 bp, Homo sapiens
aatcggtgggaaagaaaggcttgtctgagacaccaacaaagcgaagtgatataccaaaaattggaaatgaa

SEQ ID NO: 79996 - DNA, 74 bp, Homo sapiens
aaagaaaggcttgtctgagacaccaacaaagcgaagtgatataccaaaaattggaaatgaaatgcatgcccaaa

SEQ ID NO: 79997 - DNA, 81 bp, Homo sapiens
aagtgatataccaaaaattggaaatgaaatgcatgcccaaatcacggtatgcgatagtgcacatgacctcaggtctgtatg

SEQ ID NO: 79998 - DNA, 82 bp, Homo sapiens
ttggaaatgaaatgcatgcccaaatcacggtatgcgatagtgcacatgacctcaggtctgtatggggaggctgaacagttgg

SEQ ID NO: 79999 - DNA, 81 bp, Homo sapiens
aatgcatgcccaaatcacggtatgcgatagtgcacatgacctcaggtctgtatggggaggctgaacagttggggattctct

SEQ ID NO: 80000 - DNA, 76 bp, Homo sapiens
aaatcacggtatgcgatagtgcacatgacctcaggtctgtatggggaggctgaacagttggggattctcttcccct

SEQ ID NO: 80001 - DNA, 79 bp, Homo sapiens
tatgcgatagtgcacatgacctcaggtctgtatggggaggctgaacagttggggattctcttcccctttgccacaggtc

SEQ ID NO: 80002 - DNA, 73 bp, Homo sapiens
acatgacctcaggtctgtatggggaggctgaacagttggggattctcttcccctttgccacaggtccctgtta

SEQ ID NO: 80003 - DNA, 71 bp, Homo sapiens
gtctgtatggggaggctgaacagttggggattctcttcccctttgccacaggtccctgttacggccaatta

SEQ ID NO: 80004 - DNA, 71 bp, Homo sapiens
gggaggctgaacagttggggattctcttcccctttgccacaggtccctgttacggccaattaatgctgaaa

SEQ ID NO: 80005 - DNA, 69 bp, Homo sapiens
cagttggggattctcttcccctttgccacaggtccctgttacggccaattaatgctgaaacgtccctat

SEQ ID NO: 80006 - DNA, 68 bp, Homo sapiens
ccctttgccacaggtccctgttacggccaattaatgctgaaacgtccctatttgtcaaaggaaggagt

SEQ ID NO: 80007 - DNA, 69 bp, Homo sapiens
aaacgtccctatttgtcaaaggaaggagttgagctagtacttttctcttcgtcctaaagattaatgatc

SEQ ID NO: 80008 - DNA, 76 bp, Homo sapiens
aaggagttgagctagtacttttctcttcgtcctaaagattaatgatcttgacatgcatcctaggttttctatgcta

SEQ ID NO: 80009 - DNA, 80 bp, Homo sapiens
tttctcttcgtcctaaagattaatgatcttgacatgcatcctaggttttctatgctagttgatatctataacgatatcac

SEQ ID NO: 80010 - DNA, 81 bp, Homo sapiens
ctaaagattaatgatcttgacatgcatcctaggttttctatgctagttgatatctataacgatatcacttgtcctgaccta

SEQ ID NO: 80011 - DNA, 74 bp, Homo sapiens
atcctaggttttctatgctagttgatatctataacgatatcacttgtcctgacctagaaaacacttttgaagga

SEQ ID NO: 80012 - DNA, 76 bp, Homo sapiens
ctatgctagttgatatctataacgatatcacttgtcctgacctagaaaacacttttgaaggacattttgtagattg

SEQ ID NO: 80013 - DNA, 74 bp, Homo sapiens
gttgatatctataacgatatcacttgtcctgacctagaaaacacttttgaaggacattttgtagattgttgacc

SEQ ID NO: 80014 - DNA, 72 bp, Homo sapiens
ataacgatatcacttgtcctgacctagaaaacacttttgaaggacattttgtagattgttgacctaacagac

SEQ ID NO: 80015 - DNA, 69 bp, Homo sapiens
acttgtcctgacctagaaaacacttttgaaggacattttgtagattgttgacctaacagactccctagg

SEQ ID NO: 80016 - DNA, 69 bp, Homo sapiens
tagaaaacacttttgaaggacattttgtagattgttgacctaacagactccctagggagttcctggaag

SEQ ID NO: 80017 - DNA, 69 bp, Homo sapiens
acacttttgaaggacattttgtagattgttgacctaacagactccctagggagttcctggaagggtgag

SEQ ID NO: 80018 - DNA, 67 bp, Homo sapiens
attttgtagattgttgacctaacagactccctagggagttcctggaagggtgagggcccctctaaag

SEQ ID NO: 80019 - DNA, 70 bp, Homo sapiens
gtagattgttgacctaacagactccctagggagttcctggaagggtgagggcccctctaaaggattgctg

SEQ ID NO: 80020 - DNA, 70 bp, Homo sapiens
ctagggagttcctggaagggtgagggcccctctaaaggattgctggtcaacttccctttgcagcagaaaa

SEQ ID NO: 80021 - DNA, 70 bp, Homo sapiens
agttcctggaagggtgagggcccctctaaaggattgctggtcaacttccctttgcagcagaaaaagcctg

SEQ ID NO: 80022 - DNA, 72 bp, Homo sapiens
tctaaaggattgctggtcaacttccctttgcagcagaaaaagcctgggaacaagagagttttgccaaacttg

SEQ ID NO: 80023 - DNA, 72 bp, Homo sapiens
aggattgctggtcaacttccctttgcagcagaaaaagcctgggaacaagagagttttgccaaacttggtatg

SEQ ID NO: 80024 - DNA, 72 bp, Homo sapiens
aacttccctttgcagcagaaaaagcctgggaacaagagagttttgccaaacttggtatggcccagagagaga

SEQ ID NO: 80025 - DNA, 76 bp, Homo sapiens
gagagacagagagactatcctccctagccttcctttagtattaagctgcaaagcccccaaatgccttatgtcattg

SEQ ID NO: 80026 - DNA, 72 bp, Homo sapiens
tccctagccttcctttagtattaagctgcaaagcccccaaatgccttatgtcattgttttgggcactttcta

SEQ ID NO: 80027 - DNA, 73 bp, Homo sapiens
ttcctttagtattaagctgcaaagcccccaaatgccttatgtcattgttttgggcactttctagacttctgag

SEQ ID NO: 80028 - DNA, 73 bp, Homo sapiens
tagtattaagctgcaaagcccccaaatgccttatgtcattgttttgggcactttctagacttctgaggaaaac

SEQ ID NO: 80029 - DNA, 69 bp, Homo sapiens
aaagcccccaaatgccttatgtcattgttttgggcactttctagacttctgaggaaaaccccagaacca

SEQ ID NO: 80030 - DNA, 71 bp, Homo sapiens
tcattgttttgggcactttctagacttctgaggaaaaccccagaaccaaatttaccaagcgtcctattgca

SEQ ID NO: 80031 - DNA, 70 bp, Homo sapiens
ttctgaggaaaaccccagaaccaaatttaccaagcgtcctattgcattcaaaatggatttaagttcagaa

SEQ ID NO: 80032 - DNA, 69 bp, Homo sapiens
aaatttaccaagcgtcctattgcattcaaaatggatttaagttcagaagcaagggagggagtccaaagt

SEQ ID NO: 80033 - DNA, 76 bp, Homo sapiens
gtcctattgcattcaaaatggatttaagttcagaagcaagggagggagtccaaagttgctagctggatcagtaaca

SEQ ID NO: 80034 - DNA, 75 bp, Homo sapiens
attcaaaatggatttaagttcagaagcaagggagggagtccaaagttgctagctggatcagtaacaggctcagta

SEQ ID NO: 80035 - DNA, 79 bp, Homo sapiens
aagggagggagtccaaagttgctagctggatcagtaacaggctcagtatctcatgcaaagcagcccgctcaccagaaag

SEQ ID NO: 80036 - DNA, 84 bp, Homo sapiens
agtccaaagttgctagctggatcagtaacaggctcagtatctcatgcaaagcagcccgctcaccagaaaggatcttcaagcaca

SEQ ID NO: 80037 - DNA, 89 bp, Homo sapiens
ttgctagctggatcagtaacaggctcagtatctcatgcaaagcagcccgctcaccagaaaggatcttcaagcacaagcgacacagctgc

SEQ ID NO: 80038 - DNA, 88 bp, Homo sapiens
atcagtaacaggctcagtatctcatgcaaagcagcccgctcaccagaaaggatcttcaagcacaagcgacacagctgctgcccgcaga

SEQ ID NO: 80039 - DNA, 87 bp, Homo sapiens
aggctcagtatctcatgcaaagcagcccgctcaccagaaaggatcttcaagcacaagcgacacagctgctgcccgcagatgcaccgg

SEQ ID NO: 80040 - DNA, 82 bp, Homo sapiens
atgcaaagcagcccgctcaccagaaaggatcttcaagcacaagcgacacagctgctgcccgcagatgcaccggggggcaaaa

SEQ ID NO: 80041 - DNA, 80 bp, Homo sapiens
agcccgctcaccagaaaggatcttcaagcacaagcgacacagctgctgcccgcagatgcaccggggggcaaaagctggct

SEQ ID NO: 80042 - DNA, 78 bp, Homo sapiens
accagaaaggatcttcaagcacaagcgacacagctgctgcccgcagatgcaccggggggcaaaagctggcttcctcgg

SEQ ID NO: 80043 - DNA, 79 bp, Homo sapiens
ttcaagcacaagcgacacagctgctgcccgcagatgcaccggggggcaaaagctggcttcctcggggaattagtgctgt

SEQ ID NO: 80044 - DNA, 76 bp, Homo sapiens
aagcgacacagctgctgcccgcagatgcaccggggggcaaaagctggcttcctcggggaattagtgctgttgtaaa

SEQ ID NO: 80045 - DNA, 76 bp, Homo sapiens
acagctgctgcccgcagatgcaccggggggcaaaagctggcttcctcggggaattagtgctgttgtaaagaaggca

SEQ ID NO: 80046 - DNA, 75 bp, Homo sapiens
cagatgcaccggggggcaaaagctggcttcctcggggaattagtgctgttgtaaagaaggcagactgaagctcat

SEQ ID NO: 80047 - DNA, 74 bp, Homo sapiens
ggggggcaaaagctggcttcctcggggaattagtgctgttgtaaagaaggcagactgaagctcattatggtata

SEQ ID NO: 80048 - DNA, 74 bp, Homo sapiens
aaaagctggcttcctcggggaattagtgctgttgtaaagaaggcagactgaagctcattatggtataagagtag

SEQ ID NO: 80049 - DNA, 80 bp, Homo sapiens
ctgttgtaaagaaggcagactgaagctcattatggtataagagtaggtgcctctgacggcccgcctgcacctgcgatcca

SEQ ID NO: 80050 - DNA, 81 bp, Homo sapiens
aaggcagactgaagctcattatggtataagagtaggtgcctctgacggcccgcctgcacctgcgatccagctggcctggct

SEQ ID NO: 80051 - DNA, 80 bp, Homo sapiens
aagctcattatggtataagagtaggtgcctctgacggcccgcctgcacctgcgatccagctggcctggctttgtggccac

SEQ ID NO: 80052 - DNA, 81 bp, Homo sapiens
tatggtataagagtaggtgcctctgacggcccgcctgcacctgcgatccagctggcctggctttgtggccaccagttgctg

SEQ ID NO: 80053 - DNA, 81 bp, Homo sapiens
agtaggtgcctctgacggcccgcctgcacctgcgatccagctggcctggctttgtggccaccagttgctggctggagtggc

SEQ ID NO: 80054 - DNA, 85 bp, Homo sapiens
tctgacggcccgcctgcacctgcgatccagctggcctggctttgtggccaccagttgctggctggagtggcctgcaggcactgaa

SEQ ID NO: 80055 - DNA, 83 bp, Homo sapiens
ctgcacctgcgatccagctggcctggctttgtggccaccagttgctggctggagtggcctgcaggcactgaaggaaaatggaa

SEQ ID NO: 80056 - DNA, 82 bp, Homo sapiens
atccagctggcctggctttgtggccaccagttgctggctggagtggcctgcaggcactgaaggaaaatggaagcagctcatt

SEQ ID NO: 80057 - DNA, 80 bp, Homo sapiens
ctggcctggctttgtggccaccagttgctggctggagtggcctgcaggcactgaaggaaaatggaagcagctcatttccc

SEQ ID NO: 80058 - DNA, 79 bp, Homo sapiens
tttgtggccaccagttgctggctggagtggcctgcaggcactgaaggaaaatggaagcagctcatttccccaacacgga

SEQ ID NO: 80059 - DNA, 79 bp, Homo sapiens
agttgctggctggagtggcctgcaggcactgaaggaaaatggaagcagctcatttccccaacacggagactcattccac

SEQ ID NO: 80060 - DNA, 82 bp, Homo sapiens
gagtggcctgcaggcactgaaggaaaatggaagcagctcatttccccaacacggagactcattccactgactgcagtgccta

SEQ ID NO: 80061 - DNA, 79 bp, Homo sapiens
caggcactgaaggaaaatggaagcagctcatttccccaacacggagactcattccactgactgcagtgcctacggcctg

SEQ ID NO: 80062 - DNA, 78 bp, Homo sapiens
aaggaaaatggaagcagctcatttccccaacacggagactcattccactgactgcagtgcctacggcctgtgctccaa

SEQ ID NO: 80063 - DNA, 81 bp, Homo sapiens
aatggaagcagctcatttccccaacacggagactcattccactgactgcagtgcctacggcctgtgctccaagtgattcta

SEQ ID NO: 80064 - DNA, 80 bp, Homo sapiens
aacacggagactcattccactgactgcagtgcctacggcctgtgctccaagtgattctaatcaaagacttctgactccga

SEQ ID NO: 80065 - DNA, 81 bp, Homo sapiens
attccactgactgcagtgcctacggcctgtgctccaagtgattctaatcaaagacttctgactccgagagatggttcctga

SEQ ID NO: 80066 - DNA, 82 bp, Homo sapiens
actgcagtgcctacggcctgtgctccaagtgattctaatcaaagacttctgactccgagagatggttcctgatgaggtctga

SEQ ID NO: 80067 - DNA, 81 bp, Homo sapiens
cctgtgctccaagtgattctaatcaaagacttctgactccgagagatggttcctgatgaggtctgaaccctgagctctgga

SEQ ID NO: 80068 - DNA, 77 bp, Homo sapiens
aagtgattctaatcaaagacttctgactccgagagatggttcctgatgaggtctgaaccctgagctctggagggaaa

SEQ ID NO: 80069 - DNA, 76 bp, Homo sapiens
aaagacttctgactccgagagatggttcctgatgaggtctgaaccctgagctctggagggaaatgaagtctaataa

SEQ ID NO: 80070 - DNA, 78 bp, Homo sapiens
ttctgactccgagagatggttcctgatgaggtctgaaccctgagctctggagggaaatgaagtctaataagggctgga

SEQ ID NO: 80071 - DNA, 73 bp, Homo sapiens
atgaggtctgaaccctgagctctggagggaaatgaagtctaataagggctggaaccgtttccaagactcagta

SEQ ID NO: 80072 - DNA, 71 bp, Homo sapiens
gtctgaaccctgagctctggagggaaatgaagtctaataagggctggaaccgtttccaagactcagtaagg

SEQ ID NO: 80073 - DNA, 72 bp, Homo sapiens
tctggagggaaatgaagtctaataagggctggaaccgtttccaagactcagtaaggggtgcaattctcacca

SEQ ID NO: 80074 - DNA, 69 bp, Homo sapiens
aataagggctggaaccgtttccaagactcagtaaggggtgcaattctcaccaacccgattcaactaaca

SEQ ID NO: 80075 - DNA, 70 bp, Homo sapiens
gggctggaaccgtttccaagactcagtaaggggtgcaattctcaccaacccgattcaactaacatttctg

SEQ ID NO: 80076 - DNA, 80 bp, Homo sapiens
tccaagactcagtaaggggtgcaattctcaccaacccgattcaactaacatttctggagctgctgccgctggcacatata

SEQ ID NO: 80077 - DNA, 81 bp, Homo sapiens
gtgcaattctcaccaacccgattcaactaacatttctggagctgctgccgctggcacatataaagtaggcaaatggtgaca

SEQ ID NO: 80078 - DNA, 77 bp, Homo sapiens
accaacccgattcaactaacatttctggagctgctgccgctggcacatataaagtaggcaaatggtgacagccaagg

SEQ ID NO: 80079 - DNA, 81 bp, Homo sapiens
attcaactaacatttctggagctgctgccgctggcacatataaagtaggcaaatggtgacagccaagggccttgctatgga

SEQ ID NO: 80080 - DNA, 83 bp, Homo sapiens
atttctggagctgctgccgctggcacatataaagtaggcaaatggtgacagccaagggccttgctatggagatgtgagaccta

SEQ ID NO: 80081 - DNA, 84 bp, Homo sapiens
ctgctgccgctggcacatataaagtaggcaaatggtgacagccaagggccttgctatggagatgtgagacctaccactgctctg

SEQ ID NO: 80082 - DNA, 82 bp, Homo sapiens
tggcacatataaagtaggcaaatggtgacagccaagggccttgctatggagatgtgagacctaccactgctctgtgccaccg

SEQ ID NO: 80083 - DNA, 80 bp, Homo sapiens
ataaagtaggcaaatggtgacagccaagggccttgctatggagatgtgagacctaccactgctctgtgccaccgtgcgaa

SEQ ID NO: 80084 - DNA, 80 bp, Homo sapiens
agccaagggccttgctatggagatgtgagacctaccactgctctgtgccaccgtgcgaagaacacaggatgggaatcgga

SEQ ID NO: 80085 - DNA, 80 bp, Homo sapiens
ccttgctatggagatgtgagacctaccactgctctgtgccaccgtgcgaagaacacaggatgggaatcggagctggtaaa

SEQ ID NO: 80086 - DNA, 83 bp, Homo sapiens
agatgtgagacctaccactgctctgtgccaccgtgcgaagaacacaggatgggaatcggagctggtaaagctgcagcagtctc

SEQ ID NO: 80087 - DNA, 86 bp, Homo sapiens
taccactgctctgtgccaccgtgcgaagaacacaggatgggaatcggagctggtaaagctgcagcagtctcgctggcagatcttga

SEQ ID NO: 80088 - DNA, 84 bp, Homo sapiens
tgtgccaccgtgcgaagaacacaggatgggaatcggagctggtaaagctgcagcagtctcgctggcagatcttgagcaacctct

SEQ ID NO: 80089 - DNA, 82 bp, Homo sapiens
accgtgcgaagaacacaggatgggaatcggagctggtaaagctgcagcagtctcgctggcagatcttgagcaacctcttcca

SEQ ID NO: 80090 - DNA, 85 bp, Homo sapiens
agaacacaggatgggaatcggagctggtaaagctgcagcagtctcgctggcagatcttgagcaacctcttccatctctgctggga

SEQ ID NO: 80091 - DNA, 86 bp, Homo sapiens
aatcggagctggtaaagctgcagcagtctcgctggcagatcttgagcaacctcttccatctctgctgggaggcctcaattgcttca

SEQ ID NO: 80092 - DNA, 86 bp, Homo sapiens
tggtaaagctgcagcagtctcgctggcagatcttgagcaacctcttccatctctgctgggaggcctcaattgcttcatctctaaaa

SEQ ID NO: 80093 - DNA, 83 bp, Homo sapiens
cagcagtctcgctggcagatcttgagcaacctcttccatctctgctgggaggcctcaattgcttcatctctaaaacacggaag

SEQ ID NO: 80094 - DNA, 82 bp, Homo sapiens
tctcgctggcagatcttgagcaacctcttccatctctgctgggaggcctcaattgcttcatctctaaaacacggaagttgga

SEQ ID NO: 80095 - DNA, 79 bp, Homo sapiens
agatcttgagcaacctcttccatctctgctgggaggcctcaattgcttcatctctaaaacacggaagttggaccagatg

SEQ ID NO: 80096 - DNA, 76 bp, Homo sapiens
aacctcttccatctctgctgggaggcctcaattgcttcatctctaaaacacggaagttggaccagatggtctccaa

SEQ ID NO: 80097 - DNA, 78 bp, Homo sapiens
tctgctgggaggcctcaattgcttcatctctaaaacacggaagttggaccagatggtctccaagggctttcatatata

SEQ ID NO: 80098 - DNA, 77 bp, Homo sapiens
tgggaggcctcaattgcttcatctctaaaacacggaagttggaccagatggtctccaagggctttcatatatacata

SEQ ID NO: 80099 - DNA, 74 bp, Homo sapiens
gcgcccggcccaataattctaaatgtcagcattagtatatatgttttaaggacatgccattttaataggagaaa

SEQ ID NO: 80100 - DNA, 72 bp, Homo sapiens
cggcccaataattctaaatgtcagcattagtatatatgttttaaggacatgccattttaataggagaaaaaa

SEQ ID NO: 80101 - DNA, 74 bp, Homo sapiens
ctaaatgtcagcattagtatatatgttttaaggacatgccattttaataggagaaaaaaagtcacattcaagtg

SEQ ID NO: 80102 - DNA, 76 bp, Homo sapiens
gcattagtatatatgttttaaggacatgccattttaataggagaaaaaaagtcacattcaagtgtagacatgggca

SEQ ID NO: 80103 - DNA, 76 bp, Homo sapiens
atatgttttaaggacatgccattttaataggagaaaaaaagtcacattcaagtgtagacatgggcatcatgtctag

SEQ ID NO: 80104 - DNA, 80 bp, Homo sapiens
ttaaggacatgccattttaataggagaaaaaaagtcacattcaagtgtagacatgggcatcatgtctaggaggcatctga

SEQ ID NO: 80105 - DNA, 78 bp, Homo sapiens
ttttaataggagaaaaaaagtcacattcaagtgtagacatgggcatcatgtctaggaggcatctgactgttcctgaaa

SEQ ID NO: 80106 - DNA, 80 bp, Homo sapiens
agaaaaaaagtcacattcaagtgtagacatgggcatcatgtctaggaggcatctgactgttcctgaaacgtgggctgtgc

SEQ ID NO: 80107 - DNA, 80 bp, Homo sapiens
aaagtcacattcaagtgtagacatgggcatcatgtctaggaggcatctgactgttcctgaaacgtgggctgtgccccaaa

SEQ ID NO: 80108 - DNA, 79 bp, Homo sapiens
aagtgtagacatgggcatcatgtctaggaggcatctgactgttcctgaaacgtgggctgtgccccaaacaccaaggatc

SEQ ID NO: 80109 - DNA, 79 bp, Homo sapiens
acatgggcatcatgtctaggaggcatctgactgttcctgaaacgtgggctgtgccccaaacaccaaggatcctgcctta

SEQ ID NO: 80110 - DNA, 77 bp, Homo sapiens
atgtctaggaggcatctgactgttcctgaaacgtgggctgtgccccaaacaccaaggatcctgccttactgcaccca

SEQ ID NO: 80111 - DNA, 76 bp, Homo sapiens
atctgactgttcctgaaacgtgggctgtgccccaaacaccaaggatcctgccttactgcacccaggattctgtgct

SEQ ID NO: 80112 - DNA, 75 bp, Homo sapiens
ctgttcctgaaacgtgggctgtgccccaaacaccaaggatcctgccttactgcacccaggattctgtgcttccac

SEQ ID NO: 80113 - DNA, 76 bp, Homo sapiens
aacgtgggctgtgccccaaacaccaaggatcctgccttactgcacccaggattctgtgcttccacctctcaccaca

SEQ ID NO: 80114 - DNA, 78 bp, Homo sapiens
cccaaacaccaaggatcctgccttactgcacccaggattctgtgcttccacctctcaccacactgagttctgtcctga

SEQ ID NO: 80115 - DNA, 80 bp, Homo sapiens
accaaggatcctgccttactgcacccaggattctgtgcttccacctctcaccacactgagttctgtcctgatgcgtccac

SEQ ID NO: 80116 - DNA, 80 bp, Homo sapiens
ccttactgcacccaggattctgtgcttccacctctcaccacactgagttctgtcctgatgcgtccacctcttccctgtca

SEQ ID NO: 80117 - DNA, 78 bp, Homo sapiens
acccaggattctgtgcttccacctctcaccacactgagttctgtcctgatgcgtccacctcttccctgtcactcctcc

SEQ ID NO: 80118 - DNA, 79 bp, Homo sapiens
attctgtgcttccacctctcaccacactgagttctgtcctgatgcgtccacctcttccctgtcactcctccgagccacg

SEQ ID NO: 80119 - DNA, 78 bp, Homo sapiens
acctctcaccacactgagttctgtcctgatgcgtccacctcttccctgtcactcctccgagccacgtgagtggtctta

SEQ ID NO: 80120 - DNA, 79 bp, Homo sapiens
acactgagttctgtcctgatgcgtccacctcttccctgtcactcctccgagccacgtgagtggtcttagctctatttgc

SEQ ID NO: 80121 - DNA, 79 bp, Homo sapiens
gttctgtcctgatgcgtccacctcttccctgtcactcctccgagccacgtgagtggtcttagctctatttgcctagcaa

SEQ ID NO: 80122 - DNA, 77 bp, Homo sapiens
atgcgtccacctcttccctgtcactcctccgagccacgtgagtggtcttagctctatttgcctagcaactggatttc

SEQ ID NO: 80123 - DNA, 76 bp, Homo sapiens
actcctccgagccacgtgagtggtcttagctctatttgcctagcaactggatttctgccctggaatcctgggcttc

SEQ ID NO: 80124 - DNA, 81 bp, Homo sapiens
agccacgtgagtggtcttagctctatttgcctagcaactggatttctgccctggaatcctgggcttctgtctctgcatcac

SEQ ID NO: 80125 - DNA, 81 bp, Homo sapiens
agctctatttgcctagcaactggatttctgccctggaatcctgggcttctgtctctgcatcaccctggatgcaccaaaggc

SEQ ID NO: 80126 - DNA, 79 bp, Homo sapiens
tagcaactggatttctgccctggaatcctgggcttctgtctctgcatcaccctggatgcaccaaaggcgggttccagtg

SEQ ID NO: 80127 - DNA, 75 bp, Homo sapiens
atttctgccctggaatcctgggcttctgtctctgcatcaccctggatgcaccaaaggcgggttccagtggaattt

SEQ ID NO: 80128 - DNA, 75 bp, Homo sapiens
gaatcctgggcttctgtctctgcatcaccctggatgcaccaaaggcgggttccagtggaatttttctgggcctgt

SEQ ID NO: 80129 - DNA, 77 bp, Homo sapiens
cttctgtctctgcatcaccctggatgcaccaaaggcgggttccagtggaatttttctgggcctgttagcagttagca

SEQ ID NO: 80130 - DNA, 77 bp, Homo sapiens
tctctgcatcaccctggatgcaccaaaggcgggttccagtggaatttttctgggcctgttagcagttagcacttctg

SEQ ID NO: 80131 - DNA, 78 bp, Homo sapiens
tggatgcaccaaaggcgggttccagtggaatttttctgggcctgttagcagttagcacttctggctgactgctcacat

SEQ ID NO: 80132 - DNA, 75 bp, Homo sapiens
accaaaggcgggttccagtggaatttttctgggcctgttagcagttagcacttctggctgactgctcacattaca

SEQ ID NO: 80133 - DNA, 77 bp, Homo sapiens
aatttttctgggcctgttagcagttagcacttctggctgactgctcacattacacccctaacacacagcccacttca

SEQ ID NO: 80134 - DNA, 78 bp, Homo sapiens
ctgggcctgttagcagttagcacttctggctgactgctcacattacacccctaacacacagcccacttcagcttgggg

SEQ ID NO: 80135 - DNA, 78 bp, Homo sapiens
agttagcacttctggctgactgctcacattacacccctaacacacagcccacttcagcttgggggcagcccaccaaca

SEQ ID NO: 80136 - DNA, 80 bp, Homo sapiens
acttctggctgactgctcacattacacccctaacacacagcccacttcagcttgggggcagcccaccaacagcctctgca

SEQ ID NO: 80137 - DNA, 77 bp, Homo sapiens
actgctcacattacacccctaacacacagcccacttcagcttgggggcagcccaccaacagcctctgcaccccacac

SEQ ID NO: 80138 - DNA, 74 bp, Homo sapiens
attacacccctaacacacagcccacttcagcttgggggcagcccaccaacagcctctgcaccccacacgccctc

SEQ ID NO: 80139 - DNA, 76 bp, Homo sapiens
taacacacagcccacttcagcttgggggcagcccaccaacagcctctgcaccccacacgccctcttcccaagagct

SEQ ID NO: 80140 - DNA, 75 bp, Homo sapiens
cttcagcttgggggcagcccaccaacagcctctgcaccccacacgccctcttcccaagagcttgacttcggctct

SEQ ID NO: 80141 - DNA, 76 bp, Homo sapiens
accaacagcctctgcaccccacacgccctcttcccaagagcttgacttcggctcttcccagctccttgcatgccct

SEQ ID NO: 80142 - DNA, 78 bp, Homo sapiens
tctgcaccccacacgccctcttcccaagagcttgacttcggctcttcccagctccttgcatgcccttcagtgttcttc

SEQ ID NO: 80143 - DNA, 78 bp, Homo sapiens
acacgccctcttcccaagagcttgacttcggctcttcccagctccttgcatgcccttcagtgttcttcttctctgcta

SEQ ID NO: 80144 - DNA, 78 bp, Homo sapiens
gctcttcccagctccttgcatgcccttcagtgttcttcttctctgctactccctccacccccatgaagcacccaacca

SEQ ID NO: 80145 - DNA, 78 bp, Homo sapiens
agctccttgcatgcccttcagtgttcttcttctctgctactccctccacccccatgaagcacccaaccacgatccaca

SEQ ID NO: 80146 - DNA, 79 bp, Homo sapiens
ttgcatgcccttcagtgttcttcttctctgctactccctccacccccatgaagcacccaaccacgatccacacacaggc

SEQ ID NO: 80147 - DNA, 78 bp, Homo sapiens
ttcagtgttcttcttctctgctactccctccacccccatgaagcacccaaccacgatccacacacaggcctgccagaa

SEQ ID NO: 80148 - DNA, 76 bp, Homo sapiens
ccctccacccccatgaagcacccaaccacgatccacacacaggcctgccagaactccctgtgccctacagtcagac

SEQ ID NO: 80149 - DNA, 79 bp, Homo sapiens
cccatgaagcacccaaccacgatccacacacaggcctgccagaactccctgtgccctacagtcagacccaaggcagcca

SEQ ID NO: 80150 - DNA, 76 bp, Homo sapiens
acccaaccacgatccacacacaggcctgccagaactccctgtgccctacagtcagacccaaggcagccacaccttg

SEQ ID NO: 80151 - DNA, 77 bp, Homo sapiens
acgatccacacacaggcctgccagaactccctgtgccctacagtcagacccaaggcagccacaccttggtcagaact

SEQ ID NO: 80152 - DNA, 78 bp, Homo sapiens
acacaggcctgccagaactccctgtgccctacagtcagacccaaggcagccacaccttggtcagaacttgagtgattg

SEQ ID NO: 80153 - DNA, 80 bp, Homo sapiens
tgtgccctacagtcagacccaaggcagccacaccttggtcagaacttgagtgattggtctgggttcctcacagcagcaaa

SEQ ID NO: 80154 - DNA, 80 bp, Homo sapiens
tacagtcagacccaaggcagccacaccttggtcagaacttgagtgattggtctgggttcctcacagcagcaaatctccaa

SEQ ID NO: 80155 - DNA, 78 bp, Homo sapiens
ccaaggcagccacaccttggtcagaacttgagtgattggtctgggttcctcacagcagcaaatctccaagtgtggccc

SEQ ID NO: 80156 - DNA, 75 bp, Homo sapiens
acaccttggtcagaacttgagtgattggtctgggttcctcacagcagcaaatctccaagtgtggcccccgcacgg

SEQ ID NO: 80157 - DNA, 78 bp, Homo sapiens
aacttgagtgattggtctgggttcctcacagcagcaaatctccaagtgtggcccccgcacgggcagcatgaagttctc

SEQ ID NO: 80158 - DNA, 79 bp, Homo sapiens
agtgattggtctgggttcctcacagcagcaaatctccaagtgtggcccccgcacgggcagcatgaagttctctgggatc

SEQ ID NO: 80159 - DNA, 84 bp, Homo sapiens
tgggttcctcacagcagcaaatctccaagtgtggcccccgcacgggcagcatgaagttctctgggatctggctatcaatgcaga

SEQ ID NO: 80160 - DNA, 80 bp, Homo sapiens
gggcagcatgaagttctctgggatctggctatcaatgcagagccccaggtcctgccccagcaccggatcttacattttaa

SEQ ID NO: 80161 - DNA, 74 bp, Homo sapiens
aagttctctgggatctggctatcaatgcagagccccaggtcctgccccagcaccggatcttacattttaaaggt

SEQ ID NO: 80162 - DNA, 73 bp, Homo sapiens
ggatctggctatcaatgcagagccccaggtcctgccccagcaccggatcttacattttaaaggttcccgggta

SEQ ID NO: 80163 - DNA, 75 bp, Homo sapiens
tatcaatgcagagccccaggtcctgccccagcaccggatcttacattttaaaggttcccgggtagttcagatgca

SEQ ID NO: 80164 - DNA, 69 bp, Homo sapiens
agccccaggtcctgccccagcaccggatcttacattttaaaggttcccgggtagttcagatgcacgtta

SEQ ID NO: 80165 - DNA, 69 bp, Homo sapiens
cctgccccagcaccggatcttacattttaaaggttcccgggtagttcagatgcacgttaacctttgaga

SEQ ID NO: 80166 - DNA, 69 bp, Homo sapiens
cccagcaccggatcttacattttaaaggttcccgggtagttcagatgcacgttaacctttgagaagcac

SEQ ID NO: 80167 - DNA, 71 bp, Homo sapiens
tacattttaaaggttcccgggtagttcagatgcacgttaacctttgagaagcactgctgtggacggtccta

SEQ ID NO: 80168 - DNA, 71 bp, Homo sapiens
ttaaaggttcccgggtagttcagatgcacgttaacctttgagaagcactgctgtggacggtcctaggtcaa

SEQ ID NO: 80169 - DNA, 73 bp, Homo sapiens
ggtagttcagatgcacgttaacctttgagaagcactgctgtggacggtcctaggtcaactaacccgttagaga

SEQ ID NO: 80170 - DNA, 73 bp, Homo sapiens
gttaacctttgagaagcactgctgtggacggtcctaggtcaactaacccgttagagatgctcctggataacaa

SEQ ID NO: 80171 - DNA, 75 bp, Homo sapiens
agaagcactgctgtggacggtcctaggtcaactaacccgttagagatgctcctggataacaagcaccatctccct

SEQ ID NO: 80172 - DNA, 72 bp, Homo sapiens
ctgtggacggtcctaggtcaactaacccgttagagatgctcctggataacaagcaccatctcccttcccctg

SEQ ID NO: 80173 - DNA, 74 bp, Homo sapiens
tcctaggtcaactaacccgttagagatgctcctggataacaagcaccatctcccttcccctggcactgtgggaa

SEQ ID NO: 80174 - DNA, 73 bp, Homo sapiens
aactaacccgttagagatgctcctggataacaagcaccatctcccttcccctggcactgtgggaacaggaagc

SEQ ID NO: 80175 - DNA, 79 bp, Homo sapiens
aagcaccatctcccttcccctggcactgtgggaacaggaagccatgccagaatcagagatgctgatgggcccagggagg

SEQ ID NO: 80176 - DNA, 81 bp, Homo sapiens
actgtgggaacaggaagccatgccagaatcagagatgctgatgggcccagggaggtgggagagcatatcctggagggagac

SEQ ID NO: 80177 - DNA, 82 bp, Homo sapiens
caggaagccatgccagaatcagagatgctgatgggcccagggaggtgggagagcatatcctggagggagaccatgtaccaaa

SEQ ID NO: 80178 - DNA, 81 bp, Homo sapiens
agccatgccagaatcagagatgctgatgggcccagggaggtgggagagcatatcctggagggagaccatgtaccaaaacag

SEQ ID NO: 80179 - DNA, 78 bp, Homo sapiens
atcagagatgctgatgggcccagggaggtgggagagcatatcctggagggagaccatgtaccaaaacaggccagcctt

SEQ ID NO: 80180 - DNA, 75 bp, Homo sapiens
atgggcccagggaggtgggagagcatatcctggagggagaccatgtaccaaaacaggccagcctttccatgcaac

SEQ ID NO: 80181 - DNA, 77 bp, Homo sapiens
ggaggtgggagagcatatcctggagggagaccatgtaccaaaacaggccagcctttccatgcaacctggacctctca

SEQ ID NO: 80182 - DNA, 80 bp, Homo sapiens
tggagggagaccatgtaccaaaacaggccagcctttccatgcaacctggacctctcacagctgtacagagcctcaagaga

SEQ ID NO: 80183 - DNA, 81 bp, Homo sapiens
accatgtaccaaaacaggccagcctttccatgcaacctggacctctcacagctgtacagagcctcaagagagtgatcacca

SEQ ID NO: 80184 - DNA, 81 bp, Homo sapiens
aaaacaggccagcctttccatgcaacctggacctctcacagctgtacagagcctcaagagagtgatcaccactctcttgga

SEQ ID NO: 80185 - DNA, 80 bp, Homo sapiens
gcctttccatgcaacctggacctctcacagctgtacagagcctcaagagagtgatcaccactctcttggaggtcctcctt

SEQ ID NO: 80186 - DNA, 81 bp, Homo sapiens
atgcaacctggacctctcacagctgtacagagcctcaagagagtgatcaccactctcttggaggtcctcctttgcaaagaa

SEQ ID NO: 80187 - DNA, 77 bp, Homo sapiens
agagcctcaagagagtgatcaccactctcttggaggtcctcctttgcaaagaaagaagatggatgcgtaacttctgg

SEQ ID NO: 80188 - DNA, 73 bp, Homo sapiens
agtgatcaccactctcttggaggtcctcctttgcaaagaaagaagatggatgcgtaacttctgggggtggaaa

SEQ ID NO: 80189 - DNA, 71 bp, Homo sapiens
ttggaggtcctcctttgcaaagaaagaagatggatgcgtaacttctgggggtggaaagattggtgaaacaa

SEQ ID NO: 80190 - DNA, 74 bp, Homo sapiens
ttgcaaagaaagaagatggatgcgtaacttctgggggtggaaagattggtgaaacaaggctgttgtactgctaa

SEQ ID NO: 80191 - DNA, 76 bp, Homo sapiens
atgcgtaacttctgggggtggaaagattggtgaaacaaggctgttgtactgctaagtatcagaagagcttccatca

SEQ ID NO: 80192 - DNA, 76 bp, Homo sapiens
acttctgggggtggaaagattggtgaaacaaggctgttgtactgctaagtatcagaagagcttccatcatcactgt

SEQ ID NO: 80193 - DNA, 81 bp, Homo sapiens
aaacaaggctgttgtactgctaagtatcagaagagcttccatcatcactgttgcagcctccaccaccaagctggaaagatg

SEQ ID NO: 80194 - DNA, 85 bp, Homo sapiens
aggctgttgtactgctaagtatcagaagagcttccatcatcactgttgcagcctccaccaccaagctggaaagatgtctcagcca

SEQ ID NO: 80195 - DNA, 84 bp, Homo sapiens
actgctaagtatcagaagagcttccatcatcactgttgcagcctccaccaccaagctggaaagatgtctcagccaagcctggaa

SEQ ID NO: 80196 - DNA, 87 bp, Homo sapiens
atcagaagagcttccatcatcactgttgcagcctccaccaccaagctggaaagatgtctcagccaagcctggaagcacagtgcatta

SEQ ID NO: 80197 - DNA, 84 bp, Homo sapiens
atcatcactgttgcagcctccaccaccaagctggaaagatgtctcagccaagcctggaagcacagtgcattactgggcaggtac

SEQ ID NO: 80198 - DNA, 84 bp, Homo sapiens
tgttgcagcctccaccaccaagctggaaagatgtctcagccaagcctggaagcacagtgcattactgggcaggtacttctgcta

SEQ ID NO: 80199 - DNA, 83 bp, Homo sapiens
caccaccaagctggaaagatgtctcagccaagcctggaagcacagtgcattactgggcaggtacttctgctagggagccatga

SEQ ID NO: 80200 - DNA, 81 bp, Homo sapiens
ccaagctggaaagatgtctcagccaagcctggaagcacagtgcattactgggcaggtacttctgctagggagccatgaccc

SEQ ID NO: 80201 - DNA, 76 bp, Homo sapiens
aagcctggaagcacagtgcattactgggcaggtacttctgctagggagccatgaccccaggagctcccacttacct

SEQ ID NO: 80202 - DNA, 72 bp, Homo sapiens
attactgggcaggtacttctgctagggagccatgaccccaggagctcccacttaccttcataaagttttata

SEQ ID NO: 80203 - DNA, 71 bp, Homo sapiens
atgaccccaggagctcccacttaccttcataaagttttatagtcctcaaatggcttttgccttacaatgcc

SEQ ID NO: 80204 - DNA, 71 bp, Homo sapiens
agctcccacttaccttcataaagttttatagtcctcaaatggcttttgccttacaatgccccagctagaac

SEQ ID NO: 80205 - DNA, 70 bp, Homo sapiens
aatggcttttgccttacaatgccccagctagaactgggccgtggggtaaaagccagataggtgggtagaa

SEQ ID NO: 80206 - DNA, 70 bp, Homo sapiens
ttacaatgccccagctagaactgggccgtggggtaaaagccagataggtgggtagaatccaagtttctta

SEQ ID NO: 80207 - DNA, 68 bp, Homo sapiens
ccagctagaactgggccgtggggtaaaagccagataggtgggtagaatccaagtttcttacttggaaa

SEQ ID NO: 80208 - DNA, 64 bp, Homo sapiens
aactgggccgtggggtaaaagccagataggtgggtagaatccaagtttcttacttggaaaaagt

SEQ ID NO: 80209 - DNA, 68 bp, Homo sapiens
gggtaaaagccagataggtgggtagaatccaagtttcttacttggaaaaagttacatggaggaagcaa

SEQ ID NO: 80210 - DNA, 67 bp, Homo sapiens
aaagccagataggtgggtagaatccaagtttcttacttggaaaaagttacatggaggaagcaaggtt

SEQ ID NO: 80211 - DNA, 67 bp, Homo sapiens
ggtagaatccaagtttcttacttggaaaaagttacatggaggaagcaaggtttggactccattaaaa

SEQ ID NO: 80212 - DNA, 78 bp, Homo sapiens
atggaggaagcaaggtttggactccattaaaatcacatcaccactctgcttctccatcacacagctccaactacgaaa

SEQ ID NO: 80213 - DNA, 78 bp, Homo sapiens
tttggactccattaaaatcacatcaccactctgcttctccatcacacagctccaactacgaaactgctccccaggtaa

SEQ ID NO: 80214 - DNA, 77 bp, Homo sapiens
actccattaaaatcacatcaccactctgcttctccatcacacagctccaactacgaaactgctccccaggtaactag

SEQ ID NO: 80215 - DNA, 78 bp, Homo sapiens
aatcacatcaccactctgcttctccatcacacagctccaactacgaaactgctccccaggtaactaggggagccaaga

SEQ ID NO: 80216 - DNA, 75 bp, Homo sapiens
tctgcttctccatcacacagctccaactacgaaactgctccccaggtaactaggggagccaagacttcctttctc

SEQ ID NO: 80217 - DNA, 70 bp, Homo sapiens
aaactgctccccaggtaactaggggagccaagacttcctttctctccaagacatccttcataaatctttc

SEQ ID NO: 80218 - DNA, 70 bp, Homo sapiens
cccaggtaactaggggagccaagacttcctttctctccaagacatccttcataaatctttctcctcctcc

SEQ ID NO: 80219 - DNA, 72 bp, Homo sapiens
taggggagccaagacttcctttctctccaagacatccttcataaatctttctcctcctcccatccgcttttc

SEQ ID NO: 80220 - DNA, 75 bp, Homo sapiens
aagacttcctttctctccaagacatccttcataaatctttctcctcctcccatccgcttttcctgatctctcaca

SEQ ID NO: 80221 - DNA, 77 bp, Homo sapiens
tttctctccaagacatccttcataaatctttctcctcctcccatccgcttttcctgatctctcacacaatgacccac

SEQ ID NO: 80222 - DNA, 73 bp, Homo sapiens
acatccttcataaatctttctcctcctcccatccgcttttcctgatctctcacacaatgacccacgtcttttt

SEQ ID NO: 80223 - DNA, 71 bp, Homo sapiens
cttcataaatctttctcctcctcccatccgcttttcctgatctctcacacaatgacccacgtctttttttt

SEQ ID NO: 80224 - DNA, 72 bp, Homo sapiens
ttttttttttcctccctgctcatgccttggatctgtgaaaggtgccccctagcacacagggtccccagacca

SEQ ID NO: 80225 - DNA, 79 bp, Homo sapiens
ctgctcatgccttggatctgtgaaaggtgccccctagcacacagggtccccagaccaccacagctcagcagttagaccc

SEQ ID NO: 80226 - DNA, 77 bp, Homo sapiens
ttggatctgtgaaaggtgccccctagcacacagggtccccagaccaccacagctcagcagttagaccccaaatctca

SEQ ID NO: 80227 - DNA, 73 bp, Homo sapiens
aaaggtgccccctagcacacagggtccccagaccaccacagctcagcagttagaccccaaatctcagttttca

SEQ ID NO: 80228 - DNA, 78 bp, Homo sapiens
tagcacacagggtccccagaccaccacagctcagcagttagaccccaaatctcagttttcagagctgcctctttacca

SEQ ID NO: 80229 - DNA, 79 bp, Homo sapiens
gtccccagaccaccacagctcagcagttagaccccaaatctcagttttcagagctgcctctttaccatggcacagtcat

SEQ ID NO: 80230 - DNA, 79 bp, Homo sapiens
caccacagctcagcagttagaccccaaatctcagttttcagagctgcctctttaccatggcacagtcattttagaaaca

SEQ ID NO: 80231 - DNA, 80 bp, Homo sapiens
tcagcagttagaccccaaatctcagttttcagagctgcctctttaccatggcacagtcattttagaaacatgcagagaaa

SEQ ID NO: 80232 - DNA, 80 bp, Homo sapiens
aaatctcagttttcagagctgcctctttaccatggcacagtcattttagaaacatgcagagaaaagcaaactggagcata

SEQ ID NO: 80233 - DNA, 83 bp, Homo sapiens
agagctgcctctttaccatggcacagtcattttagaaacatgcagagaaaagcaaactggagcatacatctgcaggcaagaaa

SEQ ID NO: 80234 - DNA, 81 bp, Homo sapiens
tctttaccatggcacagtcattttagaaacatgcagagaaaagcaaactggagcatacatctgcaggcaagaaaaatcaat

SEQ ID NO: 80235 - DNA, 82 bp, Homo sapiens
cacagtcattttagaaacatgcagagaaaagcaaactggagcatacatctgcaggcaagaaaaatcaattcttaccatcaga

SEQ ID NO: 80236 - DNA, 80 bp, Homo sapiens
attttagaaacatgcagagaaaagcaaactggagcatacatctgcaggcaagaaaaatcaattcttaccatcagagaaca

SEQ ID NO: 80237 - DNA, 80 bp, Homo sapiens
aacatgcagagaaaagcaaactggagcatacatctgcaggcaagaaaaatcaattcttaccatcagagaacagctaacct

SEQ ID NO: 80238 - DNA, 77 bp, Homo sapiens
aaaagcaaactggagcatacatctgcaggcaagaaaaatcaattcttaccatcagagaacagctaaccttctctggg

SEQ ID NO: 80239 - DNA, 80 bp, Homo sapiens
agcatacatctgcaggcaagaaaaatcaattcttaccatcagagaacagctaaccttctctgggggctgctacctcagag

SEQ ID NO: 80240 - DNA, 78 bp, Homo sapiens
tgcaggcaagaaaaatcaattcttaccatcagagaacagctaaccttctctgggggctgctacctcagaggagagtct

SEQ ID NO: 80241 - DNA, 74 bp, Homo sapiens
aagaaaaatcaattcttaccatcagagaacagctaaccttctctgggggctgctacctcagaggagagtcttgg

SEQ ID NO: 80242 - DNA, 76 bp, Homo sapiens
aattcttaccatcagagaacagctaaccttctctgggggctgctacctcagaggagagtcttgggtcctgcctgaa

SEQ ID NO: 80243 - DNA, 79 bp, Homo sapiens
atcagagaacagctaaccttctctgggggctgctacctcagaggagagtcttgggtcctgcctgaagccctcagactca

SEQ ID NO: 80244 - DNA, 78 bp, Homo sapiens
agctaaccttctctgggggctgctacctcagaggagagtcttgggtcctgcctgaagccctcagactcagcaccaaga

SEQ ID NO: 80245 - DNA, 78 bp, Homo sapiens
tgggggctgctacctcagaggagagtcttgggtcctgcctgaagccctcagactcagcaccaagactccgccggcttc

SEQ ID NO: 80246 - DNA, 79 bp, Homo sapiens
agaggagagtcttgggtcctgcctgaagccctcagactcagcaccaagactccgccggcttcctcttcatggcagcctc

SEQ ID NO: 80247 - DNA, 77 bp, Homo sapiens
ttgggtcctgcctgaagccctcagactcagcaccaagactccgccggcttcctcttcatggcagcctctccgggaaa

SEQ ID NO: 80248 - DNA, 79 bp, Homo sapiens
ctcagactcagcaccaagactccgccggcttcctcttcatggcagcctctccgggaaatggggctgaggcaagtcgcta

SEQ ID NO: 80249 - DNA, 75 bp, Homo sapiens
ccggcttcctcttcatggcagcctctccgggaaatggggctgaggcaagtcgctagcccagggccagtgttctgg

SEQ ID NO: 80250 - DNA, 77 bp, Homo sapiens
ttcatggcagcctctccgggaaatggggctgaggcaagtcgctagcccagggccagtgttctgggcaccccagcgga

SEQ ID NO: 80251 - DNA, 72 bp, Homo sapiens
agcctctccgggaaatggggctgaggcaagtcgctagcccagggccagtgttctgggcaccccagcggaggt

SEQ ID NO: 80252 - DNA, 74 bp, Homo sapiens
aaatggggctgaggcaagtcgctagcccagggccagtgttctgggcaccccagcggaggttcctgtggctttgc

SEQ ID NO: 80253 - DNA, 78 bp, Homo sapiens
tgaggcaagtcgctagcccagggccagtgttctgggcaccccagcggaggttcctgtggctttgctcattgctgttct

SEQ ID NO: 80254 - DNA, 76 bp, Homo sapiens
aagtcgctagcccagggccagtgttctgggcaccccagcggaggttcctgtggctttgctcattgctgttctttca

SEQ ID NO: 80255 - DNA, 75 bp, Homo sapiens
ggccagtgttctgggcaccccagcggaggttcctgtggctttgctcattgctgttctttcacaaagaacccacta

SEQ ID NO: 80256 - DNA, 78 bp, Homo sapiens
tgttctgggcaccccagcggaggttcctgtggctttgctcattgctgttctttcacaaagaacccactacattgcata

SEQ ID NO: 80257 - DNA, 79 bp, Homo sapiens
ttgctcattgctgttctttcacaaagaacccactacattgcatagttccttccaaatccgctccagtgcttgctgggaa

SEQ ID NO: 80258 - DNA, 74 bp, Homo sapiens
ctgttctttcacaaagaacccactacattgcatagttccttccaaatccgctccagtgcttgctgggaaattaa

SEQ ID NO: 80259 - DNA, 73 bp, Homo sapiens
tttcacaaagaacccactacattgcatagttccttccaaatccgctccagtgcttgctgggaaattaacaact

SEQ ID NO: 80260 - DNA, 73 bp, Homo sapiens
ctccagtgcttgctgggaaattaacaacttgttctggactttccagatgcaatgtttctggaggcctttcttt

SEQ ID NO: 80261 - DNA, 71 bp, Homo sapiens
gtgcttgctgggaaattaacaacttgttctggactttccagatgcaatgtttctggaggcctttctttttt

SEQ ID NO: 80262 - DNA, 68 bp, Homo sapiens
aacttgttctggactttccagatgcaatgtttctggaggcctttctttttttcccactctccctcttt

SEQ ID NO: 80263 - DNA, 66 bp, Homo sapiens
actttccagatgcaatgtttctggaggcctttctttttttcccactctccctctttttcccctttc

SEQ ID NO: 80264 - DNA, 64 bp, Homo sapiens
aatgtttctggaggcctttctttttttcccactctccctctttttcccctttctcagctaaaaa

SEQ ID NO: 80265 - DNA, 63 bp, Homo sapiens
ttctggaggcctttctttttttcccactctccctctttttcccctttctcagctaaaaaacgt

SEQ ID NO: 80266 - DNA, 66 bp, Homo sapiens
tttttttcccactctccctctttttcccctttctcagctaaaaaacgttggctgaggtcacaacaa

SEQ ID NO: 80267 - DNA, 69 bp, Homo sapiens
actctccctctttttcccctttctcagctaaaaaacgttggctgaggtcacaacaaacaatggccaagc

SEQ ID NO: 80268 - DNA, 74 bp, Homo sapiens
tttttcccctttctcagctaaaaaacgttggctgaggtcacaacaaacaatggccaagcttgtgtcactgagca

SEQ ID NO: 80269 - DNA, 78 bp, Homo sapiens
tttctcagctaaaaaacgttggctgaggtcacaacaaacaatggccaagcttgtgtcactgagcagatgcctcccacc

SEQ ID NO: 80270 - DNA, 75 bp, Homo sapiens
aaaaacgttggctgaggtcacaacaaacaatggccaagcttgtgtcactgagcagatgcctcccacccccaggcc

SEQ ID NO: 80271 - DNA, 79 bp, Homo sapiens
cgttggctgaggtcacaacaaacaatggccaagcttgtgtcactgagcagatgcctcccacccccaggcctgtggacaa

SEQ ID NO: 80272 - DNA, 79 bp, Homo sapiens
tggccaagcttgtgtcactgagcagatgcctcccacccccaggcctgtggacaagggcagctttgtccactgtgtttta

SEQ ID NO: 80273 - DNA, 77 bp, Homo sapiens
aagcttgtgtcactgagcagatgcctcccacccccaggcctgtggacaagggcagctttgtccactgtgttttaggc

SEQ ID NO: 80274 - DNA, 71 bp, Homo sapiens
tcccacccccaggcctgtggacaagggcagctttgtccactgtgttttaggcgggacttcctgggcctgcc

SEQ ID NO: 80275 - DNA, 73 bp, Homo sapiens
aggcctgtggacaagggcagctttgtccactgtgttttaggcgggacttcctgggcctgcccaagccctgctg

SEQ ID NO: 80276 - DNA, 72 bp, Homo sapiens
acaagggcagctttgtccactgtgttttaggcgggacttcctgggcctgcccaagccctgctggagaatgtt

SEQ ID NO: 80277 - DNA, 71 bp, Homo sapiens
tgtgttttaggcgggacttcctgggcctgcccaagccctgctggagaatgttttggccaacttcctcccaa

SEQ ID NO: 80278 - DNA, 73 bp, Homo sapiens
ctgcccaagccctgctggagaatgttttggccaacttcctcccaaccctaagtcacagctctggtcctggccc

SEQ ID NO: 80279 - DNA, 70 bp, Homo sapiens
ccctgctggagaatgttttggccaacttcctcccaaccctaagtcacagctctggtcctggccccggccc

SEQ ID NO: 80280 - DNA, 67 bp, Homo sapiens
aatgttttggccaacttcctcccaaccctaagtcacagctctggtcctggccccggccccggcccca

SEQ ID NO: 80281 - DNA, 69 bp, Homo sapiens
acttcctcccaaccctaagtcacagctctggtcctggccccggccccggccccagctgtgtgaacccaa

SEQ ID NO: 80282 - DNA, 70 bp, Homo sapiens
aaccctaagtcacagctctggtcctggccccggccccggccccagctgtgtgaacccaaggccagataaa

SEQ ID NO: 80283 - DNA, 67 bp, Homo sapiens
gtcctggccccggccccggccccagctgtgtgaacccaaggccagataaaaaccaacataaaaagaa

SEQ ID NO: 80284 - DNA, 68 bp, Homo sapiens
ggccccggccccagctgtgtgaacccaaggccagataaaaaccaacataaaaagaacggagaatgttc

SEQ ID NO: 80285 - DNA, 68 bp, Homo sapiens
ccagctgtgtgaacccaaggccagataaaaaccaacataaaaagaacggagaatgttcccccaaagaa

SEQ ID NO: 80286 - DNA, 67 bp, Homo sapiens
tgtgtgaacccaaggccagataaaaaccaacataaaaagaacggagaatgttcccccaaagaaccac

SEQ ID NO: 80287 - DNA, 66 bp, Homo sapiens
aaggccagataaaaaccaacataaaaagaacggagaatgttcccccaaagaaccactgtgtggaaa

SEQ ID NO: 80288 - DNA, 67 bp, Homo sapiens
aaaaaccaacataaaaagaacggagaatgttcccccaaagaaccactgtgtggaaagctggtgcctc

SEQ ID NO: 80289 - DNA, 70 bp, Homo sapiens
ataaaaagaacggagaatgttcccccaaagaaccactgtgtggaaagctggtgcctccagaggggcgaga

SEQ ID NO: 80290 - DNA, 73 bp, Homo sapiens
agaatgttcccccaaagaaccactgtgtggaaagctggtgcctccagaggggcgagatgaaggtctcttgcct

SEQ ID NO: 80291 - DNA, 78 bp, Homo sapiens
actgtgtggaaagctggtgcctccagaggggcgagatgaaggtctcttgccttcactctgccctcgccaccatcaaac

SEQ ID NO: 80292 - DNA, 77 bp, Homo sapiens
ctccagaggggcgagatgaaggtctcttgccttcactctgccctcgccaccatcaaacctggacagataacgaacaa

SEQ ID NO: 80293 - DNA, 78 bp, Homo sapiens
cttcactctgccctcgccaccatcaaacctggacagataacgaacaaagacaggctcatgtgaggtctccactgaaag

SEQ ID NO: 80294 - DNA, 76 bp, Homo sapiens
ccctcgccaccatcaaacctggacagataacgaacaaagacaggctcatgtgaggtctccactgaaaggggcctga

SEQ ID NO: 80295 - DNA, 77 bp, Homo sapiens
ccatcaaacctggacagataacgaacaaagacaggctcatgtgaggtctccactgaaaggggcctgaggatcacaaa

SEQ ID NO: 80296 - DNA, 78 bp, Homo sapiens
tggacagataacgaacaaagacaggctcatgtgaggtctccactgaaaggggcctgaggatcacaaagtcattagtta

SEQ ID NO: 80297 - DNA, 75 bp, Homo sapiens
ataacgaacaaagacaggctcatgtgaggtctccactgaaaggggcctgaggatcacaaagtcattagttacaag

SEQ ID NO: 80298 - DNA, 75 bp, Homo sapiens
aaagacaggctcatgtgaggtctccactgaaaggggcctgaggatcacaaagtcattagttacaagtggagaaag

SEQ ID NO: 80299 - DNA, 73 bp, Homo sapiens
atgtgaggtctccactgaaaggggcctgaggatcacaaagtcattagttacaagtggagaaaggattggaccc

SEQ ID NO: 80300 - DNA, 72 bp, Homo sapiens
actgaaaggggcctgaggatcacaaagtcattagttacaagtggagaaaggattggaccccaagagcaatac

SEQ ID NO: 80301 - DNA, 77 bp, Homo sapiens
gcctgaggatcacaaagtcattagttacaagtggagaaaggattggaccccaagagcaatactgcagccaccaacta

SEQ ID NO: 80302 - DNA, 76 bp, Homo sapiens
tcacaaagtcattagttacaagtggagaaaggattggaccccaagagcaatactgcagccaccaactaaatgagct

SEQ ID NO: 80303 - DNA, 77 bp, Homo sapiens
tacaagtggagaaaggattggaccccaagagcaatactgcagccaccaactaaatgagcttgggcagggcttggatc

SEQ ID NO: 80304 - DNA, 77 bp, Homo sapiens
aaaggattggaccccaagagcaatactgcagccaccaactaaatgagcttgggcagggcttggatccttcatgaata

SEQ ID NO: 80305 - DNA, 80 bp, Homo sapiens
caagagcaatactgcagccaccaactaaatgagcttgggcagggcttggatccttcatgaatatatcctatcactccgtt

SEQ ID NO: 80306 - DNA, 72 bp, Homo sapiens
accaactaaatgagcttgggcagggcttggatccttcatgaatatatcctatcactccgtttagaaaggttt

SEQ ID NO: 80307 - DNA, 76 bp, Homo sapiens
taaatgagcttgggcagggcttggatccttcatgaatatatcctatcactccgtttagaaaggtttttggagcagc

SEQ ID NO: 80308 - DNA, 76 bp, Homo sapiens
atccttcatgaatatatcctatcactccgtttagaaaggtttttggagcagctgactatttagcactcaaaatgcc

SEQ ID NO: 80309 - DNA, 75 bp, Homo sapiens
tcctatcactccgtttagaaaggtttttggagcagctgactatttagcactcaaaatgccgcatatttctgtgtt

SEQ ID NO: 80310 - DNA, 78 bp, Homo sapiens
tttagaaaggtttttggagcagctgactatttagcactcaaaatgccgcatatttctgtgtttgctttcagatgcaaa

SEQ ID NO: 80311 - DNA, 77 bp, Homo sapiens
aggtttttggagcagctgactatttagcactcaaaatgccgcatatttctgtgtttgctttcagatgcaaacctttg

SEQ ID NO: 80312 - DNA, 74 bp, Homo sapiens
ctgactatttagcactcaaaatgccgcatatttctgtgtttgctttcagatgcaaacctttggggttttaggaa

SEQ ID NO: 80313 - DNA, 74 bp, Homo sapiens
tatttagcactcaaaatgccgcatatttctgtgtttgctttcagatgcaaacctttggggttttaggaactgat

SEQ ID NO: 80314 - DNA, 74 bp, Homo sapiens
tcaaaatgccgcatatttctgtgtttgctttcagatgcaaacctttggggttttaggaactgattctttatata

SEQ ID NO: 80315 - DNA, 72 bp, Homo sapiens
gcatatttctgtgtttgctttcagatgcaaacctttggggttttaggaactgattctttatatagaattaaa

SEQ ID NO: 80316 - DNA, 69 bp, Homo sapiens
gtgtttgctttcagatgcaaacctttggggttttaggaactgattctttatatagaattaaatatggtt

SEQ ID NO: 80317 - DNA, 69 bp, Homo sapiens
cagatgcaaacctttggggttttaggaactgattctttatatagaattaaatatggttttctagagaaa

SEQ ID NO: 80318 - DNA, 70 bp, Homo sapiens
tggggttttaggaactgattctttatatagaattaaatatggttttctagagaaaccaagatcctgagga

SEQ ID NO: 80319 - DNA, 70 bp, Homo sapiens
gattctttatatagaattaaatatggttttctagagaaaccaagatcctgaggaccgagtggttccctat

SEQ ID NO: 80320 - DNA, 70 bp, Homo sapiens
atagaattaaatatggttttctagagaaaccaagatcctgaggaccgagtggttccctattaagcaaatg

SEQ ID NO: 80321 - DNA, 69 bp, Homo sapiens
agaaaccaagatcctgaggaccgagtggttccctattaagcaaatggataaacttatttatgaagaggt

SEQ ID NO: 80322 - DNA, 72 bp, Homo sapiens
aagatcctgaggaccgagtggttccctattaagcaaatggataaacttatttatgaagaggtttcaatgcca

SEQ ID NO: 80323 - DNA, 71 bp, Homo sapiens
aggaccgagtggttccctattaagcaaatggataaacttatttatgaagaggtttcaatgccagctccttg

SEQ ID NO: 80324 - DNA, 70 bp, Homo sapiens
tggttccctattaagcaaatggataaacttatttatgaagaggtttcaatgccagctccttgggtcgggg

SEQ ID NO: 80325 - DNA, 69 bp, Homo sapiens
aacttatttatgaagaggtttcaatgccagctccttgggtcgggggaagaaaataagtacaatcgtcta

SEQ ID NO: 80326 - DNA, 70 bp, Homo sapiens
atttatgaagaggtttcaatgccagctccttgggtcgggggaagaaaataagtacaatcgtctaaggatg

SEQ ID NO: 80327 - DNA, 71 bp, Homo sapiens
aggtttcaatgccagctccttgggtcgggggaagaaaataagtacaatcgtctaaggatggagtcagacca

SEQ ID NO: 80328 - DNA, 71 bp, Homo sapiens
ctccttgggtcgggggaagaaaataagtacaatcgtctaaggatggagtcagaccagagctaagctgttgt

SEQ ID NO: 80329 - DNA, 73 bp, Homo sapiens
tcgggggaagaaaataagtacaatcgtctaaggatggagtcagaccagagctaagctgttgttttactacata

SEQ ID NO: 80330 - DNA, 75 bp, Homo sapiens
aaaataagtacaatcgtctaaggatggagtcagaccagagctaagctgttgttttactacatactagctccaaga

SEQ ID NO: 80331 - DNA, 75 bp, Homo sapiens
agtacaatcgtctaaggatggagtcagaccagagctaagctgttgttttactacatactagctccaagaccctgg

SEQ ID NO: 80332 - DNA, 77 bp, Homo sapiens
tctaaggatggagtcagaccagagctaagctgttgttttactacatactagctccaagaccctgggcaacggctcca

SEQ ID NO: 80333 - DNA, 75 bp, Homo sapiens
agtcagaccagagctaagctgttgttttactacatactagctccaagaccctgggcaacggctccagcttcaatt

SEQ ID NO: 80334 - DNA, 74 bp, Homo sapiens
taagctgttgttttactacatactagctccaagaccctgggcaacggctccagcttcaatttctccaagtgtaa

SEQ ID NO: 80335 - DNA, 77 bp, Homo sapiens
aagaccctgggcaacggctccagcttcaatttctccaagtgtaaaatgcagatgatcacagtatctttctcaaaaga

SEQ ID NO: 80336 - DNA, 83 bp, Homo sapiens
gcaacggctccagcttcaatttctccaagtgtaaaatgcagatgatcacagtatctttctcaaaagattgctgtgagagatta

SEQ ID NO: 80337 - DNA, 76 bp, Homo sapiens
aatttctccaagtgtaaaatgcagatgatcacagtatctttctcaaaagattgctgtgagagattaaagggggtgg

SEQ ID NO: 80338 - DNA, 74 bp, Homo sapiens
aagtgtaaaatgcagatgatcacagtatctttctcaaaagattgctgtgagagattaaagggggtgggggtggg

SEQ ID NO: 80339 - DNA, 76 bp, Homo sapiens
agatgatcacagtatctttctcaaaagattgctgtgagagattaaagggggtgggggtggggcatccatgtaaaca

SEQ ID NO: 80340 - DNA, 73 bp, Homo sapiens
tgtgagagattaaagggggtgggggtggggcatccatgtaaacatttcacctagtggacgaagtaaatgctca

SEQ ID NO: 80341 - DNA, 72 bp, Homo sapiens
gggggtgggggtggggcatccatgtaaacatttcacctagtggacgaagtaaatgctcaatgaaagctagga

SEQ ID NO: 80342 - DNA, 74 bp, Homo sapiens
gtggggcatccatgtaaacatttcacctagtggacgaagtaaatgctcaatgaaagctaggatttttgttgtta

SEQ ID NO: 80343 - DNA, 74 bp, Homo sapiens
atccatgtaaacatttcacctagtggacgaagtaaatgctcaatgaaagctaggatttttgttgttactatcac

SEQ ID NO: 80344 - DNA, 73 bp, Homo sapiens
atgtaaacatttcacctagtggacgaagtaaatgctcaatgaaagctaggatttttgttgttactatcaccag

SEQ ID NO: 80345 - DNA, 74 bp, Homo sapiens
atttcacctagtggacgaagtaaatgctcaatgaaagctaggatttttgttgttactatcaccagtggctgaaa

SEQ ID NO: 80346 - DNA, 74 bp, Homo sapiens
tttcacctagtggacgaagtaaatgctcaatgaaagctaggatttttgttgttactatcaccagtggctgaaag

SEQ ID NO: 80347 - DNA, 73 bp, Homo sapiens
cctagtggacgaagtaaatgctcaatgaaagctaggatttttgttgttactatcaccagtggctgaaaggtag

SEQ ID NO: 80348 - DNA, 76 bp, Homo sapiens
cgaagtaaatgctcaatgaaagctaggatttttgttgttactatcaccagtggctgaaaggtaggcactgcagtta

SEQ ID NO: 80349 - DNA, 75 bp, Homo sapiens
aagtaaatgctcaatgaaagctaggatttttgttgttactatcaccagtggctgaaaggtaggcactgcagttac

SEQ ID NO: 80350 - DNA, 74 bp, Homo sapiens
aaatgctcaatgaaagctaggatttttgttgttactatcaccagtggctgaaaggtaggcactgcagttacccc

SEQ ID NO: 80351 - DNA, 71 bp, Homo sapiens
aatgaaagctaggatttttgttgttactatcaccagtggctgaaaggtaggcactgcagttaccccgggtc

SEQ ID NO: 80352 - DNA, 70 bp, Homo sapiens
gctaggatttttgttgttactatcaccagtggctgaaaggtaggcactgcagttaccccgggtccaaaaa

SEQ ID NO: 80353 - DNA, 69 bp, Homo sapiens
ggatttttgttgttactatcaccagtggctgaaaggtaggcactgcagttaccccgggtccaaaaagag

SEQ ID NO: 80354 - DNA, 70 bp, Homo sapiens
tttttgttgttactatcaccagtggctgaaaggtaggcactgcagttaccccgggtccaaaaagagtcca

SEQ ID NO: 80355 - DNA, 72 bp, Homo sapiens
tatcaccagtggctgaaaggtaggcactgcagttaccccgggtccaaaaagagtccagactgaacaataaaa

SEQ ID NO: 80356 - DNA, 71 bp, Homo sapiens
tggctgaaaggtaggcactgcagttaccccgggtccaaaaagagtccagactgaacaataaaaagcaaaca

SEQ ID NO: 80357 - DNA, 70 bp, Homo sapiens
taggcactgcagttaccccgggtccaaaaagagtccagactgaacaataaaaagcaaacagcccaattta

SEQ ID NO: 80358 - DNA, 67 bp, Homo sapiens
actgcagttaccccgggtccaaaaagagtccagactgaacaataaaaagcaaacagcccaatttaaa

SEQ ID NO: 80359 - DNA, 68 bp, Homo sapiens
caaataaacaaatatcaacaaaacagaaaagaacaggtactagtaaggattgagaactgttggaaccc

SEQ ID NO: 80360 - DNA, 68 bp, Homo sapiens
aaatatcaacaaaacagaaaagaacaggtactagtaaggattgagaactgttggaacccttgtgccct

SEQ ID NO: 80361 - DNA, 68 bp, Homo sapiens
aaacagaaaagaacaggtactagtaaggattgagaactgttggaacccttgtgcccttctggtgggaa

SEQ ID NO: 80362 - DNA, 67 bp, Homo sapiens
gaatgtaaaatagtacagcccctgtggaaaatagtgtgttaattcttcaaaaaaattaaacaaagaa

SEQ ID NO: 80363 - DNA, 69 bp, Homo sapiens
agtacagcccctgtggaaaatagtgtgttaattcttcaaaaaaattaaacaaagaattgccatatggtc

SEQ ID NO: 80364 - DNA, 70 bp, Homo sapiens
ccctgtggaaaatagtgtgttaattcttcaaaaaaattaaacaaagaattgccatatggtccagcaattc

SEQ ID NO: 80365 - DNA, 72 bp, Homo sapiens
tagtgtgttaattcttcaaaaaaattaaacaaagaattgccatatggtccagcaattccattaataggtata

SEQ ID NO: 80366 - DNA, 72 bp, Homo sapiens
tgttaattcttcaaaaaaattaaacaaagaattgccatatggtccagcaattccattaataggtatatacca

SEQ ID NO: 80367 - DNA, 70 bp, Homo sapiens
aaaaaattaaacaaagaattgccatatggtccagcaattccattaataggtatataccaaaaagaactga

SEQ ID NO: 80368 - DNA, 72 bp, Homo sapiens
atatggtccagcaattccattaataggtatataccaaaaagaactgaaagcagagtcctgaagggagggtct

SEQ ID NO: 80369 - DNA, 73 bp, Homo sapiens
aattccattaataggtatataccaaaaagaactgaaagcagagtcctgaagggagggtcttgctgcctgttca

SEQ ID NO: 80370 - DNA, 76 bp, Homo sapiens
taataggtatataccaaaaagaactgaaagcagagtcctgaagggagggtcttgctgcctgttcatggcaacatta

SEQ ID NO: 80371 - DNA, 78 bp, Homo sapiens
tataccaaaaagaactgaaagcagagtcctgaagggagggtcttgctgcctgttcatggcaacattattcacaagagc

SEQ ID NO: 80372 - DNA, 79 bp, Homo sapiens
tgaaagcagagtcctgaagggagggtcttgctgcctgttcatggcaacattattcacaagagccagaaggtggaaacaa

SEQ ID NO: 80373 - DNA, 78 bp, Homo sapiens
agagtcctgaagggagggtcttgctgcctgttcatggcaacattattcacaagagccagaaggtggaaacaatgcaag

SEQ ID NO: 80374 - DNA, 78 bp, Homo sapiens
gagggtcttgctgcctgttcatggcaacattattcacaagagccagaaggtggaaacaatgcaagtcgtagtaaaata

SEQ ID NO: 80375 - DNA, 77 bp, Homo sapiens
ctgcctgttcatggcaacattattcacaagagccagaaggtggaaacaatgcaagtcgtagtaaaataaacacaata

SEQ ID NO: 80376 - DNA, 76 bp, Homo sapiens
ttcatggcaacattattcacaagagccagaaggtggaaacaatgcaagtcgtagtaaaataaacacaatagaatat

SEQ ID NO: 80377 - DNA, 72 bp, Homo sapiens
aagagccagaaggtggaaacaatgcaagtcgtagtaaaataaacacaatagaatattactcagccttaagaa

SEQ ID NO: 80378 - DNA, 71 bp, Homo sapiens
gaaggtggaaacaatgcaagtcgtagtaaaataaacacaatagaatattactcagccttaagaaggaagga

SEQ ID NO: 80379 - DNA, 68 bp, Homo sapiens
acaatgcaagtcgtagtaaaataaacacaatagaatattactcagccttaagaaggaaggaatttttt

SEQ ID NO: 80380 - DNA, 81 bp, Homo sapiens
ctggctaattggaaggaaattttgacatatgcaaccatgtggatggaccttaaggacattatgctcagtgcaacagccaga

SEQ ID NO: 80381 - DNA, 81 bp, Homo sapiens
taattggaaggaaattttgacatatgcaaccatgtggatggaccttaaggacattatgctcagtgcaacagccagacacaa

SEQ ID NO: 80382 - DNA, 80 bp, Homo sapiens
aattttgacatatgcaaccatgtggatggaccttaaggacattatgctcagtgcaacagccagacacaaagggacaaata

SEQ ID NO: 80383 - DNA, 80 bp, Homo sapiens
atatgcaaccatgtggatggaccttaaggacattatgctcagtgcaacagccagacacaaagggacaaataccatttgct

SEQ ID NO: 80384 - DNA, 79 bp, Homo sapiens
ggatggaccttaaggacattatgctcagtgcaacagccagacacaaagggacaaataccatttgcttcacttctatgag

SEQ ID NO: 80385 - DNA, 81 bp, Homo sapiens
taaggacattatgctcagtgcaacagccagacacaaagggacaaataccatttgcttcacttctatgaggcacctagagaa

SEQ ID NO: 80386 - DNA, 80 bp, Homo sapiens
attatgctcagtgcaacagccagacacaaagggacaaataccatttgcttcacttctatgaggcacctagagaagtcaaa

SEQ ID NO: 80387 - DNA, 77 bp, Homo sapiens
agtgcaacagccagacacaaagggacaaataccatttgcttcacttctatgaggcacctagagaagtcaaattaata

SEQ ID NO: 80388 - DNA, 76 bp, Homo sapiens
acacaaagggacaaataccatttgcttcacttctatgaggcacctagagaagtcaaattaatagcgacaggttgca

SEQ ID NO: 80389 - DNA, 76 bp, Homo sapiens
aagggacaaataccatttgcttcacttctatgaggcacctagagaagtcaaattaatagcgacaggttgcagaatg

SEQ ID NO: 80390 - DNA, 78 bp, Homo sapiens
taccatttgcttcacttctatgaggcacctagagaagtcaaattaatagcgacaggttgcagaatggaggtgaccagg

SEQ ID NO: 80391 - DNA, 80 bp, Homo sapiens
ttcacttctatgaggcacctagagaagtcaaattaatagcgacaggttgcagaatggaggtgaccaggtgctgtgggcag

SEQ ID NO: 80392 - DNA, 78 bp, Homo sapiens
cacctagagaagtcaaattaatagcgacaggttgcagaatggaggtgaccaggtgctgtgggcagggaatgatgggaa

SEQ ID NO: 80393 - DNA, 76 bp, Homo sapiens
agtcaaattaatagcgacaggttgcagaatggaggtgaccaggtgctgtgggcagggaatgatgggaagtttgtgt

SEQ ID NO: 80394 - DNA, 75 bp, Homo sapiens
aattaatagcgacaggttgcagaatggaggtgaccaggtgctgtgggcagggaatgatgggaagtttgtgtttaa

SEQ ID NO: 80395 - DNA, 78 bp, Homo sapiens
ggcagggaatgatgggaagtttgtgtttaatgggtccagagtgtcactggtgcaagatggaagcattctggagattaa

SEQ ID NO: 80396 - DNA, 83 bp, Homo sapiens
tttgtgtttaatgggtccagagtgtcactggtgcaagatggaagcattctggagattaatggtggtgatgatggctgcacaaa

SEQ ID NO: 80397 - DNA, 83 bp, Homo sapiens
tttaatgggtccagagtgtcactggtgcaagatggaagcattctggagattaatggtggtgatgatggctgcacaaacacgtg

SEQ ID NO: 80398 - DNA, 83 bp, Homo sapiens
agagtgtcactggtgcaagatggaagcattctggagattaatggtggtgatgatggctgcacaaacacgtgggtatactcaaa

SEQ ID NO: 80399 - DNA, 84 bp, Homo sapiens
tgcaagatggaagcattctggagattaatggtggtgatgatggctgcacaaacacgtgggtatactcaaagccactgaactata

SEQ ID NO: 80400 - DNA, 80 bp, Homo sapiens
gtggtgatgatggctgcacaaacacgtgggtatactcaaagccactgaactatacatttaaaactgatggagatggtgga

SEQ ID NO: 80401 - DNA, 78 bp, Homo sapiens
atggctgcacaaacacgtgggtatactcaaagccactgaactatacatttaaaactgatggagatggtggatttcatg

SEQ ID NO: 80402 - DNA, 78 bp, Homo sapiens
aaacacgtgggtatactcaaagccactgaactatacatttaaaactgatggagatggtggatttcatgtcatgcatat

SEQ ID NO: 80403 - DNA, 82 bp, Homo sapiens
tatactcaaagccactgaactatacatttaaaactgatggagatggtggatttcatgtcatgcatattttgccatgattaaa

SEQ ID NO: 80404 - DNA, 79 bp, Homo sapiens
caaagccactgaactatacatttaaaactgatggagatggtggatttcatgtcatgcatattttgccatgattaaaaaa

SEQ ID NO: 80405 - DNA, 67 bp, Homo sapiens
aaaaaaaaaagcccccaagacccacagagatagtttagatcaaaagaccctgtgacccataagccgc

SEQ ID NO: 80406 - DNA, 73 bp, Homo sapiens
aaaaagcccccaagacccacagagatagtttagatcaaaagaccctgtgacccataagccgcttcatgagata

SEQ ID NO: 80407 - DNA, 77 bp, Homo sapiens
aagacccacagagatagtttagatcaaaagaccctgtgacccataagccgcttcatgagatacaccacctcaggctc

SEQ ID NO: 80408 - DNA, 79 bp, Homo sapiens
agagatagtttagatcaaaagaccctgtgacccataagccgcttcatgagatacaccacctcaggctctccatgtacac

SEQ ID NO: 80409 - DNA, 79 bp, Homo sapiens
tagatcaaaagaccctgtgacccataagccgcttcatgagatacaccacctcaggctctccatgtacacccagagggaa

SEQ ID NO: 80410 - DNA, 79 bp, Homo sapiens
accctgtgacccataagccgcttcatgagatacaccacctcaggctctccatgtacacccagagggaagctgccccagc

SEQ ID NO: 80411 - DNA, 80 bp, Homo sapiens
ataagccgcttcatgagatacaccacctcaggctctccatgtacacccagagggaagctgccccagcctcttggcaatgg

SEQ ID NO: 80412 - DNA, 81 bp, Homo sapiens
ttcatgagatacaccacctcaggctctccatgtacacccagagggaagctgccccagcctcttggcaatggtgaagagaaa

SEQ ID NO: 80413 - DNA, 78 bp, Homo sapiens
atacaccacctcaggctctccatgtacacccagagggaagctgccccagcctcttggcaatggtgaagagaaagccca

SEQ ID NO: 80414 - DNA, 78 bp, Homo sapiens
aggctctccatgtacacccagagggaagctgccccagcctcttggcaatggtgaagagaaagcccacctagaagatga

SEQ ID NO: 80415 - DNA, 75 bp, Homo sapiens
atgtacacccagagggaagctgccccagcctcttggcaatggtgaagagaaagcccacctagaagatgagggtgg

SEQ ID NO: 80416 - DNA, 74 bp, Homo sapiens
agagggaagctgccccagcctcttggcaatggtgaagagaaagcccacctagaagatgagggtgggaccaggga

SEQ ID NO: 80417 - DNA, 73 bp, Homo sapiens
cccagcctcttggcaatggtgaagagaaagcccacctagaagatgagggtgggaccagggacggtggctcacg

SEQ ID NO: 80418 - DNA, 76 bp, Homo sapiens
aaataaataaagacgacgaggctggccacctatagcaggactcactcaccatggctcgtcttgcgttcaatcttgg

SEQ ID NO: 80419 - DNA, 77 bp, Homo sapiens
ataaagacgacgaggctggccacctatagcaggactcactcaccatggctcgtcttgcgttcaatcttggggagacc

SEQ ID NO: 80420 - DNA, 80 bp, Homo sapiens
aggctggccacctatagcaggactcactcaccatggctcgtcttgcgttcaatcttggggagaccgaggtgacacagcca

SEQ ID NO: 80421 - DNA, 83 bp, Homo sapiens
tatagcaggactcactcaccatggctcgtcttgcgttcaatcttggggagaccgaggtgacacagccagcatcctaatgtcaa

SEQ ID NO: 80422 - DNA, 81 bp, Homo sapiens
tcactcaccatggctcgtcttgcgttcaatcttggggagaccgaggtgacacagccagcatcctaatgtcaatcgagggat

SEQ ID NO: 80423 - DNA, 77 bp, Homo sapiens
accatggctcgtcttgcgttcaatcttggggagaccgaggtgacacagccagcatcctaatgtcaatcgagggattt

SEQ ID NO: 80424 - DNA, 75 bp, Homo sapiens
gtcttgcgttcaatcttggggagaccgaggtgacacagccagcatcctaatgtcaatcgagggattttccgttta

SEQ ID NO: 80425 - DNA, 72 bp, Homo sapiens
cgttcaatcttggggagaccgaggtgacacagccagcatcctaatgtcaatcgagggattttccgtttaggg

SEQ ID NO: 80426 - DNA, 72 bp, Homo sapiens
aatcttggggagaccgaggtgacacagccagcatcctaatgtcaatcgagggattttccgtttaggggtgtg

SEQ ID NO: 80427 - DNA, 74 bp, Homo sapiens
ggagaccgaggtgacacagccagcatcctaatgtcaatcgagggattttccgtttaggggtgtggcaccctctg

SEQ ID NO: 80428 - DNA, 73 bp, Homo sapiens
aggtgacacagccagcatcctaatgtcaatcgagggattttccgtttaggggtgtggcaccctctggggctcc

SEQ ID NO: 80429 - DNA, 73 bp, Homo sapiens
acacagccagcatcctaatgtcaatcgagggattttccgtttaggggtgtggcaccctctggggctcccagag

SEQ ID NO: 80430 - DNA, 70 bp, Homo sapiens
taatgtcaatcgagggattttccgtttaggggtgtggcaccctctggggctcccagagggggtgacaatg

SEQ ID NO: 80431 - DNA, 71 bp, Homo sapiens
atgtcaatcgagggattttccgtttaggggtgtggcaccctctggggctcccagagggggtgacaatgtgc

SEQ ID NO: 80432 - DNA, 68 bp, Homo sapiens
aatcgagggattttccgtttaggggtgtggcaccctctggggctcccagagggggtgacaatgtgcct

SEQ ID NO: 80433 - DNA, 68 bp, Homo sapiens
ttttccgtttaggggtgtggcaccctctggggctcccagagggggtgacaatgtgcctttcccttgga

SEQ ID NO: 80434 - DNA, 75 bp, Homo sapiens
tctggggctcccagagggggtgacaatgtgcctttcccttggacatatcaattccttctgtgtccgcatcccacc

SEQ ID NO: 80435 - DNA, 74 bp, Homo sapiens
tcccagagggggtgacaatgtgcctttcccttggacatatcaattccttctgtgtccgcatcccaccttcctgg

SEQ ID NO: 80436 - DNA, 76 bp, Homo sapiens
tgacaatgtgcctttcccttggacatatcaattccttctgtgtccgcatcccaccttcctggtcttttctcttaca

SEQ ID NO: 80437 - DNA, 75 bp, Homo sapiens
cctttcccttggacatatcaattccttctgtgtccgcatcccaccttcctggtcttttctcttacatgcctgaca

SEQ ID NO: 80438 - DNA, 78 bp, Homo sapiens
tatcaattccttctgtgtccgcatcccaccttcctggtcttttctcttacatgcctgacagcagggcccatctcttcc

SEQ ID NO: 80439 - DNA, 73 bp, Homo sapiens
atcccaccttcctggtcttttctcttacatgcctgacagcagggcccatctcttccttcctaaagttactgac

SEQ ID NO: 80440 - DNA, 76 bp, Homo sapiens
ttcctggtcttttctcttacatgcctgacagcagggcccatctcttccttcctaaagttactgacgtggctgctgg

SEQ ID NO: 80441 - DNA, 75 bp, Homo sapiens
tttctcttacatgcctgacagcagggcccatctcttccttcctaaagttactgacgtggctgctggggggactct

SEQ ID NO: 80442 - DNA, 74 bp, Homo sapiens
atgcctgacagcagggcccatctcttccttcctaaagttactgacgtggctgctggggggactcttcctccctc

SEQ ID NO: 80443 - DNA, 71 bp, Homo sapiens
ttccttcctaaagttactgacgtggctgctggggggactcttcctccctctctaattgctgggtttcaatc

SEQ ID NO: 80444 - DNA, 76 bp, Homo sapiens
taaagttactgacgtggctgctggggggactcttcctccctctctaattgctgggtttcaatctgctgcaggagtg

SEQ ID NO: 80445 - DNA, 80 bp, Homo sapiens
gtggctgctggggggactcttcctccctctctaattgctgggtttcaatctgctgcaggagtggctgtgaggatcttgta

SEQ ID NO: 80446 - DNA, 82 bp, Homo sapiens
ttcctccctctctaattgctgggtttcaatctgctgcaggagtggctgtgaggatcttgtactgagcactcactttggacca

SEQ ID NO: 80447 - DNA, 85 bp, Homo sapiens
ggtttcaatctgctgcaggagtggctgtgaggatcttgtactgagcactcactttggaccaggcgctgttctatgcttcacatgt

SEQ ID NO: 80448 - DNA, 83 bp, Homo sapiens
agtggctgtgaggatcttgtactgagcactcactttggaccaggcgctgttctatgcttcacatgtttcatgtcacttaatcc

SEQ ID NO: 80449 - DNA, 78 bp, Homo sapiens
actgagcactcactttggaccaggcgctgttctatgcttcacatgtttcatgtcacttaatccctctaacaaaccaaa

SEQ ID NO: 80450 - DNA, 74 bp, Homo sapiens
actcactttggaccaggcgctgttctatgcttcacatgtttcatgtcacttaatccctctaacaaaccaaaaag

SEQ ID NO: 80451 - DNA, 75 bp, Homo sapiens
aggcgctgttctatgcttcacatgtttcatgtcacttaatccctctaacaaaccaaaaaggaaaattctatgatc

SEQ ID NO: 80452 - DNA, 75 bp, Homo sapiens
tctatgcttcacatgtttcatgtcacttaatccctctaacaaaccaaaaaggaaaattctatgatcgccctcatt

SEQ ID NO: 80453 - DNA, 74 bp, Homo sapiens
tcacatgtttcatgtcacttaatccctctaacaaaccaaaaaggaaaattctatgatcgccctcatttaacaga

SEQ ID NO: 80454 - DNA, 71 bp, Homo sapiens
ttcatgtcacttaatccctctaacaaaccaaaaaggaaaattctatgatcgccctcatttaacagaggaaa

SEQ ID NO: 80455 - DNA, 72 bp, Homo sapiens
taacaaaccaaaaaggaaaattctatgatcgccctcatttaacagaggaaaacagaggctcctgcgagagat

SEQ ID NO: 80456 - DNA, 74 bp, Homo sapiens
aaaaggaaaattctatgatcgccctcatttaacagaggaaaacagaggctcctgcgagagattgggcaggatgg

SEQ ID NO: 80457 - DNA, 79 bp, Homo sapiens
ttctatgatcgccctcatttaacagaggaaaacagaggctcctgcgagagattgggcaggatgggtcagaagaacaagc

SEQ ID NO: 80458 - DNA, 75 bp, Homo sapiens
ccctcatttaacagaggaaaacagaggctcctgcgagagattgggcaggatgggtcagaagaacaagccacaggg

SEQ ID NO: 80459 - DNA, 77 bp, Homo sapiens
aggaaaacagaggctcctgcgagagattgggcaggatgggtcagaagaacaagccacaggggcaatattctaggcca

SEQ ID NO: 80460 - DNA, 78 bp, Homo sapiens
aacagaggctcctgcgagagattgggcaggatgggtcagaagaacaagccacaggggcaatattctaggccatggggc

SEQ ID NO: 80461 - DNA, 78 bp, Homo sapiens
attgggcaggatgggtcagaagaacaagccacaggggcaatattctaggccatggggccagcctgagccaaggtgaga

SEQ ID NO: 80462 - DNA, 75 bp, Homo sapiens
aacaagccacaggggcaatattctaggccatggggccagcctgagccaaggtgagagagaaaccgtgtgggtaga

SEQ ID NO: 80463 - DNA, 75 bp, Homo sapiens
acaggggcaatattctaggccatggggccagcctgagccaaggtgagagagaaaccgtgtgggtagaggctgtgg

SEQ ID NO: 80464 - DNA, 75 bp, Homo sapiens
tattctaggccatggggccagcctgagccaaggtgagagagaaaccgtgtgggtagaggctgtgggggaaaagca

SEQ ID NO: 80465 - DNA, 75 bp, Homo sapiens
ggccagcctgagccaaggtgagagagaaaccgtgtgggtagaggctgtgggggaaaagcaggtggatccattcat

SEQ ID NO: 80466 - DNA, 71 bp, Homo sapiens
aaaccgtgtgggtagaggctgtgggggaaaagcaggtggatccattcattagagtttaagaggcatgggag

SEQ ID NO: 80467 - DNA, 78 bp, Homo sapiens
gggaaaagcaggtggatccattcattagagtttaagaggcatgggaggtgagaaatatagtagtgaaggatggcatca

SEQ ID NO: 80468 - DNA, 82 bp, Homo sapiens
atccattcattagagtttaagaggcatgggaggtgagaaatatagtagtgaaggatggcatcagatcatgggaggccatgag

SEQ ID NO: 80469 - DNA, 81 bp, Homo sapiens
tttaagaggcatgggaggtgagaaatatagtagtgaaggatggcatcagatcatgggaggccatgaggacaccaagaacta

SEQ ID NO: 80470 - DNA, 78 bp, Homo sapiens
atgggaggtgagaaatatagtagtgaaggatggcatcagatcatgggaggccatgaggacaccaagaactaagaaatt

SEQ ID NO: 80471 - DNA, 79 bp, Homo sapiens
agaaatatagtagtgaaggatggcatcagatcatgggaggccatgaggacaccaagaactaagaaatttcgattctata

SEQ ID NO: 80472 - DNA, 79 bp, Homo sapiens
tatagtagtgaaggatggcatcagatcatgggaggccatgaggacaccaagaactaagaaatttcgattctataaagga

SEQ ID NO: 80473 - DNA, 76 bp, Homo sapiens
aaggatggcatcagatcatgggaggccatgaggacaccaagaactaagaaatttcgattctataaaggagaagaaa

SEQ ID NO: 80474 - DNA, 74 bp, Homo sapiens
atcatgggaggccatgaggacaccaagaactaagaaatttcgattctataaaggagaagaaaccatcagtggat

SEQ ID NO: 80475 - DNA, 75 bp, Homo sapiens
aggccatgaggacaccaagaactaagaaatttcgattctataaaggagaagaaaccatcagtggattctgagcca

SEQ ID NO: 80476 - DNA, 72 bp, Homo sapiens
acaccaagaactaagaaatttcgattctataaaggagaagaaaccatcagtggattctgagccagggagaag

SEQ ID NO: 80477 - DNA, 74 bp, Homo sapiens
aactaagaaatttcgattctataaaggagaagaaaccatcagtggattctgagccagggagaagtcacaatcag

SEQ ID NO: 80478 - DNA, 78 bp, Homo sapiens
tttcgattctataaaggagaagaaaccatcagtggattctgagccagggagaagtcacaatcagggctgtgctttgta

SEQ ID NO: 80479 - DNA, 82 bp, Homo sapiens
taaaggagaagaaaccatcagtggattctgagccagggagaagtcacaatcagggctgtgctttgtagaaatcatcatgata

SEQ ID NO: 80480 - DNA, 81 bp, Homo sapiens
accatcagtggattctgagccagggagaagtcacaatcagggctgtgctttgtagaaatcatcatgataccagggtataaa

SEQ ID NO: 80481 - DNA, 79 bp, Homo sapiens
gattctgagccagggagaagtcacaatcagggctgtgctttgtagaaatcatcatgataccagggtataaaaaggtcaa

SEQ ID NO: 80482 - DNA, 76 bp, Homo sapiens
aagtcacaatcagggctgtgctttgtagaaatcatcatgataccagggtataaaaaggtcaaatgtgagggagaaa

SEQ ID NO: 80483 - DNA, 71 bp, Homo sapiens
tttgtagaaatcatcatgataccagggtataaaaaggtcaaatgtgagggagaaactagagggaggaaacc

SEQ ID NO: 80484 - DNA, 71 bp, Homo sapiens
aaatcatcatgataccagggtataaaaaggtcaaatgtgagggagaaactagagggaggaaaccggctata

SEQ ID NO: 80485 - DNA, 67 bp, Homo sapiens
ataccagggtataaaaaggtcaaatgtgagggagaaactagagggaggaaaccggctatagaatccc

SEQ ID NO: 80486 - DNA, 66 bp, Homo sapiens
tataaaaaggtcaaatgtgagggagaaactagagggaggaaaccggctatagaatcccccccacct

SEQ ID NO: 80487 - DNA, 67 bp, Homo sapiens
aaatgtgagggagaaactagagggaggaaaccggctatagaatcccccccaccttctttctctctcc

SEQ ID NO: 80488 - DNA, 66 bp, Homo sapiens
agaaactagagggaggaaaccggctatagaatcccccccaccttctttctctctcccccctctcac

SEQ ID NO: 80489 - DNA, 68 bp, Homo sapiens
gaggaaaccggctatagaatcccccccaccttctttctctctcccccctctcacccatcataaaaaca

SEQ ID NO: 80490 - DNA, 68 bp, Homo sapiens
aaccggctatagaatcccccccaccttctttctctctcccccctctcacccatcataaaaacaagaga

SEQ ID NO: 80491 - DNA, 70 bp, Homo sapiens
aatcccccccaccttctttctctctcccccctctcacccatcataaaaacaagagaaaggcaatgctcaa

SEQ ID NO: 80492 - DNA, 75 bp, Homo sapiens
ttctttctctctcccccctctcacccatcataaaaacaagagaaaggcaatgctcaagcctacacttgcaaaatg

SEQ ID NO: 80493 - DNA, 74 bp, Homo sapiens
tctcccccctctcacccatcataaaaacaagagaaaggcaatgctcaagcctacacttgcaaaatggtcccaaa

SEQ ID NO: 80494 - DNA, 75 bp, Homo sapiens
ataaaaacaagagaaaggcaatgctcaagcctacacttgcaaaatggtcccaaaccagccatgaagaggaggcaa

SEQ ID NO: 80495 - DNA, 81 bp, Homo sapiens
aagagaaaggcaatgctcaagcctacacttgcaaaatggtcccaaaccagccatgaagaggaggcaagagcatcacatcca

SEQ ID NO: 80496 - DNA, 81 bp, Homo sapiens
ggcaatgctcaagcctacacttgcaaaatggtcccaaaccagccatgaagaggaggcaagagcatcacatccagcggtggg

SEQ ID NO: 80497 - DNA, 77 bp, Homo sapiens
aagcctacacttgcaaaatggtcccaaaccagccatgaagaggaggcaagagcatcacatccagcggtggggagtcc

SEQ ID NO: 80498 - DNA, 77 bp, Homo sapiens
ttgcaaaatggtcccaaaccagccatgaagaggaggcaagagcatcacatccagcggtggggagtcccccaccggca

SEQ ID NO: 80499 - DNA, 81 bp, Homo sapiens
agccatgaagaggaggcaagagcatcacatccagcggtggggagtcccccaccggcagctgagttatttgcatcttctctc

SEQ ID NO: 80500 - DNA, 81 bp, Homo sapiens
aggcaagagcatcacatccagcggtggggagtcccccaccggcagctgagttatttgcatcttctctctgcagtgtgggag

SEQ ID NO: 80501 - DNA, 81 bp, Homo sapiens
agcatcacatccagcggtggggagtcccccaccggcagctgagttatttgcatcttctctctgcagtgtgggaggagaggc

SEQ ID NO: 80502 - DNA, 76 bp, Homo sapiens
agcggtggggagtcccccaccggcagctgagttatttgcatcttctctctgcagtgtgggaggagaggccgggtga

SEQ ID NO: 80503 - DNA, 78 bp, Homo sapiens
agtcccccaccggcagctgagttatttgcatcttctctctgcagtgtgggaggagaggccgggtgacgaatccacaca

SEQ ID NO: 80504 - DNA, 81 bp, Homo sapiens
cagctgagttatttgcatcttctctctgcagtgtgggaggagaggccgggtgacgaatccacacactcgcttttgaggtca

SEQ ID NO: 80505 - DNA, 82 bp, Homo sapiens
atttgcatcttctctctgcagtgtgggaggagaggccgggtgacgaatccacacactcgcttttgaggtcagacatgctaca

SEQ ID NO: 80506 - DNA, 81 bp, Homo sapiens
ttctctctgcagtgtgggaggagaggccgggtgacgaatccacacactcgcttttgaggtcagacatgctacagaaataga

SEQ ID NO: 80507 - DNA, 77 bp, Homo sapiens
agtgtgggaggagaggccgggtgacgaatccacacactcgcttttgaggtcagacatgctacagaaatagacaggac

SEQ ID NO: 80508 - DNA, 76 bp, Homo sapiens
agaggccgggtgacgaatccacacactcgcttttgaggtcagacatgctacagaaatagacaggaccaagatactt

SEQ ID NO: 80509 - DNA, 77 bp, Homo sapiens
ggtgacgaatccacacactcgcttttgaggtcagacatgctacagaaatagacaggaccaagatacttttctgttct

SEQ ID NO: 80510 - DNA, 78 bp, Homo sapiens
aatccacacactcgcttttgaggtcagacatgctacagaaatagacaggaccaagatacttttctgttcttggagatg

SEQ ID NO: 80511 - DNA, 78 bp, Homo sapiens
ttttgaggtcagacatgctacagaaatagacaggaccaagatacttttctgttcttggagatgggctctcacccataa

SEQ ID NO: 80512 - DNA, 76 bp, Homo sapiens
agacatgctacagaaatagacaggaccaagatacttttctgttcttggagatgggctctcacccataagaaggtaa

SEQ ID NO: 80513 - DNA, 73 bp, Homo sapiens
tacagaaatagacaggaccaagatacttttctgttcttggagatgggctctcacccataagaaggtaaaagcg

SEQ ID NO: 80514 - DNA, 71 bp, Homo sapiens
atagacaggaccaagatacttttctgttcttggagatgggctctcacccataagaaggtaaaagcgggccg

SEQ ID NO: 80515 - DNA, 70 bp, Homo sapiens
ccaagatacttttctgttcttggagatgggctctcacccataagaaggtaaaagcgggccgggcacggtg

SEQ ID NO: 80516 - DNA, 68 bp, Homo sapiens
aaaagaagaaggtaaaagcaaaacttcatttgaacctagatggccaagaccttcaccttcagtcctta

SEQ ID NO: 80517 - DNA, 70 bp, Homo sapiens
gtaaaagcaaaacttcatttgaacctagatggccaagaccttcaccttcagtccttacaggtttgtgaaa

SEQ ID NO: 80518 - DNA, 68 bp, Homo sapiens
aaaacttcatttgaacctagatggccaagaccttcaccttcagtccttacaggtttgtgaaattaaaa

SEQ ID NO: 80519 - DNA, 71 bp, Homo sapiens
atttgaacctagatggccaagaccttcaccttcagtccttacaggtttgtgaaattaaaatggccatgaaa

SEQ ID NO: 80520 - DNA, 74 bp, Homo sapiens
tagatggccaagaccttcaccttcagtccttacaggtttgtgaaattaaaatggccatgaaagctttcatagcc

SEQ ID NO: 80521 - DNA, 74 bp, Homo sapiens
ttcaccttcagtccttacaggtttgtgaaattaaaatggccatgaaagctttcatagcctgtgactcctcagtt

SEQ ID NO: 80522 - DNA, 74 bp, Homo sapiens
ttcagtccttacaggtttgtgaaattaaaatggccatgaaagctttcatagcctgtgactcctcagttttgtaa

SEQ ID NO: 80523 - DNA, 75 bp, Homo sapiens
tacaggtttgtgaaattaaaatggccatgaaagctttcatagcctgtgactcctcagttttgtaacagcaaagag

SEQ ID NO: 80524 - DNA, 72 bp, Homo sapiens
aattaaaatggccatgaaagctttcatagcctgtgactcctcagttttgtaacagcaaagaggggacagttt

SEQ ID NO: 80525 - DNA, 76 bp, Homo sapiens
catgaaagctttcatagcctgtgactcctcagttttgtaacagcaaagaggggacagttttgatgctgttaaacat

SEQ ID NO: 80526 - DNA, 74 bp, Homo sapiens
aagctttcatagcctgtgactcctcagttttgtaacagcaaagaggggacagttttgatgctgttaaacattaa

SEQ ID NO: 80527 - DNA, 75 bp, Homo sapiens
tgtgactcctcagttttgtaacagcaaagaggggacagttttgatgctgttaaacattaacagccgtctccgaca

SEQ ID NO: 80528 - DNA, 70 bp, Homo sapiens
agttttgtaacagcaaagaggggacagttttgatgctgttaaacattaacagccgtctccgacaccactt

SEQ ID NO: 80529 - DNA, 78 bp, Homo sapiens
taacagcaaagaggggacagttttgatgctgttaaacattaacagccgtctccgacaccactttgacattgcatcaca

SEQ ID NO: 80530 - DNA, 79 bp, Homo sapiens
gggacagttttgatgctgttaaacattaacagccgtctccgacaccactttgacattgcatcacacagacgaacagata

SEQ ID NO: 80531 - DNA, 80 bp, Homo sapiens
agttttgatgctgttaaacattaacagccgtctccgacaccactttgacattgcatcacacagacgaacagatacaatca

SEQ ID NO: 80532 - DNA, 84 bp, Homo sapiens
ttaaacattaacagccgtctccgacaccactttgacattgcatcacacagacgaacagatacaatcacagacaacaatgcatca

SEQ ID NO: 80533 - DNA, 86 bp, Homo sapiens
ttaacagccgtctccgacaccactttgacattgcatcacacagacgaacagatacaatcacagacaacaatgcatcactccaggca

SEQ ID NO: 80534 - DNA, 87 bp, Homo sapiens
tctccgacaccactttgacattgcatcacacagacgaacagatacaatcacagacaacaatgcatcactccaggcaacacacagaaa

SEQ ID NO: 80535 - DNA, 90 bp, Homo sapiens
tttgacattgcatcacacagacgaacagatacaatcacagacaacaatgcatcactccaggcaacacacagaaatcactgtcattgcaaa

SEQ ID NO: 80536 - DNA, 87 bp, Homo sapiens
atcacacagacgaacagatacaatcacagacaacaatgcatcactccaggcaacacacagaaatcactgtcattgcaaatcccagta

SEQ ID NO: 80537 - DNA, 85 bp, Homo sapiens
acacagacgaacagatacaatcacagacaacaatgcatcactccaggcaacacacagaaatcactgtcattgcaaatcccagtag

SEQ ID NO: 80538 - DNA, 84 bp, Homo sapiens
agacgaacagatacaatcacagacaacaatgcatcactccaggcaacacacagaaatcactgtcattgcaaatcccagtagggc

SEQ ID NO: 80539 - DNA, 83 bp, Homo sapiens
tacaatcacagacaacaatgcatcactccaggcaacacacagaaatcactgtcattgcaaatcccagtagggcccccagccaa

SEQ ID NO: 80540 - DNA, 81 bp, Homo sapiens
aatcacagacaacaatgcatcactccaggcaacacacagaaatcactgtcattgcaaatcccagtagggcccccagccaag

SEQ ID NO: 80541 - DNA, 78 bp, Homo sapiens
aacaatgcatcactccaggcaacacacagaaatcactgtcattgcaaatcccagtagggcccccagccaagggcaagg

SEQ ID NO: 80542 - DNA, 73 bp, Homo sapiens
actccaggcaacacacagaaatcactgtcattgcaaatcccagtagggcccccagccaagggcaagggacctt

SEQ ID NO: 80543 - DNA, 71 bp, Homo sapiens
acagaaatcactgtcattgcaaatcccagtagggcccccagccaagggcaagggacctttccgggccatta

SEQ ID NO: 80544 - DNA, 70 bp, Homo sapiens
aatcactgtcattgcaaatcccagtagggcccccagccaagggcaagggacctttccgggccattacaaa

SEQ ID NO: 80545 - DNA, 67 bp, Homo sapiens
attgcaaatcccagtagggcccccagccaagggcaagggacctttccgggccattacaaaccaggag

SEQ ID NO: 80546 - DNA, 71 bp, Homo sapiens
ccagtagggcccccagccaagggcaagggacctttccgggccattacaaaccaggaggctgatctgctgtg

SEQ ID NO: 80547 - DNA, 76 bp, Homo sapiens
agccaagggcaagggacctttccgggccattacaaaccaggaggctgatctgctgtggcctgacctcagcagaaca

SEQ ID NO: 80548 - DNA, 75 bp, Homo sapiens
aagggacctttccgggccattacaaaccaggaggctgatctgctgtggcctgacctcagcagaacacactagtcc

SEQ ID NO: 80549 - DNA, 80 bp, Homo sapiens
tttccgggccattacaaaccaggaggctgatctgctgtggcctgacctcagcagaacacactagtcctgcagacatttaa

SEQ ID NO: 80550 - DNA, 80 bp, Homo sapiens
attacaaaccaggaggctgatctgctgtggcctgacctcagcagaacacactagtcctgcagacatttaattctttagga

SEQ ID NO: 80551 - DNA, 77 bp, Homo sapiens
atctgctgtggcctgacctcagcagaacacactagtcctgcagacatttaattctttaggattccccaaagttaatc

SEQ ID NO: 80552 - DNA, 78 bp, Homo sapiens
tgacctcagcagaacacactagtcctgcagacatttaattctttaggattccccaaagttaatctctcagagtatgga

SEQ ID NO: 80553 - DNA, 75 bp, Homo sapiens
agaacacactagtcctgcagacatttaattctttaggattccccaaagttaatctctcagagtatggaagactca

SEQ ID NO: 80554 - DNA, 75 bp, Homo sapiens
tagtcctgcagacatttaattctttaggattccccaaagttaatctctcagagtatggaagactcacgaatacat

SEQ ID NO: 80555 - DNA, 71 bp, Homo sapiens
catttaattctttaggattccccaaagttaatctctcagagtatggaagactcacgaatacattctaaggg

SEQ ID NO: 80556 - DNA, 70 bp, Homo sapiens
aattctttaggattccccaaagttaatctctcagagtatggaagactcacgaatacattctaagggttta

SEQ ID NO: 80557 - DNA, 71 bp, Homo sapiens
cccaaagttaatctctcagagtatggaagactcacgaatacattctaagggtttactgtttgggttcatcc

SEQ ID NO: 80558 - DNA, 77 bp, Homo sapiens
ttaatctctcagagtatggaagactcacgaatacattctaagggtttactgtttgggttcatcctagcatctcaatc

SEQ ID NO: 80559 - DNA, 76 bp, Homo sapiens
agagtatggaagactcacgaatacattctaagggtttactgtttgggttcatcctagcatctcaatccagaagtca

SEQ ID NO: 80560 - DNA, 72 bp, Homo sapiens
actcacgaatacattctaagggtttactgtttgggttcatcctagcatctcaatccagaagtcactttggtt

SEQ ID NO: 80561 - DNA, 69 bp, Homo sapiens
taagggtttactgtttgggttcatcctagcatctcaatccagaagtcactttggttttcctttattaac

SEQ ID NO: 80562 - DNA, 73 bp, Homo sapiens
tgtttgggttcatcctagcatctcaatccagaagtcactttggttttcctttattaaccatccttagtgatta

SEQ ID NO: 80563 - DNA, 73 bp, Homo sapiens
ctagcatctcaatccagaagtcactttggttttcctttattaaccatccttagtgattagcgttggccgtgaa

SEQ ID NO: 80564 - DNA, 68 bp, Homo sapiens
aatccagaagtcactttggttttcctttattaaccatccttagtgattagcgttggccgtgaaaaaca

SEQ ID NO: 80565 - DNA, 70 bp, Homo sapiens
ttttcctttattaaccatccttagtgattagcgttggccgtgaaaaacacgctactggtctctccttgtg

SEQ ID NO: 80566 - DNA, 75 bp, Homo sapiens
tattaaccatccttagtgattagcgttggccgtgaaaaacacgctactggtctctccttgtggcctctgcaaata

SEQ ID NO: 80567 - DNA, 78 bp, Homo sapiens
tagtgattagcgttggccgtgaaaaacacgctactggtctctccttgtggcctctgcaaatagataggttgctacata

SEQ ID NO: 80568 - DNA, 77 bp, Homo sapiens
attagcgttggccgtgaaaaacacgctactggtctctccttgtggcctctgcaaatagataggttgctacatatgaa

SEQ ID NO: 80569 - DNA, 79 bp, Homo sapiens
tgaaaaacacgctactggtctctccttgtggcctctgcaaatagataggttgctacatatgaagccacacacacgaacg

SEQ ID NO: 80570 - DNA, 83 bp, Homo sapiens
acacgctactggtctctccttgtggcctctgcaaatagataggttgctacatatgaagccacacacacgaacggcagacagca

SEQ ID NO: 80571 - DNA, 85 bp, Homo sapiens
tctctccttgtggcctctgcaaatagataggttgctacatatgaagccacacacacgaacggcagacagcagagaatccgtgatc

SEQ ID NO: 80572 - DNA, 82 bp, Homo sapiens
cctctgcaaatagataggttgctacatatgaagccacacacacgaacggcagacagcagagaatccgtgatcccaaagcaaa

SEQ ID NO: 80573 - DNA, 79 bp, Homo sapiens
aaatagataggttgctacatatgaagccacacacacgaacggcagacagcagagaatccgtgatcccaaagcaaaaaga

SEQ ID NO: 80574 - DNA, 83 bp, Homo sapiens
ttgctacatatgaagccacacacacgaacggcagacagcagagaatccgtgatcccaaagcaaaaagactgatgatatttcca

SEQ ID NO: 80575 - DNA, 80 bp, Homo sapiens
atatgaagccacacacacgaacggcagacagcagagaatccgtgatcccaaagcaaaaagactgatgatatttccaccaa

SEQ ID NO: 80576 - DNA, 75 bp, Homo sapiens
acacgaacggcagacagcagagaatccgtgatcccaaagcaaaaagactgatgatatttccaccaacctgagttt

SEQ ID NO: 80577 - DNA, 76 bp, Homo sapiens
agacagcagagaatccgtgatcccaaagcaaaaagactgatgatatttccaccaacctgagttttcctgagttcaa

SEQ ID NO: 80578 - DNA, 71 bp, Homo sapiens
atgatatttccaccaacctgagttttcctgagttcaacggcatcagataagaccaaccctcttattatttt

SEQ ID NO: 80579 - DNA, 67 bp, Homo sapiens
accaacctgagttttcctgagttcaacggcatcagataagaccaaccctcttattatttttttcgtt

SEQ ID NO: 80580 - DNA, 68 bp, Homo sapiens
agttttcctgagttcaacggcatcagataagaccaaccctcttattatttttttcgtttcagtcaagt

SEQ ID NO: 80581 - DNA, 70 bp, Homo sapiens
agttcaacggcatcagataagaccaaccctcttattatttttttcgtttcagtcaagttgaaaactgtca

SEQ ID NO: 80582 - DNA, 69 bp, Homo sapiens
acggcatcagataagaccaaccctcttattatttttttcgtttcagtcaagttgaaaactgtcaaccaa

SEQ ID NO: 80583 - DNA, 65 bp, Homo sapiens
agaccaaccctcttattatttttttcgtttcagtcaagttgaaaactgtcaaccaaaataggcct

SEQ ID NO: 80584 - DNA, 68 bp, Homo sapiens
ttattatttttttcgtttcagtcaagttgaaaactgtcaaccaaaataggccttatttgctgtaggcc

SEQ ID NO: 80585 - DNA, 69 bp, Homo sapiens
tttttcgtttcagtcaagttgaaaactgtcaaccaaaataggccttatttgctgtaggcccttgtcctc

SEQ ID NO: 80586 - DNA, 71 bp, Homo sapiens
aaactgtcaaccaaaataggccttatttgctgtaggcccttgtcctctgtaggatgaattgggttgtctta

SEQ ID NO: 80587 - DNA, 71 bp, Homo sapiens
aaccaaaataggccttatttgctgtaggcccttgtcctctgtaggatgaattgggttgtcttaaaatgata

SEQ ID NO: 80588 - DNA, 72 bp, Homo sapiens
ataggccttatttgctgtaggcccttgtcctctgtaggatgaattgggttgtcttaaaatgataattaatag

SEQ ID NO: 80589 - DNA, 73 bp, Homo sapiens
tttgctgtaggcccttgtcctctgtaggatgaattgggttgtcttaaaatgataattaataggccgagcacgg

SEQ ID NO: 80590 - DNA, 72 bp, Homo sapiens
aaaaaaagataattaataagaaaacacatctgggtagggtgatgactcacttttgtaactgcttcacagtca

SEQ ID NO: 80591 - DNA, 73 bp, Homo sapiens
aattaataagaaaacacatctgggtagggtgatgactcacttttgtaactgcttcacagtcatgaacggaaaa

SEQ ID NO: 80592 - DNA, 73 bp, Homo sapiens
ataagaaaacacatctgggtagggtgatgactcacttttgtaactgcttcacagtcatgaacggaaaaattat

SEQ ID NO: 80593 - DNA, 78 bp, Homo sapiens
acatctgggtagggtgatgactcacttttgtaactgcttcacagtcatgaacggaaaaattattcatcagcccaagca

SEQ ID NO: 80594 - DNA, 79 bp, Homo sapiens
tgatgactcacttttgtaactgcttcacagtcatgaacggaaaaattattcatcagcccaagcagtctctagggtacag

SEQ ID NO: 80595 - DNA, 74 bp, Homo sapiens
acttttgtaactgcttcacagtcatgaacggaaaaattattcatcagcccaagcagtctctagggtacagggtc

SEQ ID NO: 80596 - DNA, 77 bp, Homo sapiens
taactgcttcacagtcatgaacggaaaaattattcatcagcccaagcagtctctagggtacagggtctcagggacgc

SEQ ID NO: 80597 - DNA, 72 bp, Homo sapiens
acagtcatgaacggaaaaattattcatcagcccaagcagtctctagggtacagggtctcagggacgccccct

SEQ ID NO: 80598 - DNA, 71 bp, Homo sapiens
aaaaattattcatcagcccaagcagtctctagggtacagggtctcagggacgcccccttcctccatacgtg

SEQ ID NO: 80599 - DNA, 73 bp, Homo sapiens
tattcatcagcccaagcagtctctagggtacagggtctcagggacgcccccttcctccatacgtggccccctg

SEQ ID NO: 80600 - DNA, 74 bp, Homo sapiens
tagggtacagggtctcagggacgcccccttcctccatacgtggccccctgtctgcatgatcaatcaaccaacta

SEQ ID NO: 80601 - DNA, 71 bp, Homo sapiens
gcccccttcctccatacgtggccccctgtctgcatgatcaatcaaccaactaatagttactaactaccctt

SEQ ID NO: 80602 - DNA, 74 bp, Homo sapiens
ttcctccatacgtggccccctgtctgcatgatcaatcaaccaactaatagttactaactaccctttcctgaatc

SEQ ID NO: 80603 - DNA, 73 bp, Homo sapiens
acgtggccccctgtctgcatgatcaatcaaccaactaatagttactaactaccctttcctgaatcctgtgtgg

SEQ ID NO: 80604 - DNA, 79 bp, Homo sapiens
tctgcatgatcaatcaaccaactaatagttactaactaccctttcctgaatcctgtgtgggatgcaggcaggtattgta

SEQ ID NO: 80605 - DNA, 75 bp, Homo sapiens
atcaatcaaccaactaatagttactaactaccctttcctgaatcctgtgtgggatgcaggcaggtattgtatgta

SEQ ID NO: 80606 - DNA, 75 bp, Homo sapiens
taatagttactaactaccctttcctgaatcctgtgtgggatgcaggcaggtattgtatgtaggacctgactccta

SEQ ID NO: 80607 - DNA, 73 bp, Homo sapiens
ttactaactaccctttcctgaatcctgtgtgggatgcaggcaggtattgtatgtaggacctgactcctaaaat

SEQ ID NO: 80608 - DNA, 77 bp, Homo sapiens
ttcctgaatcctgtgtgggatgcaggcaggtattgtatgtaggacctgactcctaaaattcggaagctaagtcgcaa

SEQ ID NO: 80609 - DNA, 74 bp, Homo sapiens
gggatgcaggcaggtattgtatgtaggacctgactcctaaaattcggaagctaagtcgcaaacatgggcaaaaa

SEQ ID NO: 80610 - DNA, 69 bp, Homo sapiens
aggtattgtatgtaggacctgactcctaaaattcggaagctaagtcgcaaacatgggcaaaaaaaagga

SEQ ID NO: 80611 - DNA, 69 bp, Homo sapiens
taggacctgactcctaaaattcggaagctaagtcgcaaacatgggcaaaaaaaaggaataagtatcaaa

SEQ ID NO: 80612 - DNA, 69 bp, Homo sapiens
tcctaaaattcggaagctaagtcgcaaacatgggcaaaaaaaaggaataagtatcaaaggagtcttcaa

SEQ ID NO: 80613 - DNA, 70 bp, Homo sapiens
aaattcggaagctaagtcgcaaacatgggcaaaaaaaaggaataagtatcaaaggagtcttcaacagtgc

SEQ ID NO: 80614 - DNA, 75 bp, Homo sapiens
taagtcgcaaacatgggcaaaaaaaaggaataagtatcaaaggagtcttcaacagtgccaaatgctatgtgataa

SEQ ID NO: 80615 - DNA, 77 bp, Homo sapiens
tgggcaaaaaaaaggaataagtatcaaaggagtcttcaacagtgccaaatgctatgtgataagctggcagacaataa

SEQ ID NO: 80616 - DNA, 78 bp, Homo sapiens
aaaaaggaataagtatcaaaggagtcttcaacagtgccaaatgctatgtgataagctggcagacaataagagctttca

SEQ ID NO: 80617 - DNA, 81 bp, Homo sapiens
aataagtatcaaaggagtcttcaacagtgccaaatgctatgtgataagctggcagacaataagagctttcagaatccagag

SEQ ID NO: 80618 - DNA, 80 bp, Homo sapiens
aaaggagtcttcaacagtgccaaatgctatgtgataagctggcagacaataagagctttcagaatccagaggagggcgag

SEQ ID NO: 80619 - DNA, 73 bp, Homo sapiens
agctttcagaatccagaggagggcgaggtcactcttggctgggatggtacagggaggcttcccaaaagataaa

SEQ ID NO: 80620 - DNA, 71 bp, Homo sapiens
agaatccagaggagggcgaggtcactcttggctgggatggtacagggaggcttcccaaaagataaagaact

SEQ ID NO: 80621 - DNA, 73 bp, Homo sapiens
gtcactcttggctgggatggtacagggaggcttcccaaaagataaagaacttgcctcacagcagggataaaaa

SEQ ID NO: 80622 - DNA, 71 bp, Homo sapiens
ggatggtacagggaggcttcccaaaagataaagaacttgcctcacagcagggataaaaaacaagggcttga

SEQ ID NO: 80623 - DNA, 72 bp, Homo sapiens
tacagggaggcttcccaaaagataaagaacttgcctcacagcagggataaaaaacaagggcttgactggagc

SEQ ID NO: 80624 - DNA, 74 bp, Homo sapiens
caaaagataaagaacttgcctcacagcagggataaaaaacaagggcttgactggagcccgaggaacatgatgta

SEQ ID NO: 80625 - DNA, 71 bp, Homo sapiens
agggataaaaaacaagggcttgactggagcccgaggaacatgatgtacgaagcagaataaggtttgataaa

SEQ ID NO: 80626 - DNA, 73 bp, Homo sapiens
acaagggcttgactggagcccgaggaacatgatgtacgaagcagaataaggtttgataaaggacgggacataa

SEQ ID NO: 80627 - DNA, 74 bp, Homo sapiens
cttgactggagcccgaggaacatgatgtacgaagcagaataaggtttgataaaggacgggacataaggaaatga

SEQ ID NO: 80628 - DNA, 75 bp, Homo sapiens
aggaacatgatgtacgaagcagaataaggtttgataaaggacgggacataaggaaatgagagacagcgaagttga

SEQ ID NO: 80629 - DNA, 73 bp, Homo sapiens
atgtacgaagcagaataaggtttgataaaggacgggacataaggaaatgagagacagcgaagttgattcggaa

SEQ ID NO: 80630 - DNA, 73 bp, Homo sapiens
tttgataaaggacgggacataaggaaatgagagacagcgaagttgattcggaaggaaatgacagaagttcgaa

SEQ ID NO: 80631 - DNA, 78 bp, Homo sapiens
atgagagacagcgaagttgattcggaaggaaatgacagaagttcgaaccagtaactcgaagagatgtggctatggtga

SEQ ID NO: 80632 - DNA, 73 bp, Homo sapiens
ttcggaaggaaatgacagaagttcgaaccagtaactcgaagagatgtggctatggtgacagccagtttagggg

SEQ ID NO: 80633 - DNA, 77 bp, Homo sapiens
aatgacagaagttcgaaccagtaactcgaagagatgtggctatggtgacagccagtttagggggatgcagtagagtc

SEQ ID NO: 80634 - DNA, 80 bp, Homo sapiens
taactcgaagagatgtggctatggtgacagccagtttagggggatgcagtagagtctgttgaccatggatccaagttcaa

SEQ ID NO: 80635 - DNA, 78 bp, Homo sapiens
agatgtggctatggtgacagccagtttagggggatgcagtagagtctgttgaccatggatccaagttcaaagtgttcg

SEQ ID NO: 80636 - DNA, 75 bp, Homo sapiens
tgacagccagtttagggggatgcagtagagtctgttgaccatggatccaagttcaaagtgttcggtggggagtag

SEQ ID NO: 80637 - DNA, 71 bp, Homo sapiens
ccagtttagggggatgcagtagagtctgttgaccatggatccaagttcaaagtgttcggtggggagtaggg

SEQ ID NO: 80638 - DNA, 74 bp, Homo sapiens
atgcagtagagtctgttgaccatggatccaagttcaaagtgttcggtggggagtaggggtgagtctggcccttg

SEQ ID NO: 80639 - DNA, 75 bp, Homo sapiens
tagagtctgttgaccatggatccaagttcaaagtgttcggtggggagtaggggtgagtctggcccttggcacatg

SEQ ID NO: 80640 - DNA, 75 bp, Homo sapiens
accatggatccaagttcaaagtgttcggtggggagtaggggtgagtctggcccttggcacatggagctggagctg

SEQ ID NO: 80641 - DNA, 78 bp, Homo sapiens
aagttcaaagtgttcggtggggagtaggggtgagtctggcccttggcacatggagctggagctggaggcatctgctca

SEQ ID NO: 80642 - DNA, 80 bp, Homo sapiens
aagtgttcggtggggagtaggggtgagtctggcccttggcacatggagctggagctggaggcatctgctcagagatggtg

SEQ ID NO: 80643 - DNA, 86 bp, Homo sapiens
agtaggggtgagtctggcccttggcacatggagctggagctggaggcatctgctcagagatggtggtgagatcctacaggctgaca

SEQ ID NO: 80644 - DNA, 87 bp, Homo sapiens
agtctggcccttggcacatggagctggagctggaggcatctgctcagagatggtggtgagatcctacaggctgacaaggagttcaca

SEQ ID NO: 80645 - DNA, 83 bp, Homo sapiens
gagctggagctggaggcatctgctcagagatggtggtgagatcctacaggctgacaaggagttcacagagaaagaaaggacct

SEQ ID NO: 80646 - DNA, 83 bp, Homo sapiens
tggaggcatctgctcagagatggtggtgagatcctacaggctgacaaggagttcacagagaaagaaaggaccttgagctgaac

SEQ ID NO: 80647 - DNA, 80 bp, Homo sapiens
atctgctcagagatggtggtgagatcctacaggctgacaaggagttcacagagaaagaaaggaccttgagctgaaccttg

SEQ ID NO: 80648 - DNA, 77 bp, Homo sapiens
agagatggtggtgagatcctacaggctgacaaggagttcacagagaaagaaaggaccttgagctgaaccttggggca

SEQ ID NO: 80649 - DNA, 77 bp, Homo sapiens
ctgacaaggagttcacagagaaagaaaggaccttgagctgaaccttggggcatgctcttgcttaagcagtgggagaa

SEQ ID NO: 80650 - DNA, 74 bp, Homo sapiens
agagaaagaaaggaccttgagctgaaccttggggcatgctcttgcttaagcagtgggagaagaattattctccc

SEQ ID NO: 80651 - DNA, 76 bp, Homo sapiens
aaccttggggcatgctcttgcttaagcagtgggagaagaattattctcccccagcatgcctcaggcccaatccctc

SEQ ID NO: 80652 - DNA, 78 bp, Homo sapiens
gggcatgctcttgcttaagcagtgggagaagaattattctcccccagcatgcctcaggcccaatccctccctctcctg

SEQ ID NO: 80653 - DNA, 77 bp, Homo sapiens
ttgcttaagcagtgggagaagaattattctcccccagcatgcctcaggcccaatccctccctctcctgtgcctttca

SEQ ID NO: 80654 - DNA, 80 bp, Homo sapiens
tgggagaagaattattctcccccagcatgcctcaggcccaatccctccctctcctgtgcctttcattagtgcatgcaaca

SEQ ID NO: 80655 - DNA, 77 bp, Homo sapiens
aagaattattctcccccagcatgcctcaggcccaatccctccctctcctgtgcctttcattagtgcatgcaacaccc

SEQ ID NO: 80656 - DNA, 78 bp, Homo sapiens
ccagcatgcctcaggcccaatccctccctctcctgtgcctttcattagtgcatgcaacacccccagggcccctctcca

SEQ ID NO: 80657 - DNA, 74 bp, Homo sapiens
tcaggcccaatccctccctctcctgtgcctttcattagtgcatgcaacacccccagggcccctctccaagactt

SEQ ID NO: 80658 - DNA, 72 bp, Homo sapiens
aatccctccctctcctgtgcctttcattagtgcatgcaacacccccagggcccctctccaagactttcaaag

SEQ ID NO: 80659 - DNA, 73 bp, Homo sapiens
tttcattagtgcatgcaacacccccagggcccctctccaagactttcaaaggcaagaaccaggtcttcatctt

SEQ ID NO: 80660 - DNA, 73 bp, Homo sapiens
tagtgcatgcaacacccccagggcccctctccaagactttcaaaggcaagaaccaggtcttcatctttttcac

SEQ ID NO: 80661 - DNA, 73 bp, Homo sapiens
cctctccaagactttcaaaggcaagaaccaggtcttcatctttttcacctctaaccagactagtgctcaacac

SEQ ID NO: 80662 - DNA, 73 bp, Homo sapiens
aaaggcaagaaccaggtcttcatctttttcacctctaaccagactagtgctcaacactcaggggctacatggg

SEQ ID NO: 80663 - DNA, 76 bp, Homo sapiens
ggtcttcatctttttcacctctaaccagactagtgctcaacactcaggggctacatggggaatgaacgatgtgagt

SEQ ID NO: 80664 - DNA, 77 bp, Homo sapiens
atctttttcacctctaaccagactagtgctcaacactcaggggctacatggggaatgaacgatgtgagttctgagaa

SEQ ID NO: 80665 - DNA, 77 bp, Homo sapiens
ctcaacactcaggggctacatggggaatgaacgatgtgagttctgagaatcaggcagagaaaccaaatgaagagggg

SEQ ID NO: 80666 - DNA, 76 bp, Homo sapiens
ctacatggggaatgaacgatgtgagttctgagaatcaggcagagaaaccaaatgaagaggggggatacaagaagaa

SEQ ID NO: 80667 - DNA, 75 bp, Homo sapiens
aatgaacgatgtgagttctgagaatcaggcagagaaaccaaatgaagaggggggatacaagaagaaataagtaca

SEQ ID NO: 80668 - DNA, 76 bp, Homo sapiens
acgatgtgagttctgagaatcaggcagagaaaccaaatgaagaggggggatacaagaagaaataagtacagctgac

SEQ ID NO: 80669 - DNA, 75 bp, Homo sapiens
ttctgagaatcaggcagagaaaccaaatgaagaggggggatacaagaagaaataagtacagctgacccttgaaca

SEQ ID NO: 80670 - DNA, 72 bp, Homo sapiens
caggcagagaaaccaaatgaagaggggggatacaagaagaaataagtacagctgacccttgaacaacacgag

SEQ ID NO: 80671 - DNA, 69 bp, Homo sapiens
accaaatgaagaggggggatacaagaagaaataagtacagctgacccttgaacaacacgagggtttaga

SEQ ID NO: 80672 - DNA, 69 bp, Homo sapiens
agaggggggatacaagaagaaataagtacagctgacccttgaacaacacgagggtttagaggtgctaac

SEQ ID NO: 80673 - DNA, 70 bp, Homo sapiens
tacaagaagaaataagtacagctgacccttgaacaacacgagggtttagaggtgctaacccccatctccc

SEQ ID NO: 80674 - DNA, 71 bp, Homo sapiens
taagtacagctgacccttgaacaacacgagggtttagaggtgctaacccccatctccccatgtggttgaaa

SEQ ID NO: 80675 - DNA, 69 bp, Homo sapiens
cccttgaacaacacgagggtttagaggtgctaacccccatctccccatgtggttgaaaatctgtaccta

SEQ ID NO: 80676 - DNA, 67 bp, Homo sapiens
aacaacacgagggtttagaggtgctaacccccatctccccatgtggttgaaaatctgtacctaactt

SEQ ID NO: 80677 - DNA, 69 bp, Homo sapiens
tttagaggtgctaacccccatctccccatgtggttgaaaatctgtacctaacttttgactccctcaaaa

SEQ ID NO: 80678 - DNA, 68 bp, Homo sapiens
ggtgctaacccccatctccccatgtggttgaaaatctgtacctaacttttgactccctcaaaagttaa

SEQ ID NO: 80679 - DNA, 68 bp, Homo sapiens
tctccccatgtggttgaaaatctgtacctaacttttgactccctcaaaagttaactactaacaaccta

SEQ ID NO: 80680 - DNA, 70 bp, Homo sapiens
tgtggttgaaaatctgtacctaacttttgactccctcaaaagttaactactaacaacctactgctgacta

SEQ ID NO: 80681 - DNA, 68 bp, Homo sapiens
aaatctgtacctaacttttgactccctcaaaagttaactactaacaacctactgctgactagaagcct

SEQ ID NO: 80682 - DNA, 70 bp, Homo sapiens
cctcaaaagttaactactaacaacctactgctgactagaagccttagcgataacctaaacagttgataaa

SEQ ID NO: 80683 - DNA, 77 bp, Homo sapiens
taacaacctactgctgactagaagccttagcgataacctaaacagttgataaacatgtattctgtatgttatccata

SEQ ID NO: 80684 - DNA, 78 bp, Homo sapiens
tgctgactagaagccttagcgataacctaaacagttgataaacatgtattctgtatgttatccatattacagacttta

SEQ ID NO: 80685 - DNA, 74 bp, Homo sapiens
agaagccttagcgataacctaaacagttgataaacatgtattctgtatgttatccatattacagactttattcc

SEQ ID NO: 80686 - DNA, 74 bp, Homo sapiens
gcgataacctaaacagttgataaacatgtattctgtatgttatccatattacagactttattcctaaagtaagc

SEQ ID NO: 80687 - DNA, 74 bp, Homo sapiens
taaacagttgataaacatgtattctgtatgttatccatattacagactttattcctaaagtaagctagagaaaa

SEQ ID NO: 80688 - DNA, 72 bp, Homo sapiens
aataaataaaatcataagaaagagaaaatacacctacagtactgtactgtatttactgatgccataagttta

SEQ ID NO: 80689 - DNA, 76 bp, Homo sapiens
atcataagaaagagaaaatacacctacagtactgtactgtatttactgatgccataagtttacatcatctgtttaa

SEQ ID NO: 80690 - DNA, 76 bp, Homo sapiens
gaaagagaaaatacacctacagtactgtactgtatttactgatgccataagtttacatcatctgtttaaaagatga

SEQ ID NO: 80691 - DNA, 74 bp, Homo sapiens
acacctacagtactgtactgtatttactgatgccataagtttacatcatctgtttaaaagatgaaacctttgaa

SEQ ID NO: 80692 - DNA, 76 bp, Homo sapiens
cagtactgtactgtatttactgatgccataagtttacatcatctgtttaaaagatgaaacctttgaaatggtggca

SEQ ID NO: 80693 - DNA, 81 bp, Homo sapiens
actgtatttactgatgccataagtttacatcatctgtttaaaagatgaaacctttgaaatggtggcagcagcagctgcaga

SEQ ID NO: 80694 - DNA, 80 bp, Homo sapiens
atgccataagtttacatcatctgtttaaaagatgaaacctttgaaatggtggcagcagcagctgcagacgtcagtctacg

SEQ ID NO: 80695 - DNA, 77 bp, Homo sapiens
aagtttacatcatctgtttaaaagatgaaacctttgaaatggtggcagcagcagctgcagacgtcagtctacggtac

SEQ ID NO: 80696 - DNA, 79 bp, Homo sapiens
tgtttaaaagatgaaacctttgaaatggtggcagcagcagctgcagacgtcagtctacggtacctgacaagcaattgaa

SEQ ID NO: 80697 - DNA, 77 bp, Homo sapiens
aagatgaaacctttgaaatggtggcagcagcagctgcagacgtcagtctacggtacctgacaagcaattgaactttt

SEQ ID NO: 80698 - DNA, 78 bp, Homo sapiens
cctttgaaatggtggcagcagcagctgcagacgtcagtctacggtacctgacaagcaattgaactttttcttgtaatg

SEQ ID NO: 80699 - DNA, 80 bp, Homo sapiens
cagcagcagctgcagacgtcagtctacggtacctgacaagcaattgaactttttcttgtaatgtcaggacttttctctgc

SEQ ID NO: 80700 - DNA, 76 bp, Homo sapiens
agctgcagacgtcagtctacggtacctgacaagcaattgaactttttcttgtaatgtcaggacttttctctgcttc

SEQ ID NO: 80701 - DNA, 73 bp, Homo sapiens
acggtacctgacaagcaattgaactttttcttgtaatgtcaggacttttctctgcttctggggaatgctttca

SEQ ID NO: 80702 - DNA, 78 bp, Homo sapiens
acaagcaattgaactttttcttgtaatgtcaggacttttctctgcttctggggaatgctttcagcatcactagtggca

SEQ ID NO: 80703 - DNA, 78 bp, Homo sapiens
tttttcttgtaatgtcaggacttttctctgcttctggggaatgctttcagcatcactagtggcacactctatgggtcc

SEQ ID NO: 80704 - DNA, 80 bp, Homo sapiens
ttgtaatgtcaggacttttctctgcttctggggaatgctttcagcatcactagtggcacactctatgggtcccatggtgt

SEQ ID NO: 80705 - DNA, 81 bp, Homo sapiens
atcactagtggcacactctatgggtcccatggtgttattcgaggcttatggcattgcactaaacatgatgaaaaatacata

SEQ ID NO: 80706 - DNA, 81 bp, Homo sapiens
tagtggcacactctatgggtcccatggtgttattcgaggcttatggcattgcactaaacatgatgaaaaatacatagaaca

SEQ ID NO: 80707 - DNA, 79 bp, Homo sapiens
tatgggtcccatggtgttattcgaggcttatggcattgcactaaacatgatgaaaaatacatagaacagtgagggctta

SEQ ID NO: 80708 - DNA, 77 bp, Homo sapiens
atggtgttattcgaggcttatggcattgcactaaacatgatgaaaaatacatagaacagtgagggcttacattttac

SEQ ID NO: 80709 - DNA, 78 bp, Homo sapiens
gaggcttatggcattgcactaaacatgatgaaaaatacatagaacagtgagggcttacattttactgcgatacccaat

SEQ ID NO: 80710 - DNA, 77 bp, Homo sapiens
ttatggcattgcactaaacatgatgaaaaatacatagaacagtgagggcttacattttactgcgatacccaatttac

SEQ ID NO: 80711 - DNA, 75 bp, Homo sapiens
aaacatgatgaaaaatacatagaacagtgagggcttacattttactgcgatacccaatttactggagtgatgaac

SEQ ID NO: 80712 - DNA, 75 bp, Homo sapiens
aaaaatacatagaacagtgagggcttacattttactgcgatacccaatttactggagtgatgaactgttcatcca

SEQ ID NO: 80713 - DNA, 80 bp, Homo sapiens
tacatagaacagtgagggcttacattttactgcgatacccaatttactggagtgatgaactgttcatccagggctgatca

SEQ ID NO: 80714 - DNA, 83 bp, Homo sapiens
agtgagggcttacattttactgcgatacccaatttactggagtgatgaactgttcatccagggctgatcagcatcacatgaca

SEQ ID NO: 80715 - DNA, 85 bp, Homo sapiens
attttactgcgatacccaatttactggagtgatgaactgttcatccagggctgatcagcatcacatgacaagccgatgctctcaa

SEQ ID NO: 80716 - DNA, 87 bp, Homo sapiens
atacccaatttactggagtgatgaactgttcatccagggctgatcagcatcacatgacaagccgatgctctcaacacctgagctcac

SEQ ID NO: 80717 - DNA, 89 bp, Homo sapiens
aatttactggagtgatgaactgttcatccagggctgatcagcatcacatgacaagccgatgctctcaacacctgagctcactgcaataa

SEQ ID NO: 80718 - DNA, 88 bp, Homo sapiens
agtgatgaactgttcatccagggctgatcagcatcacatgacaagccgatgctctcaacacctgagctcactgcaataacaactaggg

SEQ ID NO: 80719 - DNA, 89 bp, Homo sapiens
tgttcatccagggctgatcagcatcacatgacaagccgatgctctcaacacctgagctcactgcaataacaactaggggtggccatgaa

SEQ ID NO: 80720 - DNA, 80 bp, Homo sapiens
acaagccgatgctctcaacacctgagctcactgcaataacaactaggggtggccatgaagttactacagtatatactatg

SEQ ID NO: 80721 - DNA, 78 bp, Homo sapiens
tctcaacacctgagctcactgcaataacaactaggggtggccatgaagttactacagtatatactatggctagtttta

SEQ ID NO: 80722 - DNA, 78 bp, Homo sapiens
agctcactgcaataacaactaggggtggccatgaagttactacagtatatactatggctagttttatgcagttatgat

SEQ ID NO: 80723 - DNA, 75 bp, Homo sapiens
caataacaactaggggtggccatgaagttactacagtatatactatggctagttttatgcagttatgattaatac

SEQ ID NO: 80724 - DNA, 75 bp, Homo sapiens
aactaggggtggccatgaagttactacagtatatactatggctagttttatgcagttatgattaatactacatct

SEQ ID NO: 80725 - DNA, 76 bp, Homo sapiens
ggccatgaagttactacagtatatactatggctagttttatgcagttatgattaatactacatctttgcctttgtt

SEQ ID NO: 80726 - DNA, 78 bp, Homo sapiens
cagttatgattaatactacatctttgcctttgtttacattttgcttaaatatgaatggtgccatacacagtctgagtg

SEQ ID NO: 80727 - DNA, 77 bp, Homo sapiens
ttaatactacatctttgcctttgtttacattttgcttaaatatgaatggtgccatacacagtctgagtgtttgtgtg

SEQ ID NO: 80728 - DNA, 73 bp, Homo sapiens
ttgcctttgtttacattttgcttaaatatgaatggtgccatacacagtctgagtgtttgtgtgggtaaaattt

SEQ ID NO: 80729 - DNA, 72 bp, Homo sapiens
tttgtttacattttgcttaaatatgaatggtgccatacacagtctgagtgtttgtgtgggtaaaattttaaa

SEQ ID NO: 80730 - DNA, 68 bp, Homo sapiens
ttttaaaaattttaactttctgtagatttgtatgtattttgtggtagtaaatgataaactagtatcga

SEQ ID NO: 80731 - DNA, 71 bp, Homo sapiens
ttttaactttctgtagatttgtatgtattttgtggtagtaaatgataaactagtatcgaatatattttatg

SEQ ID NO: 80732 - DNA, 76 bp, Homo sapiens
ctgtagatttgtatgtattttgtggtagtaaatgataaactagtatcgaatatattttatgtattcacggcatgtc

SEQ ID NO: 80733 - DNA, 74 bp, Homo sapiens
gtatgtattttgtggtagtaaatgataaactagtatcgaatatattttatgtattcacggcatgtctaacattt

SEQ ID NO: 80734 - DNA, 73 bp, Homo sapiens
attttgtggtagtaaatgataaactagtatcgaatatattttatgtattcacggcatgtctaacattttctaa

SEQ ID NO: 80735 - DNA, 70 bp, Homo sapiens
agtaaatgataaactagtatcgaatatattttatgtattcacggcatgtctaacattttctaaatttttt

SEQ ID NO: 80736 - DNA, 71 bp, Homo sapiens
ctagtatcgaatatattttatgtattcacggcatgtctaacattttctaaatttttttggtatttctagac

SEQ ID NO: 80737 - DNA, 70 bp, Homo sapiens
atattttatgtattcacggcatgtctaacattttctaaatttttttggtatttctagactaggtagtctg

SEQ ID NO: 80738 - DNA, 71 bp, Homo sapiens
atgtattcacggcatgtctaacattttctaaatttttttggtatttctagactaggtagtctgtcttcaat

SEQ ID NO: 80739 - DNA, 67 bp, Homo sapiens
acggcatgtctaacattttctaaatttttttggtatttctagactaggtagtctgtcttcaattttt

SEQ ID NO: 80740 - DNA, 67 bp, Homo sapiens
ttttctaaatttttttggtatttctagactaggtagtctgtcttcaatttttttcaaattatcacaa

SEQ ID NO: 80741 - DNA, 68 bp, Homo sapiens
ttttttggtatttctagactaggtagtctgtcttcaatttttttcaaattatcacaaatctccaaaaa

SEQ ID NO: 80742 - DNA, 70 bp, Homo sapiens
tggtatttctagactaggtagtctgtcttcaatttttttcaaattatcacaaatctccaaaaatattttc

SEQ ID NO: 80743 - DNA, 72 bp, Homo sapiens
ttttcaaattatcacaaatctccaaaaatattttccaatatattaattgaaaagaatccacatataagtaga

SEQ ID NO: 80744 - DNA, 77 bp, Homo sapiens
ttatcacaaatctccaaaaatattttccaatatattaattgaaaagaatccacatataagtagatctgtgcagttca

SEQ ID NO: 80745 - DNA, 75 bp, Homo sapiens
aatctccaaaaatattttccaatatattaattgaaaagaatccacatataagtagatctgtgcagttcaaatcca

SEQ ID NO: 80746 - DNA, 77 bp, Homo sapiens
ttttccaatatattaattgaaaagaatccacatataagtagatctgtgcagttcaaatccattgtctgagggtcaac

SEQ ID NO: 80747 - DNA, 78 bp, Homo sapiens
tattaattgaaaagaatccacatataagtagatctgtgcagttcaaatccattgtctgagggtcaactgtagttaaga

SEQ ID NO: 80748 - DNA, 78 bp, Homo sapiens
attgaaaagaatccacatataagtagatctgtgcagttcaaatccattgtctgagggtcaactgtagttaagagtgtc

SEQ ID NO: 80749 - DNA, 79 bp, Homo sapiens
atccacatataagtagatctgtgcagttcaaatccattgtctgagggtcaactgtagttaagagtgtccggccaggcgc

SEQ ID NO: 80750 - DNA, 75 bp, Homo sapiens
aaaaaaagtgtccaagtgagatgccaaagaaaatgctcgctgaatacagaaagggtgtgtctcatttatcttgga

SEQ ID NO: 80751 - DNA, 77 bp, Homo sapiens
aagtgtccaagtgagatgccaaagaaaatgctcgctgaatacagaaagggtgtgtctcatttatcttggaaagagaa

SEQ ID NO: 80752 - DNA, 78 bp, Homo sapiens
atgccaaagaaaatgctcgctgaatacagaaagggtgtgtctcatttatcttggaaagagaaatatggaagagtgatg

SEQ ID NO: 80753 - DNA, 75 bp, Homo sapiens
aaagaaaatgctcgctgaatacagaaagggtgtgtctcatttatcttggaaagagaaatatggaagagtgatggg

SEQ ID NO: 80754 - DNA, 78 bp, Homo sapiens
tgaatacagaaagggtgtgtctcatttatcttggaaagagaaatatggaagagtgatgggtgtagacttggatcacag

SEQ ID NO: 80755 - DNA, 78 bp, Homo sapiens
acagaaagggtgtgtctcatttatcttggaaagagaaatatggaagagtgatgggtgtagacttggatcacaggcaca

SEQ ID NO: 80756 - DNA, 82 bp, Homo sapiens
tctcatttatcttggaaagagaaatatggaagagtgatgggtgtagacttggatcacaggcacacaaggacctatgagcata

SEQ ID NO: 80757 - DNA, 81 bp, Homo sapiens
ttggaaagagaaatatggaagagtgatgggtgtagacttggatcacaggcacacaaggacctatgagcataggatgcaaag

SEQ ID NO: 80758 - DNA, 80 bp, Homo sapiens
aagagaaatatggaagagtgatgggtgtagacttggatcacaggcacacaaggacctatgagcataggatgcaaagggaa

SEQ ID NO: 80759 - DNA, 82 bp, Homo sapiens
agagtgatgggtgtagacttggatcacaggcacacaaggacctatgagcataggatgcaaagggaagcaagatctttagata

SEQ ID NO: 80760 - DNA, 83 bp, Homo sapiens
tgtagacttggatcacaggcacacaaggacctatgagcataggatgcaaagggaagcaagatctttagataagatgccattaa

SEQ ID NO: 80761 - DNA, 82 bp, Homo sapiens
tagacttggatcacaggcacacaaggacctatgagcataggatgcaaagggaagcaagatctttagataagatgccattaaa

SEQ ID NO: 80762 - DNA, 82 bp, Homo sapiens
gatcacaggcacacaaggacctatgagcataggatgcaaagggaagcaagatctttagataagatgccattaaagaagagaa

SEQ ID NO: 80763 - DNA, 77 bp, Homo sapiens
acaaggacctatgagcataggatgcaaagggaagcaagatctttagataagatgccattaaagaagagaacaagaaa

SEQ ID NO: 80764 - DNA, 77 bp, Homo sapiens
aggacctatgagcataggatgcaaagggaagcaagatctttagataagatgccattaaagaagagaacaagaaagag

SEQ ID NO: 80765 - DNA, 78 bp, Homo sapiens
agcataggatgcaaagggaagcaagatctttagataagatgccattaaagaagagaacaagaaagaggacaggccata

SEQ ID NO: 80766 - DNA, 77 bp, Homo sapiens
ataggatgcaaagggaagcaagatctttagataagatgccattaaagaagagaacaagaaagaggacaggccataga

SEQ ID NO: 80767 - DNA, 77 bp, Homo sapiens
atgcaaagggaagcaagatctttagataagatgccattaaagaagagaacaagaaagaggacaggccatagactgtg

SEQ ID NO: 80768 - DNA, 75 bp, Homo sapiens
aaagggaagcaagatctttagataagatgccattaaagaagagaacaagaaagaggacaggccatagactgtggc

SEQ ID NO: 80769 - DNA, 79 bp, Homo sapiens
aagcaagatctttagataagatgccattaaagaagagaacaagaaagaggacaggccatagactgtggctggctccaga

SEQ ID NO: 80770 - DNA, 77 bp, Homo sapiens
atctttagataagatgccattaaagaagagaacaagaaagaggacaggccatagactgtggctggctccagaccaag

SEQ ID NO: 80771 - DNA, 79 bp, Homo sapiens
taaagaagagaacaagaaagaggacaggccatagactgtggctggctccagaccaagggctgtgctgggcagagggctc

SEQ ID NO: 80772 - DNA, 79 bp, Homo sapiens
acaagaaagaggacaggccatagactgtggctggctccagaccaagggctgtgctgggcagagggctcccgtgaggtga

SEQ ID NO: 80773 - DNA, 80 bp, Homo sapiens
aggccatagactgtggctggctccagaccaagggctgtgctgggcagagggctcccgtgaggtgactgcagccagtttct

SEQ ID NO: 80774 - DNA, 82 bp, Homo sapiens
tagactgtggctggctccagaccaagggctgtgctgggcagagggctcccgtgaggtgactgcagccagtttcttgtacata

SEQ ID NO: 80775 - DNA, 77 bp, Homo sapiens
tgggcagagggctcccgtgaggtgactgcagccagtttcttgtacatatcatggtagagtcctaggacccttataaa

SEQ ID NO: 80776 - DNA, 75 bp, Homo sapiens
aggtgactgcagccagtttcttgtacatatcatggtagagtcctaggacccttataaaatttctatgtgtcccac

SEQ ID NO: 80777 - DNA, 72 bp, Homo sapiens
gccagtttcttgtacatatcatggtagagtcctaggacccttataaaatttctatgtgtcccaccccataaa

SEQ ID NO: 80778 - DNA, 71 bp, Homo sapiens
tttcttgtacatatcatggtagagtcctaggacccttataaaatttctatgtgtcccaccccataaaagat

SEQ ID NO: 80779 - DNA, 70 bp, Homo sapiens
atatcatggtagagtcctaggacccttataaaatttctatgtgtcccaccccataaaagattcctagtat

SEQ ID NO: 80780 - DNA, 67 bp, Homo sapiens
agagtcctaggacccttataaaatttctatgtgtcccaccccataaaagattcctagtattggccgg

SEQ ID NO: 80781 - DNA, 70 bp, Homo sapiens
ctcaaaaaaaattcccaagtatcaagtggacatatcagaaacggcacccagttgaaaaggcctccaaaca

SEQ ID NO: 80782 - DNA, 71 bp, Homo sapiens
aaaattcccaagtatcaagtggacatatcagaaacggcacccagttgaaaaggcctccaaacagccctgat

SEQ ID NO: 80783 - DNA, 74 bp, Homo sapiens
aagtatcaagtggacatatcagaaacggcacccagttgaaaaggcctccaaacagccctgattctaagagatcc

SEQ ID NO: 80784 - DNA, 73 bp, Homo sapiens
acatatcagaaacggcacccagttgaaaaggcctccaaacagccctgattctaagagatcccacagcttggtt

SEQ ID NO: 80785 - DNA, 70 bp, Homo sapiens
agaaacggcacccagttgaaaaggcctccaaacagccctgattctaagagatcccacagcttggtttccc

SEQ ID NO: 80786 - DNA, 75 bp, Homo sapiens
gttgaaaaggcctccaaacagccctgattctaagagatcccacagcttggtttccccttcctgcagtcattcata

SEQ ID NO: 80787 - DNA, 75 bp, Homo sapiens
aaaggcctccaaacagccctgattctaagagatcccacagcttggtttccccttcctgcagtcattcatatccca

SEQ ID NO: 80788 - DNA, 76 bp, Homo sapiens
aaacagccctgattctaagagatcccacagcttggtttccccttcctgcagtcattcatatcccactgtgacacct

SEQ ID NO: 80789 - DNA, 81 bp, Homo sapiens
tgattctaagagatcccacagcttggtttccccttcctgcagtcattcatatcccactgtgacaccttgttccatccatca

SEQ ID NO: 80790 - DNA, 79 bp, Homo sapiens
attctaagagatcccacagcttggtttccccttcctgcagtcattcatatcccactgtgacaccttgttccatccatca

SEQ ID NO: 80791 - DNA, 79 bp, Homo sapiens
atcccacagcttggtttccccttcctgcagtcattcatatcccactgtgacaccttgttccatccatcactgtgtacca

SEQ ID NO: 80792 - DNA, 79 bp, Homo sapiens
cttggtttccccttcctgcagtcattcatatcccactgtgacaccttgttccatccatcactgtgtaccagccgcacta

SEQ ID NO: 80793 - DNA, 79 bp, Homo sapiens
tttccccttcctgcagtcattcatatcccactgtgacaccttgttccatccatcactgtgtaccagccgcactattatt

SEQ ID NO: 80794 - DNA, 81 bp, Homo sapiens
ccttcctgcagtcattcatatcccactgtgacaccttgttccatccatcactgtgtaccagccgcactattatttactcaa

SEQ ID NO: 80795 - DNA, 82 bp, Homo sapiens
ttcctgcagtcattcatatcccactgtgacaccttgttccatccatcactgtgtaccagccgcactattatttactcaatat

SEQ ID NO: 80796 - DNA, 78 bp, Homo sapiens
agtcattcatatcccactgtgacaccttgttccatccatcactgtgtaccagccgcactattatttactcaatatttt

SEQ ID NO: 80797 - DNA, 76 bp, Homo sapiens
atatcccactgtgacaccttgttccatccatcactgtgtaccagccgcactattatttactcaatatttttttcga

SEQ ID NO: 80798 - DNA, 74 bp, Homo sapiens
acaccttgttccatccatcactgtgtaccagccgcactattatttactcaatatttttttcgaactgacttata

SEQ ID NO: 80799 - DNA, 74 bp, Homo sapiens
atcactgtgtaccagccgcactattatttactcaatatttttttcgaactgacttatatcccactgaaatgtag

SEQ ID NO: 80800 - DNA, 72 bp, Homo sapiens
agccgcactattatttactcaatatttttttcgaactgacttatatcccactgaaatgtagtctggccctaa

SEQ ID NO: 80801 - DNA, 72 bp, Homo sapiens
ctattatttactcaatatttttttcgaactgacttatatcccactgaaatgtagtctggccctaagcaataa

SEQ ID NO: 80802 - DNA, 77 bp, Homo sapiens
tttttcgaactgacttatatcccactgaaatgtagtctggccctaagcaataatatctatgaaatcacagatttgat

SEQ ID NO: 80803 - DNA, 76 bp, Homo sapiens
actgaaatgtagtctggccctaagcaataatatctatgaaatcacagatttgatttggtttctttctactacacac

SEQ ID NO: 80804 - DNA, 75 bp, Homo sapiens
gtagtctggccctaagcaataatatctatgaaatcacagatttgatttggtttctttctactacacactaaaata

SEQ ID NO: 80805 - DNA, 73 bp, Homo sapiens
ccctaagcaataatatctatgaaatcacagatttgatttggtttctttctactacacactaaaataaatataa

SEQ ID NO: 80806 - DNA, 72 bp, Homo sapiens
tctatgaaatcacagatttgatttggtttctttctactacacactaaaataaatataactttaaaactgtca

SEQ ID NO: 80807 - DNA, 73 bp, Homo sapiens
cacagatttgatttggtttctttctactacacactaaaataaatataactttaaaactgtcatctccacatga

SEQ ID NO: 80808 - DNA, 72 bp, Homo sapiens
tgatttggtttctttctactacacactaaaataaatataactttaaaactgtcatctccacatgatctaaaa

SEQ ID NO: 80809 - DNA, 73 bp, Homo sapiens
ctttctactacacactaaaataaatataactttaaaactgtcatctccacatgatctaaaattatctcacgga

SEQ ID NO: 80810 - DNA, 73 bp, Homo sapiens
cacactaaaataaatataactttaaaactgtcatctccacatgatctaaaattatctcacggatccttagttg

SEQ ID NO: 80811 - DNA, 75 bp, Homo sapiens
aaatataactttaaaactgtcatctccacatgatctaaaattatctcacggatccttagttggaaactcagcaca

SEQ ID NO: 80812 - DNA, 76 bp, Homo sapiens
tttaaaactgtcatctccacatgatctaaaattatctcacggatccttagttggaaactcagcacactttgagaaa

SEQ ID NO: 80813 - DNA, 79 bp, Homo sapiens
actgtcatctccacatgatctaaaattatctcacggatccttagttggaaactcagcacactttgagaaacactgtctc

SEQ ID NO: 80814 - DNA, 79 bp, Homo sapiens
atgatctaaaattatctcacggatccttagttggaaactcagcacactttgagaaacactgtctctggctacacatcaa

SEQ ID NO: 80815 - DNA, 78 bp, Homo sapiens
taaaattatctcacggatccttagttggaaactcagcacactttgagaaacactgtctctggctacacatcaagtcac

SEQ ID NO: 80816 - DNA, 82 bp, Homo sapiens
ttagttggaaactcagcacactttgagaaacactgtctctggctacacatcaagtcaccatgcagcatccacaaagtggttc

SEQ ID NO: 80817 - DNA, 81 bp, Homo sapiens
gcacactttgagaaacactgtctctggctacacatcaagtcaccatgcagcatccacaaagtggttctggagattcttttt

SEQ ID NO: 80818 - DNA, 78 bp, Homo sapiens
ctttgagaaacactgtctctggctacacatcaagtcaccatgcagcatccacaaagtggttctggagattcttttttt

SEQ ID NO: 80819 - DNA, 78 bp, Homo sapiens
actgtctctggctacacatcaagtcaccatgcagcatccacaaagtggttctggagattcttttttttaatccagaaa

SEQ ID NO: 80820 - DNA, 77 bp, Homo sapiens
tacacatcaagtcaccatgcagcatccacaaagtggttctggagattcttttttttaatccagaaaactgaacttga

SEQ ID NO: 80821 - DNA, 73 bp, Homo sapiens
aagtcaccatgcagcatccacaaagtggttctggagattcttttttttaatccagaaaactgaacttgaattc

SEQ ID NO: 80822 - DNA, 71 bp, Homo sapiens
catccacaaagtggttctggagattcttttttttaatccagaaaactgaacttgaattctctactgactac

SEQ ID NO: 80823 - DNA, 69 bp, Homo sapiens
caaagtggttctggagattcttttttttaatccagaaaactgaacttgaattctctactgactacgtcc

SEQ ID NO: 80824 - DNA, 69 bp, Homo sapiens
agattcttttttttaatccagaaaactgaacttgaattctctactgactacgtccccacaacgacagga

SEQ ID NO: 80825 - DNA, 69 bp, Homo sapiens
tttttaatccagaaaactgaacttgaattctctactgactacgtccccacaacgacaggaacacggtac

SEQ ID NO: 80826 - DNA, 70 bp, Homo sapiens
agaaaactgaacttgaattctctactgactacgtccccacaacgacaggaacacggtacccggcgtgtga

SEQ ID NO: 80827 - DNA, 72 bp, Homo sapiens
aacttgaattctctactgactacgtccccacaacgacaggaacacggtacccggcgtgtgactgaatctctg

SEQ ID NO: 80828 - DNA, 73 bp, Homo sapiens
attctctactgactacgtccccacaacgacaggaacacggtacccggcgtgtgactgaatctctgggagatta

SEQ ID NO: 80829 - DNA, 73 bp, Homo sapiens
tacgtccccacaacgacaggaacacggtacccggcgtgtgactgaatctctgggagattaagggcatggcaaa

SEQ ID NO: 80830 - DNA, 75 bp, Homo sapiens
acaacgacaggaacacggtacccggcgtgtgactgaatctctgggagattaagggcatggcaaaaggagatgcag

SEQ ID NO: 80831 - DNA, 73 bp, Homo sapiens
aggaacacggtacccggcgtgtgactgaatctctgggagattaagggcatggcaaaaggagatgcaggggact

SEQ ID NO: 80832 - DNA, 75 bp, Homo sapiens
tacccggcgtgtgactgaatctctgggagattaagggcatggcaaaaggagatgcaggggacttccctgtaagaa

SEQ ID NO: 80833 - DNA, 79 bp, Homo sapiens
actgaatctctgggagattaagggcatggcaaaaggagatgcaggggacttccctgtaagaagcatctgacagctgccc

SEQ ID NO: 80834 - DNA, 79 bp, Homo sapiens
ctctgggagattaagggcatggcaaaaggagatgcaggggacttccctgtaagaagcatctgacagctgccccaggaca

SEQ ID NO: 80835 - DNA, 80 bp, Homo sapiens
ttaagggcatggcaaaaggagatgcaggggacttccctgtaagaagcatctgacagctgccccaggacactgcctatcaa

SEQ ID NO: 80836 - DNA, 78 bp, Homo sapiens
aaaaggagatgcaggggacttccctgtaagaagcatctgacagctgccccaggacactgcctatcaaaccagcaataa

SEQ ID NO: 80837 - DNA, 78 bp, Homo sapiens
atgcaggggacttccctgtaagaagcatctgacagctgccccaggacactgcctatcaaaccagcaataagaggaaaa

SEQ ID NO: 80838 - DNA, 77 bp, Homo sapiens
cctgtaagaagcatctgacagctgccccaggacactgcctatcaaaccagcaataagaggaaaagaacaggaaataa

SEQ ID NO: 80839 - DNA, 78 bp, Homo sapiens
aagaagcatctgacagctgccccaggacactgcctatcaaaccagcaataagaggaaaagaacaggaaataactcatc

SEQ ID NO: 80840 - DNA, 74 bp, Homo sapiens
gctgccccaggacactgcctatcaaaccagcaataagaggaaaagaacaggaaataactcatccaatcttaaaa

SEQ ID NO: 80841 - DNA, 71 bp, Homo sapiens
aggacactgcctatcaaaccagcaataagaggaaaagaacaggaaataactcatccaatcttaaaaacaaa

SEQ ID NO: 80842 - DNA, 70 bp, Homo sapiens
gcctatcaaaccagcaataagaggaaaagaacaggaaataactcatccaatcttaaaaacaaaatccaaa

SEQ ID NO: 80843 - DNA, 69 bp, Homo sapiens
accagcaataagaggaaaagaacaggaaataactcatccaatcttaaaaacaaaatccaaaaatgacaa

SEQ ID NO: 80844 - DNA, 69 bp, Homo sapiens
gaaaagaacaggaaataactcatccaatcttaaaaacaaaatccaaaaatgacaaacagaatcggagga

SEQ ID NO: 80845 - DNA, 67 bp, Homo sapiens
aacaggaaataactcatccaatcttaaaaacaaaatccaaaaatgacaaacagaatcggaggaaaaa

SEQ ID NO: 80846 - DNA, 70 bp, Homo sapiens
aaaaaaaaaactcgagaaccatgaggccaatgaaggaaatgcagaaaatcttgcaaaccgctgggcgcgg

SEQ ID NO: 80847 - DNA, 68 bp, Homo sapiens
aaagaaaagaaaatcttgcaaaccaagatgagttgtaaaaggggaaataagacttcacaccttcacca

SEQ ID NO: 80848 - DNA, 71 bp, Homo sapiens
aaagaaaatcttgcaaaccaagatgagttgtaaaaggggaaataagacttcacaccttcaccactctctgc

SEQ ID NO: 80849 - DNA, 75 bp, Homo sapiens
aaccaagatgagttgtaaaaggggaaataagacttcacaccttcaccactctctgcccataatctgagctgcact

SEQ ID NO: 80850 - DNA, 79 bp, Homo sapiens
agatgagttgtaaaaggggaaataagacttcacaccttcaccactctctgcccataatctgagctgcacttcatgcctc

SEQ ID NO: 80851 - DNA, 81 bp, Homo sapiens
taaaaggggaaataagacttcacaccttcaccactctctgcccataatctgagctgcacttcatgcctctgccactccatg

SEQ ID NO: 80852 - DNA, 85 bp, Homo sapiens
aataagacttcacaccttcaccactctctgcccataatctgagctgcacttcatgcctctgccactccatgtctctaatttgaga

SEQ ID NO: 80853 - DNA, 89 bp, Homo sapiens
accttcaccactctctgcccataatctgagctgcacttcatgcctctgccactccatgtctctaatttgagatgcaggatttgcactga

SEQ ID NO: 80854 - DNA, 89 bp, Homo sapiens
actctctgcccataatctgagctgcacttcatgcctctgccactccatgtctctaatttgagatgcaggatttgcactgacctgaacac

SEQ ID NO: 80855 - DNA, 91 bp, Homo sapiens
cccataatctgagctgcacttcatgcctctgccactccatgtctctaatttgagatgcaggatttgcactgacctgaacactgagcagcca

SEQ ID NO: 80856 - DNA, 89 bp, Homo sapiens
agctgcacttcatgcctctgccactccatgtctctaatttgagatgcaggatttgcactgacctgaacactgagcagccagccctctcc

SEQ ID NO: 80857 - DNA, 90 bp, Homo sapiens
atgcctctgccactccatgtctctaatttgagatgcaggatttgcactgacctgaacactgagcagccagccctctcctctcagcacaga

SEQ ID NO: 80858 - DNA, 91 bp, Homo sapiens
actccatgtctctaatttgagatgcaggatttgcactgacctgaacactgagcagccagccctctcctctcagcacagatgctgtctgaga

SEQ ID NO: 80859 - DNA, 92 bp, Homo sapiens
taatttgagatgcaggatttgcactgacctgaacactgagcagccagccctctcctctcagcacagatgctgtctgagaggactgcccatca

SEQ ID NO: 80860 - DNA, 87 bp, Homo sapiens
acctgaacactgagcagccagccctctcctctcagcacagatgctgtctgagaggactgcccatcatccatttaggtacagcaagtc

SEQ ID NO: 80861 - DNA, 84 bp, Homo sapiens
cagccagccctctcctctcagcacagatgctgtctgagaggactgcccatcatccatttaggtacagcaagtcccagaaaacaa

SEQ ID NO: 80862 - DNA, 85 bp, Homo sapiens
tctcctctcagcacagatgctgtctgagaggactgcccatcatccatttaggtacagcaagtcccagaaaacaagagagcaggaa

SEQ ID NO: 80863 - DNA, 86 bp, Homo sapiens
tctcagcacagatgctgtctgagaggactgcccatcatccatttaggtacagcaagtcccagaaaacaagagagcaggaagtgcag

SEQ ID NO: 80864 - DNA, 80 bp, Homo sapiens
tgtctgagaggactgcccatcatccatttaggtacagcaagtcccagaaaacaagagagcaggaagtgcagggtagaaca

SEQ ID NO: 80865 - DNA, 76 bp, Homo sapiens
agaggactgcccatcatccatttaggtacagcaagtcccagaaaacaagagagcaggaagtgcagggtagaacaag

SEQ ID NO: 80866 - DNA, 74 bp, Homo sapiens
atcatccatttaggtacagcaagtcccagaaaacaagagagcaggaagtgcagggtagaacaaggggcgtggga

SEQ ID NO: 80867 - DNA, 70 bp, Homo sapiens
atttaggtacagcaagtcccagaaaacaagagagcaggaagtgcagggtagaacaaggggcgtgggaggg

SEQ ID NO: 80868 - DNA, 70 bp, Homo sapiens
aaaacaagagagcaggaagtgcagggtagaacaaggggcgtgggaggggtgctcactgttcggaaaggta

SEQ ID NO: 80869 - DNA, 73 bp, Homo sapiens
aggaagtgcagggtagaacaaggggcgtgggaggggtgctcactgttcggaaaggtacagatgctacaggcca

SEQ ID NO: 80870 - DNA, 74 bp, Homo sapiens
gtgcagggtagaacaaggggcgtgggaggggtgctcactgttcggaaaggtacagatgctacaggccaagccca

SEQ ID NO: 80871 - DNA, 73 bp, Homo sapiens
aacaaggggcgtgggaggggtgctcactgttcggaaaggtacagatgctacaggccaagcccagccaatgccc

SEQ ID NO: 80872 - DNA, 81 bp, Homo sapiens
gaggggtgctcactgttcggaaaggtacagatgctacaggccaagcccagccaatgccctggctgcagggcattgagaaga

SEQ ID NO: 80873 - DNA, 81 bp, Homo sapiens
gtgctcactgttcggaaaggtacagatgctacaggccaagcccagccaatgccctggctgcagggcattgagaagagaccc

SEQ ID NO: 80874 - DNA, 78 bp, Homo sapiens
ttcggaaaggtacagatgctacaggccaagcccagccaatgccctggctgcagggcattgagaagagaccccaggaac

SEQ ID NO: 80875 - DNA, 80 bp, Homo sapiens
agatgctacaggccaagcccagccaatgccctggctgcagggcattgagaagagaccccaggaactgtgagttttcatgt

SEQ ID NO: 80876 - DNA, 79 bp, Homo sapiens
ccaagcccagccaatgccctggctgcagggcattgagaagagaccccaggaactgtgagttttcatgttctccatcaat

SEQ ID NO: 80877 - DNA, 80 bp, Homo sapiens
ccaatgccctggctgcagggcattgagaagagaccccaggaactgtgagttttcatgttctccatcaattcggagtatca

SEQ ID NO: 80878 - DNA, 72 bp, Homo sapiens
aattcggagtatcagaggaccagatagtaacgtgacagttcaccaggcaaaggccaattcgaaaacagaaac

SEQ ID NO: 80879 - DNA, 77 bp, Homo sapiens
tatcagaggaccagatagtaacgtgacagttcaccaggcaaaggccaattcgaaaacagaaactggactgagagatg

SEQ ID NO: 80880 - DNA, 76 bp, Homo sapiens
tagtaacgtgacagttcaccaggcaaaggccaattcgaaaacagaaactggactgagagatgggtgcaccatcgaa

SEQ ID NO: 80881 - DNA, 74 bp, Homo sapiens
acagttcaccaggcaaaggccaattcgaaaacagaaactggactgagagatgggtgcaccatcgaaccctacag

SEQ ID NO: 80882 - DNA, 74 bp, Homo sapiens
accaggcaaaggccaattcgaaaacagaaactggactgagagatgggtgcaccatcgaaccctacaggcaggta

SEQ ID NO: 80883 - DNA, 75 bp, Homo sapiens
aaggccaattcgaaaacagaaactggactgagagatgggtgcaccatcgaaccctacaggcaggtagctgtgagg

SEQ ID NO: 80884 - DNA, 75 bp, Homo sapiens
aacagaaactggactgagagatgggtgcaccatcgaaccctacaggcaggtagctgtgaggggaagtcaaccttc

SEQ ID NO: 80885 - DNA, 74 bp, Homo sapiens
aactggactgagagatgggtgcaccatcgaaccctacaggcaggtagctgtgaggggaagtcaaccttccccca

SEQ ID NO: 80886 - DNA, 73 bp, Homo sapiens
agatgggtgcaccatcgaaccctacaggcaggtagctgtgaggggaagtcaaccttcccccaagccgacagtg

SEQ ID NO: 80887 - DNA, 72 bp, Homo sapiens
atcgaaccctacaggcaggtagctgtgaggggaagtcaaccttcccccaagccgacagtgtgccaaggctag

SEQ ID NO: 80888 - DNA, 76 bp, Homo sapiens
tacaggcaggtagctgtgaggggaagtcaaccttcccccaagccgacagtgtgccaaggctagtgacagtcgatac

SEQ ID NO: 80889 - DNA, 75 bp, Homo sapiens
tagctgtgaggggaagtcaaccttcccccaagccgacagtgtgccaaggctagtgacagtcgatactttctgttg

SEQ ID NO: 80890 - DNA, 76 bp, Homo sapiens
cttcccccaagccgacagtgtgccaaggctagtgacagtcgatactttctgttggtacatgccacgtttacataga

SEQ ID NO: 80891 - DNA, 81 bp, Homo sapiens
tgccaaggctagtgacagtcgatactttctgttggtacatgccacgtttacatagatcctgccgtgtcaagaatgcataaa

SEQ ID NO: 80892 - DNA, 79 bp, Homo sapiens
aggctagtgacagtcgatactttctgttggtacatgccacgtttacatagatcctgccgtgtcaagaatgcataaagag

SEQ ID NO: 80893 - DNA, 76 bp, Homo sapiens
agtcgatactttctgttggtacatgccacgtttacatagatcctgccgtgtcaagaatgcataaagaggggaaata

SEQ ID NO: 80894 - DNA, 78 bp, Homo sapiens
tttctgttggtacatgccacgtttacatagatcctgccgtgtcaagaatgcataaagaggggaaatatgcaaaagcag

SEQ ID NO: 80895 - DNA, 78 bp, Homo sapiens
tttacatagatcctgccgtgtcaagaatgcataaagaggggaaatatgcaaaagcagggtgaggaaacaccatcctga

SEQ ID NO: 80896 - DNA, 75 bp, Homo sapiens
aagaatgcataaagaggggaaatatgcaaaagcagggtgaggaaacaccatcctgaaagcacaaaggaagagcac

SEQ ID NO: 80897 - DNA, 77 bp, Homo sapiens
aaatatgcaaaagcagggtgaggaaacaccatcctgaaagcacaaaggaagagcacgtctcagaaaatcattcagaa

SEQ ID NO: 80898 - DNA, 74 bp, Homo sapiens
aaaagcagggtgaggaaacaccatcctgaaagcacaaaggaagagcacgtctcagaaaatcattcagaagaaaa

SEQ ID NO: 80899 - DNA, 74 bp, Homo sapiens
aaacaccatcctgaaagcacaaaggaagagcacgtctcagaaaatcattcagaagaaaaactgtcaggaaactg

SEQ ID NO: 80900 - DNA, 77 bp, Homo sapiens
ctgaaagcacaaaggaagagcacgtctcagaaaatcattcagaagaaaaactgtcaggaaactgtcagaatgtaaga

SEQ ID NO: 80901 - DNA, 76 bp, Homo sapiens
aaaggaagagcacgtctcagaaaatcattcagaagaaaaactgtcaggaaactgtcagaatgtaagaagctgtgat

SEQ ID NO: 80902 - DNA, 76 bp, Homo sapiens
cacgtctcagaaaatcattcagaagaaaaactgtcaggaaactgtcagaatgtaagaagctgtgatttctttgaaa

SEQ ID NO: 80903 - DNA, 76 bp, Homo sapiens
tcagaaaatcattcagaagaaaaactgtcaggaaactgtcagaatgtaagaagctgtgatttctttgaaagaggaa

SEQ ID NO: 80904 - DNA, 75 bp, Homo sapiens
agaagaaaaactgtcaggaaactgtcagaatgtaagaagctgtgatttctttgaaagaggaacagcaaatcataa

SEQ ID NO: 80905 - DNA, 72 bp, Homo sapiens
aggaaactgtcagaatgtaagaagctgtgatttctttgaaagaggaacagcaaatcataacaggaaaaaaaa

SEQ ID NO: 80906 - DNA, 73 bp, Homo sapiens
cagaatgtaagaagctgtgatttctttgaaagaggaacagcaaatcataacaggaaaaaaaaagcagttcgaa

SEQ ID NO: 80907 - DNA, 72 bp, Homo sapiens
gctgtgatttctttgaaagaggaacagcaaatcataacaggaaaaaaaaagcagttcgaataaaaaggatga

SEQ ID NO: 80908 - DNA, 69 bp, Homo sapiens
ctttgaaagaggaacagcaaatcataacaggaaaaaaaaagcagttcgaataaaaaggatgacaaagaa

SEQ ID NO: 80909 - DNA, 71 bp, Homo sapiens
gaacagcaaatcataacaggaaaaaaaaagcagttcgaataaaaaggatgacaaagaagatagtggacgag

SEQ ID NO: 80910 - DNA, 70 bp, Homo sapiens
cataacaggaaaaaaaaagcagttcgaataaaaaggatgacaaagaagatagtggacgaggtgaggatta

SEQ ID NO: 80911 - DNA, 68 bp, Homo sapiens
aaaaaaaagcagttcgaataaaaaggatgacaaagaagatagtggacgaggtgaggattatataaaaa

SEQ ID NO: 80912 - DNA, 72 bp, Homo sapiens
aaagcagttcgaataaaaaggatgacaaagaagatagtggacgaggtgaggattatataaaaattgctcatt

SEQ ID NO: 80913 - DNA, 73 bp, Homo sapiens
gacaaagaagatagtggacgaggtgaggattatataaaaattgctcatttaaatccatatttagttgtagttg

SEQ ID NO: 80914 - DNA, 73 bp, Homo sapiens
agtggacgaggtgaggattatataaaaattgctcatttaaatccatatttagttgtagttgtgggtaactgca

SEQ ID NO: 80915 - DNA, 72 bp, Homo sapiens
acgaggtgaggattatataaaaattgctcatttaaatccatatttagttgtagttgtgggtaactgcaaata

SEQ ID NO: 80916 - DNA, 72 bp, Homo sapiens
gattatataaaaattgctcatttaaatccatatttagttgtagttgtgggtaactgcaaatataaacattta

SEQ ID NO: 80917 - DNA, 73 bp, Homo sapiens
gctcatttaaatccatatttagttgtagttgtgggtaactgcaaatataaacatttaaatcagtgacttgcgg

SEQ ID NO: 80918 - DNA, 72 bp, Homo sapiens
aatccatatttagttgtagttgtgggtaactgcaaatataaacatttaaatcagtgacttgcggggctaaca

SEQ ID NO: 80919 - DNA, 70 bp, Homo sapiens
atttagttgtagttgtgggtaactgcaaatataaacatttaaatcagtgacttgcggggctaacaggaaa

SEQ ID NO: 80920 - DNA, 70 bp, Homo sapiens
ttgtgggtaactgcaaatataaacatttaaatcagtgacttgcggggctaacaggaaaagtgtccccaaa

SEQ ID NO: 80921 - DNA, 68 bp, Homo sapiens
ataaacatttaaatcagtgacttgcggggctaacaggaaaagtgtccccaaattgcaaaggacaaaaa

SEQ ID NO: 80922 - DNA, 71 bp, Homo sapiens
taaatcagtgacttgcggggctaacaggaaaagtgtccccaaattgcaaaggacaaaaagcaaggaaatca

SEQ ID NO: 80923 - DNA, 69 bp, Homo sapiens
cggggctaacaggaaaagtgtccccaaattgcaaaggacaaaaagcaaggaaatcaagagtctatgtaa

SEQ ID NO: 80924 - DNA, 70 bp, Homo sapiens
aagtgtccccaaattgcaaaggacaaaaagcaaggaaatcaagagtctatgtaacatatatgtttaaaaa

SEQ ID NO: 80925 - DNA, 72 bp, Homo sapiens
gcaaaggacaaaaagcaaggaaatcaagagtctatgtaacatatatgtttaaaaatattccattattaaaga

SEQ ID NO: 80926 - DNA, 72 bp, Homo sapiens
ggacaaaaagcaaggaaatcaagagtctatgtaacatatatgtttaaaaatattccattattaaagaccaga

SEQ ID NO: 80927 - DNA, 70 bp, Homo sapiens
ggaaatcaagagtctatgtaacatatatgtttaaaaatattccattattaaagaccagaataggttaaac

SEQ ID NO: 80928 - DNA, 69 bp, Homo sapiens
gtaacatatatgtttaaaaatattccattattaaagaccagaataggttaaacttaataaccaattgca

SEQ ID NO: 80929 - DNA, 67 bp, Homo sapiens
aaaaatattccattattaaagaccagaataggttaaacttaataaccaattgcaattaaaattatca

SEQ ID NO: 80930 - DNA, 68 bp, Homo sapiens
attccattattaaagaccagaataggttaaacttaataaccaattgcaattaaaattatcaagtatta

SEQ ID NO: 80931 - DNA, 69 bp, Homo sapiens
ataggttaaacttaataaccaattgcaattaaaattatcaagtattaataaaattaataatgaattgca

SEQ ID NO: 80932 - DNA, 70 bp, Homo sapiens
cttaataaccaattgcaattaaaattatcaagtattaataaaattaataatgaattgcaaaaataatcta

SEQ ID NO: 80933 - DNA, 72 bp, Homo sapiens
tgcaattaaaattatcaagtattaataaaattaataatgaattgcaaaaataatctaaaattacgcatatag

SEQ ID NO: 80934 - DNA, 72 bp, Homo sapiens
attatcaagtattaataaaattaataatgaattgcaaaaataatctaaaattacgcatataggccaggcgcg

SEQ ID NO: 80935 - DNA, 68 bp, Homo sapiens
acaacaacaaaaaatcattcatataaacaggcaaaaagagaaagggttacccaggaaatcagattttc

SEQ ID NO: 80936 - DNA, 70 bp, Homo sapiens
aaaatcattcatataaacaggcaaaaagagaaagggttacccaggaaatcagattttcctcagacttctc

SEQ ID NO: 80937 - DNA, 70 bp, Homo sapiens
attcatataaacaggcaaaaagagaaagggttacccaggaaatcagattttcctcagacttctcctctac

SEQ ID NO: 80938 - DNA, 68 bp, Homo sapiens
gcaaaaagagaaagggttacccaggaaatcagattttcctcagacttctcctctaccctccctaccaa

SEQ ID NO: 80939 - DNA, 66 bp, Homo sapiens
aaaaagagaaagggttacccaggaaatcagattttcctcagacttctcctctaccctccctaccaa

SEQ ID NO: 80940 - DNA, 69 bp, Homo sapiens
aagagaaagggttacccaggaaatcagattttcctcagacttctcctctaccctccctaccaatggcta

SEQ ID NO: 80941 - DNA, 74 bp, Homo sapiens
ccaggaaatcagattttcctcagacttctcctctaccctccctaccaatggctagagagctctttctactagaa

SEQ ID NO: 80942 - DNA, 73 bp, Homo sapiens
aaatcagattttcctcagacttctcctctaccctccctaccaatggctagagagctctttctactagaataaa

SEQ ID NO: 80943 - DNA, 77 bp, Homo sapiens
ttcctcagacttctcctctaccctccctaccaatggctagagagctctttctactagaataaaagctccatacagca

SEQ ID NO: 80944 - DNA, 74 bp, Homo sapiens
tcctctaccctccctaccaatggctagagagctctttctactagaataaaagctccatacagcagggattttgt

SEQ ID NO: 80945 - DNA, 73 bp, Homo sapiens
tctaccctccctaccaatggctagagagctctttctactagaataaaagctccatacagcagggattttgttt

SEQ ID NO: 80946 - DNA, 80 bp, Homo sapiens
ctaccaatggctagagagctctttctactagaataaaagctccatacagcagggattttgttttgctcactgctctatca

SEQ ID NO: 80947 - DNA, 81 bp, Homo sapiens
tagagagctctttctactagaataaaagctccatacagcagggattttgttttgctcactgctctatcacggtgcatacag

SEQ ID NO: 80948 - DNA, 79 bp, Homo sapiens
tctttctactagaataaaagctccatacagcagggattttgttttgctcactgctctatcacggtgcatacagggcctg

SEQ ID NO: 80949 - DNA, 78 bp, Homo sapiens
aataaaagctccatacagcagggattttgttttgctcactgctctatcacggtgcatacagggcctggcatcacccct

SEQ ID NO: 80950 - DNA, 77 bp, Homo sapiens
attttgttttgctcactgctctatcacggtgcatacagggcctggcatcaccccttggaaagtgctagaagacaaac

SEQ ID NO: 80951 - DNA, 79 bp, Homo sapiens
ttttgctcactgctctatcacggtgcatacagggcctggcatcaccccttggaaagtgctagaagacaaaccccactga

SEQ ID NO: 80952 - DNA, 74 bp, Homo sapiens
ctctatcacggtgcatacagggcctggcatcaccccttggaaagtgctagaagacaaaccccactgagtttaaa

SEQ ID NO: 80953 - DNA, 73 bp, Homo sapiens
acggtgcatacagggcctggcatcaccccttggaaagtgctagaagacaaaccccactgagtttaaagcttca

SEQ ID NO: 80954 - DNA, 71 bp, Homo sapiens
cctggcatcaccccttggaaagtgctagaagacaaaccccactgagtttaaagcttcacggggtacagtca

SEQ ID NO: 80955 - DNA, 68 bp, Homo sapiens
accccttggaaagtgctagaagacaaaccccactgagtttaaagcttcacggggtacagtcattgtta

SEQ ID NO: 80956 - DNA, 73 bp, Homo sapiens
aaagtgctagaagacaaaccccactgagtttaaagcttcacggggtacagtcattgttatgtccattgctgtg

SEQ ID NO: 80957 - DNA, 73 bp, Homo sapiens
agacaaaccccactgagtttaaagcttcacggggtacagtcattgttatgtccattgctgtgggtattcaata

SEQ ID NO: 80958 - DNA, 72 bp, Homo sapiens
accccactgagtttaaagcttcacggggtacagtcattgttatgtccattgctgtgggtattcaataaatat

SEQ ID NO: 80959 - DNA, 72 bp, Homo sapiens
taaatatttgctgaagctaaactgcaaatgtgaatttttacccaaaactttgtaattcaagacatacaaatc

SEQ ID NO: 80960 - DNA, 73 bp, Homo sapiens
gctgaagctaaactgcaaatgtgaatttttacccaaaactttgtaattcaagacatacaaatccatcaagttg

SEQ ID NO: 80961 - DNA, 73 bp, Homo sapiens
gctaaactgcaaatgtgaatttttacccaaaactttgtaattcaagacatacaaatccatcaagttgtatgag

SEQ ID NO: 80962 - DNA, 73 bp, Homo sapiens
tgtgaatttttacccaaaactttgtaattcaagacatacaaatccatcaagttgtatgagtatttcaagtgaa

SEQ ID NO: 80963 - DNA, 72 bp, Homo sapiens
acccaaaactttgtaattcaagacatacaaatccatcaagttgtatgagtatttcaagtgaaagaaatagga

SEQ ID NO: 80964 - DNA, 75 bp, Homo sapiens
tgtaattcaagacatacaaatccatcaagttgtatgagtatttcaagtgaaagaaataggaaggttctgttagag

SEQ ID NO: 80965 - DNA, 78 bp, Homo sapiens
ttcaagacatacaaatccatcaagttgtatgagtatttcaagtgaaagaaataggaaggttctgttagaggcatgcaa

SEQ ID NO: 80966 - DNA, 77 bp, Homo sapiens
acaaatccatcaagttgtatgagtatttcaagtgaaagaaataggaaggttctgttagaggcatgcaagtgaagaca

SEQ ID NO: 80967 - DNA, 76 bp, Homo sapiens
agttgtatgagtatttcaagtgaaagaaataggaaggttctgttagaggcatgcaagtgaagacaccatctcctta

SEQ ID NO: 80968 - DNA, 74 bp, Homo sapiens
agtatttcaagtgaaagaaataggaaggttctgttagaggcatgcaagtgaagacaccatctccttaccctcca

SEQ ID NO: 80969 - DNA, 76 bp, Homo sapiens
aagaaataggaaggttctgttagaggcatgcaagtgaagacaccatctccttaccctccaggcactgagagagaaa

SEQ ID NO: 80970 - DNA, 76 bp, Homo sapiens
ataggaaggttctgttagaggcatgcaagtgaagacaccatctccttaccctccaggcactgagagagaaaattag

SEQ ID NO: 80971 - DNA, 77 bp, Homo sapiens
atgcaagtgaagacaccatctccttaccctccaggcactgagagagaaaattaggaagacaacacagccatggggaa

SEQ ID NO: 80972 - DNA, 74 bp, Homo sapiens
acaccatctccttaccctccaggcactgagagagaaaattaggaagacaacacagccatggggaagtaataata

SEQ ID NO: 80973 - DNA, 74 bp, Homo sapiens
tctccttaccctccaggcactgagagagaaaattaggaagacaacacagccatggggaagtaataatacaaata

SEQ ID NO: 80974 - DNA, 78 bp, Homo sapiens
ggcactgagagagaaaattaggaagacaacacagccatggggaagtaataatacaaatacaatgcatatgtaagtcat

SEQ ID NO: 80975 - DNA, 76 bp, Homo sapiens
agagaaaattaggaagacaacacagccatggggaagtaataatacaaatacaatgcatatgtaagtcatttcttgc

SEQ ID NO: 80976 - DNA, 78 bp, Homo sapiens
ttaggaagacaacacagccatggggaagtaataatacaaatacaatgcatatgtaagtcatttcttgctcagtacaaa

SEQ ID NO: 80977 - DNA, 78 bp, Homo sapiens
acagccatggggaagtaataatacaaatacaatgcatatgtaagtcatttcttgctcagtacaaactcccaatgcaaa

SEQ ID NO: 80978 - DNA, 78 bp, Homo sapiens
aataatacaaatacaatgcatatgtaagtcatttcttgctcagtacaaactcccaatgcaaaaatccagagaactgtg

SEQ ID NO: 80979 - DNA, 80 bp, Homo sapiens
aatgcatatgtaagtcatttcttgctcagtacaaactcccaatgcaaaaatccagagaactgtgtgctgcctggtggatt

SEQ ID NO: 80980 - DNA, 78 bp, Homo sapiens
atatgtaagtcatttcttgctcagtacaaactcccaatgcaaaaatccagagaactgtgtgctgcctggtggattttc

SEQ ID NO: 80981 - DNA, 79 bp, Homo sapiens
atttcttgctcagtacaaactcccaatgcaaaaatccagagaactgtgtgctgcctggtggattttccagctcattgcg

SEQ ID NO: 80982 - DNA, 76 bp, Homo sapiens
tacaaactcccaatgcaaaaatccagagaactgtgtgctgcctggtggattttccagctcattgcgggggggaaga

SEQ ID NO: 80983 - DNA, 74 bp, Homo sapiens
aaatccagagaactgtgtgctgcctggtggattttccagctcattgcgggggggaagattagtgccttagtatt

SEQ ID NO: 80984 - DNA, 75 bp, Homo sapiens
agaactgtgtgctgcctggtggattttccagctcattgcgggggggaagattagtgccttagtatttcattcacc

SEQ ID NO: 80985 - DNA, 72 bp, Homo sapiens
ctgcctggtggattttccagctcattgcgggggggaagattagtgccttagtatttcattcacctccttttc

SEQ ID NO: 80986 - DNA, 73 bp, Homo sapiens
attttccagctcattgcgggggggaagattagtgccttagtatttcattcacctccttttctgctcctgtcca

SEQ ID NO: 80987 - DNA, 74 bp, Homo sapiens
gaagattagtgccttagtatttcattcacctccttttctgctcctgtccatcccagaaccaggatacgagtttc

SEQ ID NO: 80988 - DNA, 73 bp, Homo sapiens
agtatttcattcacctccttttctgctcctgtccatcccagaaccaggatacgagtttctcctacaaggccag

SEQ ID NO: 80989 - DNA, 77 bp, Homo sapiens
acctccttttctgctcctgtccatcccagaaccaggatacgagtttctcctacaaggccagtgcagatgaagcaatg

SEQ ID NO: 80990 - DNA, 82 bp, Homo sapiens
ttctgctcctgtccatcccagaaccaggatacgagtttctcctacaaggccagtgcagatgaagcaatgggccatgtgtgag

SEQ ID NO: 80991 - DNA, 81 bp, Homo sapiens
atcccagaaccaggatacgagtttctcctacaaggccagtgcagatgaagcaatgggccatgtgtgaggagcacgcataac

SEQ ID NO: 80992 - DNA, 82 bp, Homo sapiens
aaccaggatacgagtttctcctacaaggccagtgcagatgaagcaatgggccatgtgtgaggagcacgcataactgatgttc

SEQ ID NO: 80993 - DNA, 81 bp, Homo sapiens
acgagtttctcctacaaggccagtgcagatgaagcaatgggccatgtgtgaggagcacgcataactgatgttccctttctg

SEQ ID NO: 80994 - DNA, 84 bp, Homo sapiens
cagatgaagcaatgggccatgtgtgaggagcacgcataactgatgttccctttctgtccaggcgcataccaacaatgaggacta

SEQ ID NO: 80995 - DNA, 82 bp, Homo sapiens
agcaatgggccatgtgtgaggagcacgcataactgatgttccctttctgtccaggcgcataccaacaatgaggactattcaa

SEQ ID NO: 80996 - DNA, 79 bp, Homo sapiens
atgtgtgaggagcacgcataactgatgttccctttctgtccaggcgcataccaacaatgaggactattcaagctttagg

SEQ ID NO: 80997 - DNA, 77 bp, Homo sapiens
aggagcacgcataactgatgttccctttctgtccaggcgcataccaacaatgaggactattcaagctttagggacac

SEQ ID NO: 80998 - DNA, 78 bp, Homo sapiens
tttctgtccaggcgcataccaacaatgaggactattcaagctttagggacactctgctgggaggatccagaaacaaga

SEQ ID NO: 80999 - DNA, 73 bp, Homo sapiens
ataccaacaatgaggactattcaagctttagggacactctgctgggaggatccagaaacaagaagtctttgtt

SEQ ID NO: 81000 - DNA, 71 bp, Homo sapiens
aagctttagggacactctgctgggaggatccagaaacaagaagtctttgtttttcgtgtccaccaaagcaa

SEQ ID NO: 81001 - DNA, 75 bp, Homo sapiens
acactctgctgggaggatccagaaacaagaagtctttgtttttcgtgtccaccaaagcaacactgtgctatgtaa

SEQ ID NO: 81002 - DNA, 75 bp, Homo sapiens
gaggatccagaaacaagaagtctttgtttttcgtgtccaccaaagcaacactgtgctatgtaaggcaccacagtg

SEQ ID NO: 81003 - DNA, 72 bp, Homo sapiens
aaacaagaagtctttgtttttcgtgtccaccaaagcaacactgtgctatgtaaggcaccacagtggccattt

SEQ ID NO: 81004 - DNA, 73 bp, Homo sapiens
aagtctttgtttttcgtgtccaccaaagcaacactgtgctatgtaaggcaccacagtggccattttcttcgcc

SEQ ID NO: 81005 - DNA, 75 bp, Homo sapiens
tttttcgtgtccaccaaagcaacactgtgctatgtaaggcaccacagtggccattttcttcgccgtggaacttca

SEQ ID NO: 81006 - DNA, 73 bp, Homo sapiens
accaaagcaacactgtgctatgtaaggcaccacagtggccattttcttcgccgtggaacttcagtctttattt

SEQ ID NO: 81007 - DNA, 75 bp, Homo sapiens
actgtgctatgtaaggcaccacagtggccattttcttcgccgtggaacttcagtctttattttctgcatgttaaa

SEQ ID NO: 81008 - DNA, 73 bp, Homo sapiens
taaggcaccacagtggccattttcttcgccgtggaacttcagtctttattttctgcatgttaaaaactcatat

SEQ ID NO: 81009 - DNA, 73 bp, Homo sapiens
accacagtggccattttcttcgccgtggaacttcagtctttattttctgcatgttaaaaactcatattgaatg

SEQ ID NO: 81010 - DNA, 71 bp, Homo sapiens
ccgtggaacttcagtctttattttctgcatgttaaaaactcatattgaatggaccaagtcttgttttcttc

SEQ ID NO: 81011 - DNA, 71 bp, Homo sapiens
tcagtctttattttctgcatgttaaaaactcatattgaatggaccaagtcttgttttcttccttaatttgg

SEQ ID NO: 81012 - DNA, 67 bp, Homo sapiens
taaaaactcatattgaatggaccaagtcttgttttcttccttaatttgggtaagaccaataaaccac

SEQ ID NO: 81013 - DNA, 67 bp, Homo sapiens
aatggaccaagtcttgttttcttccttaatttgggtaagaccaataaaccaccccatggcaatgctt

SEQ ID NO: 81014 - DNA, 70 bp, Homo sapiens
ttgttttcttccttaatttgggtaagaccaataaaccaccccatggcaatgctttctgtcatcaaagccc

SEQ ID NO: 81015 - DNA, 73 bp, Homo sapiens
ttccttaatttgggtaagaccaataaaccaccccatggcaatgctttctgtcatcaaagccctctttatatca

SEQ ID NO: 81016 - DNA, 74 bp, Homo sapiens
gtaagaccaataaaccaccccatggcaatgctttctgtcatcaaagccctctttatatcatcctccctctaaaa

SEQ ID NO: 81017 - DNA, 74 bp, Homo sapiens
aataaaccaccccatggcaatgctttctgtcatcaaagccctctttatatcatcctccctctaaaagctgtccc

SEQ ID NO: 81018 - DNA, 77 bp, Homo sapiens
atggcaatgctttctgtcatcaaagccctctttatatcatcctccctctaaaagctgtccctgctttagaaatcaaa

SEQ ID NO: 81019 - DNA, 75 bp, Homo sapiens
aatgctttctgtcatcaaagccctctttatatcatcctccctctaaaagctgtccctgctttagaaatcaaagta

SEQ ID NO: 81020 - DNA, 79 bp, Homo sapiens
tcaaagccctctttatatcatcctccctctaaaagctgtccctgctttagaaatcaaagtatgcagtatgatctcaata

SEQ ID NO: 81021 - DNA, 79 bp, Homo sapiens
tctttatatcatcctccctctaaaagctgtccctgctttagaaatcaaagtatgcagtatgatctcaatatggaaaata

SEQ ID NO: 81022 - DNA, 79 bp, Homo sapiens
atcatcctccctctaaaagctgtccctgctttagaaatcaaagtatgcagtatgatctcaatatggaaaatagcactcc

SEQ ID NO: 81023 - DNA, 79 bp, Homo sapiens
taaaagctgtccctgctttagaaatcaaagtatgcagtatgatctcaatatggaaaatagcactccctcacccaaatga

SEQ ID NO: 81024 - DNA, 78 bp, Homo sapiens
ctgctttagaaatcaaagtatgcagtatgatctcaatatggaaaatagcactccctcacccaaatgaagtactaaaga

SEQ ID NO: 81025 - DNA, 77 bp, Homo sapiens
ttagaaatcaaagtatgcagtatgatctcaatatggaaaatagcactccctcacccaaatgaagtactaaagaaaga

SEQ ID NO: 81026 - DNA, 78 bp, Homo sapiens
aagtatgcagtatgatctcaatatggaaaatagcactccctcacccaaatgaagtactaaagaaagacacagacacat

SEQ ID NO: 81027 - DNA, 75 bp, Homo sapiens
tctcaatatggaaaatagcactccctcacccaaatgaagtactaaagaaagacacagacacattaacaaagctta

SEQ ID NO: 81028 - DNA, 73 bp, Homo sapiens
tatggaaaatagcactccctcacccaaatgaagtactaaagaaagacacagacacattaacaaagcttatctt

SEQ ID NO: 81029 - DNA, 73 bp, Homo sapiens
tagcactccctcacccaaatgaagtactaaagaaagacacagacacattaacaaagcttatctttgtattggg

SEQ ID NO: 81030 - DNA, 70 bp, Homo sapiens
caaatgaagtactaaagaaagacacagacacattaacaaagcttatctttgtattgggggattctccggt

SEQ ID NO: 81031 - DNA, 70 bp, Homo sapiens
tactaaagaaagacacagacacattaacaaagcttatctttgtattgggggattctccggttgtttcaat

SEQ ID NO: 81032 - DNA, 70 bp, Homo sapiens
agacacagacacattaacaaagcttatctttgtattgggggattctccggttgtttcaattctatttctt

SEQ ID NO: 81033 - DNA, 70 bp, Homo sapiens
agacacattaacaaagcttatctttgtattgggggattctccggttgtttcaattctatttctttcacca

SEQ ID NO: 81034 - DNA, 67 bp, Homo sapiens
acaaagcttatctttgtattgggggattctccggttgtttcaattctatttctttcaccaattttaa

SEQ ID NO: 81035 - DNA, 65 bp, Homo sapiens
tctttgtattgggggattctccggttgtttcaattctatttctttcaccaattttaaaattttac

SEQ ID NO: 81036 - DNA, 78 bp, Homo sapiens
gccaccgcgcccggtctgaaattagttttacaatcagcaaatcatcatatacaatcctaaatatactatatgatccca

SEQ ID NO: 81037 - DNA, 78 bp, Homo sapiens
gcccggtctgaaattagttttacaatcagcaaatcatcatatacaatcctaaatatactatatgatcccaattgtgga

SEQ ID NO: 81038 - DNA, 77 bp, Homo sapiens
ctgaaattagttttacaatcagcaaatcatcatatacaatcctaaatatactatatgatcccaattgtggagaaaaa

SEQ ID NO: 81039 - DNA, 80 bp, Homo sapiens
ttttacaatcagcaaatcatcatatacaatcctaaatatactatatgatcccaattgtggagaaaaatatacacaacata

SEQ ID NO: 81040 - DNA, 77 bp, Homo sapiens
agcaaatcatcatatacaatcctaaatatactatatgatcccaattgtggagaaaaatatacacaacataaaaaaga

SEQ ID NO: 81041 - DNA, 74 bp, Homo sapiens
catatacaatcctaaatatactatatgatcccaattgtggagaaaaatatacacaacataaaaaagaatgcccc

SEQ ID NO: 81042 - DNA, 72 bp, Homo sapiens
caatcctaaatatactatatgatcccaattgtggagaaaaatatacacaacataaaaaagaatgcccctaat

SEQ ID NO: 81043 - DNA, 71 bp, Homo sapiens
cctaaatatactatatgatcccaattgtggagaaaaatatacacaacataaaaaagaatgcccctaattat

SEQ ID NO: 81044 - DNA, 71 bp, Homo sapiens
atatactatatgatcccaattgtggagaaaaatatacacaacataaaaaagaatgcccctaattattttct

SEQ ID NO: 81045 - DNA, 70 bp, Homo sapiens
ctatatgatcccaattgtggagaaaaatatacacaacataaaaaagaatgcccctaattattttcttatt

SEQ ID NO: 81046 - DNA, 69 bp, Homo sapiens
gatcccaattgtggagaaaaatatacacaacataaaaaagaatgcccctaattattttcttatttctgt

SEQ ID NO: 81047 - DNA, 67 bp, Homo sapiens
ccaattgtggagaaaaatatacacaacataaaaaagaatgcccctaattattttcttatttctgttt

SEQ ID NO: 81048 - DNA, 70 bp, Homo sapiens
ttttcttatttctgtttttctatattttccatgttttctataatgagcatattaattttaatgcctttta

SEQ ID NO: 81049 - DNA, 69 bp, Homo sapiens
tttctgtttttctatattttccatgttttctataatgagcatattaattttaatgccttttaaaaattc

SEQ ID NO: 81050 - DNA, 70 bp, Homo sapiens
tctatattttccatgttttctataatgagcatattaattttaatgccttttaaaaattctaagcttattt

SEQ ID NO: 81051 - DNA, 73 bp, Homo sapiens
tccatgttttctataatgagcatattaattttaatgccttttaaaaattctaagcttattttctattatcagc

SEQ ID NO: 81052 - DNA, 76 bp, Homo sapiens
taatgagcatattaattttaatgccttttaaaaattctaagcttattttctattatcagctagtacatgaatatca

SEQ ID NO: 81053 - DNA, 73 bp, Homo sapiens
gcatattaattttaatgccttttaaaaattctaagcttattttctattatcagctagtacatgaatatcacct

SEQ ID NO: 81054 - DNA, 71 bp, Homo sapiens
atgccttttaaaaattctaagcttattttctattatcagctagtacatgaatatcaccttactaaaattat

SEQ ID NO: 81055 - DNA, 71 bp, Homo sapiens
gcttattttctattatcagctagtacatgaatatcaccttactaaaattatttaaacaagtccaataaaac

SEQ ID NO: 81056 - DNA, 71 bp, Homo sapiens
ctattatcagctagtacatgaatatcaccttactaaaattatttaaacaagtccaataaaaccctccttga

SEQ ID NO: 81057 - DNA, 72 bp, Homo sapiens
tcagctagtacatgaatatcaccttactaaaattatttaaacaagtccaataaaaccctccttgacatatcc

SEQ ID NO: 81058 - DNA, 71 bp, Homo sapiens
catgaatatcaccttactaaaattatttaaacaagtccaataaaaccctccttgacatatcccatcacatt

SEQ ID NO: 81059 - DNA, 69 bp, Homo sapiens
ccttactaaaattatttaaacaagtccaataaaaccctccttgacatatcccatcacatttgacatccc

SEQ ID NO: 81060 - DNA, 71 bp, Homo sapiens
atttaaacaagtccaataaaaccctccttgacatatcccatcacatttgacatcccctaaaatgagtacta

SEQ ID NO: 81061 - DNA, 73 bp, Homo sapiens
agtccaataaaaccctccttgacatatcccatcacatttgacatcccctaaaatgagtactatttatcaggta

SEQ ID NO: 81062 - DNA, 71 bp, Homo sapiens
aaccctccttgacatatcccatcacatttgacatcccctaaaatgagtactatttatcaggtagggtttat

SEQ ID NO: 81063 - DNA, 74 bp, Homo sapiens
cttgacatatcccatcacatttgacatcccctaaaatgagtactatttatcaggtagggtttattgtattatct

SEQ ID NO: 81064 - DNA, 74 bp, Homo sapiens
ccatcacatttgacatcccctaaaatgagtactatttatcaggtagggtttattgtattatctttcaaatggca

SEQ ID NO: 81065 - DNA, 68 bp, Homo sapiens
tatttatcaggtagggtttattgtattatctttcaaatggcaagacagttggtggggtgggggggctt

SEQ ID NO: 81066 - DNA, 68 bp, Homo sapiens
tagggtttattgtattatctttcaaatggcaagacagttggtggggtgggggggctttatctttaaga

SEQ ID NO: 81067 - DNA, 69 bp, Homo sapiens
ttattgtattatctttcaaatggcaagacagttggtggggtgggggggctttatctttaagaaaacaga

SEQ ID NO: 81068 - DNA, 69 bp, Homo sapiens
atctttcaaatggcaagacagttggtggggtgggggggctttatctttaagaaaacagagacaaaatga

SEQ ID NO: 81069 - DNA, 67 bp, Homo sapiens
agacagttggtggggtgggggggctttatctttaagaaaacagagacaaaatgactttctcaaccaa

SEQ ID NO: 81070 - DNA, 70 bp, Homo sapiens
tggggtgggggggctttatctttaagaaaacagagacaaaatgactttctcaaccaatgcaacgctaaca

SEQ ID NO: 81071 - DNA, 74 bp, Homo sapiens
tctttaagaaaacagagacaaaatgactttctcaaccaatgcaacgctaacacaaaaattagagacagaaggca

SEQ ID NO: 81072 - DNA, 73 bp, Homo sapiens
aacagagacaaaatgactttctcaaccaatgcaacgctaacacaaaaattagagacagaaggcaccttagtaa

SEQ ID NO: 81073 - DNA, 77 bp, Homo sapiens
aaaatgactttctcaaccaatgcaacgctaacacaaaaattagagacagaaggcaccttagtaatcatctgatcaca

SEQ ID NO: 81074 - DNA, 80 bp, Homo sapiens
tttctcaaccaatgcaacgctaacacaaaaattagagacagaaggcaccttagtaatcatctgatcacatctcatcattt

SEQ ID NO: 81075 - DNA, 79 bp, Homo sapiens
aacgctaacacaaaaattagagacagaaggcaccttagtaatcatctgatcacatctcatcattttacagatggacaaa

SEQ ID NO: 81076 - DNA, 84 bp, Homo sapiens
attagagacagaaggcaccttagtaatcatctgatcacatctcatcattttacagatggacaaactgaggcctggagacagagc

SEQ ID NO: 81077 - DNA, 82 bp, Homo sapiens
aaggcaccttagtaatcatctgatcacatctcatcattttacagatggacaaactgaggcctggagacagagcttggacacc

SEQ ID NO: 81078 - DNA, 84 bp, Homo sapiens
taatcatctgatcacatctcatcattttacagatggacaaactgaggcctggagacagagcttggacaccgagtctccccagta

SEQ ID NO: 81079 - DNA, 80 bp, Homo sapiens
atcacatctcatcattttacagatggacaaactgaggcctggagacagagcttggacaccgagtctccccagtacccaca

SEQ ID NO: 81080 - DNA, 77 bp, Homo sapiens
tacagatggacaaactgaggcctggagacagagcttggacaccgagtctccccagtacccacacagagccctctcct

SEQ ID NO: 81081 - DNA, 76 bp, Homo sapiens
aaactgaggcctggagacagagcttggacaccgagtctccccagtacccacacagagccctctccttgccctctgc

SEQ ID NO: 81082 - DNA, 73 bp, Homo sapiens
agacagagcttggacaccgagtctccccagtacccacacagagccctctccttgccctctgcccaccctaaac

SEQ ID NO: 81083 - DNA, 74 bp, Homo sapiens
accgagtctccccagtacccacacagagccctctccttgccctctgcccaccctaaacctgggtgcagatgtca

SEQ ID NO: 81084 - DNA, 75 bp, Homo sapiens
agtacccacacagagccctctccttgccctctgcccaccctaaacctgggtgcagatgtcacccccatgactaga

SEQ ID NO: 81085 - DNA, 82 bp, Homo sapiens
cttgccctctgcccaccctaaacctgggtgcagatgtcacccccatgactagagggctagcacatggtcagatggcacagca

SEQ ID NO: 81086 - DNA, 81 bp, Homo sapiens
cagatgtcacccccatgactagagggctagcacatggtcagatggcacagcagaaccaaggccccattcaggaccactccc

SEQ ID NO: 81087 - DNA, 80 bp, Homo sapiens
ccccatgactagagggctagcacatggtcagatggcacagcagaaccaaggccccattcaggaccactccccaagatgac

SEQ ID NO: 81088 - DNA, 80 bp, Homo sapiens
actagagggctagcacatggtcagatggcacagcagaaccaaggccccattcaggaccactccccaagatgacctccaca

SEQ ID NO: 81089 - DNA, 81 bp, Homo sapiens
tagcacatggtcagatggcacagcagaaccaaggccccattcaggaccactccccaagatgacctccacactgctggaaaa

SEQ ID NO: 81090 - DNA, 76 bp, Homo sapiens
agatggcacagcagaaccaaggccccattcaggaccactccccaagatgacctccacactgctggaaaaggtgacc

SEQ ID NO: 81091 - DNA, 75 bp, Homo sapiens
cagaaccaaggccccattcaggaccactccccaagatgacctccacactgctggaaaaggtgaccctctccatca

SEQ ID NO: 81092 - DNA, 74 bp, Homo sapiens
aaggccccattcaggaccactccccaagatgacctccacactgctggaaaaggtgaccctctccatcaggccca

SEQ ID NO: 81093 - DNA, 77 bp, Homo sapiens
attcaggaccactccccaagatgacctccacactgctggaaaaggtgaccctctccatcaggcccagctctcttctc

SEQ ID NO: 81094 - DNA, 79 bp, Homo sapiens
ccaagatgacctccacactgctggaaaaggtgaccctctccatcaggcccagctctcttctcctgaagcacaagctact

SEQ ID NO: 81095 - DNA, 78 bp, Homo sapiens
atgacctccacactgctggaaaaggtgaccctctccatcaggcccagctctcttctcctgaagcacaagctacttccc

SEQ ID NO: 81096 - DNA, 78 bp, Homo sapiens
aaaggtgaccctctccatcaggcccagctctcttctcctgaagcacaagctacttcccgtctgttagcagccaggcaa

SEQ ID NO: 81097 - DNA, 72 bp, Homo sapiens
tcttctcctgaagcacaagctacttcccgtctgttagcagccaggcaaaccccacgaaaggaagggcccagg

SEQ ID NO: 81098 - DNA, 71 bp, Homo sapiens
tacttcccgtctgttagcagccaggcaaaccccacgaaaggaagggcccagggaggaaacatctgtgtata

SEQ ID NO: 81099 - DNA, 69 bp, Homo sapiens
aggcaaaccccacgaaaggaagggcccagggaggaaacatctgtgtatacacgaggggtgaagtcataa

SEQ ID NO: 81100 - DNA, 71 bp, Homo sapiens
gaaaggaagggcccagggaggaaacatctgtgtatacacgaggggtgaagtcataagccctcttgactttc

SEQ ID NO: 81101 - DNA, 69 bp, Homo sapiens
aagggcccagggaggaaacatctgtgtatacacgaggggtgaagtcataagccctcttgactttccctt

SEQ ID NO: 81102 - DNA, 71 bp, Homo sapiens
aggaaacatctgtgtatacacgaggggtgaagtcataagccctcttgactttcccttttggcaaatcctct

SEQ ID NO: 81103 - DNA, 71 bp, Homo sapiens
tgtatacacgaggggtgaagtcataagccctcttgactttcccttttggcaaatcctcttctgcctaattt

SEQ ID NO: 81104 - DNA, 68 bp, Homo sapiens
acacgaggggtgaagtcataagccctcttgactttcccttttggcaaatcctcttctgcctaattttt

SEQ ID NO: 81105 - DNA, 67 bp, Homo sapiens
aagtcataagccctcttgactttcccttttggcaaatcctcttctgcctaattttttttcccctaca

SEQ ID NO: 81106 - DNA, 71 bp, Homo sapiens
cctcttgactttcccttttggcaaatcctcttctgcctaattttttttcccctacatcattgagatgcaaa

SEQ ID NO: 81107 - DNA, 73 bp, Homo sapiens
ttcccttttggcaaatcctcttctgcctaattttttttcccctacatcattgagatgcaaagctccattcaaa

SEQ ID NO: 81108 - DNA, 73 bp, Homo sapiens
ttggcaaatcctcttctgcctaattttttttcccctacatcattgagatgcaaagctccattcaaacaagggg

SEQ ID NO: 81109 - DNA, 73 bp, Homo sapiens
ttctgcctaattttttttcccctacatcattgagatgcaaagctccattcaaacaagggggcctggaagactc

SEQ ID NO: 81110 - DNA, 76 bp, Homo sapiens
ttttttcccctacatcattgagatgcaaagctccattcaaacaagggggcctggaagactccagcagcttctagaa

SEQ ID NO: 81111 - DNA, 74 bp, Homo sapiens
attgagatgcaaagctccattcaaacaagggggcctggaagactccagcagcttctagaaaccaaaacttccat

SEQ ID NO: 81112 - DNA, 73 bp, Homo sapiens
aaagctccattcaaacaagggggcctggaagactccagcagcttctagaaaccaaaacttccattctgctaca

SEQ ID NO: 81113 - DNA, 73 bp, Homo sapiens
aaacaagggggcctggaagactccagcagcttctagaaaccaaaacttccattctgctacagagattctcaaa

SEQ ID NO: 81114 - DNA, 77 bp, Homo sapiens
actccagcagcttctagaaaccaaaacttccattctgctacagagattctcaaaagaaggtatgtcttgttgcactg

SEQ ID NO: 81115 - DNA, 74 bp, Homo sapiens
ttctagaaaccaaaacttccattctgctacagagattctcaaaagaaggtatgtcttgttgcactggggtgtgg

SEQ ID NO: 81116 - DNA, 76 bp, Homo sapiens
attctgctacagagattctcaaaagaaggtatgtcttgttgcactggggtgtgggtggggctaagaacagaagata

SEQ ID NO: 81117 - DNA, 76 bp, Homo sapiens
agattctcaaaagaaggtatgtcttgttgcactggggtgtgggtggggctaagaacagaagatagatgccctgcaa

SEQ ID NO: 81118 - DNA, 73 bp, Homo sapiens
aaaagaaggtatgtcttgttgcactggggtgtgggtggggctaagaacagaagatagatgccctgcaaaccac

SEQ ID NO: 81119 - DNA, 78 bp, Homo sapiens
actggggtgtgggtggggctaagaacagaagatagatgccctgcaaaccactcagttgaccacagacatccatgtgct

SEQ ID NO: 81120 - DNA, 78 bp, Homo sapiens
ggtgtgggtggggctaagaacagaagatagatgccctgcaaaccactcagttgaccacagacatccatgtgcttaccc

SEQ ID NO: 81121 - DNA, 78 bp, Homo sapiens
taagaacagaagatagatgccctgcaaaccactcagttgaccacagacatccatgtgcttacccctaaacccagcttc

SEQ ID NO: 81122 - DNA, 78 bp, Homo sapiens
aagatagatgccctgcaaaccactcagttgaccacagacatccatgtgcttacccctaaacccagcttctgcccttca

SEQ ID NO: 81123 - DNA, 79 bp, Homo sapiens
atgccctgcaaaccactcagttgaccacagacatccatgtgcttacccctaaacccagcttctgcccttcagccaagca

SEQ ID NO: 81124 - DNA, 77 bp, Homo sapiens
aaccactcagttgaccacagacatccatgtgcttacccctaaacccagcttctgcccttcagccaagcagagaggaa

SEQ ID NO: 81125 - DNA, 78 bp, Homo sapiens
accacagacatccatgtgcttacccctaaacccagcttctgcccttcagccaagcagagaggaagctcaaatgcaggt

SEQ ID NO: 81126 - DNA, 78 bp, Homo sapiens
atccatgtgcttacccctaaacccagcttctgcccttcagccaagcagagaggaagctcaaatgcaggttccacagct

SEQ ID NO: 81127 - DNA, 79 bp, Homo sapiens
aaacccagcttctgcccttcagccaagcagagaggaagctcaaatgcaggttccacagcttctcagccatataaccctg

SEQ ID NO: 81128 - DNA, 80 bp, Homo sapiens
ccttcagccaagcagagaggaagctcaaatgcaggttccacagcttctcagccatataaccctggccaaggcacttcacc

SEQ ID NO: 81129 - DNA, 79 bp, Homo sapiens
aagcagagaggaagctcaaatgcaggttccacagcttctcagccatataaccctggccaaggcacttcacctctacaaa

SEQ ID NO: 81130 - DNA, 74 bp, Homo sapiens
aaatgcaggttccacagcttctcagccatataaccctggccaaggcacttcacctctacaaacctcatcttttt

SEQ ID NO: 81131 - DNA, 73 bp, Homo sapiens
ataaccctggccaaggcacttcacctctacaaacctcatcttttttctttcccacataggaaaatgcagatgc

SEQ ID NO: 81132 - DNA, 76 bp, Homo sapiens
gcacttcacctctacaaacctcatcttttttctttcccacataggaaaatgcagatgccaccacctacttcataga

SEQ ID NO: 81133 - DNA, 74 bp, Homo sapiens
tcatcttttttctttcccacataggaaaatgcagatgccaccacctacttcatagaatttttgcagggattaaa

SEQ ID NO: 81134 - DNA, 73 bp, Homo sapiens
tttttctttcccacataggaaaatgcagatgccaccacctacttcatagaatttttgcagggattaaataaga

SEQ ID NO: 81135 - DNA, 74 bp, Homo sapiens
ataggaaaatgcagatgccaccacctacttcatagaatttttgcagggattaaataagacagtagaaacaatgg

SEQ ID NO: 81136 - DNA, 74 bp, Homo sapiens
aaatgcagatgccaccacctacttcatagaatttttgcagggattaaataagacagtagaaacaatggtaggta

SEQ ID NO: 81137 - DNA, 72 bp, Homo sapiens
caccacctacttcatagaatttttgcagggattaaataagacagtagaaacaatggtaggtacatattagct

SEQ ID NO: 81138 - DNA, 74 bp, Homo sapiens
cttcatagaatttttgcagggattaaataagacagtagaaacaatggtaggtacatattagcttcatcccatac

SEQ ID NO: 81139 - DNA, 72 bp, Homo sapiens
taaataagacagtagaaacaatggtaggtacatattagcttcatcccatacttttccatccccttgagaaaa

SEQ ID NO: 81140 - DNA, 74 bp, Homo sapiens
agtagaaacaatggtaggtacatattagcttcatcccatacttttccatccccttgagaaaagccatcaactga

SEQ ID NO: 81141 - DNA, 74 bp, Homo sapiens
aaacaatggtaggtacatattagcttcatcccatacttttccatccccttgagaaaagccatcaactgaggtca

SEQ ID NO: 81142 - DNA, 79 bp, Homo sapiens
tacatattagcttcatcccatacttttccatccccttgagaaaagccatcaactgaggtcaccaacgctgagtcactca

SEQ ID NO: 81143 - DNA, 79 bp, Homo sapiens
tagcttcatcccatacttttccatccccttgagaaaagccatcaactgaggtcaccaacgctgagtcactcatgttgcc

SEQ ID NO: 81144 - DNA, 74 bp, Homo sapiens
atacttttccatccccttgagaaaagccatcaactgaggtcaccaacgctgagtcactcatgttgcccggactt

SEQ ID NO: 81145 - DNA, 76 bp, Homo sapiens
cccttgagaaaagccatcaactgaggtcaccaacgctgagtcactcatgttgcccggactttcccaacagcacggc

SEQ ID NO: 81146 - DNA, 75 bp, Homo sapiens
accaacgctgagtcactcatgttgcccggactttcccaacagcacggctaaactctccagaatgataccttctaa

SEQ ID NO: 81147 - DNA, 77 bp, Homo sapiens
tcactcatgttgcccggactttcccaacagcacggctaaactctccagaatgataccttctaaccattctgacataa

SEQ ID NO: 81148 - DNA, 73 bp, Homo sapiens
atgttgcccggactttcccaacagcacggctaaactctccagaatgataccttctaaccattctgacataaac

SEQ ID NO: 81149 - DNA, 78 bp, Homo sapiens
aacagcacggctaaactctccagaatgataccttctaaccattctgacataaactgagctgactgaaggaaagagcac

SEQ ID NO: 81150 - DNA, 80 bp, Homo sapiens
taaactctccagaatgataccttctaaccattctgacataaactgagctgactgaaggaaagagcacgtgaatgacgaga

SEQ ID NO: 81151 - DNA, 79 bp, Homo sapiens
aatgataccttctaaccattctgacataaactgagctgactgaaggaaagagcacgtgaatgacgagactagaattcaa

SEQ ID NO: 81152 - DNA, 77 bp, Homo sapiens
ccttctaaccattctgacataaactgagctgactgaaggaaagagcacgtgaatgacgagactagaattcaaagaaa

SEQ ID NO: 81153 - DNA, 79 bp, Homo sapiens
ttctgacataaactgagctgactgaaggaaagagcacgtgaatgacgagactagaattcaaagaaacatcagaataggt

SEQ ID NO: 81154 - DNA, 79 bp, Homo sapiens
aaactgagctgactgaaggaaagagcacgtgaatgacgagactagaattcaaagaaacatcagaataggttctcatcaa

SEQ ID NO: 81155 - DNA, 78 bp, Homo sapiens
actgaaggaaagagcacgtgaatgacgagactagaattcaaagaaacatcagaataggttctcatcaatggctttgcg

SEQ ID NO: 81156 - DNA, 79 bp, Homo sapiens
aagagcacgtgaatgacgagactagaattcaaagaaacatcagaataggttctcatcaatggctttgcgggcctagagc

SEQ ID NO: 81157 - DNA, 75 bp, Homo sapiens
acgagactagaattcaaagaaacatcagaataggttctcatcaatggctttgcgggcctagagccctccaagtaa

SEQ ID NO: 81158 - DNA, 74 bp, Homo sapiens
agaattcaaagaaacatcagaataggttctcatcaatggctttgcgggcctagagccctccaagtaaatacatt

SEQ ID NO: 81159 - DNA, 73 bp, Homo sapiens
aaagaaacatcagaataggttctcatcaatggctttgcgggcctagagccctccaagtaaatacatttggaaa

SEQ ID NO: 81160 - DNA, 73 bp, Homo sapiens
atcaatggctttgcgggcctagagccctccaagtaaatacatttggaaaagacgtggtttcttggctcgcatg

SEQ ID NO: 81161 - DNA, 72 bp, Homo sapiens
tttgcgggcctagagccctccaagtaaatacatttggaaaagacgtggtttcttggctcgcatggactgtcc

SEQ ID NO: 81162 - DNA, 71 bp, Homo sapiens
tagagccctccaagtaaatacatttggaaaagacgtggtttcttggctcgcatggactgtcccctaaagta

SEQ ID NO: 81163 - DNA, 69 bp, Homo sapiens
agtaaatacatttggaaaagacgtggtttcttggctcgcatggactgtcccctaaagtaactaaagcca

SEQ ID NO: 81164 - DNA, 69 bp, Homo sapiens
atttggaaaagacgtggtttcttggctcgcatggactgtcccctaaagtaactaaagccattagacaaa

SEQ ID NO: 81165 - DNA, 69 bp, Homo sapiens
aaaagacgtggtttcttggctcgcatggactgtcccctaaagtaactaaagccattagacaaagagaaa

SEQ ID NO: 81166 - DNA, 70 bp, Homo sapiens
atggactgtcccctaaagtaactaaagccattagacaaagagaaagctgaaggagaccctgccagtaaaa

SEQ ID NO: 81167 - DNA, 70 bp, Homo sapiens
ccctaaagtaactaaagccattagacaaagagaaagctgaaggagaccctgccagtaaaactcacagggc

SEQ ID NO: 81168 - DNA, 72 bp, Homo sapiens
agtaactaaagccattagacaaagagaaagctgaaggagaccctgccagtaaaactcacagggcggagaaca

SEQ ID NO: 81169 - DNA, 74 bp, Homo sapiens
attagacaaagagaaagctgaaggagaccctgccagtaaaactcacagggcggagaacacacgcaagtccacga

SEQ ID NO: 81170 - DNA, 73 bp, Homo sapiens
agaaagctgaaggagaccctgccagtaaaactcacagggcggagaacacacgcaagtccacgagggctacaac

SEQ ID NO: 81171 - DNA, 72 bp, Homo sapiens
aaggagaccctgccagtaaaactcacagggcggagaacacacgcaagtccacgagggctacaaccatacaaa

SEQ ID NO: 81172 - DNA, 74 bp, Homo sapiens
ccctgccagtaaaactcacagggcggagaacacacgcaagtccacgagggctacaaccatacaaagctgctggg

SEQ ID NO: 81173 - DNA, 73 bp, Homo sapiens
aaaactcacagggcggagaacacacgcaagtccacgagggctacaaccatacaaagctgctggggtaaatgaa

SEQ ID NO: 81174 - DNA, 73 bp, Homo sapiens
gagaacacacgcaagtccacgagggctacaaccatacaaagctgctggggtaaatgaaaacaagacccagaaa

SEQ ID NO: 81175 - DNA, 71 bp, Homo sapiens
acgagggctacaaccatacaaagctgctggggtaaatgaaaacaagacccagaaacaaacatggtccttga

SEQ ID NO: 81176 - DNA, 71 bp, Homo sapiens
tacaaccatacaaagctgctggggtaaatgaaaacaagacccagaaacaaacatggtccttgaccaagaac

SEQ ID NO: 81177 - DNA, 70 bp, Homo sapiens
aaagctgctggggtaaatgaaaacaagacccagaaacaaacatggtccttgaccaagaactgcaaacaaa

SEQ ID NO: 81178 - DNA, 71 bp, Homo sapiens
taaatgaaaacaagacccagaaacaaacatggtccttgaccaagaactgcaaacaaaccagtgcaagaccc

SEQ ID NO: 81179 - DNA, 71 bp, Homo sapiens
aaacaagacccagaaacaaacatggtccttgaccaagaactgcaaacaaaccagtgcaagaccctggcaaa

SEQ ID NO: 81180 - DNA, 69 bp, Homo sapiens
cgagtgcgggtcaccgggtcactgggtcattgtctccgcgcccgaaccccgagcaccccgtggaatccc

SEQ ID NO: 81181 - DNA, 72 bp, Homo sapiens
cgggtcactgggtcattgtctccgcgcccgaaccccgagcaccccgtggaatcccccacgtcatcatcagaa

SEQ ID NO: 81182 - DNA, 76 bp, Homo sapiens
tgggtcattgtctccgcgcccgaaccccgagcaccccgtggaatcccccacgtcatcatcagaaccatcaatgaga

SEQ ID NO: 81183 - DNA, 77 bp, Homo sapiens
ttgtctccgcgcccgaaccccgagcaccccgtggaatcccccacgtcatcatcagaaccatcaatgagatgcaaaca

SEQ ID NO: 81184 - DNA, 77 bp, Homo sapiens
aaccccgagcaccccgtggaatcccccacgtcatcatcagaaccatcaatgagatgcaaacatgaaagacaagagga

SEQ ID NO: 81185 - DNA, 79 bp, Homo sapiens
cgagcaccccgtggaatcccccacgtcatcatcagaaccatcaatgagatgcaaacatgaaagacaagaggaagaagaa

SEQ ID NO: 81186 - DNA, 78 bp, Homo sapiens
aatcccccacgtcatcatcagaaccatcaatgagatgcaaacatgaaagacaagaggaagaagaaggaccgcacctgg

SEQ ID NO: 81187 - DNA, 81 bp, Homo sapiens
acgtcatcatcagaaccatcaatgagatgcaaacatgaaagacaagaggaagaagaaggaccgcacctgggccgaggctgc

SEQ ID NO: 81188 - DNA, 78 bp, Homo sapiens
atcagaaccatcaatgagatgcaaacatgaaagacaagaggaagaagaaggaccgcacctgggccgaggctgcccgcc

SEQ ID NO: 81189 - DNA, 75 bp, Homo sapiens
aatgagatgcaaacatgaaagacaagaggaagaagaaggaccgcacctgggccgaggctgcccgcctggtacgta

SEQ ID NO: 81190 - DNA, 70 bp, Homo sapiens
aaacatgaaagacaagaggaagaagaaggaccgcacctgggccgaggctgcccgcctggtacgtaccgcc

SEQ ID NO: 81191 - DNA, 69 bp, Homo sapiens
aagacaagaggaagaagaaggaccgcacctgggccgaggctgcccgcctggtacgtaccgccccccaca

SEQ ID NO: 81192 - DNA, 68 bp, Homo sapiens
aagaagaaggaccgcacctgggccgaggctgcccgcctggtacgtaccgccccccacacgccgcccgc

SEQ ID NO: 81193 - DNA, 75 bp, Homo sapiens
cattttcattttgtatgctgccatgcaataatctaggaatcttatgtttatattttaggcactagaaaaacaccc

SEQ ID NO: 81194 - DNA, 76 bp, Homo sapiens
ttgtatgctgccatgcaataatctaggaatcttatgtttatattttaggcactagaaaaacaccccaactcaccaa

SEQ ID NO: 81195 - DNA, 75 bp, Homo sapiens
catgcaataatctaggaatcttatgtttatattttaggcactagaaaaacaccccaactcaccaatgacagcaaa

SEQ ID NO: 81196 - DNA, 74 bp, Homo sapiens
atctaggaatcttatgtttatattttaggcactagaaaaacaccccaactcaccaatgacagcaaagcagatat

SEQ ID NO: 81197 - DNA, 75 bp, Homo sapiens
gtttatattttaggcactagaaaaacaccccaactcaccaatgacagcaaagcagatattggaagtcattcagaa

SEQ ID NO: 81198 - DNA, 75 bp, Homo sapiens
tattttaggcactagaaaaacaccccaactcaccaatgacagcaaagcagatattggaagtcattcagaaagaag

SEQ ID NO: 81199 - DNA, 71 bp, Homo sapiens
aaaaacaccccaactcaccaatgacagcaaagcagatattggaagtcattcagaaagaagggttaaaagaa

SEQ ID NO: 81200 - DNA, 75 bp, Homo sapiens
caactcaccaatgacagcaaagcagatattggaagtcattcagaaagaagggttaaaagaaacaaggtcagtatc

SEQ ID NO: 81201 - DNA, 75 bp, Homo sapiens
caatgacagcaaagcagatattggaagtcattcagaaagaagggttaaaagaaacaaggtcagtatccatattta

SEQ ID NO: 81202 - DNA, 72 bp, Homo sapiens
gcaaagcagatattggaagtcattcagaaagaagggttaaaagaaacaaggtcagtatccatatttaaaaca

SEQ ID NO: 81203 - DNA, 69 bp, Homo sapiens
tattggaagtcattcagaaagaagggttaaaagaaacaaggtcagtatccatatttaaaacattttctg

SEQ ID NO: 81204 - DNA, 69 bp, Homo sapiens
tcattcagaaagaagggttaaaagaaacaaggtcagtatccatatttaaaacattttctgttttcatta

SEQ ID NO: 81205 - DNA, 77 bp, Homo sapiens
atagaagctgtacctcagactgcttcatttttgcacacttttattttctagtggaacctctccattagcctgtctga

SEQ ID NO: 81206 - DNA, 81 bp, Homo sapiens
tcagactgcttcatttttgcacacttttattttctagtggaacctctccattagcctgtctgaatgcaatgcttcacacta

SEQ ID NO: 81207 - DNA, 78 bp, Homo sapiens
ttcatttttgcacacttttattttctagtggaacctctccattagcctgtctgaatgcaatgcttcacactaacactc

SEQ ID NO: 81208 - DNA, 75 bp, Homo sapiens
acacttttattttctagtggaacctctccattagcctgtctgaatgcaatgcttcacactaacactcgaataggg

SEQ ID NO: 81209 - DNA, 77 bp, Homo sapiens
attttctagtggaacctctccattagcctgtctgaatgcaatgcttcacactaacactcgaataggggatggaacat

SEQ ID NO: 81210 - DNA, 78 bp, Homo sapiens
gtggaacctctccattagcctgtctgaatgcaatgcttcacactaacactcgaataggggatggaacattcttcaaaa

SEQ ID NO: 81211 - DNA, 76 bp, Homo sapiens
attagcctgtctgaatgcaatgcttcacactaacactcgaataggggatggaacattcttcaaaatccctggaaag

SEQ ID NO: 81212 - DNA, 78 bp, Homo sapiens
tctgaatgcaatgcttcacactaacactcgaataggggatggaacattcttcaaaatccctggaaagtcaggcctcta

SEQ ID NO: 81213 - DNA, 75 bp, Homo sapiens
cttcacactaacactcgaataggggatggaacattcttcaaaatccctggaaagtcaggcctctatgctctcaaa

SEQ ID NO: 81214 - DNA, 73 bp, Homo sapiens
actaacactcgaataggggatggaacattcttcaaaatccctggaaagtcaggcctctatgctctcaaagtaa

SEQ ID NO: 81215 - DNA, 74 bp, Homo sapiens
aataggggatggaacattcttcaaaatccctggaaagtcaggcctctatgctctcaaagtaagttgcattgttc

SEQ ID NO: 81216 - DNA, 77 bp, Homo sapiens
aacattcttcaaaatccctggaaagtcaggcctctatgctctcaaagtaagttgcattgttctgcatattgttatta

SEQ ID NO: 81217 - DNA, 77 bp, Homo sapiens
cttcaaaatccctggaaagtcaggcctctatgctctcaaagtaagttgcattgttctgcatattgttattactatta

SEQ ID NO: 81218 - DNA, 82 bp, Homo sapiens
tagttgctaatacatcttctccataaatcatcacttttcaaaataatacagaaagaggagtcgtcatgcccagcagatggca

SEQ ID NO: 81219 - DNA, 79 bp, Homo sapiens
tcttctccataaatcatcacttttcaaaataatacagaaagaggagtcgtcatgcccagcagatggcacgttggattta

SEQ ID NO: 81220 - DNA, 79 bp, Homo sapiens
taaatcatcacttttcaaaataatacagaaagaggagtcgtcatgcccagcagatggcacgttggatttagtctgtgaa

SEQ ID NO: 81221 - DNA, 79 bp, Homo sapiens
ttttcaaaataatacagaaagaggagtcgtcatgcccagcagatggcacgttggatttagtctgtgaatctgaattgga

SEQ ID NO: 81222 - DNA, 82 bp, Homo sapiens
ataatacagaaagaggagtcgtcatgcccagcagatggcacgttggatttagtctgtgaatctgaattggatggtacagata

SEQ ID NO: 81223 - DNA, 81 bp, Homo sapiens
aaagaggagtcgtcatgcccagcagatggcacgttggatttagtctgtgaatctgaattggatggtacagatatggccgag

SEQ ID NO: 81224 - DNA, 84 bp, Homo sapiens
atgcccagcagatggcacgttggatttagtctgtgaatctgaattggatggtacagatatggccgaggcaaatgcccatggaga

SEQ ID NO: 81225 - DNA, 80 bp, Homo sapiens
agatggcacgttggatttagtctgtgaatctgaattggatggtacagatatggccgaggcaaatgcccatggagaagaaa

SEQ ID NO: 81226 - DNA, 78 bp, Homo sapiens
acgttggatttagtctgtgaatctgaattggatggtacagatatggccgaggcaaatgcccatggagaagaaaatgga

SEQ ID NO: 81227 - DNA, 81 bp, Homo sapiens
tctgtgaatctgaattggatggtacagatatggccgaggcaaatgcccatggagaagaaaatggaggtaagtgtgatgaat

SEQ ID NO: 81228 - DNA, 78 bp, Homo sapiens
tgaattggatggtacagatatggccgaggcaaatgcccatggagaagaaaatggaggtaagtgtgatgaattccaaaa

SEQ ID NO: 81229 - DNA, 77 bp, Homo sapiens
atggtacagatatggccgaggcaaatgcccatggagaagaaaatggaggtaagtgtgatgaattccaaaatataatc

SEQ ID NO: 81230 - DNA, 74 bp, Homo sapiens
atatggccgaggcaaatgcccatggagaagaaaatggaggtaagtgtgatgaattccaaaatataatcccttgt

SEQ ID NO: 81231 - DNA, 75 bp, Homo sapiens
aaaaggaattcaaattagtaatatcattatctctctctgtttctagtttgttcgaagcaggtaactgatgaagca

SEQ ID NO: 81232 - DNA, 77 bp, Homo sapiens
aattcaaattagtaatatcattatctctctctgtttctagtttgttcgaagcaggtaactgatgaagcatcttccac

SEQ ID NO: 81233 - DNA, 80 bp, Homo sapiens
atatcattatctctctctgtttctagtttgttcgaagcaggtaactgatgaagcatcttccactcgagattcaagcctta

SEQ ID NO: 81234 - DNA, 78 bp, Homo sapiens
ctctctctgtttctagtttgttcgaagcaggtaactgatgaagcatcttccactcgagattcaagccttactaacaca

SEQ ID NO: 81235 - DNA, 79 bp, Homo sapiens
tttctagtttgttcgaagcaggtaactgatgaagcatcttccactcgagattcaagccttactaacacagcagtgcaaa

SEQ ID NO: 81236 - DNA, 80 bp, Homo sapiens
tttgttcgaagcaggtaactgatgaagcatcttccactcgagattcaagccttactaacacagcagtgcaaagcaagtta

SEQ ID NO: 81237 - DNA, 78 bp, Homo sapiens
aggtaactgatgaagcatcttccactcgagattcaagccttactaacacagcagtgcaaagcaagttagtgtcttcct

SEQ ID NO: 81238 - DNA, 82 bp, Homo sapiens
atgaagcatcttccactcgagattcaagccttactaacacagcagtgcaaagcaagttagtgtcttccttccagcagcacac

SEQ ID NO: 81239 - DNA, 79 bp, Homo sapiens
tcttccactcgagattcaagccttactaacacagcagtgcaaagcaagttagtgtcttccttccagcagcacaccaaaa

SEQ ID NO: 81240 - DNA, 76 bp, Homo sapiens
attcaagccttactaacacagcagtgcaaagcaagttagtgtcttccttccagcagcacaccaaaaaggctcttaa

SEQ ID NO: 81241 - DNA, 75 bp, Homo sapiens
ttactaacacagcagtgcaaagcaagttagtgtcttccttccagcagcacaccaaaaaggctcttaaacaggtaa

SEQ ID NO: 81242 - DNA, 75 bp, Homo sapiens
agtgcaaagcaagttagtgtcttccttccagcagcacaccaaaaaggctcttaaacaggtaagatagctgccatt

SEQ ID NO: 81243 - DNA, 72 bp, Homo sapiens
aagttagtgtcttccttccagcagcacaccaaaaaggctcttaaacaggtaagatagctgccatttattctt

SEQ ID NO: 81244 - DNA, 73 bp, Homo sapiens
agtgtcttccttccagcagcacaccaaaaaggctcttaaacaggtaagatagctgccatttattctttgtcct

SEQ ID NO: 81245 - DNA, 73 bp, Homo sapiens
attttggctatatttttatgttatatctttttattatgttttgtaggctttgaggcagcagcagaaaagaaga

SEQ ID NO: 81246 - DNA, 75 bp, Homo sapiens
tatttttatgttatatctttttattatgttttgtaggctttgaggcagcagcagaaaagaagaaatggagtctca

SEQ ID NO: 81247 - DNA, 76 bp, Homo sapiens
gttatatctttttattatgttttgtaggctttgaggcagcagcagaaaagaagaaatggagtctcaatgatggtaa

SEQ ID NO: 81248 - DNA, 76 bp, Homo sapiens
tttattatgttttgtaggctttgaggcagcagcagaaaagaagaaatggagtctcaatgatggtaaacaagactgt

SEQ ID NO: 81249 - DNA, 76 bp, Homo sapiens
ttttgtaggctttgaggcagcagcagaaaagaagaaatggagtctcaatgatggtaaacaagactgttcctcgtgt

SEQ ID NO: 81250 - DNA, 77 bp, Homo sapiens
tttgaggcagcagcagaaaagaagaaatggagtctcaatgatggtaaacaagactgttcctcgtgttgttttgacac

SEQ ID NO: 81251 - DNA, 73 bp, Homo sapiens
agcagaaaagaagaaatggagtctcaatgatggtaaacaagactgttcctcgtgttgttttgacaccattaaa

SEQ ID NO: 81252 - DNA, 75 bp, Homo sapiens
aagaaatggagtctcaatgatggtaaacaagactgttcctcgtgttgttttgacaccattaaaggtgtctgatga

SEQ ID NO: 81253 - DNA, 76 bp, Homo sapiens
agtctcaatgatggtaaacaagactgttcctcgtgttgttttgacaccattaaaggtgtctgatgagcagtcggat

SEQ ID NO: 81254 - DNA, 75 bp, Homo sapiens
atggtaaacaagactgttcctcgtgttgttttgacaccattaaaggtgtctgatgagcagtcggattcgccttca

SEQ ID NO: 81255 - DNA, 74 bp, Homo sapiens
acaagactgttcctcgtgttgttttgacaccattaaaggtgtctgatgagcagtcggattcgccttcaggtaaa

SEQ ID NO: 81256 - DNA, 78 bp, Homo sapiens
ctcgtgttgttttgacaccattaaaggtgtctgatgagcagtcggattcgccttcaggtaaagagctgaaatatcata

SEQ ID NO: 81257 - DNA, 80 bp, Homo sapiens
ttgacaccattaaaggtgtctgatgagcagtcggattcgccttcaggtaaagagctgaaatatcatatgcttggccagtt

SEQ ID NO: 81258 - DNA, 76 bp, Homo sapiens
ggacagctagagaagataatgacataataactatttccttttttaggatctgaatctaaaaatggtgaagcagaca

SEQ ID NO: 81259 - DNA, 76 bp, Homo sapiens
gctagagaagataatgacataataactatttccttttttaggatctgaatctaaaaatggtgaagcagacagttca

SEQ ID NO: 81260 - DNA, 74 bp, Homo sapiens
gacataataactatttccttttttaggatctgaatctaaaaatggtgaagcagacagttcagataaagaaatga

SEQ ID NO: 81261 - DNA, 74 bp, Homo sapiens
ctatttccttttttaggatctgaatctaaaaatggtgaagcagacagttcagataaagaaatgaaacatgggca

SEQ ID NO: 81262 - DNA, 75 bp, Homo sapiens
ttttaggatctgaatctaaaaatggtgaagcagacagttcagataaagaaatgaaacatgggcaaaaatctccca

SEQ ID NO: 81263 - DNA, 75 bp, Homo sapiens
tgaatctaaaaatggtgaagcagacagttcagataaagaaatgaaacatgggcaaaaatctcccactggaaaaca

SEQ ID NO: 81264 - DNA, 73 bp, Homo sapiens
taaaaatggtgaagcagacagttcagataaagaaatgaaacatgggcaaaaatctcccactggaaaacaaaca

SEQ ID NO: 81265 - DNA, 73 bp, Homo sapiens
cagacagttcagataaagaaatgaaacatgggcaaaaatctcccactggaaaacaaacaagtcagcacttaaa

SEQ ID NO: 81266 - DNA, 71 bp, Homo sapiens
cagataaagaaatgaaacatgggcaaaaatctcccactggaaaacaaacaagtcagcacttaaaacgatta

SEQ ID NO: 81267 - DNA, 68 bp, Homo sapiens
agaaatgaaacatgggcaaaaatctcccactggaaaacaaacaagtcagcacttaaaacgattaaaaa

SEQ ID NO: 81268 - DNA, 67 bp, Homo sapiens
catgggcaaaaatctcccactggaaaacaaacaagtcagcacttaaaacgattaaaaaagtctggtt

SEQ ID NO: 81269 - DNA, 67 bp, Homo sapiens
tctcccactggaaaacaaacaagtcagcacttaaaacgattaaaaaagtctggtttaggtgagtgtt

SEQ ID NO: 81270 - DNA, 68 bp, Homo sapiens
aaacaaacaagtcagcacttaaaacgattaaaaaagtctggtttaggtgagtgtttaatagactatgc

SEQ ID NO: 81271 - DNA, 71 bp, Homo sapiens
acaagtcagcacttaaaacgattaaaaaagtctggtttaggtgagtgtttaatagactatgccatttcaca

SEQ ID NO: 81272 - DNA, 76 bp, Homo sapiens
acgtttccctctacctgtagtaaattcatgcctcttgcttgttcatcacagggcacttgaaatggaccaaagctga

SEQ ID NO: 81273 - DNA, 81 bp, Homo sapiens
tacctgtagtaaattcatgcctcttgcttgttcatcacagggcacttgaaatggaccaaagctgaggacattgacatagaa

SEQ ID NO: 81274 - DNA, 79 bp, Homo sapiens
taaattcatgcctcttgcttgttcatcacagggcacttgaaatggaccaaagctgaggacattgacatagaaaccccag

SEQ ID NO: 81275 - DNA, 80 bp, Homo sapiens
ttgcttgttcatcacagggcacttgaaatggaccaaagctgaggacattgacatagaaaccccaggatctattcttgtca

SEQ ID NO: 81276 - DNA, 77 bp, Homo sapiens
atcacagggcacttgaaatggaccaaagctgaggacattgacatagaaaccccaggatctattcttgtcaacactaa

SEQ ID NO: 81277 - DNA, 74 bp, Homo sapiens
accaaagctgaggacattgacatagaaaccccaggatctattcttgtcaacactaacttgagggcattaataaa

SEQ ID NO: 81278 - DNA, 75 bp, Homo sapiens
agctgaggacattgacatagaaaccccaggatctattcttgtcaacactaacttgagggcattaataaataaaca

SEQ ID NO: 81279 - DNA, 71 bp, Homo sapiens
acatagaaaccccaggatctattcttgtcaacactaacttgagggcattaataaataaacatacgtttgct

SEQ ID NO: 81280 - DNA, 72 bp, Homo sapiens
cccaggatctattcttgtcaacactaacttgagggcattaataaataaacatacgtttgcttccttacctca

SEQ ID NO: 81281 - DNA, 73 bp, Homo sapiens
ttcttgtcaacactaacttgagggcattaataaataaacatacgtttgcttccttacctcagcattttcaaca

SEQ ID NO: 81282 - DNA, 71 bp, Homo sapiens
caacactaacttgagggcattaataaataaacatacgtttgcttccttacctcagcattttcaacaatacc

SEQ ID NO: 81283 - DNA, 71 bp, Homo sapiens
acttgagggcattaataaataaacatacgtttgcttccttacctcagcattttcaacaatacctcctgctt

SEQ ID NO: 81284 - DNA, 72 bp, Homo sapiens
ttaataaataaacatacgtttgcttccttacctcagcattttcaacaatacctcctgcttttgctcccagaa

SEQ ID NO: 81285 - DNA, 74 bp, Homo sapiens
aaacatacgtttgcttccttacctcagcattttcaacaatacctcctgcttttgctcccagaagtggataggca

SEQ ID NO: 81286 - DNA, 73 bp, Homo sapiens
ttccttacctcagcattttcaacaatacctcctgcttttgctcccagaagtggataggcaggtaagtagaagt

SEQ ID NO: 81287 - DNA, 72 bp, Homo sapiens
agcattttcaacaatacctcctgcttttgctcccagaagtggataggcaggtaagtagaagttttagacatt

SEQ ID NO: 81288 - DNA, 73 bp, Homo sapiens
tttcaacaatacctcctgcttttgctcccagaagtggataggcaggtaagtagaagttttagacatttgatac

SEQ ID NO: 81289 - DNA, 73 bp, Homo sapiens
ttccttattttgaagcacgttaaagtgttctgatcttatagtatactttctctgccccagtccaggaatgaac

SEQ ID NO: 81290 - DNA, 72 bp, Homo sapiens
tttgaagcacgttaaagtgttctgatcttatagtatactttctctgccccagtccaggaatgaaccctttct

SEQ ID NO: 81291 - DNA, 74 bp, Homo sapiens
ttaaagtgttctgatcttatagtatactttctctgccccagtccaggaatgaaccctttcttcaagaagccatg

SEQ ID NO: 81292 - DNA, 72 bp, Homo sapiens
atcttatagtatactttctctgccccagtccaggaatgaaccctttcttcaagaagccatggttcccattag

SEQ ID NO: 81293 - DNA, 73 bp, Homo sapiens
tagtatactttctctgccccagtccaggaatgaaccctttcttcaagaagccatggttcccattagtggagga

SEQ ID NO: 81294 - DNA, 77 bp, Homo sapiens
tctgccccagtccaggaatgaaccctttcttcaagaagccatggttcccattagtggaggatgtcatgaaatcaaga

SEQ ID NO: 81295 - DNA, 76 bp, Homo sapiens
aggaatgaaccctttcttcaagaagccatggttcccattagtggaggatgtcatgaaatcaagatgtcatgaaagg

SEQ ID NO: 81296 - DNA, 77 bp, Homo sapiens
cctttcttcaagaagccatggttcccattagtggaggatgtcatgaaatcaagatgtcatgaaaggtgtgctctttt

SEQ ID NO: 81297 - DNA, 77 bp, Homo sapiens
cttcaagaagccatggttcccattagtggaggatgtcatgaaatcaagatgtcatgaaaggtgtgctctttttttct

SEQ ID NO: 81298 - DNA, 78 bp, Homo sapiens
gttcccattagtggaggatgtcatgaaatcaagatgtcatgaaaggtgtgctctttttttcttaggatgttgctgtta

SEQ ID NO: 81299 - DNA, 80 bp, Homo sapiens
tagtggaggatgtcatgaaatcaagatgtcatgaaaggtgtgctctttttttcttaggatgttgctgttactagatctaa

SEQ ID NO: 81300 - DNA, 70 bp, Homo sapiens
tttgacttattcctgatggaaccttgtttttgtcggcttattttcctagatgggaagtgatggaatttta

SEQ ID NO: 81301 - DNA, 71 bp, Homo sapiens
ttattcctgatggaaccttgtttttgtcggcttattttcctagatgggaagtgatggaattttacgcctca

SEQ ID NO: 81302 - DNA, 71 bp, Homo sapiens
ccttgtttttgtcggcttattttcctagatgggaagtgatggaattttacgcctcagtacttcagctctaa

SEQ ID NO: 81303 - DNA, 73 bp, Homo sapiens
tttttgtcggcttattttcctagatgggaagtgatggaattttacgcctcagtacttcagctctaaataatga

SEQ ID NO: 81304 - DNA, 75 bp, Homo sapiens
cttattttcctagatgggaagtgatggaattttacgcctcagtacttcagctctaaataatgaattctttgcata

SEQ ID NO: 81305 - DNA, 79 bp, Homo sapiens
tgggaagtgatggaattttacgcctcagtacttcagctctaaataatgaattctttgcatatgcagcacaagggtggaa

SEQ ID NO: 81306 - DNA, 78 bp, Homo sapiens
atggaattttacgcctcagtacttcagctctaaataatgaattctttgcatatgcagcacaagggtggaaacagcgac

SEQ ID NO: 81307 - DNA, 80 bp, Homo sapiens
tttacgcctcagtacttcagctctaaataatgaattctttgcatatgcagcacaagggtggaaacagcgactggcagaag

SEQ ID NO: 81308 - DNA, 78 bp, Homo sapiens
ttcagctctaaataatgaattctttgcatatgcagcacaagggtggaaacagcgactggcagaaggtaaatttgtatt

SEQ ID NO: 81309 - DNA, 76 bp, Homo sapiens
taaataatgaattctttgcatatgcagcacaagggtggaaacagcgactggcagaaggtaaatttgtattttctat

SEQ ID NO: 81310 - DNA, 77 bp, Homo sapiens
aattctttgcatatgcagcacaagggtggaaacagcgactggcagaaggtaaatttgtattttctattattatgtga

SEQ ID NO: 81311 - DNA, 78 bp, Homo sapiens
tatgcagcacaagggtggaaacagcgactggcagaaggtaaatttgtattttctattattatgtgacatattggagta

SEQ ID NO: 81312 - DNA, 73 bp, Homo sapiens
gcaaaagatgtgaccacatttattcaatacattagcattttctttttaggagagtttaccccagaaatgcagt

SEQ ID NO: 81313 - DNA, 71 bp, Homo sapiens
accacatttattcaatacattagcattttctttttaggagagtttaccccagaaatgcagttgcggataag

SEQ ID NO: 81314 - DNA, 71 bp, Homo sapiens
attcaatacattagcattttctttttaggagagtttaccccagaaatgcagttgcggataaggcaagaaat

SEQ ID NO: 81315 - DNA, 70 bp, Homo sapiens
agcattttctttttaggagagtttaccccagaaatgcagttgcggataaggcaagaaattgagaaggaaa

SEQ ID NO: 81316 - DNA, 69 bp, Homo sapiens
tttctttttaggagagtttaccccagaaatgcagttgcggataaggcaagaaattgagaaggaaaagaa

SEQ ID NO: 81317 - DNA, 69 bp, Homo sapiens
agagtttaccccagaaatgcagttgcggataaggcaagaaattgagaaggaaaagaaaacagaaccttg

SEQ ID NO: 81318 - DNA, 69 bp, Homo sapiens
cagaaatgcagttgcggataaggcaagaaattgagaaggaaaagaaaacagaaccttggaaagaaaaat

SEQ ID NO: 81319 - DNA, 69 bp, Homo sapiens
gcagttgcggataaggcaagaaattgagaaggaaaagaaaacagaaccttggaaagaaaaattctttga

SEQ ID NO: 81320 - DNA, 66 bp, Homo sapiens
ggcaagaaattgagaaggaaaagaaaacagaaccttggaaagaaaaattctttgagaggttttatg

SEQ ID NO: 81321 - DNA, 65 bp, Homo sapiens
gagaaggaaaagaaaacagaaccttggaaagaaaaattctttgagaggttttatggagaaaagta

SEQ ID NO: 81322 - DNA, 65 bp, Homo sapiens
agaaaacagaaccttggaaagaaaaattctttgagaggttttatggagaaaagtaagtactagag

SEQ ID NO: 81323 - DNA, 65 bp, Homo sapiens
cagaaccttggaaagaaaaattctttgagaggttttatggagaaaagtaagtactagagtatttt

SEQ ID NO: 81324 - DNA, 66 bp, Homo sapiens
ggaaagaaaaattctttgagaggttttatggagaaaagtaagtactagagtattttttctcatttc

SEQ ID NO: 81325 - DNA, 77 bp, Homo sapiens
tttatgttttgtggttgagcaataatttatttctaatttctgtacaggctgggcatgtcaagagaggaatctgtgaa

SEQ ID NO: 81326 - DNA, 79 bp, Homo sapiens
ttttgtggttgagcaataatttatttctaatttctgtacaggctgggcatgtcaagagaggaatctgtgaagctcacta

SEQ ID NO: 81327 - DNA, 77 bp, Homo sapiens
ataatttatttctaatttctgtacaggctgggcatgtcaagagaggaatctgtgaagctcactactggaccaaacaa

SEQ ID NO: 81328 - DNA, 81 bp, Homo sapiens
tctaatttctgtacaggctgggcatgtcaagagaggaatctgtgaagctcactactggaccaaacaacgctggagctcaaa

SEQ ID NO: 81329 - DNA, 79 bp, Homo sapiens
gtacaggctgggcatgtcaagagaggaatctgtgaagctcactactggaccaaacaacgctggagctcaaagtagttct

SEQ ID NO: 81330 - DNA, 81 bp, Homo sapiens
tgggcatgtcaagagaggaatctgtgaagctcactactggaccaaacaacgctggagctcaaagtagttcttcatgtggga

SEQ ID NO: 81331 - DNA, 77 bp, Homo sapiens
aagagaggaatctgtgaagctcactactggaccaaacaacgctggagctcaaagtagttcttcatgtgggacttctg

SEQ ID NO: 81332 - DNA, 77 bp, Homo sapiens
aatctgtgaagctcactactggaccaaacaacgctggagctcaaagtagttcttcatgtgggacttctggccttcca

SEQ ID NO: 81333 - DNA, 77 bp, Homo sapiens
agctcactactggaccaaacaacgctggagctcaaagtagttcttcatgtgggacttctggccttccagtttctgca

SEQ ID NO: 81334 - DNA, 76 bp, Homo sapiens
accaaacaacgctggagctcaaagtagttcttcatgtgggacttctggccttccagtttctgcacagacagccttg

SEQ ID NO: 81335 - DNA, 78 bp, Homo sapiens
aacgctggagctcaaagtagttcttcatgtgggacttctggccttccagtttctgcacagacagccttggcagaacaa

SEQ ID NO: 81336 - DNA, 75 bp, Homo sapiens
aaagtagttcttcatgtgggacttctggccttccagtttctgcacagacagccttggcagaacaacagccaaaaa

SEQ ID NO: 81337 - DNA, 79 bp, Homo sapiens
ttcttcatgtgggacttctggccttccagtttctgcacagacagccttggcagaacaacagccaaaaagcatgaaaagc

SEQ ID NO: 81338 - DNA, 78 bp, Homo sapiens
acttctggccttccagtttctgcacagacagccttggcagaacaacagccaaaaagcatgaaaagcccagcttctcca

SEQ ID NO: 81339 - DNA, 77 bp, Homo sapiens
cttggcagaacaacagccaaaaagcatgaaaagcccagcttctccagagcctggtttctgtgctactctttgcccta

SEQ ID NO: 81340 - DNA, 76 bp, Homo sapiens
caacagccaaaaagcatgaaaagcccagcttctccagagcctggtttctgtgctactctttgccctatggtagaaa

SEQ ID NO: 81341 - DNA, 74 bp, Homo sapiens
aaaaagcatgaaaagcccagcttctccagagcctggtttctgtgctactctttgccctatggtagaaattccac

SEQ ID NO: 81342 - DNA, 74 bp, Homo sapiens
aagcccagcttctccagagcctggtttctgtgctactctttgccctatggtagaaattccacctaaagatataa

SEQ ID NO: 81343 - DNA, 76 bp, Homo sapiens
ttctccagagcctggtttctgtgctactctttgccctatggtagaaattccacctaaagatataatggcagaattg

SEQ ID NO: 81344 - DNA, 76 bp, Homo sapiens
ctggtttctgtgctactctttgccctatggtagaaattccacctaaagatataatggcagaattggagtcagagga

SEQ ID NO: 81345 - DNA, 79 bp, Homo sapiens
ttctgtgctactctttgccctatggtagaaattccacctaaagatataatggcagaattggagtcagaggatatcttga

SEQ ID NO: 81346 - DNA, 77 bp, Homo sapiens
tttgccctatggtagaaattccacctaaagatataatggcagaattggagtcagaggatatcttgatccctgaagaa

SEQ ID NO: 81347 - DNA, 78 bp, Homo sapiens
attccacctaaagatataatggcagaattggagtcagaggatatcttgatccctgaagaatctgtaattcaggaggaa

SEQ ID NO: 81348 - DNA, 80 bp, Homo sapiens
aagatataatggcagaattggagtcagaggatatcttgatccctgaagaatctgtaattcaggaggaaattgcagaagag

SEQ ID NO: 81349 - DNA, 78 bp, Homo sapiens
aattggagtcagaggatatcttgatccctgaagaatctgtaattcaggaggaaattgcagaagaggtagagactagta

SEQ ID NO: 81350 - DNA, 80 bp, Homo sapiens
agtcagaggatatcttgatccctgaagaatctgtaattcaggaggaaattgcagaagaggtagagactagtatctgtgaa

SEQ ID NO: 81351 - DNA, 80 bp, Homo sapiens
ttgatccctgaagaatctgtaattcaggaggaaattgcagaagaggtagagactagtatctgtgaatgccaggatgaaaa

SEQ ID NO: 81352 - DNA, 80 bp, Homo sapiens
aagaatctgtaattcaggaggaaattgcagaagaggtagagactagtatctgtgaatgccaggatgaaaatcataagaca

SEQ ID NO: 81353 - DNA, 80 bp, Homo sapiens
taattcaggaggaaattgcagaagaggtagagactagtatctgtgaatgccaggatgaaaatcataagacaatacctgaa

SEQ ID NO: 81354 - DNA, 79 bp, Homo sapiens
aggaaattgcagaagaggtagagactagtatctgtgaatgccaggatgaaaatcataagacaatacctgaattttctga

SEQ ID NO: 81355 - DNA, 79 bp, Homo sapiens
gtagagactagtatctgtgaatgccaggatgaaaatcataagacaatacctgaattttctgaggaggctgaaagtctaa

SEQ ID NO: 81356 - DNA, 81 bp, Homo sapiens
tatctgtgaatgccaggatgaaaatcataagacaatacctgaattttctgaggaggctgaaagtctaaccaattctcatga

SEQ ID NO: 81357 - DNA, 74 bp, Homo sapiens
aggatgaaaatcataagacaatacctgaattttctgaggaggctgaaagtctaaccaattctcatgaagaaccc

SEQ ID NO: 81358 - DNA, 73 bp, Homo sapiens
aaatcataagacaatacctgaattttctgaggaggctgaaagtctaaccaattctcatgaagaaccccaaata

SEQ ID NO: 81359 - DNA, 73 bp, Homo sapiens
aatacctgaattttctgaggaggctgaaagtctaaccaattctcatgaagaaccccaaatagcacctcctgaa

SEQ ID NO: 81360 - DNA, 74 bp, Homo sapiens
ggctgaaagtctaaccaattctcatgaagaaccccaaatagcacctcctgaagataacttggaatcctgtgtta

SEQ ID NO: 81361 - DNA, 75 bp, Homo sapiens
aagtctaaccaattctcatgaagaaccccaaatagcacctcctgaagataacttggaatcctgtgttatgatgaa

SEQ ID NO: 81362 - DNA, 77 bp, Homo sapiens
aattctcatgaagaaccccaaatagcacctcctgaagataacttggaatcctgtgttatgatgaatgatgttttaga

SEQ ID NO: 81363 - DNA, 72 bp, Homo sapiens
aagaaccccaaatagcacctcctgaagataacttggaatcctgtgttatgatgaatgatgttttagaaactt

SEQ ID NO: 81364 - DNA, 77 bp, Homo sapiens
aaatagcacctcctgaagataacttggaatcctgtgttatgatgaatgatgttttagaaactttgcctcatattgaa

SEQ ID NO: 81365 - DNA, 76 bp, Homo sapiens
cctgtgttatgatgaatgatgttttagaaactttgcctcatattgaagttaagatagaagggaagtcagaatcacc

SEQ ID NO: 81366 - DNA, 72 bp, Homo sapiens
atgatgttttagaaactttgcctcatattgaagttaagatagaagggaagtcagaatcaccccaggaagaaa

SEQ ID NO: 81367 - DNA, 72 bp, Homo sapiens
gttttagaaactttgcctcatattgaagttaagatagaagggaagtcagaatcaccccaggaagaaatgaca

SEQ ID NO: 81368 - DNA, 74 bp, Homo sapiens
tattgaagttaagatagaagggaagtcagaatcaccccaggaagaaatgacagttgttatcgatcagttagaag

SEQ ID NO: 81369 - DNA, 76 bp, Homo sapiens
tagaagggaagtcagaatcaccccaggaagaaatgacagttgttatcgatcagttagaagtctgtgactctcttat

SEQ ID NO: 81370 - DNA, 76 bp, Homo sapiens
aagtcagaatcaccccaggaagaaatgacagttgttatcgatcagttagaagtctgtgactctcttattccttcca

SEQ ID NO: 81371 - DNA, 79 bp, Homo sapiens
cccaggaagaaatgacagttgttatcgatcagttagaagtctgtgactctcttattccttccacttcatctatgactca

SEQ ID NO: 81372 - DNA, 81 bp, Homo sapiens
agttagaagtctgtgactctcttattccttccacttcatctatgactcatgtcagtgacacagaacataaggagtcagaaa

SEQ ID NO: 81373 - DNA, 83 bp, Homo sapiens
aagtctgtgactctcttattccttccacttcatctatgactcatgtcagtgacacagaacataaggagtcagaaactgcagta

SEQ ID NO: 81374 - DNA, 82 bp, Homo sapiens
tcttattccttccacttcatctatgactcatgtcagtgacacagaacataaggagtcagaaactgcagtagagaccagtacc

SEQ ID NO: 81375 - DNA, 81 bp, Homo sapiens
tccacttcatctatgactcatgtcagtgacacagaacataaggagtcagaaactgcagtagagaccagtacccccaaaata

SEQ ID NO: 81376 - DNA, 77 bp, Homo sapiens
atctatgactcatgtcagtgacacagaacataaggagtcagaaactgcagtagagaccagtacccccaaaataaaaa

SEQ ID NO: 81377 - DNA, 74 bp, Homo sapiens
atgtcagtgacacagaacataaggagtcagaaactgcagtagagaccagtacccccaaaataaaaacagggtca

SEQ ID NO: 81378 - DNA, 72 bp, Homo sapiens
acagaacataaggagtcagaaactgcagtagagaccagtacccccaaaataaaaacagggtcatcttctcta

SEQ ID NO: 81379 - DNA, 71 bp, Homo sapiens
ataaggagtcagaaactgcagtagagaccagtacccccaaaataaaaacagggtcatcttctctagaaggc

SEQ ID NO: 81380 - DNA, 72 bp, Homo sapiens
ccccaaaataaaaacagggtcatcttctctagaaggccagtttccaaatgaaggaattgctatagatatgga

SEQ ID NO: 81381 - DNA, 75 bp, Homo sapiens
aaataaaaacagggtcatcttctctagaaggccagtttccaaatgaaggaattgctatagatatggagctacaga

SEQ ID NO: 81382 - DNA, 80 bp, Homo sapiens
tcatcttctctagaaggccagtttccaaatgaaggaattgctatagatatggagctacagagtgaccctgaagaacagct

SEQ ID NO: 81383 - DNA, 80 bp, Homo sapiens
agtttccaaatgaaggaattgctatagatatggagctacagagtgaccctgaagaacagctttcagaaaatgcctgcatc

SEQ ID NO: 81384 - DNA, 81 bp, Homo sapiens
aaatgaaggaattgctatagatatggagctacagagtgaccctgaagaacagctttcagaaaatgcctgcatctctgaaac

SEQ ID NO: 81385 - DNA, 80 bp, Homo sapiens
attgctatagatatggagctacagagtgaccctgaagaacagctttcagaaaatgcctgcatctctgaaacgtccttttc

SEQ ID NO: 81386 - DNA, 77 bp, Homo sapiens
acagagtgaccctgaagaacagctttcagaaaatgcctgcatctctgaaacgtccttttcttctgagagcccagagg

SEQ ID NO: 81387 - DNA, 77 bp, Homo sapiens
aagaacagctttcagaaaatgcctgcatctctgaaacgtccttttcttctgagagcccagagggagcctgtaccagc

SEQ ID NO: 81388 - DNA, 78 bp, Homo sapiens
tttcagaaaatgcctgcatctctgaaacgtccttttcttctgagagcccagagggagcctgtaccagcctgccttctc

SEQ ID NO: 81389 - DNA, 77 bp, Homo sapiens
aaatgcctgcatctctgaaacgtccttttcttctgagagcccagagggagcctgtaccagcctgccttctccaggag

SEQ ID NO: 81390 - DNA, 77 bp, Homo sapiens
ttttcttctgagagcccagagggagcctgtaccagcctgccttctccaggaggggaaacacagtccacatcagaaga

SEQ ID NO: 81391 - DNA, 80 bp, Homo sapiens
ttctgagagcccagagggagcctgtaccagcctgccttctccaggaggggaaacacagtccacatcagaagaatcatgta

SEQ ID NO: 81392 - DNA, 78 bp, Homo sapiens
agagggagcctgtaccagcctgccttctccaggaggggaaacacagtccacatcagaagaatcatgtactccagcctc

SEQ ID NO: 81393 - DNA, 79 bp, Homo sapiens
taccagcctgccttctccaggaggggaaacacagtccacatcagaagaatcatgtactccagcctcccttgagacaaca

SEQ ID NO: 81394 - DNA, 76 bp, Homo sapiens
cttctccaggaggggaaacacagtccacatcagaagaatcatgtactccagcctcccttgagacaacattttgttc

SEQ ID NO: 81395 - DNA, 77 bp, Homo sapiens
aggggaaacacagtccacatcagaagaatcatgtactccagcctcccttgagacaacattttgttctgaggtatcta

SEQ ID NO: 81396 - DNA, 79 bp, Homo sapiens
atcagaagaatcatgtactccagcctcccttgagacaacattttgttctgaggtatctagcactgaaaatacagacaaa

SEQ ID NO: 81397 - DNA, 77 bp, Homo sapiens
aatcatgtactccagcctcccttgagacaacattttgttctgaggtatctagcactgaaaatacagacaaatacaac

SEQ ID NO: 81398 - DNA, 76 bp, Homo sapiens
cattttgttctgaggtatctagcactgaaaatacagacaaatacaaccagagaaattccactgatgaaaactttca

SEQ ID NO: 81399 - DNA, 80 bp, Homo sapiens
ctgaaaatacagacaaatacaaccagagaaattccactgatgaaaactttcatgcatctttgatgtcagaaatatctcca

SEQ ID NO: 81400 - DNA, 81 bp, Homo sapiens
agaaattccactgatgaaaactttcatgcatctttgatgtcagaaatatctccaatatccacttcacctgaaatatcagaa

SEQ ID NO: 81401 - DNA, 84 bp, Homo sapiens
tgaaaactttcatgcatctttgatgtcagaaatatctccaatatccacttcacctgaaatatcagaagcatctcttatgtccaa

SEQ ID NO: 81402 - DNA, 80 bp, Homo sapiens
atctttgatgtcagaaatatctccaatatccacttcacctgaaatatcagaagcatctcttatgtccaacttaccattaa

SEQ ID NO: 81403 - DNA, 81 bp, Homo sapiens
aaatatctccaatatccacttcacctgaaatatcagaagcatctcttatgtccaacttaccattaacatctgaagcatcac

SEQ ID NO: 81404 - DNA, 81 bp, Homo sapiens
aatatccacttcacctgaaatatcagaagcatctcttatgtccaacttaccattaacatctgaagcatcaccagtatccaa

SEQ ID NO: 81405 - DNA, 79 bp, Homo sapiens
tcacctgaaatatcagaagcatctcttatgtccaacttaccattaacatctgaagcatcaccagtatccaacttacctt

SEQ ID NO: 81406 - DNA, 77 bp, Homo sapiens
aaatatcagaagcatctcttatgtccaacttaccattaacatctgaagcatcaccagtatccaacttacctttaaca

SEQ ID NO: 81407 - DNA, 76 bp, Homo sapiens
atctcttatgtccaacttaccattaacatctgaagcatcaccagtatccaacttacctttaacatcagaaacctca

SEQ ID NO: 81408 - DNA, 76 bp, Homo sapiens
tatgtccaacttaccattaacatctgaagcatcaccagtatccaacttacctttaacatcagaaacctcaccgatg

SEQ ID NO: 81409 - DNA, 76 bp, Homo sapiens
atctgaagcatcaccagtatccaacttacctttaacatcagaaacctcaccgatgtctgacttacctttaacatca

SEQ ID NO: 81410 - DNA, 70 bp, Homo sapiens
accagtatccaacttacctttaacatcagaaacctcaccgatgtctgacttacctttaacatcagaaact

SEQ ID NO: 81411 - DNA, 77 bp, Homo sapiens
agaaacctcaccgatgtctgacttacctttaacatcagaaacttcttcagtgtcttccatgcttctcacctctgaga

SEQ ID NO: 81412 - DNA, 77 bp, Homo sapiens
atgtctgacttacctttaacatcagaaacttcttcagtgtcttccatgcttctcacctctgagaccacttttgtatc

SEQ ID NO: 81413 - DNA, 74 bp, Homo sapiens
acttacctttaacatcagaaacttcttcagtgtcttccatgcttctcacctctgagaccacttttgtatccagt

SEQ ID NO: 81414 - DNA, 78 bp, Homo sapiens
ttcagtgtcttccatgcttctcacctctgagaccacttttgtatccagtttgccacttccttcagaaacatctccaat

SEQ ID NO: 81415 - DNA, 77 bp, Homo sapiens
tcttccatgcttctcacctctgagaccacttttgtatccagtttgccacttccttcagaaacatctccaatttccaa

SEQ ID NO: 81416 - DNA, 75 bp, Homo sapiens
tcacctctgagaccacttttgtatccagtttgccacttccttcagaaacatctccaatttccaactcttccataa

SEQ ID NO: 81417 - DNA, 74 bp, Homo sapiens
agaccacttttgtatccagtttgccacttccttcagaaacatctccaatttccaactcttccataaatgagaga

SEQ ID NO: 81418 - DNA, 78 bp, Homo sapiens
ttttgtatccagtttgccacttccttcagaaacatctccaatttccaactcttccataaatgagagaatggcacatca

SEQ ID NO: 81419 - DNA, 77 bp, Homo sapiens
agtttgccacttccttcagaaacatctccaatttccaactcttccataaatgagagaatggcacatcagcaaagaaa

SEQ ID NO: 81420 - DNA, 79 bp, Homo sapiens
aaacatctccaatttccaactcttccataaatgagagaatggcacatcagcaaagaaagtcaccttctgtatctgaaga

SEQ ID NO: 81421 - DNA, 79 bp, Homo sapiens
aatttccaactcttccataaatgagagaatggcacatcagcaaagaaagtcaccttctgtatctgaagagccactctcc

SEQ ID NO: 81422 - DNA, 83 bp, Homo sapiens
tcttccataaatgagagaatggcacatcagcaaagaaagtcaccttctgtatctgaagagccactctccccgcagaaagatga

SEQ ID NO: 81423 - DNA, 81 bp, Homo sapiens
agagaatggcacatcagcaaagaaagtcaccttctgtatctgaagagccactctccccgcagaaagatgagtcttccgcca

SEQ ID NO: 81424 - DNA, 78 bp, Homo sapiens
atcagcaaagaaagtcaccttctgtatctgaagagccactctccccgcagaaagatgagtcttccgccactgccaaac

SEQ ID NO: 81425 - DNA, 75 bp, Homo sapiens
aaagaaagtcaccttctgtatctgaagagccactctccccgcagaaagatgagtcttccgccactgccaaacctc

SEQ ID NO: 81426 - DNA, 74 bp, Homo sapiens
actctccccgcagaaagatgagtcttccgccactgccaaacctctgggagagaaccttacctcccagcagaaga

SEQ ID NO: 81427 - DNA, 74 bp, Homo sapiens
aaagatgagtcttccgccactgccaaacctctgggagagaaccttacctcccagcagaagaatctgtctaatac

SEQ ID NO: 81428 - DNA, 73 bp, Homo sapiens
agtcttccgccactgccaaacctctgggagagaaccttacctcccagcagaagaatctgtctaatactcccga

SEQ ID NO: 81429 - DNA, 73 bp, Homo sapiens
actgccaaacctctgggagagaaccttacctcccagcagaagaatctgtctaatactcccgaacccatcataa

SEQ ID NO: 81430 - DNA, 75 bp, Homo sapiens
tctgggagagaaccttacctcccagcagaagaatctgtctaatactcccgaacccatcataatgagttcttcttc

SEQ ID NO: 81431 - DNA, 75 bp, Homo sapiens
agagaaccttacctcccagcagaagaatctgtctaatactcccgaacccatcataatgagttcttcttccattgc

SEQ ID NO: 81432 - DNA, 76 bp, Homo sapiens
aatctgtctaatactcccgaacccatcataatgagttcttcttccattgctcctgaagcatttccgtctgaagatt

SEQ ID NO: 81433 - DNA, 78 bp, Homo sapiens
taatactcccgaacccatcataatgagttcttcttccattgctcctgaagcatttccgtctgaagatttgcacaataa

SEQ ID NO: 81434 - DNA, 79 bp, Homo sapiens
aacccatcataatgagttcttcttccattgctcctgaagcatttccgtctgaagatttgcacaataagaccctgagtca

SEQ ID NO: 81435 - DNA, 78 bp, Homo sapiens
ataatgagttcttcttccattgctcctgaagcatttccgtctgaagatttgcacaataagaccctgagtcagcaaacc

SEQ ID NO: 81436 - DNA, 79 bp, Homo sapiens
ttcttcttccattgctcctgaagcatttccgtctgaagatttgcacaataagaccctgagtcagcaaacctgtaaatca

SEQ ID NO: 81437 - DNA, 81 bp, Homo sapiens
tcctgaagcatttccgtctgaagatttgcacaataagaccctgagtcagcaaacctgtaaatcacatgttgacactgagaa

SEQ ID NO: 81438 - DNA, 78 bp, Homo sapiens
atttccgtctgaagatttgcacaataagaccctgagtcagcaaacctgtaaatcacatgttgacactgagaagcccta

SEQ ID NO: 81439 - DNA, 78 bp, Homo sapiens
aagatttgcacaataagaccctgagtcagcaaacctgtaaatcacatgttgacactgagaagccctaccctgcttcaa

SEQ ID NO: 81440 - DNA, 77 bp, Homo sapiens
taaatcacatgttgacactgagaagccctaccctgcttcaattccagaacttgcttctactgaaatgataaaagtta

SEQ ID NO: 81441 - DNA, 73 bp, Homo sapiens
atgttgacactgagaagccctaccctgcttcaattccagaacttgcttctactgaaatgataaaagttaaaaa

SEQ ID NO: 81442 - DNA, 72 bp, Homo sapiens
agaagccctaccctgcttcaattccagaacttgcttctactgaaatgataaaagttaaaaatcatagcgtcc

SEQ ID NO: 81443 - DNA, 75 bp, Homo sapiens
ctgcttcaattccagaacttgcttctactgaaatgataaaagttaaaaatcatagcgtcctgcaaagaacagaaa

SEQ ID NO: 81444 - DNA, 72 bp, Homo sapiens
caattccagaacttgcttctactgaaatgataaaagttaaaaatcatagcgtcctgcaaagaacagaaaaaa

SEQ ID NO: 81445 - DNA, 69 bp, Homo sapiens
gcttctactgaaatgataaaagttaaaaatcatagcgtcctgcaaagaacagaaaaaaaagtgttacct

SEQ ID NO: 81446 - DNA, 70 bp, Homo sapiens
agttaaaaatcatagcgtcctgcaaagaacagaaaaaaaagtgttaccttcaccattggaattatctgtc

SEQ ID NO: 81447 - DNA, 72 bp, Homo sapiens
aaatcatagcgtcctgcaaagaacagaaaaaaaagtgttaccttcaccattggaattatctgtcttttctga

SEQ ID NO: 81448 - DNA, 71 bp, Homo sapiens
aaaagtgttaccttcaccattggaattatctgtcttttctgaagggacagataataagggaaatgagcttc

SEQ ID NO: 81449 - DNA, 76 bp, Homo sapiens
cttcaccattggaattatctgtcttttctgaagggacagataataagggaaatgagcttccatctgctaaattaca

SEQ ID NO: 81450 - DNA, 77 bp, Homo sapiens
attatctgtcttttctgaagggacagataataagggaaatgagcttccatctgctaaattacaggacaagcaatata

SEQ ID NO: 81451 - DNA, 81 bp, Homo sapiens
tttctgaagggacagataataagggaaatgagcttccatctgctaaattacaggacaagcaatatatctcatcagtggata

SEQ ID NO: 81452 - DNA, 81 bp, Homo sapiens
gacagataataagggaaatgagcttccatctgctaaattacaggacaagcaatatatctcatcagtggataaggctccatt

SEQ ID NO: 81453 - DNA, 80 bp, Homo sapiens
ataataagggaaatgagcttccatctgctaaattacaggacaagcaatatatctcatcagtggataaggctccattttca

SEQ ID NO: 81454 - DNA, 81 bp, Homo sapiens
agcttccatctgctaaattacaggacaagcaatatatctcatcagtggataaggctccattttcagaaggctctagaaata

SEQ ID NO: 81455 - DNA, 79 bp, Homo sapiens
atctgctaaattacaggacaagcaatatatctcatcagtggataaggctccattttcagaaggctctagaaataaaaca

SEQ ID NO: 81456 - DNA, 78 bp, Homo sapiens
aatatatctcatcagtggataaggctccattttcagaaggctctagaaataaaacacataagcaagggagtacacaga

SEQ ID NO: 81457 - DNA, 74 bp, Homo sapiens
atcagtggataaggctccattttcagaaggctctagaaataaaacacataagcaagggagtacacagagtcggt

SEQ ID NO: 81458 - DNA, 72 bp, Homo sapiens
ataaggctccattttcagaaggctctagaaataaaacacataagcaagggagtacacagagtcggttagaaa

SEQ ID NO: 81459 - DNA, 72 bp, Homo sapiens
ttttcagaaggctctagaaataaaacacataagcaagggagtacacagagtcggttagaaacctcacatact

SEQ ID NO: 81460 - DNA, 75 bp, Homo sapiens
ctctagaaataaaacacataagcaagggagtacacagagtcggttagaaacctcacatacttccaagtcatcaga

SEQ ID NO: 81461 - DNA, 74 bp, Homo sapiens
aataaaacacataagcaagggagtacacagagtcggttagaaacctcacatacttccaagtcatcagagccctc

SEQ ID NO: 81462 - DNA, 76 bp, Homo sapiens
ataagcaagggagtacacagagtcggttagaaacctcacatacttccaagtcatcagagccctccaagtcacctga

SEQ ID NO: 81463 - DNA, 78 bp, Homo sapiens
tacacagagtcggttagaaacctcacatacttccaagtcatcagagccctccaagtcacctgatgggataagaaatga

SEQ ID NO: 81464 - DNA, 75 bp, Homo sapiens
agagtcggttagaaacctcacatacttccaagtcatcagagccctccaagtcacctgatgggataagaaatgaaa

SEQ ID NO: 81465 - DNA, 79 bp, Homo sapiens
aacctcacatacttccaagtcatcagagccctccaagtcacctgatgggataagaaatgaaagtagagattcagagata

SEQ ID NO: 81466 - DNA, 79 bp, Homo sapiens
ttccaagtcatcagagccctccaagtcacctgatgggataagaaatgaaagtagagattcagagatatcaaagagaaaa

SEQ ID NO: 81467 - DNA, 80 bp, Homo sapiens
agtcatcagagccctccaagtcacctgatgggataagaaatgaaagtagagattcagagatatcaaagagaaaaactgca

SEQ ID NO: 81468 - DNA, 80 bp, Homo sapiens
tccaagtcacctgatgggataagaaatgaaagtagagattcagagatatcaaagagaaaaactgcagagcaacacagctt

SEQ ID NO: 81469 - DNA, 78 bp, Homo sapiens
taagaaatgaaagtagagattcagagatatcaaagagaaaaactgcagagcaacacagctttggaatctgtaaggaaa

SEQ ID NO: 81470 - DNA, 78 bp, Homo sapiens
aaagtagagattcagagatatcaaagagaaaaactgcagagcaacacagctttggaatctgtaaggaaaagagagcta

SEQ ID NO: 81471 - DNA, 79 bp, Homo sapiens
attcagagatatcaaagagaaaaactgcagagcaacacagctttggaatctgtaaggaaaagagagctaggatagaaga

SEQ ID NO: 81472 - DNA, 78 bp, Homo sapiens
aaagagaaaaactgcagagcaacacagctttggaatctgtaaggaaaagagagctaggatagaagatgatcagtcaac

SEQ ID NO: 81473 - DNA, 79 bp, Homo sapiens
gtaaggaaaagagagctaggatagaagatgatcagtcaacccggaacatatcatctagcagcccacctgagaaagaaca

SEQ ID NO: 81474 - DNA, 81 bp, Homo sapiens
aagagagctaggatagaagatgatcagtcaacccggaacatatcatctagcagcccacctgagaaagaacagcctcccaga

SEQ ID NO: 81475 - DNA, 75 bp, Homo sapiens
atcagtcaacccggaacatatcatctagcagcccacctgagaaagaacagcctcccagagaggaaccaagggttc

SEQ ID NO: 81476 - DNA, 74 bp, Homo sapiens
cggaacatatcatctagcagcccacctgagaaagaacagcctcccagagaggaaccaagggttccccctctcaa

SEQ ID NO: 81477 - DNA, 69 bp, Homo sapiens
cacctgagaaagaacagcctcccagagaggaaccaagggttccccctctcaaggtatggtattaaataa

SEQ ID NO: 81478 - DNA, 67 bp, Homo sapiens
agaaagaacagcctcccagagaggaaccaagggttccccctctcaaggtatggtattaaataaacaa

SEQ ID NO: 81479 - DNA, 66 bp, Homo sapiens
agcctcccagagaggaaccaagggttccccctctcaaggtatggtattaaataaacaaaaggcaat

SEQ ID NO: 81480 - DNA, 75 bp, Homo sapiens
ctgtgatcatgtatgaagcacattatatttttttttctgtcctccttttagattcagctttccaaaattgggcca

SEQ ID NO: 81481 - DNA, 69 bp, Homo sapiens
gtatgaagcacattatatttttttttctgtcctccttttagattcagctttccaaaattgggccacctt

SEQ ID NO: 81482 - DNA, 68 bp, Homo sapiens
tatttttttttctgtcctccttttagattcagctttccaaaattgggccaccttttataatcaagagc

SEQ ID NO: 81483 - DNA, 69 bp, Homo sapiens
tttttctgtcctccttttagattcagctttccaaaattgggccaccttttataatcaagagccaaccag

SEQ ID NO: 81484 - DNA, 71 bp, Homo sapiens
ttttagattcagctttccaaaattgggccaccttttataatcaagagccaaccagtctccaaacctgagtc

SEQ ID NO: 81485 - DNA, 73 bp, Homo sapiens
agctttccaaaattgggccaccttttataatcaagagccaaccagtctccaaacctgagtctcgagcatccac

SEQ ID NO: 81486 - DNA, 76 bp, Homo sapiens
aaaattgggccaccttttataatcaagagccaaccagtctccaaacctgagtctcgagcatccactagcacatctg

SEQ ID NO: 81487 - DNA, 78 bp, Homo sapiens
accttttataatcaagagccaaccagtctccaaacctgagtctcgagcatccactagcacatctgtcagtggcgggag

SEQ ID NO: 81488 - DNA, 82 bp, Homo sapiens
tataatcaagagccaaccagtctccaaacctgagtctcgagcatccactagcacatctgtcagtggcgggaggaacacagga

SEQ ID NO: 81489 - DNA, 80 bp, Homo sapiens
agccaaccagtctccaaacctgagtctcgagcatccactagcacatctgtcagtggcgggaggaacacaggagccaggac

SEQ ID NO: 81490 - DNA, 81 bp, Homo sapiens
aaacctgagtctcgagcatccactagcacatctgtcagtggcgggaggaacacaggagccaggaccctcgcagatatcaag

SEQ ID NO: 81491 - DNA, 80 bp, Homo sapiens
agtctcgagcatccactagcacatctgtcagtggcgggaggaacacaggagccaggaccctcgcagatatcaaggcccgg

SEQ ID NO: 81492 - DNA, 78 bp, Homo sapiens
tccactagcacatctgtcagtggcgggaggaacacaggagccaggaccctcgcagatatcaaggcccgggcccaacaa

SEQ ID NO: 81493 - DNA, 75 bp, Homo sapiens
acatctgtcagtggcgggaggaacacaggagccaggaccctcgcagatatcaaggcccgggcccaacaagctcgg

SEQ ID NO: 81494 - DNA, 75 bp, Homo sapiens
tggcgggaggaacacaggagccaggaccctcgcagatatcaaggcccgggcccaacaagctcgggcccagcgaga

SEQ ID NO: 81495 - DNA, 78 bp, Homo sapiens
aggaacacaggagccaggaccctcgcagatatcaaggcccgggcccaacaagctcgggcccagcgagaggctgctgca

SEQ ID NO: 81496 - DNA, 84 bp, Homo sapiens
agccaggaccctcgcagatatcaaggcccgggcccaacaagctcgggcccagcgagaggctgctgcagctgctgctgtggctgc

SEQ ID NO: 81497 - DNA, 90 bp, Homo sapiens
cagatatcaaggcccgggcccaacaagctcgggcccagcgagaggctgctgcagctgctgctgtggctgctgcagcgagcattgtctctg

SEQ ID NO: 81498 - DNA, 89 bp, Homo sapiens
atcaaggcccgggcccaacaagctcgggcccagcgagaggctgctgcagctgctgctgtggctgctgcagcgagcattgtctctggagc

SEQ ID NO: 81499 - DNA, 92 bp, Homo sapiens
caacaagctcgggcccagcgagaggctgctgcagctgctgctgtggctgctgcagcgagcattgtctctggagccatgggaagtccaggaga

SEQ ID NO: 81500 - DNA, 90 bp, Homo sapiens
gggcccagcgagaggctgctgcagctgctgctgtggctgctgcagcgagcattgtctctggagccatgggaagtccaggagagggtggaa

SEQ ID NO: 81501 - DNA, 89 bp, Homo sapiens
agaggctgctgcagctgctgctgtggctgctgcagcgagcattgtctctggagccatgggaagtccaggagagggtggaaagacgagaa

SEQ ID NO: 81502 - DNA, 90 bp, Homo sapiens
tgcagctgctgctgtggctgctgcagcgagcattgtctctggagccatgggaagtccaggagagggtggaaagacgagaactctggcaca

SEQ ID NO: 81503 - DNA, 85 bp, Homo sapiens
ctgtggctgctgcagcgagcattgtctctggagccatgggaagtccaggagagggtggaaagacgagaactctggcacacatcaa

SEQ ID NO: 81504 - DNA, 78 bp, Homo sapiens
attgtctctggagccatgggaagtccaggagagggtggaaagacgagaactctggcacacatcaaagagcagacaaag

SEQ ID NO: 81505 - DNA, 78 bp, Homo sapiens
aagtccaggagagggtggaaagacgagaactctggcacacatcaaagagcagacaaaggctaagctctttgcaaagca

SEQ ID NO: 81506 - DNA, 81 bp, Homo sapiens
agagggtggaaagacgagaactctggcacacatcaaagagcagacaaaggctaagctctttgcaaagcatcaagctcgagc

SEQ ID NO: 81507 - DNA, 82 bp, Homo sapiens
aaagacgagaactctggcacacatcaaagagcagacaaaggctaagctctttgcaaagcatcaagctcgagcccatctcttc

SEQ ID NO: 81508 - DNA, 76 bp, Homo sapiens
agacaaaggctaagctctttgcaaagcatcaagctcgagcccatctcttccagacctctaaagagacccggttgcc

SEQ ID NO: 81509 - DNA, 79 bp, Homo sapiens
tctttgcaaagcatcaagctcgagcccatctcttccagacctctaaagagacccggttgcctcctccgctcagctcaaa

SEQ ID NO: 81510 - DNA, 75 bp, Homo sapiens
atcaagctcgagcccatctcttccagacctctaaagagacccggttgcctcctccgctcagctcaaaggaagggc

SEQ ID NO: 81511 - DNA, 71 bp, Homo sapiens
ccatctcttccagacctctaaagagacccggttgcctcctccgctcagctcaaaggaagggcctccaaact

SEQ ID NO: 81512 - DNA, 71 bp, Homo sapiens
tcttccagacctctaaagagacccggttgcctcctccgctcagctcaaaggaagggcctccaaacttagaa

SEQ ID NO: 81513 - DNA, 71 bp, Homo sapiens
ctctaaagagacccggttgcctcctccgctcagctcaaaggaagggcctccaaacttagaagtctcttcta

SEQ ID NO: 81514 - DNA, 70 bp, Homo sapiens
gttgcctcctccgctcagctcaaaggaagggcctccaaacttagaagtctcttctacccctgaaacaaaa

SEQ ID NO: 81515 - DNA, 70 bp, Homo sapiens
tcctccgctcagctcaaaggaagggcctccaaacttagaagtctcttctacccctgaaacaaaaatggaa

SEQ ID NO: 81516 - DNA, 67 bp, Homo sapiens
tcaaaggaagggcctccaaacttagaagtctcttctacccctgaaacaaaaatggaaggttcgactg

SEQ ID NO: 81517 - DNA, 69 bp, Homo sapiens
ggcctccaaacttagaagtctcttctacccctgaaacaaaaatggaaggttcgactggtgtcattattg

SEQ ID NO: 81518 - DNA, 70 bp, Homo sapiens
acttagaagtctcttctacccctgaaacaaaaatggaaggttcgactggtgtcattattgtcaatccaaa

SEQ ID NO: 81519 - DNA, 73 bp, Homo sapiens
tcttctacccctgaaacaaaaatggaaggttcgactggtgtcattattgtcaatccaaactgtagatctccta

SEQ ID NO: 81520 - DNA, 76 bp, Homo sapiens
tgaaacaaaaatggaaggttcgactggtgtcattattgtcaatccaaactgtagatctcctagcaacaagtctgcc

SEQ ID NO: 81521 - DNA, 74 bp, Homo sapiens
aaaaatggaaggttcgactggtgtcattattgtcaatccaaactgtagatctcctagcaacaagtctgcccacc

SEQ ID NO: 81522 - DNA, 75 bp, Homo sapiens
aggttcgactggtgtcattattgtcaatccaaactgtagatctcctagcaacaagtctgcccacctccgggagac

SEQ ID NO: 81523 - DNA, 77 bp, Homo sapiens
gtcattattgtcaatccaaactgtagatctcctagcaacaagtctgcccacctccgggagaccaccactgtactaca

SEQ ID NO: 81524 - DNA, 74 bp, Homo sapiens
aaactgtagatctcctagcaacaagtctgcccacctccgggagaccaccactgtactacagcagtctcttaacc

SEQ ID NO: 81525 - DNA, 73 bp, Homo sapiens
tagcaacaagtctgcccacctccgggagaccaccactgtactacagcagtctcttaacccaagtaaacttcca

SEQ ID NO: 81526 - DNA, 73 bp, Homo sapiens
tccgggagaccaccactgtactacagcagtctcttaacccaagtaaacttccagaaactgccactgacttatc

SEQ ID NO: 81527 - DNA, 75 bp, Homo sapiens
accaccactgtactacagcagtctcttaacccaagtaaacttccagaaactgccactgacttatctgtgcatagt

SEQ ID NO: 81528 - DNA, 75 bp, Homo sapiens
agtctcttaacccaagtaaacttccagaaactgccactgacttatctgtgcatagttctgatgaaaacatacctg

SEQ ID NO: 81529 - DNA, 80 bp, Homo sapiens
aagtaaacttccagaaactgccactgacttatctgtgcatagttctgatgaaaacatacctgtgtcacatttatctgaga

SEQ ID NO: 81530 - DNA, 79 bp, Homo sapiens
aacttccagaaactgccactgacttatctgtgcatagttctgatgaaaacatacctgtgtcacatttatctgagaaaat

SEQ ID NO: 81531 - DNA, 80 bp, Homo sapiens
acttatctgtgcatagttctgatgaaaacatacctgtgtcacatttatctgagaaaattgtttcatctacctcttctgaa

SEQ ID NO: 81532 - DNA, 78 bp, Homo sapiens
atagttctgatgaaaacatacctgtgtcacatttatctgagaaaattgtttcatctacctcttctgaaaatagcagtg

SEQ ID NO: 81533 - DNA, 77 bp, Homo sapiens
aaaacatacctgtgtcacatttatctgagaaaattgtttcatctacctcttctgaaaatagcagtgtgcccatgctt

SEQ ID NO: 81534 - DNA, 77 bp, Homo sapiens
ctgtgtcacatttatctgagaaaattgtttcatctacctcttctgaaaatagcagtgtgcccatgctttttaataaa

SEQ ID NO: 81535 - DNA, 74 bp, Homo sapiens
cacatttatctgagaaaattgtttcatctacctcttctgaaaatagcagtgtgcccatgctttttaataaaaat

SEQ ID NO: 81536 - DNA, 73 bp, Homo sapiens
aaattgtttcatctacctcttctgaaaatagcagtgtgcccatgctttttaataaaaattctgtccctgtatc

SEQ ID NO: 81537 - DNA, 79 bp, Homo sapiens
ttctgaaaatagcagtgtgcccatgctttttaataaaaattctgtccctgtatctgtttgcagcactgctatatcggga

SEQ ID NO: 81538 - DNA, 79 bp, Homo sapiens
tagcagtgtgcccatgctttttaataaaaattctgtccctgtatctgtttgcagcactgctatatcgggagcaattaaa

SEQ ID NO: 81539 - DNA, 76 bp, Homo sapiens
catgctttttaataaaaattctgtccctgtatctgtttgcagcactgctatatcgggagcaattaaagaacatccc

SEQ ID NO: 81540 - DNA, 79 bp, Homo sapiens
attctgtccctgtatctgtttgcagcactgctatatcgggagcaattaaagaacatccctttgtgagttctgttgataa

SEQ ID NO: 81541 - DNA, 80 bp, Homo sapiens
tatctgtttgcagcactgctatatcgggagcaattaaagaacatccctttgtgagttctgttgataaatcctctgtccta

SEQ ID NO: 81542 - DNA, 77 bp, Homo sapiens
agcactgctatatcgggagcaattaaagaacatccctttgtgagttctgttgataaatcctctgtcctaatgtctgt

SEQ ID NO: 81543 - DNA, 76 bp, Homo sapiens
ctatatcgggagcaattaaagaacatccctttgtgagttctgttgataaatcctctgtcctaatgtctgttgacag

SEQ ID NO: 81544 - DNA, 76 bp, Homo sapiens
aattaaagaacatccctttgtgagttctgttgataaatcctctgtcctaatgtctgttgacagtgcaaacactaca

SEQ ID NO: 81545 - DNA, 79 bp, Homo sapiens
tttgtgagttctgttgataaatcctctgtcctaatgtctgttgacagtgcaaacactacaatttctgcttgtaatataa

SEQ ID NO: 81546 - DNA, 80 bp, Homo sapiens
tctgttgataaatcctctgtcctaatgtctgttgacagtgcaaacactacaatttctgcttgtaatataagcatgttaaa

SEQ ID NO: 81547 - DNA, 77 bp, Homo sapiens
aatcctctgtcctaatgtctgttgacagtgcaaacactacaatttctgcttgtaatataagcatgttaaaaaccatc

SEQ ID NO: 81548 - DNA, 78 bp, Homo sapiens
taatgtctgttgacagtgcaaacactacaatttctgcttgtaatataagcatgttaaaaaccatccagggaactgaca

SEQ ID NO: 81549 - DNA, 80 bp, Homo sapiens
ttgacagtgcaaacactacaatttctgcttgtaatataagcatgttaaaaaccatccagggaactgacactccatgcata

SEQ ID NO: 81550 - DNA, 78 bp, Homo sapiens
aacactacaatttctgcttgtaatataagcatgttaaaaaccatccagggaactgacactccatgcatagccattata

SEQ ID NO: 81551 - DNA, 76 bp, Homo sapiens
aatttctgcttgtaatataagcatgttaaaaaccatccagggaactgacactccatgcatagccattataccaaaa

SEQ ID NO: 81552 - DNA, 79 bp, Homo sapiens
tgtaatataagcatgttaaaaaccatccagggaactgacactccatgcatagccattataccaaaatgtattgaaagca

SEQ ID NO: 81553 - DNA, 75 bp, Homo sapiens
atgttaaaaaccatccagggaactgacactccatgcatagccattataccaaaatgtattgaaagcactcccatt

SEQ ID NO: 81554 - DNA, 82 bp, Homo sapiens
aactgacactccatgcatagccattataccaaaatgtattgaaagcactcccatttcagccactacagagggctccagcata

SEQ ID NO: 81555 - DNA, 84 bp, Homo sapiens
atgcatagccattataccaaaatgtattgaaagcactcccatttcagccactacagagggctccagcatatcaagctccatgga

SEQ ID NO: 81556 - DNA, 83 bp, Homo sapiens
attataccaaaatgtattgaaagcactcccatttcagccactacagagggctccagcatatcaagctccatggatgataagca

SEQ ID NO: 81557 - DNA, 83 bp, Homo sapiens
aatgtattgaaagcactcccatttcagccactacagagggctccagcatatcaagctccatggatgataagcagttactaata

SEQ ID NO: 81558 - DNA, 87 bp, Homo sapiens
ttgaaagcactcccatttcagccactacagagggctccagcatatcaagctccatggatgataagcagttactaatatcaagcagca

SEQ ID NO: 81559 - DNA, 86 bp, Homo sapiens
tttcagccactacagagggctccagcatatcaagctccatggatgataagcagttactaatatcaagcagcagtgctagtaactta

SEQ ID NO: 81560 - DNA, 85 bp, Homo sapiens
actacagagggctccagcatatcaagctccatggatgataagcagttactaatatcaagcagcagtgctagtaacttagtctcca

SEQ ID NO: 81561 - DNA, 85 bp, Homo sapiens
atatcaagctccatggatgataagcagttactaatatcaagcagcagtgctagtaacttagtctccactcagtacacctctgtgc

SEQ ID NO: 81562 - DNA, 81 bp, Homo sapiens
atggatgataagcagttactaatatcaagcagcagtgctagtaacttagtctccactcagtacacctctgtgccaactccc

SEQ ID NO: 81563 - DNA, 80 bp, Homo sapiens
ataagcagttactaatatcaagcagcagtgctagtaacttagtctccactcagtacacctctgtgccaactccctccatc

SEQ ID NO: 81564 - DNA, 75 bp, Homo sapiens
agcagtgctagtaacttagtctccactcagtacacctctgtgccaactccctccatcggaaacaatttgccaaac

SEQ ID NO: 81565 - DNA, 74 bp, Homo sapiens
tagtaacttagtctccactcagtacacctctgtgccaactccctccatcggaaacaatttgccaaacctctcca

SEQ ID NO: 81566 - DNA, 77 bp, Homo sapiens
tccactcagtacacctctgtgccaactccctccatcggaaacaatttgccaaacctctccactagctctgtcttgat

SEQ ID NO: 81567 - DNA, 74 bp, Homo sapiens
agtacacctctgtgccaactccctccatcggaaacaatttgccaaacctctccactagctctgtcttgattccc

SEQ ID NO: 81568 - DNA, 71 bp, Homo sapiens
ccaactccctccatcggaaacaatttgccaaacctctccactagctctgtcttgattcccccaatgggaat

SEQ ID NO: 81569 - DNA, 73 bp, Homo sapiens
tccatcggaaacaatttgccaaacctctccactagctctgtcttgattcccccaatgggaattaacaacagat

SEQ ID NO: 81570 - DNA, 70 bp, Homo sapiens
aaacaatttgccaaacctctccactagctctgtcttgattcccccaatgggaattaacaacagatttcct

SEQ ID NO: 81571 - DNA, 74 bp, Homo sapiens
actagctctgtcttgattcccccaatgggaattaacaacagatttccttctgagaagatagccatacctgggag

SEQ ID NO: 81572 - DNA, 76 bp, Homo sapiens
ccaatgggaattaacaacagatttccttctgagaagatagccatacctgggagtgaagaacaggccactgtatcca

SEQ ID NO: 81573 - DNA, 78 bp, Homo sapiens
aacagatttccttctgagaagatagccatacctgggagtgaagaacaggccactgtatccatgggtaccactgtgaga

SEQ ID NO: 81574 - DNA, 84 bp, Homo sapiens
cttctgagaagatagccatacctgggagtgaagaacaggccactgtatccatgggtaccactgtgagagcagccctcagctgca

SEQ ID NO: 81575 - DNA, 84 bp, Homo sapiens
atagccatacctgggagtgaagaacaggccactgtatccatgggtaccactgtgagagcagccctcagctgcagtgattctgta

SEQ ID NO: 81576 - DNA, 84 bp, Homo sapiens
agaacaggccactgtatccatgggtaccactgtgagagcagccctcagctgcagtgattctgtagcggtcacagactctctggt

SEQ ID NO: 81577 - DNA, 85 bp, Homo sapiens
actgtatccatgggtaccactgtgagagcagccctcagctgcagtgattctgtagcggtcacagactctctggttgcacacccga

SEQ ID NO: 81578 - DNA, 82 bp, Homo sapiens
agagcagccctcagctgcagtgattctgtagcggtcacagactctctggttgcacacccgaccgtcgcaatgtttactggaa

SEQ ID NO: 81579 - DNA, 84 bp, Homo sapiens
tcagctgcagtgattctgtagcggtcacagactctctggttgcacacccgaccgtcgcaatgtttactggaaacatgctgacaa

SEQ ID NO: 81580 - DNA, 79 bp, Homo sapiens
agtgattctgtagcggtcacagactctctggttgcacacccgaccgtcgcaatgtttactggaaacatgctgacaataa

SEQ ID NO: 81581 - DNA, 79 bp, Homo sapiens
tagcggtcacagactctctggttgcacacccgaccgtcgcaatgtttactggaaacatgctgacaataaactcttatga

SEQ ID NO: 81582 - DNA, 77 bp, Homo sapiens
agactctctggttgcacacccgaccgtcgcaatgtttactggaaacatgctgacaataaactcttatgatagtcctc

SEQ ID NO: 81583 - DNA, 75 bp, Homo sapiens
ttgcacacccgaccgtcgcaatgtttactggaaacatgctgacaataaactcttatgatagtcctcccaagttaa

SEQ ID NO: 81584 - DNA, 75 bp, Homo sapiens
cgaccgtcgcaatgtttactggaaacatgctgacaataaactcttatgatagtcctcccaagttaagtgctgaaa

SEQ ID NO: 81585 - DNA, 75 bp, Homo sapiens
tgtttactggaaacatgctgacaataaactcttatgatagtcctcccaagttaagtgctgaaagcttggacaaaa

SEQ ID NO: 81586 - DNA, 75 bp, Homo sapiens
actggaaacatgctgacaataaactcttatgatagtcctcccaagttaagtgctgaaagcttggacaaaaattca

SEQ ID NO: 81587 - DNA, 71 bp, Homo sapiens
acaataaactcttatgatagtcctcccaagttaagtgctgaaagcttggacaaaaattcagggcctcgaaa

SEQ ID NO: 81588 - DNA, 70 bp, Homo sapiens
aaactcttatgatagtcctcccaagttaagtgctgaaagcttggacaaaaattcagggcctcgaaacagg

SEQ ID NO: 81589 - DNA, 71 bp, Homo sapiens
aagttaagtgctgaaagcttggacaaaaattcagggcctcgaaacagggcagataattctggaaaacctca

SEQ ID NO: 81590 - DNA, 70 bp, Homo sapiens
aaagcttggacaaaaattcagggcctcgaaacagggcagataattctggaaaacctcagcaaccaccagg

SEQ ID NO: 81591 - DNA, 71 bp, Homo sapiens
acaaaaattcagggcctcgaaacagggcagataattctggaaaacctcagcaaccaccagggggctttgca

SEQ ID NO: 81592 - DNA, 74 bp, Homo sapiens
aacagggcagataattctggaaaacctcagcaaccaccagggggctttgcaccagcagccataaaccgatcaat

SEQ ID NO: 81593 - DNA, 73 bp, Homo sapiens
taattctggaaaacctcagcaaccaccagggggctttgcaccagcagccataaaccgatcaattccgtgtaaa

SEQ ID NO: 81594 - DNA, 75 bp, Homo sapiens
aaccaccagggggctttgcaccagcagccataaaccgatcaattccgtgtaaagtcatcgttgaccacagcacca

SEQ ID NO: 81595 - DNA, 78 bp, Homo sapiens
gggctttgcaccagcagccataaaccgatcaattccgtgtaaagtcatcgttgaccacagcaccacgctgacctccag

SEQ ID NO: 81596 - DNA, 77 bp, Homo sapiens
accagcagccataaaccgatcaattccgtgtaaagtcatcgttgaccacagcaccacgctgacctccagtttgtctc

SEQ ID NO: 81597 - DNA, 77 bp, Homo sapiens
agccataaaccgatcaattccgtgtaaagtcatcgttgaccacagcaccacgctgacctccagtttgtctctgactg

SEQ ID NO: 81598 - DNA, 77 bp, Homo sapiens
atcaattccgtgtaaagtcatcgttgaccacagcaccacgctgacctccagtttgtctctgactgtctccgttgaaa

SEQ ID NO: 81599 - DNA, 80 bp, Homo sapiens
gtgtaaagtcatcgttgaccacagcaccacgctgacctccagtttgtctctgactgtctccgttgaaagctcagaagcca

SEQ ID NO: 81600 - DNA, 79 bp, Homo sapiens
atcgttgaccacagcaccacgctgacctccagtttgtctctgactgtctccgttgaaagctcagaagccagcttggacc

SEQ ID NO: 81601 - DNA, 81 bp, Homo sapiens
acagcaccacgctgacctccagtttgtctctgactgtctccgttgaaagctcagaagccagcttggacctgcagggcagac

SEQ ID NO: 81602 - DNA, 82 bp, Homo sapiens
tttgtctctgactgtctccgttgaaagctcagaagccagcttggacctgcagggcagaccagtgaggacagaggcatccgta

SEQ ID NO: 81603 - DNA, 79 bp, Homo sapiens
actgtctccgttgaaagctcagaagccagcttggacctgcagggcagaccagtgaggacagaggcatccgtacagcccg

SEQ ID NO: 81604 - DNA, 82 bp, Homo sapiens
ttgaaagctcagaagccagcttggacctgcagggcagaccagtgaggacagaggcatccgtacagcccgtggcgtgtcctca

SEQ ID NO: 81605 - DNA, 81 bp, Homo sapiens
aagccagcttggacctgcagggcagaccagtgaggacagaggcatccgtacagcccgtggcgtgtcctcaggtgtctgtga

SEQ ID NO: 81606 - DNA, 81 bp, Homo sapiens
agggcagaccagtgaggacagaggcatccgtacagcccgtggcgtgtcctcaggtgtctgtgattagcaggcctgagccag

SEQ ID NO: 81607 - DNA, 79 bp, Homo sapiens
agaggcatccgtacagcccgtggcgtgtcctcaggtgtctgtgattagcaggcctgagccagttgccaacgaaggtata

SEQ ID NO: 81608 - DNA, 81 bp, Homo sapiens
tacagcccgtggcgtgtcctcaggtgtctgtgattagcaggcctgagccagttgccaacgaaggtatagatcacagttcca

SEQ ID NO: 81609 - DNA, 80 bp, Homo sapiens
gtggcgtgtcctcaggtgtctgtgattagcaggcctgagccagttgccaacgaaggtatagatcacagttccactttcat

SEQ ID NO: 81610 - DNA, 83 bp, Homo sapiens
ggtgtctgtgattagcaggcctgagccagttgccaacgaaggtatagatcacagttccactttcattgctgcttcggcagcaa

SEQ ID NO: 81611 - DNA, 82 bp, Homo sapiens
tgtgattagcaggcctgagccagttgccaacgaaggtatagatcacagttccactttcattgctgcttcggcagcaaaacaa

SEQ ID NO: 81612 - DNA, 78 bp, Homo sapiens
ctgagccagttgccaacgaaggtatagatcacagttccactttcattgctgcttcggcagcaaaacaagacagtaaaa

SEQ ID NO: 81613 - DNA, 76 bp, Homo sapiens
ccagttgccaacgaaggtatagatcacagttccactttcattgctgcttcggcagcaaaacaagacagtaaaacat

SEQ ID NO: 81614 - DNA, 76 bp, Homo sapiens
acgaaggtatagatcacagttccactttcattgctgcttcggcagcaaaacaagacagtaaaacattgccggccac

SEQ ID NO: 81615 - DNA, 79 bp, Homo sapiens
agatcacagttccactttcattgctgcttcggcagcaaaacaagacagtaaaacattgccggccacctgcacaagtctc

SEQ ID NO: 81616 - DNA, 76 bp, Homo sapiens
actttcattgctgcttcggcagcaaaacaagacagtaaaacattgccggccacctgcacaagtctccgagaattac

SEQ ID NO: 81617 - DNA, 74 bp, Homo sapiens
tgcttcggcagcaaaacaagacagtaaaacattgccggccacctgcacaagtctccgagaattaccccttgttc

SEQ ID NO: 81618 - DNA, 70 bp, Homo sapiens
aagacagtaaaacattgccggccacctgcacaagtctccgagaattaccccttgttccagataaattaaa

SEQ ID NO: 81619 - DNA, 73 bp, Homo sapiens
acctgcacaagtctccgagaattaccccttgttccagataaattaaatgagccgactgctcccagtcataact

SEQ ID NO: 81620 - DNA, 76 bp, Homo sapiens
agaattaccccttgttccagataaattaaatgagccgactgctcccagtcataactttgctgagcaggcacgtggc

SEQ ID NO: 81621 - DNA, 78 bp, Homo sapiens
ttccagataaattaaatgagccgactgctcccagtcataactttgctgagcaggcacgtggcccagctcctttcaaaa

SEQ ID NO: 81622 - DNA, 79 bp, Homo sapiens
ccgactgctcccagtcataactttgctgagcaggcacgtggcccagctcctttcaaaagtgaagcagacacaacctgta

SEQ ID NO: 81623 - DNA, 81 bp, Homo sapiens
ccagtcataactttgctgagcaggcacgtggcccagctcctttcaaaagtgaagcagacacaacctgtagcaatcagtata

SEQ ID NO: 81624 - DNA, 75 bp, Homo sapiens
agcaggcacgtggcccagctcctttcaaaagtgaagcagacacaacctgtagcaatcagtataacccaagtaacc

SEQ ID NO: 81625 - DNA, 75 bp, Homo sapiens
gcccagctcctttcaaaagtgaagcagacacaacctgtagcaatcagtataacccaagtaaccggatttgctgga

SEQ ID NO: 81626 - DNA, 77 bp, Homo sapiens
tttcaaaagtgaagcagacacaacctgtagcaatcagtataacccaagtaaccggatttgctggaatgatgatggga

SEQ ID NO: 81627 - DNA, 78 bp, Homo sapiens
aaagtgaagcagacacaacctgtagcaatcagtataacccaagtaaccggatttgctggaatgatgatgggatgagga

SEQ ID NO: 81628 - DNA, 80 bp, Homo sapiens
agacacaacctgtagcaatcagtataacccaagtaaccggatttgctggaatgatgatgggatgaggagcacaggacagc

SEQ ID NO: 81629 - DNA, 81 bp, Homo sapiens
tagcaatcagtataacccaagtaaccggatttgctggaatgatgatgggatgaggagcacaggacagcctctggttactca

SEQ ID NO: 81630 - DNA, 77 bp, Homo sapiens
agtataacccaagtaaccggatttgctggaatgatgatgggatgaggagcacaggacagcctctggttactcactcg

SEQ ID NO: 81631 - DNA, 78 bp, Homo sapiens
taaccggatttgctggaatgatgatgggatgaggagcacaggacagcctctggttactcactcgggttcaagtaaaca

SEQ ID NO: 81632 - DNA, 77 bp, Homo sapiens
atttgctggaatgatgatgggatgaggagcacaggacagcctctggttactcactcgggttcaagtaaacaaaaaga

SEQ ID NO: 81633 - DNA, 77 bp, Homo sapiens
atgatgggatgaggagcacaggacagcctctggttactcactcgggttcaagtaaacaaaaagaatatctagagcaa

SEQ ID NO: 81634 - DNA, 74 bp, Homo sapiens
acagcctctggttactcactcgggttcaagtaaacaaaaagaatatctagagcaaagctgtccaaaggctatca

SEQ ID NO: 81635 - DNA, 72 bp, Homo sapiens
gttactcactcgggttcaagtaaacaaaaagaatatctagagcaaagctgtccaaaggctatcaaaactgaa

SEQ ID NO: 81636 - DNA, 75 bp, Homo sapiens
aaaagaatatctagagcaaagctgtccaaaggctatcaaaactgaacatgccaactacttgaacgtgtcagaact

SEQ ID NO: 81637 - DNA, 75 bp, Homo sapiens
tccaaaggctatcaaaactgaacatgccaactacttgaacgtgtcagaacttcatcccaggaatcttgtaacaaa

SEQ ID NO: 81638 - DNA, 76 bp, Homo sapiens
aacatgccaactacttgaacgtgtcagaacttcatcccaggaatcttgtaacaaatgttgctcttcctgtgaaatc

SEQ ID NO: 81639 - DNA, 74 bp, Homo sapiens
aactacttgaacgtgtcagaacttcatcccaggaatcttgtaacaaatgttgctcttcctgtgaaatctgaact

SEQ ID NO: 81640 - DNA, 77 bp, Homo sapiens
aacgtgtcagaacttcatcccaggaatcttgtaacaaatgttgctcttcctgtgaaatctgaacttcacgaagcaga

SEQ ID NO: 81641 - DNA, 77 bp, Homo sapiens
ttcatcccaggaatcttgtaacaaatgttgctcttcctgtgaaatctgaacttcacgaagcagacaagggctttaga

SEQ ID NO: 81642 - DNA, 76 bp, Homo sapiens
aggaatcttgtaacaaatgttgctcttcctgtgaaatctgaacttcacgaagcagacaagggctttagaatggaca

SEQ ID NO: 81643 - DNA, 77 bp, Homo sapiens
taacaaatgttgctcttcctgtgaaatctgaacttcacgaagcagacaagggctttagaatggacactgaagacttc

SEQ ID NO: 81644 - DNA, 77 bp, Homo sapiens
tgttgctcttcctgtgaaatctgaacttcacgaagcagacaagggctttagaatggacactgaagacttccctggcc

SEQ ID NO: 81645 - DNA, 78 bp, Homo sapiens
ctgtgaaatctgaacttcacgaagcagacaagggctttagaatggacactgaagacttccctggccctgagctgcctc

SEQ ID NO: 81646 - DNA, 78 bp, Homo sapiens
cagacaagggctttagaatggacactgaagacttccctggccctgagctgcctcctccggctgcagagggagcctcta

SEQ ID NO: 81647 - DNA, 78 bp, Homo sapiens
ctttagaatggacactgaagacttccctggccctgagctgcctcctccggctgcagagggagcctctagtgtacaaca

SEQ ID NO: 81648 - DNA, 78 bp, Homo sapiens
aatggacactgaagacttccctggccctgagctgcctcctccggctgcagagggagcctctagtgtacaacaaacaca

SEQ ID NO: 81649 - DNA, 77 bp, Homo sapiens
aagacttccctggccctgagctgcctcctccggctgcagagggagcctctagtgtacaacaaacacagaacatgaaa

SEQ ID NO: 81650 - DNA, 78 bp, Homo sapiens
ccctgagctgcctcctccggctgcagagggagcctctagtgtacaacaaacacagaacatgaaagcttccacctcaag

SEQ ID NO: 81651 - DNA, 77 bp, Homo sapiens
cctcctccggctgcagagggagcctctagtgtacaacaaacacagaacatgaaagcttccacctcaagtcccatgga

SEQ ID NO: 81652 - DNA, 77 bp, Homo sapiens
ctgcagagggagcctctagtgtacaacaaacacagaacatgaaagcttccacctcaagtcccatggaagaggctatt

SEQ ID NO: 81653 - DNA, 75 bp, Homo sapiens
ggagcctctagtgtacaacaaacacagaacatgaaagcttccacctcaagtcccatggaagaggctatttccttg

SEQ ID NO: 81654 - DNA, 75 bp, Homo sapiens
tagtgtacaacaaacacagaacatgaaagcttccacctcaagtcccatggaagaggctatttccttggctaccga

SEQ ID NO: 81655 - DNA, 75 bp, Homo sapiens
aaacacagaacatgaaagcttccacctcaagtcccatggaagaggctatttccttggctaccgatgccctgaaga

SEQ ID NO: 81656 - DNA, 75 bp, Homo sapiens
cttccacctcaagtcccatggaagaggctatttccttggctaccgatgccctgaagagagtccctggtgcaggga

SEQ ID NO: 81657 - DNA, 79 bp, Homo sapiens
tttccttggctaccgatgccctgaagagagtccctggtgcagggagctcaggctgtcgtctgtcctctgtggaggctaa

SEQ ID NO: 81658 - DNA, 82 bp, Homo sapiens
atgccctgaagagagtccctggtgcagggagctcaggctgtcgtctgtcctctgtggaggctaacaatccgctggtgacgca

SEQ ID NO: 81659 - DNA, 80 bp, Homo sapiens
agagagtccctggtgcagggagctcaggctgtcgtctgtcctctgtggaggctaacaatccgctggtgacgcagttacta

SEQ ID NO: 81660 - DNA, 80 bp, Homo sapiens
tggtgcagggagctcaggctgtcgtctgtcctctgtggaggctaacaatccgctggtgacgcagttactacagggcaacc

SEQ ID NO: 81661 - DNA, 78 bp, Homo sapiens
agctcaggctgtcgtctgtcctctgtggaggctaacaatccgctggtgacgcagttactacagggcaacctgcctttg

SEQ ID NO: 81662 - DNA, 75 bp, Homo sapiens
tgtcgtctgtcctctgtggaggctaacaatccgctggtgacgcagttactacagggcaacctgcctttggaaaaa

SEQ ID NO: 81663 - DNA, 75 bp, Homo sapiens
tgtcctctgtggaggctaacaatccgctggtgacgcagttactacagggcaacctgcctttggaaaaagtgttgc

SEQ ID NO: 81664 - DNA, 74 bp, Homo sapiens
ctaacaatccgctggtgacgcagttactacagggcaacctgcctttggaaaaagtgttgccacagcccagattg

SEQ ID NO: 81665 - DNA, 74 bp, Homo sapiens
aatccgctggtgacgcagttactacagggcaacctgcctttggaaaaagtgttgccacagcccagattgggagc

SEQ ID NO: 81666 - DNA, 75 bp, Homo sapiens
tacagggcaacctgcctttggaaaaagtgttgccacagcccagattgggagccaagcttgaaatcaacaggcttc

SEQ ID NO: 81667 - DNA, 77 bp, Homo sapiens
tgcctttggaaaaagtgttgccacagcccagattgggagccaagcttgaaatcaacaggcttccattgcctcttcaa

SEQ ID NO: 81668 - DNA, 74 bp, Homo sapiens
aaaaagtgttgccacagcccagattgggagccaagcttgaaatcaacaggcttccattgcctcttcaaactacc

SEQ ID NO: 81669 - DNA, 75 bp, Homo sapiens
cacagcccagattgggagccaagcttgaaatcaacaggcttccattgcctcttcaaactacctcagtgggtaaaa

SEQ ID NO: 81670 - DNA, 72 bp, Homo sapiens
aatcaacaggcttccattgcctcttcaaactacctcagtgggtaaaacagcaccagagagaaacgttgaaat

SEQ ID NO: 81671 - DNA, 73 bp, Homo sapiens
ttccattgcctcttcaaactacctcagtgggtaaaacagcaccagagagaaacgttgaaattccgcccagctc

SEQ ID NO: 81672 - DNA, 73 bp, Homo sapiens
actacctcagtgggtaaaacagcaccagagagaaacgttgaaattccgcccagctctccaaatccagatggta

SEQ ID NO: 81673 - DNA, 74 bp, Homo sapiens
taaaacagcaccagagagaaacgttgaaattccgcccagctctccaaatccagatggtaagggctacttggcag

SEQ ID NO: 81674 - DNA, 73 bp, Homo sapiens
accagagagaaacgttgaaattccgcccagctctccaaatccagatggtaagggctacttggcagggactctg

SEQ ID NO: 81675 - DNA, 73 bp, Homo sapiens
agaaacgttgaaattccgcccagctctccaaatccagatggtaagggctacttggcagggactctggcaccac

SEQ ID NO: 81676 - DNA, 75 bp, Homo sapiens
aaattccgcccagctctccaaatccagatggtaagggctacttggcagggactctggcaccactccaaatgagaa

SEQ ID NO: 81677 - DNA, 75 bp, Homo sapiens
tctccaaatccagatggtaagggctacttggcagggactctggcaccactccaaatgagaaagcgagaaaaccac

SEQ ID NO: 81678 - DNA, 72 bp, Homo sapiens
aaatccagatggtaagggctacttggcagggactctggcaccactccaaatgagaaagcgagaaaaccaccc

SEQ ID NO: 81679 - DNA, 70 bp, Homo sapiens
ggtaagggctacttggcagggactctggcaccactccaaatgagaaagcgagaaaaccaccccaaaaaga

SEQ ID NO: 81680 - DNA, 72 bp, Homo sapiens
acttggcagggactctggcaccactccaaatgagaaagcgagaaaaccaccccaaaaagagagtagctagga

SEQ ID NO: 81681 - DNA, 72 bp, Homo sapiens
actctggcaccactccaaatgagaaagcgagaaaaccaccccaaaaagagagtagctaggactgtaggagaa

SEQ ID NO: 81682 - DNA, 72 bp, Homo sapiens
tccaaatgagaaagcgagaaaaccaccccaaaaagagagtagctaggactgtaggagaacacactcaagtta

SEQ ID NO: 81683 - DNA, 71 bp, Homo sapiens
aaaaagagagtagctaggactgtaggagaacacactcaagttaaatgtgaaccaggaaaattgttggtgga

SEQ ID NO: 81684 - DNA, 73 bp, Homo sapiens
agctaggactgtaggagaacacactcaagttaaatgtgaaccaggaaaattgttggtggagccagatgttaaa

SEQ ID NO: 81685 - DNA, 70 bp, Homo sapiens
actgtaggagaacacactcaagttaaatgtgaaccaggaaaattgttggtggagccagatgttaaagggg

SEQ ID NO: 81686 - DNA, 72 bp, Homo sapiens
aacacactcaagttaaatgtgaaccaggaaaattgttggtggagccagatgttaaaggggtgccttgtgtca

SEQ ID NO: 81687 - DNA, 71 bp, Homo sapiens
aagttaaatgtgaaccaggaaaattgttggtggagccagatgttaaaggggtgccttgtgtcatcagttcc

SEQ ID NO: 81688 - DNA, 75 bp, Homo sapiens
aaccaggaaaattgttggtggagccagatgttaaaggggtgccttgtgtcatcagttccggcatcagtcagctag

SEQ ID NO: 81689 - DNA, 80 bp, Homo sapiens
ccagatgttaaaggggtgccttgtgtcatcagttccggcatcagtcagctaggacacagccagccatttaagcaagaatg

SEQ ID NO: 81690 - DNA, 79 bp, Homo sapiens
ttaaaggggtgccttgtgtcatcagttccggcatcagtcagctaggacacagccagccatttaagcaagaatggctaaa

SEQ ID NO: 81691 - DNA, 83 bp, Homo sapiens
atcagttccggcatcagtcagctaggacacagccagccatttaagcaagaatggctaaacaagcactccatgcagaacagaat

SEQ ID NO: 81692 - DNA, 83 bp, Homo sapiens
atcagtcagctaggacacagccagccatttaagcaagaatggctaaacaagcactccatgcagaacagaattgttcacagccc

SEQ ID NO: 81693 - DNA, 82 bp, Homo sapiens
taggacacagccagccatttaagcaagaatggctaaacaagcactccatgcagaacagaattgttcacagccctgaggtcaa

SEQ ID NO: 81694 - DNA, 80 bp, Homo sapiens
cagccatttaagcaagaatggctaaacaagcactccatgcagaacagaattgttcacagccctgaggtcaaacagcaaaa

SEQ ID NO: 81695 - DNA, 78 bp, Homo sapiens
atttaagcaagaatggctaaacaagcactccatgcagaacagaattgttcacagccctgaggtcaaacagcaaaagcg

SEQ ID NO: 81696 - DNA, 79 bp, Homo sapiens
aatggctaaacaagcactccatgcagaacagaattgttcacagccctgaggtcaaacagcaaaagcggctgctcccctc

SEQ ID NO: 81697 - DNA, 80 bp, Homo sapiens
aagcactccatgcagaacagaattgttcacagccctgaggtcaaacagcaaaagcggctgctcccctcgtgtagcttcca

SEQ ID NO: 81698 - DNA, 77 bp, Homo sapiens
agaacagaattgttcacagccctgaggtcaaacagcaaaagcggctgctcccctcgtgtagcttccagcagaaccta

SEQ ID NO: 81699 - DNA, 77 bp, Homo sapiens
agaattgttcacagccctgaggtcaaacagcaaaagcggctgctcccctcgtgtagcttccagcagaacctatttca

SEQ ID NO: 81700 - DNA, 77 bp, Homo sapiens
aaacagcaaaagcggctgctcccctcgtgtagcttccagcagaacctatttcatgttgacaagaatggcggcttcca

SEQ ID NO: 81701 - DNA, 79 bp, Homo sapiens
ccctcgtgtagcttccagcagaacctatttcatgttgacaagaatggcggcttccacactgacgctggtacctcacaca

SEQ ID NO: 81702 - DNA, 81 bp, Homo sapiens
tagcttccagcagaacctatttcatgttgacaagaatggcggcttccacactgacgctggtacctcacacagacagcagtt

SEQ ID NO: 81703 - DNA, 80 bp, Homo sapiens
tatttcatgttgacaagaatggcggcttccacactgacgctggtacctcacacagacagcagttttaccaaatgcctgtg

SEQ ID NO: 81704 - DNA, 77 bp, Homo sapiens
cttccacactgacgctggtacctcacacagacagcagttttaccaaatgcctgtggctgccaggggccccattccta

SEQ ID NO: 81705 - DNA, 80 bp, Homo sapiens
tgacgctggtacctcacacagacagcagttttaccaaatgcctgtggctgccaggggccccattcctactgcagctctgt

SEQ ID NO: 81706 - DNA, 79 bp, Homo sapiens
tggtacctcacacagacagcagttttaccaaatgcctgtggctgccaggggccccattcctactgcagctctgttacag

SEQ ID NO: 81707 - DNA, 77 bp, Homo sapiens
agacagcagttttaccaaatgcctgtggctgccaggggccccattcctactgcagctctgttacaggcctcttccaa

SEQ ID NO: 81708 - DNA, 74 bp, Homo sapiens
agttttaccaaatgcctgtggctgccaggggccccattcctactgcagctctgttacaggcctcttccaagacc

SEQ ID NO: 81709 - DNA, 77 bp, Homo sapiens
ctgtggctgccaggggccccattcctactgcagctctgttacaggcctcttccaagaccccagtggggtgtaatgca

SEQ ID NO: 81710 - DNA, 74 bp, Homo sapiens
caggggccccattcctactgcagctctgttacaggcctcttccaagaccccagtggggtgtaatgcatttgcct

SEQ ID NO: 81711 - DNA, 77 bp, Homo sapiens
attcctactgcagctctgttacaggcctcttccaagaccccagtggggtgtaatgcatttgccttcaacaggcatct

SEQ ID NO: 81712 - DNA, 80 bp, Homo sapiens
tactgcagctctgttacaggcctcttccaagaccccagtggggtgtaatgcatttgccttcaacaggcatcttgaacaga

SEQ ID NO: 81713 - DNA, 75 bp, Homo sapiens
tgttacaggcctcttccaagaccccagtggggtgtaatgcatttgccttcaacaggcatcttgaacagaagggat

SEQ ID NO: 81714 - DNA, 74 bp, Homo sapiens
ttccaagaccccagtggggtgtaatgcatttgccttcaacaggcatcttgaacagaagggattgggagaggtta

SEQ ID NO: 81715 - DNA, 75 bp, Homo sapiens
ccagtggggtgtaatgcatttgccttcaacaggcatcttgaacagaagggattgggagaggttagtctttcctca

SEQ ID NO: 81716 - DNA, 79 bp, Homo sapiens
taatgcatttgccttcaacaggcatcttgaacagaagggattgggagaggttagtctttcctcagcacctcaccagcta

SEQ ID NO: 81717 - DNA, 74 bp, Homo sapiens
aacaggcatcttgaacagaagggattgggagaggttagtctttcctcagcacctcaccagctaaggttagccaa

SEQ ID NO: 81718 - DNA, 74 bp, Homo sapiens
ttgaacagaagggattgggagaggttagtctttcctcagcacctcaccagctaaggttagccaacatgttatcc

SEQ ID NO: 81719 - DNA, 74 bp, Homo sapiens
attgggagaggttagtctttcctcagcacctcaccagctaaggttagccaacatgttatcccccaatatgccca

SEQ ID NO: 81720 - DNA, 77 bp, Homo sapiens
tttcctcagcacctcaccagctaaggttagccaacatgttatcccccaatatgcccatgaaagaaggtgatgaggtg

SEQ ID NO: 81721 - DNA, 75 bp, Homo sapiens
acctcaccagctaaggttagccaacatgttatcccccaatatgcccatgaaagaaggtgatgaggtgggaggcac

SEQ ID NO: 81722 - DNA, 80 bp, Homo sapiens
taaggttagccaacatgttatcccccaatatgcccatgaaagaaggtgatgaggtgggaggcactgcacacacaatgcca

SEQ ID NO: 81723 - DNA, 80 bp, Homo sapiens
cccaatatgcccatgaaagaaggtgatgaggtgggaggcactgcacacacaatgccaaacaaagcactagtacatccgcc

SEQ ID NO: 81724 - DNA, 82 bp, Homo sapiens
tatgcccatgaaagaaggtgatgaggtgggaggcactgcacacacaatgccaaacaaagcactagtacatccgccgccgcca

SEQ ID NO: 81725 - DNA, 77 bp, Homo sapiens
aaagaaggtgatgaggtgggaggcactgcacacacaatgccaaacaaagcactagtacatccgccgccgccaccgcc

SEQ ID NO: 81726 - DNA, 76 bp, Homo sapiens
atgaggtgggaggcactgcacacacaatgccaaacaaagcactagtacatccgccgccgccaccgcctccccctcc

SEQ ID NO: 81727 - DNA, 63 bp, Homo sapiens
ccctccccctccacccttggctttgcccccgcctccccccccaccacctccgctacctccacc

SEQ ID NO: 81728 - DNA, 69 bp, Homo sapiens
tccacccttggctttgcccccgcctccccccccaccacctccgctacctccacctctccctaatgcaga

SEQ ID NO: 81729 - DNA, 70 bp, Homo sapiens
ctttgcccccgcctccccccccaccacctccgctacctccacctctccctaatgcagaagtcccatctga

SEQ ID NO: 81730 - DNA, 71 bp, Homo sapiens
cgcctccccccccaccacctccgctacctccacctctccctaatgcagaagtcccatctgatcaaaaacaa

SEQ ID NO: 81731 - DNA, 73 bp, Homo sapiens
ccaccacctccgctacctccacctctccctaatgcagaagtcccatctgatcaaaaacaacctccagttacca

SEQ ID NO: 81732 - DNA, 73 bp, Homo sapiens
acctccgctacctccacctctccctaatgcagaagtcccatctgatcaaaaacaacctccagttaccatggaa

SEQ ID NO: 81733 - DNA, 72 bp, Homo sapiens
acctctccctaatgcagaagtcccatctgatcaaaaacaacctccagttaccatggaaaccactaagagact

SEQ ID NO: 81734 - DNA, 73 bp, Homo sapiens
tccctaatgcagaagtcccatctgatcaaaaacaacctccagttaccatggaaaccactaagagacttagttg

SEQ ID NO: 81735 - DNA, 72 bp, Homo sapiens
agaagtcccatctgatcaaaaacaacctccagttaccatggaaaccactaagagacttagttggccacagtc

SEQ ID NO: 81736 - DNA, 72 bp, Homo sapiens
atcaaaaacaacctccagttaccatggaaaccactaagagacttagttggccacagtccacgggcatatgta

SEQ ID NO: 81737 - DNA, 73 bp, Homo sapiens
aacctccagttaccatggaaaccactaagagacttagttggccacagtccacgggcatatgtagcaatataaa

SEQ ID NO: 81738 - DNA, 73 bp, Homo sapiens
agttaccatggaaaccactaagagacttagttggccacagtccacgggcatatgtagcaatataaaatcggaa

SEQ ID NO: 81739 - DNA, 73 bp, Homo sapiens
taagagacttagttggccacagtccacgggcatatgtagcaatataaaatcggaacctctttcttttgaggaa

SEQ ID NO: 81740 - DNA, 70 bp, Homo sapiens
acttagttggccacagtccacgggcatatgtagcaatataaaatcggaacctctttcttttgaggaaggt

SEQ ID NO: 81741 - DNA, 71 bp, Homo sapiens
ttagttggccacagtccacgggcatatgtagcaatataaaatcggaacctctttcttttgaggaaggttta

SEQ ID NO: 81742 - DNA, 74 bp, Homo sapiens
ttggccacagtccacgggcatatgtagcaatataaaatcggaacctctttcttttgaggaaggtttaagcagca

SEQ ID NO: 81743 - DNA, 74 bp, Homo sapiens
agtccacgggcatatgtagcaatataaaatcggaacctctttcttttgaggaaggtttaagcagcagctgtgaa

SEQ ID NO: 81744 - DNA, 73 bp, Homo sapiens
acgggcatatgtagcaatataaaatcggaacctctttcttttgaggaaggtttaagcagcagctgtgaactgg

SEQ ID NO: 81745 - DNA, 75 bp, Homo sapiens
atatgtagcaatataaaatcggaacctctttcttttgaggaaggtttaagcagcagctgtgaactgggcatgaaa

SEQ ID NO: 81746 - DNA, 76 bp, Homo sapiens
tatgtagcaatataaaatcggaacctctttcttttgaggaaggtttaagcagcagctgtgaactgggcatgaaaca

SEQ ID NO: 81747 - DNA, 71 bp, Homo sapiens
atataaaatcggaacctctttcttttgaggaaggtttaagcagcagctgtgaactgggcatgaaacaagtt

SEQ ID NO: 81748 - DNA, 72 bp, Homo sapiens
tataaaatcggaacctctttcttttgaggaaggtttaagcagcagctgtgaactgggcatgaaacaagtttc

SEQ ID NO: 81749 - DNA, 76 bp, Homo sapiens
tttcttttgaggaaggtttaagcagcagctgtgaactgggcatgaaacaagtttcctatgaccagaatgaaatgaa

SEQ ID NO: 81750 - DNA, 72 bp, Homo sapiens
aactgggcatgaaacaagtttcctatgaccagaatgaaatgaaagaacagttaaaagcattcgcgctaaaaa

SEQ ID NO: 81751 - DNA, 74 bp, Homo sapiens
tttcctatgaccagaatgaaatgaaagaacagttaaaagcattcgcgctaaaaagtgcagatttctcttcctat

SEQ ID NO: 81752 - DNA, 74 bp, Homo sapiens
atgaaagaacagttaaaagcattcgcgctaaaaagtgcagatttctcttcctatttgctttctgagccacaaaa

SEQ ID NO: 81753 - DNA, 73 bp, Homo sapiens
agcattcgcgctaaaaagtgcagatttctcttcctatttgctttctgagccacaaaagccttttacccaatta

SEQ ID NO: 81754 - DNA, 74 bp, Homo sapiens
taaaaagtgcagatttctcttcctatttgctttctgagccacaaaagccttttacccaattagctgctcagaaa

SEQ ID NO: 81755 - DNA, 80 bp, Homo sapiens
ttcctatttgctttctgagccacaaaagccttttacccaattagctgctcagaaaatgcaggtgcagcaacaacagcagc

SEQ ID NO: 81756 - DNA, 81 bp, Homo sapiens
ttctgagccacaaaagccttttacccaattagctgctcagaaaatgcaggtgcagcaacaacagcagctctgtggaaatta

SEQ ID NO: 81757 - DNA, 79 bp, Homo sapiens
aaagccttttacccaattagctgctcagaaaatgcaggtgcagcaacaacagcagctctgtggaaattatccaacaata

SEQ ID NO: 81758 - DNA, 80 bp, Homo sapiens
ttttacccaattagctgctcagaaaatgcaggtgcagcaacaacagcagctctgtggaaattatccaacaatacactttg

SEQ ID NO: 81759 - DNA, 82 bp, Homo sapiens
tgctcagaaaatgcaggtgcagcaacaacagcagctctgtggaaattatccaacaatacactttggtagcacgagtttcaaa

SEQ ID NO: 81760 - DNA, 78 bp, Homo sapiens
agaaaatgcaggtgcagcaacaacagcagctctgtggaaattatccaacaatacactttggtagcacgagtttcaaaa

SEQ ID NO: 81761 - DNA, 79 bp, Homo sapiens
agcaacaacagcagctctgtggaaattatccaacaatacactttggtagcacgagtttcaaaagggcagcatctgcaat

SEQ ID NO: 81762 - DNA, 77 bp, Homo sapiens
agcagctctgtggaaattatccaacaatacactttggtagcacgagtttcaaaagggcagcatctgcaattgaaaag

SEQ ID NO: 81763 - DNA, 74 bp, Homo sapiens
ttatccaacaatacactttggtagcacgagtttcaaaagggcagcatctgcaattgaaaagtccattgggattt

SEQ ID NO: 81764 - DNA, 73 bp, Homo sapiens
atacactttggtagcacgagtttcaaaagggcagcatctgcaattgaaaagtccattgggattttgggaagtg

SEQ ID NO: 81765 - DNA, 78 bp, Homo sapiens
atctgcaattgaaaagtccattgggattttgggaagtggctccaatcctgccacaggcttgtctggtcagaacgctca

SEQ ID NO: 81766 - DNA, 77 bp, Homo sapiens
aattgaaaagtccattgggattttgggaagtggctccaatcctgccacaggcttgtctggtcagaacgctcagatgc

SEQ ID NO: 81767 - DNA, 76 bp, Homo sapiens
ttgggattttgggaagtggctccaatcctgccacaggcttgtctggtcagaacgctcagatgcccgttcagaactt

SEQ ID NO: 81768 - DNA, 77 bp, Homo sapiens
attttgggaagtggctccaatcctgccacaggcttgtctggtcagaacgctcagatgcccgttcagaactttgccga

SEQ ID NO: 81769 - DNA, 86 bp, Homo sapiens
tccaatcctgccacaggcttgtctggtcagaacgctcagatgcccgttcagaactttgccgacagcagcaatgcagatgaattgga

SEQ ID NO: 81770 - DNA, 83 bp, Homo sapiens
ccacaggcttgtctggtcagaacgctcagatgcccgttcagaactttgccgacagcagcaatgcagatgaattggaactgaaa

SEQ ID NO: 81771 - DNA, 84 bp, Homo sapiens
ggcttgtctggtcagaacgctcagatgcccgttcagaactttgccgacagcagcaatgcagatgaattggaactgaaatgctct

SEQ ID NO: 81772 - DNA, 83 bp, Homo sapiens
agaacgctcagatgcccgttcagaactttgccgacagcagcaatgcagatgaattggaactgaaatgctcttgccggctgaaa

SEQ ID NO: 81773 - DNA, 84 bp, Homo sapiens
agatgcccgttcagaactttgccgacagcagcaatgcagatgaattggaactgaaatgctcttgccggctgaaagccatgattg

SEQ ID NO: 81774 - DNA, 85 bp, Homo sapiens
gttcagaactttgccgacagcagcaatgcagatgaattggaactgaaatgctcttgccggctgaaagccatgattgtgtgcaaag

SEQ ID NO: 81775 - DNA, 85 bp, Homo sapiens
cgacagcagcaatgcagatgaattggaactgaaatgctcttgccggctgaaagccatgattgtgtgcaaaggctgtggggccttc

SEQ ID NO: 81776 - DNA, 86 bp, Homo sapiens
agcaatgcagatgaattggaactgaaatgctcttgccggctgaaagccatgattgtgtgcaaaggctgtggggccttctgccatga

SEQ ID NO: 81777 - DNA, 83 bp, Homo sapiens
aattggaactgaaatgctcttgccggctgaaagccatgattgtgtgcaaaggctgtggggccttctgccatgacgactgcata

SEQ ID NO: 81778 - DNA, 82 bp, Homo sapiens
aaatgctcttgccggctgaaagccatgattgtgtgcaaaggctgtggggccttctgccatgacgactgcataggtccttcaa

SEQ ID NO: 81779 - DNA, 79 bp, Homo sapiens
ttgccggctgaaagccatgattgtgtgcaaaggctgtggggccttctgccatgacgactgcataggtccttcaaaactt

SEQ ID NO: 81780 - DNA, 81 bp, Homo sapiens
aaagccatgattgtgtgcaaaggctgtggggccttctgccatgacgactgcataggtccttcaaaactttgtgtagcatgc

SEQ ID NO: 81781 - DNA, 80 bp, Homo sapiens
ttgtgtgcaaaggctgtggggccttctgccatgacgactgcataggtccttcaaaactttgtgtagcatgcctggttgta

SEQ ID NO: 81782 - DNA, 80 bp, Homo sapiens
ccttctgccatgacgactgcataggtccttcaaaactttgtgtagcatgcctggttgtacgataagagctgagtgaaaga

SEQ ID NO: 81783 - DNA, 76 bp, Homo sapiens
ataggtccttcaaaactttgtgtagcatgcctggttgtacgataagagctgagtgaaagatgcagtatcccttttc

SEQ ID NO: 81784 - DNA, 75 bp, Homo sapiens
aaaactttgtgtagcatgcctggttgtacgataagagctgagtgaaagatgcagtatcccttttccacacggaaa

SEQ ID NO: 81785 - DNA, 78 bp, Homo sapiens
ttgtgtagcatgcctggttgtacgataagagctgagtgaaagatgcagtatcccttttccacacggaaaagccaaata

SEQ ID NO: 81786 - DNA, 78 bp, Homo sapiens
ataagagctgagtgaaagatgcagtatcccttttccacacggaaaagccaaatagcatcagcaacaacaaatagaata

SEQ ID NO: 81787 - DNA, 77 bp, Homo sapiens
agtgaaagatgcagtatcccttttccacacggaaaagccaaatagcatcagcaacaacaaatagaataatgcagtgg

SEQ ID NO: 81788 - DNA, 78 bp, Homo sapiens
atgcagtatcccttttccacacggaaaagccaaatagcatcagcaacaacaaatagaataatgcagtggtttctatca

SEQ ID NO: 81789 - DNA, 77 bp, Homo sapiens
ttttccacacggaaaagccaaatagcatcagcaacaacaaatagaataatgcagtggtttctatcatgctaatttat

SEQ ID NO: 81790 - DNA, 77 bp, Homo sapiens
acacggaaaagccaaatagcatcagcaacaacaaatagaataatgcagtggtttctatcatgctaatttattttgct

SEQ ID NO: 81791 - DNA, 78 bp, Homo sapiens
aatagcatcagcaacaacaaatagaataatgcagtggtttctatcatgctaatttattttgctttggagcaggtacct

SEQ ID NO: 81792 - DNA, 76 bp, Homo sapiens
gcaacaacaaatagaataatgcagtggtttctatcatgctaatttattttgctttggagcaggtacctttcctcta

SEQ ID NO: 81793 - DNA, 76 bp, Homo sapiens
atagaataatgcagtggtttctatcatgctaatttattttgctttggagcaggtacctttcctctatggcattatt

SEQ ID NO: 81794 - DNA, 75 bp, Homo sapiens
ataatgcagtggtttctatcatgctaatttattttgctttggagcaggtacctttcctctatggcattattttct

SEQ ID NO: 81795 - DNA, 77 bp, Homo sapiens
gtttctatcatgctaatttattttgctttggagcaggtacctttcctctatggcattattttcttgcatttctcata

SEQ ID NO: 81796 - DNA, 73 bp, Homo sapiens
atgctaatttattttgctttggagcaggtacctttcctctatggcattattttcttgcatttctcataaaggg

SEQ ID NO: 81797 - DNA, 75 bp, Homo sapiens
attttgctttggagcaggtacctttcctctatggcattattttcttgcatttctcataaaggggaggatgcatcc

SEQ ID NO: 81798 - DNA, 81 bp, Homo sapiens
tcctctatggcattattttcttgcatttctcataaaggggaggatgcatcccaactgaatggctcactggcatgtctttta

SEQ ID NO: 81799 - DNA, 82 bp, Homo sapiens
ttgcatttctcataaaggggaggatgcatcccaactgaatggctcactggcatgtcttttatgtgttcagttgccattccta

SEQ ID NO: 81800 - DNA, 80 bp, Homo sapiens
ttctcataaaggggaggatgcatcccaactgaatggctcactggcatgtcttttatgtgttcagttgccattcctagctt

SEQ ID NO: 81801 - DNA, 79 bp, Homo sapiens
aggatgcatcccaactgaatggctcactggcatgtcttttatgtgttcagttgccattcctagctttggaaagtttcta

SEQ ID NO: 81802 - DNA, 78 bp, Homo sapiens
atcccaactgaatggctcactggcatgtcttttatgtgttcagttgccattcctagctttggaaagtttctatctgtc

SEQ ID NO: 81803 - DNA, 77 bp, Homo sapiens
atgtcttttatgtgttcagttgccattcctagctttggaaagtttctatctgtccatgtgtatacaagtcaatgccc

SEQ ID NO: 81804 - DNA, 72 bp, Homo sapiens
agttgccattcctagctttggaaagtttctatctgtccatgtgtatacaagtcaatgccccatttttgtttt

SEQ ID NO: 81805 - DNA, 62 bp, Homo sapiens
gtttttcttttaaccgaggtgtagataggaaaaggacatttttaattacttaataaccggaa

SEQ ID NO: 81806 - DNA, 69 bp, Homo sapiens
taaccgaggtgtagataggaaaaggacatttttaattacttaataaccggaaatgcagatgtgtaagga

SEQ ID NO: 81807 - DNA, 71 bp, Homo sapiens
ggtgtagataggaaaaggacatttttaattacttaataaccggaaatgcagatgtgtaaggagaatgagag

SEQ ID NO: 81808 - DNA, 71 bp, Homo sapiens
ggaaaaggacatttttaattacttaataaccggaaatgcagatgtgtaaggagaatgagaggaatgagtta

SEQ ID NO: 81809 - DNA, 73 bp, Homo sapiens
ttaattacttaataaccggaaatgcagatgtgtaaggagaatgagaggaatgagttaaagtggttatgcattt

SEQ ID NO: 81810 - DNA, 75 bp, Homo sapiens
cttaataaccggaaatgcagatgtgtaaggagaatgagaggaatgagttaaagtggttatgcatttttctataga

SEQ ID NO: 81811 - DNA, 77 bp, Homo sapiens
tgtaaggagaatgagaggaatgagttaaagtggttatgcatttttctatagatgagccattacagcaaggaatttta

SEQ ID NO: 81812 - DNA, 76 bp, Homo sapiens
atgagaggaatgagttaaagtggttatgcatttttctatagatgagccattacagcaaggaattttacagttgact

SEQ ID NO: 81813 - DNA, 77 bp, Homo sapiens
gaatgagttaaagtggttatgcatttttctatagatgagccattacagcaaggaattttacagttgacttctctgaa

SEQ ID NO: 81814 - DNA, 76 bp, Homo sapiens
agtggttatgcatttttctatagatgagccattacagcaaggaattttacagttgacttctctgaacctagcttta

SEQ ID NO: 81815 - DNA, 76 bp, Homo sapiens
tttttctatagatgagccattacagcaaggaattttacagttgacttctctgaacctagctttaccacagtgatta

SEQ ID NO: 81816 - DNA, 77 bp, Homo sapiens
tatagatgagccattacagcaaggaattttacagttgacttctctgaacctagctttaccacagtgattaaatccta

SEQ ID NO: 81817 - DNA, 73 bp, Homo sapiens
ccattacagcaaggaattttacagttgacttctctgaacctagctttaccacagtgattaaatcctatttaga

SEQ ID NO: 81818 - DNA, 69 bp, Homo sapiens
caaggaattttacagttgacttctctgaacctagctttaccacagtgattaaatcctatttagaaaggg

SEQ ID NO: 81819 - DNA, 71 bp, Homo sapiens
acagttgacttctctgaacctagctttaccacagtgattaaatcctatttagaaaggggaatctgatttaa

SEQ ID NO: 81820 - DNA, 71 bp, Homo sapiens
ctgaacctagctttaccacagtgattaaatcctatttagaaaggggaatctgatttaaatgtgtgattcct

SEQ ID NO: 81821 - DNA, 73 bp, Homo sapiens
gctttaccacagtgattaaatcctatttagaaaggggaatctgatttaaatgtgtgattccttgtatttgctc

SEQ ID NO: 81822 - DNA, 75 bp, Homo sapiens
ccacagtgattaaatcctatttagaaaggggaatctgatttaaatgtgtgattccttgtatttgctcctatcaca

SEQ ID NO: 81823 - DNA, 73 bp, Homo sapiens
gattaaatcctatttagaaaggggaatctgatttaaatgtgtgattccttgtatttgctcctatcacaaaaga

SEQ ID NO: 81824 - DNA, 73 bp, Homo sapiens
tagaaaggggaatctgatttaaatgtgtgattccttgtatttgctcctatcacaaaagatatattaaaggagg

SEQ ID NO: 81825 - DNA, 75 bp, Homo sapiens
aggggaatctgatttaaatgtgtgattccttgtatttgctcctatcacaaaagatatattaaaggaggtatgcca

SEQ ID NO: 81826 - DNA, 76 bp, Homo sapiens
gggaatctgatttaaatgtgtgattccttgtatttgctcctatcacaaaagatatattaaaggaggtatgccatta

SEQ ID NO: 81827 - DNA, 76 bp, Homo sapiens
aaatgtgtgattccttgtatttgctcctatcacaaaagatatattaaaggaggtatgccattaatgaaatccactg

SEQ ID NO: 81828 - DNA, 76 bp, Homo sapiens
ttccttgtatttgctcctatcacaaaagatatattaaaggaggtatgccattaatgaaatccactgtcctgagtat

SEQ ID NO: 81829 - DNA, 76 bp, Homo sapiens
tttgctcctatcacaaaagatatattaaaggaggtatgccattaatgaaatccactgtcctgagtattatctttcc

SEQ ID NO: 81830 - DNA, 76 bp, Homo sapiens
tcacaaaagatatattaaaggaggtatgccattaatgaaatccactgtcctgagtattatctttcctcctgttgta

SEQ ID NO: 81831 - DNA, 75 bp, Homo sapiens
atatattaaaggaggtatgccattaatgaaatccactgtcctgagtattatctttcctcctgttgtactttctca

SEQ ID NO: 81832 - DNA, 75 bp, Homo sapiens
aaaggaggtatgccattaatgaaatccactgtcctgagtattatctttcctcctgttgtactttctcagagacta

SEQ ID NO: 81833 - DNA, 79 bp, Homo sapiens
attaatgaaatccactgtcctgagtattatctttcctcctgttgtactttctcagagactatggcagaatatctggatc

SEQ ID NO: 81834 - DNA, 77 bp, Homo sapiens
aaatccactgtcctgagtattatctttcctcctgttgtactttctcagagactatggcagaatatctggatcttcct

SEQ ID NO: 81835 - DNA, 79 bp, Homo sapiens
tgagtattatctttcctcctgttgtactttctcagagactatggcagaatatctggatcttccttggattttgtacaca

SEQ ID NO: 81836 - DNA, 78 bp, Homo sapiens
atctttcctcctgttgtactttctcagagactatggcagaatatctggatcttccttggattttgtacacatattgta

SEQ ID NO: 81837 - DNA, 82 bp, Homo sapiens
tctcagagactatggcagaatatctggatcttccttggattttgtacacatattgtagtgaaatgtgtcctacatctgaaat

SEQ ID NO: 81838 - DNA, 81 bp, Homo sapiens
actatggcagaatatctggatcttccttggattttgtacacatattgtagtgaaatgtgtcctacatctgaaattgcatgg

SEQ ID NO: 81839 - DNA, 81 bp, Homo sapiens
aatatctggatcttccttggattttgtacacatattgtagtgaaatgtgtcctacatctgaaattgcatgggactcatgcc

SEQ ID NO: 81840 - DNA, 81 bp, Homo sapiens
ttccttggattttgtacacatattgtagtgaaatgtgtcctacatctgaaattgcatgggactcatgcccagcaatctggt

SEQ ID NO: 81841 - DNA, 81 bp, Homo sapiens
tttgtacacatattgtagtgaaatgtgtcctacatctgaaattgcatgggactcatgcccagcaatctggttctaggcctt

SEQ ID NO: 81842 - DNA, 83 bp, Homo sapiens
tattgtagtgaaatgtgtcctacatctgaaattgcatgggactcatgcccagcaatctggttctaggcctttgacacctgata

SEQ ID NO: 81843 - DNA, 84 bp, Homo sapiens
aaatgtgtcctacatctgaaattgcatgggactcatgcccagcaatctggttctaggcctttgacacctgataatatgagagca

SEQ ID NO: 81844 - DNA, 85 bp, Homo sapiens
tcctacatctgaaattgcatgggactcatgcccagcaatctggttctaggcctttgacacctgataatatgagagcaattggcca

SEQ ID NO: 81845 - DNA, 83 bp, Homo sapiens
aaattgcatgggactcatgcccagcaatctggttctaggcctttgacacctgataatatgagagcaattggccagccaatagc

SEQ ID NO: 81846 - DNA, 83 bp, Homo sapiens
actcatgcccagcaatctggttctaggcctttgacacctgataatatgagagcaattggccagccaatagccataagcccaga

SEQ ID NO: 81847 - DNA, 79 bp, Homo sapiens
caatctggttctaggcctttgacacctgataatatgagagcaattggccagccaatagccataagcccagaggatttta

SEQ ID NO: 81848 - DNA, 80 bp, Homo sapiens
gttctaggcctttgacacctgataatatgagagcaattggccagccaatagccataagcccagaggattttagagcttca

SEQ ID NO: 81849 - DNA, 81 bp, Homo sapiens
tttgacacctgataatatgagagcaattggccagccaatagccataagcccagaggattttagagcttcatgtgtggcttt

SEQ ID NO: 81850 - DNA, 78 bp, Homo sapiens
agagcaattggccagccaatagccataagcccagaggattttagagcttcatgtgtggcttttaagagcaggtttgaa

SEQ ID NO: 81851 - DNA, 74 bp, Homo sapiens
ggccagccaatagccataagcccagaggattttagagcttcatgtgtggcttttaagagcaggtttgaaaaaaa

SEQ ID NO: 81852 - DNA, 72 bp, Homo sapiens
tatctctctccataaatcggtggcgcggcggaggcggcagagtcgggcgggaagcgcggggccggccggggc

SEQ ID NO: 81853 - DNA, 68 bp, Homo sapiens
ataaatcggtggcgcggcggaggcggcagagtcgggcgggaagcgcggggccggccggggcgcccgcc

SEQ ID NO: 81854 - DNA, 69 bp, Homo sapiens
cggcggaggcggcagagtcgggcgggaagcgcggggccggccggggcgcccgccgctcgccgccgcctc

SEQ ID NO: 81855 - DNA, 70 bp, Homo sapiens
aggcggcagagtcgggcgggaagcgcggggccggccggggcgcccgccgctcgccgccgcctccgcgcgc

SEQ ID NO: 81856 - DNA, 66 bp, Homo sapiens
agtcgggcgggaagcgcggggccggccggggcgcccgccgctcgccgccgcctccgcgcgcccggg

SEQ ID NO: 81857 - DNA, 66 bp, Homo sapiens
aagcgcggggccggccggggcgcccgccgctcgccgccgcctccgcgcgcccgggggccccggcgc

SEQ ID NO: 81858 - DNA, 69 bp, Homo sapiens
cgccgctcgccgccgcctccgcgcgcccgggggccccggcgccccccgagctagggcggccagctcgcg

SEQ ID NO: 81859 - DNA, 68 bp, Homo sapiens
cgccgcctccgcgcgcccgggggccccggcgccccccgagctagggcggccagctcgcggctcgccgt

SEQ ID NO: 81860 - DNA, 74 bp, Homo sapiens
gcgcgcccgggggccccggcgccccccgagctagggcggccagctcgcggctcgccgtttgacagatgctcatc

SEQ ID NO: 81861 - DNA, 77 bp, Homo sapiens
gggccccggcgccccccgagctagggcggccagctcgcggctcgccgtttgacagatgctcatcgccatggagttgc

SEQ ID NO: 81862 - DNA, 81 bp, Homo sapiens
gccccccgagctagggcggccagctcgcggctcgccgtttgacagatgctcatcgccatggagttgccgcagcagcacctt

SEQ ID NO: 81863 - DNA, 81 bp, Homo sapiens
ccgagctagggcggccagctcgcggctcgccgtttgacagatgctcatcgccatggagttgccgcagcagcacctttgggg

SEQ ID NO: 81864 - DNA, 82 bp, Homo sapiens
cagctcgcggctcgccgtttgacagatgctcatcgccatggagttgccgcagcagcacctttgggggctcgggcgagcgacg

SEQ ID NO: 81865 - DNA, 79 bp, Homo sapiens
ctcgccgtttgacagatgctcatcgccatggagttgccgcagcagcacctttgggggctcgggcgagcgacgggagccg

SEQ ID NO: 81866 - DNA, 81 bp, Homo sapiens
gtttgacagatgctcatcgccatggagttgccgcagcagcacctttgggggctcgggcgagcgacgggagccgggatctga

SEQ ID NO: 81867 - DNA, 81 bp, Homo sapiens
atgctcatcgccatggagttgccgcagcagcacctttgggggctcgggcgagcgacgggagccgggatctgagcgagcgcc

SEQ ID NO: 81868 - DNA, 76 bp, Homo sapiens
atggagttgccgcagcagcacctttgggggctcgggcgagcgacgggagccgggatctgagcgagcgccggggcca

SEQ ID NO: 81869 - DNA, 74 bp, Homo sapiens
agcagcacctttgggggctcgggcgagcgacgggagccgggatctgagcgagcgccggggccagcggagccgga

SEQ ID NO: 81870 - DNA, 71 bp, Homo sapiens
acctttgggggctcgggcgagcgacgggagccgggatctgagcgagcgccggggccagcggagccggagcc

SEQ ID NO: 81871 - DNA, 75 bp, Homo sapiens
tcgggcgagcgacgggagccgggatctgagcgagcgccggggccagcggagccggagccgccgggacatgggtga

SEQ ID NO: 81872 - DNA, 76 bp, Homo sapiens
agcgacgggagccgggatctgagcgagcgccggggccagcggagccggagccgccgggacatgggtgagcacgcgc

SEQ ID NO: 81873 - DNA, 75 bp, Homo sapiens
ccgggatctgagcgagcgccggggccagcggagccggagccgccgggacatgggtgagcacgcgcggcgaccttg

SEQ ID NO: 81874 - DNA, 73 bp, Homo sapiens
agcgagcgccggggccagcggagccggagccgccgggacatgggtgagcacgcgcggcgaccttggcccggga

SEQ ID NO: 81875 - DNA, 70 bp, Homo sapiens
ttttttttctctctttgtaacttgcaggttaagtggagctagagagctacattgtaacctagttggattt

SEQ ID NO: 81876 - DNA, 71 bp, Homo sapiens
tttctctctttgtaacttgcaggttaagtggagctagagagctacattgtaacctagttggatttttttgg

SEQ ID NO: 81877 - DNA, 69 bp, Homo sapiens
tgtaacttgcaggttaagtggagctagagagctacattgtaacctagttggatttttttggggggggaa

SEQ ID NO: 81878 - DNA, 71 bp, Homo sapiens
ttaagtggagctagagagctacattgtaacctagttggatttttttggggggggaatgtatcagaatctaa

SEQ ID NO: 81879 - DNA, 70 bp, Homo sapiens
tagagagctacattgtaacctagttggatttttttggggggggaatgtatcagaatctaacgtgtcgtta

SEQ ID NO: 81880 - DNA, 68 bp, Homo sapiens
tacattgtaacctagttggatttttttggggggggaatgtatcagaatctaacgtgtcgttaatagaa

SEQ ID NO: 81881 - DNA, 66 bp, Homo sapiens
aacctagttggatttttttggggggggaatgtatcagaatctaacgtgtcgttaatagaaagaaga

SEQ ID NO: 81882 - DNA, 69 bp, Homo sapiens
tttttggggggggaatgtatcagaatctaacgtgtcgttaatagaaagaagaacaggcaagaagtggtc

SEQ ID NO: 81883 - DNA, 72 bp, Homo sapiens
ggaatgtatcagaatctaacgtgtcgttaatagaaagaagaacaggcaagaagtggtccagccggcgaaggt

SEQ ID NO: 81884 - DNA, 73 bp, Homo sapiens
tatcagaatctaacgtgtcgttaatagaaagaagaacaggcaagaagtggtccagccggcgaaggttggtgtg

SEQ ID NO: 81885 - DNA, 72 bp, Homo sapiens
taacgtgtcgttaatagaaagaagaacaggcaagaagtggtccagccggcgaaggttggtgtgtgcttgtgt

SEQ ID NO: 81886 - DNA, 75 bp, Homo sapiens
aatagaaagaagaacaggcaagaagtggtccagccggcgaaggttggtgtgtgcttgtgttgtgcctgtgtgtta

SEQ ID NO: 81887 - DNA, 83 bp, Homo sapiens
ggtcattttcctttctgccatgcctaactgtctctttgcttctcagttgcagatctgatctcttctgaacacctcatcgtgtc

SEQ ID NO: 81888 - DNA, 84 bp, Homo sapiens
ttttcctttctgccatgcctaactgtctctttgcttctcagttgcagatctgatctcttctgaacacctcatcgtgtctccatc

SEQ ID NO: 81889 - DNA, 84 bp, Homo sapiens
atgcctaactgtctctttgcttctcagttgcagatctgatctcttctgaacacctcatcgtgtctccatccctgggaatctgac

SEQ ID NO: 81890 - DNA, 82 bp, Homo sapiens
aactgtctctttgcttctcagttgcagatctgatctcttctgaacacctcatcgtgtctccatccctgggaatctgacccta

SEQ ID NO: 81891 - DNA, 82 bp, Homo sapiens
tctcagttgcagatctgatctcttctgaacacctcatcgtgtctccatccctgggaatctgaccctagcaactggaccactt

SEQ ID NO: 81892 - DNA, 78 bp, Homo sapiens
agatctgatctcttctgaacacctcatcgtgtctccatccctgggaatctgaccctagcaactggaccactttgttct

SEQ ID NO: 81893 - DNA, 75 bp, Homo sapiens
tcttctgaacacctcatcgtgtctccatccctgggaatctgaccctagcaactggaccactttgttcttggaatt

SEQ ID NO: 81894 - DNA, 72 bp, Homo sapiens
aacacctcatcgtgtctccatccctgggaatctgaccctagcaactggaccactttgttcttggaattttgg

SEQ ID NO: 81895 - DNA, 71 bp, Homo sapiens
tgtctccatccctgggaatctgaccctagcaactggaccactttgttcttggaattttgggtgtcctcttt

SEQ ID NO: 81896 - DNA, 69 bp, Homo sapiens
ctgggaatctgaccctagcaactggaccactttgttcttggaattttgggtgtcctcttttctcacctt

SEQ ID NO: 81897 - DNA, 67 bp, Homo sapiens
tgaccctagcaactggaccactttgttcttggaattttgggtgtcctcttttctcacctttcccttt

SEQ ID NO: 81898 - DNA, 63 bp, Homo sapiens
aactggaccactttgttcttggaattttgggtgtcctcttttctcacctttcccttttccctt

SEQ ID NO: 81899 - DNA, 62 bp, Homo sapiens
accactttgttcttggaattttgggtgtcctcttttctcacctttcccttttcccttttccc

SEQ ID NO: 81900 - DNA, 62 bp, Homo sapiens
tcttggaattttgggtgtcctcttttctcacctttcccttttcccttttccccttccccctc

SEQ ID NO: 81901 - DNA, 64 bp, Homo sapiens
tgtcctcttttctcacctttcccttttcccttttccccttccccctcctgagaactccggaaga

SEQ ID NO: 81902 - DNA, 64 bp, Homo sapiens
ttttctcacctttcccttttcccttttccccttccccctcctgagaactccggaagactgtaga

SEQ ID NO: 81903 - DNA, 67 bp, Homo sapiens
tttcccttttcccttttccccttccccctcctgagaactccggaagactgtagagattgtcatggag

SEQ ID NO: 81904 - DNA, 69 bp, Homo sapiens
ttttccccttccccctcctgagaactccggaagactgtagagattgtcatggagtccagggaaacctta

SEQ ID NO: 81905 - DNA, 72 bp, Homo sapiens
ttccccctcctgagaactccggaagactgtagagattgtcatggagtccagggaaaccttaagcagctcccg

SEQ ID NO: 81906 - DNA, 74 bp, Homo sapiens
tcctgagaactccggaagactgtagagattgtcatggagtccagggaaaccttaagcagctcccggcaaagagg

SEQ ID NO: 81907 - DNA, 73 bp, Homo sapiens
aagactgtagagattgtcatggagtccagggaaaccttaagcagctcccggcaaagagggggcgagtcagact

SEQ ID NO: 81908 - DNA, 75 bp, Homo sapiens
tgtagagattgtcatggagtccagggaaaccttaagcagctcccggcaaagagggggcgagtcagacttcctgcc

SEQ ID NO: 81909 - DNA, 72 bp, Homo sapiens
atggagtccagggaaaccttaagcagctcccggcaaagagggggcgagtcagacttcctgccggtctcctca

SEQ ID NO: 81910 - DNA, 71 bp, Homo sapiens
agggaaaccttaagcagctcccggcaaagagggggcgagtcagacttcctgccggtctcctcagccaagcc

SEQ ID NO: 81911 - DNA, 75 bp, Homo sapiens
cttaagcagctcccggcaaagagggggcgagtcagacttcctgccggtctcctcagccaagcccccagctgctcc

SEQ ID NO: 81912 - DNA, 78 bp, Homo sapiens
tcccggcaaagagggggcgagtcagacttcctgccggtctcctcagccaagcccccagctgctcctggctgtgcagga

SEQ ID NO: 81913 - DNA, 80 bp, Homo sapiens
gggcgagtcagacttcctgccggtctcctcagccaagcccccagctgctcctggctgtgcaggagaacctttgctctcca

SEQ ID NO: 81914 - DNA, 79 bp, Homo sapiens
agacttcctgccggtctcctcagccaagcccccagctgctcctggctgtgcaggagaacctttgctctccactccagga

SEQ ID NO: 81915 - DNA, 79 bp, Homo sapiens
tgccggtctcctcagccaagcccccagctgctcctggctgtgcaggagaacctttgctctccactccaggacctgggaa

SEQ ID NO: 81916 - DNA, 75 bp, Homo sapiens
agccaagcccccagctgctcctggctgtgcaggagaacctttgctctccactccaggacctgggaaggggatccc

SEQ ID NO: 81917 - DNA, 76 bp, Homo sapiens
cagctgctcctggctgtgcaggagaacctttgctctccactccaggacctgggaaggggatcccggtgggcggaga

SEQ ID NO: 81918 - DNA, 77 bp, Homo sapiens
tggctgtgcaggagaacctttgctctccactccaggacctgggaaggggatcccggtgggcggagagcgcatggagc

SEQ ID NO: 81919 - DNA, 77 bp, Homo sapiens
atcccggtgggcggagagcgcatggagccagaggaggaggatgaactaggctcagggcgggatgtggattccaactc

SEQ ID NO: 81920 - DNA, 78 bp, Homo sapiens
cggagagcgcatggagccagaggaggaggatgaactaggctcagggcgggatgtggattccaactccaacgcggacag

SEQ ID NO: 81921 - DNA, 77 bp, Homo sapiens
atggagccagaggaggaggatgaactaggctcagggcgggatgtggattccaactccaacgcggacagtgagaaatg

SEQ ID NO: 81922 - DNA, 75 bp, Homo sapiens
aggaggaggatgaactaggctcagggcgggatgtggattccaactccaacgcggacagtgagaaatgggtggcag

SEQ ID NO: 81923 - DNA, 75 bp, Homo sapiens
atgaactaggctcagggcgggatgtggattccaactccaacgcggacagtgagaaatgggtggcaggagatggtt

SEQ ID NO: 81924 - DNA, 76 bp, Homo sapiens
taggctcagggcgggatgtggattccaactccaacgcggacagtgagaaatgggtggcaggagatggtttggaaga

SEQ ID NO: 81925 - DNA, 75 bp, Homo sapiens
atgtggattccaactccaacgcggacagtgagaaatgggtggcaggagatggtttggaagagcaggaattttcta

SEQ ID NO: 81926 - DNA, 74 bp, Homo sapiens
attccaactccaacgcggacagtgagaaatgggtggcaggagatggtttggaagagcaggaattttctatcaag

SEQ ID NO: 81927 - DNA, 73 bp, Homo sapiens
aacgcggacagtgagaaatgggtggcaggagatggtttggaagagcaggaattttctatcaaggaggcaaact

SEQ ID NO: 81928 - DNA, 73 bp, Homo sapiens
agaaatgggtggcaggagatggtttggaagagcaggaattttctatcaaggaggcaaacttcacagagggaag

SEQ ID NO: 81929 - DNA, 75 bp, Homo sapiens
atggtttggaagagcaggaattttctatcaaggaggcaaacttcacagagggaagtctgaagctaaagattcaga

SEQ ID NO: 81930 - DNA, 73 bp, Homo sapiens
aattttctatcaaggaggcaaacttcacagagggaagtctgaagctaaagattcagaccacaaagcgggctaa

SEQ ID NO: 81931 - DNA, 70 bp, Homo sapiens
aaggaggcaaacttcacagagggaagtctgaagctaaagattcagaccacaaagcgggctaagaaacccc

SEQ ID NO: 81932 - DNA, 69 bp, Homo sapiens
aaacttcacagagggaagtctgaagctaaagattcagaccacaaagcgggctaagaaacccccaaagaa

SEQ ID NO: 81933 - DNA, 70 bp, Homo sapiens
aagtctgaagctaaagattcagaccacaaagcgggctaagaaacccccaaagaatttggagaactatata

SEQ ID NO: 81934 - DNA, 70 bp, Homo sapiens
aagctaaagattcagaccacaaagcgggctaagaaacccccaaagaatttggagaactatatatgtccac

SEQ ID NO: 81935 - DNA, 73 bp, Homo sapiens
attcagaccacaaagcgggctaagaaacccccaaagaatttggagaactatatatgtccacctgagatcaaga

SEQ ID NO: 81936 - DNA, 74 bp, Homo sapiens
acaaagcgggctaagaaacccccaaagaatttggagaactatatatgtccacctgagatcaagatcaccatcaa

SEQ ID NO: 81937 - DNA, 76 bp, Homo sapiens
taagaaacccccaaagaatttggagaactatatatgtccacctgagatcaagatcaccatcaagcagtctggggac

SEQ ID NO: 81938 - DNA, 77 bp, Homo sapiens
aaagaatttggagaactatatatgtccacctgagatcaagatcaccatcaagcagtctggggaccagaaggtgtccc

SEQ ID NO: 81939 - DNA, 78 bp, Homo sapiens
agaactatatatgtccacctgagatcaagatcaccatcaagcagtctggggaccagaaggtgtcccgtgctggaaaaa

SEQ ID NO: 81940 - DNA, 79 bp, Homo sapiens
atatatgtccacctgagatcaagatcaccatcaagcagtctggggaccagaaggtgtcccgtgctggaaaaaatagcaa

SEQ ID NO: 81941 - DNA, 76 bp, Homo sapiens
agatcaagatcaccatcaagcagtctggggaccagaaggtgtcccgtgctggaaaaaatagcaaagccacgaagga

SEQ ID NO: 81942 - DNA, 74 bp, Homo sapiens
agatcaccatcaagcagtctggggaccagaaggtgtcccgtgctggaaaaaatagcaaagccacgaaggaggaa

SEQ ID NO: 81943 - DNA, 69 bp, Homo sapiens
accagaaggtgtcccgtgctggaaaaaatagcaaagccacgaaggaggaagaaagaagccactccaaaa

SEQ ID NO: 81944 - DNA, 77 bp, Homo sapiens
tcagttgtcgtggggatactgtatgcaaactgaaaagtgtcactgagaaaatttctttattcttttgcagctcctca

SEQ ID NO: 81945 - DNA, 78 bp, Homo sapiens
gtggggatactgtatgcaaactgaaaagtgtcactgagaaaatttctttattcttttgcagctcctcacagccagtga

SEQ ID NO: 81946 - DNA, 80 bp, Homo sapiens
tactgtatgcaaactgaaaagtgtcactgagaaaatttctttattcttttgcagctcctcacagccagtgaccttgcagc

SEQ ID NO: 81947 - DNA, 77 bp, Homo sapiens
aaactgaaaagtgtcactgagaaaatttctttattcttttgcagctcctcacagccagtgaccttgcagccagtgac

SEQ ID NO: 81948 - DNA, 80 bp, Homo sapiens
tgtcactgagaaaatttctttattcttttgcagctcctcacagccagtgaccttgcagccagtgacctcaaaggatttca

SEQ ID NO: 81949 - DNA, 78 bp, Homo sapiens
atttctttattcttttgcagctcctcacagccagtgaccttgcagccagtgacctcaaaggatttcagccacaggtaa

SEQ ID NO: 81950 - DNA, 79 bp, Homo sapiens
ttattcttttgcagctcctcacagccagtgaccttgcagccagtgacctcaaaggatttcagccacaggtaagttccac

SEQ ID NO: 81951 - DNA, 79 bp, Homo sapiens
tcctcacagccagtgaccttgcagccagtgacctcaaaggatttcagccacaggtaagttccactgatgcttttaagaa

SEQ ID NO: 81952 - DNA, 75 bp, Homo sapiens
agccagtgaccttgcagccagtgacctcaaaggatttcagccacaggtaagttccactgatgcttttaagaagtt

SEQ ID NO: 81953 - DNA, 75 bp, Homo sapiens
ttgcagccagtgacctcaaaggatttcagccacaggtaagttccactgatgcttttaagaagtttggaagagtaa

SEQ ID NO: 81954 - DNA, 72 bp, Homo sapiens
agtgacctcaaaggatttcagccacaggtaagttccactgatgcttttaagaagtttggaagagtaaaatga

SEQ ID NO: 81955 - DNA, 71 bp, Homo sapiens
atttcagccacaggtaagttccactgatgcttttaagaagtttggaagagtaaaatgatccagagtttggt

SEQ ID NO: 81956 - DNA, 73 bp, Homo sapiens
tattttcagaagctctccaaaatctaagtcagcctcctcattttctagattaaagactccagtaaggaggaag

SEQ ID NO: 81957 - DNA, 73 bp, Homo sapiens
agaagctctccaaaatctaagtcagcctcctcattttctagattaaagactccagtaaggaggaagtctggaa

SEQ ID NO: 81958 - DNA, 72 bp, Homo sapiens
aaaatctaagtcagcctcctcattttctagattaaagactccagtaaggaggaagtctggaagagaagagga

SEQ ID NO: 81959 - DNA, 73 bp, Homo sapiens
cctcctcattttctagattaaagactccagtaaggaggaagtctggaagagaagaggaggccaaggcatccca

SEQ ID NO: 81960 - DNA, 72 bp, Homo sapiens
tttctagattaaagactccagtaaggaggaagtctggaagagaagaggaggccaaggcatcccattcaaaaa

SEQ ID NO: 81961 - DNA, 72 bp, Homo sapiens
attaaagactccagtaaggaggaagtctggaagagaagaggaggccaaggcatcccattcaaaaagcaattc

SEQ ID NO: 81962 - DNA, 72 bp, Homo sapiens
agtaaggaggaagtctggaagagaagaggaggccaaggcatcccattcaaaaagcaattcctgtcccaggaa

SEQ ID NO: 81963 - DNA, 75 bp, Homo sapiens
aagtctggaagagaagaggaggccaaggcatcccattcaaaaagcaattcctgtcccaggaacgtgccatgtgct

SEQ ID NO: 81964 - DNA, 77 bp, Homo sapiens
aagagaagaggaggccaaggcatcccattcaaaaagcaattcctgtcccaggaacgtgccatgtgcttctcatgccc

SEQ ID NO: 81965 - DNA, 74 bp, Homo sapiens
ccaaggcatcccattcaaaaagcaattcctgtcccaggaacgtgccatgtgcttctcatgcccccggaacccat

SEQ ID NO: 81966 - DNA, 72 bp, Homo sapiens
atcccattcaaaaagcaattcctgtcccaggaacgtgccatgtgcttctcatgcccccggaacccattcccc

SEQ ID NO: 81967 - DNA, 70 bp, Homo sapiens
aaaaagcaattcctgtcccaggaacgtgccatgtgcttctcatgcccccggaacccattccccgcaaaac

SEQ ID NO: 81968 - DNA, 72 bp, Homo sapiens
tgtcccaggaacgtgccatgtgcttctcatgcccccggaacccattccccgcaaaacccggttctctcactc

SEQ ID NO: 81969 - DNA, 70 bp, Homo sapiens
aggaacgtgccatgtgcttctcatgcccccggaacccattccccgcaaaacccggttctctcactcttcc

SEQ ID NO: 81970 - DNA, 71 bp, Homo sapiens
atgtgcttctcatgcccccggaacccattccccgcaaaacccggttctctcactcttccttttcacagtga

SEQ ID NO: 81971 - DNA, 68 bp, Homo sapiens
atgcccccggaacccattccccgcaaaacccggttctctcactcttccttttcacagtgaacctgcag

SEQ ID NO: 81972 - DNA, 72 bp, Homo sapiens
ccattccccgcaaaacccggttctctcactcttccttttcacagtgaacctgcagtctgggcacaagaagta

SEQ ID NO: 81973 - DNA, 74 bp, Homo sapiens
caaaacccggttctctcactcttccttttcacagtgaacctgcagtctgggcacaagaagtataacttcgcatg

SEQ ID NO: 81974 - DNA, 78 bp, Homo sapiens
cggttctctcactcttccttttcacagtgaacctgcagtctgggcacaagaagtataacttcgcatggattctgcaaa

SEQ ID NO: 81975 - DNA, 79 bp, Homo sapiens
tcttccttttcacagtgaacctgcagtctgggcacaagaagtataacttcgcatggattctgcaaagcccacacctgtg

SEQ ID NO: 81976 - DNA, 80 bp, Homo sapiens
ttttcacagtgaacctgcagtctgggcacaagaagtataacttcgcatggattctgcaaagcccacacctgtggtcattc

SEQ ID NO: 81977 - DNA, 77 bp, Homo sapiens
aacctgcagtctgggcacaagaagtataacttcgcatggattctgcaaagcccacacctgtggtcattccctgttct

SEQ ID NO: 81978 - DNA, 77 bp, Homo sapiens
ggcacaagaagtataacttcgcatggattctgcaaagcccacacctgtggtcattccctgttctttccattcaacaa

SEQ ID NO: 81979 - DNA, 77 bp, Homo sapiens
agaagtataacttcgcatggattctgcaaagcccacacctgtggtcattccctgttctttccattcaacaatggaga

SEQ ID NO: 81980 - DNA, 78 bp, Homo sapiens
catggattctgcaaagcccacacctgtggtcattccctgttctttccattcaacaatggagacttgcccaagattgta

SEQ ID NO: 81981 - DNA, 75 bp, Homo sapiens
attctgcaaagcccacacctgtggtcattccctgttctttccattcaacaatggagacttgcccaagattgtaaa

SEQ ID NO: 81982 - DNA, 77 bp, Homo sapiens
tcattccctgttctttccattcaacaatggagacttgcccaagattgtaaactagtgagtgacagcatttgggctta

SEQ ID NO: 81983 - DNA, 82 bp, Homo sapiens
attcaacaatggagacttgcccaagattgtaaactagtgagtgacagcatttgggcttatgatcttctctgcctgctagcta

SEQ ID NO: 81984 - DNA, 83 bp, Homo sapiens
agacttgcccaagattgtaaactagtgagtgacagcatttgggcttatgatcttctctgcctgctagctagacattctctctg

SEQ ID NO: 81985 - DNA, 82 bp, Homo sapiens
taaactagtgagtgacagcatttgggcttatgatcttctctgcctgctagctagacattctctctgggtctaaaagataatc

SEQ ID NO: 81986 - DNA, 80 bp, Homo sapiens
agtgacagcatttgggcttatgatcttctctgcctgctagctagacattctctctgggtctaaaagataatccaaaaaga

SEQ ID NO: 81987 - DNA, 81 bp, Homo sapiens
cttctctgcctgctagctagacattctctctgggtctaaaagataatccaaaaagatccagcttcacaatgctgccctgaa

SEQ ID NO: 81988 - DNA, 83 bp, Homo sapiens
tgctagctagacattctctctgggtctaaaagataatccaaaaagatccagcttcacaatgctgccctgaagagataatgcat

SEQ ID NO: 81989 - DNA, 80 bp, Homo sapiens
tctctgggtctaaaagataatccaaaaagatccagcttcacaatgctgccctgaagagataatgcattaggcggccctga

SEQ ID NO: 81990 - DNA, 84 bp, Homo sapiens
taaaagataatccaaaaagatccagcttcacaatgctgccctgaagagataatgcattaggcggccctgatgcagcattcactg

SEQ ID NO: 81991 - DNA, 84 bp, Homo sapiens
atccaaaaagatccagcttcacaatgctgccctgaagagataatgcattaggcggccctgatgcagcattcactgtcttccagg

SEQ ID NO: 81992 - DNA, 88 bp, Homo sapiens
agcttcacaatgctgccctgaagagataatgcattaggcggccctgatgcagcattcactgtcttccagggcaggcttgatcccatga

SEQ ID NO: 81993 - DNA, 85 bp, Homo sapiens
acaatgctgccctgaagagataatgcattaggcggccctgatgcagcattcactgtcttccagggcaggcttgatcccatgagtt

SEQ ID NO: 81994 - DNA, 88 bp, Homo sapiens
agagataatgcattaggcggccctgatgcagcattcactgtcttccagggcaggcttgatcccatgagtttgcttgctcagacgatca

SEQ ID NO: 81995 - DNA, 87 bp, Homo sapiens
taatgcattaggcggccctgatgcagcattcactgtcttccagggcaggcttgatcccatgagtttgcttgctcagacgatcactta

SEQ ID NO: 81996 - DNA, 84 bp, Homo sapiens
cggccctgatgcagcattcactgtcttccagggcaggcttgatcccatgagtttgcttgctcagacgatcacttaggaaacaca

SEQ ID NO: 81997 - DNA, 80 bp, Homo sapiens
actgtcttccagggcaggcttgatcccatgagtttgcttgctcagacgatcacttaggaaacacatgcctttactctcta

SEQ ID NO: 81998 - DNA, 77 bp, Homo sapiens
ggcaggcttgatcccatgagtttgcttgctcagacgatcacttaggaaacacatgcctttactctctaggccttttt

SEQ ID NO: 81999 - DNA, 77 bp, Homo sapiens
ttgatcccatgagtttgcttgctcagacgatcacttaggaaacacatgcctttactctctaggccttttttctagct

SEQ ID NO: 82000 - DNA, 75 bp, Homo sapiens
agtttgcttgctcagacgatcacttaggaaacacatgcctttactctctaggccttttttctagcttgccttgta

SEQ ID NO: 82001 - DNA, 78 bp, Homo sapiens
agacgatcacttaggaaacacatgcctttactctctaggccttttttctagcttgccttgtatcagctatgccatgga

SEQ ID NO: 82002 - DNA, 78 bp, Homo sapiens
aacacatgcctttactctctaggccttttttctagcttgccttgtatcagctatgccatggatctttgctctcttacc

SEQ ID NO: 82003 - DNA, 80 bp, Homo sapiens
tttactctctaggccttttttctagcttgccttgtatcagctatgccatggatctttgctctcttaccccatgctataca

SEQ ID NO: 82004 - DNA, 86 bp, Homo sapiens
ttgtatcagctatgccatggatctttgctctcttaccccatgctatacagagtatgggctccaagccacagctggcctgtcaagtg

SEQ ID NO: 82005 - DNA, 86 bp, Homo sapiens
tatgccatggatctttgctctcttaccccatgctatacagagtatgggctccaagccacagctggcctgtcaagtgtgtgtcgctg

SEQ ID NO: 82006 - DNA, 82 bp, Homo sapiens
ttaccccatgctatacagagtatgggctccaagccacagctggcctgtcaagtgtgtgtcgctggtccaccatgggatacat

SEQ ID NO: 82007 - DNA, 82 bp, Homo sapiens
atgctatacagagtatgggctccaagccacagctggcctgtcaagtgtgtgtcgctggtccaccatgggatacatttagaaa

SEQ ID NO: 82008 - DNA, 78 bp, Homo sapiens
aagccacagctggcctgtcaagtgtgtgtcgctggtccaccatgggatacatttagaaacttttatagcaatttgaca

SEQ ID NO: 82009 - DNA, 77 bp, Homo sapiens
gcctgtcaagtgtgtgtcgctggtccaccatgggatacatttagaaacttttatagcaatttgacatttttgtgata

SEQ ID NO: 82010 - DNA, 75 bp, Homo sapiens
aagtgtgtgtcgctggtccaccatgggatacatttagaaacttttatagcaatttgacatttttgtgatatccaa

SEQ ID NO: 82011 - DNA, 76 bp, Homo sapiens
ctggtccaccatgggatacatttagaaacttttatagcaatttgacatttttgtgatatccaagcatgtgattgtt

SEQ ID NO: 82012 - DNA, 75 bp, Homo sapiens
tgggatacatttagaaacttttatagcaatttgacatttttgtgatatccaagcatgtgattgttttcctacgga

SEQ ID NO: 82013 - DNA, 74 bp, Homo sapiens
ttagaaacttttatagcaatttgacatttttgtgatatccaagcatgtgattgttttcctacggatttgtctta

SEQ ID NO: 82014 - DNA, 75 bp, Homo sapiens
ttatagcaatttgacatttttgtgatatccaagcatgtgattgttttcctacggatttgtcttatagtattttac

SEQ ID NO: 82015 - DNA, 72 bp, Homo sapiens
ttgacatttttgtgatatccaagcatgtgattgttttcctacggatttgtcttatagtattttaccaaagtt

SEQ ID NO: 82016 - DNA, 73 bp, Homo sapiens
tttgtgatatccaagcatgtgattgttttcctacggatttgtcttatagtattttaccaaagtttccacacaa

SEQ ID NO: 82017 - DNA, 69 bp, Homo sapiens
atccaagcatgtgattgttttcctacggatttgtcttatagtattttaccaaagtttccacacaaaaag

SEQ ID NO: 82018 - DNA, 68 bp, Homo sapiens
gtgattgttttcctacggatttgtcttatagtattttaccaaagtttccacacaaaaagtatggatta

SEQ ID NO: 82019 - DNA, 66 bp, Homo sapiens
cctacggatttgtcttatagtattttaccaaagtttccacacaaaaagtatggattaaggacaaag

SEQ ID NO: 82020 - DNA, 69 bp, Homo sapiens
gtcttatagtattttaccaaagtttccacacaaaaagtatggattaaggacaaagtatctggtccttca

SEQ ID NO: 82021 - DNA, 69 bp, Homo sapiens
tttaccaaagtttccacacaaaaagtatggattaaggacaaagtatctggtccttcatcaaagatcgtt

SEQ ID NO: 82022 - DNA, 71 bp, Homo sapiens
aaagtttccacacaaaaagtatggattaaggacaaagtatctggtccttcatcaaagatcgtttgataagc

SEQ ID NO: 82023 - DNA, 72 bp, Homo sapiens
aaaagtatggattaaggacaaagtatctggtccttcatcaaagatcgtttgataagctctgttctagttaac

SEQ ID NO: 82024 - DNA, 76 bp, Homo sapiens
tatggattaaggacaaagtatctggtccttcatcaaagatcgtttgataagctctgttctagttaaccaacactga

SEQ ID NO: 82025 - DNA, 73 bp, Homo sapiens
aaagtatctggtccttcatcaaagatcgtttgataagctctgttctagttaaccaacactgagctttcctagt

SEQ ID NO: 82026 - DNA, 72 bp, Homo sapiens
catcaaagatcgtttgataagctctgttctagttaaccaacactgagctttcctagttttaataaaagagta

SEQ ID NO: 82027 - DNA, 71 bp, Homo sapiens
ttgataagctctgttctagttaaccaacactgagctttcctagttttaataaaagagtaggatttggactc

SEQ ID NO: 82028 - DNA, 69 bp, Homo sapiens
gctctgttctagttaaccaacactgagctttcctagttttaataaaagagtaggatttggactccttat

SEQ ID NO: 82029 - DNA, 66 bp, Homo sapiens
agttaaccaacactgagctttcctagttttaataaaagagtaggatttggactccttatttgtctt

SEQ ID NO: 82030 - DNA, 74 bp, Homo sapiens
tctgtctctctccctctccactccacccacccttaggcttacgagaggccccagaaacattcaactctccatta

SEQ ID NO: 82031 - DNA, 72 bp, Homo sapiens
tccctctccactccacccacccttaggcttacgagaggccccagaaacattcaactctccattatgacacgg

SEQ ID NO: 82032 - DNA, 71 bp, Homo sapiens
actccacccacccttaggcttacgagaggccccagaaacattcaactctccattatgacacgggcctccca

SEQ ID NO: 82033 - DNA, 72 bp, Homo sapiens
acccttaggcttacgagaggccccagaaacattcaactctccattatgacacgggcctcccacaggacttca

SEQ ID NO: 82034 - DNA, 71 bp, Homo sapiens
ccagaaacattcaactctccattatgacacgggcctcccacaggacttcaccggtgacaccttaaaaccaa

SEQ ID NO: 82035 - DNA, 71 bp, Homo sapiens
aacattcaactctccattatgacacgggcctcccacaggacttcaccggtgacaccttaaaaccaaagcac

SEQ ID NO: 82036 - DNA, 71 bp, Homo sapiens
tctccattatgacacgggcctcccacaggacttcaccggtgacaccttaaaaccaaagcaccagcaaaaaa

SEQ ID NO: 82037 - DNA, 71 bp, Homo sapiens
acgggcctcccacaggacttcaccggtgacaccttaaaaccaaagcaccagcaaaaaagcagcagccagaa

SEQ ID NO: 82038 - DNA, 73 bp, Homo sapiens
acaggacttcaccggtgacaccttaaaaccaaagcaccagcaaaaaagcagcagccagaaccacatggactgg

SEQ ID NO: 82039 - DNA, 74 bp, Homo sapiens
ttcaccggtgacaccttaaaaccaaagcaccagcaaaaaagcagcagccagaaccacatggactggtccaccaa

SEQ ID NO: 82040 - DNA, 75 bp, Homo sapiens
accttaaaaccaaagcaccagcaaaaaagcagcagccagaaccacatggactggtccaccaactctgacagcgga

SEQ ID NO: 82041 - DNA, 78 bp, Homo sapiens
aagcaccagcaaaaaagcagcagccagaaccacatggactggtccaccaactctgacagcggacccgtcactcagaat

SEQ ID NO: 82042 - DNA, 82 bp, Homo sapiens
agcagccagaaccacatggactggtccaccaactctgacagcggacccgtcactcagaattgcttcatcagtccagagtctg

SEQ ID NO: 82043 - DNA, 81 bp, Homo sapiens
aaccacatggactggtccaccaactctgacagcggacccgtcactcagaattgcttcatcagtccagagtctggcagagaa

SEQ ID NO: 82044 - DNA, 82 bp, Homo sapiens
actggtccaccaactctgacagcggacccgtcactcagaattgcttcatcagtccagagtctggcagagaaactgcaagcac

SEQ ID NO: 82045 - DNA, 84 bp, Homo sapiens
accaactctgacagcggacccgtcactcagaattgcttcatcagtccagagtctggcagagaaactgcaagcaccagcaagatc

SEQ ID NO: 82046 - DNA, 83 bp, Homo sapiens
agcggacccgtcactcagaattgcttcatcagtccagagtctggcagagaaactgcaagcaccagcaagatccccgctcttga

SEQ ID NO: 82047 - DNA, 83 bp, Homo sapiens
actcagaattgcttcatcagtccagagtctggcagagaaactgcaagcaccagcaagatccccgctcttgagcccgtggcttc

SEQ ID NO: 82048 - DNA, 80 bp, Homo sapiens
aattgcttcatcagtccagagtctggcagagaaactgcaagcaccagcaagatccccgctcttgagcccgtggcttcctt

SEQ ID NO: 82049 - DNA, 78 bp, Homo sapiens
agtccagagtctggcagagaaactgcaagcaccagcaagatccccgctcttgagcccgtggcttcctttgcaaaggcc

SEQ ID NO: 82050 - DNA, 76 bp, Homo sapiens
gcagagaaactgcaagcaccagcaagatccccgctcttgagcccgtggcttcctttgcaaaggcccagggtaagaa

SEQ ID NO: 82051 - DNA, 72 bp, Homo sapiens
aaactgcaagcaccagcaagatccccgctcttgagcccgtggcttcctttgcaaaggcccagggtaagaaag

SEQ ID NO: 82052 - DNA, 73 bp, Homo sapiens
agcaagatccccgctcttgagcccgtggcttcctttgcaaaggcccagggtaagaaaggcagtgcagggaaca

SEQ ID NO: 82053 - DNA, 73 bp, Homo sapiens
ccgctcttgagcccgtggcttcctttgcaaaggcccagggtaagaaaggcagtgcagggaacacgtggagtca

SEQ ID NO: 82054 - DNA, 72 bp, Homo sapiens
ttcctttgcaaaggcccagggtaagaaaggcagtgcagggaacacgtggagtcagttgtctaacaataacaa

SEQ ID NO: 82055 - DNA, 77 bp, Homo sapiens
aaggcagtgcagggaacacgtggagtcagttgtctaacaataacaaagatctgctcttgggaggtgtggctccatcc

SEQ ID NO: 82056 - DNA, 76 bp, Homo sapiens
agggaacacgtggagtcagttgtctaacaataacaaagatctgctcttgggaggtgtggctccatccccaagcagc

SEQ ID NO: 82057 - DNA, 81 bp, Homo sapiens
tgtctaacaataacaaagatctgctcttgggaggtgtggctccatccccaagcagccacagctcaccagccccacccagca

SEQ ID NO: 82058 - DNA, 86 bp, Homo sapiens
taacaaagatctgctcttgggaggtgtggctccatccccaagcagccacagctcaccagccccacccagcagctctgctgagtgca

SEQ ID NO: 82059 - DNA, 83 bp, Homo sapiens
ctcttgggaggtgtggctccatccccaagcagccacagctcaccagccccacccagcagctctgctgagtgcaacgggcttca

SEQ ID NO: 82060 - DNA, 84 bp, Homo sapiens
tgtggctccatccccaagcagccacagctcaccagccccacccagcagctctgctgagtgcaacgggcttcagcccttggtgga

SEQ ID NO: 82061 - DNA, 83 bp, Homo sapiens
atccccaagcagccacagctcaccagccccacccagcagctctgctgagtgcaacgggcttcagcccttggtggatcaagatg

SEQ ID NO: 82062 - DNA, 82 bp, Homo sapiens
agccacagctcaccagccccacccagcagctctgctgagtgcaacgggcttcagcccttggtggatcaagatggaggaggta

SEQ ID NO: 82063 - DNA, 78 bp, Homo sapiens
accagccccacccagcagctctgctgagtgcaacgggcttcagcccttggtggatcaagatggaggaggtacaaagga

SEQ ID NO: 82064 - DNA, 77 bp, Homo sapiens
cccacccagcagctctgctgagtgcaacgggcttcagcccttggtggatcaagatggaggaggtacaaaggagcccc

SEQ ID NO: 82065 - DNA, 69 bp, Homo sapiens
aacgggcttcagcccttggtggatcaagatggaggaggtacaaaggagcccccagaaccacctacggtg

SEQ ID NO: 82066 - DNA, 71 bp, Homo sapiens
agcccttggtggatcaagatggaggaggtacaaaggagcccccagaaccacctacggtgggcagcaagaaa

SEQ ID NO: 82067 - DNA, 71 bp, Homo sapiens
ttggtggatcaagatggaggaggtacaaaggagcccccagaaccacctacggtgggcagcaagaaaaagtc

SEQ ID NO: 82068 - DNA, 67 bp, Homo sapiens
atggaggaggtacaaaggagcccccagaaccacctacggtgggcagcaagaaaaagtccagtaaaaa

SEQ ID NO: 82069 - DNA, 69 bp, Homo sapiens
gtacaaaggagcccccagaaccacctacggtgggcagcaagaaaaagtccagtaaaaaagatgtgataa

SEQ ID NO: 82070 - DNA, 69 bp, Homo sapiens
aaccacctacggtgggcagcaagaaaaagtccagtaaaaaagatgtgataagtcagaccataccaaacc

SEQ ID NO: 82071 - DNA, 73 bp, Homo sapiens
gcagcaagaaaaagtccagtaaaaaagatgtgataagtcagaccataccaaacccagacctggattgggtcaa

SEQ ID NO: 82072 - DNA, 70 bp, Homo sapiens
agaaaaagtccagtaaaaaagatgtgataagtcagaccataccaaacccagacctggattgggtcaagaa

SEQ ID NO: 82073 - DNA, 75 bp, Homo sapiens
taaaaaagatgtgataagtcagaccataccaaacccagacctggattgggtcaagaatgcccagaaagcatttga

SEQ ID NO: 82074 - DNA, 77 bp, Homo sapiens
atgtgataagtcagaccataccaaacccagacctggattgggtcaagaatgcccagaaagcatttgacaatacagaa

SEQ ID NO: 82075 - DNA, 71 bp, Homo sapiens
taccaaacccagacctggattgggtcaagaatgcccagaaagcatttgacaatacagaagggaaaagggaa

SEQ ID NO: 82076 - DNA, 73 bp, Homo sapiens
tggattgggtcaagaatgcccagaaagcatttgacaatacagaagggaaaagggaaggttattccgcagatag

SEQ ID NO: 82077 - DNA, 74 bp, Homo sapiens
tcaagaatgcccagaaagcatttgacaatacagaagggaaaagggaaggttattccgcagatagtgcccaagag

SEQ ID NO: 82078 - DNA, 75 bp, Homo sapiens
atgcccagaaagcatttgacaatacagaagggaaaagggaaggttattccgcagatagtgcccaagaggcatcac

SEQ ID NO: 82079 - DNA, 75 bp, Homo sapiens
atttgacaatacagaagggaaaagggaaggttattccgcagatagtgcccaagaggcatcaccagccaggcagaa

SEQ ID NO: 82080 - DNA, 74 bp, Homo sapiens
atacagaagggaaaagggaaggttattccgcagatagtgcccaagaggcatcaccagccaggcagaacgtgagt

SEQ ID NO: 82081 - DNA, 76 bp, Homo sapiens
aaaagggaaggttattccgcagatagtgcccaagaggcatcaccagccaggcagaacgtgagttctgccagtaatc

SEQ ID NO: 82082 - DNA, 81 bp, Homo sapiens
tagtgcccaagaggcatcaccagccaggcagaacgtgagttctgccagtaatcctgaaaatgactcaagtcatgtccggat

SEQ ID NO: 82083 - DNA, 80 bp, Homo sapiens
aagaggcatcaccagccaggcagaacgtgagttctgccagtaatcctgaaaatgactcaagtcatgtccggattactatc

SEQ ID NO: 82084 - DNA, 78 bp, Homo sapiens
accagccaggcagaacgtgagttctgccagtaatcctgaaaatgactcaagtcatgtccggattactatccccatcaa

SEQ ID NO: 82085 - DNA, 76 bp, Homo sapiens
agaacgtgagttctgccagtaatcctgaaaatgactcaagtcatgtccggattactatccccatcaaggcaccctc

SEQ ID NO: 82086 - DNA, 78 bp, Homo sapiens
ttctgccagtaatcctgaaaatgactcaagtcatgtccggattactatccccatcaaggcaccctctctggatccaac

SEQ ID NO: 82087 - DNA, 77 bp, Homo sapiens
taatcctgaaaatgactcaagtcatgtccggattactatccccatcaaggcaccctctctggatccaaccaaccata

SEQ ID NO: 82088 - DNA, 75 bp, Homo sapiens
aaatgactcaagtcatgtccggattactatccccatcaaggcaccctctctggatccaaccaaccataagaggaa

SEQ ID NO: 82089 - DNA, 71 bp, Homo sapiens
aagtcatgtccggattactatccccatcaaggcaccctctctggatccaaccaaccataagaggaaaaaaa

SEQ ID NO: 82090 - DNA, 71 bp, Homo sapiens
ttactatccccatcaaggcaccctctctggatccaaccaaccataagaggaaaaaaagacagtccattaaa

SEQ ID NO: 82091 - DNA, 72 bp, Homo sapiens
catcaaggcaccctctctggatccaaccaaccataagaggaaaaaaagacagtccattaaagcggtggtgga

SEQ ID NO: 82092 - DNA, 70 bp, Homo sapiens
accaaccataagaggaaaaaaagacagtccattaaagcggtggtggaaaagatcatgccagagaaagcct

SEQ ID NO: 82093 - DNA, 73 bp, Homo sapiens
aaaaaaagacagtccattaaagcggtggtggaaaagatcatgccagagaaagccttggcttctggaatcacca

SEQ ID NO: 82094 - DNA, 77 bp, Homo sapiens
attaaagcggtggtggaaaagatcatgccagagaaagccttggcttctggaatcaccatgagcagtgaagtagttaa

SEQ ID NO: 82095 - DNA, 79 bp, Homo sapiens
tggaaaagatcatgccagagaaagccttggcttctggaatcaccatgagcagtgaagtagttaacaggatactttccaa

SEQ ID NO: 82096 - DNA, 79 bp, Homo sapiens
atcatgccagagaaagccttggcttctggaatcaccatgagcagtgaagtagttaacaggatactttccaactctgagg

SEQ ID NO: 82097 - DNA, 74 bp, Homo sapiens
aaagccttggcttctggaatcaccatgagcagtgaagtagttaacaggatactttccaactctgaggggaataa

SEQ ID NO: 82098 - DNA, 74 bp, Homo sapiens
cttctggaatcaccatgagcagtgaagtagttaacaggatactttccaactctgaggggaataagaaggatccc

SEQ ID NO: 82099 - DNA, 73 bp, Homo sapiens
aatcaccatgagcagtgaagtagttaacaggatactttccaactctgaggggaataagaaggatccccgtgtc

SEQ ID NO: 82100 - DNA, 68 bp, Homo sapiens
tagttaacaggatactttccaactctgaggggaataagaaggatccccgtgtccctaagttgagtaaa

SEQ ID NO: 82101 - DNA, 71 bp, Homo sapiens
aataagaaggatccccgtgtccctaagttgagtaaaatgatagagaatgagtccccctcagttggccttga

SEQ ID NO: 82102 - DNA, 70 bp, Homo sapiens
cccgtgtccctaagttgagtaaaatgatagagaatgagtccccctcagttggccttgaaactggtggaaa

SEQ ID NO: 82103 - DNA, 73 bp, Homo sapiens
agtaaaatgatagagaatgagtccccctcagttggccttgaaactggtggaaatgctgagaaagttatcccag

SEQ ID NO: 82104 - DNA, 73 bp, Homo sapiens
agaatgagtccccctcagttggccttgaaactggtggaaatgctgagaaagttatcccaggaggtgtgtctaa

SEQ ID NO: 82105 - DNA, 72 bp, Homo sapiens
cccctcagttggccttgaaactggtggaaatgctgagaaagttatcccaggaggtgtgtctaagccgcggaa

SEQ ID NO: 82106 - DNA, 72 bp, Homo sapiens
agttggccttgaaactggtggaaatgctgagaaagttatcccaggaggtgtgtctaagccgcggaagccacc

SEQ ID NO: 82107 - DNA, 77 bp, Homo sapiens
aaatgctgagaaagttatcccaggaggtgtgtctaagccgcggaagccacccatggtcatgacacctccaacgtgca

SEQ ID NO: 82108 - DNA, 80 bp, Homo sapiens
ccaggaggtgtgtctaagccgcggaagccacccatggtcatgacacctccaacgtgcacagatcactctccatccagaaa

SEQ ID NO: 82109 - DNA, 83 bp, Homo sapiens
tgtctaagccgcggaagccacccatggtcatgacacctccaacgtgcacagatcactctccatccagaaagctgccagaaatc

SEQ ID NO: 82110 - DNA, 79 bp, Homo sapiens
aacgtgcacagatcactctccatccagaaagctgccagaaatccagcatccaaaatttgctgcaaaacgaaggtggact

SEQ ID NO: 82111 - DNA, 78 bp, Homo sapiens
actctccatccagaaagctgccagaaatccagcatccaaaatttgctgcaaaacgaaggtggacttgcagcaaaccaa

SEQ ID NO: 82112 - DNA, 76 bp, Homo sapiens
tccagaaagctgccagaaatccagcatccaaaatttgctgcaaaacgaaggtggacttgcagcaaaccaaaaccta

SEQ ID NO: 82113 - DNA, 76 bp, Homo sapiens
ccagaaatccagcatccaaaatttgctgcaaaacgaaggtggacttgcagcaaaccaaaacctagcaccatgcttc

SEQ ID NO: 82114 - DNA, 76 bp, Homo sapiens
aatccagcatccaaaatttgctgcaaaacgaaggtggacttgcagcaaaccaaaacctagcaccatgcttcgagag

SEQ ID NO: 82115 - DNA, 75 bp, Homo sapiens
aaaatttgctgcaaaacgaaggtggacttgcagcaaaccaaaacctagcaccatgcttcgagaggcagttatggc

SEQ ID NO: 82116 - DNA, 75 bp, Homo sapiens
aaaacgaaggtggacttgcagcaaaccaaaacctagcaccatgcttcgagaggcagttatggccacctctgataa

SEQ ID NO: 82117 - DNA, 79 bp, Homo sapiens
caaaccaaaacctagcaccatgcttcgagaggcagttatggccacctctgataaactgatgctggagcccccgtctgca

SEQ ID NO: 82118 - DNA, 80 bp, Homo sapiens
aaaacctagcaccatgcttcgagaggcagttatggccacctctgataaactgatgctggagcccccgtctgcatatccca

SEQ ID NO: 82119 - DNA, 81 bp, Homo sapiens
agaggcagttatggccacctctgataaactgatgctggagcccccgtctgcatatcccatcaccccatccagccctctcta

SEQ ID NO: 82120 - DNA, 81 bp, Homo sapiens
ttatggccacctctgataaactgatgctggagcccccgtctgcatatcccatcaccccatccagccctctctacaccaaca

SEQ ID NO: 82121 - DNA, 79 bp, Homo sapiens
ataaactgatgctggagcccccgtctgcatatcccatcaccccatccagccctctctacaccaacacagacagtcttac

SEQ ID NO: 82122 - DNA, 82 bp, Homo sapiens
atgctggagcccccgtctgcatatcccatcaccccatccagccctctctacaccaacacagacagtcttactgtgatcactc

SEQ ID NO: 82123 - DNA, 80 bp, Homo sapiens
ccgtctgcatatcccatcaccccatccagccctctctacaccaacacagacagtcttactgtgatcactccagtcaaaaa

SEQ ID NO: 82124 - DNA, 78 bp, Homo sapiens
atatcccatcaccccatccagccctctctacaccaacacagacagtcttactgtgatcactccagtcaaaaagaagcg

SEQ ID NO: 82125 - DNA, 76 bp, Homo sapiens
cccatccagccctctctacaccaacacagacagtcttactgtgatcactccagtcaaaaagaagcggggacgacca

SEQ ID NO: 82126 - DNA, 74 bp, Homo sapiens
agccctctctacaccaacacagacagtcttactgtgatcactccagtcaaaaagaagcggggacgaccaaagaa

SEQ ID NO: 82127 - DNA, 74 bp, Homo sapiens
ctacaccaacacagacagtcttactgtgatcactccagtcaaaaagaagcggggacgaccaaagaagcagcctt

SEQ ID NO: 82128 - DNA, 76 bp, Homo sapiens
acagtcttactgtgatcactccagtcaaaaagaagcggggacgaccaaagaagcagcctttgctcacagtcgagac

SEQ ID NO: 82129 - DNA, 79 bp, Homo sapiens
ttactgtgatcactccagtcaaaaagaagcggggacgaccaaagaagcagcctttgctcacagtcgagacgattcatga

SEQ ID NO: 82130 - DNA, 74 bp, Homo sapiens
ccagtcaaaaagaagcggggacgaccaaagaagcagcctttgctcacagtcgagacgattcatgagggaacttc

SEQ ID NO: 82131 - DNA, 77 bp, Homo sapiens
acgaccaaagaagcagcctttgctcacagtcgagacgattcatgagggaacttccaccagccccgtcagtcccatca

SEQ ID NO: 82132 - DNA, 77 bp, Homo sapiens
aagcagcctttgctcacagtcgagacgattcatgagggaacttccaccagccccgtcagtcccatcagccgagagtt

SEQ ID NO: 82133 - DNA, 73 bp, Homo sapiens
attcatgagggaacttccaccagccccgtcagtcccatcagccgagagtttcctggcactaagaaaagaaagc

SEQ ID NO: 82134 - DNA, 73 bp, Homo sapiens
ttccaccagccccgtcagtcccatcagccgagagtttcctggcactaagaaaagaaagcgacgacgcaattta

SEQ ID NO: 82135 - DNA, 72 bp, Homo sapiens
cccgtcagtcccatcagccgagagtttcctggcactaagaaaagaaagcgacgacgcaatttagcgaagttg

SEQ ID NO: 82136 - DNA, 74 bp, Homo sapiens
gtcccatcagccgagagtttcctggcactaagaaaagaaagcgacgacgcaatttagcgaagttggcccagcta

SEQ ID NO: 82137 - DNA, 72 bp, Homo sapiens
agagtttcctggcactaagaaaagaaagcgacgacgcaatttagcgaagttggcccagctagtgccgggaga

SEQ ID NO: 82138 - DNA, 73 bp, Homo sapiens
tcctggcactaagaaaagaaagcgacgacgcaatttagcgaagttggcccagctagtgccgggagaggacaaa

SEQ ID NO: 82139 - DNA, 73 bp, Homo sapiens
aaaagaaagcgacgacgcaatttagcgaagttggcccagctagtgccgggagaggacaaacccatgagcgaga

SEQ ID NO: 82140 - DNA, 74 bp, Homo sapiens
aagcgacgacgcaatttagcgaagttggcccagctagtgccgggagaggacaaacccatgagcgagatgaaatt

SEQ ID NO: 82141 - DNA, 73 bp, Homo sapiens
aatttagcgaagttggcccagctagtgccgggagaggacaaacccatgagcgagatgaaatttcacaagaaag

SEQ ID NO: 82142 - DNA, 73 bp, Homo sapiens
aagttggcccagctagtgccgggagaggacaaacccatgagcgagatgaaatttcacaagaaagttggaaagc

SEQ ID NO: 82143 - DNA, 75 bp, Homo sapiens
tagtgccgggagaggacaaacccatgagcgagatgaaatttcacaagaaagttggaaagctcggcgtgttggata

SEQ ID NO: 82144 - DNA, 74 bp, Homo sapiens
agaggacaaacccatgagcgagatgaaatttcacaagaaagttggaaagctcggcgtgttggataagaagacca

SEQ ID NO: 82145 - DNA, 73 bp, Homo sapiens
aaacccatgagcgagatgaaatttcacaagaaagttggaaagctcggcgtgttggataagaagaccatcaaaa

SEQ ID NO: 82146 - DNA, 75 bp, Homo sapiens
gatgaaatttcacaagaaagttggaaagctcggcgtgttggataagaagaccatcaaaactatcaataagatgaa

SEQ ID NO: 82147 - DNA, 74 bp, Homo sapiens
aatttcacaagaaagttggaaagctcggcgtgttggataagaagaccatcaaaactatcaataagatgaagaca

SEQ ID NO: 82148 - DNA, 74 bp, Homo sapiens
aaagttggaaagctcggcgtgttggataagaagaccatcaaaactatcaataagatgaagacactcaagaggaa

SEQ ID NO: 82149 - DNA, 76 bp, Homo sapiens
aagctcggcgtgttggataagaagaccatcaaaactatcaataagatgaagacactcaagaggaaaaacatcttga

SEQ ID NO: 82150 - DNA, 79 bp, Homo sapiens
aagaccatcaaaactatcaataagatgaagacactcaagaggaaaaacatcttgaatcagatcttgtcctgttccagca

SEQ ID NO: 82151 - DNA, 79 bp, Homo sapiens
aaaactatcaataagatgaagacactcaagaggaaaaacatcttgaatcagatcttgtcctgttccagcagcgttgctc

SEQ ID NO: 82152 - DNA, 80 bp, Homo sapiens
ataagatgaagacactcaagaggaaaaacatcttgaatcagatcttgtcctgttccagcagcgttgctctgaaggcaaaa

SEQ ID NO: 82153 - DNA, 82 bp, Homo sapiens
tcttgaatcagatcttgtcctgttccagcagcgttgctctgaaggcaaaagctcccccagagaccagccctggggcagcagc

SEQ ID NO: 82154 - DNA, 79 bp, Homo sapiens
atcttgtcctgttccagcagcgttgctctgaaggcaaaagctcccccagagaccagccctggggcagcagccattgaaa

SEQ ID NO: 82155 - DNA, 79 bp, Homo sapiens
tgttccagcagcgttgctctgaaggcaaaagctcccccagagaccagccctggggcagcagccattgaaagcaaactgg

SEQ ID NO: 82156 - DNA, 79 bp, Homo sapiens
ttgctctgaaggcaaaagctcccccagagaccagccctggggcagcagccattgaaagcaaactgggcaagcagattaa

SEQ ID NO: 82157 - DNA, 79 bp, Homo sapiens
aggcaaaagctcccccagagaccagccctggggcagcagccattgaaagcaaactgggcaagcagattaatgtcagcaa

SEQ ID NO: 82158 - DNA, 79 bp, Homo sapiens
cccagagaccagccctggggcagcagccattgaaagcaaactgggcaagcagattaatgtcagcaagaggggaaccatc

SEQ ID NO: 82159 - DNA, 80 bp, Homo sapiens
agccctggggcagcagccattgaaagcaaactgggcaagcagattaatgtcagcaagaggggaaccatctacattggcaa

SEQ ID NO: 82160 - DNA, 80 bp, Homo sapiens
ggcagcagccattgaaagcaaactgggcaagcagattaatgtcagcaagaggggaaccatctacattggcaagaagcggg

SEQ ID NO: 82161 - DNA, 77 bp, Homo sapiens
attgaaagcaaactgggcaagcagattaatgtcagcaagaggggaaccatctacattggcaagaagcggggcaggaa

SEQ ID NO: 82162 - DNA, 78 bp, Homo sapiens
aaactgggcaagcagattaatgtcagcaagaggggaaccatctacattggcaagaagcggggcaggaagccaagagca

SEQ ID NO: 82163 - DNA, 80 bp, Homo sapiens
aagcagattaatgtcagcaagaggggaaccatctacattggcaagaagcggggcaggaagccaagagcagagctgccacc

SEQ ID NO: 82164 - DNA, 78 bp, Homo sapiens
aatgtcagcaagaggggaaccatctacattggcaagaagcggggcaggaagccaagagcagagctgccacccccatcc

SEQ ID NO: 82165 - DNA, 77 bp, Homo sapiens
tacattggcaagaagcggggcaggaagccaagagcagagctgccacccccatccgaagaacccaaaacagccatcaa

SEQ ID NO: 82166 - DNA, 74 bp, Homo sapiens
aagaagcggggcaggaagccaagagcagagctgccacccccatccgaagaacccaaaacagccatcaagcaccc

SEQ ID NO: 82167 - DNA, 75 bp, Homo sapiens
aagagcagagctgccacccccatccgaagaacccaaaacagccatcaagcaccccaggcctgtttctagccagcc

SEQ ID NO: 82168 - DNA, 74 bp, Homo sapiens
tgccacccccatccgaagaacccaaaacagccatcaagcaccccaggcctgtttctagccagccggatgttcca

SEQ ID NO: 82169 - DNA, 76 bp, Homo sapiens
acagccatcaagcaccccaggcctgtttctagccagccggatgttccagccgtgccttccaactttcagtcacttg

SEQ ID NO: 82170 - DNA, 75 bp, Homo sapiens
cccaggcctgtttctagccagccggatgttccagccgtgccttccaactttcagtcacttgtggcgtcttcacca

SEQ ID NO: 82171 - DNA, 80 bp, Homo sapiens
ctgtttctagccagccggatgttccagccgtgccttccaactttcagtcacttgtggcgtcttcaccagcagctatgcac

SEQ ID NO: 82172 - DNA, 78 bp, Homo sapiens
agccggatgttccagccgtgccttccaactttcagtcacttgtggcgtcttcaccagcagctatgcacccactttcaa

SEQ ID NO: 82173 - DNA, 78 bp, Homo sapiens
atgttccagccgtgccttccaactttcagtcacttgtggcgtcttcaccagcagctatgcacccactttcaacacagt

SEQ ID NO: 82174 - DNA, 76 bp, Homo sapiens
cttccaactttcagtcacttgtggcgtcttcaccagcagctatgcacccactttcaacacagttaggtgggtccaa

SEQ ID NO: 82175 - DNA, 77 bp, Homo sapiens
aactttcagtcacttgtggcgtcttcaccagcagctatgcacccactttcaacacagttaggtgggtccaatggcaa

SEQ ID NO: 82176 - DNA, 78 bp, Homo sapiens
acttgtggcgtcttcaccagcagctatgcacccactttcaacacagttaggtgggtccaatggcaacctgagccctgc

SEQ ID NO: 82177 - DNA, 74 bp, Homo sapiens
ctatgcacccactttcaacacagttaggtgggtccaatggcaacctgagccctgccagcactgaaaccaatttt

SEQ ID NO: 82178 - DNA, 74 bp, Homo sapiens
actttcaacacagttaggtgggtccaatggcaacctgagccctgccagcactgaaaccaatttttcagagttga

SEQ ID NO: 82179 - DNA, 76 bp, Homo sapiens
gtgggtccaatggcaacctgagccctgccagcactgaaaccaatttttcagagttgaaaactatgccaaatctcca

SEQ ID NO: 82180 - DNA, 77 bp, Homo sapiens
aacctgagccctgccagcactgaaaccaatttttcagagttgaaaactatgccaaatctccagcccatcagtgctct

SEQ ID NO: 82181 - DNA, 77 bp, Homo sapiens
ctgccagcactgaaaccaatttttcagagttgaaaactatgccaaatctccagcccatcagtgctcttccaaccaaa

SEQ ID NO: 82182 - DNA, 70 bp, Homo sapiens
aatttttcagagttgaaaactatgccaaatctccagcccatcagtgctcttccaaccaaaacccaaaagg

SEQ ID NO: 82183 - DNA, 73 bp, Homo sapiens
ttgaaaactatgccaaatctccagcccatcagtgctcttccaaccaaaacccaaaagggaatacacagtggaa

SEQ ID NO: 82184 - DNA, 74 bp, Homo sapiens
atctccagcccatcagtgctcttccaaccaaaacccaaaagggaatacacagtggaacctggaagctgtctcca

SEQ ID NO: 82185 - DNA, 73 bp, Homo sapiens
atcagtgctcttccaaccaaaacccaaaagggaatacacagtggaacctggaagctgtctccacccagactga

SEQ ID NO: 82186 - DNA, 71 bp, Homo sapiens
ttccaaccaaaacccaaaagggaatacacagtggaacctggaagctgtctccacccagactgatggccaac

SEQ ID NO: 82187 - DNA, 71 bp, Homo sapiens
aaacccaaaagggaatacacagtggaacctggaagctgtctccacccagactgatggccaactccccttca

SEQ ID NO: 82188 - DNA, 78 bp, Homo sapiens
aatacacagtggaacctggaagctgtctccacccagactgatggccaactccccttcacacctgtgcgagattggctc

SEQ ID NO: 82189 - DNA, 77 bp, Homo sapiens
ctgtctccacccagactgatggccaactccccttcacacctgtgcgagattggctccctaaaggaaatcacgctgtc

SEQ ID NO: 82190 - DNA, 76 bp, Homo sapiens
cccagactgatggccaactccccttcacacctgtgcgagattggctccctaaaggaaatcacgctgtcccctgtga

SEQ ID NO: 82191 - DNA, 75 bp, Homo sapiens
atggccaactccccttcacacctgtgcgagattggctccctaaaggaaatcacgctgtcccctgtgagcgagtcc

SEQ ID NO: 82192 - DNA, 77 bp, Homo sapiens
acacctgtgcgagattggctccctaaaggaaatcacgctgtcccctgtgagcgagtcccacagtgaggagacgatcc

SEQ ID NO: 82193 - DNA, 77 bp, Homo sapiens
agattggctccctaaaggaaatcacgctgtcccctgtgagcgagtcccacagtgaggagacgatccccagcgacagc

SEQ ID NO: 82194 - DNA, 79 bp, Homo sapiens
taaaggaaatcacgctgtcccctgtgagcgagtcccacagtgaggagacgatccccagcgacagcggcattgggacaga

SEQ ID NO: 82195 - DNA, 80 bp, Homo sapiens
aatcacgctgtcccctgtgagcgagtcccacagtgaggagacgatccccagcgacagcggcattgggacagacaacaaca

SEQ ID NO: 82196 - DNA, 79 bp, Homo sapiens
agtcccacagtgaggagacgatccccagcgacagcggcattgggacagacaacaacagcacttctgaccaagcggagaa

SEQ ID NO: 82197 - DNA, 79 bp, Homo sapiens
acgatccccagcgacagcggcattgggacagacaacaacagcacttctgaccaagcggagaagagctcagaatcccgaa

SEQ ID NO: 82198 - DNA, 76 bp, Homo sapiens
agcggcattgggacagacaacaacagcacttctgaccaagcggagaagagctcagaatcccgaaggaggtactctt

SEQ ID NO: 82199 - DNA, 75 bp, Homo sapiens
attgggacagacaacaacagcacttctgaccaagcggagaagagctcagaatcccgaaggaggtactcttttgat

SEQ ID NO: 82200 - DNA, 75 bp, Homo sapiens
acaacaacagcacttctgaccaagcggagaagagctcagaatcccgaaggaggtactcttttgatttctgctccc

SEQ ID NO: 82201 - DNA, 73 bp, Homo sapiens
acttctgaccaagcggagaagagctcagaatcccgaaggaggtactcttttgatttctgctccctggacaacc

SEQ ID NO: 82202 - DNA, 72 bp, Homo sapiens
agcggagaagagctcagaatcccgaaggaggtactcttttgatttctgctccctggacaacccggaggccat

SEQ ID NO: 82203 - DNA, 71 bp, Homo sapiens
aagagctcagaatcccgaaggaggtactcttttgatttctgctccctggacaacccggaggccattccgtc

SEQ ID NO: 82204 - DNA, 69 bp, Homo sapiens
aatcccgaaggaggtactcttttgatttctgctccctggacaacccggaggccattccgtccgacacca

SEQ ID NO: 82205 - DNA, 73 bp, Homo sapiens
tttgatttctgctccctggacaacccggaggccattccgtccgacaccagcacaaagaaccggcatggccacc

SEQ ID NO: 82206 - DNA, 74 bp, Homo sapiens
ctggacaacccggaggccattccgtccgacaccagcacaaagaaccggcatggccaccggcaaaagcatctcat

SEQ ID NO: 82207 - DNA, 74 bp, Homo sapiens
aacccggaggccattccgtccgacaccagcacaaagaaccggcatggccaccggcaaaagcatctcattgtgga

SEQ ID NO: 82208 - DNA, 75 bp, Homo sapiens
attccgtccgacaccagcacaaagaaccggcatggccaccggcaaaagcatctcattgtggacaactttctggcc

SEQ ID NO: 82209 - DNA, 76 bp, Homo sapiens
accagcacaaagaaccggcatggccaccggcaaaagcatctcattgtggacaactttctggcccacgaaagcctca

SEQ ID NO: 82210 - DNA, 74 bp, Homo sapiens
acaaagaaccggcatggccaccggcaaaagcatctcattgtggacaactttctggcccacgaaagcctcaagaa

SEQ ID NO: 82211 - DNA, 76 bp, Homo sapiens
atggccaccggcaaaagcatctcattgtggacaactttctggcccacgaaagcctcaagaagccaaagcacaagag

SEQ ID NO: 82212 - DNA, 74 bp, Homo sapiens
caaaagcatctcattgtggacaactttctggcccacgaaagcctcaagaagccaaagcacaagaggaaacggaa

SEQ ID NO: 82213 - DNA, 72 bp, Homo sapiens
atctcattgtggacaactttctggcccacgaaagcctcaagaagccaaagcacaagaggaaacggaaaagcc

SEQ ID NO: 82214 - DNA, 69 bp, Homo sapiens
acaactttctggcccacgaaagcctcaagaagccaaagcacaagaggaaacggaaaagcctgcaaaacc

SEQ ID NO: 82215 - DNA, 72 bp, Homo sapiens
ttctggcccacgaaagcctcaagaagccaaagcacaagaggaaacggaaaagcctgcaaaaccgcgatgacc

SEQ ID NO: 82216 - DNA, 71 bp, Homo sapiens
aaagcctcaagaagccaaagcacaagaggaaacggaaaagcctgcaaaaccgcgatgacctccagtttctg

SEQ ID NO: 82217 - DNA, 73 bp, Homo sapiens
aagaggaaacggaaaagcctgcaaaaccgcgatgacctccagtttctggcagacctggaggagctaatcacca

SEQ ID NO: 82218 - DNA, 72 bp, Homo sapiens
aaacggaaaagcctgcaaaaccgcgatgacctccagtttctggcagacctggaggagctaatcaccaagttc

SEQ ID NO: 82219 - DNA, 76 bp, Homo sapiens
agcctgcaaaaccgcgatgacctccagtttctggcagacctggaggagctaatcaccaagttccaagtgttcagaa

SEQ ID NO: 82220 - DNA, 72 bp, Homo sapiens
agacctggaggagctaatcaccaagttccaagtgttcagaatctcccaccggagttacaccttctaccacga

SEQ ID NO: 82221 - DNA, 72 bp, Homo sapiens
accaagttccaagtgttcagaatctcccaccggagttacaccttctaccacgagaatccatatcccagcatt

SEQ ID NO: 82222 - DNA, 72 bp, Homo sapiens
agtgttcagaatctcccaccggagttacaccttctaccacgagaatccatatcccagcatttttcggattaa

SEQ ID NO: 82223 - DNA, 71 bp, Homo sapiens
agaatctcccaccggagttacaccttctaccacgagaatccatatcccagcatttttcggattaattttga

SEQ ID NO: 82224 - DNA, 71 bp, Homo sapiens
accggagttacaccttctaccacgagaatccatatcccagcatttttcggattaattttgatcactattac

SEQ ID NO: 82225 - DNA, 73 bp, Homo sapiens
accttctaccacgagaatccatatcccagcatttttcggattaattttgatcactattacccggtgccatata

SEQ ID NO: 82226 - DNA, 76 bp, Homo sapiens
accacgagaatccatatcccagcatttttcggattaattttgatcactattacccggtgccatatatccagtatga

SEQ ID NO: 82227 - DNA, 75 bp, Homo sapiens
atatcccagcatttttcggattaattttgatcactattacccggtgccatatatccagtatgacccgttgctcta

SEQ ID NO: 82228 - DNA, 73 bp, Homo sapiens
atttttcggattaattttgatcactattacccggtgccatatatccagtatgacccgttgctctatcttcgta

SEQ ID NO: 82229 - DNA, 76 bp, Homo sapiens
atcactattacccggtgccatatatccagtatgacccgttgctctatcttcgtaggacttcagacttgaagtcaaa

SEQ ID NO: 82230 - DNA, 77 bp, Homo sapiens
ggtgccatatatccagtatgacccgttgctctatcttcgtaggacttcagacttgaagtcaaagaagaagcgtggta

SEQ ID NO: 82231 - DNA, 75 bp, Homo sapiens
atatatccagtatgacccgttgctctatcttcgtaggacttcagacttgaagtcaaagaagaagcgtggtaggcc

SEQ ID NO: 82232 - DNA, 71 bp, Homo sapiens
agaagcgtggtaggcctgcaaaaaccaatgacaccatgacaaaggtgccttttttacaagggttcagctac

SEQ ID NO: 82233 - DNA, 71 bp, Homo sapiens
taggcctgcaaaaaccaatgacaccatgacaaaggtgccttttttacaagggttcagctaccctattccca

SEQ ID NO: 82234 - DNA, 69 bp, Homo sapiens
aaccaatgacaccatgacaaaggtgccttttttacaagggttcagctaccctattcccagtggaagtta

SEQ ID NO: 82235 - DNA, 70 bp, Homo sapiens
atgacaaaggtgccttttttacaagggttcagctaccctattcccagtggaagttactatgcaccctatg

SEQ ID NO: 82236 - DNA, 68 bp, Homo sapiens
aaaggtgccttttttacaagggttcagctaccctattcccagtggaagttactatgcaccctatggaa

SEQ ID NO: 82237 - DNA, 73 bp, Homo sapiens
tttttacaagggttcagctaccctattcccagtggaagttactatgcaccctatggaatgccttacacatcaa

SEQ ID NO: 82238 - DNA, 79 bp, Homo sapiens
ttcagctaccctattcccagtggaagttactatgcaccctatggaatgccttacacatcaatgcctatgatgaaccttg

SEQ ID NO: 82239 - DNA, 77 bp, Homo sapiens
tattcccagtggaagttactatgcaccctatggaatgccttacacatcaatgcctatgatgaaccttggttattacg

SEQ ID NO: 82240 - DNA, 76 bp, Homo sapiens
aagttactatgcaccctatggaatgccttacacatcaatgcctatgatgaaccttggttattacggtcagtaccca

SEQ ID NO: 82241 - DNA, 77 bp, Homo sapiens
tatggaatgccttacacatcaatgcctatgatgaaccttggttattacggtcagtacccagctcctttgtacctatc

SEQ ID NO: 82242 - DNA, 77 bp, Homo sapiens
ttacacatcaatgcctatgatgaaccttggttattacggtcagtacccagctcctttgtacctatcgcacacgcttg

SEQ ID NO: 82243 - DNA, 76 bp, Homo sapiens
aatgcctatgatgaaccttggttattacggtcagtacccagctcctttgtacctatcgcacacgcttggagcagct

SEQ ID NO: 82244 - DNA, 73 bp, Homo sapiens
atgaaccttggttattacggtcagtacccagctcctttgtacctatcgcacacgcttggagcagcttccccat

SEQ ID NO: 82245 - DNA, 79 bp, Homo sapiens
agtacccagctcctttgtacctatcgcacacgcttggagcagcttccccattcatgaggccaacagtgccaccacctca

SEQ ID NO: 82246 - DNA, 80 bp, Homo sapiens
tacctatcgcacacgcttggagcagcttccccattcatgaggccaacagtgccaccacctcagttccacacaaactccca

SEQ ID NO: 82247 - DNA, 77 bp, Homo sapiens
cttggagcagcttccccattcatgaggccaacagtgccaccacctcagttccacacaaactcccacgtaaagatgtc

SEQ ID NO: 82248 - DNA, 76 bp, Homo sapiens
agcttccccattcatgaggccaacagtgccaccacctcagttccacacaaactcccacgtaaagatgtccggtgca

SEQ ID NO: 82249 - DNA, 78 bp, Homo sapiens
ttcatgaggccaacagtgccaccacctcagttccacacaaactcccacgtaaagatgtccggtgcagctaagcataaa

SEQ ID NO: 82250 - DNA, 77 bp, Homo sapiens
aacagtgccaccacctcagttccacacaaactcccacgtaaagatgtccggtgcagctaagcataaagccaagcatg

SEQ ID NO: 82251 - DNA, 76 bp, Homo sapiens
accacctcagttccacacaaactcccacgtaaagatgtccggtgcagctaagcataaagccaagcatggagtacac

SEQ ID NO: 82252 - DNA, 77 bp, Homo sapiens
agttccacacaaactcccacgtaaagatgtccggtgcagctaagcataaagccaagcatggagtacacctgcaggga

SEQ ID NO: 82253 - DNA, 77 bp, Homo sapiens
aaactcccacgtaaagatgtccggtgcagctaagcataaagccaagcatggagtacacctgcagggacctgttagca

SEQ ID NO: 82254 - DNA, 81 bp, Homo sapiens
taaagatgtccggtgcagctaagcataaagccaagcatggagtacacctgcagggacctgttagcatgggccttggtgaca

SEQ ID NO: 82255 - DNA, 85 bp, Homo sapiens
gtgcagctaagcataaagccaagcatggagtacacctgcagggacctgttagcatgggccttggtgacatgcagccttctctgaa

SEQ ID NO: 82256 - DNA, 81 bp, Homo sapiens
ctaagcataaagccaagcatggagtacacctgcagggacctgttagcatgggccttggtgacatgcagccttctctgaacc

SEQ ID NO: 82257 - DNA, 78 bp, Homo sapiens
aagcatggagtacacctgcagggacctgttagcatgggccttggtgacatgcagccttctctgaaccctcccaaggta

SEQ ID NO: 82258 - DNA, 78 bp, Homo sapiens
agtacacctgcagggacctgttagcatgggccttggtgacatgcagccttctctgaaccctcccaaggtaggcagtgc

SEQ ID NO: 82259 - DNA, 78 bp, Homo sapiens
agggacctgttagcatgggccttggtgacatgcagccttctctgaaccctcccaaggtaggcagtgccagtctgtcca

SEQ ID NO: 82260 - DNA, 80 bp, Homo sapiens
ttagcatgggccttggtgacatgcagccttctctgaaccctcccaaggtaggcagtgccagtctgtccagtggtcggctc

SEQ ID NO: 82261 - DNA, 75 bp, Homo sapiens
ttctctgaaccctcccaaggtaggcagtgccagtctgtccagtggtcggctccataagaggaaacacaaacacaa

SEQ ID NO: 82262 - DNA, 78 bp, Homo sapiens
caaggtaggcagtgccagtctgtccagtggtcggctccataagaggaaacacaaacacaagcataagcacaaggaaga

SEQ ID NO: 82263 - DNA, 76 bp, Homo sapiens
agtgccagtctgtccagtggtcggctccataagaggaaacacaaacacaagcataagcacaaggaagaccggatcc

SEQ ID NO: 82264 - DNA, 74 bp, Homo sapiens
agtctgtccagtggtcggctccataagaggaaacacaaacacaagcataagcacaaggaagaccggatcctagg

SEQ ID NO: 82265 - DNA, 73 bp, Homo sapiens
ataagaggaaacacaaacacaagcataagcacaaggaagaccggatcctagggacccatgacaacctgagtgg

SEQ ID NO: 82266 - DNA, 71 bp, Homo sapiens
aaacacaaacacaagcataagcacaaggaagaccggatcctagggacccatgacaacctgagtggtctttt

SEQ ID NO: 82267 - DNA, 75 bp, Homo sapiens
acaagcataagcacaaggaagaccggatcctagggacccatgacaacctgagtggtctttttgcaggcaaagcca

SEQ ID NO: 82268 - DNA, 73 bp, Homo sapiens
acaaggaagaccggatcctagggacccatgacaacctgagtggtctttttgcaggcaaagccacaggcttctc

SEQ ID NO: 82269 - DNA, 76 bp, Homo sapiens
agaccggatcctagggacccatgacaacctgagtggtctttttgcaggcaaagccacaggcttctccagccacatc

SEQ ID NO: 82270 - DNA, 81 bp, Homo sapiens
ggacccatgacaacctgagtggtctttttgcaggcaaagccacaggcttctccagccacatcctgagcgagcggctgagta

SEQ ID NO: 82271 - DNA, 82 bp, Homo sapiens
agtggtctttttgcaggcaaagccacaggcttctccagccacatcctgagcgagcggctgagtagcgcagacaaagagctcc

SEQ ID NO: 82272 - DNA, 84 bp, Homo sapiens
aggcaaagccacaggcttctccagccacatcctgagcgagcggctgagtagcgcagacaaagagctcccgctggtgagtgagaa

SEQ ID NO: 82273 - DNA, 85 bp, Homo sapiens
acaggcttctccagccacatcctgagcgagcggctgagtagcgcagacaaagagctcccgctggtgagtgagaagaacaagcata

SEQ ID NO: 82274 - DNA, 84 bp, Homo sapiens
tccagccacatcctgagcgagcggctgagtagcgcagacaaagagctcccgctggtgagtgagaagaacaagcataaggagaaa

SEQ ID NO: 82275 - DNA, 82 bp, Homo sapiens
acatcctgagcgagcggctgagtagcgcagacaaagagctcccgctggtgagtgagaagaacaagcataaggagaaacagaa

SEQ ID NO: 82276 - DNA, 83 bp, Homo sapiens
cgagcggctgagtagcgcagacaaagagctcccgctggtgagtgagaagaacaagcataaggagaaacagaagcaccagcaca

SEQ ID NO: 82277 - DNA, 81 bp, Homo sapiens
agtagcgcagacaaagagctcccgctggtgagtgagaagaacaagcataaggagaaacagaagcaccagcacagcgaagcc

SEQ ID NO: 82278 - DNA, 79 bp, Homo sapiens
ctggtgagtgagaagaacaagcataaggagaaacagaagcaccagcacagcgaagccggccacaaagcttctaagaaca

SEQ ID NO: 82279 - DNA, 76 bp, Homo sapiens
agaagaacaagcataaggagaaacagaagcaccagcacagcgaagccggccacaaagcttctaagaacaactttga

SEQ ID NO: 82280 - DNA, 75 bp, Homo sapiens
aacaagcataaggagaaacagaagcaccagcacagcgaagccggccacaaagcttctaagaacaactttgaggtg

SEQ ID NO: 82281 - DNA, 75 bp, Homo sapiens
aaacagaagcaccagcacagcgaagccggccacaaagcttctaagaacaactttgaggtggacaccctgtctaca

SEQ ID NO: 82282 - DNA, 74 bp, Homo sapiens
accagcacagcgaagccggccacaaagcttctaagaacaactttgaggtggacaccctgtctacactgtcactt

SEQ ID NO: 82283 - DNA, 73 bp, Homo sapiens
acagcgaagccggccacaaagcttctaagaacaactttgaggtggacaccctgtctacactgtcactttccga

SEQ ID NO: 82284 - DNA, 75 bp, Homo sapiens
cacaaagcttctaagaacaactttgaggtggacaccctgtctacactgtcactttccgacgcccagcattggaca

SEQ ID NO: 82285 - DNA, 72 bp, Homo sapiens
aactttgaggtggacaccctgtctacactgtcactttccgacgcccagcattggacacaggccaaggaaaaa

SEQ ID NO: 82286 - DNA, 72 bp, Homo sapiens
aggtggacaccctgtctacactgtcactttccgacgcccagcattggacacaggccaaggaaaaaggagact

SEQ ID NO: 82287 - DNA, 79 bp, Homo sapiens
tgtctacactgtcactttccgacgcccagcattggacacaggccaaggaaaaaggagacttgagcagtgagcctgtgga

SEQ ID NO: 82288 - DNA, 80 bp, Homo sapiens
tcactttccgacgcccagcattggacacaggccaaggaaaaaggagacttgagcagtgagcctgtggactcatgcacgaa

SEQ ID NO: 82289 - DNA, 79 bp, Homo sapiens
acgcccagcattggacacaggccaaggaaaaaggagacttgagcagtgagcctgtggactcatgcacgaaaagatactc

SEQ ID NO: 82290 - DNA, 80 bp, Homo sapiens
attggacacaggccaaggaaaaaggagacttgagcagtgagcctgtggactcatgcacgaaaagatactctggcagtggc

SEQ ID NO: 82291 - DNA, 80 bp, Homo sapiens
caaggaaaaaggagacttgagcagtgagcctgtggactcatgcacgaaaagatactctggcagtggcggggatggtggca

SEQ ID NO: 82292 - DNA, 81 bp, Homo sapiens
aaaaaggagacttgagcagtgagcctgtggactcatgcacgaaaagatactctggcagtggcggggatggtggcagcacga

SEQ ID NO: 82293 - DNA, 84 bp, Homo sapiens
tgtggactcatgcacgaaaagatactctggcagtggcggggatggtggcagcacgagatcagagaacctggacgtgttcagtga

SEQ ID NO: 82294 - DNA, 81 bp, Homo sapiens
atgcacgaaaagatactctggcagtggcggggatggtggcagcacgagatcagagaacctggacgtgttcagtgaaatgaa

SEQ ID NO: 82295 - DNA, 78 bp, Homo sapiens
cagtggcggggatggtggcagcacgagatcagagaacctggacgtgttcagtgaaatgaacccttcgaatgacaagtg

SEQ ID NO: 82296 - DNA, 79 bp, Homo sapiens
gatggtggcagcacgagatcagagaacctggacgtgttcagtgaaatgaacccttcgaatgacaagtgggacagtgacg

SEQ ID NO: 82297 - DNA, 77 bp, Homo sapiens
agcacgagatcagagaacctggacgtgttcagtgaaatgaacccttcgaatgacaagtgggacagtgacgtgagtgg

SEQ ID NO: 82298 - DNA, 72 bp, Homo sapiens
acctggacgtgttcagtgaaatgaacccttcgaatgacaagtgggacagtgacgtgagtgggagtaaaagga

SEQ ID NO: 82299 - DNA, 73 bp, Homo sapiens
gtgaaatgaacccttcgaatgacaagtgggacagtgacgtgagtgggagtaaaaggaggagctatgaaggctt

SEQ ID NO: 82300 - DNA, 73 bp, Homo sapiens
atgaacccttcgaatgacaagtgggacagtgacgtgagtgggagtaaaaggaggagctatgaaggctttggaa

SEQ ID NO: 82301 - DNA, 72 bp, Homo sapiens
tgacaagtgggacagtgacgtgagtgggagtaaaaggaggagctatgaaggctttggaacgtacagggaaaa

SEQ ID NO: 82302 - DNA, 71 bp, Homo sapiens
acagtgacgtgagtgggagtaaaaggaggagctatgaaggctttggaacgtacagggaaaaggacatccaa

SEQ ID NO: 82303 - DNA, 72 bp, Homo sapiens
agctatgaaggctttggaacgtacagggaaaaggacatccaagccttcaagatgaaccgcaaggagagaagt

SEQ ID NO: 82304 - DNA, 70 bp, Homo sapiens
aaggctttggaacgtacagggaaaaggacatccaagccttcaagatgaaccgcaaggagagaagttctta

SEQ ID NO: 82305 - DNA, 73 bp, Homo sapiens
aacgtacagggaaaaggacatccaagccttcaagatgaaccgcaaggagagaagttcttatgactcctccatg

SEQ ID NO: 82306 - DNA, 74 bp, Homo sapiens
aaaaggacatccaagccttcaagatgaaccgcaaggagagaagttcttatgactcctccatgtctccaggtaag

SEQ ID NO: 82307 - DNA, 73 bp, Homo sapiens
aagccttcaagatgaaccgcaaggagagaagttcttatgactcctccatgtctccaggtaaggctgtttttct

SEQ ID NO: 82308 - DNA, 66 bp, Homo sapiens
ctgttcccttaaagtgactgaaagctttggggttgttattttttagggatgccaagtccccactta

SEQ ID NO: 82309 - DNA, 66 bp, Homo sapiens
ttaaagtgactgaaagctttggggttgttattttttagggatgccaagtccccacttaaaagtgga

SEQ ID NO: 82310 - DNA, 68 bp, Homo sapiens
actgaaagctttggggttgttattttttagggatgccaagtccccacttaaaagtggaccagacagca

SEQ ID NO: 82311 - DNA, 71 bp, Homo sapiens
ggttgttattttttagggatgccaagtccccacttaaaagtggaccagacagcagtgcatagtaagaacga

SEQ ID NO: 82312 - DNA, 74 bp, Homo sapiens
tttttagggatgccaagtccccacttaaaagtggaccagacagcagtgcatagtaagaacgaaggctcagtgcc

SEQ ID NO: 82313 - DNA, 79 bp, Homo sapiens
atgccaagtccccacttaaaagtggaccagacagcagtgcatagtaagaacgaaggctcagtgcccaccatgatgacca

SEQ ID NO: 82314 - DNA, 79 bp, Homo sapiens
ccacttaaaagtggaccagacagcagtgcatagtaagaacgaaggctcagtgcccaccatgatgaccaggaagaagcca

SEQ ID NO: 82315 - DNA, 80 bp, Homo sapiens
aaagtggaccagacagcagtgcatagtaagaacgaaggctcagtgcccaccatgatgaccaggaagaagccagccgcagt

SEQ ID NO: 82316 - DNA, 81 bp, Homo sapiens
agcagtgcatagtaagaacgaaggctcagtgcccaccatgatgaccaggaagaagccagccgcagttgacagtgttacaat

SEQ ID NO: 82317 - DNA, 78 bp, Homo sapiens
atagtaagaacgaaggctcagtgcccaccatgatgaccaggaagaagccagccgcagttgacagtgttacaattccac

SEQ ID NO: 82318 - DNA, 78 bp, Homo sapiens
aacgaaggctcagtgcccaccatgatgaccaggaagaagccagccgcagttgacagtgttacaattccaccagcccca

SEQ ID NO: 82319 - DNA, 79 bp, Homo sapiens
tgcccaccatgatgaccaggaagaagccagccgcagttgacagtgttacaattccaccagccccagtgttatctctcct

SEQ ID NO: 82320 - DNA, 84 bp, Homo sapiens
atgatgaccaggaagaagccagccgcagttgacagtgttacaattccaccagccccagtgttatctctccttgctgcatctgca

SEQ ID NO: 82321 - DNA, 81 bp, Homo sapiens
aagaagccagccgcagttgacagtgttacaattccaccagccccagtgttatctctccttgctgcatctgcagcaacgtcg

SEQ ID NO: 82322 - DNA, 84 bp, Homo sapiens
agccgcagttgacagtgttacaattccaccagccccagtgttatctctccttgctgcatctgcagcaacgtcggatgcaggtga

SEQ ID NO: 82323 - DNA, 83 bp, Homo sapiens
agtgttacaattccaccagccccagtgttatctctccttgctgcatctgcagcaacgtcggatgcaggtgagcacttttcaga

SEQ ID NO: 82324 - DNA, 85 bp, Homo sapiens
tacaattccaccagccccagtgttatctctccttgctgcatctgcagcaacgtcggatgcaggtgagcacttttcagatgctttg

SEQ ID NO: 82325 - DNA, 82 bp, Homo sapiens
cccagtgttatctctccttgctgcatctgcagcaacgtcggatgcaggtgagcacttttcagatgctttgggttcaccccaa

SEQ ID NO: 82326 - DNA, 74 bp, Homo sapiens
aaggcaccttgcatcctgtgctcaatttcttatctcttcccctcccgcagtcggctcctccctgaagaagaggt

SEQ ID NO: 82327 - DNA, 71 bp, Homo sapiens
aatttcttatctcttcccctcccgcagtcggctcctccctgaagaagaggttcaagcggcgggagatcgaa

SEQ ID NO: 82328 - DNA, 74 bp, Homo sapiens
ttatctcttcccctcccgcagtcggctcctccctgaagaagaggttcaagcggcgggagatcgaagccatccag

SEQ ID NO: 82329 - DNA, 77 bp, Homo sapiens
ccgcagtcggctcctccctgaagaagaggttcaagcggcgggagatcgaagccatccagtgcgaagtgcggaagatg

SEQ ID NO: 82330 - DNA, 78 bp, Homo sapiens
ctcctccctgaagaagaggttcaagcggcgggagatcgaagccatccagtgcgaagtgcggaagatgtgcaactacac

SEQ ID NO: 82331 - DNA, 78 bp, Homo sapiens
aagaagaggttcaagcggcgggagatcgaagccatccagtgcgaagtgcggaagatgtgcaactacaccaagatcctg

SEQ ID NO: 82332 - DNA, 80 bp, Homo sapiens
ttcaagcggcgggagatcgaagccatccagtgcgaagtgcggaagatgtgcaactacaccaagatcctgtccaccaagaa

SEQ ID NO: 82333 - DNA, 78 bp, Homo sapiens
cgggagatcgaagccatccagtgcgaagtgcggaagatgtgcaactacaccaagatcctgtccaccaagaagaacctg

SEQ ID NO: 82334 - DNA, 78 bp, Homo sapiens
agccatccagtgcgaagtgcggaagatgtgcaactacaccaagatcctgtccaccaagaagaacctggaccacgtgaa

SEQ ID NO: 82335 - DNA, 77 bp, Homo sapiens
agtgcgaagtgcggaagatgtgcaactacaccaagatcctgtccaccaagaagaacctggaccacgtgaacaagatc

SEQ ID NO: 82336 - DNA, 76 bp, Homo sapiens
ggaagatgtgcaactacaccaagatcctgtccaccaagaagaacctggaccacgtgaacaagatcctgaaggccaa

SEQ ID NO: 82337 - DNA, 76 bp, Homo sapiens
aactacaccaagatcctgtccaccaagaagaacctggaccacgtgaacaagatcctgaaggccaagcggctgcaga

SEQ ID NO: 82338 - DNA, 77 bp, Homo sapiens
aagatcctgtccaccaagaagaacctggaccacgtgaacaagatcctgaaggccaagcggctgcagagacaatcaaa

SEQ ID NO: 82339 - DNA, 75 bp, Homo sapiens
aagaacctggaccacgtgaacaagatcctgaaggccaagcggctgcagagacaatcaaaaacaggcaacaacttc

SEQ ID NO: 82340 - DNA, 76 bp, Homo sapiens
accacgtgaacaagatcctgaaggccaagcggctgcagagacaatcaaaaacaggcaacaacttcgtgaagaagag

SEQ ID NO: 82341 - DNA, 76 bp, Homo sapiens
aacaagatcctgaaggccaagcggctgcagagacaatcaaaaacaggcaacaacttcgtgaagaagaggcgcgggc

SEQ ID NO: 82342 - DNA, 74 bp, Homo sapiens
aaggccaagcggctgcagagacaatcaaaaacaggcaacaacttcgtgaagaagaggcgcgggcgtcccaggaa

SEQ ID NO: 82343 - DNA, 75 bp, Homo sapiens
tgcagagacaatcaaaaacaggcaacaacttcgtgaagaagaggcgcgggcgtcccaggaagcagcccacccagt

SEQ ID NO: 82344 - DNA, 73 bp, Homo sapiens
aatcaaaaacaggcaacaacttcgtgaagaagaggcgcgggcgtcccaggaagcagcccacccagttcgatga

SEQ ID NO: 82345 - DNA, 73 bp, Homo sapiens
aaacaggcaacaacttcgtgaagaagaggcgcgggcgtcccaggaagcagcccacccagttcgatgaggactc

SEQ ID NO: 82346 - DNA, 75 bp, Homo sapiens
aagaggcgcgggcgtcccaggaagcagcccacccagttcgatgaggactccagagaccaaatgccggtgctggaa

SEQ ID NO: 82347 - DNA, 76 bp, Homo sapiens
cgtcccaggaagcagcccacccagttcgatgaggactccagagaccaaatgccggtgctggaaaaatgcatcgacc

SEQ ID NO: 82348 - DNA, 78 bp, Homo sapiens
agcagcccacccagttcgatgaggactccagagaccaaatgccggtgctggaaaaatgcatcgacctgcccagcaaaa

SEQ ID NO: 82349 - DNA, 76 bp, Homo sapiens
cccacccagttcgatgaggactccagagaccaaatgccggtgctggaaaaatgcatcgacctgcccagcaaaagag

SEQ ID NO: 82350 - DNA, 78 bp, Homo sapiens
agagaccaaatgccggtgctggaaaaatgcatcgacctgcccagcaaaagaggccagaagcccagcctgagcccgctg

SEQ ID NO: 82351 - DNA, 79 bp, Homo sapiens
aaatgccggtgctggaaaaatgcatcgacctgcccagcaaaagaggccagaagcccagcctgagcccgctggtgctgga

SEQ ID NO: 82352 - DNA, 79 bp, Homo sapiens
ctggaaaaatgcatcgacctgcccagcaaaagaggccagaagcccagcctgagcccgctggtgctggagcccgccgcca

SEQ ID NO: 82353 - DNA, 82 bp, Homo sapiens
cagcaaaagaggccagaagcccagcctgagcccgctggtgctggagcccgccgccagccaagacaccatcatggccaccatc

SEQ ID NO: 82354 - DNA, 83 bp, Homo sapiens
ccagcctgagcccgctggtgctggagcccgccgccagccaagacaccatcatggccaccatcgaggcggtcatccacatggcc

SEQ ID NO: 82355 - DNA, 80 bp, Homo sapiens
agcccgctggtgctggagcccgccgccagccaagacaccatcatggccaccatcgaggcggtcatccacatggcccggga

SEQ ID NO: 82356 - DNA, 81 bp, Homo sapiens
tggtgctggagcccgccgccagccaagacaccatcatggccaccatcgaggcggtcatccacatggcccgggaggcgccgc

SEQ ID NO: 82357 - DNA, 77 bp, Homo sapiens
cccgccgccagccaagacaccatcatggccaccatcgaggcggtcatccacatggcccgggaggcgccgcccctgcc

SEQ ID NO: 82358 - DNA, 76 bp, Homo sapiens
agccaagacaccatcatggccaccatcgaggcggtcatccacatggcccgggaggcgccgcccctgcccccgccac

SEQ ID NO: 82359 - DNA, 75 bp, Homo sapiens
ccatcatggccaccatcgaggcggtcatccacatggcccgggaggcgccgcccctgcccccgccaccgccgccgc

SEQ ID NO: 82360 - DNA, 71 bp, Homo sapiens
accatcgaggcggtcatccacatggcccgggaggcgccgcccctgcccccgccaccgccgccgcccctgcc

SEQ ID NO: 82361 - DNA, 70 bp, Homo sapiens
cggtcatccacatggcccgggaggcgccgcccctgcccccgccaccgccgccgcccctgccgccaccgcc

SEQ ID NO: 82362 - DNA, 69 bp, Homo sapiens
acatggcccgggaggcgccgcccctgcccccgccaccgccgccgcccctgccgccaccgccgccaccac

SEQ ID NO: 82363 - DNA, 68 bp, Homo sapiens
ggaggcgccgcccctgcccccgccaccgccgccgcccctgccgccaccgccgccaccacccctgcccc

SEQ ID NO: 82364 - DNA, 66 bp, Homo sapiens
ccctgcccccgccaccgccgccgcccctgccgccaccgccgccaccacccctgcccccgccacccc

SEQ ID NO: 82365 - DNA, 66 bp, Homo sapiens
accgccgccgcccctgccgccaccgccgccaccacccctgcccccgccaccccctctacccaagac

SEQ ID NO: 82366 - DNA, 65 bp, Homo sapiens
ccctgccgccaccgccgccaccacccctgcccccgccaccccctctacccaagaccccccgaggc

SEQ ID NO: 82367 - DNA, 63 bp, Homo sapiens
accacccctgcccccgccaccccctctacccaagaccccccgaggcggaaagaggaaacacaa

SEQ ID NO: 82368 - DNA, 68 bp, Homo sapiens
tacccaagaccccccgaggcggaaagaggaaacacaaaccgcaggcccccgctcagcccccacagcag

SEQ ID NO: 82369 - DNA, 70 bp, Homo sapiens
aaagaggaaacacaaaccgcaggcccccgctcagcccccacagcagtcgcccccgcagcagccccttccc

SEQ ID NO: 82370 - DNA, 71 bp, Homo sapiens
aacacaaaccgcaggcccccgctcagcccccacagcagtcgcccccgcagcagccccttccccaggaagag

SEQ ID NO: 82371 - DNA, 71 bp, Homo sapiens
cccccgctcagcccccacagcagtcgcccccgcagcagccccttccccaggaagaggaggtgaaagccaaa

SEQ ID NO: 82372 - DNA, 71 bp, Homo sapiens
acagcagtcgcccccgcagcagccccttccccaggaagaggaggtgaaagccaaaaggcagaggaagtccc

SEQ ID NO: 82373 - DNA, 69 bp, Homo sapiens
aggaagaggaggtgaaagccaaaaggcagaggaagtcccgagggagtgagagcgaggtccttccctagg

SEQ ID NO: 82374 - DNA, 69 bp, Homo sapiens
aggtgaaagccaaaaggcagaggaagtcccgagggagtgagagcgaggtccttccctagggcgggtctg

SEQ ID NO: 82375 - DNA, 71 bp, Homo sapiens
aaaggcagaggaagtcccgagggagtgagagcgaggtccttccctagggcgggtctgggcgtctgcacctg

SEQ ID NO: 82376 - DNA, 70 bp, Homo sapiens
aggaagtcccgagggagtgagagcgaggtccttccctagggcgggtctgggcgtctgcacctggggccta

SEQ ID NO: 82377 - DNA, 71 bp, Homo sapiens
agggagtgagagcgaggtccttccctagggcgggtctgggcgtctgcacctggggcctagggaactgacac

SEQ ID NO: 82378 - DNA, 73 bp, Homo sapiens
tccttccctagggcgggtctgggcgtctgcacctggggcctagggaactgacacgtgggaagcgcagtgagcc

SEQ ID NO: 82379 - DNA, 71 bp, Homo sapiens
gggcgggtctgggcgtctgcacctggggcctagggaactgacacgtgggaagcgcagtgagccggggcggg

SEQ ID NO: 82380 - DNA, 71 bp, Homo sapiens
ggcgtctgcacctggggcctagggaactgacacgtgggaagcgcagtgagccggggcgggggcggaatccc

SEQ ID NO: 82381 - DNA, 71 bp, Homo sapiens
tagggaactgacacgtgggaagcgcagtgagccggggcgggggcggaatcccccgctgcagggacacccac

SEQ ID NO: 82382 - DNA, 72 bp, Homo sapiens
tgggaagcgcagtgagccggggcgggggcggaatcccccgctgcagggacacccacgcccttctctccagaa

SEQ ID NO: 82383 - DNA, 70 bp, Homo sapiens
agtgagccggggcgggggcggaatcccccgctgcagggacacccacgcccttctctccagaagccgggca

SEQ ID NO: 82384 - DNA, 73 bp, Homo sapiens
gaatcccccgctgcagggacacccacgcccttctctccagaagccgggcaggcagaatccggccagacgacgg

SEQ ID NO: 82385 - DNA, 77 bp, Homo sapiens
ctgcagggacacccacgcccttctctccagaagccgggcaggcagaatccggccagacgacggggctgagccatcag

SEQ ID NO: 82386 - DNA, 76 bp, Homo sapiens
acacccacgcccttctctccagaagccgggcaggcagaatccggccagacgacggggctgagccatcaggagctct

SEQ ID NO: 82387 - DNA, 77 bp, Homo sapiens
cttctctccagaagccgggcaggcagaatccggccagacgacggggctgagccatcaggagctcttgggaaagcaaa

SEQ ID NO: 82388 - DNA, 78 bp, Homo sapiens
tccagaagccgggcaggcagaatccggccagacgacggggctgagccatcaggagctcttgggaaagcaaagcaggga

SEQ ID NO: 82389 - DNA, 77 bp, Homo sapiens
aggcagaatccggccagacgacggggctgagccatcaggagctcttgggaaagcaaagcagggagacaccttcagaa

SEQ ID NO: 82390 - DNA, 76 bp, Homo sapiens
aatccggccagacgacggggctgagccatcaggagctcttgggaaagcaaagcagggagacaccttcagaagaagc

SEQ ID NO: 82391 - DNA, 79 bp, Homo sapiens
acgacggggctgagccatcaggagctcttgggaaagcaaagcagggagacaccttcagaagaagcttgtctgagcttca

SEQ ID NO: 82392 - DNA, 80 bp, Homo sapiens
ccatcaggagctcttgggaaagcaaagcagggagacaccttcagaagaagcttgtctgagcttcaccgcagctcccacca

SEQ ID NO: 82393 - DNA, 78 bp, Homo sapiens
aggagctcttgggaaagcaaagcagggagacaccttcagaagaagcttgtctgagcttcaccgcagctcccaccacgc

SEQ ID NO: 82394 - DNA, 78 bp, Homo sapiens
aaagcaaagcagggagacaccttcagaagaagcttgtctgagcttcaccgcagctcccaccacgcggcgcttcagtac

SEQ ID NO: 82395 - DNA, 79 bp, Homo sapiens
accttcagaagaagcttgtctgagcttcaccgcagctcccaccacgcggcgcttcagtacggctggatcctccgcaggc

SEQ ID NO: 82396 - DNA, 79 bp, Homo sapiens
agaagcttgtctgagcttcaccgcagctcccaccacgcggcgcttcagtacggctggatcctccgcaggcgagcggaag

SEQ ID NO: 82397 - DNA, 77 bp, Homo sapiens
ctgagcttcaccgcagctcccaccacgcggcgcttcagtacggctggatcctccgcaggcgagcggaaggcccccag

SEQ ID NO: 82398 - DNA, 76 bp, Homo sapiens
ccgcagctcccaccacgcggcgcttcagtacggctggatcctccgcaggcgagcggaaggcccccaggaggagcag

SEQ ID NO: 82399 - DNA, 80 bp, Homo sapiens
tggatcctccgcaggcgagcggaaggcccccaggaggagcaggctggtggcactctcctgacctcacgctgccaaggtgc

SEQ ID NO: 82400 - DNA, 78 bp, Homo sapiens
caggcgagcggaaggcccccaggaggagcaggctggtggcactctcctgacctcacgctgccaaggtgcgccctcgac

SEQ ID NO: 82401 - DNA, 76 bp, Homo sapiens
gaaggcccccaggaggagcaggctggtggcactctcctgacctcacgctgccaaggtgcgccctcgactcccgatt

SEQ ID NO: 82402 - DNA, 80 bp, Homo sapiens
aggaggagcaggctggtggcactctcctgacctcacgctgccaaggtgcgccctcgactcccgatttcatttgctggcca

SEQ ID NO: 82403 - DNA, 77 bp, Homo sapiens
aggctggtggcactctcctgacctcacgctgccaaggtgcgccctcgactcccgatttcatttgctggccaggaaaa

SEQ ID NO: 82404 - DNA, 74 bp, Homo sapiens
actctcctgacctcacgctgccaaggtgcgccctcgactcccgatttcatttgctggccaggaaaatcgaaagg

SEQ ID NO: 82405 - DNA, 72 bp, Homo sapiens
acctcacgctgccaaggtgcgccctcgactcccgatttcatttgctggccaggaaaatcgaaagggaaacac

SEQ ID NO: 82406 - DNA, 70 bp, Homo sapiens
ccaaggtgcgccctcgactcccgatttcatttgctggccaggaaaatcgaaagggaaacaccctcaatta

SEQ ID NO: 82407 - DNA, 68 bp, Homo sapiens
ccctcgactcccgatttcatttgctggccaggaaaatcgaaagggaaacaccctcaattaggaaacat

SEQ ID NO: 82408 - DNA, 68 bp, Homo sapiens
actcccgatttcatttgctggccaggaaaatcgaaagggaaacaccctcaattaggaaacattccaag

SEQ ID NO: 82409 - DNA, 68 bp, Homo sapiens
ttcatttgctggccaggaaaatcgaaagggaaacaccctcaattaggaaacattccaaggggagaaaa

SEQ ID NO: 82410 - DNA, 69 bp, Homo sapiens
aggaaaatcgaaagggaaacaccctcaattaggaaacattccaaggggagaaaagctgcaaattgctca

SEQ ID NO: 82411 - DNA, 71 bp, Homo sapiens
atcgaaagggaaacaccctcaattaggaaacattccaaggggagaaaagctgcaaattgctcaactggcat

SEQ ID NO: 82412 - DNA, 72 bp, Homo sapiens
aaacaccctcaattaggaaacattccaaggggagaaaagctgcaaattgctcaactggcattgctgtaaccc

SEQ ID NO: 82413 - DNA, 72 bp, Homo sapiens
ttaggaaacattccaaggggagaaaagctgcaaattgctcaactggcattgctgtaacccgttccatttaat

SEQ ID NO: 82414 - DNA, 70 bp, Homo sapiens
caaggggagaaaagctgcaaattgctcaactggcattgctgtaacccgttccatttaattggtttttatt

SEQ ID NO: 82415 - DNA, 70 bp, Homo sapiens
ggagaaaagctgcaaattgctcaactggcattgctgtaacccgttccatttaattggtttttatttcttt

SEQ ID NO: 82416 - DNA, 71 bp, Homo sapiens
gcaaattgctcaactggcattgctgtaacccgttccatttaattggtttttatttcttttgattttcaagc

SEQ ID NO: 82417 - DNA, 69 bp, Homo sapiens
tccatttaattggtttttatttcttttgattttcaagctctgctaagctttggggtaccaacgtcatct

SEQ ID NO: 82418 - DNA, 71 bp, Homo sapiens
taattggtttttatttcttttgattttcaagctctgctaagctttggggtaccaacgtcatcttcaggtga

SEQ ID NO: 82419 - DNA, 73 bp, Homo sapiens
tcttttgattttcaagctctgctaagctttggggtaccaacgtcatcttcaggtgacctgaatctttccctta

SEQ ID NO: 82420 - DNA, 71 bp, Homo sapiens
ttttcaagctctgctaagctttggggtaccaacgtcatcttcaggtgacctgaatctttcccttaaccgta

SEQ ID NO: 82421 - DNA, 71 bp, Homo sapiens
tgctaagctttggggtaccaacgtcatcttcaggtgacctgaatctttcccttaaccgtacagtttctcga

SEQ ID NO: 82422 - DNA, 69 bp, Homo sapiens
tttggggtaccaacgtcatcttcaggtgacctgaatctttcccttaaccgtacagtttctcgatggaat

SEQ ID NO: 82423 - DNA, 74 bp, Homo sapiens
accaacgtcatcttcaggtgacctgaatctttcccttaaccgtacagtttctcgatggaattgtgtgatcagaa

SEQ ID NO: 82424 - DNA, 74 bp, Homo sapiens
ttcaggtgacctgaatctttcccttaaccgtacagtttctcgatggaattgtgtgatcagaaggtggaattcta

SEQ ID NO: 82425 - DNA, 73 bp, Homo sapiens
acctgaatctttcccttaaccgtacagtttctcgatggaattgtgtgatcagaaggtggaattctagtgatag

SEQ ID NO: 82426 - DNA, 75 bp, Homo sapiens
ttcccttaaccgtacagtttctcgatggaattgtgtgatcagaaggtggaattctagtgataggcgacctcagac

SEQ ID NO: 82427 - DNA, 81 bp, Homo sapiens
atggaattgtgtgatcagaaggtggaattctagtgataggcgacctcagacccgcattcatgttctgtgtgcctcttctat

SEQ ID NO: 82428 - DNA, 85 bp, Homo sapiens
tgatcagaaggtggaattctagtgataggcgacctcagacccgcattcatgttctgtgtgcctcttctattgcacatacactgat

SEQ ID NO: 82429 - DNA, 80 bp, Homo sapiens
aaggtggaattctagtgataggcgacctcagacccgcattcatgttctgtgtgcctcttctattgcacatacactgattt

SEQ ID NO: 82430 - DNA, 84 bp, Homo sapiens
ttctagtgataggcgacctcagacccgcattcatgttctgtgtgcctcttctattgcacatacactgatttttagcattgtcta

SEQ ID NO: 82431 - DNA, 77 bp, Homo sapiens
acccgcattcatgttctgtgtgcctcttctattgcacatacactgatttttagcattgtctattcctatttttcctt

SEQ ID NO: 82432 - DNA, 78 bp, Homo sapiens
atgttctgtgtgcctcttctattgcacatacactgatttttagcattgtctattcctatttttcctttgcccattgta

SEQ ID NO: 82433 - DNA, 76 bp, Homo sapiens
cctcttctattgcacatacactgatttttagcattgtctattcctatttttcctttgcccattgtacttccatata

SEQ ID NO: 82434 - DNA, 75 bp, Homo sapiens
ctattgcacatacactgatttttagcattgtctattcctatttttcctttgcccattgtacttccatatatcttt

SEQ ID NO: 82435 - DNA, 72 bp, Homo sapiens
acactgatttttagcattgtctattcctatttttcctttgcccattgtacttccatatatcttttcattaac

SEQ ID NO: 82436 - DNA, 73 bp, Homo sapiens
gcattgtctattcctatttttcctttgcccattgtacttccatatatcttttcattaacttacttgctgcctt

SEQ ID NO: 82437 - DNA, 70 bp, Homo sapiens
gtctattcctatttttcctttgcccattgtacttccatatatcttttcattaacttacttgctgcctttt

SEQ ID NO: 82438 - DNA, 67 bp, Homo sapiens
atttttcctttgcccattgtacttccatatatcttttcattaacttacttgctgccttttttttttc

SEQ ID NO: 82439 - DNA, 64 bp, Homo sapiens
cttttttttttcttggtacacatttaaataaagtaatccttaacctgtgctgtaaagttcaccc

SEQ ID NO: 82440 - DNA, 70 bp, Homo sapiens
tttttcttggtacacatttaaataaagtaatccttaacctgtgctgtaaagttcacccttggcatgctgt

SEQ ID NO: 82441 - DNA, 70 bp, Homo sapiens
acatttaaataaagtaatccttaacctgtgctgtaaagttcacccttggcatgctgttccaagaacctgg

SEQ ID NO: 82442 - DNA, 70 bp, Homo sapiens
aaataaagtaatccttaacctgtgctgtaaagttcacccttggcatgctgttccaagaacctgggtttga

SEQ ID NO: 82443 - DNA, 73 bp, Homo sapiens
taacctgtgctgtaaagttcacccttggcatgctgttccaagaacctgggtttgaatcccaatcgttgtgaaa

SEQ ID NO: 82444 - DNA, 74 bp, Homo sapiens
tgtaaagttcacccttggcatgctgttccaagaacctgggtttgaatcccaatcgttgtgaaacatactcagta

SEQ ID NO: 82445 - DNA, 73 bp, Homo sapiens
acccttggcatgctgttccaagaacctgggtttgaatcccaatcgttgtgaaacatactcagtattgataaaa

SEQ ID NO: 82446 - DNA, 71 bp, Homo sapiens
tgctgttccaagaacctgggtttgaatcccaatcgttgtgaaacatactcagtattgataaaaccttttta

SEQ ID NO: 82447 - DNA, 69 bp, Homo sapiens
ttccaagaacctgggtttgaatcccaatcgttgtgaaacatactcagtattgataaaacctttttaata

SEQ ID NO: 82448 - DNA, 76 bp, Homo sapiens
atcccaatcgttgtgaaacatactcagtattgataaaacctttttaataagtgatgcagagcagccaaggatatgt

SEQ ID NO: 82449 - DNA, 77 bp, Homo sapiens
aaacatactcagtattgataaaacctttttaataagtgatgcagagcagccaaggatatgttgacccagatgtcaac

SEQ ID NO: 82450 - DNA, 76 bp, Homo sapiens
agtattgataaaacctttttaataagtgatgcagagcagccaaggatatgttgacccagatgtcaaccaggctatt

SEQ ID NO: 82451 - DNA, 75 bp, Homo sapiens
ataaaacctttttaataagtgatgcagagcagccaaggatatgttgacccagatgtcaaccaggctatttttata

SEQ ID NO: 82452 - DNA, 84 bp, Homo sapiens
atgcagagcagccaaggatatgttgacccagatgtcaaccaggctatttttatacttaaaacatgtcagcagagcataggcaga

SEQ ID NO: 82453 - DNA, 78 bp, Homo sapiens
caaggatatgttgacccagatgtcaaccaggctatttttatacttaaaacatgtcagcagagcataggcagaataaaa

SEQ ID NO: 82454 - DNA, 77 bp, Homo sapiens
atatgttgacccagatgtcaaccaggctatttttatacttaaaacatgtcagcagagcataggcagaataaaatggt

SEQ ID NO: 82455 - DNA, 74 bp, Homo sapiens
caggctatttttatacttaaaacatgtcagcagagcataggcagaataaaatggtttaaataccccacagcaaa

SEQ ID NO: 82456 - DNA, 76 bp, Homo sapiens
ttatacttaaaacatgtcagcagagcataggcagaataaaatggtttaaataccccacagcaaatagagtaactga

SEQ ID NO: 82457 - DNA, 75 bp, Homo sapiens
aaaacatgtcagcagagcataggcagaataaaatggtttaaataccccacagcaaatagagtaactgacaaacca

SEQ ID NO: 82458 - DNA, 71 bp, Homo sapiens
agcataggcagaataaaatggtttaaataccccacagcaaatagagtaactgacaaaccaccaaaaactga

SEQ ID NO: 82459 - DNA, 66 bp, Homo sapiens
gaataaaatggtttaaataccccacagcaaatagagtaactgacaaaccaccaaaaactgaaaccc

SEQ ID NO: 82460 - DNA, 66 bp, Homo sapiens
aaatggtttaaataccccacagcaaatagagtaactgacaaaccaccaaaaactgaaaccccagac

SEQ ID NO: 82461 - DNA, 69 bp, Homo sapiens
cccacagcaaatagagtaactgacaaaccaccaaaaactgaaaccccagacccaccagaaagacaagtg

SEQ ID NO: 82462 - DNA, 71 bp, Homo sapiens
aaaccccagacccaccagaaagacaagtgtctagcaatgccttggtacctgatctttttcattcaaataat

SEQ ID NO: 82463 - DNA, 74 bp, Homo sapiens
acccaccagaaagacaagtgtctagcaatgccttggtacctgatctttttcattcaaataattgtcataggttg

SEQ ID NO: 82464 - DNA, 75 bp, Homo sapiens
cagaaagacaagtgtctagcaatgccttggtacctgatctttttcattcaaataattgtcataggttgttcaaaa

SEQ ID NO: 82465 - DNA, 71 bp, Homo sapiens
agtgtctagcaatgccttggtacctgatctttttcattcaaataattgtcataggttgttcaaaaaaaaaa

SEQ ID NO: 82466 - DNA, 67 bp, Homo sapiens
aaaggaaacaaaaacacaatagaagtccattatcccttgataattatttcttaaaagcaaatgggag

SEQ ID NO: 82467 - DNA, 69 bp, Homo sapiens
caaaaacacaatagaagtccattatcccttgataattatttcttaaaagcaaatgggagtaagtgttct

SEQ ID NO: 82468 - DNA, 71 bp, Homo sapiens
acaatagaagtccattatcccttgataattatttcttaaaagcaaatgggagtaagtgttcttatctggaa

SEQ ID NO: 82469 - DNA, 70 bp, Homo sapiens
tccattatcccttgataattatttcttaaaagcaaatgggagtaagtgttcttatctggaaaaataaata

SEQ ID NO: 82470 - DNA, 70 bp, Homo sapiens
aaataaataaaatgctcaaagggtatcaccacttcaattttatcaagccaccttggacaaagtatccaaa

SEQ ID NO: 82471 - DNA, 71 bp, Homo sapiens
ataaaatgctcaaagggtatcaccacttcaattttatcaagccaccttggacaaagtatccaaattgtggt

SEQ ID NO: 82472 - DNA, 69 bp, Homo sapiens
caccacttcaattttatcaagccaccttggacaaagtatccaaattgtggttgccttaataaactaaaa

SEQ ID NO: 82473 - DNA, 72 bp, Homo sapiens
agtatccaaattgtggttgccttaataaactaaaacattattgtacataatgtaattataaatctatcagtc

SEQ ID NO: 82474 - DNA, 78 bp, Homo sapiens
caaattgtggttgccttaataaactaaaacattattgtacataatgtaattataaatctatcagtctgcatggatgca

SEQ ID NO: 82475 - DNA, 80 bp, Homo sapiens
gccttaataaactaaaacattattgtacataatgtaattataaatctatcagtctgcatggatgcaaactgtgtgtgaca

SEQ ID NO: 82476 - DNA, 79 bp, Homo sapiens
ctaaaacattattgtacataatgtaattataaatctatcagtctgcatggatgcaaactgtgtgtgacaaatcgtcttt

SEQ ID NO: 82477 - DNA, 80 bp, Homo sapiens
attgtacataatgtaattataaatctatcagtctgcatggatgcaaactgtgtgtgacaaatcgtcttttaaatggtcaa

SEQ ID NO: 82478 - DNA, 81 bp, Homo sapiens
atgtaattataaatctatcagtctgcatggatgcaaactgtgtgtgacaaatcgtcttttaaatggtcaatttcagctgta

SEQ ID NO: 82479 - DNA, 81 bp, Homo sapiens
ttataaatctatcagtctgcatggatgcaaactgtgtgtgacaaatcgtcttttaaatggtcaatttcagctgtacatttc

SEQ ID NO: 82480 - DNA, 81 bp, Homo sapiens
atcagtctgcatggatgcaaactgtgtgtgacaaatcgtcttttaaatggtcaatttcagctgtacatttctcatccaagt

SEQ ID NO: 82481 - DNA, 78 bp, Homo sapiens
atgcaaactgtgtgtgacaaatcgtcttttaaatggtcaatttcagctgtacatttctcatccaagttgtactctagc

SEQ ID NO: 82482 - DNA, 76 bp, Homo sapiens
tgtgtgacaaatcgtcttttaaatggtcaatttcagctgtacatttctcatccaagttgtactctagccattggtt

SEQ ID NO: 82483 - DNA, 74 bp, Homo sapiens
acaaatcgtcttttaaatggtcaatttcagctgtacatttctcatccaagttgtactctagccattggtttagc

SEQ ID NO: 82484 - DNA, 76 bp, Homo sapiens
ttttaaatggtcaatttcagctgtacatttctcatccaagttgtactctagccattggtttagcgtggacagatac

SEQ ID NO: 82485 - DNA, 79 bp, Homo sapiens
aatttcagctgtacatttctcatccaagttgtactctagccattggtttagcgtggacagatactccatctctattatc

SEQ ID NO: 82486 - DNA, 77 bp, Homo sapiens
atccaagttgtactctagccattggtttagcgtggacagatactccatctctattatccatttccacagcccaaata

SEQ ID NO: 82487 - DNA, 77 bp, Homo sapiens
ttgtactctagccattggtttagcgtggacagatactccatctctattatccatttccacagcccaaataaaatatg

SEQ ID NO: 82488 - DNA, 77 bp, Homo sapiens
attggtttagcgtggacagatactccatctctattatccatttccacagcccaaataaaatatgttaagcaggctca

SEQ ID NO: 82489 - DNA, 78 bp, Homo sapiens
ctccatctctattatccatttccacagcccaaataaaatatgttaagcaggctcagaatgaatatgaagaattccatt

SEQ ID NO: 82490 - DNA, 76 bp, Homo sapiens
ttccacagcccaaataaaatatgttaagcaggctcagaatgaatatgaagaattccatttccgtagatgttttcta

SEQ ID NO: 82491 - DNA, 73 bp, Homo sapiens
gcccaaataaaatatgttaagcaggctcagaatgaatatgaagaattccatttccgtagatgttttctaaaag

SEQ ID NO: 82492 - DNA, 75 bp, Homo sapiens
atgttaagcaggctcagaatgaatatgaagaattccatttccgtagatgttttctaaaagtcagattgtggaaat

SEQ ID NO: 82493 - DNA, 75 bp, Homo sapiens
agcaggctcagaatgaatatgaagaattccatttccgtagatgttttctaaaagtcagattgtggaaatttcaaa

SEQ ID NO: 82494 - DNA, 72 bp, Homo sapiens
gaatgaatatgaagaattccatttccgtagatgttttctaaaagtcagattgtggaaatttcaaataagtat

SEQ ID NO: 82495 - DNA, 69 bp, Homo sapiens
gaagaattccatttccgtagatgttttctaaaagtcagattgtggaaatttcaaataagtattttcaat

SEQ ID NO: 82496 - DNA, 69 bp, Homo sapiens
ccgtagatgttttctaaaagtcagattgtggaaatttcaaataagtattttcaatttcctccctcactc

SEQ ID NO: 82497 - DNA, 68 bp, Homo sapiens
ttctaaaagtcagattgtggaaatttcaaataagtattttcaatttcctccctcactccctcttacct

SEQ ID NO: 82498 - DNA, 67 bp, Homo sapiens
aaagtcagattgtggaaatttcaaataagtattttcaatttcctccctcactccctcttaccttccc

SEQ ID NO: 82499 - DNA, 70 bp, Homo sapiens
aataagtattttcaatttcctccctcactccctcttaccttccccaagacatcaaacacctggcatggta

SEQ ID NO: 82500 - DNA, 72 bp, Homo sapiens
tttcaatttcctccctcactccctcttaccttccccaagacatcaaacacctggcatggtagattatagaaa

SEQ ID NO: 82501 - DNA, 76 bp, Homo sapiens
ccctcactccctcttaccttccccaagacatcaaacacctggcatggtagattatagaaagagacactgagagaga

SEQ ID NO: 82502 - DNA, 75 bp, Homo sapiens
tcttaccttccccaagacatcaaacacctggcatggtagattatagaaagagacactgagagagagaattaaatt

SEQ ID NO: 82503 - DNA, 76 bp, Homo sapiens
cccaagacatcaaacacctggcatggtagattatagaaagagacactgagagagagaattaaattttctaatggga

SEQ ID NO: 82504 - DNA, 76 bp, Homo sapiens
acatcaaacacctggcatggtagattatagaaagagacactgagagagagaattaaattttctaatgggaattaga

SEQ ID NO: 82505 - DNA, 73 bp, Homo sapiens
gattatagaaagagacactgagagagagaattaaattttctaatgggaattagaatatctggtttacctccaa

SEQ ID NO: 82506 - DNA, 70 bp, Homo sapiens
gagacactgagagagagaattaaattttctaatgggaattagaatatctggtttacctccaaattaagtt

SEQ ID NO: 82507 - DNA, 68 bp, Homo sapiens
ctgagagagagaattaaattttctaatgggaattagaatatctggtttacctccaaattaagtttctt

SEQ ID NO: 82508 - DNA, 65 bp, Homo sapiens
aaattttctaatgggaattagaatatctggtttacctccaaattaagtttctttacaggaagttg

SEQ ID NO: 82509 - DNA, 68 bp, Homo sapiens
ttctaatgggaattagaatatctggtttacctccaaattaagtttctttacaggaagttgggaccagc

SEQ ID NO: 82510 - DNA, 70 bp, Homo sapiens
gaatatctggtttacctccaaattaagtttctttacaggaagttgggaccagctggaaattgtattatca

SEQ ID NO: 82511 - DNA, 68 bp, Homo sapiens
gtttacctccaaattaagtttctttacaggaagttgggaccagctggaaattgtattatcatttcgga

SEQ ID NO: 82512 - DNA, 70 bp, Homo sapiens
ctccaaattaagtttctttacaggaagttgggaccagctggaaattgtattatcatttcggaacacaata

SEQ ID NO: 82513 - DNA, 69 bp, Homo sapiens
agtttctttacaggaagttgggaccagctggaaattgtattatcatttcggaacacaatattacttcct

SEQ ID NO: 82514 - DNA, 72 bp, Homo sapiens
aagttgggaccagctggaaattgtattatcatttcggaacacaatattacttccttagagagagatggattt

SEQ ID NO: 82515 - DNA, 76 bp, Homo sapiens
cagctggaaattgtattatcatttcggaacacaatattacttccttagagagagatggatttttgttggcaacata

SEQ ID NO: 82516 - DNA, 74 bp, Homo sapiens
ttgtattatcatttcggaacacaatattacttccttagagagagatggatttttgttggcaacataaaagaata

SEQ ID NO: 82517 - DNA, 72 bp, Homo sapiens
tttcggaacacaatattacttccttagagagagatggatttttgttggcaacataaaagaataagtgatggg

SEQ ID NO: 82518 - DNA, 76 bp, Homo sapiens
cacaatattacttccttagagagagatggatttttgttggcaacataaaagaataagtgatggggtatctatgtga

SEQ ID NO: 82519 - DNA, 73 bp, Homo sapiens
cttccttagagagagatggatttttgttggcaacataaaagaataagtgatggggtatctatgtgagtaaatt

SEQ ID NO: 82520 - DNA, 72 bp, Homo sapiens
agagagagatggatttttgttggcaacataaaagaataagtgatggggtatctatgtgagtaaatttttaaa

SEQ ID NO: 82521 - DNA, 74 bp, Homo sapiens
tggcaacataaaagaataagtgatggggtatctatgtgagtaaatttttaaattccaagttaatatgcttgcaa

SEQ ID NO: 82522 - DNA, 75 bp, Homo sapiens
gaataagtgatggggtatctatgtgagtaaatttttaaattccaagttaatatgcttgcaaacattactgctgcg

SEQ ID NO: 82523 - DNA, 75 bp, Homo sapiens
gggtatctatgtgagtaaatttttaaattccaagttaatatgcttgcaaacattactgctgcgttatggcaccaa

SEQ ID NO: 82524 - DNA, 76 bp, Homo sapiens
tctatgtgagtaaatttttaaattccaagttaatatgcttgcaaacattactgctgcgttatggcaccaagagttg

SEQ ID NO: 82525 - DNA, 73 bp, Homo sapiens
ttttaaattccaagttaatatgcttgcaaacattactgctgcgttatggcaccaagagttggttgaaattacc

SEQ ID NO: 82526 - DNA, 74 bp, Homo sapiens
aattccaagttaatatgcttgcaaacattactgctgcgttatggcaccaagagttggttgaaattacccacgta

SEQ ID NO: 82527 - DNA, 77 bp, Homo sapiens
aaacattactgctgcgttatggcaccaagagttggttgaaattacccacgtagtcatactcctgtgctctgtcacca

SEQ ID NO: 82528 - DNA, 80 bp, Homo sapiens
tgcgttatggcaccaagagttggttgaaattacccacgtagtcatactcctgtgctctgtcaccatggacttcacatcat

SEQ ID NO: 82529 - DNA, 79 bp, Homo sapiens
accaagagttggttgaaattacccacgtagtcatactcctgtgctctgtcaccatggacttcacatcatttgctgccca

SEQ ID NO: 82530 - DNA, 80 bp, Homo sapiens
ttggttgaaattacccacgtagtcatactcctgtgctctgtcaccatggacttcacatcatttgctgcccactagttcaa

SEQ ID NO: 82531 - DNA, 81 bp, Homo sapiens
aattacccacgtagtcatactcctgtgctctgtcaccatggacttcacatcatttgctgcccactagttcaatcgcattta

SEQ ID NO: 82532 - DNA, 86 bp, Homo sapiens
tagtcatactcctgtgctctgtcaccatggacttcacatcatttgctgcccactagttcaatcgcatttaatcctagcaatatgta

SEQ ID NO: 82533 - DNA, 79 bp, Homo sapiens
tgtcaccatggacttcacatcatttgctgcccactagttcaatcgcatttaatcctagcaatatgtaagtttaaaggac

SEQ ID NO: 82534 - DNA, 77 bp, Homo sapiens
acttcacatcatttgctgcccactagttcaatcgcatttaatcctagcaatatgtaagtttaaaggactgcattccc

SEQ ID NO: 82535 - DNA, 75 bp, Homo sapiens
ttgctgcccactagttcaatcgcatttaatcctagcaatatgtaagtttaaaggactgcattcccctctacttta

SEQ ID NO: 82536 - DNA, 71 bp, Homo sapiens
actagttcaatcgcatttaatcctagcaatatgtaagtttaaaggactgcattcccctctactttaaagct

SEQ ID NO: 82537 - DNA, 73 bp, Homo sapiens
caatcgcatttaatcctagcaatatgtaagtttaaaggactgcattcccctctactttaaagcttatatccta

SEQ ID NO: 82538 - DNA, 71 bp, Homo sapiens
taaaggactgcattcccctctactttaaagcttatatcctagatactcagtttgtgaccttggttgacctt

SEQ ID NO: 82539 - DNA, 74 bp, Homo sapiens
atactcagtttgtgaccttggttgacctttggcatttcacgcaagttgaacagcaaaatcaaagcagccatttt

SEQ ID NO: 82540 - DNA, 74 bp, Homo sapiens
ttggttgacctttggcatttcacgcaagttgaacagcaaaatcaaagcagccatttttaattcgtcattcccaa

SEQ ID NO: 82541 - DNA, 76 bp, Homo sapiens
ctttggcatttcacgcaagttgaacagcaaaatcaaagcagccatttttaattcgtcattcccaagccctatctga

SEQ ID NO: 82542 - DNA, 73 bp, Homo sapiens
caagttgaacagcaaaatcaaagcagccatttttaattcgtcattcccaagccctatctgagtggttccaaag

SEQ ID NO: 82543 - DNA, 74 bp, Homo sapiens
aacagcaaaatcaaagcagccatttttaattcgtcattcccaagccctatctgagtggttccaaagtcacctga

SEQ ID NO: 82544 - DNA, 71 bp, Homo sapiens
aagcagccatttttaattcgtcattcccaagccctatctgagtggttccaaagtcacctgagaggaaggtt

SEQ ID NO: 82545 - DNA, 69 bp, Homo sapiens
tttttaattcgtcattcccaagccctatctgagtggttccaaagtcacctgagaggaaggtttaaatta

SEQ ID NO: 82546 - DNA, 70 bp, Homo sapiens
attcgtcattcccaagccctatctgagtggttccaaagtcacctgagaggaaggtttaaattagtccctc

SEQ ID NO: 82547 - DNA, 69 bp, Homo sapiens
agtggttccaaagtcacctgagaggaaggtttaaattagtccctctcaccccaccattgctataaaaca

SEQ ID NO: 82548 - DNA, 68 bp, Homo sapiens
aagtcacctgagaggaaggtttaaattagtccctctcaccccaccattgctataaaacagcaacgttt

SEQ ID NO: 82549 - DNA, 68 bp, Homo sapiens
agaggaaggtttaaattagtccctctcaccccaccattgctataaaacagcaacgttttcattccaat

SEQ ID NO: 82550 - DNA, 72 bp, Homo sapiens
ttagtccctctcaccccaccattgctataaaacagcaacgttttcattccaattcagccataaagaggtttc

SEQ ID NO: 82551 - DNA, 71 bp, Homo sapiens
ccaccattgctataaaacagcaacgttttcattccaattcagccataaagaggtttctcttcttactgggt

SEQ ID NO: 82552 - DNA, 70 bp, Homo sapiens
gctataaaacagcaacgttttcattccaattcagccataaagaggtttctcttcttactgggttttgaaa

SEQ ID NO: 82553 - DNA, 70 bp, Homo sapiens
aacagcaacgttttcattccaattcagccataaagaggtttctcttcttactgggttttgaaatcatttc

SEQ ID NO: 82554 - DNA, 68 bp, Homo sapiens
ttttcattccaattcagccataaagaggtttctcttcttactgggttttgaaatcatttccttttttc

SEQ ID NO: 82555 - DNA, 67 bp, Homo sapiens
tcagccataaagaggtttctcttcttactgggttttgaaatcatttccttttttctttcgtttgccc

SEQ ID NO: 82556 - DNA, 64 bp, Homo sapiens
agaggtttctcttcttactgggttttgaaatcatttccttttttctttcgtttgcccttcttcc

SEQ ID NO: 82557 - DNA, 67 bp, Homo sapiens
ctgggttttgaaatcatttccttttttctttcgtttgcccttcttccttcctgtgttgtactatctc

SEQ ID NO: 82558 - DNA, 68 bp, Homo sapiens
ttttgaaatcatttccttttttctttcgtttgcccttcttccttcctgtgttgtactatctctccaac

SEQ ID NO: 82559 - DNA, 74 bp, Homo sapiens
ttctttcgtttgcccttcttccttcctgtgttgtactatctctccaaccacgtctataagcagactcaatcttc

SEQ ID NO: 82560 - DNA, 80 bp, Homo sapiens
cttcttccttcctgtgttgtactatctctccaaccacgtctataagcagactcaatcttcttgcagaggaagatgagctg

SEQ ID NO: 82561 - DNA, 84 bp, Homo sapiens
ttcctgtgttgtactatctctccaaccacgtctataagcagactcaatcttcttgcagaggaagatgagctggcactctgcaaa

SEQ ID NO: 82562 - DNA, 82 bp, Homo sapiens
tactatctctccaaccacgtctataagcagactcaatcttcttgcagaggaagatgagctggcactctgcaaacttctttaa

SEQ ID NO: 82563 - DNA, 82 bp, Homo sapiens
tatctctccaaccacgtctataagcagactcaatcttcttgcagaggaagatgagctggcactctgcaaacttctttaataa

SEQ ID NO: 82564 - DNA, 81 bp, Homo sapiens
tctccaaccacgtctataagcagactcaatcttcttgcagaggaagatgagctggcactctgcaaacttctttaataagga

SEQ ID NO: 82565 - DNA, 78 bp, Homo sapiens
acgtctataagcagactcaatcttcttgcagaggaagatgagctggcactctgcaaacttctttaataaggacccaaa

SEQ ID NO: 82566 - DNA, 78 bp, Homo sapiens
tataagcagactcaatcttcttgcagaggaagatgagctggcactctgcaaacttctttaataaggacccaaagttta

SEQ ID NO: 82567 - DNA, 77 bp, Homo sapiens
ataagcagactcaatcttcttgcagaggaagatgagctggcactctgcaaacttctttaataaggacccaaagttta

SEQ ID NO: 82568 - DNA, 77 bp, Homo sapiens
tcaatcttcttgcagaggaagatgagctggcactctgcaaacttctttaataaggacccaaagtttacttgacatta

SEQ ID NO: 82569 - DNA, 75 bp, Homo sapiens
aatcttcttgcagaggaagatgagctggcactctgcaaacttctttaataaggacccaaagtttacttgacatta

SEQ ID NO: 82570 - DNA, 72 bp, Homo sapiens
aggaagatgagctggcactctgcaaacttctttaataaggacccaaagtttacttgacattaacctctagta

SEQ ID NO: 82571 - DNA, 65 bp, Homo sapiens
acttctttaataaggacccaaagtttacttgacattaacctctagtaggtgagaaattccaaaaa

SEQ ID NO: 82572 - DNA, 65 bp, Homo sapiens
acccaaagtttacttgacattaacctctagtaggtgagaaattccaaaaaagctttggggtacat

SEQ ID NO: 82573 - DNA, 67 bp, Homo sapiens
gtttacttgacattaacctctagtaggtgagaaattccaaaaaagctttggggtacattagaatttc

SEQ ID NO: 82574 - DNA, 70 bp, Homo sapiens
gtaggtgagaaattccaaaaaagctttggggtacattagaatttccaaagctctgaaagatatttcagga

SEQ ID NO: 82575 - DNA, 71 bp, Homo sapiens
attccaaaaaagctttggggtacattagaatttccaaagctctgaaagatatttcaggagatttaacagca

SEQ ID NO: 82576 - DNA, 73 bp, Homo sapiens
aaaagctttggggtacattagaatttccaaagctctgaaagatatttcaggagatttaacagcagagttgcaa

SEQ ID NO: 82577 - DNA, 77 bp, Homo sapiens
tacattagaatttccaaagctctgaaagatatttcaggagatttaacagcagagttgcaacttacacgtgaattctg

SEQ ID NO: 82578 - DNA, 76 bp, Homo sapiens
aatttccaaagctctgaaagatatttcaggagatttaacagcagagttgcaacttacacgtgaattctggtctata

SEQ ID NO: 82579 - DNA, 80 bp, Homo sapiens
tctgaaagatatttcaggagatttaacagcagagttgcaacttacacgtgaattctggtctatagtggtcatgtgagtta

SEQ ID NO: 82580 - DNA, 77 bp, Homo sapiens
atatttcaggagatttaacagcagagttgcaacttacacgtgaattctggtctatagtggtcatgtgagttaaattc

SEQ ID NO: 82581 - DNA, 76 bp, Homo sapiens
atttaacagcagagttgcaacttacacgtgaattctggtctatagtggtcatgtgagttaaattcgaatcctctac

SEQ ID NO: 82582 - DNA, 76 bp, Homo sapiens
agagttgcaacttacacgtgaattctggtctatagtggtcatgtgagttaaattcgaatcctctacttgtatgacc

SEQ ID NO: 82583 - DNA, 75 bp, Homo sapiens
cttacacgtgaattctggtctatagtggtcatgtgagttaaattcgaatcctctacttgtatgaccctaggaata

SEQ ID NO: 82584 - DNA, 75 bp, Homo sapiens
aattctggtctatagtggtcatgtgagttaaattcgaatcctctacttgtatgaccctaggaatagattggaata

SEQ ID NO: 82585 - DNA, 78 bp, Homo sapiens
tggtctatagtggtcatgtgagttaaattcgaatcctctacttgtatgaccctaggaatagattggaatactgcagag

SEQ ID NO: 82586 - DNA, 76 bp, Homo sapiens
atgtgagttaaattcgaatcctctacttgtatgaccctaggaatagattggaatactgcagaggaccaaagctgag

SEQ ID NO: 82587 - DNA, 78 bp, Homo sapiens
ttaaattcgaatcctctacttgtatgaccctaggaatagattggaatactgcagaggaccaaagctgaggcatgctaa

SEQ ID NO: 82588 - DNA, 80 bp, Homo sapiens
aatcctctacttgtatgaccctaggaatagattggaatactgcagaggaccaaagctgaggcatgctaaacagctgcttg

SEQ ID NO: 82589 - DNA, 82 bp, Homo sapiens
gaatagattggaatactgcagaggaccaaagctgaggcatgctaaacagctgcttggaggtggaagcaagttcagtcaccta

SEQ ID NO: 82590 - DNA, 81 bp, Homo sapiens
agaggaccaaagctgaggcatgctaaacagctgcttggaggtggaagcaagttcagtcacctactcagcttcctctctcca

SEQ ID NO: 82591 - DNA, 80 bp, Homo sapiens
aaagctgaggcatgctaaacagctgcttggaggtggaagcaagttcagtcacctactcagcttcctctctccaccaccca

SEQ ID NO: 82592 - DNA, 77 bp, Homo sapiens
atgctaaacagctgcttggaggtggaagcaagttcagtcacctactcagcttcctctctccaccacccagttcctcc

SEQ ID NO: 82593 - DNA, 75 bp, Homo sapiens
tggaagcaagttcagtcacctactcagcttcctctctccaccacccagttcctccctcagtatcacattattttt

SEQ ID NO: 82594 - DNA, 72 bp, Homo sapiens
aagttcagtcacctactcagcttcctctctccaccacccagttcctccctcagtatcacattatttttttct

SEQ ID NO: 82595 - DNA, 74 bp, Homo sapiens
tactcagcttcctctctccaccacccagttcctccctcagtatcacattatttttttcttctgcttttcattaa

SEQ ID NO: 82596 - DNA, 71 bp, Homo sapiens
ttcctctctccaccacccagttcctccctcagtatcacattatttttttcttctgcttttcattaacctaa

SEQ ID NO: 82597 - DNA, 74 bp, Homo sapiens
ccacccagttcctccctcagtatcacattatttttttcttctgcttttcattaacctaactcatctcatcagta

SEQ ID NO: 82598 - DNA, 74 bp, Homo sapiens
gttcctccctcagtatcacattatttttttcttctgcttttcattaacctaactcatctcatcagtacaaccat

SEQ ID NO: 82599 - DNA, 74 bp, Homo sapiens
ctcagtatcacattatttttttcttctgcttttcattaacctaactcatctcatcagtacaaccattttcttat

SEQ ID NO: 82600 - DNA, 72 bp, Homo sapiens
tctgcttttcattaacctaactcatctcatcagtacaaccattttcttattctctaactacccccaattcct

SEQ ID NO: 82601 - DNA, 71 bp, Homo sapiens
tttcattaacctaactcatctcatcagtacaaccattttcttattctctaactacccccaattcctttagc

SEQ ID NO: 82602 - DNA, 71 bp, Homo sapiens
ctaactcatctcatcagtacaaccattttcttattctctaactacccccaattcctttagcctctccccac

SEQ ID NO: 82603 - DNA, 68 bp, Homo sapiens
atcagtacaaccattttcttattctctaactacccccaattcctttagcctctccccacctgtccaaa

SEQ ID NO: 82604 - DNA, 71 bp, Homo sapiens
ttattctctaactacccccaattcctttagcctctccccacctgtccaaactcagctcagccgtgggccaa

SEQ ID NO: 82605 - DNA, 73 bp, Homo sapiens
ccccaattcctttagcctctccccacctgtccaaactcagctcagccgtgggccaatgcagcttacagacggt

SEQ ID NO: 82606 - DNA, 78 bp, Homo sapiens
attcctttagcctctccccacctgtccaaactcagctcagccgtgggccaatgcagcttacagacggttgcagagcta

SEQ ID NO: 82607 - DNA, 79 bp, Homo sapiens
tgtccaaactcagctcagccgtgggccaatgcagcttacagacggttgcagagctaggaagaaaacccagctctcccaa

SEQ ID NO: 82608 - DNA, 77 bp, Homo sapiens
ctcagccgtgggccaatgcagcttacagacggttgcagagctaggaagaaaacccagctctcccaaccctgatcgtg

SEQ ID NO: 82609 - DNA, 77 bp, Homo sapiens
ggccaatgcagcttacagacggttgcagagctaggaagaaaacccagctctcccaaccctgatcgtggaggtctctg

SEQ ID NO: 82610 - DNA, 76 bp, Homo sapiens
atgcagcttacagacggttgcagagctaggaagaaaacccagctctcccaaccctgatcgtggaggtctctggccc

SEQ ID NO: 82611 - DNA, 72 bp, Homo sapiens
agacggttgcagagctaggaagaaaacccagctctcccaaccctgatcgtggaggtctctggccccccaaca

SEQ ID NO: 82612 - DNA, 72 bp, Homo sapiens
agagctaggaagaaaacccagctctcccaaccctgatcgtggaggtctctggccccccaacactgccttctg

SEQ ID NO: 82613 - DNA, 71 bp, Homo sapiens
aacccagctctcccaaccctgatcgtggaggtctctggccccccaacactgccttctgggggctgcatttt

SEQ ID NO: 82614 - DNA, 70 bp, Homo sapiens
agctctcccaaccctgatcgtggaggtctctggccccccaacactgccttctgggggctgcatttttttt

SEQ ID NO: 82615 - DNA, 76 bp, Homo sapiens
tttttttttgagaagaggtcttttgggatgcatggtgctccacatacagcttcacaaaatatttcattataagaga

SEQ ID NO: 82616 - DNA, 76 bp, Homo sapiens
ttttttttgagaagaggtcttttgggatgcatggtgctccacatacagcttcacaaaatatttcattataagagaa

SEQ ID NO: 82617 - DNA, 76 bp, Homo sapiens
gaagaggtcttttgggatgcatggtgctccacatacagcttcacaaaatatttcattataagagaaaccccttgat

SEQ ID NO: 82618 - DNA, 75 bp, Homo sapiens
tcttttgggatgcatggtgctccacatacagcttcacaaaatatttcattataagagaaaccccttgatttttat

SEQ ID NO: 82619 - DNA, 74 bp, Homo sapiens
gatgcatggtgctccacatacagcttcacaaaatatttcattataagagaaaccccttgatttttatttctttt

SEQ ID NO: 82620 - DNA, 72 bp, Homo sapiens
tttttcttttgttttctggattacctgccttcagtaagcagatgcagacccacttgtaaggagtctggttag

SEQ ID NO: 82621 - DNA, 76 bp, Homo sapiens
tttgttttctggattacctgccttcagtaagcagatgcagacccacttgtaaggagtctggttagtgatgagaaaa

SEQ ID NO: 82622 - DNA, 79 bp, Homo sapiens
ttacctgccttcagtaagcagatgcagacccacttgtaaggagtctggttagtgatgagaaaaggatgaaatctagata

SEQ ID NO: 82623 - DNA, 79 bp, Homo sapiens
ttcagtaagcagatgcagacccacttgtaaggagtctggttagtgatgagaaaaggatgaaatctagatacaaaagtca

SEQ ID NO: 82624 - DNA, 76 bp, Homo sapiens
agatgcagacccacttgtaaggagtctggttagtgatgagaaaaggatgaaatctagatacaaaagtcaccttgaa

SEQ ID NO: 82625 - DNA, 73 bp, Homo sapiens
acccacttgtaaggagtctggttagtgatgagaaaaggatgaaatctagatacaaaagtcaccttgaaggtga

SEQ ID NO: 82626 - DNA, 77 bp, Homo sapiens
taaggagtctggttagtgatgagaaaaggatgaaatctagatacaaaagtcaccttgaaggtgatgatggatcttta

SEQ ID NO: 82627 - DNA, 78 bp, Homo sapiens
tagtgatgagaaaaggatgaaatctagatacaaaagtcaccttgaaggtgatgatggatctttaatccacttgactaa

SEQ ID NO: 82628 - DNA, 75 bp, Homo sapiens
aaaaggatgaaatctagatacaaaagtcaccttgaaggtgatgatggatctttaatccacttgactaagtgtctg

SEQ ID NO: 82629 - DNA, 78 bp, Homo sapiens
atgaaatctagatacaaaagtcaccttgaaggtgatgatggatctttaatccacttgactaagtgtctggaagagcta

SEQ ID NO: 82630 - DNA, 77 bp, Homo sapiens
atacaaaagtcaccttgaaggtgatgatggatctttaatccacttgactaagtgtctggaagagctacttgctcttc

SEQ ID NO: 82631 - DNA, 79 bp, Homo sapiens
ttgaaggtgatgatggatctttaatccacttgactaagtgtctggaagagctacttgctcttccacccctcatctcaaa

SEQ ID NO: 82632 - DNA, 76 bp, Homo sapiens
acttgactaagtgtctggaagagctacttgctcttccacccctcatctcaaatgagaggagcagaagtttaacttc

SEQ ID NO: 82633 - DNA, 77 bp, Homo sapiens
aagagctacttgctcttccacccctcatctcaaatgagaggagcagaagtttaacttcctcaaatagcccagctctg

SEQ ID NO: 82634 - DNA, 74 bp, Homo sapiens
ttccacccctcatctcaaatgagaggagcagaagtttaacttcctcaaatagcccagctctggctaaaacccaa

SEQ ID NO: 82635 - DNA, 71 bp, Homo sapiens
aaatgagaggagcagaagtttaacttcctcaaatagcccagctctggctaaaacccaaagaagaaaggtca

SEQ ID NO: 82636 - DNA, 66 bp, Homo sapiens
agaagtttaacttcctcaaatagcccagctctggctaaaacccaaagaagaaaggtcaaaggaagg

SEQ ID NO: 82637 - DNA, 69 bp, Homo sapiens
atagcccagctctggctaaaacccaaagaagaaaggtcaaaggaagggaaagcatgtcaggggctggtt

SEQ ID NO: 82638 - DNA, 69 bp, Homo sapiens
agctctggctaaaacccaaagaagaaaggtcaaaggaagggaaagcatgtcaggggctggtttgtgact

SEQ ID NO: 82639 - DNA, 73 bp, Homo sapiens
aagaaaggtcaaaggaagggaaagcatgtcaggggctggtttgtgacttggcaggaccaggaaacagcagcca

SEQ ID NO: 82640 - DNA, 76 bp, Homo sapiens
aaaggaagggaaagcatgtcaggggctggtttgtgacttggcaggaccaggaaacagcagccactgacagcccaga

SEQ ID NO: 82641 - DNA, 78 bp, Homo sapiens
aaagcatgtcaggggctggtttgtgacttggcaggaccaggaaacagcagccactgacagcccagagaaggtgactaa

SEQ ID NO: 82642 - DNA, 79 bp, Homo sapiens
gctggtttgtgacttggcaggaccaggaaacagcagccactgacagcccagagaaggtgactaagggctggcagaagat

SEQ ID NO: 82643 - DNA, 80 bp, Homo sapiens
tgacttggcaggaccaggaaacagcagccactgacagcccagagaaggtgactaagggctggcagaagattagaatgtta

SEQ ID NO: 82644 - DNA, 76 bp, Homo sapiens
aggaccaggaaacagcagccactgacagcccagagaaggtgactaagggctggcagaagattagaatgttaatttg

SEQ ID NO: 82645 - DNA, 78 bp, Homo sapiens
aaacagcagccactgacagcccagagaaggtgactaagggctggcagaagattagaatgttaatttggctgctgtccg

SEQ ID NO: 82646 - DNA, 76 bp, Homo sapiens
actgacagcccagagaaggtgactaagggctggcagaagattagaatgttaatttggctgctgtccggactaggag

SEQ ID NO: 82647 - DNA, 81 bp, Homo sapiens
attagaatgttaatttggctgctgtccggactaggaggccatgttcaatggcagtcagaatttgtgttctgcgcattgctg

SEQ ID NO: 82648 - DNA, 84 bp, Homo sapiens
taggaggccatgttcaatggcagtcagaatttgtgttctgcgcattgctgggtctataaatatgataagcaagtggtgacagaa

SEQ ID NO: 82649 - DNA, 82 bp, Homo sapiens
gtcagaatttgtgttctgcgcattgctgggtctataaatatgataagcaagtggtgacagaattatagtataaggtgatgta

SEQ ID NO: 82650 - DNA, 83 bp, Homo sapiens
cgcattgctgggtctataaatatgataagcaagtggtgacagaattatagtataaggtgatgtactacatgcagatcataaag

SEQ ID NO: 82651 - DNA, 80 bp, Homo sapiens
gtctataaatatgataagcaagtggtgacagaattatagtataaggtgatgtactacatgcagatcataaaggctttggt

SEQ ID NO: 82652 - DNA, 79 bp, Homo sapiens
atatgataagcaagtggtgacagaattatagtataaggtgatgtactacatgcagatcataaaggctttggttttaaga

SEQ ID NO: 82653 - DNA, 76 bp, Homo sapiens
agcaagtggtgacagaattatagtataaggtgatgtactacatgcagatcataaaggctttggttttaagacttaa

SEQ ID NO: 82654 - DNA, 73 bp, Homo sapiens
gaattatagtataaggtgatgtactacatgcagatcataaaggctttggttttaagacttaagtagaaaatcc

SEQ ID NO: 82655 - DNA, 74 bp, Homo sapiens
tgatgtactacatgcagatcataaaggctttggttttaagacttaagtagaaaatccctctcctagcttattac

SEQ ID NO: 82656 - DNA, 70 bp, Homo sapiens
gcagatcataaaggctttggttttaagacttaagtagaaaatccctctcctagcttattacccaacaata

SEQ ID NO: 82657 - DNA, 70 bp, Homo sapiens
ggctttggttttaagacttaagtagaaaatccctctcctagcttattacccaacaatattcagataatga

SEQ ID NO: 82658 - DNA, 72 bp, Homo sapiens
tttaagacttaagtagaaaatccctctcctagcttattacccaacaatattcagataatgagcttttggaga

SEQ ID NO: 82659 - DNA, 72 bp, Homo sapiens
cttaagtagaaaatccctctcctagcttattacccaacaatattcagataatgagcttttggagaatatctt

SEQ ID NO: 82660 - DNA, 75 bp, Homo sapiens
tccctctcctagcttattacccaacaatattcagataatgagcttttggagaatatctttttcctatcactagaa

SEQ ID NO: 82661 - DNA, 72 bp, Homo sapiens
cccaacaatattcagataatgagcttttggagaatatctttttcctatcactagaaagatttacctgggaac

SEQ ID NO: 82662 - DNA, 74 bp, Homo sapiens
tgagcttttggagaatatctttttcctatcactagaaagatttacctgggaactgtctaaagtctacacacata

SEQ ID NO: 82663 - DNA, 72 bp, Homo sapiens
gaatatctttttcctatcactagaaagatttacctgggaactgtctaaagtctacacacatatttccaaagc

SEQ ID NO: 82664 - DNA, 69 bp, Homo sapiens
ctttttcctatcactagaaagatttacctgggaactgtctaaagtctacacacatatttccaaagcctt

SEQ ID NO: 82665 - DNA, 76 bp, Homo sapiens
aactgtctaaagtctacacacatatttccaaagcctttaaataccaactgcagcatggagagagaggggtggcaga

SEQ ID NO: 82666 - DNA, 76 bp, Homo sapiens
aaagtctacacacatatttccaaagcctttaaataccaactgcagcatggagagagaggggtggcagaagctgaaa

SEQ ID NO: 82667 - DNA, 77 bp, Homo sapiens
tatttccaaagcctttaaataccaactgcagcatggagagagaggggtggcagaagctgaaatgcctcaaaagccat

SEQ ID NO: 82668 - DNA, 76 bp, Homo sapiens
cctttaaataccaactgcagcatggagagagaggggtggcagaagctgaaatgcctcaaaagccatttaagtgtta

SEQ ID NO: 82669 - DNA, 78 bp, Homo sapiens
aaataccaactgcagcatggagagagaggggtggcagaagctgaaatgcctcaaaagccatttaagtgttacgttgca

SEQ ID NO: 82670 - DNA, 76 bp, Homo sapiens
catggagagagaggggtggcagaagctgaaatgcctcaaaagccatttaagtgttacgttgcaggattttcagtcc

SEQ ID NO: 82671 - DNA, 74 bp, Homo sapiens
agagagaggggtggcagaagctgaaatgcctcaaaagccatttaagtgttacgttgcaggattttcagtccttc

SEQ ID NO: 82672 - DNA, 72 bp, Homo sapiens
agaagctgaaatgcctcaaaagccatttaagtgttacgttgcaggattttcagtccttctcgttatgtaaaa

SEQ ID NO: 82673 - DNA, 74 bp, Homo sapiens
tcagtccttctcgttatgtaaaagtagataaatatagacgttattctcaacactaccctatagtatcacagtgg

SEQ ID NO: 82674 - DNA, 75 bp, Homo sapiens
tctcgttatgtaaaagtagataaatatagacgttattctcaacactaccctatagtatcacagtggtccaaatgc

SEQ ID NO: 82675 - DNA, 77 bp, Homo sapiens
aagtagataaatatagacgttattctcaacactaccctatagtatcacagtggtccaaatgccagagcttacagata

SEQ ID NO: 82676 - DNA, 80 bp, Homo sapiens
ataaatatagacgttattctcaacactaccctatagtatcacagtggtccaaatgccagagcttacagataatgtcatca

SEQ ID NO: 82677 - DNA, 81 bp, Homo sapiens
ttattctcaacactaccctatagtatcacagtggtccaaatgccagagcttacagataatgtcatcacagtgcctagaaac

SEQ ID NO: 82678 - DNA, 80 bp, Homo sapiens
actaccctatagtatcacagtggtccaaatgccagagcttacagataatgtcatcacagtgcctagaaactcgaactgta

SEQ ID NO: 82679 - DNA, 83 bp, Homo sapiens
tatagtatcacagtggtccaaatgccagagcttacagataatgtcatcacagtgcctagaaactcgaactgtaatatatcgta

SEQ ID NO: 82680 - DNA, 81 bp, Homo sapiens
tggtccaaatgccagagcttacagataatgtcatcacagtgcctagaaactcgaactgtaatatatcgtagcattttcttg

SEQ ID NO: 82681 - DNA, 76 bp, Homo sapiens
cttacagataatgtcatcacagtgcctagaaactcgaactgtaatatatcgtagcattttcttggtgtttcttaaa

SEQ ID NO: 82682 - DNA, 73 bp, Homo sapiens
aatgtcatcacagtgcctagaaactcgaactgtaatatatcgtagcattttcttggtgtttcttaaagtttct

SEQ ID NO: 82683 - DNA, 71 bp, Homo sapiens
cagtgcctagaaactcgaactgtaatatatcgtagcattttcttggtgtttcttaaagtttctttccacaa

SEQ ID NO: 82684 - DNA, 70 bp, Homo sapiens
ctcgaactgtaatatatcgtagcattttcttggtgtttcttaaagtttctttccacaatacaaggtcctc

SEQ ID NO: 82685 - DNA, 72 bp, Homo sapiens
tgtaatatatcgtagcattttcttggtgtttcttaaagtttctttccacaatacaaggtcctctctgcctct

SEQ ID NO: 82686 - DNA, 70 bp, Homo sapiens
tcgtagcattttcttggtgtttcttaaagtttctttccacaatacaaggtcctctctgcctcttgtttct

SEQ ID NO: 82687 - DNA, 71 bp, Homo sapiens
ttcttggtgtttcttaaagtttctttccacaatacaaggtcctctctgcctcttgtttcttggagagttca

SEQ ID NO: 82688 - DNA, 73 bp, Homo sapiens
ttcttaaagtttctttccacaatacaaggtcctctctgcctcttgtttcttggagagttcaccccactgatga

SEQ ID NO: 82689 - DNA, 74 bp, Homo sapiens
ttctttccacaatacaaggtcctctctgcctcttgtttcttggagagttcaccccactgatgagtcttccttcc

SEQ ID NO: 82690 - DNA, 75 bp, Homo sapiens
ctctctgcctcttgtttcttggagagttcaccccactgatgagtcttccttccctgttggactcagtcatttggg

SEQ ID NO: 82691 - DNA, 74 bp, Homo sapiens
tttcttggagagttcaccccactgatgagtcttccttccctgttggactcagtcatttggggaacagtcttaga

SEQ ID NO: 82692 - DNA, 76 bp, Homo sapiens
agttcaccccactgatgagtcttccttccctgttggactcagtcatttggggaacagtcttagaagcacatatcaa

SEQ ID NO: 82693 - DNA, 76 bp, Homo sapiens
actgatgagtcttccttccctgttggactcagtcatttggggaacagtcttagaagcacatatcaaccaaggaaga

SEQ ID NO: 82694 - DNA, 75 bp, Homo sapiens
agtcatttggggaacagtcttagaagcacatatcaaccaaggaagaaacttcctggatatctattgcccacttgc

SEQ ID NO: 82695 - DNA, 75 bp, Homo sapiens
ggaacagtcttagaagcacatatcaaccaaggaagaaacttcctggatatctattgcccacttgcccaggtctaa

SEQ ID NO: 82696 - DNA, 75 bp, Homo sapiens
ttagaagcacatatcaaccaaggaagaaacttcctggatatctattgcccacttgcccaggtctaataaacacta

SEQ ID NO: 82697 - DNA, 71 bp, Homo sapiens
acatatcaaccaaggaagaaacttcctggatatctattgcccacttgcccaggtctaataaacactaaagg

SEQ ID NO: 82698 - DNA, 67 bp, Homo sapiens
aggaagaaacttcctggatatctattgcccacttgcccaggtctaataaacactaaaggggggaaat

SEQ ID NO: 82699 - DNA, 67 bp, Homo sapiens
aaacttcctggatatctattgcccacttgcccaggtctaataaacactaaaggggggaaattgaaag

SEQ ID NO: 82700 - DNA, 70 bp, Homo sapiens
atatctattgcccacttgcccaggtctaataaacactaaaggggggaaattgaaaggagctgccaactgg

SEQ ID NO: 82701 - DNA, 68 bp, Homo sapiens
acttgcccaggtctaataaacactaaaggggggaaattgaaaggagctgccaactggtcaacgtggaa

SEQ ID NO: 82702 - DNA, 68 bp, Homo sapiens
tctaataaacactaaaggggggaaattgaaaggagctgccaactggtcaacgtggaagggcggttcca

SEQ ID NO: 82703 - DNA, 66 bp, Homo sapiens
aacactaaaggggggaaattgaaaggagctgccaactggtcaacgtggaagggcggttccacccta

SEQ ID NO: 82704 - DNA, 69 bp, Homo sapiens
ggaaattgaaaggagctgccaactggtcaacgtggaagggcggttccaccctagattggtgtctttctt

SEQ ID NO: 82705 - DNA, 69 bp, Homo sapiens
ttgaaaggagctgccaactggtcaacgtggaagggcggttccaccctagattggtgtctttctttttct

SEQ ID NO: 82706 - DNA, 66 bp, Homo sapiens
ctgccaactggtcaacgtggaagggcggttccaccctagattggtgtctttctttttcttcctttt

SEQ ID NO: 82707 - DNA, 71 bp, Homo sapiens
catatatatttcaaaagaaaaaatggggcacaagattgtcttacaagtcgtgctggctaatttttagtttg

SEQ ID NO: 82708 - DNA, 70 bp, Homo sapiens
caaaagaaaaaatggggcacaagattgtcttacaagtcgtgctggctaatttttagtttgtattcataag

SEQ ID NO: 82709 - DNA, 69 bp, Homo sapiens
aaaaatggggcacaagattgtcttacaagtcgtgctggctaatttttagtttgtattcataagtggttt

SEQ ID NO: 82710 - DNA, 70 bp, Homo sapiens
ggcacaagattgtcttacaagtcgtgctggctaatttttagtttgtattcataagtggtttttaaaagcc

SEQ ID NO: 82711 - DNA, 67 bp, Homo sapiens
tgtcttacaagtcgtgctggctaatttttagtttgtattcataagtggtttttaaaagcctttttta

SEQ ID NO: 82712 - DNA, 65 bp, Homo sapiens
gtcgtgctggctaatttttagtttgtattcataagtggtttttaaaagccttttttaaagtgtaa

SEQ ID NO: 82713 - DNA, 65 bp, Homo sapiens
ttttagtttgtattcataagtggtttttaaaagccttttttaaagtgtaatttgcatgttctact

SEQ ID NO: 82714 - DNA, 70 bp, Homo sapiens
tgtattcataagtggtttttaaaagccttttttaaagtgtaatttgcatgttctactttgattgtatgta

SEQ ID NO: 82715 - DNA, 73 bp, Homo sapiens
tgtaatttgcatgttctactttgattgtatgtaaacatattttagaacaaaaaatgtatttgtattttattga

SEQ ID NO: 82716 - DNA, 73 bp, Homo sapiens
tctactttgattgtatgtaaacatattttagaacaaaaaatgtatttgtattttattgaatatagaggcaaga

SEQ ID NO: 82717 - DNA, 71 bp, Homo sapiens
catattttagaacaaaaaatgtatttgtattttattgaatatagaggcaagaaaattgtacattgtttgaa

SEQ ID NO: 82718 - DNA, 71 bp, Homo sapiens
ttagaacaaaaaatgtatttgtattttattgaatatagaggcaagaaaattgtacattgtttgaaatgttc

SEQ ID NO: 82719 - DNA, 70 bp, Homo sapiens
gtatttgtattttattgaatatagaggcaagaaaattgtacattgtttgaaatgttctttttgtaacagt

SEQ ID NO: 82720 - DNA, 70 bp, Homo sapiens
ttttattgaatatagaggcaagaaaattgtacattgtttgaaatgttctttttgtaacagtttttattca

SEQ ID NO: 82721 - DNA, 71 bp, Homo sapiens
gaatatagaggcaagaaaattgtacattgtttgaaatgttctttttgtaacagtttttattcataaagcat

SEQ ID NO: 82722 - DNA, 69 bp, Homo sapiens
ggcaagaaaattgtacattgtttgaaatgttctttttgtaacagtttttattcataaagcatttttgta

SEQ ID NO: 82723 - DNA, 70 bp, Homo sapiens
tgtacattgtttgaaatgttctttttgtaacagtttttattcataaagcatttttgtacatttaaaatga

SEQ ID NO: 82724 - DNA, 70 bp, Homo sapiens
aatgttctttttgtaacagtttttattcataaagcatttttgtacatttaaaatgaacatggacttgctg

SEQ ID NO: 82725 - DNA, 72 bp, Homo sapiens
ttgtaacagtttttattcataaagcatttttgtacatttaaaatgaacatggacttgctgttatttgaggcg

SEQ ID NO: 82726 - DNA, 77 bp, Homo sapiens
ttttattcataaagcatttttgtacatttaaaatgaacatggacttgctgttatttgaggcgtagatacatctagca

SEQ ID NO: 82727 - DNA, 80 bp, Homo sapiens
taaagcatttttgtacatttaaaatgaacatggacttgctgttatttgaggcgtagatacatctagcatgcttactgtca

SEQ ID NO: 82728 - DNA, 81 bp, Homo sapiens
tttttgtacatttaaaatgaacatggacttgctgttatttgaggcgtagatacatctagcatgcttactgtcatgctcctc

SEQ ID NO: 82729 - DNA, 83 bp, Homo sapiens
aaaatgaacatggacttgctgttatttgaggcgtagatacatctagcatgcttactgtcatgctcctccatggtcttagatgt

SEQ ID NO: 82730 - DNA, 81 bp, Homo sapiens
atggacttgctgttatttgaggcgtagatacatctagcatgcttactgtcatgctcctccatggtcttagatgttgggttt

SEQ ID NO: 82731 - DNA, 78 bp, Homo sapiens
ttatttgaggcgtagatacatctagcatgcttactgtcatgctcctccatggtcttagatgttgggttttaaacattt

SEQ ID NO: 82732 - DNA, 76 bp, Homo sapiens
cgtagatacatctagcatgcttactgtcatgctcctccatggtcttagatgttgggttttaaacatttttttctaa

SEQ ID NO: 82733 - DNA, 75 bp, Homo sapiens
atacatctagcatgcttactgtcatgctcctccatggtcttagatgttgggttttaaacatttttttctaaaaga

SEQ ID NO: 82734 - DNA, 71 bp, Homo sapiens
ttactgtcatgctcctccatggtcttagatgttgggttttaaacatttttttctaaaagaaagctcagtct

SEQ ID NO: 82735 - DNA, 70 bp, Homo sapiens
gtcatgctcctccatggtcttagatgttgggttttaaacatttttttctaaaagaaagctcagtcttttc

SEQ ID NO: 82736 - DNA, 69 bp, Homo sapiens
tggtcttagatgttgggttttaaacatttttttctaaaagaaagctcagtcttttccgctaccagatca

SEQ ID NO: 82737 - DNA, 69 bp, Homo sapiens
tgttgggttttaaacatttttttctaaaagaaagctcagtcttttccgctaccagatcaggttagcaca

SEQ ID NO: 82738 - DNA, 72 bp, Homo sapiens
aaacatttttttctaaaagaaagctcagtcttttccgctaccagatcaggttagcacagtatagagcactta

SEQ ID NO: 82739 - DNA, 73 bp, Homo sapiens
ttctaaaagaaagctcagtcttttccgctaccagatcaggttagcacagtatagagcacttaactattaaaaa

SEQ ID NO: 82740 - DNA, 71 bp, Homo sapiens
aaagaaagctcagtcttttccgctaccagatcaggttagcacagtatagagcacttaactattaaaaaaaa

SEQ ID NO: 82741 - DNA, 73 bp, Homo sapiens
aaaaaaaaagttaatcctattcatatgttattcattgtgtgaaattaaagacattcaattcagtctaacatga

SEQ ID NO: 82742 - DNA, 77 bp, Homo sapiens
aagttaatcctattcatatgttattcattgtgtgaaattaaagacattcaattcagtctaacatgagttgtgaattc

SEQ ID NO: 82743 - DNA, 75 bp, Homo sapiens
ttcattgtgtgaaattaaagacattcaattcagtctaacatgagttgtgaattcttttgttttattttccatctg

SEQ ID NO: 82744 - DNA, 73 bp, Homo sapiens
cccttttcagtagtagttatatgatcaaatataatactaaaagactaaatgcttgtggctcttttatatatat

SEQ ID NO: 82745 - DNA, 75 bp, Homo sapiens
tcagtagtagttatatgatcaaatataatactaaaagactaaatgcttgtggctcttttatatatatttaaaaca

SEQ ID NO: 82746 - DNA, 74 bp, Homo sapiens
atgatcaaatataatactaaaagactaaatgcttgtggctcttttatatatatttaaaacacacagtaagaaca

SEQ ID NO: 82747 - DNA, 73 bp, Homo sapiens
tataatactaaaagactaaatgcttgtggctcttttatatatatttaaaacacacagtaagaacataagaaca

SEQ ID NO: 82748 - DNA, 74 bp, Homo sapiens
aagactaaatgcttgtggctcttttatatatatttaaaacacacagtaagaacataagaacatctcaaatcatt

SEQ ID NO: 82749 - DNA, 75 bp, Homo sapiens
atgcttgtggctcttttatatatatttaaaacacacagtaagaacataagaacatctcaaatcatttagaaggta

SEQ ID NO: 82750 - DNA, 72 bp, Homo sapiens
tggctcttttatatatatttaaaacacacagtaagaacataagaacatctcaaatcatttagaaggtaaaag

SEQ ID NO: 82751 - DNA, 69 bp, Homo sapiens
tatttaaaacacacagtaagaacataagaacatctcaaatcatttagaaggtaaaagggggttatcaac

SEQ ID NO: 82752 - DNA, 69 bp, Homo sapiens
cacacagtaagaacataagaacatctcaaatcatttagaaggtaaaagggggttatcaaccaaaatctt

SEQ ID NO: 82753 - DNA, 68 bp, Homo sapiens
gtaagaacataagaacatctcaaatcatttagaaggtaaaagggggttatcaaccaaaatctttggaa

SEQ ID NO: 82754 - DNA, 67 bp, Homo sapiens
aagaacatctcaaatcatttagaaggtaaaagggggttatcaaccaaaatctttggaaatttcataa

SEQ ID NO: 82755 - DNA, 64 bp, Homo sapiens
caaatcatttagaaggtaaaagggggttatcaaccaaaatctttggaaatttcataaaatttaa

SEQ ID NO: 82756 - DNA, 67 bp, Homo sapiens
gtaaaagggggttatcaaccaaaatctttggaaatttcataaaatttaaatatctgcaaacagtcca

SEQ ID NO: 82757 - DNA, 67 bp, Homo sapiens
ggttatcaaccaaaatctttggaaatttcataaaatttaaatatctgcaaacagtccaaccaaaaac

SEQ ID NO: 82758 - DNA, 66 bp, Homo sapiens
caaccaaaatctttggaaatttcataaaatttaaatatctgcaaacagtccaaccaaaaacgaaaa

SEQ ID NO: 82759 - DNA, 63 bp, Homo sapiens
ctttggaaatttcataaaatttaaatatctgcaaacagtccaaccaaaaacgaaaaaaaaaaa

SEQ ID NO: 82760 - DNA, 69 bp, Homo sapiens
aaaaaaaaaatcccaacatttggctatggagggcacttcacatgtgaaccaaatggcgttataacattt

SEQ ID NO: 82761 - DNA, 72 bp, Homo sapiens
aaaaatcccaacatttggctatggagggcacttcacatgtgaaccaaatggcgttataacattttccttcaa

SEQ ID NO: 82762 - DNA, 74 bp, Homo sapiens
acatttggctatggagggcacttcacatgtgaaccaaatggcgttataacattttccttcaactagtcactaaa

SEQ ID NO: 82763 - DNA, 71 bp, Homo sapiens
agggcacttcacatgtgaaccaaatggcgttataacattttccttcaactagtcactaaacccaattagaa

SEQ ID NO: 82764 - DNA, 71 bp, Homo sapiens
cttcacatgtgaaccaaatggcgttataacattttccttcaactagtcactaaacccaattagaaagaata

SEQ ID NO: 82765 - DNA, 73 bp, Homo sapiens
gcgttataacattttccttcaactagtcactaaacccaattagaaagaatacaagagcaatattggagacatc

SEQ ID NO: 82766 - DNA, 71 bp, Homo sapiens
ttttccttcaactagtcactaaacccaattagaaagaatacaagagcaatattggagacatccccaaatac

SEQ ID NO: 82767 - DNA, 74 bp, Homo sapiens
ccaattagaaagaatacaagagcaatattggagacatccccaaataccacgtacttgattagaacattctgtta

SEQ ID NO: 82768 - DNA, 77 bp, Homo sapiens
aaagaatacaagagcaatattggagacatccccaaataccacgtacttgattagaacattctgttatgaagcgctca

SEQ ID NO: 82769 - DNA, 78 bp, Homo sapiens
acaagagcaatattggagacatccccaaataccacgtacttgattagaacattctgttatgaagcgctcagctaccgc

SEQ ID NO: 82770 - DNA, 76 bp, Homo sapiens
tattggagacatccccaaataccacgtacttgattagaacattctgttatgaagcgctcagctaccgcgggctttc

SEQ ID NO: 82771 - DNA, 77 bp, Homo sapiens
gtacttgattagaacattctgttatgaagcgctcagctaccgcgggctttcctttacattgcatacattactttaca

SEQ ID NO: 82772 - DNA, 76 bp, Homo sapiens
attagaacattctgttatgaagcgctcagctaccgcgggctttcctttacattgcatacattactttacatttcta

SEQ ID NO: 82773 - DNA, 78 bp, Homo sapiens
ttctgttatgaagcgctcagctaccgcgggctttcctttacattgcatacattactttacatttctacagtgcaatgt

SEQ ID NO: 82774 - DNA, 77 bp, Homo sapiens
aagcgctcagctaccgcgggctttcctttacattgcatacattactttacatttctacagtgcaatgttgaaatagc

SEQ ID NO: 82775 - DNA, 73 bp, Homo sapiens
cgcgggctttcctttacattgcatacattactttacatttctacagtgcaatgttgaaatagcctccaaattt

SEQ ID NO: 82776 - DNA, 75 bp, Homo sapiens
gctttcctttacattgcatacattactttacatttctacagtgcaatgttgaaatagcctccaaattttgcaaag

SEQ ID NO: 82777 - DNA, 79 bp, Homo sapiens
gcatacattactttacatttctacagtgcaatgttgaaatagcctccaaattttgcaaagtagattgatgtccattcta

SEQ ID NO: 82778 - DNA, 77 bp, Homo sapiens
cattactttacatttctacagtgcaatgttgaaatagcctccaaattttgcaaagtagattgatgtccattctacaa

SEQ ID NO: 82779 - DNA, 75 bp, Homo sapiens
gcaatgttgaaatagcctccaaattttgcaaagtagattgatgtccattctacaaaaatattaacttacagtaca

SEQ ID NO: 82780 - DNA, 74 bp, Homo sapiens
agcctccaaattttgcaaagtagattgatgtccattctacaaaaatattaacttacagtacataacactgaata

SEQ ID NO: 82781 - DNA, 72 bp, Homo sapiens
ccaaattttgcaaagtagattgatgtccattctacaaaaatattaacttacagtacataacactgaataatt

SEQ ID NO: 82782 - DNA, 74 bp, Homo sapiens
caaagtagattgatgtccattctacaaaaatattaacttacagtacataacactgaataattttaatctgtaca

SEQ ID NO: 82783 - DNA, 71 bp, Homo sapiens
gatgtccattctacaaaaatattaacttacagtacataacactgaataattttaatctgtacatttttttc

SEQ ID NO: 82784 - DNA, 70 bp, Homo sapiens
caaaaatattaacttacagtacataacactgaataattttaatctgtacatttttttccttccatgatag

SEQ ID NO: 82785 - DNA, 73 bp, Homo sapiens
acttacagtacataacactgaataattttaatctgtacatttttttccttccatgatagttgacacacgtcag

SEQ ID NO: 82786 - DNA, 73 bp, Homo sapiens
cataacactgaataattttaatctgtacatttttttccttccatgatagttgacacacgtcagtttgtacaag

SEQ ID NO: 82787 - DNA, 71 bp, Homo sapiens
atctgtacatttttttccttccatgatagttgacacacgtcagtttgtacaagttagaaaaaaacatctgg

SEQ ID NO: 82788 - DNA, 70 bp, Homo sapiens
ttttttccttccatgatagttgacacacgtcagtttgtacaagttagaaaaaaacatctggttgtttaca

SEQ ID NO: 82789 - DNA, 74 bp, Homo sapiens
tccttccatgatagttgacacacgtcagtttgtacaagttagaaaaaaacatctggttgtttacatctggatta

SEQ ID NO: 82790 - DNA, 73 bp, Homo sapiens
gttgacacacgtcagtttgtacaagttagaaaaaaacatctggttgtttacatctggattaatagtcaacaga

SEQ ID NO: 82791 - DNA, 70 bp, Homo sapiens
aagttagaaaaaaacatctggttgtttacatctggattaatagtcaacagaggcaaccagaagtggtggg

SEQ ID NO: 82792 - DNA, 72 bp, Homo sapiens
aaaacatctggttgtttacatctggattaatagtcaacagaggcaaccagaagtggtggggcggatgtagtt

SEQ ID NO: 82793 - DNA, 74 bp, Homo sapiens
gttgtttacatctggattaatagtcaacagaggcaaccagaagtggtggggcggatgtagtttgagaaagtata

SEQ ID NO: 82794 - DNA, 75 bp, Homo sapiens
ttacatctggattaatagtcaacagaggcaaccagaagtggtggggcggatgtagtttgagaaagtataaataca

SEQ ID NO: 82795 - DNA, 72 bp, Homo sapiens
attaatagtcaacagaggcaaccagaagtggtggggcggatgtagtttgagaaagtataaatacagtgttaa

SEQ ID NO: 82796 - DNA, 70 bp, Homo sapiens
aggcaaccagaagtggtggggcggatgtagtttgagaaagtataaatacagtgttaatattaactgtagt

SEQ ID NO: 82797 - DNA, 70 bp, Homo sapiens
accagaagtggtggggcggatgtagtttgagaaagtataaatacagtgttaatattaactgtagttaaca

SEQ ID NO: 82798 - DNA, 71 bp, Homo sapiens
gggcggatgtagtttgagaaagtataaatacagtgttaatattaactgtagttaacaatattcagctttta

SEQ ID NO: 82799 - DNA, 71 bp, Homo sapiens
tagtttgagaaagtataaatacagtgttaatattaactgtagttaacaatattcagcttttaacaaagtga

SEQ ID NO: 82800 - DNA, 70 bp, Homo sapiens
gaaagtataaatacagtgttaatattaactgtagttaacaatattcagcttttaacaaagtgatacaaaa

SEQ ID NO: 82801 - DNA, 72 bp, Homo sapiens
acagtgttaatattaactgtagttaacaatattcagcttttaacaaagtgatacaaaataaatcatcttaga

SEQ ID NO: 82802 - DNA, 74 bp, Homo sapiens
gttaacaatattcagcttttaacaaagtgatacaaaataaatcatcttagatttttgactgaaaagatctgaga

SEQ ID NO: 82803 - DNA, 76 bp, Homo sapiens
tcagcttttaacaaagtgatacaaaataaatcatcttagatttttgactgaaaagatctgagaatgttctgccaaa

SEQ ID NO: 82804 - DNA, 76 bp, Homo sapiens
caaagtgatacaaaataaatcatcttagatttttgactgaaaagatctgagaatgttctgccaaacagccgaccaa

SEQ ID NO: 82805 - DNA, 76 bp, Homo sapiens
caaaataaatcatcttagatttttgactgaaaagatctgagaatgttctgccaaacagccgaccaactggtgcaaa

SEQ ID NO: 82806 - DNA, 75 bp, Homo sapiens
atcatcttagatttttgactgaaaagatctgagaatgttctgccaaacagccgaccaactggtgcaaaaggttaa

SEQ ID NO: 82807 - DNA, 73 bp, Homo sapiens
atttttgactgaaaagatctgagaatgttctgccaaacagccgaccaactggtgcaaaaggttaaggctgact

SEQ ID NO: 82808 - DNA, 73 bp, Homo sapiens
ccaaacagccgaccaactggtgcaaaaggttaaggctgacttgacttagcaacctgcagcacaaccgaaaaca

SEQ ID NO: 82809 - DNA, 76 bp, Homo sapiens
gaccaactggtgcaaaaggttaaggctgacttgacttagcaacctgcagcacaaccgaaaacactggtgcagttca

SEQ ID NO: 82810 - DNA, 78 bp, Homo sapiens
tgcaaaaggttaaggctgacttgacttagcaacctgcagcacaaccgaaaacactggtgcagttcagagctcttcaaa

SEQ ID NO: 82811 - DNA, 79 bp, Homo sapiens
aaggttaaggctgacttgacttagcaacctgcagcacaaccgaaaacactggtgcagttcagagctcttcaaatgcata

SEQ ID NO: 82812 - DNA, 82 bp, Homo sapiens
acttgacttagcaacctgcagcacaaccgaaaacactggtgcagttcagagctcttcaaatgcatagcttcagtgttacaca

SEQ ID NO: 82813 - DNA, 81 bp, Homo sapiens
aacctgcagcacaaccgaaaacactggtgcagttcagagctcttcaaatgcatagcttcagtgttacacacacattaatta

SEQ ID NO: 82814 - DNA, 78 bp, Homo sapiens
acaaccgaaaacactggtgcagttcagagctcttcaaatgcatagcttcagtgttacacacacattaattatattcct

SEQ ID NO: 82815 - DNA, 80 bp, Homo sapiens
acactggtgcagttcagagctcttcaaatgcatagcttcagtgttacacacacattaattatattccttcaattagttaa

SEQ ID NO: 82816 - DNA, 79 bp, Homo sapiens
agttcagagctcttcaaatgcatagcttcagtgttacacacacattaattatattccttcaattagttaatcctctaga

SEQ ID NO: 82817 - DNA, 78 bp, Homo sapiens
gagctcttcaaatgcatagcttcagtgttacacacacattaattatattccttcaattagttaatcctctagacagtt

SEQ ID NO: 82818 - DNA, 73 bp, Homo sapiens
cacacacattaattatattccttcaattagttaatcctctagacagttttctttttgttttgcatgcatcccg

SEQ ID NO: 82819 - DNA, 72 bp, Homo sapiens
tatattccttcaattagttaatcctctagacagttttctttttgttttgcatgcatcccgttccattttcat

SEQ ID NO: 82820 - DNA, 72 bp, Homo sapiens
ttaatcctctagacagttttctttttgttttgcatgcatcccgttccattttcattaagggcatctcttcct

SEQ ID NO: 82821 - DNA, 75 bp, Homo sapiens
agttttctttttgttttgcatgcatcccgttccattttcattaagggcatctcttccttgatcaatcatgtgctt

SEQ ID NO: 82822 - DNA, 78 bp, Homo sapiens
ttttgttttgcatgcatcccgttccattttcattaagggcatctcttccttgatcaatcatgtgctttgcttttcaat

SEQ ID NO: 82823 - DNA, 78 bp, Homo sapiens
ttgcatgcatcccgttccattttcattaagggcatctcttccttgatcaatcatgtgctttgcttttcaatttgtttt

SEQ ID NO: 82824 - DNA, 74 bp, Homo sapiens
ccgttccattttcattaagggcatctcttccttgatcaatcatgtgctttgcttttcaatttgtttttgtgatt

SEQ ID NO: 82825 - DNA, 75 bp, Homo sapiens
ttcattaagggcatctcttccttgatcaatcatgtgctttgcttttcaatttgtttttgtgattttttttgtatg

SEQ ID NO: 82826 - DNA, 70 bp, Homo sapiens
ttttttgtatgttttgtttgttaagctgtcaatacctccaacacttggaaaatgaaatatagatgcgttt

SEQ ID NO: 82827 - DNA, 71 bp, Homo sapiens
gttttgtttgttaagctgtcaatacctccaacacttggaaaatgaaatatagatgcgttttacttacagaa

SEQ ID NO: 82828 - DNA, 76 bp, Homo sapiens
gttaagctgtcaatacctccaacacttggaaaatgaaatatagatgcgttttacttacagaagagaatcatagcta

SEQ ID NO: 82829 - DNA, 78 bp, Homo sapiens
tgtcaatacctccaacacttggaaaatgaaatatagatgcgttttacttacagaagagaatcatagctatatggacaa

SEQ ID NO: 82830 - DNA, 78 bp, Homo sapiens
agatgcgttttacttacagaagagaatcatagctatatggacaatgcaaaatgaaatgaaacaagtgtcagaaacagt

SEQ ID NO: 82831 - DNA, 76 bp, Homo sapiens
cgttttacttacagaagagaatcatagctatatggacaatgcaaaatgaaatgaaacaagtgtcagaaacagttta

SEQ ID NO: 82832 - DNA, 79 bp, Homo sapiens
acagaagagaatcatagctatatggacaatgcaaaatgaaatgaaacaagtgtcagaaacagtttataaaaatggcaca

SEQ ID NO: 82833 - DNA, 79 bp, Homo sapiens
catagctatatggacaatgcaaaatgaaatgaaacaagtgtcagaaacagtttataaaaatggcacatttattgctaca

SEQ ID NO: 82834 - DNA, 76 bp, Homo sapiens
atgaaatgaaacaagtgtcagaaacagtttataaaaatggcacatttattgctacagaacggtcatgtacatgact

SEQ ID NO: 82835 - DNA, 77 bp, Homo sapiens
acaagtgtcagaaacagtttataaaaatggcacatttattgctacagaacggtcatgtacatgacttcatcgaataa

SEQ ID NO: 82836 - DNA, 77 bp, Homo sapiens
agaaacagtttataaaaatggcacatttattgctacagaacggtcatgtacatgacttcatcgaataactacagatg

SEQ ID NO: 82837 - DNA, 78 bp, Homo sapiens
cacatttattgctacagaacggtcatgtacatgacttcatcgaataactacagatgggaaacaggtaatggccttgac

SEQ ID NO: 82838 - DNA, 78 bp, Homo sapiens
ttattgctacagaacggtcatgtacatgacttcatcgaataactacagatgggaaacaggtaatggccttgaccaagc

SEQ ID NO: 82839 - DNA, 74 bp, Homo sapiens
ggtcatgtacatgacttcatcgaataactacagatgggaaacaggtaatggccttgaccaagctgggtttgttt

SEQ ID NO: 82840 - DNA, 73 bp, Homo sapiens
tacatgacttcatcgaataactacagatgggaaacaggtaatggccttgaccaagctgggtttgtttttgtct

SEQ ID NO: 82841 - DNA, 70 bp, Homo sapiens
atcgaataactacagatgggaaacaggtaatggccttgaccaagctgggtttgtttttgtcttgaaggaa

SEQ ID NO: 82842 - DNA, 69 bp, Homo sapiens
aaacaggtaatggccttgaccaagctgggtttgtttttgtcttgaaggaactccagcacacaacctgtt

SEQ ID NO: 82843 - DNA, 72 bp, Homo sapiens
atggccttgaccaagctgggtttgtttttgtcttgaaggaactccagcacacaacctgtttggacacttcta

SEQ ID NO: 82844 - DNA, 72 bp, Homo sapiens
agctgggtttgtttttgtcttgaaggaactccagcacacaacctgtttggacacttctacaaatcagaaata

SEQ ID NO: 82845 - DNA, 71 bp, Homo sapiens
gtttttgtcttgaaggaactccagcacacaacctgtttggacacttctacaaatcagaaatacaccaaaaa

SEQ ID NO: 82846 - DNA, 74 bp, Homo sapiens
tgtcttgaaggaactccagcacacaacctgtttggacacttctacaaatcagaaatacaccaaaaacatgaaaa

SEQ ID NO: 82847 - DNA, 73 bp, Homo sapiens
aactccagcacacaacctgtttggacacttctacaaatcagaaatacaccaaaaacatgaaaaaatcgaggca

SEQ ID NO: 82848 - DNA, 73 bp, Homo sapiens
aacctgtttggacacttctacaaatcagaaatacaccaaaaacatgaaaaaatcgaggcactcagccacacat

SEQ ID NO: 82849 - DNA, 75 bp, Homo sapiens
tttggacacttctacaaatcagaaatacaccaaaaacatgaaaaaatcgaggcactcagccacacattgaaaaca

SEQ ID NO: 82850 - DNA, 72 bp, Homo sapiens
aaatcagaaatacaccaaaaacatgaaaaaatcgaggcactcagccacacattgaaaacaaggtgtaactgt

SEQ ID NO: 82851 - DNA, 71 bp, Homo sapiens
tacaccaaaaacatgaaaaaatcgaggcactcagccacacattgaaaacaaggtgtaactgtttatctttt

SEQ ID NO: 82852 - DNA, 69 bp, Homo sapiens
caaaaacatgaaaaaatcgaggcactcagccacacattgaaaacaaggtgtaactgtttatcttttttt

SEQ ID NO: 82853 - DNA, 70 bp, Homo sapiens
tttaacaatttttttaagtttttaatgctgcagctatgtgtacagtcgcaaaaaatttccccgctgcgac

SEQ ID NO: 82854 - DNA, 71 bp, Homo sapiens
ttttttaagtttttaatgctgcagctatgtgtacagtcgcaaaaaatttccccgctgcgacctacaactaa

SEQ ID NO: 82855 - DNA, 71 bp, Homo sapiens
tttttaagtttttaatgctgcagctatgtgtacagtcgcaaaaaatttccccgctgcgacctacaactaaa

SEQ ID NO: 82856 - DNA, 71 bp, Homo sapiens
aagtttttaatgctgcagctatgtgtacagtcgcaaaaaatttccccgctgcgacctacaactaaaaacaa

SEQ ID NO: 82857 - DNA, 69 bp, Homo sapiens
caaacaaaaaagctacccatacagtttcatcttggtaacacatggtaaaataacatcttttaaatagta

SEQ ID NO: 82858 - DNA, 68 bp, Homo sapiens
aaaagctacccatacagtttcatcttggtaacacatggtaaaataacatcttttaaatagtaaaataa

SEQ ID NO: 82859 - DNA, 68 bp, Homo sapiens
catacagtttcatcttggtaacacatggtaaaataacatcttttaaatagtaaaataaagtaacaaac

SEQ ID NO: 82860 - DNA, 67 bp, Homo sapiens
catcttggtaacacatggtaaaataacatcttttaaatagtaaaataaagtaacaaacttttactca

SEQ ID NO: 82861 - DNA, 68 bp, Homo sapiens
cacatggtaaaataacatcttttaaatagtaaaataaagtaacaaacttttactcataatgattccaa

SEQ ID NO: 82862 - DNA, 67 bp, Homo sapiens
acatcttttaaatagtaaaataaagtaacaaacttttactcataatgattccaaaaatctacaaaga

SEQ ID NO: 82863 - DNA, 68 bp, Homo sapiens
aatagtaaaataaagtaacaaacttttactcataatgattccaaaaatctacaaagaagaaatattca

SEQ ID NO: 82864 - DNA, 71 bp, Homo sapiens
taaagtaacaaacttttactcataatgattccaaaaatctacaaagaagaaatattcagaatctgacaatt

SEQ ID NO: 82865 - DNA, 70 bp, Homo sapiens
taacaaacttttactcataatgattccaaaaatctacaaagaagaaatattcagaatctgacaatttttt

SEQ ID NO: 82866 - DNA, 74 bp, Homo sapiens
ttactcataatgattccaaaaatctacaaagaagaaatattcagaatctgacaatttttttgtaatattcatgg

SEQ ID NO: 82867 - DNA, 71 bp, Homo sapiens
tccaaaaatctacaaagaagaaatattcagaatctgacaatttttttgtaatattcatggtataaaaggat

SEQ ID NO: 82868 - DNA, 74 bp, Homo sapiens
ctacaaagaagaaatattcagaatctgacaatttttttgtaatattcatggtataaaaggattgctcctgcgaa

SEQ ID NO: 82869 - DNA, 74 bp, Homo sapiens
gaaatattcagaatctgacaatttttttgtaatattcatggtataaaaggattgctcctgcgaaaaataagcca

SEQ ID NO: 82870 - DNA, 73 bp, Homo sapiens
cagaatctgacaatttttttgtaatattcatggtataaaaggattgctcctgcgaaaaataagccaaatatat

SEQ ID NO: 82871 - DNA, 68 bp, Homo sapiens
ttttttttttcctactagggtgtactacagtctattttatagcaaaagagcactagacaaacaaagct

SEQ ID NO: 82872 - DNA, 71 bp, Homo sapiens
tttttcctactagggtgtactacagtctattttatagcaaaagagcactagacaaacaaagctttataaca

SEQ ID NO: 82873 - DNA, 73 bp, Homo sapiens
tagggtgtactacagtctattttatagcaaaagagcactagacaaacaaagctttataacaaaaagccaggca

SEQ ID NO: 82874 - DNA, 75 bp, Homo sapiens
cagtctattttatagcaaaagagcactagacaaacaaagctttataacaaaaagccaggcactgatacatggtaa

SEQ ID NO: 82875 - DNA, 76 bp, Homo sapiens
ttatagcaaaagagcactagacaaacaaagctttataacaaaaagccaggcactgatacatggtaaatctctgctt

SEQ ID NO: 82876 - DNA, 72 bp, Homo sapiens
aagagcactagacaaacaaagctttataacaaaaagccaggcactgatacatggtaaatctctgcttttttt

SEQ ID NO: 82877 - DNA, 71 bp, Homo sapiens
ttttttttttcttatcttcacttaattgcatcacaagtaacaagaatgaaaaaggccacagttcatatatt

SEQ ID NO: 82878 - DNA, 77 bp, Homo sapiens
cttatcttcacttaattgcatcacaagtaacaagaatgaaaaaggccacagttcatatattttcaccattacatatg

SEQ ID NO: 82879 - DNA, 78 bp, Homo sapiens
cttcacttaattgcatcacaagtaacaagaatgaaaaaggccacagttcatatattttcaccattacatatgtctata

SEQ ID NO: 82880 - DNA, 79 bp, Homo sapiens
gcatcacaagtaacaagaatgaaaaaggccacagttcatatattttcaccattacatatgtctataatacttgaaatga

SEQ ID NO: 82881 - DNA, 77 bp, Homo sapiens
caagaatgaaaaaggccacagttcatatattttcaccattacatatgtctataatacttgaaatgagtatggcaaaa

SEQ ID NO: 82882 - DNA, 78 bp, Homo sapiens
tgaaaaaggccacagttcatatattttcaccattacatatgtctataatacttgaaatgagtatggcaaaaccagcac

SEQ ID NO: 82883 - DNA, 81 bp, Homo sapiens
agttcatatattttcaccattacatatgtctataatacttgaaatgagtatggcaaaaccagcactgcacaaagatgagtc

SEQ ID NO: 82884 - DNA, 80 bp, Homo sapiens
attttcaccattacatatgtctataatacttgaaatgagtatggcaaaaccagcactgcacaaagatgagtccacttcaa

SEQ ID NO: 82885 - DNA, 82 bp, Homo sapiens
tacatatgtctataatacttgaaatgagtatggcaaaaccagcactgcacaaagatgagtccacttcaagtcccatgagaaa

SEQ ID NO: 82886 - DNA, 83 bp, Homo sapiens
tgtctataatacttgaaatgagtatggcaaaaccagcactgcacaaagatgagtccacttcaagtcccatgagaaagagcatg

SEQ ID NO: 82887 - DNA, 80 bp, Homo sapiens
aaatgagtatggcaaaaccagcactgcacaaagatgagtccacttcaagtcccatgagaaagagcatgtctctaaagaaa

SEQ ID NO: 82888 - DNA, 78 bp, Homo sapiens
atggcaaaaccagcactgcacaaagatgagtccacttcaagtcccatgagaaagagcatgtctctaaagaaaaacaaa

SEQ ID NO: 82889 - DNA, 76 bp, Homo sapiens
aaaaccagcactgcacaaagatgagtccacttcaagtcccatgagaaagagcatgtctctaaagaaaaacaaacaa

SEQ ID NO: 82890 - DNA, 66 bp, Homo sapiens
aacaaacaaaaccaaagcaaaataaaaagagaggcctaaaggccttggtgccccattgtgttggaa

SEQ ID NO: 82891 - DNA, 69 bp, Homo sapiens
aaaaccaaagcaaaataaaaagagaggcctaaaggccttggtgccccattgtgttggaattcatcatat

SEQ ID NO: 82892 - DNA, 71 bp, Homo sapiens
aataaaaagagaggcctaaaggccttggtgccccattgtgttggaattcatcatattccatcttgactttt

SEQ ID NO: 82893 - DNA, 73 bp, Homo sapiens
aaagagaggcctaaaggccttggtgccccattgtgttggaattcatcatattccatcttgacttttttgcttc

SEQ ID NO: 82894 - DNA, 78 bp, Homo sapiens
ggccttggtgccccattgtgttggaattcatcatattccatcttgacttttttgcttccagtcagccagcagactaaa

SEQ ID NO: 82895 - DNA, 77 bp, Homo sapiens
tggtgccccattgtgttggaattcatcatattccatcttgacttttttgcttccagtcagccagcagactaaatttt

SEQ ID NO: 82896 - DNA, 77 bp, Homo sapiens
ttgtgttggaattcatcatattccatcttgacttttttgcttccagtcagccagcagactaaatttttgtgcttgtt

SEQ ID NO: 82897 - DNA, 78 bp, Homo sapiens
attcatcatattccatcttgacttttttgcttccagtcagccagcagactaaatttttgtgcttgtttatgctgaaat

SEQ ID NO: 82898 - DNA, 78 bp, Homo sapiens
atcttgacttttttgcttccagtcagccagcagactaaatttttgtgcttgtttatgctgaaattgattcattcctga

SEQ ID NO: 82899 - DNA, 79 bp, Homo sapiens
tttttgcttccagtcagccagcagactaaatttttgtgcttgtttatgctgaaattgattcattcctgactcaagttca

SEQ ID NO: 82900 - DNA, 78 bp, Homo sapiens
cagactaaatttttgtgcttgtttatgctgaaattgattcattcctgactcaagttcacttttggacacagatcatat

SEQ ID NO: 82901 - DNA, 78 bp, Homo sapiens
aaatttttgtgcttgtttatgctgaaattgattcattcctgactcaagttcacttttggacacagatcatattctgcc

SEQ ID NO: 82902 - DNA, 83 bp, Homo sapiens
tttatgctgaaattgattcattcctgactcaagttcacttttggacacagatcatattctgcctgttggatgcaaaagatgaa

SEQ ID NO: 82903 - DNA, 79 bp, Homo sapiens
aaattgattcattcctgactcaagttcacttttggacacagatcatattctgcctgttggatgcaaaagatgaaaatcc

SEQ ID NO: 82904 - DNA, 79 bp, Homo sapiens
attcattcctgactcaagttcacttttggacacagatcatattctgcctgttggatgcaaaagatgaaaatcctcttaa

SEQ ID NO: 82905 - DNA, 79 bp, Homo sapiens
tgactcaagttcacttttggacacagatcatattctgcctgttggatgcaaaagatgaaaatcctcttaactccaagtc

SEQ ID NO: 82906 - DNA, 76 bp, Homo sapiens
aagttcacttttggacacagatcatattctgcctgttggatgcaaaagatgaaaatcctcttaactccaagtcttg

SEQ ID NO: 82907 - DNA, 76 bp, Homo sapiens
acttttggacacagatcatattctgcctgttggatgcaaaagatgaaaatcctcttaactccaagtcttggttcga

SEQ ID NO: 82908 - DNA, 77 bp, Homo sapiens
ttggacacagatcatattctgcctgttggatgcaaaagatgaaaatcctcttaactccaagtcttggttcgactccc

SEQ ID NO: 82909 - DNA, 74 bp, Homo sapiens
atcatattctgcctgttggatgcaaaagatgaaaatcctcttaactccaagtcttggttcgactccctccccac

SEQ ID NO: 82910 - DNA, 70 bp, Homo sapiens
cctgttggatgcaaaagatgaaaatcctcttaactccaagtcttggttcgactccctccccactccccaa

SEQ ID NO: 82911 - DNA, 68 bp, Homo sapiens
aagatgaaaatcctcttaactccaagtcttggttcgactccctccccactccccaacccctcatcaaa

SEQ ID NO: 82912 - DNA, 67 bp, Homo sapiens
aaaatcctcttaactccaagtcttggttcgactccctccccactccccaacccctcatcaaaatcaa

SEQ ID NO: 82913 - DNA, 70 bp, Homo sapiens
ttaactccaagtcttggttcgactccctccccactccccaacccctcatcaaaatcaagatcacaaataa

SEQ ID NO: 82914 - DNA, 68 bp, Homo sapiens
aaaattcagaaataggaaaaagtgaaaaataaaaaggaatcggaagactgaatcagaaccagttgcac

SEQ ID NO: 82915 - DNA, 68 bp, Homo sapiens
aaataggaaaaagtgaaaaataaaaaggaatcggaagactgaatcagaaccagttgcaccactgggtg

SEQ ID NO: 82916 - DNA, 73 bp, Homo sapiens
agtgaaaaataaaaaggaatcggaagactgaatcagaaccagttgcaccactgggtggactgacagttgtata

SEQ ID NO: 82917 - DNA, 73 bp, Homo sapiens
aataaaaaggaatcggaagactgaatcagaaccagttgcaccactgggtggactgacagttgtataaacatta

SEQ ID NO: 82918 - DNA, 78 bp, Homo sapiens
atcggaagactgaatcagaaccagttgcaccactgggtggactgacagttgtataaacattagtgttccttgcagcta

SEQ ID NO: 82919 - DNA, 78 bp, Homo sapiens
aatcagaaccagttgcaccactgggtggactgacagttgtataaacattagtgttccttgcagctacacagaagacaa

SEQ ID NO: 82920 - DNA, 76 bp, Homo sapiens
actgacagttgtataaacattagtgttccttgcagctacacagaagacaaatggtaaaaatttctagatgaacaga

SEQ ID NO: 82921 - DNA, 76 bp, Homo sapiens
tgtataaacattagtgttccttgcagctacacagaagacaaatggtaaaaatttctagatgaacagatccctattc

SEQ ID NO: 82922 - DNA, 79 bp, Homo sapiens
attagtgttccttgcagctacacagaagacaaatggtaaaaatttctagatgaacagatccctattctgcatattcata

SEQ ID NO: 82923 - DNA, 77 bp, Homo sapiens
ccttgcagctacacagaagacaaatggtaaaaatttctagatgaacagatccctattctgcatattcataaattact

SEQ ID NO: 82924 - DNA, 76 bp, Homo sapiens
gaagacaaatggtaaaaatttctagatgaacagatccctattctgcatattcataaattacttgaatgtggaggtg

SEQ ID NO: 82925 - DNA, 78 bp, Homo sapiens
atggtaaaaatttctagatgaacagatccctattctgcatattcataaattacttgaatgtggaggtggatcaactgc

SEQ ID NO: 82926 - DNA, 78 bp, Homo sapiens
aaatttctagatgaacagatccctattctgcatattcataaattacttgaatgtggaggtggatcaactgctccaagt

SEQ ID NO: 82927 - DNA, 78 bp, Homo sapiens
atgaacagatccctattctgcatattcataaattacttgaatgtggaggtggatcaactgctccaagttgcttttaaa

SEQ ID NO: 82928 - DNA, 76 bp, Homo sapiens
tattctgcatattcataaattacttgaatgtggaggtggatcaactgctccaagttgcttttaaagtccgagtttc

SEQ ID NO: 82929 - DNA, 73 bp, Homo sapiens
atattcataaattacttgaatgtggaggtggatcaactgctccaagttgcttttaaagtccgagtttctgaaa

SEQ ID NO: 82930 - DNA, 72 bp, Homo sapiens
aattacttgaatgtggaggtggatcaactgctccaagttgcttttaaagtccgagtttctgaaagagatccc

SEQ ID NO: 82931 - DNA, 73 bp, Homo sapiens
aagttgcttttaaagtccgagtttctgaaagagatccccagcctaagtgtcgtcatacagatagcgtagtatg

SEQ ID NO: 82932 - DNA, 72 bp, Homo sapiens
ttttaaagtccgagtttctgaaagagatccccagcctaagtgtcgtcatacagatagcgtagtatggaccct

SEQ ID NO: 82933 - DNA, 71 bp, Homo sapiens
agtttctgaaagagatccccagcctaagtgtcgtcatacagatagcgtagtatggacccttttgaaatttt

SEQ ID NO: 82934 - DNA, 72 bp, Homo sapiens
aaagagatccccagcctaagtgtcgtcatacagatagcgtagtatggacccttttgaaatttttgtatagta

SEQ ID NO: 82935 - DNA, 72 bp, Homo sapiens
cagcctaagtgtcgtcatacagatagcgtagtatggacccttttgaaatttttgtatagtactttaatctta

SEQ ID NO: 82936 - DNA, 72 bp, Homo sapiens
cgtcatacagatagcgtagtatggacccttttgaaatttttgtatagtactttaatcttaactgtcttctgc

SEQ ID NO: 82937 - DNA, 71 bp, Homo sapiens
acagatagcgtagtatggacccttttgaaatttttgtatagtactttaatcttaactgtcttctgctgaac

SEQ ID NO: 82938 - DNA, 75 bp, Homo sapiens
tgaaatttttgtatagtactttaatcttaactgtcttctgctgaacttcatttgaaaatccagtgcaggatacca

SEQ ID NO: 82939 - DNA, 76 bp, Homo sapiens
tgtatagtactttaatcttaactgtcttctgctgaacttcatttgaaaatccagtgcaggataccaatatcttacc

SEQ ID NO: 82940 - DNA, 76 bp, Homo sapiens
ttaatcttaactgtcttctgctgaacttcatttgaaaatccagtgcaggataccaatatcttacctgggtttgata

SEQ ID NO: 82941 - DNA, 75 bp, Homo sapiens
ttctgctgaacttcatttgaaaatccagtgcaggataccaatatcttacctgggtttgataattacaaaacaaca

SEQ ID NO: 82942 - DNA, 71 bp, Homo sapiens
ttttttcttttttaatggggatacaacccaattaatatggataggtgcagattatgtttctccaccaagca

SEQ ID NO: 82943 - DNA, 71 bp, Homo sapiens
ttcttttttaatggggatacaacccaattaatatggataggtgcagattatgtttctccaccaagcaaaac

SEQ ID NO: 82944 - DNA, 72 bp, Homo sapiens
tttttaatggggatacaacccaattaatatggataggtgcagattatgtttctccaccaagcaaaacctagc

SEQ ID NO: 82945 - DNA, 75 bp, Homo sapiens
tttaatggggatacaacccaattaatatggataggtgcagattatgtttctccaccaagcaaaacctagcgagca

SEQ ID NO: 82946 - DNA, 77 bp, Homo sapiens
ggatacaacccaattaatatggataggtgcagattatgtttctccaccaagcaaaacctagcgagcagctttcagtg

SEQ ID NO: 82947 - DNA, 77 bp, Homo sapiens
atacaacccaattaatatggataggtgcagattatgtttctccaccaagcaaaacctagcgagcagctttcagtggc

SEQ ID NO: 82948 - DNA, 76 bp, Homo sapiens
attaatatggataggtgcagattatgtttctccaccaagcaaaacctagcgagcagctttcagtggccgttagaat

SEQ ID NO: 82949 - DNA, 76 bp, Homo sapiens
taatatggataggtgcagattatgtttctccaccaagcaaaacctagcgagcagctttcagtggccgttagaattt

SEQ ID NO: 82950 - DNA, 75 bp, Homo sapiens
ataggtgcagattatgtttctccaccaagcaaaacctagcgagcagctttcagtggccgttagaattttcactta

SEQ ID NO: 82951 - DNA, 73 bp, Homo sapiens
agattatgtttctccaccaagcaaaacctagcgagcagctttcagtggccgttagaattttcacttatttcca

SEQ ID NO: 82952 - DNA, 72 bp, Homo sapiens
attatgtttctccaccaagcaaaacctagcgagcagctttcagtggccgttagaattttcacttatttccaa

SEQ ID NO: 82953 - DNA, 70 bp, Homo sapiens
aaaacctagcgagcagctttcagtggccgttagaattttcacttatttccaaagggaattcaacaataga

SEQ ID NO: 82954 - DNA, 72 bp, Homo sapiens
agctttcagtggccgttagaattttcacttatttccaaagggaattcaacaatagaggtattgcattactga

SEQ ID NO: 82955 - DNA, 72 bp, Homo sapiens
agtggccgttagaattttcacttatttccaaagggaattcaacaatagaggtattgcattactgagtaatga

SEQ ID NO: 82956 - DNA, 76 bp, Homo sapiens
ttttcacttatttccaaagggaattcaacaatagaggtattgcattactgagtaatgaatacatcaaagctggtga

SEQ ID NO: 82957 - DNA, 75 bp, Homo sapiens
acttatttccaaagggaattcaacaatagaggtattgcattactgagtaatgaatacatcaaagctggtgaacaa

SEQ ID NO: 82958 - DNA, 80 bp, Homo sapiens
aacaatagaggtattgcattactgagtaatgaatacatcaaagctggtgaacaataaattgcagcttttactctgagtga

SEQ ID NO: 82959 - DNA, 79 bp, Homo sapiens
ggtattgcattactgagtaatgaatacatcaaagctggtgaacaataaattgcagcttttactctgagtgagaacaaaa

SEQ ID NO: 82960 - DNA, 78 bp, Homo sapiens
actgagtaatgaatacatcaaagctggtgaacaataaattgcagcttttactctgagtgagaacaaaatataaagcac

SEQ ID NO: 82961 - DNA, 71 bp, Homo sapiens
aaagctggtgaacaataaattgcagcttttactctgagtgagaacaaaatataaagcaccaatttaaaaaa

SEQ ID NO: 82962 - DNA, 72 bp, Homo sapiens
acaataaattgcagcttttactctgagtgagaacaaaatataaagcaccaatttaaaaaataatcaaatgac

SEQ ID NO: 82963 - DNA, 72 bp, Homo sapiens
gcagcttttactctgagtgagaacaaaatataaagcaccaatttaaaaaataatcaaatgactacaatttac

SEQ ID NO: 82964 - DNA, 68 bp, Homo sapiens
actctgagtgagaacaaaatataaagcaccaatttaaaaaataatcaaatgactacaatttacttttt

SEQ ID NO: 82965 - DNA, 66 bp, Homo sapiens
gaacaaaatataaagcaccaatttaaaaaataatcaaatgactacaatttacttttttgctttgtt

SEQ ID NO: 82966 - DNA, 64 bp, Homo sapiens
aatttaaaaaataatcaaatgactacaatttacttttttgctttgtttacagatttgaaaaact

SEQ ID NO: 82967 - DNA, 69 bp, Homo sapiens
tgactacaatttacttttttgctttgtttacagatttgaaaaactttaattcagctctattaagcacct

SEQ ID NO: 82968 - DNA, 71 bp, Homo sapiens
tacttttttgctttgtttacagatttgaaaaactttaattcagctctattaagcacctttatgataacatg

SEQ ID NO: 82969 - DNA, 74 bp, Homo sapiens
gctttgtttacagatttgaaaaactttaattcagctctattaagcacctttatgataacatgtatcaaaagtgc

SEQ ID NO: 82970 - DNA, 74 bp, Homo sapiens
cagatttgaaaaactttaattcagctctattaagcacctttatgataacatgtatcaaaagtgccattcttaaa

SEQ ID NO: 82971 - DNA, 78 bp, Homo sapiens
aactttaattcagctctattaagcacctttatgataacatgtatcaaaagtgccattcttaaaatgtacatcaatgca

SEQ ID NO: 82972 - DNA, 80 bp, Homo sapiens
taattcagctctattaagcacctttatgataacatgtatcaaaagtgccattcttaaaatgtacatcaatgcagggagtg

SEQ ID NO: 82973 - DNA, 76 bp, Homo sapiens
attaagcacctttatgataacatgtatcaaaagtgccattcttaaaatgtacatcaatgcagggagtgtttccagt

SEQ ID NO: 82974 - DNA, 76 bp, Homo sapiens
tttatgataacatgtatcaaaagtgccattcttaaaatgtacatcaatgcagggagtgtttccagttccctaaaga

SEQ ID NO: 82975 - DNA, 73 bp, Homo sapiens
aacatgtatcaaaagtgccattcttaaaatgtacatcaatgcagggagtgtttccagttccctaaagagtaaa

SEQ ID NO: 82976 - DNA, 71 bp, Homo sapiens
tgccattcttaaaatgtacatcaatgcagggagtgtttccagttccctaaagagtaaacaccgtattttct

SEQ ID NO: 82977 - DNA, 70 bp, Homo sapiens
cttaaaatgtacatcaatgcagggagtgtttccagttccctaaagagtaaacaccgtattttcttctgta

SEQ ID NO: 82978 - DNA, 71 bp, Homo sapiens
atcaatgcagggagtgtttccagttccctaaagagtaaacaccgtattttcttctgtacacttatcctgaa

SEQ ID NO: 82979 - DNA, 73 bp, Homo sapiens
gagtgtttccagttccctaaagagtaaacaccgtattttcttctgtacacttatcctgaatgtgatcagagta

SEQ ID NO: 82980 - DNA, 72 bp, Homo sapiens
tttccagttccctaaagagtaaacaccgtattttcttctgtacacttatcctgaatgtgatcagagtatacc

SEQ ID NO: 82981 - DNA, 75 bp, Homo sapiens
ctaaagagtaaacaccgtattttcttctgtacacttatcctgaatgtgatcagagtatacctgcttcctatataa

SEQ ID NO: 82982 - DNA, 76 bp, Homo sapiens
aacaccgtattttcttctgtacacttatcctgaatgtgatcagagtatacctgcttcctatataatattgttccta

SEQ ID NO: 82983 - DNA, 76 bp, Homo sapiens
attttcttctgtacacttatcctgaatgtgatcagagtatacctgcttcctatataatattgttcctagggatacc

SEQ ID NO: 82984 - DNA, 76 bp, Homo sapiens
ttttcttctgtacacttatcctgaatgtgatcagagtatacctgcttcctatataatattgttcctagggataccc

SEQ ID NO: 82985 - DNA, 77 bp, Homo sapiens
ttatcctgaatgtgatcagagtatacctgcttcctatataatattgttcctagggatacccgccttggtagactata

SEQ ID NO: 82986 - DNA, 74 bp, Homo sapiens
aatgtgatcagagtatacctgcttcctatataatattgttcctagggatacccgccttggtagactatacaaaa

SEQ ID NO: 82987 - DNA, 76 bp, Homo sapiens
tgtgatcagagtatacctgcttcctatataatattgttcctagggatacccgccttggtagactatacaaaatgag

SEQ ID NO: 82988 - DNA, 74 bp, Homo sapiens
agtatacctgcttcctatataatattgttcctagggatacccgccttggtagactatacaaaatgagtgcagaa

SEQ ID NO: 82989 - DNA, 74 bp, Homo sapiens
cttcctatataatattgttcctagggatacccgccttggtagactatacaaaatgagtgcagaatgtaccacta

SEQ ID NO: 82990 - DNA, 71 bp, Homo sapiens
atattgttcctagggatacccgccttggtagactatacaaaatgagtgcagaatgtaccactaaaaggaaa

SEQ ID NO: 82991 - DNA, 71 bp, Homo sapiens
ttggtagactatacaaaatgagtgcagaatgtaccactaaaaggaaatctttaacatacggagggaacaaa

SEQ ID NO: 82992 - DNA, 72 bp, Homo sapiens
actatacaaaatgagtgcagaatgtaccactaaaaggaaatctttaacatacggagggaacaaatacacatg

SEQ ID NO: 82993 - DNA, 69 bp, Homo sapiens
tgtaccactaaaaggaaatctttaacatacggagggaacaaatacacatggttttcattattcagggag

SEQ ID NO: 82994 - DNA, 69 bp, Homo sapiens
ctaaaaggaaatctttaacatacggagggaacaaatacacatggttttcattattcagggaggaggaga

SEQ ID NO: 82995 - DNA, 72 bp, Homo sapiens
atctttaacatacggagggaacaaatacacatggttttcattattcagggaggaggagagagtatacattat

SEQ ID NO: 82996 - DNA, 74 bp, Homo sapiens
agggaacaaatacacatggttttcattattcagggaggaggagagagtatacattattgtcttccatgtccttc

SEQ ID NO: 82997 - DNA, 77 bp, Homo sapiens
acaaatacacatggttttcattattcagggaggaggagagagtatacattattgtcttccatgtccttctctgagcc

SEQ ID NO: 82998 - DNA, 78 bp, Homo sapiens
tttcattattcagggaggaggagagagtatacattattgtcttccatgtccttctctgagcctctttgttcatacatt

SEQ ID NO: 82999 - DNA, 79 bp, Homo sapiens
ttattcagggaggaggagagagtatacattattgtcttccatgtccttctctgagcctctttgttcatacatttcacag

SEQ ID NO: 83000 - DNA, 77 bp, Homo sapiens
aggaggagagagtatacattattgtcttccatgtccttctctgagcctctttgttcatacatttcacaggaaagccc

SEQ ID NO: 83001 - DNA, 75 bp, Homo sapiens
tatacattattgtcttccatgtccttctctgagcctctttgttcatacatttcacaggaaagccccaaaataact

SEQ ID NO: 83002 - DNA, 75 bp, Homo sapiens
ttgtcttccatgtccttctctgagcctctttgttcatacatttcacaggaaagccccaaaataacttttcatgaa

SEQ ID NO: 83003 - DNA, 74 bp, Homo sapiens
cttctctgagcctctttgttcatacatttcacaggaaagccccaaaataacttttcatgaagtttgatttctgc

SEQ ID NO: 83004 - DNA, 73 bp, Homo sapiens
agcctctttgttcatacatttcacaggaaagccccaaaataacttttcatgaagtttgatttctgctattctc

SEQ ID NO: 83005 - DNA, 71 bp, Homo sapiens
gttcatacatttcacaggaaagccccaaaataacttttcatgaagtttgatttctgctattctcctaaggt

SEQ ID NO: 83006 - DNA, 70 bp, Homo sapiens
tcacaggaaagccccaaaataacttttcatgaagtttgatttctgctattctcctaaggttttaatccac

SEQ ID NO: 83007 - DNA, 71 bp, Homo sapiens
cttttcatgaagtttgatttctgctattctcctaaggttttaatccacctccacattttaggaacttatca

SEQ ID NO: 83008 - DNA, 70 bp, Homo sapiens
gatttctgctattctcctaaggttttaatccacctccacattttaggaacttatcaacaaatcaaagtta

SEQ ID NO: 83009 - DNA, 66 bp, Homo sapiens
attctcctaaggttttaatccacctccacattttaggaacttatcaacaaatcaaagttattttag

SEQ ID NO: 83010 - DNA, 71 bp, Homo sapiens
taatccacctccacattttaggaacttatcaacaaatcaaagttattttagttttatcgctactgaacata

SEQ ID NO: 83011 - DNA, 70 bp, Homo sapiens
ggaacttatcaacaaatcaaagttattttagttttatcgctactgaacatatttacagtttttcaacaca

SEQ ID NO: 83012 - DNA, 73 bp, Homo sapiens
ttatcaacaaatcaaagttattttagttttatcgctactgaacatatttacagtttttcaacacacacacagc

SEQ ID NO: 83013 - DNA, 73 bp, Homo sapiens
tcaaagttattttagttttatcgctactgaacatatttacagtttttcaacacacacacagctaatcaaaatg

SEQ ID NO: 83014 - DNA, 72 bp, Homo sapiens
agttttatcgctactgaacatatttacagtttttcaacacacacacagctaatcaaaatgtttatgggtttg

SEQ ID NO: 83015 - DNA, 72 bp, Homo sapiens
catatttacagtttttcaacacacacacagctaatcaaaatgtttatgggtttgtaaaagatgaccacgtgg

SEQ ID NO: 83016 - DNA, 71 bp, Homo sapiens
gtttttcaacacacacacagctaatcaaaatgtttatgggtttgtaaaagatgaccacgtggtaactatct

SEQ ID NO: 83017 - DNA, 72 bp, Homo sapiens
cacacacacagctaatcaaaatgtttatgggtttgtaaaagatgaccacgtggtaactatcttatttgttct

SEQ ID NO: 83018 - DNA, 69 bp, Homo sapiens
agctaatcaaaatgtttatgggtttgtaaaagatgaccacgtggtaactatcttatttgttcttacatt

SEQ ID NO: 83019 - DNA, 70 bp, Homo sapiens
gtttatgggtttgtaaaagatgaccacgtggtaactatcttatttgttcttacattttcagaaatgaaca

SEQ ID NO: 83020 - DNA, 73 bp, Homo sapiens
tgtaaaagatgaccacgtggtaactatcttatttgttcttacattttcagaaatgaacataaaattctgattc

SEQ ID NO: 83021 - DNA, 75 bp, Homo sapiens
gatgaccacgtggtaactatcttatttgttcttacattttcagaaatgaacataaaattctgattcttgtagcta

SEQ ID NO: 83022 - DNA, 73 bp, Homo sapiens
gtggtaactatcttatttgttcttacattttcagaaatgaacataaaattctgattcttgtagctatttcatt

SEQ ID NO: 83023 - DNA, 74 bp, Homo sapiens
tcttatttgttcttacattttcagaaatgaacataaaattctgattcttgtagctatttcatttaaatgagact

SEQ ID NO: 83024 - DNA, 72 bp, Homo sapiens
cattttcagaaatgaacataaaattctgattcttgtagctatttcatttaaatgagacttctttttaaacca

SEQ ID NO: 83025 - DNA, 72 bp, Homo sapiens
tcagaaatgaacataaaattctgattcttgtagctatttcatttaaatgagacttctttttaaaccacagtt

SEQ ID NO: 83026 - DNA, 68 bp, Homo sapiens
acataaaattctgattcttgtagctatttcatttaaatgagacttctttttaaaccacagtttttaaa

SEQ ID NO: 83027 - DNA, 68 bp, Homo sapiens
aaaacaaaaactgatacaatgtattaaaacacataataacaagagtctacatgtaaaaatataacttt

SEQ ID NO: 83028 - DNA, 74 bp, Homo sapiens
ctgatacaatgtattaaaacacataataacaagagtctacatgtaaaaatataacttttacatacacaatttca

SEQ ID NO: 83029 - DNA, 71 bp, Homo sapiens
acaatgtattaaaacacataataacaagagtctacatgtaaaaatataacttttacatacacaatttcaaa

SEQ ID NO: 83030 - DNA, 73 bp, Homo sapiens
cacataataacaagagtctacatgtaaaaatataacttttacatacacaatttcaaaataatgatacgtttgc

SEQ ID NO: 83031 - DNA, 74 bp, Homo sapiens
caagagtctacatgtaaaaatataacttttacatacacaatttcaaaataatgatacgtttgccatttgttgca

SEQ ID NO: 83032 - DNA, 73 bp, Homo sapiens
tctacatgtaaaaatataacttttacatacacaatttcaaaataatgatacgtttgccatttgttgcataaaa

SEQ ID NO: 83033 - DNA, 70 bp, Homo sapiens
aaaatataacttttacatacacaatttcaaaataatgatacgtttgccatttgttgcataaaatttacaa

SEQ ID NO: 83034 - DNA, 71 bp, Homo sapiens
aatataacttttacatacacaatttcaaaataatgatacgtttgccatttgttgcataaaatttacaaatg

SEQ ID NO: 83035 - DNA, 72 bp, Homo sapiens
acttttacatacacaatttcaaaataatgatacgtttgccatttgttgcataaaatttacaaatgtatttca

SEQ ID NO: 83036 - DNA, 75 bp, Homo sapiens
tacatacacaatttcaaaataatgatacgtttgccatttgttgcataaaatttacaaatgtatttcattactata

SEQ ID NO: 83037 - DNA, 73 bp, Homo sapiens
cacaatttcaaaataatgatacgtttgccatttgttgcataaaatttacaaatgtatttcattactatataac

SEQ ID NO: 83038 - DNA, 74 bp, Homo sapiens
ttcaaaataatgatacgtttgccatttgttgcataaaatttacaaatgtatttcattactatataactggcaaa

SEQ ID NO: 83039 - DNA, 73 bp, Homo sapiens
aataatgatacgtttgccatttgttgcataaaatttacaaatgtatttcattactatataactggcaaaacag

SEQ ID NO: 83040 - DNA, 75 bp, Homo sapiens
tgatacgtttgccatttgttgcataaaatttacaaatgtatttcattactatataactggcaaaacaggagaaca

SEQ ID NO: 83041 - DNA, 74 bp, Homo sapiens
cgtttgccatttgttgcataaaatttacaaatgtatttcattactatataactggcaaaacaggagaacagatg

SEQ ID NO: 83042 - DNA, 73 bp, Homo sapiens
aaatttacaaatgtatttcattactatataactggcaaaacaggagaacagatggaacatttagaccatttca

SEQ ID NO: 83043 - DNA, 77 bp, Homo sapiens
atgtatttcattactatataactggcaaaacaggagaacagatggaacatttagaccatttcaatggatttatggca

SEQ ID NO: 83044 - DNA, 76 bp, Homo sapiens
ttactatataactggcaaaacaggagaacagatggaacatttagaccatttcaatggatttatggcatttactcag

SEQ ID NO: 83045 - DNA, 79 bp, Homo sapiens
atataactggcaaaacaggagaacagatggaacatttagaccatttcaatggatttatggcatttactcagtgctgata

SEQ ID NO: 83046 - DNA, 76 bp, Homo sapiens
aacaggagaacagatggaacatttagaccatttcaatggatttatggcatttactcagtgctgataggtggaaaaa

SEQ ID NO: 83047 - DNA, 76 bp, Homo sapiens
aacagatggaacatttagaccatttcaatggatttatggcatttactcagtgctgataggtggaaaaactacttga

SEQ ID NO: 83048 - DNA, 71 bp, Homo sapiens
ccatttcaatggatttatggcatttactcagtgctgataggtggaaaaactacttgaacagggattttttt

SEQ ID NO: 83049 - DNA, 75 bp, Homo sapiens
ttcttaatacatgccaagaattgtgtggctgtaaaaatagaaacaagttagagacaaaaggatgctgacaaatac

SEQ ID NO: 83050 - DNA, 74 bp, Homo sapiens
catgccaagaattgtgtggctgtaaaaatagaaacaagttagagacaaaaggatgctgacaaatacttaactag

SEQ ID NO: 83051 - DNA, 74 bp, Homo sapiens
tgtgtggctgtaaaaatagaaacaagttagagacaaaaggatgctgacaaatacttaactaggagcactatttg

SEQ ID NO: 83052 - DNA, 72 bp, Homo sapiens
aaaaatagaaacaagttagagacaaaaggatgctgacaaatacttaactaggagcactatttgtttactgca

SEQ ID NO: 83053 - DNA, 74 bp, Homo sapiens
aaacaagttagagacaaaaggatgctgacaaatacttaactaggagcactatttgtttactgcactatacacca

SEQ ID NO: 83054 - DNA, 76 bp, Homo sapiens
agacaaaaggatgctgacaaatacttaactaggagcactatttgtttactgcactatacaccaaagtcaatcatta

SEQ ID NO: 83055 - DNA, 75 bp, Homo sapiens
tacttaactaggagcactatttgtttactgcactatacaccaaagtcaatcattataaagattcacgatggaagt

SEQ ID NO: 83056 - DNA, 76 bp, Homo sapiens
taggagcactatttgtttactgcactatacaccaaagtcaatcattataaagattcacgatggaagttggttcaat

SEQ ID NO: 83057 - DNA, 79 bp, Homo sapiens
accaaagtcaatcattataaagattcacgatggaagttggttcaattgtgcccagacgtcaaagctagctatctgatga

SEQ ID NO: 83058 - DNA, 83 bp, Homo sapiens
atcattataaagattcacgatggaagttggttcaattgtgcccagacgtcaaagctagctatctgatgagtcgctgtgccata

SEQ ID NO: 83059 - DNA, 84 bp, Homo sapiens
taaagattcacgatggaagttggttcaattgtgcccagacgtcaaagctagctatctgatgagtcgctgtgccatagcttgatc

SEQ ID NO: 83060 - DNA, 84 bp, Homo sapiens
gaagttggttcaattgtgcccagacgtcaaagctagctatctgatgagtcgctgtgccatagcttgatctatgtttctatcaaa

SEQ ID NO: 83061 - DNA, 85 bp, Homo sapiens
gttcaattgtgcccagacgtcaaagctagctatctgatgagtcgctgtgccatagcttgatctatgtttctatcaaatatggtaa

SEQ ID NO: 83062 - DNA, 84 bp, Homo sapiens
cagacgtcaaagctagctatctgatgagtcgctgtgccatagcttgatctatgtttctatcaaatatggtaagtataaacttca

SEQ ID NO: 83063 - DNA, 83 bp, Homo sapiens
aaagctagctatctgatgagtcgctgtgccatagcttgatctatgtttctatcaaatatggtaagtataaacttcattcatac

SEQ ID NO: 83064 - DNA, 85 bp, Homo sapiens
tatctgatgagtcgctgtgccatagcttgatctatgtttctatcaaatatggtaagtataaacttcattcatactggccagagaa

SEQ ID NO: 83065 - DNA, 80 bp, Homo sapiens
agtcgctgtgccatagcttgatctatgtttctatcaaatatggtaagtataaacttcattcatactggccagagaaatac

SEQ ID NO: 83066 - DNA, 78 bp, Homo sapiens
atagcttgatctatgtttctatcaaatatggtaagtataaacttcattcatactggccagagaaatactgcactaccc

SEQ ID NO: 83067 - DNA, 76 bp, Homo sapiens
tatgtttctatcaaatatggtaagtataaacttcattcatactggccagagaaatactgcactacccctcctcaaa

SEQ ID NO: 83068 - DNA, 74 bp, Homo sapiens
tctatcaaatatggtaagtataaacttcattcatactggccagagaaatactgcactacccctcctcaaaaaag

SEQ ID NO: 83069 - DNA, 74 bp, Homo sapiens
taagtataaacttcattcatactggccagagaaatactgcactacccctcctcaaaaaagtgcaacttaatgct

SEQ ID NO: 83070 - DNA, 75 bp, Homo sapiens
ttcattcatactggccagagaaatactgcactacccctcctcaaaaaagtgcaacttaatgctttaggacttata

SEQ ID NO: 83071 - DNA, 72 bp, Homo sapiens
tactggccagagaaatactgcactacccctcctcaaaaaagtgcaacttaatgctttaggacttataaggct

SEQ ID NO: 83072 - DNA, 70 bp, Homo sapiens
agaaatactgcactacccctcctcaaaaaagtgcaacttaatgctttaggacttataaggcttgttataa

SEQ ID NO: 83073 - DNA, 76 bp, Homo sapiens
ctacccctcctcaaaaaagtgcaacttaatgctttaggacttataaggcttgttataatgctgcatgatgattgaa

SEQ ID NO: 83074 - DNA, 78 bp, Homo sapiens
cctcaaaaaagtgcaacttaatgctttaggacttataaggcttgttataatgctgcatgatgattgaatattggcatt

SEQ ID NO: 83075 - DNA, 80 bp, Homo sapiens
aagtgcaacttaatgctttaggacttataaggcttgttataatgctgcatgatgattgaatattggcatttttcagacga

SEQ ID NO: 83076 - DNA, 79 bp, Homo sapiens
ttaatgctttaggacttataaggcttgttataatgctgcatgatgattgaatattggcatttttcagacgaaggaggag

SEQ ID NO: 83077 - DNA, 82 bp, Homo sapiens
ttataaggcttgttataatgctgcatgatgattgaatattggcatttttcagacgaaggaggaggcagttaagtcatctaca

SEQ ID NO: 83078 - DNA, 81 bp, Homo sapiens
ttgttataatgctgcatgatgattgaatattggcatttttcagacgaaggaggaggcagttaagtcatctacattttagta

SEQ ID NO: 83079 - DNA, 74 bp, Homo sapiens
tgattgaatattggcatttttcagacgaaggaggaggcagttaagtcatctacattttagtaaacccattttga

SEQ ID NO: 83080 - DNA, 74 bp, Homo sapiens
aaaaaatcaagaaagcaacaaaatcaatcagctctgtcacactacttgcaattttctcatttgacggtttttga

SEQ ID NO: 83081 - DNA, 74 bp, Homo sapiens
gaaagcaacaaaatcaatcagctctgtcacactacttgcaattttctcatttgacggtttttgaactttacttg

SEQ ID NO: 83082 - DNA, 72 bp, Homo sapiens
caacaaaatcaatcagctctgtcacactacttgcaattttctcatttgacggtttttgaactttacttgttt

SEQ ID NO: 83083 - DNA, 69 bp, Homo sapiens
aatcagctctgtcacactacttgcaattttctcatttgacggtttttgaactttacttgttttttttgt

SEQ ID NO: 83084 - DNA, 73 bp, Homo sapiens
tttgtttttttccaaaaatctgaccatgtattcagaaacgcctcactgcacactacttcggctacacaggtag

SEQ ID NO: 83085 - DNA, 75 bp, Homo sapiens
ttccaaaaatctgaccatgtattcagaaacgcctcactgcacactacttcggctacacaggtaggtaacacttta

SEQ ID NO: 83086 - DNA, 75 bp, Homo sapiens
aaatctgaccatgtattcagaaacgcctcactgcacactacttcggctacacaggtaggtaacactttaatcatt

SEQ ID NO: 83087 - DNA, 73 bp, Homo sapiens
atgtattcagaaacgcctcactgcacactacttcggctacacaggtaggtaacactttaatcattttgttaaa

SEQ ID NO: 83088 - DNA, 74 bp, Homo sapiens
cctcactgcacactacttcggctacacaggtaggtaacactttaatcattttgttaaatcacagccactttgat

SEQ ID NO: 83089 - DNA, 74 bp, Homo sapiens
ggctacacaggtaggtaacactttaatcattttgttaaatcacagccactttgattatgttatgtttccgatga

SEQ ID NO: 83090 - DNA, 73 bp, Homo sapiens
ggtaggtaacactttaatcattttgttaaatcacagccactttgattatgttatgtttccgatgatataaaca

SEQ ID NO: 83091 - DNA, 76 bp, Homo sapiens
tttaatcattttgttaaatcacagccactttgattatgttatgtttccgatgatataaacattggaaggcacagtg

SEQ ID NO: 83092 - DNA, 76 bp, Homo sapiens
tttgttaaatcacagccactttgattatgttatgtttccgatgatataaacattggaaggcacagtggtaacattg

SEQ ID NO: 83093 - DNA, 79 bp, Homo sapiens
atcacagccactttgattatgttatgtttccgatgatataaacattggaaggcacagtggtaacattgtagcattctaa

SEQ ID NO: 83094 - DNA, 76 bp, Homo sapiens
tttgattatgttatgtttccgatgatataaacattggaaggcacagtggtaacattgtagcattctaaccttgtac

SEQ ID NO: 83095 - DNA, 75 bp, Homo sapiens
ttatgtttccgatgatataaacattggaaggcacagtggtaacattgtagcattctaaccttgtacctctgaaaa

SEQ ID NO: 83096 - DNA, 75 bp, Homo sapiens
atgatataaacattggaaggcacagtggtaacattgtagcattctaaccttgtacctctgaaaatcccagaatag

SEQ ID NO: 83097 - DNA, 74 bp, Homo sapiens
taaacattggaaggcacagtggtaacattgtagcattctaaccttgtacctctgaaaatcccagaataggttca

SEQ ID NO: 83098 - DNA, 73 bp, Homo sapiens
acagtggtaacattgtagcattctaaccttgtacctctgaaaatcccagaataggttcacaaacgcaacatta

SEQ ID NO: 83099 - DNA, 74 bp, Homo sapiens
gtaacattgtagcattctaaccttgtacctctgaaaatcccagaataggttcacaaacgcaacattacaattca

SEQ ID NO: 83100 - DNA, 71 bp, Homo sapiens
accttgtacctctgaaaatcccagaataggttcacaaacgcaacattacaattcagacaaactctttttgc

SEQ ID NO: 83101 - DNA, 77 bp, Homo sapiens
ataggttcacaaacgcaacattacaattcagacaaactctttttgccatgtcttggtaatgctgcttgtaatatcta

SEQ ID NO: 83102 - DNA, 81 bp, Homo sapiens
ttcacaaacgcaacattacaattcagacaaactctttttgccatgtcttggtaatgctgcttgtaatatctacacatgatg

SEQ ID NO: 83103 - DNA, 80 bp, Homo sapiens
caacattacaattcagacaaactctttttgccatgtcttggtaatgctgcttgtaatatctacacatgatgtgactttta

SEQ ID NO: 83104 - DNA, 77 bp, Homo sapiens
atgtcttggtaatgctgcttgtaatatctacacatgatgtgacttttaagtcctgtgttcccaaaagactggagaaa

SEQ ID NO: 83105 - DNA, 76 bp, Homo sapiens
taatgctgcttgtaatatctacacatgatgtgacttttaagtcctgtgttcccaaaagactggagaaacaactttc

SEQ ID NO: 83106 - DNA, 73 bp, Homo sapiens
acacatgatgtgacttttaagtcctgtgttcccaaaagactggagaaacaactttctacttatttatgaatga

SEQ ID NO: 83107 - DNA, 71 bp, Homo sapiens
gtgacttttaagtcctgtgttcccaaaagactggagaaacaactttctacttatttatgaatgagaagcaa

SEQ ID NO: 83108 - DNA, 77 bp, Homo sapiens
tgtgttcccaaaagactggagaaacaactttctacttatttatgaatgagaagcaacatcagggtcagcatttcatc

SEQ ID NO: 83109 - DNA, 77 bp, Homo sapiens
aaaagactggagaaacaactttctacttatttatgaatgagaagcaacatcagggtcagcatttcatcctgcactac

SEQ ID NO: 83110 - DNA, 77 bp, Homo sapiens
agaaacaactttctacttatttatgaatgagaagcaacatcagggtcagcatttcatcctgcactacccctctggaa

SEQ ID NO: 83111 - DNA, 78 bp, Homo sapiens
aactttctacttatttatgaatgagaagcaacatcagggtcagcatttcatcctgcactacccctctggaagcagagt

SEQ ID NO: 83112 - DNA, 81 bp, Homo sapiens
atttatgaatgagaagcaacatcagggtcagcatttcatcctgcactacccctctggaagcagagttggcactacaggtta

SEQ ID NO: 83113 - DNA, 78 bp, Homo sapiens
aagcaacatcagggtcagcatttcatcctgcactacccctctggaagcagagttggcactacaggttacgataacaaa

SEQ ID NO: 83114 - DNA, 77 bp, Homo sapiens
acatcagggtcagcatttcatcctgcactacccctctggaagcagagttggcactacaggttacgataacaaaccag

SEQ ID NO: 83115 - DNA, 72 bp, Homo sapiens
atttcatcctgcactacccctctggaagcagagttggcactacaggttacgataacaaaccagggaaaggga

SEQ ID NO: 83116 - DNA, 70 bp, Homo sapiens
cactacccctctggaagcagagttggcactacaggttacgataacaaaccagggaaagggacagaaataa

SEQ ID NO: 83117 - DNA, 70 bp, Homo sapiens
tctggaagcagagttggcactacaggttacgataacaaaccagggaaagggacagaaataagaccaaaaa

SEQ ID NO: 83118 - DNA, 67 bp, Homo sapiens
agcagagttggcactacaggttacgataacaaaccagggaaagggacagaaataagaccaaaaaaaa

SEQ ID NO: 83119 - DNA, 61 bp, Homo sapiens
aaaaaaaatccatatttacagtaaaatctttcttttaaaaaagttaatcagtactattttt

SEQ ID NO: 83120 - DNA, 65 bp, Homo sapiens
aatccatatttacagtaaaatctttcttttaaaaaagttaatcagtactatttttttacaggaga

SEQ ID NO: 83121 - DNA, 64 bp, Homo sapiens
cagtaaaatctttcttttaaaaaagttaatcagtactatttttttacaggagaaaaaagtctga

SEQ ID NO: 83122 - DNA, 64 bp, Homo sapiens
cttttaaaaaagttaatcagtactatttttttacaggagaaaaaagtctgaaacaaatgaacaa

SEQ ID NO: 83123 - DNA, 67 bp, Homo sapiens
agttaatcagtactatttttttacaggagaaaaaagtctgaaacaaatgaacaaaagcttaccatag

SEQ ID NO: 83124 - DNA, 69 bp, Homo sapiens
tcagtactatttttttacaggagaaaaaagtctgaaacaaatgaacaaaagcttaccatagtcactaaa

SEQ ID NO: 83125 - DNA, 67 bp, Homo sapiens
tttttacaggagaaaaaagtctgaaacaaatgaacaaaagcttaccatagtcactaaatttttaata

SEQ ID NO: 83126 - DNA, 78 bp, Homo sapiens
tttatatatatatttgtcataggtctataagatccatctgttcctcctaccctaaggaatggctaatgtcatcacttc

SEQ ID NO: 83127 - DNA, 78 bp, Homo sapiens
atatatttgtcataggtctataagatccatctgttcctcctaccctaaggaatggctaatgtcatcacttcgttgtca

SEQ ID NO: 83128 - DNA, 76 bp, Homo sapiens
ataggtctataagatccatctgttcctcctaccctaaggaatggctaatgtcatcacttcgttgtcatcaggacgt

SEQ ID NO: 83129 - DNA, 76 bp, Homo sapiens
taagatccatctgttcctcctaccctaaggaatggctaatgtcatcacttcgttgtcatcaggacgtttgctggtt

SEQ ID NO: 83130 - DNA, 74 bp, Homo sapiens
atctgttcctcctaccctaaggaatggctaatgtcatcacttcgttgtcatcaggacgtttgctggttttgtta

SEQ ID NO: 83131 - DNA, 75 bp, Homo sapiens
taccctaaggaatggctaatgtcatcacttcgttgtcatcaggacgtttgctggttttgttactagggcagccga

SEQ ID NO: 83132 - DNA, 75 bp, Homo sapiens
tggctaatgtcatcacttcgttgtcatcaggacgtttgctggttttgttactagggcagccgagcttcccctaat

SEQ ID NO: 83133 - DNA, 75 bp, Homo sapiens
atgtcatcacttcgttgtcatcaggacgtttgctggttttgttactagggcagccgagcttcccctaattcaata

SEQ ID NO: 83134 - DNA, 74 bp, Homo sapiens
ttgtcatcaggacgtttgctggttttgttactagggcagccgagcttcccctaattcaatatccagtaattata

SEQ ID NO: 83135 - DNA, 70 bp, Homo sapiens
acgtttgctggttttgttactagggcagccgagcttcccctaattcaatatccagtaattataaacacta

SEQ ID NO: 83136 - DNA, 73 bp, Homo sapiens
gttttgttactagggcagccgagcttcccctaattcaatatccagtaattataaacactagctgacttgaata

SEQ ID NO: 83137 - DNA, 73 bp, Homo sapiens
tagggcagccgagcttcccctaattcaatatccagtaattataaacactagctgacttgaataccaacaaaaa

SEQ ID NO: 83138 - DNA, 73 bp, Homo sapiens
gagcttcccctaattcaatatccagtaattataaacactagctgacttgaataccaacaaaaacgttcatgta

SEQ ID NO: 83139 - DNA, 71 bp, Homo sapiens
cctaattcaatatccagtaattataaacactagctgacttgaataccaacaaaaacgttcatgtagttttc

SEQ ID NO: 83140 - DNA, 72 bp, Homo sapiens
tccagtaattataaacactagctgacttgaataccaacaaaaacgttcatgtagttttcttcagaagtacac

SEQ ID NO: 83141 - DNA, 70 bp, Homo sapiens
cttgaataccaacaaaaacgttcatgtagttttcttcagaagtacactttttcattattgcaagtttaca

SEQ ID NO: 83142 - DNA, 66 bp, Homo sapiens
aacaaaaacgttcatgtagttttcttcagaagtacactttttcattattgcaagtttacaattttt

SEQ ID NO: 83143 - DNA, 71 bp, Homo sapiens
tttttttttccaaaagaagtttaggcacaaatgcattgttccacagtgtggaaagattgccgttcagtctc

SEQ ID NO: 83144 - DNA, 74 bp, Homo sapiens
tttttccaaaagaagtttaggcacaaatgcattgttccacagtgtggaaagattgccgttcagtctctgggctg

SEQ ID NO: 83145 - DNA, 75 bp, Homo sapiens
ttttccaaaagaagtttaggcacaaatgcattgttccacagtgtggaaagattgccgttcagtctctgggctgtg

SEQ ID NO: 83146 - DNA, 77 bp, Homo sapiens
aaaagaagtttaggcacaaatgcattgttccacagtgtggaaagattgccgttcagtctctgggctgtgtctcagcc

SEQ ID NO: 83147 - DNA, 80 bp, Homo sapiens
aagtttaggcacaaatgcattgttccacagtgtggaaagattgccgttcagtctctgggctgtgtctcagcctgtacata

SEQ ID NO: 83148 - DNA, 82 bp, Homo sapiens
ttaggcacaaatgcattgttccacagtgtggaaagattgccgttcagtctctgggctgtgtctcagcctgtacatactgctt

SEQ ID NO: 83149 - DNA, 83 bp, Homo sapiens
acaaatgcattgttccacagtgtggaaagattgccgttcagtctctgggctgtgtctcagcctgtacatactgctttgcacat

SEQ ID NO: 83150 - DNA, 85 bp, Homo sapiens
ttgttccacagtgtggaaagattgccgttcagtctctgggctgtgtctcagcctgtacatactgctttgcacattctgaatgata

SEQ ID NO: 83151 - DNA, 85 bp, Homo sapiens
ccacagtgtggaaagattgccgttcagtctctgggctgtgtctcagcctgtacatactgctttgcacattctgaatgatatgtta

SEQ ID NO: 83152 - DNA, 83 bp, Homo sapiens
agtgtggaaagattgccgttcagtctctgggctgtgtctcagcctgtacatactgctttgcacattctgaatgatatgttaaa

SEQ ID NO: 83153 - DNA, 83 bp, Homo sapiens
tggaaagattgccgttcagtctctgggctgtgtctcagcctgtacatactgctttgcacattctgaatgatatgttaaagaaa

SEQ ID NO: 83154 - DNA, 81 bp, Homo sapiens
aaagattgccgttcagtctctgggctgtgtctcagcctgtacatactgctttgcacattctgaatgatatgttaaagaaag

SEQ ID NO: 83155 - DNA, 80 bp, Homo sapiens
agtctctgggctgtgtctcagcctgtacatactgctttgcacattctgaatgatatgttaaagaaagtcgtccctcaagt

SEQ ID NO: 83156 - DNA, 79 bp, Homo sapiens
ctgtgtctcagcctgtacatactgctttgcacattctgaatgatatgttaaagaaagtcgtccctcaagttgcactttt

SEQ ID NO: 83157 - DNA, 75 bp, Homo sapiens
agcctgtacatactgctttgcacattctgaatgatatgttaaagaaagtcgtccctcaagttgcacttttttctt

SEQ ID NO: 83158 - DNA, 73 bp, Homo sapiens
ttttgtttttctgttttttgataattgggaatgctgaaacctcttgcgtctgcgattcataactactcagact

SEQ ID NO: 83159 - DNA, 77 bp, Homo sapiens
ctgttttttgataattgggaatgctgaaacctcttgcgtctgcgattcataactactcagacttgtcttatattaca

SEQ ID NO: 83160 - DNA, 76 bp, Homo sapiens
ttttgataattgggaatgctgaaacctcttgcgtctgcgattcataactactcagacttgtcttatattacaaaaa

SEQ ID NO: 83161 - DNA, 73 bp, Homo sapiens
aatgctgaaacctcttgcgtctgcgattcataactactcagacttgtcttatattacaaaaatgggggttaag

SEQ ID NO: 83162 - DNA, 71 bp, Homo sapiens
aaacctcttgcgtctgcgattcataactactcagacttgtcttatattacaaaaatgggggttaaggagaa

SEQ ID NO: 83163 - DNA, 71 bp, Homo sapiens
tgcgattcataactactcagacttgtcttatattacaaaaatgggggttaaggagaagtgtttatgtgggt

SEQ ID NO: 83164 - DNA, 69 bp, Homo sapiens
ttcataactactcagacttgtcttatattacaaaaatgggggttaaggagaagtgtttatgtgggttta

SEQ ID NO: 83165 - DNA, 69 bp, Homo sapiens
gacttgtcttatattacaaaaatgggggttaaggagaagtgtttatgtgggtttaagataatacagctg

SEQ ID NO: 83166 - DNA, 66 bp, Homo sapiens
aaaaatgggggttaaggagaagtgtttatgtgggtttaagataatacagctgttaaggaagtggtc

SEQ ID NO: 83167 - DNA, 68 bp, Homo sapiens
ggttaaggagaagtgtttatgtgggtttaagataatacagctgttaaggaagtggtctcttgttttaa

SEQ ID NO: 83168 - DNA, 73 bp, Homo sapiens
tttatgtgggtttaagataatacagctgttaaggaagtggtctcttgttttaatgaagcaatgtggcaacttg

SEQ ID NO: 83169 - DNA, 74 bp, Homo sapiens
tttaagataatacagctgttaaggaagtggtctcttgttttaatgaagcaatgtggcaacttggacctgagaaa

SEQ ID NO: 83170 - DNA, 73 bp, Homo sapiens
ataatacagctgttaaggaagtggtctcttgttttaatgaagcaatgtggcaacttggacctgagaaaggaaa

SEQ ID NO: 83171 - DNA, 71 bp, Homo sapiens
ctgttaaggaagtggtctcttgttttaatgaagcaatgtggcaacttggacctgagaaaggaaaaaagaga

SEQ ID NO: 83172 - DNA, 80 bp, Homo sapiens
atgagagttttgaatgatcgatctcagaaatggctgaaaacaaacttgcccttttacatctgtcccatgtgattcgatgc

SEQ ID NO: 83173 - DNA, 80 bp, Homo sapiens
tttgaatgatcgatctcagaaatggctgaaaacaaacttgcccttttacatctgtcccatgtgattcgatgcgtctccca

SEQ ID NO: 83174 - DNA, 76 bp, Homo sapiens
atctcagaaatggctgaaaacaaacttgcccttttacatctgtcccatgtgattcgatgcgtctcccattccaggg

SEQ ID NO: 83175 - DNA, 75 bp, Homo sapiens
aatggctgaaaacaaacttgcccttttacatctgtcccatgtgattcgatgcgtctcccattccagggtgtgggc

SEQ ID NO: 83176 - DNA, 74 bp, Homo sapiens
aaacttgcccttttacatctgtcccatgtgattcgatgcgtctcccattccagggtgtgggccggccaaggaga

SEQ ID NO: 83177 - DNA, 73 bp, Homo sapiens
cccttttacatctgtcccatgtgattcgatgcgtctcccattccagggtgtgggccggccaaggagagagggg

SEQ ID NO: 83178 - DNA, 78 bp, Homo sapiens
tctgtcccatgtgattcgatgcgtctcccattccagggtgtgggccggccaaggagagagggggaggctctgaggaca

SEQ ID NO: 83179 - DNA, 75 bp, Homo sapiens
tgattcgatgcgtctcccattccagggtgtgggccggccaaggagagagggggaggctctgaggacaccttctct

SEQ ID NO: 83180 - DNA, 71 bp, Homo sapiens
cgtctcccattccagggtgtgggccggccaaggagagagggggaggctctgaggacaccttctcttcctcc

SEQ ID NO: 83181 - DNA, 69 bp, Homo sapiens
ttccagggtgtgggccggccaaggagagagggggaggctctgaggacaccttctcttcctcccttcttt

SEQ ID NO: 83182 - DNA, 72 bp, Homo sapiens
cggccaaggagagagggggaggctctgaggacaccttctcttcctcccttcttttcagacacgcagctttcg

SEQ ID NO: 83183 - DNA, 74 bp, Homo sapiens
agagagggggaggctctgaggacaccttctcttcctcccttcttttcagacacgcagctttcggattcagattc

SEQ ID NO: 83184 - DNA, 75 bp, Homo sapiens
aggctctgaggacaccttctcttcctcccttcttttcagacacgcagctttcggattcagattcctttctgtgga

SEQ ID NO: 83185 - DNA, 72 bp, Homo sapiens
acaccttctcttcctcccttcttttcagacacgcagctttcggattcagattcctttctgtggaggattaaa

SEQ ID NO: 83186 - DNA, 73 bp, Homo sapiens
ttcctcccttcttttcagacacgcagctttcggattcagattcctttctgtggaggattaaagcacagaacct

SEQ ID NO: 83187 - DNA, 73 bp, Homo sapiens
ttcttttcagacacgcagctttcggattcagattcctttctgtggaggattaaagcacagaacctttgtttaa

SEQ ID NO: 83188 - DNA, 84 bp, Homo sapiens
ccacaagctcctcacgagctctgcaaggaggctggcctgcactgacctcggacttgctgctccagactgaggatgacggccacc

SEQ ID NO: 83189 - DNA, 84 bp, Homo sapiens
agctcctcacgagctctgcaaggaggctggcctgcactgacctcggacttgctgctccagactgaggatgacggccaccgcctg

SEQ ID NO: 83190 - DNA, 84 bp, Homo sapiens
tctgcaaggaggctggcctgcactgacctcggacttgctgctccagactgaggatgacggccaccgcctggtggaggatcagga

SEQ ID NO: 83191 - DNA, 83 bp, Homo sapiens
gctggcctgcactgacctcggacttgctgctccagactgaggatgacggccaccgcctggtggaggatcaggagcttggtctg

SEQ ID NO: 83192 - DNA, 80 bp, Homo sapiens
cctgcactgacctcggacttgctgctccagactgaggatgacggccaccgcctggtggaggatcaggagcttggtctggg

SEQ ID NO: 83193 - DNA, 81 bp, Homo sapiens
ggacttgctgctccagactgaggatgacggccaccgcctggtggaggatcaggagcttggtctggggcttgtcactcttga

SEQ ID NO: 83194 - DNA, 80 bp, Homo sapiens
ctgctccagactgaggatgacggccaccgcctggtggaggatcaggagcttggtctggggcttgtcactcttgaggtgga

SEQ ID NO: 83195 - DNA, 80 bp, Homo sapiens
actgaggatgacggccaccgcctggtggaggatcaggagcttggtctggggcttgtcactcttgaggtggagctgcacca

SEQ ID NO: 83196 - DNA, 80 bp, Homo sapiens
caccgcctggtggaggatcaggagcttggtctggggcttgtcactcttgaggtggagctgcaccatgcggccgagctctt

SEQ ID NO: 83197 - DNA, 80 bp, Homo sapiens
cctggtggaggatcaggagcttggtctggggcttgtcactcttgaggtggagctgcaccatgcggccgagctctttgaaa

SEQ ID NO: 83198 - DNA, 81 bp, Homo sapiens
aggagcttggtctggggcttgtcactcttgaggtggagctgcaccatgcggccgagctctttgaaagcctcgttgatgtca

SEQ ID NO: 83199 - DNA, 80 bp, Homo sapiens
ttggtctggggcttgtcactcttgaggtggagctgcaccatgcggccgagctctttgaaagcctcgttgatgtcacggac

SEQ ID NO: 83200 - DNA, 82 bp, Homo sapiens
ttgtcactcttgaggtggagctgcaccatgcggccgagctctttgaaagcctcgttgatgtcacggacccgcagacgctctc

SEQ ID NO: 83201 - DNA, 79 bp, Homo sapiens
aggtggagctgcaccatgcggccgagctctttgaaagcctcgttgatgtcacggacccgcagacgctctcgggcattgt

SEQ ID NO: 83202 - DNA, 79 bp, Homo sapiens
caccatgcggccgagctctttgaaagcctcgttgatgtcacggacccgcagacgctctcgggcattgttggccatcctc

SEQ ID NO: 83203 - DNA, 76 bp, Homo sapiens
ccgagctctttgaaagcctcgttgatgtcacggacccgcagacgctctcgggcattgttggccatcctccgctcct

SEQ ID NO: 83204 - DNA, 77 bp, Homo sapiens
ctctttgaaagcctcgttgatgtcacggacccgcagacgctctcgggcattgttggccatcctccgctccttctcac

SEQ ID NO: 83205 - DNA, 80 bp, Homo sapiens
cctcgttgatgtcacggacccgcagacgctctcgggcattgttggccatcctccgctccttctcacgctctgccttctgc

SEQ ID NO: 83206 - DNA, 82 bp, Homo sapiens
tgtcacggacccgcagacgctctcgggcattgttggccatcctccgctccttctcacgctctgccttctgctctggtgtcag

SEQ ID NO: 83207 - DNA, 83 bp, Homo sapiens
gacgctctcgggcattgttggccatcctccgctccttctcacgctctgccttctgctctggtgtcaggtcctcatcgtcatta

SEQ ID NO: 83208 - DNA, 84 bp, Homo sapiens
tctcgggcattgttggccatcctccgctccttctcacgctctgccttctgctctggtgtcaggtcctcatcgtcattattgctg

SEQ ID NO: 83209 - DNA, 82 bp, Homo sapiens
ttggccatcctccgctccttctcacgctctgccttctgctctggtgtcaggtcctcatcgtcattattgctgtgggacaaaa

SEQ ID NO: 83210 - DNA, 82 bp, Homo sapiens
gctccttctcacgctctgccttctgctctggtgtcaggtcctcatcgtcattattgctgtgggacaaaagggatgcaacatt

SEQ ID NO: 83211 - DNA, 82 bp, Homo sapiens
ttctcacgctctgccttctgctctggtgtcaggtcctcatcgtcattattgctgtgggacaaaagggatgcaacattttcta

SEQ ID NO: 83212 - DNA, 73 bp, Homo sapiens
caaagtccaataaaggaattaaatgaagcgacagtattatatactgttacctagatcttgacctagtaattga

SEQ ID NO: 83213 - DNA, 75 bp, Homo sapiens
ggaattaaatgaagcgacagtattatatactgttacctagatcttgacctagtaattgatttgatatccttcttg

SEQ ID NO: 83214 - DNA, 78 bp, Homo sapiens
atgaagcgacagtattatatactgttacctagatcttgacctagtaattgatttgatatccttcttgtcgtcatctaa

SEQ ID NO: 83215 - DNA, 76 bp, Homo sapiens
tattatatactgttacctagatcttgacctagtaattgatttgatatccttcttgtcgtcatctaatttcttgtcc

SEQ ID NO: 83216 - DNA, 76 bp, Homo sapiens
tatactgttacctagatcttgacctagtaattgatttgatatccttcttgtcgtcatctaatttcttgtcctccga

SEQ ID NO: 83217 - DNA, 74 bp, Homo sapiens
atcttgacctagtaattgatttgatatccttcttgtcgtcatctaatttcttgtcctccgaagatttcgtgtct

SEQ ID NO: 83218 - DNA, 77 bp, Homo sapiens
tagtaattgatttgatatccttcttgtcgtcatctaatttcttgtcctccgaagatttcgtgtcttgcaggttctca

SEQ ID NO: 83219 - DNA, 76 bp, Homo sapiens
atttgatatccttcttgtcgtcatctaatttcttgtcctccgaagatttcgtgtcttgcaggttctcatcaccctc

SEQ ID NO: 83220 - DNA, 76 bp, Homo sapiens
ttcttgtcgtcatctaatttcttgtcctccgaagatttcgtgtcttgcaggttctcatcaccctcgtcatcggatt

SEQ ID NO: 83221 - DNA, 80 bp, Homo sapiens
tcgtcatctaatttcttgtcctccgaagatttcgtgtcttgcaggttctcatcaccctcgtcatcggatttgatctcaga

SEQ ID NO: 83222 - DNA, 80 bp, Homo sapiens
atttcttgtcctccgaagatttcgtgtcttgcaggttctcatcaccctcgtcatcggatttgatctcagagctgccagag

SEQ ID NO: 83223 - DNA, 83 bp, Homo sapiens
ctccgaagatttcgtgtcttgcaggttctcatcaccctcgtcatcggatttgatctcagagctgccagaggagacactctgcc

SEQ ID NO: 83224 - DNA, 83 bp, Homo sapiens
ttcgtgtcttgcaggttctcatcaccctcgtcatcggatttgatctcagagctgccagaggagacactctgcccctgtagtcc

SEQ ID NO: 83225 - DNA, 83 bp, Homo sapiens
aggttctcatcaccctcgtcatcggatttgatctcagagctgccagaggagacactctgcccctgtagtcctggtggcatgcc

SEQ ID NO: 83226 - DNA, 82 bp, Homo sapiens
cctcgtcatcggatttgatctcagagctgccagaggagacactctgcccctgtagtcctggtggcatgcctgccgaaaaaga

SEQ ID NO: 83227 - DNA, 82 bp, Homo sapiens
atcggatttgatctcagagctgccagaggagacactctgcccctgtagtcctggtggcatgcctgccgaaaaagagaaatca

SEQ ID NO: 83228 - DNA, 83 bp, Homo sapiens
atctcagagctgccagaggagacactctgcccctgtagtcctggtggcatgcctgccgaaaaagagaaatcaggtgacatgta

SEQ ID NO: 83229 - DNA, 72 bp, Homo sapiens
tggtcctattgtgaaagtgaggtcagaagtgccctggtgaggccaacctacctctgtaagggtcctggggtg

SEQ ID NO: 83230 - DNA, 70 bp, Homo sapiens
aaagtgaggtcagaagtgccctggtgaggccaacctacctctgtaagggtcctggggtgggttcaggtca

SEQ ID NO: 83231 - DNA, 68 bp, Homo sapiens
agaagtgccctggtgaggccaacctacctctgtaagggtcctggggtgggttcaggtcaggggaagtc

SEQ ID NO: 83232 - DNA, 71 bp, Homo sapiens
tggtgaggccaacctacctctgtaagggtcctggggtgggttcaggtcaggggaagtcgcagactggacag

SEQ ID NO: 83233 - DNA, 70 bp, Homo sapiens
aacctacctctgtaagggtcctggggtgggttcaggtcaggggaagtcgcagactggacaggaagctgtg

SEQ ID NO: 83234 - DNA, 71 bp, Homo sapiens
tctgtaagggtcctggggtgggttcaggtcaggggaagtcgcagactggacaggaagctgtggaaccggaa

SEQ ID NO: 83235 - DNA, 72 bp, Homo sapiens
tggggtgggttcaggtcaggggaagtcgcagactggacaggaagctgtggaaccggaacctggtttggcaga

SEQ ID NO: 83236 - DNA, 73 bp, Homo sapiens
tgggttcaggtcaggggaagtcgcagactggacaggaagctgtggaaccggaacctggtttggcagaagagaa

SEQ ID NO: 83237 - DNA, 77 bp, Homo sapiens
ggaagtcgcagactggacaggaagctgtggaaccggaacctggtttggcagaagagaatggctgcctctcagggcca

SEQ ID NO: 83238 - DNA, 76 bp, Homo sapiens
agactggacaggaagctgtggaaccggaacctggtttggcagaagagaatggctgcctctcagggccacgccatct

SEQ ID NO: 83239 - DNA, 77 bp, Homo sapiens
acaggaagctgtggaaccggaacctggtttggcagaagagaatggctgcctctcagggccacgccatcttcacgatg

SEQ ID NO: 83240 - DNA, 76 bp, Homo sapiens
tgtggaaccggaacctggtttggcagaagagaatggctgcctctcagggccacgccatcttcacgatgggtcccca

SEQ ID NO: 83241 - DNA, 74 bp, Homo sapiens
aacctggtttggcagaagagaatggctgcctctcagggccacgccatcttcacgatgggtccccacctgaaagg

SEQ ID NO: 83242 - DNA, 76 bp, Homo sapiens
agaagagaatggctgcctctcagggccacgccatcttcacgatgggtccccacctgaaagggcgagaggaaccaga

SEQ ID NO: 83243 - DNA, 76 bp, Homo sapiens
aatggctgcctctcagggccacgccatcttcacgatgggtccccacctgaaagggcgagaggaaccagagaggtga

SEQ ID NO: 83244 - DNA, 80 bp, Homo sapiens
ttctaactctatatgataactatagagtctataaatttcatcacttaccatgagtgaatgtctgttggctgaaagaaggc

SEQ ID NO: 83245 - DNA, 79 bp, Homo sapiens
tatgataactatagagtctataaatttcatcacttaccatgagtgaatgtctgttggctgaaagaaggccggttccata

SEQ ID NO: 83246 - DNA, 75 bp, Homo sapiens
aactatagagtctataaatttcatcacttaccatgagtgaatgtctgttggctgaaagaaggccggttccatacc

SEQ ID NO: 83247 - DNA, 77 bp, Homo sapiens
tataaatttcatcacttaccatgagtgaatgtctgttggctgaaagaaggccggttccataccctgagcccagacca

SEQ ID NO: 83248 - DNA, 77 bp, Homo sapiens
atcacttaccatgagtgaatgtctgttggctgaaagaaggccggttccataccctgagcccagaccacccatggctc

SEQ ID NO: 83249 - DNA, 78 bp, Homo sapiens
atgagtgaatgtctgttggctgaaagaaggccggttccataccctgagcccagaccacccatggctccattatgagaa

SEQ ID NO: 83250 - DNA, 76 bp, Homo sapiens
tgttggctgaaagaaggccggttccataccctgagcccagaccacccatggctccattatgagaaggtccaatgat

SEQ ID NO: 83251 - DNA, 77 bp, Homo sapiens
aaagaaggccggttccataccctgagcccagaccacccatggctccattatgagaaggtccaatgattccatgcatg

SEQ ID NO: 83252 - DNA, 80 bp, Homo sapiens
cggttccataccctgagcccagaccacccatggctccattatgagaaggtccaatgattccatgcatgtccccatgacca

SEQ ID NO: 83253 - DNA, 82 bp, Homo sapiens
ataccctgagcccagaccacccatggctccattatgagaaggtccaatgattccatgcatgtccccatgaccaccaggcata

SEQ ID NO: 83254 - DNA, 83 bp, Homo sapiens
agaccacccatggctccattatgagaaggtccaatgattccatgcatgtccccatgaccaccaggcatagctgtggatgggcc

SEQ ID NO: 83255 - DNA, 85 bp, Homo sapiens
atggctccattatgagaaggtccaatgattccatgcatgtccccatgaccaccaggcatagctgtggatgggcccactgcatggt

SEQ ID NO: 83256 - DNA, 83 bp, Homo sapiens
attatgagaaggtccaatgattccatgcatgtccccatgaccaccaggcatagctgtggatgggcccactgcatggttccgga

SEQ ID NO: 83257 - DNA, 87 bp, Homo sapiens
aatgattccatgcatgtccccatgaccaccaggcatagctgtggatgggcccactgcatggttccggagaacatgaatagcatcatc

SEQ ID NO: 83258 - DNA, 85 bp, Homo sapiens
atgcatgtccccatgaccaccaggcatagctgtggatgggcccactgcatggttccggagaacatgaatagcatcatccagtctt

SEQ ID NO: 83259 - DNA, 83 bp, Homo sapiens
catgaccaccaggcatagctgtggatgggcccactgcatggttccggagaacatgaatagcatcatccagtctttctaaacga

SEQ ID NO: 83260 - DNA, 81 bp, Homo sapiens
aggcatagctgtggatgggcccactgcatggttccggagaacatgaatagcatcatccagtctttctaaacgatcttcaat

SEQ ID NO: 83261 - DNA, 79 bp, Homo sapiens
tgtggatgggcccactgcatggttccggagaacatgaatagcatcatccagtctttctaaacgatcttcaattcggctt

SEQ ID NO: 83262 - DNA, 78 bp, Homo sapiens
ccactgcatggttccggagaacatgaatagcatcatccagtctttctaaacgatcttcaattcggctttgctgttggt

SEQ ID NO: 83263 - DNA, 75 bp, Homo sapiens
gttccggagaacatgaatagcatcatccagtctttctaaacgatcttcaattcggctttgctgttggttaacaaa

SEQ ID NO: 83264 - DNA, 76 bp, Homo sapiens
aacatgaatagcatcatccagtctttctaaacgatcttcaattcggctttgctgttggttaacaaatgatgtaaaa

SEQ ID NO: 83265 - DNA, 75 bp, Homo sapiens
aatagcatcatccagtctttctaaacgatcttcaattcggctttgctgttggttaacaaatgatgtaaaatttga

SEQ ID NO: 83266 - DNA, 73 bp, Homo sapiens
aacaagaaagaacatgacctgaaaatgggtgggacagagattagcaaatgagacataccaaagagtgtaaggg

SEQ ID NO: 83267 - DNA, 74 bp, Homo sapiens
aacatgacctgaaaatgggtgggacagagattagcaaatgagacataccaaagagtgtaagggtccttcataat

SEQ ID NO: 83268 - DNA, 73 bp, Homo sapiens
acctgaaaatgggtgggacagagattagcaaatgagacataccaaagagtgtaagggtccttcataattagga

SEQ ID NO: 83269 - DNA, 77 bp, Homo sapiens
tgggacagagattagcaaatgagacataccaaagagtgtaagggtccttcataattaggagacgatgaggcctgtcc

SEQ ID NO: 83270 - DNA, 75 bp, Homo sapiens
agattagcaaatgagacataccaaagagtgtaagggtccttcataattaggagacgatgaggcctgtcctccatt

SEQ ID NO: 83271 - DNA, 74 bp, Homo sapiens
aaatgagacataccaaagagtgtaagggtccttcataattaggagacgatgaggcctgtcctccatttctagac

SEQ ID NO: 83272 - DNA, 74 bp, Homo sapiens
taccaaagagtgtaagggtccttcataattaggagacgatgaggcctgtcctccatttctagaccaaacagctg

SEQ ID NO: 83273 - DNA, 78 bp, Homo sapiens
taagggtccttcataattaggagacgatgaggcctgtcctccatttctagaccaaacagctgtgcctgctgatattaa

SEQ ID NO: 83274 - DNA, 77 bp, Homo sapiens
ataattaggagacgatgaggcctgtcctccatttctagaccaaacagctgtgcctgctgatattaaagtgggaatta

SEQ ID NO: 83275 - DNA, 80 bp, Homo sapiens
agacgatgaggcctgtcctccatttctagaccaaacagctgtgcctgctgatattaaagtgggaattacaatcagatcta

SEQ ID NO: 83276 - DNA, 80 bp, Homo sapiens
ctgtcctccatttctagaccaaacagctgtgcctgctgatattaaagtgggaattacaatcagatctagacacatgtaaa

SEQ ID NO: 83277 - DNA, 79 bp, Homo sapiens
ctccatttctagaccaaacagctgtgcctgctgatattaaagtgggaattacaatcagatctagacacatgtaaaaaga

SEQ ID NO: 83278 - DNA, 76 bp, Homo sapiens
tacaaggggggaatcattcttataaactgttatatgatgaaatgggatttgaaatacactacctgagagagatgga

SEQ ID NO: 83279 - DNA, 78 bp, Homo sapiens
aatcattcttataaactgttatatgatgaaatgggatttgaaatacactacctgagagagatggaggagagccaacag

SEQ ID NO: 83280 - DNA, 78 bp, Homo sapiens
tataaactgttatatgatgaaatgggatttgaaatacactacctgagagagatggaggagagccaacaggagttgaag

SEQ ID NO: 83281 - DNA, 79 bp, Homo sapiens
tatatgatgaaatgggatttgaaatacactacctgagagagatggaggagagccaacaggagttgaagggtttgatgaa

SEQ ID NO: 83282 - DNA, 76 bp, Homo sapiens
gatttgaaatacactacctgagagagatggaggagagccaacaggagttgaagggtttgatgaaaagctgttgtta

SEQ ID NO: 83283 - DNA, 76 bp, Homo sapiens
aaatacactacctgagagagatggaggagagccaacaggagttgaagggtttgatgaaaagctgttgttagtgtga

SEQ ID NO: 83284 - DNA, 78 bp, Homo sapiens
agagagatggaggagagccaacaggagttgaagggtttgatgaaaagctgttgttagtgtgatctggagaatagatct

SEQ ID NO: 83285 - DNA, 75 bp, Homo sapiens
aggagagccaacaggagttgaagggtttgatgaaaagctgttgttagtgtgatctggagaatagatcttaaaaca

SEQ ID NO: 83286 - DNA, 73 bp, Homo sapiens
aacaggagttgaagggtttgatgaaaagctgttgttagtgtgatctggagaatagatcttaaaacaataagga

SEQ ID NO: 83287 - DNA, 72 bp, Homo sapiens
agttgaagggtttgatgaaaagctgttgttagtgtgatctggagaatagatcttaaaacaataaggagaaaa

SEQ ID NO: 83288 - DNA, 71 bp, Homo sapiens
tttgatgaaaagctgttgttagtgtgatctggagaatagatcttaaaacaataaggagaaaaaaaaaacac

SEQ ID NO: 83289 - DNA, 72 bp, Homo sapiens
acttctgattaaagttcaccctttacaatggtacatatggagtccaaagtcaatatttcctcaccgaagcaa

SEQ ID NO: 83290 - DNA, 71 bp, Homo sapiens
attaaagttcaccctttacaatggtacatatggagtccaaagtcaatatttcctcaccgaagcaagtgctt

SEQ ID NO: 83291 - DNA, 74 bp, Homo sapiens
accctttacaatggtacatatggagtccaaagtcaatatttcctcaccgaagcaagtgctttccccagagcatc

SEQ ID NO: 83292 - DNA, 78 bp, Homo sapiens
atggtacatatggagtccaaagtcaatatttcctcaccgaagcaagtgctttccccagagcatctccagtctgggagc

SEQ ID NO: 83293 - DNA, 77 bp, Homo sapiens
agtccaaagtcaatatttcctcaccgaagcaagtgctttccccagagcatctccagtctgggagctgccggctgccc

SEQ ID NO: 83294 - DNA, 77 bp, Homo sapiens
aatatttcctcaccgaagcaagtgctttccccagagcatctccagtctgggagctgccggctgccccgcttcctcta

SEQ ID NO: 83295 - DNA, 78 bp, Homo sapiens
accgaagcaagtgctttccccagagcatctccagtctgggagctgccggctgccccgcttcctctatttgctgcaaaa

SEQ ID NO: 83296 - DNA, 76 bp, Homo sapiens
aagtgctttccccagagcatctccagtctgggagctgccggctgccccgcttcctctatttgctgcaaaaacaaaa

SEQ ID NO: 83297 - DNA, 79 bp, Homo sapiens
cagagcatctccagtctgggagctgccggctgccccgcttcctctatttgctgcaaaaacaaaaggcagaatatgaaaa

SEQ ID NO: 83298 - DNA, 76 bp, Homo sapiens
atctccagtctgggagctgccggctgccccgcttcctctatttgctgcaaaaacaaaaggcagaatatgaaaacca

SEQ ID NO: 83299 - DNA, 76 bp, Homo sapiens
agctgccggctgccccgcttcctctatttgctgcaaaaacaaaaggcagaatatgaaaaccaggcagtgagacgtc

SEQ ID NO: 83300 - DNA, 74 bp, Homo sapiens
tttttttttgcattgagaagtgggccatgtttagcaagatacattaaagctgaaaatgtgggtttgatgtaaca

SEQ ID NO: 83301 - DNA, 78 bp, Homo sapiens
ttgcattgagaagtgggccatgtttagcaagatacattaaagctgaaaatgtgggtttgatgtaacaggacttgatta

SEQ ID NO: 83302 - DNA, 73 bp, Homo sapiens
aagtgggccatgtttagcaagatacattaaagctgaaaatgtgggtttgatgtaacaggacttgattactctt

SEQ ID NO: 83303 - DNA, 74 bp, Homo sapiens
tttagcaagatacattaaagctgaaaatgtgggtttgatgtaacaggacttgattactctttgaggcccaagat

SEQ ID NO: 83304 - DNA, 71 bp, Homo sapiens
aagatacattaaagctgaaaatgtgggtttgatgtaacaggacttgattactctttgaggcccaagatttt

SEQ ID NO: 83305 - DNA, 75 bp, Homo sapiens
tgaaaatgtgggtttgatgtaacaggacttgattactctttgaggcccaagatttttgtcaattcatattagaga

SEQ ID NO: 83306 - DNA, 76 bp, Homo sapiens
tgggtttgatgtaacaggacttgattactctttgaggcccaagatttttgtcaattcatattagagatgatcaaaa

SEQ ID NO: 83307 - DNA, 78 bp, Homo sapiens
atgtaacaggacttgattactctttgaggcccaagatttttgtcaattcatattagagatgatcaaaatgtccatgta

SEQ ID NO: 83308 - DNA, 78 bp, Homo sapiens
gacttgattactctttgaggcccaagatttttgtcaattcatattagagatgatcaaaatgtccatgtaacagaaaga

SEQ ID NO: 83309 - DNA, 77 bp, Homo sapiens
ctctttgaggcccaagatttttgtcaattcatattagagatgatcaaaatgtccatgtaacagaaagatgaaaacta

SEQ ID NO: 83310 - DNA, 78 bp, Homo sapiens
cccaagatttttgtcaattcatattagagatgatcaaaatgtccatgtaacagaaagatgaaaactaatgcatttgct

SEQ ID NO: 83311 - DNA, 79 bp, Homo sapiens
tgtcaattcatattagagatgatcaaaatgtccatgtaacagaaagatgaaaactaatgcatttgcttggtaaagactt

SEQ ID NO: 83312 - DNA, 77 bp, Homo sapiens
agagatgatcaaaatgtccatgtaacagaaagatgaaaactaatgcatttgcttggtaaagactttatcgatttcta

SEQ ID NO: 83313 - DNA, 74 bp, Homo sapiens
gatcaaaatgtccatgtaacagaaagatgaaaactaatgcatttgcttggtaaagactttatcgatttctaatt

SEQ ID NO: 83314 - DNA, 74 bp, Homo sapiens
gtccatgtaacagaaagatgaaaactaatgcatttgcttggtaaagactttatcgatttctaattttggctcta

SEQ ID NO: 83315 - DNA, 74 bp, Homo sapiens
agatgaaaactaatgcatttgcttggtaaagactttatcgatttctaattttggctctaatcaatttatcttgc

SEQ ID NO: 83316 - DNA, 74 bp, Homo sapiens
actaatgcatttgcttggtaaagactttatcgatttctaattttggctctaatcaatttatcttgcccaagaga

SEQ ID NO: 83317 - DNA, 73 bp, Homo sapiens
gcttggtaaagactttatcgatttctaattttggctctaatcaatttatcttgcccaagagaaatataatcag

SEQ ID NO: 83318 - DNA, 72 bp, Homo sapiens
gtaaagactttatcgatttctaattttggctctaatcaatttatcttgcccaagagaaatataatcagtccc

SEQ ID NO: 83319 - DNA, 75 bp, Homo sapiens
gatttctaattttggctctaatcaatttatcttgcccaagagaaatataatcagtccctaagtagagctgtaaca

SEQ ID NO: 83320 - DNA, 74 bp, Homo sapiens
aattttggctctaatcaatttatcttgcccaagagaaatataatcagtccctaagtagagctgtaacatacaaa

SEQ ID NO: 83321 - DNA, 80 bp, Homo sapiens
atcaatttatcttgcccaagagaaatataatcagtccctaagtagagctgtaacatacaaatatgaatggaagatgagca

SEQ ID NO: 83322 - DNA, 76 bp, Homo sapiens
tcagtccctaagtagagctgtaacatacaaatatgaatggaagatgagcagttattaagaggaactgtaatttttg

SEQ ID NO: 83323 - DNA, 76 bp, Homo sapiens
taagtagagctgtaacatacaaatatgaatggaagatgagcagttattaagaggaactgtaatttttgtaggaggc

SEQ ID NO: 83324 - DNA, 75 bp, Homo sapiens
aacatacaaatatgaatggaagatgagcagttattaagaggaactgtaatttttgtaggaggcttcgacactgcc

SEQ ID NO: 83325 - DNA, 75 bp, Homo sapiens
aaatatgaatggaagatgagcagttattaagaggaactgtaatttttgtaggaggcttcgacactgcctgccacc

SEQ ID NO: 83326 - DNA, 73 bp, Homo sapiens
aagatgagcagttattaagaggaactgtaatttttgtaggaggcttcgacactgcctgccacccaagtattgt

SEQ ID NO: 83327 - DNA, 75 bp, Homo sapiens
ttattaagaggaactgtaatttttgtaggaggcttcgacactgcctgccacccaagtattgttcagatggcttga

SEQ ID NO: 83328 - DNA, 75 bp, Homo sapiens
aagaggaactgtaatttttgtaggaggcttcgacactgcctgccacccaagtattgttcagatggcttgaacaca

SEQ ID NO: 83329 - DNA, 81 bp, Homo sapiens
taggaggcttcgacactgcctgccacccaagtattgttcagatggcttgaacacaggtggtgttgctggctagaagatgaa

SEQ ID NO: 83330 - DNA, 80 bp, Homo sapiens
acactgcctgccacccaagtattgttcagatggcttgaacacaggtggtgttgctggctagaagatgaagcagaaagaaa

SEQ ID NO: 83331 - DNA, 75 bp, Homo sapiens
acccaagtattgttcagatggcttgaacacaggtggtgttgctggctagaagatgaagcagaaagaaaggttttg

SEQ ID NO: 83332 - DNA, 77 bp, Homo sapiens
tattgttcagatggcttgaacacaggtggtgttgctggctagaagatgaagcagaaagaaaggttttgtatcttggg

SEQ ID NO: 83333 - DNA, 76 bp, Homo sapiens
cttgaacacaggtggtgttgctggctagaagatgaagcagaaagaaaggttttgtatcttgggttacatgctagac

SEQ ID NO: 83334 - DNA, 75 bp, Homo sapiens
acacaggtggtgttgctggctagaagatgaagcagaaagaaaggttttgtatcttgggttacatgctagaccacc

SEQ ID NO: 83335 - DNA, 77 bp, Homo sapiens
tagaagatgaagcagaaagaaaggttttgtatcttgggttacatgctagaccaccctctgtctcagcctcagctttg

SEQ ID NO: 83336 - DNA, 71 bp, Homo sapiens
aaagaaaggttttgtatcttgggttacatgctagaccaccctctgtctcagcctcagctttggggaaatgt

SEQ ID NO: 83337 - DNA, 76 bp, Homo sapiens
tttgtatcttgggttacatgctagaccaccctctgtctcagcctcagctttggggaaatgttcattcccattagaa

SEQ ID NO: 83338 - DNA, 76 bp, Homo sapiens
atcttgggttacatgctagaccaccctctgtctcagcctcagctttggggaaatgttcattcccattagaacacac

SEQ ID NO: 83339 - DNA, 76 bp, Homo sapiens
ctctgtctcagcctcagctttggggaaatgttcattcccattagaacacaccctcaacaaaacactgggatgagtg

SEQ ID NO: 83340 - DNA, 73 bp, Homo sapiens
agcctcagctttggggaaatgttcattcccattagaacacaccctcaacaaaacactgggatgagtggtgcct

SEQ ID NO: 83341 - DNA, 73 bp, Homo sapiens
tttggggaaatgttcattcccattagaacacaccctcaacaaaacactgggatgagtggtgccttgggatcaa

SEQ ID NO: 83342 - DNA, 72 bp, Homo sapiens
ccattagaacacaccctcaacaaaacactgggatgagtggtgccttgggatcaactactaaaaatcagaatt

SEQ ID NO: 83343 - DNA, 71 bp, Homo sapiens
acacaccctcaacaaaacactgggatgagtggtgccttgggatcaactactaaaaatcagaatttggaaaa

SEQ ID NO: 83344 - DNA, 72 bp, Homo sapiens
ccttgggatcaactactaaaaatcagaatttggaaaatgtgttgcccctttaatgcacacccatcatctaag

SEQ ID NO: 83345 - DNA, 73 bp, Homo sapiens
atcaactactaaaaatcagaatttggaaaatgtgttgcccctttaatgcacacccatcatctaaggctgggaa

SEQ ID NO: 83346 - DNA, 78 bp, Homo sapiens
atcagaatttggaaaatgtgttgcccctttaatgcacacccatcatctaaggctgggaacatcatgaaggcatcaaaa

SEQ ID NO: 83347 - DNA, 77 bp, Homo sapiens
atttggaaaatgtgttgcccctttaatgcacacccatcatctaaggctgggaacatcatgaaggcatcaaaagaata

SEQ ID NO: 83348 - DNA, 82 bp, Homo sapiens
atgtgttgcccctttaatgcacacccatcatctaaggctgggaacatcatgaaggcatcaaaagaataagcagcacaattca

SEQ ID NO: 83349 - DNA, 81 bp, Homo sapiens
cctttaatgcacacccatcatctaaggctgggaacatcatgaaggcatcaaaagaataagcagcacaattcacactgtgtt

SEQ ID NO: 83350 - DNA, 83 bp, Homo sapiens
acacccatcatctaaggctgggaacatcatgaaggcatcaaaagaataagcagcacaattcacactgtgtttgcctgagagaa

SEQ ID NO: 83351 - DNA, 85 bp, Homo sapiens
taaggctgggaacatcatgaaggcatcaaaagaataagcagcacaattcacactgtgtttgcctgagagaagatgactgctttca

SEQ ID NO: 83352 - DNA, 78 bp, Homo sapiens
catcaaaagaataagcagcacaattcacactgtgtttgcctgagagaagatgactgctttcaaagtaggtttttctaa

SEQ ID NO: 83353 - DNA, 75 bp, Homo sapiens
acaattcacactgtgtttgcctgagagaagatgactgctttcaaagtaggtttttctaaactgtgtccgagtgac

SEQ ID NO: 83354 - DNA, 74 bp, Homo sapiens
tgtgtttgcctgagagaagatgactgctttcaaagtaggtttttctaaactgtgtccgagtgaccctcgtgtta

SEQ ID NO: 83355 - DNA, 72 bp, Homo sapiens
tgagagaagatgactgctttcaaagtaggtttttctaaactgtgtccgagtgaccctcgtgttattaaacca

SEQ ID NO: 83356 - DNA, 69 bp, Homo sapiens
tttcaaagtaggtttttctaaactgtgtccgagtgaccctcgtgttattaaaccattagaaacagcata

SEQ ID NO: 83357 - DNA, 74 bp, Homo sapiens
tttttctaaactgtgtccgagtgaccctcgtgttattaaaccattagaaacagcataacaatgccatgtgctta

SEQ ID NO: 83358 - DNA, 76 bp, Homo sapiens
agtgaccctcgtgttattaaaccattagaaacagcataacaatgccatgtgcttatctataaagatgacaaaaaga

SEQ ID NO: 83359 - DNA, 76 bp, Homo sapiens
ctcgtgttattaaaccattagaaacagcataacaatgccatgtgcttatctataaagatgacaaaaagaaggaaca

SEQ ID NO: 83360 - DNA, 77 bp, Homo sapiens
agcataacaatgccatgtgcttatctataaagatgacaaaaagaaggaacatttccagcactcctactacaaccatt

SEQ ID NO: 83361 - DNA, 75 bp, Homo sapiens
acaatgccatgtgcttatctataaagatgacaaaaagaaggaacatttccagcactcctactacaaccattttaa

SEQ ID NO: 83362 - DNA, 72 bp, Homo sapiens
gtgcttatctataaagatgacaaaaagaaggaacatttccagcactcctactacaaccattttaaaatacaa

SEQ ID NO: 83363 - DNA, 71 bp, Homo sapiens
agatgacaaaaagaaggaacatttccagcactcctactacaaccattttaaaatacaaacgcaagtatata

SEQ ID NO: 83364 - DNA, 73 bp, Homo sapiens
aagaaggaacatttccagcactcctactacaaccattttaaaatacaaacgcaagtatatagactacaatgca

SEQ ID NO: 83365 - DNA, 73 bp, Homo sapiens
ggaacatttccagcactcctactacaaccattttaaaatacaaacgcaagtatatagactacaatgcactatt

SEQ ID NO: 83366 - DNA, 72 bp, Homo sapiens
cagcactcctactacaaccattttaaaatacaaacgcaagtatatagactacaatgcactattttttaacag

SEQ ID NO: 83367 - DNA, 70 bp, Homo sapiens
caaccattttaaaatacaaacgcaagtatatagactacaatgcactattttttaacaggagggattccta

SEQ ID NO: 83368 - DNA, 70 bp, Homo sapiens
aaatacaaacgcaagtatatagactacaatgcactattttttaacaggagggattcctaggaattcaggg

SEQ ID NO: 83369 - DNA, 70 bp, Homo sapiens
tatatagactacaatgcactattttttaacaggagggattcctaggaattcagggggaagttgggcttcc

SEQ ID NO: 83370 - DNA, 71 bp, Homo sapiens
gcactattttttaacaggagggattcctaggaattcagggggaagttgggcttcctgatcgtgcacaggaa

SEQ ID NO: 83371 - DNA, 72 bp, Homo sapiens
ggattcctaggaattcagggggaagttgggcttcctgatcgtgcacaggaaatggaggagatttaaatcaaa

SEQ ID NO: 83372 - DNA, 71 bp, Homo sapiens
gaattcagggggaagttgggcttcctgatcgtgcacaggaaatggaggagatttaaatcaaactagtttat

SEQ ID NO: 83373 - DNA, 74 bp, Homo sapiens
gggaagttgggcttcctgatcgtgcacaggaaatggaggagatttaaatcaaactagtttattgttctctgctg

SEQ ID NO: 83374 - DNA, 73 bp, Homo sapiens
atcgtgcacaggaaatggaggagatttaaatcaaactagtttattgttctctgctggtggtcttggtaactaa

SEQ ID NO: 83375 - DNA, 73 bp, Homo sapiens
aatggaggagatttaaatcaaactagtttattgttctctgctggtggtcttggtaactaagatgccttcacat

SEQ ID NO: 83376 - DNA, 75 bp, Homo sapiens
atttaaatcaaactagtttattgttctctgctggtggtcttggtaactaagatgccttcacattgctggatacaa

SEQ ID NO: 83377 - DNA, 75 bp, Homo sapiens
aaactagtttattgttctctgctggtggtcttggtaactaagatgccttcacattgctggatacaattcttatta

SEQ ID NO: 83378 - DNA, 79 bp, Homo sapiens
tttattgttctctgctggtggtcttggtaactaagatgccttcacattgctggatacaattcttattactcttatgctc

SEQ ID NO: 83379 - DNA, 81 bp, Homo sapiens
ttggtaactaagatgccttcacattgctggatacaattcttattactcttatgctctgtgcttgttcatcgcctgactact

SEQ ID NO: 83380 - DNA, 84 bp, Homo sapiens
gatgccttcacattgctggatacaattcttattactcttatgctctgtgcttgttcatcgcctgactacttcaaggctcaatat

SEQ ID NO: 83381 - DNA, 82 bp, Homo sapiens
acattgctggatacaattcttattactcttatgctctgtgcttgttcatcgcctgactacttcaaggctcaatattcttgta

SEQ ID NO: 83382 - DNA, 79 bp, Homo sapiens
tacaattcttattactcttatgctctgtgcttgttcatcgcctgactacttcaaggctcaatattcttgtaaaatataa

SEQ ID NO: 83383 - DNA, 78 bp, Homo sapiens
gcttgttcatcgcctgactacttcaaggctcaatattcttgtaaaatataaagtgaacattatgtgactactctaata

SEQ ID NO: 83384 - DNA, 76 bp, Homo sapiens
catcgcctgactacttcaaggctcaatattcttgtaaaatataaagtgaacattatgtgactactctaataataaa

SEQ ID NO: 83385 - DNA, 73 bp, Homo sapiens
gctcaatattcttgtaaaatataaagtgaacattatgtgactactctaataataaaattactgtgaaaccaag

SEQ ID NO: 83386 - DNA, 72 bp, Homo sapiens
gtaaaatataaagtgaacattatgtgactactctaataataaaattactgtgaaaccaagtcctcaaagaga

SEQ ID NO: 83387 - DNA, 73 bp, Homo sapiens
gtgaacattatgtgactactctaataataaaattactgtgaaaccaagtcctcaaagagaaaaggacataatg

SEQ ID NO: 83388 - DNA, 72 bp, Homo sapiens
cattatgtgactactctaataataaaattactgtgaaaccaagtcctcaaagagaaaaggacataatgtttc

SEQ ID NO: 83389 - DNA, 71 bp, Homo sapiens
ctaataataaaattactgtgaaaccaagtcctcaaagagaaaaggacataatgtttctactagacaagcca

SEQ ID NO: 83390 - DNA, 73 bp, Homo sapiens
aaaccaagtcctcaaagagaaaaggacataatgtttctactagacaagccacatactaacatgtcattcgaag

SEQ ID NO: 83391 - DNA, 74 bp, Homo sapiens
ctcaaagagaaaaggacataatgtttctactagacaagccacatactaacatgtcattcgaagttaaagttcta

SEQ ID NO: 83392 - DNA, 74 bp, Homo sapiens
gaaaaggacataatgtttctactagacaagccacatactaacatgtcattcgaagttaaagttctaagccagat

SEQ ID NO: 83393 - DNA, 76 bp, Homo sapiens
atgtttctactagacaagccacatactaacatgtcattcgaagttaaagttctaagccagattaattcatgaacca

SEQ ID NO: 83394 - DNA, 76 bp, Homo sapiens
cacatactaacatgtcattcgaagttaaagttctaagccagattaattcatgaaccagatagatattccagggtaa

SEQ ID NO: 83395 - DNA, 76 bp, Homo sapiens
acatgtcattcgaagttaaagttctaagccagattaattcatgaaccagatagatattccagggtaatctttagca

SEQ ID NO: 83396 - DNA, 76 bp, Homo sapiens
tcgaagttaaagttctaagccagattaattcatgaaccagatagatattccagggtaatctttagcatatggtgta

SEQ ID NO: 83397 - DNA, 78 bp, Homo sapiens
tctaagccagattaattcatgaaccagatagatattccagggtaatctttagcatatggtgtattaaatcaatcttgg

SEQ ID NO: 83398 - DNA, 78 bp, Homo sapiens
cagattaattcatgaaccagatagatattccagggtaatctttagcatatggtgtattaaatcaatcttggtagtctg

SEQ ID NO: 83399 - DNA, 76 bp, Homo sapiens
atgaaccagatagatattccagggtaatctttagcatatggtgtattaaatcaatcttggtagtctgttccttcaa

SEQ ID NO: 83400 - DNA, 73 bp, Homo sapiens
tagatattccagggtaatctttagcatatggtgtattaaatcaatcttggtagtctgttccttcaaccctgtt

SEQ ID NO: 83401 - DNA, 71 bp, Homo sapiens
agggtaatctttagcatatggtgtattaaatcaatcttggtagtctgttccttcaaccctgtttggtttga

SEQ ID NO: 83402 - DNA, 67 bp, Homo sapiens
gtgtattaaatcaatcttggtagtctgttccttcaaccctgtttggtttgaggtttaaaaacgtgga

SEQ ID NO: 83403 - DNA, 65 bp, Homo sapiens
aaatcaatcttggtagtctgttccttcaaccctgtttggtttgaggtttaaaaacgtggaaaaga

SEQ ID NO: 83404 - DNA, 65 bp, Homo sapiens
tagtctgttccttcaaccctgtttggtttgaggtttaaaaacgtggaaaagaccacgtattagaa

SEQ ID NO: 83405 - DNA, 67 bp, Homo sapiens
tgtttggtttgaggtttaaaaacgtggaaaagaccacgtattagaatgcaggccagttaaagactaa

SEQ ID NO: 83406 - DNA, 67 bp, Homo sapiens
ttgaggtttaaaaacgtggaaaagaccacgtattagaatgcaggccagttaaagactaataaaacaa

SEQ ID NO: 83407 - DNA, 67 bp, Homo sapiens
aaaacgtggaaaagaccacgtattagaatgcaggccagttaaagactaataaaacaataatagttat

SEQ ID NO: 83408 - DNA, 71 bp, Homo sapiens
gaccacgtattagaatgcaggccagttaaagactaataaaacaataatagttattataaccattatgttag

SEQ ID NO: 83409 - DNA, 72 bp, Homo sapiens
gaatgcaggccagttaaagactaataaaacaataatagttattataaccattatgttagttatatgaccagt

SEQ ID NO: 83410 - DNA, 71 bp, Homo sapiens
ggccagttaaagactaataaaacaataatagttattataaccattatgttagttatatgaccagttctctc

SEQ ID NO: 83411 - DNA, 72 bp, Homo sapiens
ctaataaaacaataatagttattataaccattatgttagttatatgaccagttctctctgagggcaagggag

SEQ ID NO: 83412 - DNA, 74 bp, Homo sapiens
aaacaataatagttattataaccattatgttagttatatgaccagttctctctgagggcaagggagtgtgtgta

SEQ ID NO: 83413 - DNA, 76 bp, Homo sapiens
tattataaccattatgttagttatatgaccagttctctctgagggcaagggagtgtgtgtagcctcaaaccacaaa

SEQ ID NO: 83414 - DNA, 73 bp, Homo sapiens
aaccattatgttagttatatgaccagttctctctgagggcaagggagtgtgtgtagcctcaaaccacaaaggg

SEQ ID NO: 83415 - DNA, 74 bp, Homo sapiens
aagggagtgtgtgtagcctcaaaccacaaagggtcacaccctgtgaatgtatacagatggtatgtcccaatggg

SEQ ID NO: 83416 - DNA, 74 bp, Homo sapiens
aaccacaaagggtcacaccctgtgaatgtatacagatggtatgtcccaatggggagacgacgcattctcaccct

SEQ ID NO: 83417 - DNA, 80 bp, Homo sapiens
acaccctgtgaatgtatacagatggtatgtcccaatggggagacgacgcattctcacccttgagcagtctcagtggtctg

SEQ ID NO: 83418 - DNA, 81 bp, Homo sapiens
aatgtatacagatggtatgtcccaatggggagacgacgcattctcacccttgagcagtctcagtggtctgtgctatggtag

SEQ ID NO: 83419 - DNA, 80 bp, Homo sapiens
atacagatggtatgtcccaatggggagacgacgcattctcacccttgagcagtctcagtggtctgtgctatggtaggagg

SEQ ID NO: 83420 - DNA, 79 bp, Homo sapiens
tatgtcccaatggggagacgacgcattctcacccttgagcagtctcagtggtctgtgctatggtaggaggtcctcttac

SEQ ID NO: 83421 - DNA, 77 bp, Homo sapiens
attctcacccttgagcagtctcagtggtctgtgctatggtaggaggtcctcttacttctttccatcaggaagggcta

SEQ ID NO: 83422 - DNA, 78 bp, Homo sapiens
ttgagcagtctcagtggtctgtgctatggtaggaggtcctcttacttctttccatcaggaagggctactggatattat

SEQ ID NO: 83423 - DNA, 78 bp, Homo sapiens
tctcagtggtctgtgctatggtaggaggtcctcttacttctttccatcaggaagggctactggatattattgcaaata

SEQ ID NO: 83424 - DNA, 75 bp, Homo sapiens
tgtgctatggtaggaggtcctcttacttctttccatcaggaagggctactggatattattgcaaataggaaggaa

SEQ ID NO: 83425 - DNA, 73 bp, Homo sapiens
tggtaggaggtcctcttacttctttccatcaggaagggctactggatattattgcaaataggaaggaagtatg

SEQ ID NO: 83426 - DNA, 76 bp, Homo sapiens
tccatcaggaagggctactggatattattgcaaataggaaggaagtatgtggctaaccaaatgtgtatggttaata

SEQ ID NO: 83427 - DNA, 73 bp, Homo sapiens
aggaagggctactggatattattgcaaataggaaggaagtatgtggctaaccaaatgtgtatggttaatatcc

SEQ ID NO: 83428 - DNA, 77 bp, Homo sapiens
atattattgcaaataggaaggaagtatgtggctaaccaaatgtgtatggttaatatcctgcagacattcctattctc

SEQ ID NO: 83429 - DNA, 76 bp, Homo sapiens
aaataggaaggaagtatgtggctaaccaaatgtgtatggttaatatcctgcagacattcctattctctatagctgg

SEQ ID NO: 83430 - DNA, 78 bp, Homo sapiens
gaagtatgtggctaaccaaatgtgtatggttaatatcctgcagacattcctattctctatagctggtatctaataact

SEQ ID NO: 83431 - DNA, 76 bp, Homo sapiens
aaatgtgtatggttaatatcctgcagacattcctattctctatagctggtatctaataacttactacacttcctcc

SEQ ID NO: 83432 - DNA, 80 bp, Homo sapiens
ttaatatcctgcagacattcctattctctatagctggtatctaataacttactacacttcctcctccgtatgtatgctca

SEQ ID NO: 83433 - DNA, 86 bp, Homo sapiens
tctatagctggtatctaataacttactacacttcctcctccgtatgtatgctcagatgcagaggcactgaactgcactgcttctga

SEQ ID NO: 83434 - DNA, 84 bp, Homo sapiens
tatctaataacttactacacttcctcctccgtatgtatgctcagatgcagaggcactgaactgcactgcttctgagaataccca

SEQ ID NO: 83435 - DNA, 84 bp, Homo sapiens
cgtatgtatgctcagatgcagaggcactgaactgcactgcttctgagaatacccagtggcataacattgaaaaagtttgaagaa

SEQ ID NO: 83436 - DNA, 81 bp, Homo sapiens
agatgcagaggcactgaactgcactgcttctgagaatacccagtggcataacattgaaaaagtttgaagaactgagtagaa

SEQ ID NO: 83437 - DNA, 77 bp, Homo sapiens
actgcttctgagaatacccagtggcataacattgaaaaagtttgaagaactgagtagaaggtgctgatgctggtaac

SEQ ID NO: 83438 - DNA, 74 bp, Homo sapiens
agaatacccagtggcataacattgaaaaagtttgaagaactgagtagaaggtgctgatgctggtaactcccaaa

SEQ ID NO: 83439 - DNA, 73 bp, Homo sapiens
acccagtggcataacattgaaaaagtttgaagaactgagtagaaggtgctgatgctggtaactcccaaagacc

SEQ ID NO: 83440 - DNA, 72 bp, Homo sapiens
attgaaaaagtttgaagaactgagtagaaggtgctgatgctggtaactcccaaagacccctgacagcttctt

SEQ ID NO: 83441 - DNA, 71 bp, Homo sapiens
aaaagtttgaagaactgagtagaaggtgctgatgctggtaactcccaaagacccctgacagcttctttcct

SEQ ID NO: 83442 - DNA, 74 bp, Homo sapiens
aactgagtagaaggtgctgatgctggtaactcccaaagacccctgacagcttctttccttaactgggtgcgcca

SEQ ID NO: 83443 - DNA, 75 bp, Homo sapiens
aggtgctgatgctggtaactcccaaagacccctgacagcttctttccttaactgggtgcgccaccagctgaacta

SEQ ID NO: 83444 - DNA, 74 bp, Homo sapiens
tggtaactcccaaagacccctgacagcttctttccttaactgggtgcgccaccagctgaactactgtgaatcca

SEQ ID NO: 83445 - DNA, 78 bp, Homo sapiens
caaagacccctgacagcttctttccttaactgggtgcgccaccagctgaactactgtgaatccatgctgtgtcccata

SEQ ID NO: 83446 - DNA, 81 bp, Homo sapiens
tgacagcttctttccttaactgggtgcgccaccagctgaactactgtgaatccatgctgtgtcccatacattatattcctc

SEQ ID NO: 83447 - DNA, 78 bp, Homo sapiens
ttctttccttaactgggtgcgccaccagctgaactactgtgaatccatgctgtgtcccatacattatattcctctaat

SEQ ID NO: 83448 - DNA, 75 bp, Homo sapiens
aatccatgctgtgtcccatacattatattcctctaattggagggctaattagatgaccttttcaattcagaaagg

SEQ ID NO: 83449 - DNA, 76 bp, Homo sapiens
tacattatattcctctaattggagggctaattagatgaccttttcaattcagaaaggtctaatatgatctccagag

SEQ ID NO: 83450 - DNA, 77 bp, Homo sapiens
ttcctctaattggagggctaattagatgaccttttcaattcagaaaggtctaatatgatctccagagtttgccagca

SEQ ID NO: 83451 - DNA, 76 bp, Homo sapiens
agggctaattagatgaccttttcaattcagaaaggtctaatatgatctccagagtttgccagcaaggcttgagaaa

SEQ ID NO: 83452 - DNA, 81 bp, Homo sapiens
tcaattcagaaaggtctaatatgatctccagagtttgccagcaaggcttgagaaaagtagtggactgtatgcaatgagtaa

SEQ ID NO: 83453 - DNA, 77 bp, Homo sapiens
aaaggtctaatatgatctccagagtttgccagcaaggcttgagaaaagtagtggactgtatgcaatgagtaaaatac

SEQ ID NO: 83454 - DNA, 79 bp, Homo sapiens
taatatgatctccagagtttgccagcaaggcttgagaaaagtagtggactgtatgcaatgagtaaaataccttgttcta

SEQ ID NO: 83455 - DNA, 76 bp, Homo sapiens
agtttgccagcaaggcttgagaaaagtagtggactgtatgcaatgagtaaaataccttgttctacaattctcttga

SEQ ID NO: 83456 - DNA, 75 bp, Homo sapiens
caaggcttgagaaaagtagtggactgtatgcaatgagtaaaataccttgttctacaattctcttgaaaatccatg

SEQ ID NO: 83457 - DNA, 76 bp, Homo sapiens
cttgagaaaagtagtggactgtatgcaatgagtaaaataccttgttctacaattctcttgaaaatccatggatgaa

SEQ ID NO: 83458 - DNA, 78 bp, Homo sapiens
agtggactgtatgcaatgagtaaaataccttgttctacaattctcttgaaaatccatggatgaatgtgtcatgaaaaa

SEQ ID NO: 83459 - DNA, 75 bp, Homo sapiens
gtatgcaatgagtaaaataccttgttctacaattctcttgaaaatccatggatgaatgtgtcatgaaaaaaaaaa

SEQ ID NO: 83460 - DNA, 71 bp, Homo sapiens
aaaaaaatctctcattaatgtaatccaagtaagctttatccttcttatggatttctcaaaaaatgatattg

SEQ ID NO: 83461 - DNA, 72 bp, Homo sapiens
ctcattaatgtaatccaagtaagctttatccttcttatggatttctcaaaaaatgatattgggtattatagg

SEQ ID NO: 83462 - DNA, 71 bp, Homo sapiens
gtaatccaagtaagctttatccttcttatggatttctcaaaaaatgatattgggtattatagggcaaaaga

SEQ ID NO: 83463 - DNA, 70 bp, Homo sapiens
caagtaagctttatccttcttatggatttctcaaaaaatgatattgggtattatagggcaaaagaaaaca

SEQ ID NO: 83464 - DNA, 70 bp, Homo sapiens
aaacaaaacaagaaacacctggtcactcccccaagccaaacaaacagcaaacctcagtgggcatcttcca

SEQ ID NO: 83465 - DNA, 69 bp, Homo sapiens
aaacaagaaacacctggtcactcccccaagccaaacaaacagcaaacctcagtgggcatcttccacctt

SEQ ID NO: 83466 - DNA, 75 bp, Homo sapiens
agaaacacctggtcactcccccaagccaaacaaacagcaaacctcagtgggcatcttccacctttgagatgcaga

SEQ ID NO: 83467 - DNA, 77 bp, Homo sapiens
tggtcactcccccaagccaaacaaacagcaaacctcagtgggcatcttccacctttgagatgcagagaacagaagaa

SEQ ID NO: 83468 - DNA, 75 bp, Homo sapiens
ccaagccaaacaaacagcaaacctcagtgggcatcttccacctttgagatgcagagaacagaagaagaaagggaa

SEQ ID NO: 83469 - DNA, 75 bp, Homo sapiens
aagccaaacaaacagcaaacctcagtgggcatcttccacctttgagatgcagagaacagaagaagaaagggaatg

SEQ ID NO: 83470 - DNA, 76 bp, Homo sapiens
aaacagcaaacctcagtgggcatcttccacctttgagatgcagagaacagaagaagaaagggaatgtggttacaga

SEQ ID NO: 83471 - DNA, 74 bp, Homo sapiens
aaacctcagtgggcatcttccacctttgagatgcagagaacagaagaagaaagggaatgtggttacagagaggt

SEQ ID NO: 83472 - DNA, 74 bp, Homo sapiens
agtgggcatcttccacctttgagatgcagagaacagaagaagaaagggaatgtggttacagagaggttcccttc

SEQ ID NO: 83473 - DNA, 73 bp, Homo sapiens
ttccacctttgagatgcagagaacagaagaagaaagggaatgtggttacagagaggttcccttccgagagttc

SEQ ID NO: 83474 - DNA, 73 bp, Homo sapiens
agagaacagaagaagaaagggaatgtggttacagagaggttcccttccgagagttctagagcttgtatctcac

SEQ ID NO: 83475 - DNA, 75 bp, Homo sapiens
aagaaagggaatgtggttacagagaggttcccttccgagagttctagagcttgtatctcaccccacatgcactgc

SEQ ID NO: 83476 - DNA, 76 bp, Homo sapiens
aatgtggttacagagaggttcccttccgagagttctagagcttgtatctcaccccacatgcactgcgttgttctag

SEQ ID NO: 83477 - DNA, 79 bp, Homo sapiens
ttacagagaggttcccttccgagagttctagagcttgtatctcaccccacatgcactgcgttgttctagtgtcagttca

SEQ ID NO: 83478 - DNA, 81 bp, Homo sapiens
agagttctagagcttgtatctcaccccacatgcactgcgttgttctagtgtcagttcaggacaactgctgaccaccagaaa

SEQ ID NO: 83479 - DNA, 81 bp, Homo sapiens
cttgtatctcaccccacatgcactgcgttgttctagtgtcagttcaggacaactgctgaccaccagaaagacatattataa

SEQ ID NO: 83480 - DNA, 83 bp, Homo sapiens
cccacatgcactgcgttgttctagtgtcagttcaggacaactgctgaccaccagaaagacatattataacatgacactgagac

SEQ ID NO: 83481 - DNA, 82 bp, Homo sapiens
atgcactgcgttgttctagtgtcagttcaggacaactgctgaccaccagaaagacatattataacatgacactgagacgaag

SEQ ID NO: 83482 - DNA, 82 bp, Homo sapiens
ttgttctagtgtcagttcaggacaactgctgaccaccagaaagacatattataacatgacactgagacgaagggcagcagcc

SEQ ID NO: 83483 - DNA, 82 bp, Homo sapiens
ttcaggacaactgctgaccaccagaaagacatattataacatgacactgagacgaagggcagcagccctcttctgaactgaa

SEQ ID NO: 83484 - DNA, 79 bp, Homo sapiens
acaactgctgaccaccagaaagacatattataacatgacactgagacgaagggcagcagccctcttctgaactgaaaaa

SEQ ID NO: 83485 - DNA, 78 bp, Homo sapiens
accagaaagacatattataacatgacactgagacgaagggcagcagccctcttctgaactgaaaaagcagcttcctaa

SEQ ID NO: 83486 - DNA, 80 bp, Homo sapiens
aagacatattataacatgacactgagacgaagggcagcagccctcttctgaactgaaaaagcagcttcctaagacatcaa

SEQ ID NO: 83487 - DNA, 78 bp, Homo sapiens
actgagacgaagggcagcagccctcttctgaactgaaaaagcagcttcctaagacatcaacaccatgtatgaaaagac

SEQ ID NO: 83488 - DNA, 78 bp, Homo sapiens
ttctgaactgaaaaagcagcttcctaagacatcaacaccatgtatgaaaagactgcactgtcttgcaactttttacca

SEQ ID NO: 83489 - DNA, 74 bp, Homo sapiens
aaaaagcagcttcctaagacatcaacaccatgtatgaaaagactgcactgtcttgcaactttttaccaggaaaa

SEQ ID NO: 83490 - DNA, 73 bp, Homo sapiens
ttcctaagacatcaacaccatgtatgaaaagactgcactgtcttgcaactttttaccaggaaaacgtgaaaaa

SEQ ID NO: 83491 - DNA, 75 bp, Homo sapiens
aagacatcaacaccatgtatgaaaagactgcactgtcttgcaactttttaccaggaaaacgtgaaaaatgtgatg

SEQ ID NO: 83492 - DNA, 72 bp, Homo sapiens
tcttgcaactttttaccaggaaaacgtgaaaaatgtgatgtccatgtgttagtgctcgaaccccattcttaa

SEQ ID NO: 83493 - DNA, 72 bp, Homo sapiens
ttttaccaggaaaacgtgaaaaatgtgatgtccatgtgttagtgctcgaaccccattcttaaggcattagta

SEQ ID NO: 83494 - DNA, 75 bp, Homo sapiens
aaaacgtgaaaaatgtgatgtccatgtgttagtgctcgaaccccattcttaaggcattagtattgcttacagtca

SEQ ID NO: 83495 - DNA, 76 bp, Homo sapiens
aaaaatgtgatgtccatgtgttagtgctcgaaccccattcttaaggcattagtattgcttacagtcattttctaca

SEQ ID NO: 83496 - DNA, 77 bp, Homo sapiens
tccatgtgttagtgctcgaaccccattcttaaggcattagtattgcttacagtcattttctacagaatcgtgtgtaa

SEQ ID NO: 83497 - DNA, 76 bp, Homo sapiens
aaccccattcttaaggcattagtattgcttacagtcattttctacagaatcgtgtgtaatctcaaacatgtgtcag

SEQ ID NO: 83498 - DNA, 80 bp, Homo sapiens
ttcttaaggcattagtattgcttacagtcattttctacagaatcgtgtgtaatctcaaacatgtgtcaggctatgtgttc

SEQ ID NO: 83499 - DNA, 80 bp, Homo sapiens
tattgcttacagtcattttctacagaatcgtgtgtaatctcaaacatgtgtcaggctatgtgttccctatttgccaatta

SEQ ID NO: 83500 - DNA, 76 bp, Homo sapiens
agtcattttctacagaatcgtgtgtaatctcaaacatgtgtcaggctatgtgttccctatttgccaattatttaat

SEQ ID NO: 83501 - DNA, 77 bp, Homo sapiens
ttttctacagaatcgtgtgtaatctcaaacatgtgtcaggctatgtgttccctatttgccaattatttaattagctc

SEQ ID NO: 83502 - DNA, 76 bp, Homo sapiens
aatcgtgtgtaatctcaaacatgtgtcaggctatgtgttccctatttgccaattatttaattagctctgtttgttc

SEQ ID NO: 83503 - DNA, 77 bp, Homo sapiens
aatctcaaacatgtgtcaggctatgtgttccctatttgccaattatttaattagctctgtttgttctttgagataca

SEQ ID NO: 83504 - DNA, 75 bp, Homo sapiens
tcaggctatgtgttccctatttgccaattatttaattagctctgtttgttctttgagatacaggcaacgtaatat

SEQ ID NO: 83505 - DNA, 73 bp, Homo sapiens
ctatgtgttccctatttgccaattatttaattagctctgtttgttctttgagatacaggcaacgtaatatttc

SEQ ID NO: 83506 - DNA, 72 bp, Homo sapiens
ttgccaattatttaattagctctgtttgttctttgagatacaggcaacgtaatatttctttacttcctgcgt

SEQ ID NO: 83507 - DNA, 73 bp, Homo sapiens
tttaattagctctgtttgttctttgagatacaggcaacgtaatatttctttacttcctgcgtttcagaatgag

SEQ ID NO: 83508 - DNA, 76 bp, Homo sapiens
ttagctctgtttgttctttgagatacaggcaacgtaatatttctttacttcctgcgtttcagaatgagtgagtata

SEQ ID NO: 83509 - DNA, 76 bp, Homo sapiens
ttgttctttgagatacaggcaacgtaatatttctttacttcctgcgtttcagaatgagtgagtatatgccaaatat

SEQ ID NO: 83510 - DNA, 74 bp, Homo sapiens
agatacaggcaacgtaatatttctttacttcctgcgtttcagaatgagtgagtatatgccaaatattttcaaaa

SEQ ID NO: 83511 - DNA, 77 bp, Homo sapiens
cgtaatatttctttacttcctgcgtttcagaatgagtgagtatatgccaaatattttcaaaagtctgcagatgtatc

SEQ ID NO: 83512 - DNA, 77 bp, Homo sapiens
atgccaaatattttcaaaagtctgcagatgtatcctattaatccatactgtttgttagggtagtatcactaacatca

SEQ ID NO: 83513 - DNA, 76 bp, Homo sapiens
attttcaaaagtctgcagatgtatcctattaatccatactgtttgttagggtagtatcactaacatcagaagagaa

SEQ ID NO: 83514 - DNA, 76 bp, Homo sapiens
aaaagtctgcagatgtatcctattaatccatactgtttgttagggtagtatcactaacatcagaagagaaagcttc

SEQ ID NO: 83515 - DNA, 75 bp, Homo sapiens
agatgtatcctattaatccatactgtttgttagggtagtatcactaacatcagaagagaaagcttctcttcttgt

SEQ ID NO: 83516 - DNA, 76 bp, Homo sapiens
tattaatccatactgtttgttagggtagtatcactaacatcagaagagaaagcttctcttcttgttatacagacac

SEQ ID NO: 83517 - DNA, 80 bp, Homo sapiens
tactgtttgttagggtagtatcactaacatcagaagagaaagcttctcttcttgttatacagacacgctgccatcactga

SEQ ID NO: 83518 - DNA, 82 bp, Homo sapiens
tagtatcactaacatcagaagagaaagcttctcttcttgttatacagacacgctgccatcactgacttctaccacactcaaa

SEQ ID NO: 83519 - DNA, 80 bp, Homo sapiens
taacatcagaagagaaagcttctcttcttgttatacagacacgctgccatcactgacttctaccacactcaaaaaatcaa

SEQ ID NO: 83520 - DNA, 76 bp, Homo sapiens
aagagaaagcttctcttcttgttatacagacacgctgccatcactgacttctaccacactcaaaaaatcaaaccaa

SEQ ID NO: 83521 - DNA, 77 bp, Homo sapiens
tctcttcttgttatacagacacgctgccatcactgacttctaccacactcaaaaaatcaaaccaaagcctaagagaa

SEQ ID NO: 83522 - DNA, 72 bp, Homo sapiens
acgctgccatcactgacttctaccacactcaaaaaatcaaaccaaagcctaagagaacttaagtgtgaaaaa

SEQ ID NO: 83523 - DNA, 71 bp, Homo sapiens
ttctaccacactcaaaaaatcaaaccaaagcctaagagaacttaagtgtgaaaaaacatgggccactcaga

SEQ ID NO: 83524 - DNA, 73 bp, Homo sapiens
accaaagcctaagagaacttaagtgtgaaaaaacatgggccactcagacatcacgcaatactaaggcttatta

SEQ ID NO: 83525 - DNA, 74 bp, Homo sapiens
taagagaacttaagtgtgaaaaaacatgggccactcagacatcacgcaatactaaggcttattatgcttaaatt

SEQ ID NO: 83526 - DNA, 73 bp, Homo sapiens
acttaagtgtgaaaaaacatgggccactcagacatcacgcaatactaaggcttattatgcttaaattttcctc

SEQ ID NO: 83527 - DNA, 75 bp, Homo sapiens
aaaaacatgggccactcagacatcacgcaatactaaggcttattatgcttaaattttcctctgcattttcacgta

SEQ ID NO: 83528 - DNA, 77 bp, Homo sapiens
actcagacatcacgcaatactaaggcttattatgcttaaattttcctctgcattttcacgtacgcaattggtgaaca

SEQ ID NO: 83529 - DNA, 76 bp, Homo sapiens
acatcacgcaatactaaggcttattatgcttaaattttcctctgcattttcacgtacgcaattggtgaacatatta

SEQ ID NO: 83530 - DNA, 70 bp, Homo sapiens
cttattatgcttaaattttcctctgcattttcacgtacgcaattggtgaacatattattttaaagaaaaa

SEQ ID NO: 83531 - DNA, 72 bp, Homo sapiens
ttttcctctgcattttcacgtacgcaattggtgaacatattattttaaagaaaaacattctagaatgttctc

SEQ ID NO: 83532 - DNA, 72 bp, Homo sapiens
ctctgcattttcacgtacgcaattggtgaacatattattttaaagaaaaacattctagaatgttctccctta

SEQ ID NO: 83533 - DNA, 69 bp, Homo sapiens
tcacgtacgcaattggtgaacatattattttaaagaaaaacattctagaatgttctcccttaaagtaac

SEQ ID NO: 83534 - DNA, 66 bp, Homo sapiens
ttggtgaacatattattttaaagaaaaacattctagaatgttctcccttaaagtaaccttaaagta

SEQ ID NO: 83535 - DNA, 70 bp, Homo sapiens
tattttaaagaaaaacattctagaatgttctcccttaaagtaaccttaaagtaatatctgtatctatgca

SEQ ID NO: 83536 - DNA, 71 bp, Homo sapiens
agaaaaacattctagaatgttctcccttaaagtaaccttaaagtaatatctgtatctatgcataataataa

SEQ ID NO: 83537 - DNA, 72 bp, Homo sapiens
tagaatgttctcccttaaagtaaccttaaagtaatatctgtatctatgcataataataaaggtttgctcctc

SEQ ID NO: 83538 - DNA, 72 bp, Homo sapiens
tctcccttaaagtaaccttaaagtaatatctgtatctatgcataataataaaggtttgctcctccaaaatgc

SEQ ID NO: 83539 - DNA, 75 bp, Homo sapiens
gtaaccttaaagtaatatctgtatctatgcataataataaaggtttgctcctccaaaatgctgaattaccatgtc

SEQ ID NO: 83540 - DNA, 76 bp, Homo sapiens
agtaatatctgtatctatgcataataataaaggtttgctcctccaaaatgctgaattaccatgtctacctatttcc

SEQ ID NO: 83541 - DNA, 75 bp, Homo sapiens
ctgtatctatgcataataataaaggtttgctcctccaaaatgctgaattaccatgtctacctatttccttaaaga

SEQ ID NO: 83542 - DNA, 75 bp, Homo sapiens
gcataataataaaggtttgctcctccaaaatgctgaattaccatgtctacctatttccttaaagattatgcatct

SEQ ID NO: 83543 - DNA, 73 bp, Homo sapiens
aaaggtttgctcctccaaaatgctgaattaccatgtctacctatttccttaaagattatgcatctttttctca

SEQ ID NO: 83544 - DNA, 76 bp, Homo sapiens
atgtctacctatttccttaaagattatgcatctttttctcattccgctagtggattttgacaagtgcatccattat

SEQ ID NO: 83545 - DNA, 75 bp, Homo sapiens
acctatttccttaaagattatgcatctttttctcattccgctagtggattttgacaagtgcatccattattgtaa

SEQ ID NO: 83546 - DNA, 78 bp, Homo sapiens
ttaaagattatgcatctttttctcattccgctagtggattttgacaagtgcatccattattgtaaaataatgtatgaa

SEQ ID NO: 83547 - DNA, 76 bp, Homo sapiens
gcatctttttctcattccgctagtggattttgacaagtgcatccattattgtaaaataatgtatgaaataaatttc

SEQ ID NO: 83548 - DNA, 74 bp, Homo sapiens
ctcattccgctagtggattttgacaagtgcatccattattgtaaaataatgtatgaaataaatttctaaaaagc

SEQ ID NO: 83549 - DNA, 71 bp, Homo sapiens
ttgacaagtgcatccattattgtaaaataatgtatgaaataaatttctaaaaagcccttttctgggttcta

SEQ ID NO: 83550 - DNA, 68 bp, Homo sapiens
tccattattgtaaaataatgtatgaaataaatttctaaaaagcccttttctgggttctaaaaatctca

SEQ ID NO: 83551 - DNA, 65 bp, Homo sapiens
aataatgtatgaaataaatttctaaaaagcccttttctgggttctaaaaatctcatacttttgtt

SEQ ID NO: 83552 - DNA, 64 bp, Homo sapiens
tttctaaaaagcccttttctgggttctaaaaatctcatacttttgtttttaaattatagctcct

SEQ ID NO: 83553 - DNA, 67 bp, Homo sapiens
agcccttttctgggttctaaaaatctcatacttttgtttttaaattatagctcctttattattgtca

SEQ ID NO: 83554 - DNA, 67 bp, Homo sapiens
ctgggttctaaaaatctcatacttttgtttttaaattatagctcctttattattgtcaagaccctta

SEQ ID NO: 83555 - DNA, 68 bp, Homo sapiens
tctcatacttttgtttttaaattatagctcctttattattgtcaagacccttaaataaggccctatgg

SEQ ID NO: 83556 - DNA, 65 bp, Homo sapiens
ttgtttttaaattatagctcctttattattgtcaagacccttaaataaggccctatggtttttaa

SEQ ID NO: 83557 - DNA, 68 bp, Homo sapiens
cctttattattgtcaagacccttaaataaggccctatggtttttaacaagttaagtctattctcagca

SEQ ID NO: 83558 - DNA, 71 bp, Homo sapiens
ttgtcaagacccttaaataaggccctatggtttttaacaagttaagtctattctcagcatatagaagtcac

SEQ ID NO: 83559 - DNA, 70 bp, Homo sapiens
acccttaaataaggccctatggtttttaacaagttaagtctattctcagcatatagaagtcacctattgc

SEQ ID NO: 83560 - DNA, 76 bp, Homo sapiens
taaggccctatggtttttaacaagttaagtctattctcagcatatagaagtcacctattgctccactctggctaga

SEQ ID NO: 83561 - DNA, 76 bp, Homo sapiens
tttttaacaagttaagtctattctcagcatatagaagtcacctattgctccactctggctagaccaacaagtagat

SEQ ID NO: 83562 - DNA, 79 bp, Homo sapiens
aagttaagtctattctcagcatatagaagtcacctattgctccactctggctagaccaacaagtagattctcctgttca

SEQ ID NO: 83563 - DNA, 81 bp, Homo sapiens
tattctcagcatatagaagtcacctattgctccactctggctagaccaacaagtagattctcctgttcatccacaaactaa

SEQ ID NO: 83564 - DNA, 80 bp, Homo sapiens
atatagaagtcacctattgctccactctggctagaccaacaagtagattctcctgttcatccacaaactaatgaagatga

SEQ ID NO: 83565 - DNA, 76 bp, Homo sapiens
actctggctagaccaacaagtagattctcctgttcatccacaaactaatgaagatgaccagctaaaaccaagcaaa

SEQ ID NO: 83566 - DNA, 76 bp, Homo sapiens
tagaccaacaagtagattctcctgttcatccacaaactaatgaagatgaccagctaaaaccaagcaaaactcattc

SEQ ID NO: 83567 - DNA, 76 bp, Homo sapiens
aagtagattctcctgttcatccacaaactaatgaagatgaccagctaaaaccaagcaaaactcattcccactgaga

SEQ ID NO: 83568 - DNA, 78 bp, Homo sapiens
ctcctgttcatccacaaactaatgaagatgaccagctaaaaccaagcaaaactcattcccactgagagctgtggctaa

SEQ ID NO: 83569 - DNA, 80 bp, Homo sapiens
aaactaatgaagatgaccagctaaaaccaagcaaaactcattcccactgagagctgtggctaagctgtctacagctcatg

SEQ ID NO: 83570 - DNA, 82 bp, Homo sapiens
aatgaagatgaccagctaaaaccaagcaaaactcattcccactgagagctgtggctaagctgtctacagctcatggagataa

SEQ ID NO: 83571 - DNA, 77 bp, Homo sapiens
ctaaaaccaagcaaaactcattcccactgagagctgtggctaagctgtctacagctcatggagataaccaccctatt

SEQ ID NO: 83572 - DNA, 81 bp, Homo sapiens
aagcaaaactcattcccactgagagctgtggctaagctgtctacagctcatggagataaccaccctatttcctgatatgtc

SEQ ID NO: 83573 - DNA, 79 bp, Homo sapiens
attcccactgagagctgtggctaagctgtctacagctcatggagataaccaccctatttcctgatatgtcccttccaag

SEQ ID NO: 83574 - DNA, 81 bp, Homo sapiens
agagctgtggctaagctgtctacagctcatggagataaccaccctatttcctgatatgtcccttccaagtcatagtgcctc

SEQ ID NO: 83575 - DNA, 81 bp, Homo sapiens
ctaagctgtctacagctcatggagataaccaccctatttcctgatatgtcccttccaagtcatagtgcctctctctcaaga

SEQ ID NO: 83576 - DNA, 78 bp, Homo sapiens
gagataaccaccctatttcctgatatgtcccttccaagtcatagtgcctctctctcaagaggactgttttgcaaatca

SEQ ID NO: 83577 - DNA, 77 bp, Homo sapiens
accctatttcctgatatgtcccttccaagtcatagtgcctctctctcaagaggactgttttgcaaatcaatcagaaa

SEQ ID NO: 83578 - DNA, 75 bp, Homo sapiens
ctgatatgtcccttccaagtcatagtgcctctctctcaagaggactgttttgcaaatcaatcagaaaaagttttt

SEQ ID NO: 83579 - DNA, 72 bp, Homo sapiens
ccttccaagtcatagtgcctctctctcaagaggactgttttgcaaatcaatcagaaaaagttttttttcaaa

SEQ ID NO: 83580 - DNA, 72 bp, Homo sapiens
atagtgcctctctctcaagaggactgttttgcaaatcaatcagaaaaagttttttttcaaacagagcctaag

SEQ ID NO: 83581 - DNA, 69 bp, Homo sapiens
gaggactgttttgcaaatcaatcagaaaaagttttttttcaaacagagcctaagtatgttttcctcaac

SEQ ID NO: 83582 - DNA, 71 bp, Homo sapiens
gcaaatcaatcagaaaaagttttttttcaaacagagcctaagtatgttttcctcaactcaaggttctgctc

SEQ ID NO: 83583 - DNA, 68 bp, Homo sapiens
aatcagaaaaagttttttttcaaacagagcctaagtatgttttcctcaactcaaggttctgctccacc

SEQ ID NO: 83584 - DNA, 70 bp, Homo sapiens
tttttttcaaacagagcctaagtatgttttcctcaactcaaggttctgctccaccttcataccttcctaa

SEQ ID NO: 83585 - DNA, 69 bp, Homo sapiens
aaacagagcctaagtatgttttcctcaactcaaggttctgctccaccttcataccttcctaaaaaagaa

SEQ ID NO: 83586 - DNA, 67 bp, Homo sapiens
cctaagtatgttttcctcaactcaaggttctgctccaccttcataccttcctaaaaaagaaaattac

SEQ ID NO: 83587 - DNA, 68 bp, Homo sapiens
ttttcctcaactcaaggttctgctccaccttcataccttcctaaaaaagaaaattactcaaaccacaa

SEQ ID NO: 83588 - DNA, 67 bp, Homo sapiens
aaggttctgctccaccttcataccttcctaaaaaagaaaattactcaaaccacaagtagacaggaaa

SEQ ID NO: 83589 - DNA, 69 bp, Homo sapiens
ctccaccttcataccttcctaaaaaagaaaattactcaaaccacaagtagacaggaaatctgtcttgta

SEQ ID NO: 83590 - DNA, 69 bp, Homo sapiens
cataccttcctaaaaaagaaaattactcaaaccacaagtagacaggaaatctgtcttgtaaaaggatga

SEQ ID NO: 83591 - DNA, 70 bp, Homo sapiens
aaaagaaaattactcaaaccacaagtagacaggaaatctgtcttgtaaaaggatgaatgaccggtcatcc

SEQ ID NO: 83592 - DNA, 72 bp, Homo sapiens
aattactcaaaccacaagtagacaggaaatctgtcttgtaaaaggatgaatgaccggtcatccttctttata

SEQ ID NO: 83593 - DNA, 71 bp, Homo sapiens
aaaccacaagtagacaggaaatctgtcttgtaaaaggatgaatgaccggtcatccttctttataaccagac

SEQ ID NO: 83594 - DNA, 77 bp, Homo sapiens
tagacaggaaatctgtcttgtaaaaggatgaatgaccggtcatccttctttataaccagacctcatgactgcagaaa

SEQ ID NO: 83595 - DNA, 74 bp, Homo sapiens
aaaaggatgaatgaccggtcatccttctttataaccagacctcatgactgcagaaaggggctttccatttgtca

SEQ ID NO: 83596 - DNA, 74 bp, Homo sapiens
atccttctttataaccagacctcatgactgcagaaaggggctttccatttgtcaaaccacactgaagtgaaata

SEQ ID NO: 83597 - DNA, 77 bp, Homo sapiens
tataaccagacctcatgactgcagaaaggggctttccatttgtcaaaccacactgaagtgaaatatgcttttctcac

SEQ ID NO: 83598 - DNA, 77 bp, Homo sapiens
ctcatgactgcagaaaggggctttccatttgtcaaaccacactgaagtgaaatatgcttttctcactctttcagttc

SEQ ID NO: 83599 - DNA, 74 bp, Homo sapiens
aaaggggctttccatttgtcaaaccacactgaagtgaaatatgcttttctcactctttcagttctgcactgctt

SEQ ID NO: 83600 - DNA, 76 bp, Homo sapiens
tttccatttgtcaaaccacactgaagtgaaatatgcttttctcactctttcagttctgcactgctttctttcttct

SEQ ID NO: 83601 - DNA, 74 bp, Homo sapiens
aaaccacactgaagtgaaatatgcttttctcactctttcagttctgcactgctttctttcttcttgtttttcaa

SEQ ID NO: 83602 - DNA, 76 bp, Homo sapiens
tgaagtgaaatatgcttttctcactctttcagttctgcactgctttctttcttcttgtttttcaaatctgccaaaa

SEQ ID NO: 83603 - DNA, 75 bp, Homo sapiens
aaatatgcttttctcactctttcagttctgcactgctttctttcttcttgtttttcaaatctgccaaaactgcat

SEQ ID NO: 83604 - DNA, 75 bp, Homo sapiens
actctttcagttctgcactgctttctttcttcttgtttttcaaatctgccaaaactgcattgatagctaacaaac

SEQ ID NO: 83605 - DNA, 75 bp, Homo sapiens
ttcagttctgcactgctttctttcttcttgtttttcaaatctgccaaaactgcattgatagctaacaaacttccc

SEQ ID NO: 83606 - DNA, 78 bp, Homo sapiens
tcttgtttttcaaatctgccaaaactgcattgatagctaacaaacttccccatgtgacctctgtctgtagctctccaa

SEQ ID NO: 83607 - DNA, 78 bp, Homo sapiens
tttcaaatctgccaaaactgcattgatagctaacaaacttccccatgtgacctctgtctgtagctctccaaggtcaaa

SEQ ID NO: 83608 - DNA, 79 bp, Homo sapiens
aaaactgcattgatagctaacaaacttccccatgtgacctctgtctgtagctctccaaggtcaaactgatgcaacatat

SEQ ID NO: 83609 - DNA, 79 bp, Homo sapiens
attgatagctaacaaacttccccatgtgacctctgtctgtagctctccaaggtcaaactgatgcaacatatttgtagaa

SEQ ID NO: 83610 - DNA, 77 bp, Homo sapiens
acaaacttccccatgtgacctctgtctgtagctctccaaggtcaaactgatgcaacatatttgtagaagcttggtta

SEQ ID NO: 83611 - DNA, 77 bp, Homo sapiens
catgtgacctctgtctgtagctctccaaggtcaaactgatgcaacatatttgtagaagcttggttaggaaaagttaa

SEQ ID NO: 83612 - DNA, 73 bp, Homo sapiens
acctctgtctgtagctctccaaggtcaaactgatgcaacatatttgtagaagcttggttaggaaaagttaaaa

SEQ ID NO: 83613 - DNA, 73 bp, Homo sapiens
aagttaaaaaaaatggaaactctctcctcaatttgcttcttagacaggatagcggagtggagaggctgcgaga

SEQ ID NO: 83614 - DNA, 80 bp, Homo sapiens
aaaatggaaactctctcctcaatttgcttcttagacaggatagcggagtggagaggctgcgagatagctcatctcaagtg

SEQ ID NO: 83615 - DNA, 84 bp, Homo sapiens
aactctctcctcaatttgcttcttagacaggatagcggagtggagaggctgcgagatagctcatctcaagtgtgagatatatta

SEQ ID NO: 83616 - DNA, 85 bp, Homo sapiens
ttagacaggatagcggagtggagaggctgcgagatagctcatctcaagtgtgagatatattattgaatacgcagggagggcatta

SEQ ID NO: 83617 - DNA, 84 bp, Homo sapiens
aggatagcggagtggagaggctgcgagatagctcatctcaagtgtgagatatattattgaatacgcagggagggcattattgag

SEQ ID NO: 83618 - DNA, 83 bp, Homo sapiens
agaggctgcgagatagctcatctcaagtgtgagatatattattgaatacgcagggagggcattattgaggcagaaattatatt

SEQ ID NO: 83619 - DNA, 81 bp, Homo sapiens
agatagctcatctcaagtgtgagatatattattgaatacgcagggagggcattattgaggcagaaattatatttccaacat

SEQ ID NO: 83620 - DNA, 78 bp, Homo sapiens
atctcaagtgtgagatatattattgaatacgcagggagggcattattgaggcagaaattatatttccaacatttcaaa

SEQ ID NO: 83621 - DNA, 74 bp, Homo sapiens
cagggagggcattattgaggcagaaattatatttccaacatttcaaaacacatctctcctccaacatcaaaaac

SEQ ID NO: 83622 - DNA, 75 bp, Homo sapiens
tgaggcagaaattatatttccaacatttcaaaacacatctctcctccaacatcaaaaactttcctacataagtga

SEQ ID NO: 83623 - DNA, 74 bp, Homo sapiens
tatatttccaacatttcaaaacacatctctcctccaacatcaaaaactttcctacataagtgattcacgccact

SEQ ID NO: 83624 - DNA, 71 bp, Homo sapiens
atttcaaaacacatctctcctccaacatcaaaaactttcctacataagtgattcacgccacttccccaaat

SEQ ID NO: 83625 - DNA, 73 bp, Homo sapiens
aaacacatctctcctccaacatcaaaaactttcctacataagtgattcacgccacttccccaaattctacaca

SEQ ID NO: 83626 - DNA, 72 bp, Homo sapiens
tccaacatcaaaaactttcctacataagtgattcacgccacttccccaaattctacacactctctaaagaaa

SEQ ID NO: 83627 - DNA, 70 bp, Homo sapiens
atcaaaaactttcctacataagtgattcacgccacttccccaaattctacacactctctaaagaaaacaa

SEQ ID NO: 83628 - DNA, 74 bp, Homo sapiens
ttcctacataagtgattcacgccacttccccaaattctacacactctctaaagaaaacaagtgcaaagagctaa

SEQ ID NO: 83629 - DNA, 79 bp, Homo sapiens
aattctacacactctctaaagaaaacaagtgcaaagagctaagaggactcaacagcagcattattctgttgcgccatct

SEQ ID NO: 83630 - DNA, 81 bp, Homo sapiens
ctctaaagaaaacaagtgcaaagagctaagaggactcaacagcagcattattctgttgcgccatcttctctcaaagacata

SEQ ID NO: 83631 - DNA, 82 bp, Homo sapiens
aaacaagtgcaaagagctaagaggactcaacagcagcattattctgttgcgccatcttctctcaaagacatacactgagtat

SEQ ID NO: 83632 - DNA, 81 bp, Homo sapiens
aaagagctaagaggactcaacagcagcattattctgttgcgccatcttctctcaaagacatacactgagtattctccccac

SEQ ID NO: 83633 - DNA, 82 bp, Homo sapiens
taagaggactcaacagcagcattattctgttgcgccatcttctctcaaagacatacactgagtattctccccaccgacgctc

SEQ ID NO: 83634 - DNA, 84 bp, Homo sapiens
agcagcattattctgttgcgccatcttctctcaaagacatacactgagtattctccccaccgacgctctgacagtgacattcag

SEQ ID NO: 83635 - DNA, 82 bp, Homo sapiens
attattctgttgcgccatcttctctcaaagacatacactgagtattctccccaccgacgctctgacagtgacattcaggcca

SEQ ID NO: 83636 - DNA, 80 bp, Homo sapiens
ccatcttctctcaaagacatacactgagtattctccccaccgacgctctgacagtgacattcaggccaagcaaggagtta

SEQ ID NO: 83637 - DNA, 80 bp, Homo sapiens
tcaaagacatacactgagtattctccccaccgacgctctgacagtgacattcaggccaagcaaggagttagtttgagcta

SEQ ID NO: 83638 - DNA, 78 bp, Homo sapiens
acatacactgagtattctccccaccgacgctctgacagtgacattcaggccaagcaaggagttagtttgagctataac

SEQ ID NO: 83639 - DNA, 76 bp, Homo sapiens
agtattctccccaccgacgctctgacagtgacattcaggccaagcaaggagttagtttgagctataaccgcagaaa

SEQ ID NO: 83640 - DNA, 74 bp, Homo sapiens
ttcaggccaagcaaggagttagtttgagctataaccgcagaaagtgactacctgagaagtctgaggttttaata

SEQ ID NO: 83641 - DNA, 71 bp, Homo sapiens
aagcaaggagttagtttgagctataaccgcagaaagtgactacctgagaagtctgaggttttaataagacc

SEQ ID NO: 83642 - DNA, 72 bp, Homo sapiens
tagtttgagctataaccgcagaaagtgactacctgagaagtctgaggttttaataagaccctggggcactaa

SEQ ID NO: 83643 - DNA, 77 bp, Homo sapiens
tataaccgcagaaagtgactacctgagaagtctgaggttttaataagaccctggggcactaagctgtgctgctcatc

SEQ ID NO: 83644 - DNA, 76 bp, Homo sapiens
aaagtgactacctgagaagtctgaggttttaataagaccctggggcactaagctgtgctgctcatctgaacaacaa

SEQ ID NO: 83645 - DNA, 77 bp, Homo sapiens
tacctgagaagtctgaggttttaataagaccctggggcactaagctgtgctgctcatctgaacaacaaggtgtcaaa

SEQ ID NO: 83646 - DNA, 78 bp, Homo sapiens
ttttaataagaccctggggcactaagctgtgctgctcatctgaacaacaaggtgtcaaagctggttcagaagcaggta

SEQ ID NO: 83647 - DNA, 80 bp, Homo sapiens
actaagctgtgctgctcatctgaacaacaaggtgtcaaagctggttcagaagcaggtagctatctccccaccaactccac

SEQ ID NO: 83648 - DNA, 72 bp, Homo sapiens
aacaacaaggtgtcaaagctggttcagaagcaggtagctatctccccaccaactccacctcttccctccagg

SEQ ID NO: 83649 - DNA, 78 bp, Homo sapiens
tgtcaaagctggttcagaagcaggtagctatctccccaccaactccacctcttccctccaggggcagctggacatcca

SEQ ID NO: 83650 - DNA, 76 bp, Homo sapiens
tggttcagaagcaggtagctatctccccaccaactccacctcttccctccaggggcagctggacatccagcccagt

SEQ ID NO: 83651 - DNA, 75 bp, Homo sapiens
aggtagctatctccccaccaactccacctcttccctccaggggcagctggacatccagcccagttcattcctcaa

SEQ ID NO: 83652 - DNA, 74 bp, Homo sapiens
tccccaccaactccacctcttccctccaggggcagctggacatccagcccagttcattcctcaaagtgggaata

SEQ ID NO: 83653 - DNA, 74 bp, Homo sapiens
ttccctccaggggcagctggacatccagcccagttcattcctcaaagtgggaatactgactggggaaccaccta

SEQ ID NO: 83654 - DNA, 76 bp, Homo sapiens
gcagctggacatccagcccagttcattcctcaaagtgggaatactgactggggaaccacctatggaaaagactaca

SEQ ID NO: 83655 - DNA, 73 bp, Homo sapiens
acatccagcccagttcattcctcaaagtgggaatactgactggggaaccacctatggaaaagactacagtgaa

SEQ ID NO: 83656 - DNA, 73 bp, Homo sapiens
agttcattcctcaaagtgggaatactgactggggaaccacctatggaaaagactacagtgaacatcacaagaa

SEQ ID NO: 83657 - DNA, 74 bp, Homo sapiens
ttcctcaaagtgggaatactgactggggaaccacctatggaaaagactacagtgaacatcacaagaaatgagag

SEQ ID NO: 83658 - DNA, 80 bp, Homo sapiens
gggaaccacctatggaaaagactacagtgaacatcacaagaaatgagaggatgatggctcagttcatgggaacagcattc

SEQ ID NO: 83659 - DNA, 81 bp, Homo sapiens
tatggaaaagactacagtgaacatcacaagaaatgagaggatgatggctcagttcatgggaacagcattcttcttggacct

SEQ ID NO: 83660 - DNA, 81 bp, Homo sapiens
actacagtgaacatcacaagaaatgagaggatgatggctcagttcatgggaacagcattcttcttggaccttaactcatta

SEQ ID NO: 83661 - DNA, 79 bp, Homo sapiens
aacatcacaagaaatgagaggatgatggctcagttcatgggaacagcattcttcttggaccttaactcattagtaaatg

SEQ ID NO: 83662 - DNA, 77 bp, Homo sapiens
aaatgagaggatgatggctcagttcatgggaacagcattcttcttggaccttaactcattagtaaatgtccttggta

SEQ ID NO: 83663 - DNA, 74 bp, Homo sapiens
atgatggctcagttcatgggaacagcattcttcttggaccttaactcattagtaaatgtccttggtaaaaatta

SEQ ID NO: 83664 - DNA, 72 bp, Homo sapiens
gctcagttcatgggaacagcattcttcttggaccttaactcattagtaaatgtccttggtaaaaattaatta

SEQ ID NO: 83665 - DNA, 76 bp, Homo sapiens
taattaatttaaaaaagcagcaaataatttctggccaactgatgcccacgcatctcctctctcataagtgaacaaa

SEQ ID NO: 83666 - DNA, 75 bp, Homo sapiens
aatttaaaaaagcagcaaataatttctggccaactgatgcccacgcatctcctctctcataagtgaacaaatact

SEQ ID NO: 83667 - DNA, 77 bp, Homo sapiens
caaataatttctggccaactgatgcccacgcatctcctctctcataagtgaacaaatacttcttcccctctgaggga

SEQ ID NO: 83668 - DNA, 77 bp, Homo sapiens
aatttctggccaactgatgcccacgcatctcctctctcataagtgaacaaatacttcttcccctctgagggactcca

SEQ ID NO: 83669 - DNA, 78 bp, Homo sapiens
catctcctctctcataagtgaacaaatacttcttcccctctgagggactccacagtgtcacattctccaggagattaa

SEQ ID NO: 83670 - DNA, 74 bp, Homo sapiens
aacaaatacttcttcccctctgagggactccacagtgtcacattctccaggagattaacctcatgtagttatta

SEQ ID NO: 83671 - DNA, 77 bp, Homo sapiens
atacttcttcccctctgagggactccacagtgtcacattctccaggagattaacctcatgtagttattagcagtcac

SEQ ID NO: 83672 - DNA, 80 bp, Homo sapiens
tgagggactccacagtgtcacattctccaggagattaacctcatgtagttattagcagtcacctgagaatttcacattaa

SEQ ID NO: 83673 - DNA, 78 bp, Homo sapiens
actccacagtgtcacattctccaggagattaacctcatgtagttattagcagtcacctgagaatttcacattaaccag

SEQ ID NO: 83674 - DNA, 76 bp, Homo sapiens
acattctccaggagattaacctcatgtagttattagcagtcacctgagaatttcacattaaccagtcctcggaaga

SEQ ID NO: 83675 - DNA, 77 bp, Homo sapiens
aggagattaacctcatgtagttattagcagtcacctgagaatttcacattaaccagtcctcggaagacagtggcaca

SEQ ID NO: 83676 - DNA, 80 bp, Homo sapiens
taacctcatgtagttattagcagtcacctgagaatttcacattaaccagtcctcggaagacagtggcacatcatggataa

SEQ ID NO: 83677 - DNA, 82 bp, Homo sapiens
tagttattagcagtcacctgagaatttcacattaaccagtcctcggaagacagtggcacatcatggataagagcctagcaca

SEQ ID NO: 83678 - DNA, 79 bp, Homo sapiens
acctgagaatttcacattaaccagtcctcggaagacagtggcacatcatggataagagcctagcacaatgactggaatt

SEQ ID NO: 83679 - DNA, 78 bp, Homo sapiens
atttcacattaaccagtcctcggaagacagtggcacatcatggataagagcctagcacaatgactggaattttgggaa

SEQ ID NO: 83680 - DNA, 79 bp, Homo sapiens
taaccagtcctcggaagacagtggcacatcatggataagagcctagcacaatgactggaattttgggaagtggtcaata

SEQ ID NO: 83681 - DNA, 79 bp, Homo sapiens
gaagacagtggcacatcatggataagagcctagcacaatgactggaattttgggaagtggtcaataactaccattaaga

SEQ ID NO: 83682 - DNA, 78 bp, Homo sapiens
agtggcacatcatggataagagcctagcacaatgactggaattttgggaagtggtcaataactaccattaagagctat

SEQ ID NO: 83683 - DNA, 77 bp, Homo sapiens
tggataagagcctagcacaatgactggaattttgggaagtggtcaataactaccattaagagctattctgctttgta

SEQ ID NO: 83684 - DNA, 77 bp, Homo sapiens
aatgactggaattttgggaagtggtcaataactaccattaagagctattctgctttgtagctcactagtcactgatg

SEQ ID NO: 83685 - DNA, 78 bp, Homo sapiens
aattttgggaagtggtcaataactaccattaagagctattctgctttgtagctcactagtcactgatggctcatctta

SEQ ID NO: 83686 - DNA, 81 bp, Homo sapiens
tcaataactaccattaagagctattctgctttgtagctcactagtcactgatggctcatcttatgactttgttcactcttt

SEQ ID NO: 83687 - DNA, 80 bp, Homo sapiens
aactaccattaagagctattctgctttgtagctcactagtcactgatggctcatcttatgactttgttcactctttttga

SEQ ID NO: 83688 - DNA, 82 bp, Homo sapiens
ctattctgctttgtagctcactagtcactgatggctcatcttatgactttgttcactctttttgaatgtgaggaacaagata

SEQ ID NO: 83689 - DNA, 78 bp, Homo sapiens
ctttgtagctcactagtcactgatggctcatcttatgactttgttcactctttttgaatgtgaggaacaagatagttt

SEQ ID NO: 83690 - DNA, 76 bp, Homo sapiens
actagtcactgatggctcatcttatgactttgttcactctttttgaatgtgaggaacaagatagttttggtctgtt

SEQ ID NO: 83691 - DNA, 73 bp, Homo sapiens
atggctcatcttatgactttgttcactctttttgaatgtgaggaacaagatagttttggtctgtttgaaccct

SEQ ID NO: 83692 - DNA, 71 bp, Homo sapiens
cttatgactttgttcactctttttgaatgtgaggaacaagatagttttggtctgtttgaacccttgttcaa

SEQ ID NO: 83693 - DNA, 72 bp, Homo sapiens
ttgttcactctttttgaatgtgaggaacaagatagttttggtctgtttgaacccttgttcaatctaatgact

SEQ ID NO: 83694 - DNA, 73 bp, Homo sapiens
ttttgaatgtgaggaacaagatagttttggtctgtttgaacccttgttcaatctaatgacttgcaacgtagaa

SEQ ID NO: 83695 - DNA, 71 bp, Homo sapiens
aggaacaagatagttttggtctgtttgaacccttgttcaatctaatgacttgcaacgtagaacgtagctaa

SEQ ID NO: 83696 - DNA, 71 bp, Homo sapiens
aagatagttttggtctgtttgaacccttgttcaatctaatgacttgcaacgtagaacgtagctaaatttca

SEQ ID NO: 83697 - DNA, 74 bp, Homo sapiens
tctgtttgaacccttgttcaatctaatgacttgcaacgtagaacgtagctaaatttcagtgtcttgtgacgaaa

SEQ ID NO: 83698 - DNA, 73 bp, Homo sapiens
ccttgttcaatctaatgacttgcaacgtagaacgtagctaaatttcagtgtcttgtgacgaaaaatatggtta

SEQ ID NO: 83699 - DNA, 76 bp, Homo sapiens
aatctaatgacttgcaacgtagaacgtagctaaatttcagtgtcttgtgacgaaaaatatggttatgctcaagcca

SEQ ID NO: 83700 - DNA, 74 bp, Homo sapiens
acttgcaacgtagaacgtagctaaatttcagtgtcttgtgacgaaaaatatggttatgctcaagccagtgattt

SEQ ID NO: 83701 - DNA, 74 bp, Homo sapiens
tagaacgtagctaaatttcagtgtcttgtgacgaaaaatatggttatgctcaagccagtgattttacttctgtt

SEQ ID NO: 83702 - DNA, 74 bp, Homo sapiens
aatttcagtgtcttgtgacgaaaaatatggttatgctcaagccagtgattttacttctgtttggtacatttgtg

SEQ ID NO: 83703 - DNA, 75 bp, Homo sapiens
agtgtcttgtgacgaaaaatatggttatgctcaagccagtgattttacttctgtttggtacatttgtgtgttcat

SEQ ID NO: 83704 - DNA, 77 bp, Homo sapiens
aaaaatatggttatgctcaagccagtgattttacttctgtttggtacatttgtgtgttcattctgtcatgtgactaa

SEQ ID NO: 83705 - DNA, 79 bp, Homo sapiens
tatggttatgctcaagccagtgattttacttctgtttggtacatttgtgtgttcattctgtcatgtgactaatatttag

SEQ ID NO: 83706 - DNA, 78 bp, Homo sapiens
agccagtgattttacttctgtttggtacatttgtgtgttcattctgtcatgtgactaatatttagtgcctaattgcta

SEQ ID NO: 83707 - DNA, 79 bp, Homo sapiens
tttacttctgtttggtacatttgtgtgttcattctgtcatgtgactaatatttagtgcctaattgctattcagttatga

SEQ ID NO: 83708 - DNA, 77 bp, Homo sapiens
gtttggtacatttgtgtgttcattctgtcatgtgactaatatttagtgcctaattgctattcagttatgaaagggaa

SEQ ID NO: 83709 - DNA, 76 bp, Homo sapiens
tttgtgtgttcattctgtcatgtgactaatatttagtgcctaattgctattcagttatgaaagggaaaaagaggtc

SEQ ID NO: 83710 - DNA, 77 bp, Homo sapiens
cattctgtcatgtgactaatatttagtgcctaattgctattcagttatgaaagggaaaaagaggtccttgatgatta

SEQ ID NO: 83711 - DNA, 75 bp, Homo sapiens
tgactaatatttagtgcctaattgctattcagttatgaaagggaaaaagaggtccttgatgattaaactctgaca

SEQ ID NO: 83712 - DNA, 72 bp, Homo sapiens
atttagtgcctaattgctattcagttatgaaagggaaaaagaggtccttgatgattaaactctgacaccaat

SEQ ID NO: 83713 - DNA, 75 bp, Homo sapiens
taattgctattcagttatgaaagggaaaaagaggtccttgatgattaaactctgacaccaattgttggtatcaga

SEQ ID NO: 83714 - DNA, 72 bp, Homo sapiens
agttatgaaagggaaaaagaggtccttgatgattaaactctgacaccaattgttggtatcagaattggcatt

SEQ ID NO: 83715 - DNA, 73 bp, Homo sapiens
aaagggaaaaagaggtccttgatgattaaactctgacaccaattgttggtatcagaattggcatttctgtgac

SEQ ID NO: 83716 - DNA, 77 bp, Homo sapiens
aaagaggtccttgatgattaaactctgacaccaattgttggtatcagaattggcatttctgtgactcacccattata

SEQ ID NO: 83717 - DNA, 78 bp, Homo sapiens
aactctgacaccaattgttggtatcagaattggcatttctgtgactcacccattatactgtctgtcccgttggcagga

SEQ ID NO: 83718 - DNA, 77 bp, Homo sapiens
agaattggcatttctgtgactcacccattatactgtctgtcccgttggcaggaggcgtacaggaagaggtgctgtaa

SEQ ID NO: 83719 - DNA, 73 bp, Homo sapiens
aggaggcgtacaggaagaggtgctgtaatggtttgtaccactacgatggaaagtggacatcggaggaagactg

SEQ ID NO: 83720 - DNA, 77 bp, Homo sapiens
aggtgctgtaatggtttgtaccactacgatggaaagtggacatcggaggaagactggaattgatgtctgctgaggag

SEQ ID NO: 83721 - DNA, 79 bp, Homo sapiens
aatggtttgtaccactacgatggaaagtggacatcggaggaagactggaattgatgtctgctgaggagtgtgatggata

SEQ ID NO: 83722 - DNA, 83 bp, Homo sapiens
tggaaagtggacatcggaggaagactggaattgatgtctgctgaggagtgtgatggatagctctatagcaagaagcagaaaaa

SEQ ID NO: 83723 - DNA, 82 bp, Homo sapiens
ggaggaagactggaattgatgtctgctgaggagtgtgatggatagctctatagcaagaagcagaaaaaggtggccatattta

SEQ ID NO: 83724 - DNA, 83 bp, Homo sapiens
aagactggaattgatgtctgctgaggagtgtgatggatagctctatagcaagaagcagaaaaaggtggccatatttaatcata

SEQ ID NO: 83725 - DNA, 78 bp, Homo sapiens
ttaatcaactagctgtgacattcccgttaccgtgtatgtctgccttaccaaacgttcatgtggatgcaggctacagta

SEQ ID NO: 83726 - DNA, 80 bp, Homo sapiens
actagctgtgacattcccgttaccgtgtatgtctgccttaccaaacgttcatgtggatgcaggctacagtagctgctgga

SEQ ID NO: 83727 - DNA, 78 bp, Homo sapiens
attcccgttaccgtgtatgtctgccttaccaaacgttcatgtggatgcaggctacagtagctgctggactgtggaata

SEQ ID NO: 83728 - DNA, 84 bp, Homo sapiens
tgtatgtctgccttaccaaacgttcatgtggatgcaggctacagtagctgctggactgtggaatatgagaagagttgcccaaca

SEQ ID NO: 83729 - DNA, 82 bp, Homo sapiens
tctgccttaccaaacgttcatgtggatgcaggctacagtagctgctggactgtggaatatgagaagagttgcccaacattcc

SEQ ID NO: 83730 - DNA, 84 bp, Homo sapiens
ccaaacgttcatgtggatgcaggctacagtagctgctggactgtggaatatgagaagagttgcccaacattcctgcatagccag

SEQ ID NO: 83731 - DNA, 88 bp, Homo sapiens
atgtggatgcaggctacagtagctgctggactgtggaatatgagaagagttgcccaacattcctgcatagccaggctgattcatccca

SEQ ID NO: 83732 - DNA, 84 bp, Homo sapiens
aggctacagtagctgctggactgtggaatatgagaagagttgcccaacattcctgcatagccaggctgattcatcccactggag

SEQ ID NO: 83733 - DNA, 84 bp, Homo sapiens
agctgctggactgtggaatatgagaagagttgcccaacattcctgcatagccaggctgattcatcccactggaggagctccaag

SEQ ID NO: 83734 - DNA, 85 bp, Homo sapiens
tggaatatgagaagagttgcccaacattcctgcatagccaggctgattcatcccactggaggagctccaagggtcactgctgtga

SEQ ID NO: 83735 - DNA, 85 bp, Homo sapiens
agagttgcccaacattcctgcatagccaggctgattcatcccactggaggagctccaagggtcactgctgtgatggccatctgta

SEQ ID NO: 83736 - DNA, 83 bp, Homo sapiens
aacattcctgcatagccaggctgattcatcccactggaggagctccaagggtcactgctgtgatggccatctgtaaaggacaa

SEQ ID NO: 83737 - DNA, 84 bp, Homo sapiens
tcctgcatagccaggctgattcatcccactggaggagctccaagggtcactgctgtgatggccatctgtaaaggacaaagacaa

SEQ ID NO: 83738 - DNA, 80 bp, Homo sapiens
ctgattcatcccactggaggagctccaagggtcactgctgtgatggccatctgtaaaggacaaagacaaccatgactttc

SEQ ID NO: 83739 - DNA, 79 bp, Homo sapiens
aaaatgctatccagtggcctttccctcagaagcagcagcatcttaccttgcatgaagaaggagctagggaaagtgctgg

SEQ ID NO: 83740 - DNA, 80 bp, Homo sapiens
tatccagtggcctttccctcagaagcagcagcatcttaccttgcatgaagaaggagctagggaaagtgctggttgctggt

SEQ ID NO: 83741 - DNA, 78 bp, Homo sapiens
ctttccctcagaagcagcagcatcttaccttgcatgaagaaggagctagggaaagtgctggttgctggtttggaggaa

SEQ ID NO: 83742 - DNA, 79 bp, Homo sapiens
agaagcagcagcatcttaccttgcatgaagaaggagctagggaaagtgctggttgctggtttggaggaaggatagcctg

SEQ ID NO: 83743 - DNA, 75 bp, Homo sapiens
atcttaccttgcatgaagaaggagctagggaaagtgctggttgctggtttggaggaaggatagcctggcgagtcc

SEQ ID NO: 83744 - DNA, 76 bp, Homo sapiens
ttgcatgaagaaggagctagggaaagtgctggttgctggtttggaggaaggatagcctggcgagtccctattgtag

SEQ ID NO: 83745 - DNA, 73 bp, Homo sapiens
aaggagctagggaaagtgctggttgctggtttggaggaaggatagcctggcgagtccctattgtagtcggcag

SEQ ID NO: 83746 - DNA, 80 bp, Homo sapiens
aaagtgctggttgctggtttggaggaaggatagcctggcgagtccctattgtagtcggcagtgcttgctgatggagcata

SEQ ID NO: 83747 - DNA, 82 bp, Homo sapiens
tgctggtttggaggaaggatagcctggcgagtccctattgtagtcggcagtgcttgctgatggagcatagacctgaggagaa

SEQ ID NO: 83748 - DNA, 80 bp, Homo sapiens
tttggaggaaggatagcctggcgagtccctattgtagtcggcagtgcttgctgatggagcatagacctgaggagaaagaa

SEQ ID NO: 83749 - DNA, 79 bp, Homo sapiens
atagcctggcgagtccctattgtagtcggcagtgcttgctgatggagcatagacctgaggagaaagaaccaactgagtt

SEQ ID NO: 83750 - DNA, 76 bp, Homo sapiens
agtccctattgtagtcggcagtgcttgctgatggagcatagacctgaggagaaagaaccaactgagttttgctttt

SEQ ID NO: 83751 - DNA, 81 bp, Homo sapiens
tattgtagtcggcagtgcttgctgatggagcatagacctgaggagaaagaaccaactgagttttgctttttgcattgacca

SEQ ID NO: 83752 - DNA, 81 bp, Homo sapiens
agtgcttgctgatggagcatagacctgaggagaaagaaccaactgagttttgctttttgcattgaccacagcagcccaagc

SEQ ID NO: 83753 - DNA, 73 bp, Homo sapiens
aagtcaggcaggctcaggatagaccactttggggagactctgaccttacctctgctttcccttcgtggtccag

SEQ ID NO: 83754 - DNA, 74 bp, Homo sapiens
aggctcaggatagaccactttggggagactctgaccttacctctgctttcccttcgtggtccaggcaacatagc

SEQ ID NO: 83755 - DNA, 73 bp, Homo sapiens
atagaccactttggggagactctgaccttacctctgctttcccttcgtggtccaggcaacatagccctgtatc

SEQ ID NO: 83756 - DNA, 79 bp, Homo sapiens
gagactctgaccttacctctgctttcccttcgtggtccaggcaacatagccctgtatctgagcatctgcattgtttaaa

SEQ ID NO: 83757 - DNA, 79 bp, Homo sapiens
tctgaccttacctctgctttcccttcgtggtccaggcaacatagccctgtatctgagcatctgcattgtttaaatttca

SEQ ID NO: 83758 - DNA, 79 bp, Homo sapiens
tgctttcccttcgtggtccaggcaacatagccctgtatctgagcatctgcattgtttaaatttcatcctgtggtgttgt

SEQ ID NO: 83759 - DNA, 81 bp, Homo sapiens
cttcgtggtccaggcaacatagccctgtatctgagcatctgcattgtttaaatttcatcctgtggtgttgtttgctgattg

SEQ ID NO: 83760 - DNA, 85 bp, Homo sapiens
aggcaacatagccctgtatctgagcatctgcattgtttaaatttcatcctgtggtgttgtttgctgattggtcagacatggctga

SEQ ID NO: 83761 - DNA, 86 bp, Homo sapiens
cctgtatctgagcatctgcattgtttaaatttcatcctgtggtgttgtttgctgattggtcagacatggctgacagcatcagaact

SEQ ID NO: 83762 - DNA, 87 bp, Homo sapiens
agcatctgcattgtttaaatttcatcctgtggtgttgtttgctgattggtcagacatggctgacagcatcagaacttcaatctgaca

SEQ ID NO: 83763 - DNA, 83 bp, Homo sapiens
attgtttaaatttcatcctgtggtgttgtttgctgattggtcagacatggctgacagcatcagaacttcaatctgacacacaa

SEQ ID NO: 83764 - DNA, 87 bp, Homo sapiens
taaatttcatcctgtggtgttgtttgctgattggtcagacatggctgacagcatcagaacttcaatctgacacacaaggagcaagca

SEQ ID NO: 83765 - DNA, 88 bp, Homo sapiens
tgtggtgttgtttgctgattggtcagacatggctgacagcatcagaacttcaatctgacacacaaggagcaagcaggaccacagccca

SEQ ID NO: 83766 - DNA, 88 bp, Homo sapiens
tttgctgattggtcagacatggctgacagcatcagaacttcaatctgacacacaaggagcaagcaggaccacagcccagaattcataa

SEQ ID NO: 83767 - DNA, 86 bp, Homo sapiens
ttggtcagacatggctgacagcatcagaacttcaatctgacacacaaggagcaagcaggaccacagcccagaattcataatgggag

SEQ ID NO: 83768 - DNA, 84 bp, Homo sapiens
atggctgacagcatcagaacttcaatctgacacacaaggagcaagcaggaccacagcccagaattcataatgggagggagagag

SEQ ID NO: 83769 - DNA, 78 bp, Homo sapiens
atcagaacttcaatctgacacacaaggagcaagcaggaccacagcccagaattcataatgggagggagagagggaact

SEQ ID NO: 83770 - DNA, 81 bp, Homo sapiens
aatctgacacacaaggagcaagcaggaccacagcccagaattcataatgggagggagagagggaacttcatgctggatata

SEQ ID NO: 83771 - DNA, 80 bp, Homo sapiens
acaaggagcaagcaggaccacagcccagaattcataatgggagggagagagggaacttcatgctggatatatgaaactca

SEQ ID NO: 83772 - DNA, 79 bp, Homo sapiens
aagcaggaccacagcccagaattcataatgggagggagagagggaacttcatgctggatatatgaaactcagacccgca

SEQ ID NO: 83773 - DNA, 81 bp, Homo sapiens
agcccagaattcataatgggagggagagagggaacttcatgctggatatatgaaactcagacccgcagatgtccgctgtga

SEQ ID NO: 83774 - DNA, 80 bp, Homo sapiens
aattcataatgggagggagagagggaacttcatgctggatatatgaaactcagacccgcagatgtccgctgtgaggcctg

SEQ ID NO: 83775 - DNA, 70 bp, Homo sapiens
acaataaaacttgtcaaaaatccccctcgcagcccgcattcgcttaccgctttcccattatagtagtaca

SEQ ID NO: 83776 - DNA, 71 bp, Homo sapiens
acttgtcaaaaatccccctcgcagcccgcattcgcttaccgctttcccattatagtagtacatcaaagagt

SEQ ID NO: 83777 - DNA, 72 bp, Homo sapiens
aaaatccccctcgcagcccgcattcgcttaccgctttcccattatagtagtacatcaaagagttgccgccca

SEQ ID NO: 83778 - DNA, 74 bp, Homo sapiens
agcccgcattcgcttaccgctttcccattatagtagtacatcaaagagttgccgcccatgcccgggattgtgta

SEQ ID NO: 83779 - DNA, 76 bp, Homo sapiens
attcgcttaccgctttcccattatagtagtacatcaaagagttgccgcccatgcccgggattgtgtatgcgcagta

SEQ ID NO: 83780 - DNA, 78 bp, Homo sapiens
ttcccattatagtagtacatcaaagagttgccgcccatgcccgggattgtgtatgcgcagtacatggtctcggattct

SEQ ID NO: 83781 - DNA, 76 bp, Homo sapiens
ttatagtagtacatcaaagagttgccgcccatgcccgggattgtgtatgcgcagtacatggtctcggattcttttt

SEQ ID NO: 83782 - DNA, 78 bp, Homo sapiens
tacatcaaagagttgccgcccatgcccgggattgtgtatgcgcagtacatggtctcggattcttttttctcctcagta

SEQ ID NO: 83783 - DNA, 75 bp, Homo sapiens
ccgcccatgcccgggattgtgtatgcgcagtacatggtctcggattcttttttctcctcagtaccactctaacaa

SEQ ID NO: 83784 - DNA, 72 bp, Homo sapiens
ccgggattgtgtatgcgcagtacatggtctcggattcttttttctcctcagtaccactctaacaacttttat

SEQ ID NO: 83785 - DNA, 73 bp, Homo sapiens
attgtgtatgcgcagtacatggtctcggattcttttttctcctcagtaccactctaacaacttttatttcaaa

SEQ ID NO: 83786 - DNA, 70 bp, Homo sapiens
agtacatggtctcggattcttttttctcctcagtaccactctaacaacttttatttcaaactcgctgtcc

SEQ ID NO: 83787 - DNA, 67 bp, Homo sapiens
tctcggattcttttttctcctcagtaccactctaacaacttttatttcaaactcgctgtcccttttt

SEQ ID NO: 83788 - DNA, 68 bp, Homo sapiens
tttctcctcagtaccactctaacaacttttatttcaaactcgctgtcccttttttcacaacaattcct

SEQ ID NO: 83789 - DNA, 69 bp, Homo sapiens
agtaccactctaacaacttttatttcaaactcgctgtcccttttttcacaacaattccttcagttgcat

SEQ ID NO: 83790 - DNA, 69 bp, Homo sapiens
ctctaacaacttttatttcaaactcgctgtcccttttttcacaacaattccttcagttgcattttccca

SEQ ID NO: 83791 - DNA, 69 bp, Homo sapiens
cttttatttcaaactcgctgtcccttttttcacaacaattccttcagttgcattttcccatatggccgg

SEQ ID NO: 83792 - DNA, 70 bp, Homo sapiens
aaactcgctgtcccttttttcacaacaattccttcagttgcattttcccatatggccgggccaagcgtgg

SEQ ID NO: 83793 - DNA, 76 bp, Homo sapiens
tttttcacaacaattccttcagttgcattttcccatatggccgggccaagcgtggtgaatatgcaaagcaggaaga

SEQ ID NO: 83794 - DNA, 76 bp, Homo sapiens
acaacaattccttcagttgcattttcccatatggccgggccaagcgtggtgaatatgcaaagcaggaagagaccat

SEQ ID NO: 83795 - DNA, 76 bp, Homo sapiens
ccttcagttgcattttcccatatggccgggccaagcgtggtgaatatgcaaagcaggaagagaccattcctggcgg

SEQ ID NO: 83796 - DNA, 75 bp, Homo sapiens
ctatctccttcccatcaatacaaaacagaacaaaataagcaatatacaaagcagaaacaagcagtacttactgaa

SEQ ID NO: 83797 - DNA, 76 bp, Homo sapiens
cttcccatcaatacaaaacagaacaaaataagcaatatacaaagcagaaacaagcagtacttactgaagatggcaa

SEQ ID NO: 83798 - DNA, 74 bp, Homo sapiens
caaaacagaacaaaataagcaatatacaaagcagaaacaagcagtacttactgaagatggcaaacctggaggaa

SEQ ID NO: 83799 - DNA, 73 bp, Homo sapiens
caaaataagcaatatacaaagcagaaacaagcagtacttactgaagatggcaaacctggaggaacttttcgaa

SEQ ID NO: 83800 - DNA, 70 bp, Homo sapiens
aatatacaaagcagaaacaagcagtacttactgaagatggcaaacctggaggaacttttcgaactttctt

SEQ ID NO: 83801 - DNA, 71 bp, Homo sapiens
aaagcagaaacaagcagtacttactgaagatggcaaacctggaggaacttttcgaactttctttgtctgta

SEQ ID NO: 83802 - DNA, 71 bp, Homo sapiens
aacaagcagtacttactgaagatggcaaacctggaggaacttttcgaactttctttgtctgtacctctgaa

SEQ ID NO: 83803 - DNA, 70 bp, Homo sapiens
acttactgaagatggcaaacctggaggaacttttcgaactttctttgtctgtacctctgaaagaaaatga

SEQ ID NO: 83804 - DNA, 72 bp, Homo sapiens
atggcaaacctggaggaacttttcgaactttctttgtctgtacctctgaaagaaaatgaagatgctttcagc

SEQ ID NO: 83805 - DNA, 72 bp, Homo sapiens
aggaacttttcgaactttctttgtctgtacctctgaaagaaaatgaagatgctttcagctcccaaatgccca

SEQ ID NO: 83806 - DNA, 73 bp, Homo sapiens
tttcgaactttctttgtctgtacctctgaaagaaaatgaagatgctttcagctcccaaatgcccattttccta

SEQ ID NO: 83807 - DNA, 74 bp, Homo sapiens
aagaaaaaggcataatcatccctcaggcattcaaacaaaggaataccttacccatggcactactgtgaagaggc

SEQ ID NO: 83808 - DNA, 73 bp, Homo sapiens
ataatcatccctcaggcattcaaacaaaggaataccttacccatggcactactgtgaagaggcctccttcggg

SEQ ID NO: 83809 - DNA, 73 bp, Homo sapiens
ggcattcaaacaaaggaataccttacccatggcactactgtgaagaggcctccttcggggattattgctagaa

SEQ ID NO: 83810 - DNA, 73 bp, Homo sapiens
aacaaaggaataccttacccatggcactactgtgaagaggcctccttcggggattattgctagaatactgata

SEQ ID NO: 83811 - DNA, 74 bp, Homo sapiens
aataccttacccatggcactactgtgaagaggcctccttcggggattattgctagaatactgatagtactggga

SEQ ID NO: 83812 - DNA, 73 bp, Homo sapiens
atggcactactgtgaagaggcctccttcggggattattgctagaatactgatagtactgggaaccaggtttgg

SEQ ID NO: 83813 - DNA, 71 bp, Homo sapiens
tgaagaggcctccttcggggattattgctagaatactgatagtactgggaaccaggtttggtgggcgaaag

SEQ ID NO: 83814 - DNA, 69 bp, Homo sapiens
tccttcggggattattgctagaatactgatagtactgggaaccaggtttggtgggcgaaagggttcctg

SEQ ID NO: 83815 - DNA, 70 bp, Homo sapiens
attattgctagaatactgatagtactgggaaccaggtttggtgggcgaaagggttcctgggttgcccata

SEQ ID NO: 83816 - DNA, 72 bp, Homo sapiens
ctagaatactgatagtactgggaaccaggtttggtgggcgaaagggttcctgggttgcccatatccatgtca

SEQ ID NO: 83817 - DNA, 69 bp, Homo sapiens
atagtactgggaaccaggtttggtgggcgaaagggttcctgggttgcccatatccatgtcacctccaag

SEQ ID NO: 83818 - DNA, 71 bp, Homo sapiens
accaggtttggtgggcgaaagggttcctgggttgcccatatccatgtcacctccaaggagactctgctaaa

SEQ ID NO: 83819 - DNA, 70 bp, Homo sapiens
gtgggcgaaagggttcctgggttgcccatatccatgtcacctccaaggagactctgctaaaaggttaaaa

SEQ ID NO: 83820 - DNA, 68 bp, Homo sapiens
aaagggttcctgggttgcccatatccatgtcacctccaaggagactctgctaaaaggttaaaaaggga

SEQ ID NO: 83821 - DNA, 70 bp, Homo sapiens
ggttgcccatatccatgtcacctccaaggagactctgctaaaaggttaaaaagggaaaacaaacatataa

SEQ ID NO: 83822 - DNA, 73 bp, Homo sapiens
tagtaaacagaagaaaacaaaagcctcccctccacgagtcactcaccttgtcacacagtggggaatcatttca

SEQ ID NO: 83823 - DNA, 77 bp, Homo sapiens
aagaaaacaaaagcctcccctccacgagtcactcaccttgtcacacagtggggaatcatttcagctgtgatctgcta

SEQ ID NO: 83824 - DNA, 78 bp, Homo sapiens
aacaaaagcctcccctccacgagtcactcaccttgtcacacagtggggaatcatttcagctgtgatctgctatttaga

SEQ ID NO: 83825 - DNA, 83 bp, Homo sapiens
tccacgagtcactcaccttgtcacacagtggggaatcatttcagctgtgatctgctatttagacttgaagcccaagatactga

SEQ ID NO: 83826 - DNA, 81 bp, Homo sapiens
agtcactcaccttgtcacacagtggggaatcatttcagctgtgatctgctatttagacttgaagcccaagatactgagatt

SEQ ID NO: 83827 - DNA, 80 bp, Homo sapiens
cttgtcacacagtggggaatcatttcagctgtgatctgctatttagacttgaagcccaagatactgagattttgcctttc

SEQ ID NO: 83828 - DNA, 79 bp, Homo sapiens
gggaatcatttcagctgtgatctgctatttagacttgaagcccaagatactgagattttgcctttctctttggtttgca

SEQ ID NO: 83829 - DNA, 81 bp, Homo sapiens
tttcagctgtgatctgctatttagacttgaagcccaagatactgagattttgcctttctctttggtttgcatagctgatgt

SEQ ID NO: 83830 - DNA, 79 bp, Homo sapiens
atctgctatttagacttgaagcccaagatactgagattttgcctttctctttggtttgcatagctgatgttgtagacag

SEQ ID NO: 83831 - DNA, 77 bp, Homo sapiens
agcccaagatactgagattttgcctttctctttggtttgcatagctgatgttgtagacagggattcaaataacaata

SEQ ID NO: 83832 - DNA, 77 bp, Homo sapiens
atactgagattttgcctttctctttggtttgcatagctgatgttgtagacagggattcaaataacaatacggcacaa

SEQ ID NO: 83833 - DNA, 77 bp, Homo sapiens
cctttctctttggtttgcatagctgatgttgtagacagggattcaaataacaatacggcacaagagaaactgattca

SEQ ID NO: 83834 - DNA, 79 bp, Homo sapiens
tctttggtttgcatagctgatgttgtagacagggattcaaataacaatacggcacaagagaaactgattcactggaaga

SEQ ID NO: 83835 - DNA, 79 bp, Homo sapiens
atagctgatgttgtagacagggattcaaataacaatacggcacaagagaaactgattcactggaagacacactatggtc

SEQ ID NO: 83836 - DNA, 77 bp, Homo sapiens
ttgtagacagggattcaaataacaatacggcacaagagaaactgattcactggaagacacactatggtctgttctat

SEQ ID NO: 83837 - DNA, 77 bp, Homo sapiens
attcaaataacaatacggcacaagagaaactgattcactggaagacacactatggtctgttctattctcaaatttca

SEQ ID NO: 83838 - DNA, 77 bp, Homo sapiens
aataacaatacggcacaagagaaactgattcactggaagacacactatggtctgttctattctcaaatttcacagaa

SEQ ID NO: 83839 - DNA, 78 bp, Homo sapiens
acaagagaaactgattcactggaagacacactatggtctgttctattctcaaatttcacagaaagcagaaattcatac

SEQ ID NO: 83840 - DNA, 79 bp, Homo sapiens
tgattcactggaagacacactatggtctgttctattctcaaatttcacagaaagcagaaattcatactctgtacatttt

SEQ ID NO: 83841 - DNA, 78 bp, Homo sapiens
actggaagacacactatggtctgttctattctcaaatttcacagaaagcagaaattcatactctgtacatttttcatc

SEQ ID NO: 83842 - DNA, 77 bp, Homo sapiens
actatggtctgttctattctcaaatttcacagaaagcagaaattcatactctgtacatttttcatcttcagtcccta

SEQ ID NO: 83843 - DNA, 76 bp, Homo sapiens
tctattctcaaatttcacagaaagcagaaattcatactctgtacatttttcatcttcagtccctattttccctctg

SEQ ID NO: 83844 - DNA, 75 bp, Homo sapiens
aatttcacagaaagcagaaattcatactctgtacatttttcatcttcagtccctattttccctctgtcagcaaat

SEQ ID NO: 83845 - DNA, 74 bp, Homo sapiens
gaaagcagaaattcatactctgtacatttttcatcttcagtccctattttccctctgtcagcaaatttccaaaa

SEQ ID NO: 83846 - DNA, 73 bp, Homo sapiens
gaaattcatactctgtacatttttcatcttcagtccctattttccctctgtcagcaaatttccaaaatttcac

SEQ ID NO: 83847 - DNA, 69 bp, Homo sapiens
tttcatcttcagtccctattttccctctgtcagcaaatttccaaaatttcacttttatttatccctaag

SEQ ID NO: 83848 - DNA, 69 bp, Homo sapiens
gtccctattttccctctgtcagcaaatttccaaaatttcacttttatttatccctaagtaatcacactg

SEQ ID NO: 83849 - DNA, 74 bp, Homo sapiens
cctctgtcagcaaatttccaaaatttcacttttatttatccctaagtaatcacactgtttatggagattgctgc

SEQ ID NO: 83850 - DNA, 74 bp, Homo sapiens
tcagcaaatttccaaaatttcacttttatttatccctaagtaatcacactgtttatggagattgctgcgaccac

SEQ ID NO: 83851 - DNA, 76 bp, Homo sapiens
aaatttcacttttatttatccctaagtaatcacactgtttatggagattgctgcgaccacgctaagcacagagata

SEQ ID NO: 83852 - DNA, 80 bp, Homo sapiens
tttatttatccctaagtaatcacactgtttatggagattgctgcgaccacgctaagcacagagatagtagactcttgcaa

SEQ ID NO: 83853 - DNA, 83 bp, Homo sapiens
tatccctaagtaatcacactgtttatggagattgctgcgaccacgctaagcacagagatagtagactcttgcaagactcacaa

SEQ ID NO: 83854 - DNA, 86 bp, Homo sapiens
taatcacactgtttatggagattgctgcgaccacgctaagcacagagatagtagactcttgcaagactcacaaccatgaagcacaa

SEQ ID NO: 83855 - DNA, 83 bp, Homo sapiens
tttatggagattgctgcgaccacgctaagcacagagatagtagactcttgcaagactcacaaccatgaagcacaaattaagaa

SEQ ID NO: 83856 - DNA, 82 bp, Homo sapiens
attgctgcgaccacgctaagcacagagatagtagactcttgcaagactcacaaccatgaagcacaaattaagaatgaaggaa

SEQ ID NO: 83857 - DNA, 81 bp, Homo sapiens
accacgctaagcacagagatagtagactcttgcaagactcacaaccatgaagcacaaattaagaatgaaggaatctccaca

SEQ ID NO: 83858 - DNA, 80 bp, Homo sapiens
gagatagtagactcttgcaagactcacaaccatgaagcacaaattaagaatgaaggaatctccacactccacggctacat

SEQ ID NO: 83859 - DNA, 79 bp, Homo sapiens
tagactcttgcaagactcacaaccatgaagcacaaattaagaatgaaggaatctccacactccacggctacattacgaa

SEQ ID NO: 83860 - DNA, 75 bp, Homo sapiens
gactcacaaccatgaagcacaaattaagaatgaaggaatctccacactccacggctacattacgaaggcttttta

SEQ ID NO: 83861 - DNA, 72 bp, Homo sapiens
aaccatgaagcacaaattaagaatgaaggaatctccacactccacggctacattacgaaggctttttaagaa

SEQ ID NO: 83862 - DNA, 74 bp, Homo sapiens
aaattaagaatgaaggaatctccacactccacggctacattacgaaggctttttaagaaaagcatatgcagtca

SEQ ID NO: 83863 - DNA, 78 bp, Homo sapiens
aatgaaggaatctccacactccacggctacattacgaaggctttttaagaaaagcatatgcagtcatagtgctatata

SEQ ID NO: 83864 - DNA, 77 bp, Homo sapiens
aatctccacactccacggctacattacgaaggctttttaagaaaagcatatgcagtcatagtgctatatacaaaaga

SEQ ID NO: 83865 - DNA, 77 bp, Homo sapiens
tacgaaggctttttaagaaaagcatatgcagtcatagtgctatatacaaaagaattttcctggacattaatgcctca

SEQ ID NO: 83866 - DNA, 75 bp, Homo sapiens
aaaagcatatgcagtcatagtgctatatacaaaagaattttcctggacattaatgcctcaaaacgaacctcccaa

SEQ ID NO: 83867 - DNA, 71 bp, Homo sapiens
agtgctatatacaaaagaattttcctggacattaatgcctcaaaacgaacctcccaaggcccagaaattca

SEQ ID NO: 83868 - DNA, 76 bp, Homo sapiens
tttcctggacattaatgcctcaaaacgaacctcccaaggcccagaaattcagccatcacatgccaatccatccacc

SEQ ID NO: 83869 - DNA, 76 bp, Homo sapiens
attaatgcctcaaaacgaacctcccaaggcccagaaattcagccatcacatgccaatccatccacctctcttccac

SEQ ID NO: 83870 - DNA, 76 bp, Homo sapiens
aaggcccagaaattcagccatcacatgccaatccatccacctctcttccaccctctgcccctttccacttctcacc

SEQ ID NO: 83871 - DNA, 76 bp, Homo sapiens
aaattcagccatcacatgccaatccatccacctctcttccaccctctgcccctttccacttctcaccttgtgtttg

SEQ ID NO: 83872 - DNA, 74 bp, Homo sapiens
ccatcacatgccaatccatccacctctcttccaccctctgcccctttccacttctcaccttgtgtttggaaaaa

SEQ ID NO: 83873 - DNA, 70 bp, Homo sapiens
atgccaatccatccacctctcttccaccctctgcccctttccacttctcaccttgtgtttggaaaaaaaa

SEQ ID NO: 83874 - DNA, 64 bp, Homo sapiens
aaaaattaacttcagtttcacccgagggaagtattccccacaaacggagaaaggagggtctgtg

SEQ ID NO: 83875 - DNA, 70 bp, Homo sapiens
ttaacttcagtttcacccgagggaagtattccccacaaacggagaaaggagggtctgtgttctgcacata

SEQ ID NO: 83876 - DNA, 74 bp, Homo sapiens
tttcacccgagggaagtattccccacaaacggagaaaggagggtctgtgttctgcacatacacagacagactca

SEQ ID NO: 83877 - DNA, 78 bp, Homo sapiens
aagtattccccacaaacggagaaaggagggtctgtgttctgcacatacacagacagactcacacggtctggatgatgc

SEQ ID NO: 83878 - DNA, 79 bp, Homo sapiens
acaaacggagaaaggagggtctgtgttctgcacatacacagacagactcacacggtctggatgatgctttcacaagtta

SEQ ID NO: 83879 - DNA, 79 bp, Homo sapiens
aaaggagggtctgtgttctgcacatacacagacagactcacacggtctggatgatgctttcacaagttaaggggcctca

SEQ ID NO: 83880 - DNA, 77 bp, Homo sapiens
tcgcccaggctatctagcccgaacatttgcactcacattccaaagatgtttccgttgcgctggaatggctgtaaatt

SEQ ID NO: 83881 - DNA, 75 bp, Homo sapiens
aggctatctagcccgaacatttgcactcacattccaaagatgtttccgttgcgctggaatggctgtaaatttctt

SEQ ID NO: 83882 - DNA, 76 bp, Homo sapiens
gaacatttgcactcacattccaaagatgtttccgttgcgctggaatggctgtaaatttctttcctgcagaattctt

SEQ ID NO: 83883 - DNA, 74 bp, Homo sapiens
actcacattccaaagatgtttccgttgcgctggaatggctgtaaatttctttcctgcagaattctttccaaaca

SEQ ID NO: 83884 - DNA, 71 bp, Homo sapiens
attccaaagatgtttccgttgcgctggaatggctgtaaatttctttcctgcagaattctttccaaacaaac

SEQ ID NO: 83885 - DNA, 76 bp, Homo sapiens
atgtttccgttgcgctggaatggctgtaaatttctttcctgcagaattctttccaaacaaactgccatgaactgca

SEQ ID NO: 83886 - DNA, 77 bp, Homo sapiens
tggaatggctgtaaatttctttcctgcagaattctttccaaacaaactgccatgaactgcactccggcaggagctct

SEQ ID NO: 83887 - DNA, 75 bp, Homo sapiens
tgtaaatttctttcctgcagaattctttccaaacaaactgccatgaactgcactccggcaggagctcttaaccaa

SEQ ID NO: 83888 - DNA, 76 bp, Homo sapiens
tttctttcctgcagaattctttccaaacaaactgccatgaactgcactccggcaggagctcttaaccaagcactgt

SEQ ID NO: 83889 - DNA, 78 bp, Homo sapiens
attctttccaaacaaactgccatgaactgcactccggcaggagctcttaaccaagcactgttcacctcaatgcaacaa

SEQ ID NO: 83890 - DNA, 78 bp, Homo sapiens
ttccaaacaaactgccatgaactgcactccggcaggagctcttaaccaagcactgttcacctcaatgcaacaaatctt

SEQ ID NO: 83891 - DNA, 84 bp, Homo sapiens
catgaactgcactccggcaggagctcttaaccaagcactgttcacctcaatgcaacaaatctttcagatgccgaatatgactga

SEQ ID NO: 83892 - DNA, 81 bp, Homo sapiens
actgcactccggcaggagctcttaaccaagcactgttcacctcaatgcaacaaatctttcagatgccgaatatgactgaat

SEQ ID NO: 83893 - DNA, 81 bp, Homo sapiens
gagctcttaaccaagcactgttcacctcaatgcaacaaatctttcagatgccgaatatgactgaattggtggctgggccaa

SEQ ID NO: 83894 - DNA, 78 bp, Homo sapiens
cttaaccaagcactgttcacctcaatgcaacaaatctttcagatgccgaatatgactgaattggtggctgggccaagg

SEQ ID NO: 83895 - DNA, 76 bp, Homo sapiens
ttcacctcaatgcaacaaatctttcagatgccgaatatgactgaattggtggctgggccaagggagtaaactttaa

SEQ ID NO: 83896 - DNA, 69 bp, Homo sapiens
atttagaaaacaaactgatttaccaggttaatcctctcaacccttccgcaacagagattctcacttacc

SEQ ID NO: 83897 - DNA, 71 bp, Homo sapiens
acaaactgatttaccaggttaatcctctcaacccttccgcaacagagattctcacttacctggtggcaacc

SEQ ID NO: 83898 - DNA, 71 bp, Homo sapiens
aggttaatcctctcaacccttccgcaacagagattctcacttacctggtggcaaccctgtaagtttgattc

SEQ ID NO: 83899 - DNA, 76 bp, Homo sapiens
tctcaacccttccgcaacagagattctcacttacctggtggcaaccctgtaagtttgattctctcccataagatga

SEQ ID NO: 83900 - DNA, 74 bp, Homo sapiens
acccttccgcaacagagattctcacttacctggtggcaaccctgtaagtttgattctctcccataagatgagta

SEQ ID NO: 83901 - DNA, 74 bp, Homo sapiens
agattctcacttacctggtggcaaccctgtaagtttgattctctcccataagatgagtatgagcccctttctgt

SEQ ID NO: 83902 - DNA, 71 bp, Homo sapiens
acttacctggtggcaaccctgtaagtttgattctctcccataagatgagtatgagcccctttctgttttac

SEQ ID NO: 83903 - DNA, 74 bp, Homo sapiens
tggcaaccctgtaagtttgattctctcccataagatgagtatgagcccctttctgttttacctgccaagagaaa

SEQ ID NO: 83904 - DNA, 72 bp, Homo sapiens
taagtttgattctctcccataagatgagtatgagcccctttctgttttacctgccaagagaaacgacaaaaa

SEQ ID NO: 83905 - DNA, 71 bp, Homo sapiens
attctctcccataagatgagtatgagcccctttctgttttacctgccaagagaaacgacaaaaaagtgtaa

SEQ ID NO: 83906 - DNA, 69 bp, Homo sapiens
ataagatgagtatgagcccctttctgttttacctgccaagagaaacgacaaaaaagtgtaaattgtgtt

SEQ ID NO: 83907 - DNA, 66 bp, Homo sapiens
agtatgagcccctttctgttttacctgccaagagaaacgacaaaaaagtgtaaattgtgtttttcc

SEQ ID NO: 83908 - DNA, 63 bp, Homo sapiens
cctttctgttttacctgccaagagaaacgacaaaaaagtgtaaattgtgtttttccttaaaaa

SEQ ID NO: 83909 - DNA, 76 bp, Homo sapiens
atctcctccaggtaacagacatctactgctcttccccgatgtttacatacgtaaagtaggcactactggcaatgta

SEQ ID NO: 83910 - DNA, 78 bp, Homo sapiens
aggtaacagacatctactgctcttccccgatgtttacatacgtaaagtaggcactactggcaatgtatgcaagcaaga

SEQ ID NO: 83911 - DNA, 77 bp, Homo sapiens
atctactgctcttccccgatgtttacatacgtaaagtaggcactactggcaatgtatgcaagcaagagagggaataa

SEQ ID NO: 83912 - DNA, 76 bp, Homo sapiens
cccgatgtttacatacgtaaagtaggcactactggcaatgtatgcaagcaagagagggaataacacttcctcactc

SEQ ID NO: 83913 - DNA, 80 bp, Homo sapiens
tttacatacgtaaagtaggcactactggcaatgtatgcaagcaagagagggaataacacttcctcactctggctatgata

SEQ ID NO: 83914 - DNA, 79 bp, Homo sapiens
taaagtaggcactactggcaatgtatgcaagcaagagagggaataacacttcctcactctggctatgataaactggaaa

SEQ ID NO: 83915 - DNA, 77 bp, Homo sapiens
actactggcaatgtatgcaagcaagagagggaataacacttcctcactctggctatgataaactggaaaaaaatatc

SEQ ID NO: 83916 - DNA, 76 bp, Homo sapiens
aatgtatgcaagcaagagagggaataacacttcctcactctggctatgataaactggaaaaaaatatccttcattc

SEQ ID NO: 83917 - DNA, 72 bp, Homo sapiens
aagagagggaataacacttcctcactctggctatgataaactggaaaaaaatatccttcattcctattctta

SEQ ID NO: 83918 - DNA, 73 bp, Homo sapiens
aataacacttcctcactctggctatgataaactggaaaaaaatatccttcattcctattcttagccaaactgc

SEQ ID NO: 83919 - DNA, 75 bp, Homo sapiens
tcactctggctatgataaactggaaaaaaatatccttcattcctattcttagccaaactgctccacacttccaaa

SEQ ID NO: 83920 - DNA, 71 bp, Homo sapiens
ctatgataaactggaaaaaaatatccttcattcctattcttagccaaactgctccacacttccaaaaactg

SEQ ID NO: 83921 - DNA, 72 bp, Homo sapiens
ctggaaaaaaatatccttcattcctattcttagccaaactgctccacacttccaaaaactgtcattccaatg

SEQ ID NO: 83922 - DNA, 73 bp, Homo sapiens
aaaaatatccttcattcctattcttagccaaactgctccacacttccaaaaactgtcattccaatggcctcca

SEQ ID NO: 83923 - DNA, 73 bp, Homo sapiens
attcctattcttagccaaactgctccacacttccaaaaactgtcattccaatggcctccactttctctaacaa

SEQ ID NO: 83924 - DNA, 73 bp, Homo sapiens
tagccaaactgctccacacttccaaaaactgtcattccaatggcctccactttctctaacaaacaaatcgtaa

SEQ ID NO: 83925 - DNA, 69 bp, Homo sapiens
acttccaaaaactgtcattccaatggcctccactttctctaacaaacaaatcgtaactccttattttca

SEQ ID NO: 83926 - DNA, 69 bp, Homo sapiens
ccaatggcctccactttctctaacaaacaaatcgtaactccttattttcactttctcttgcacaaaatt

SEQ ID NO: 83927 - DNA, 67 bp, Homo sapiens
taacaaacaaatcgtaactccttattttcactttctcttgcacaaaatttaaacaatttcattttta

SEQ ID NO: 83928 - DNA, 71 bp, Homo sapiens
tcgtaactccttattttcactttctcttgcacaaaatttaaacaatttcatttttatttacacagcaggca

SEQ ID NO: 83929 - DNA, 74 bp, Homo sapiens
tttcactttctcttgcacaaaatttaaacaatttcatttttatttacacagcaggcaaattatctatgtaatga

SEQ ID NO: 83930 - DNA, 73 bp, Homo sapiens
ctcttgcacaaaatttaaacaatttcatttttatttacacagcaggcaaattatctatgtaatgaccctagcc

SEQ ID NO: 83931 - DNA, 72 bp, Homo sapiens
cacaaaatttaaacaatttcatttttatttacacagcaggcaaattatctatgtaatgaccctagcctagta

SEQ ID NO: 83932 - DNA, 74 bp, Homo sapiens
atttcatttttatttacacagcaggcaaattatctatgtaatgaccctagcctagtaattcccattgattatat

SEQ ID NO: 83933 - DNA, 77 bp, Homo sapiens
tatttacacagcaggcaaattatctatgtaatgaccctagcctagtaattcccattgattatattgacacttaatag

SEQ ID NO: 83934 - DNA, 77 bp, Homo sapiens
agcaggcaaattatctatgtaatgaccctagcctagtaattcccattgattatattgacacttaatagtgaggccaa

SEQ ID NO: 83935 - DNA, 76 bp, Homo sapiens
tatctatgtaatgaccctagcctagtaattcccattgattatattgacacttaatagtgaggccaaaactaatcaa

SEQ ID NO: 83936 - DNA, 76 bp, Homo sapiens
atgtaatgaccctagcctagtaattcccattgattatattgacacttaatagtgaggccaaaactaatcaatcaca

SEQ ID NO: 83937 - DNA, 78 bp, Homo sapiens
ctagcctagtaattcccattgattatattgacacttaatagtgaggccaaaactaatcaatcacaggctctccagatg

SEQ ID NO: 83938 - DNA, 78 bp, Homo sapiens
taattcccattgattatattgacacttaatagtgaggccaaaactaatcaatcacaggctctccagatggtgaattta

SEQ ID NO: 83939 - DNA, 76 bp, Homo sapiens
attatattgacacttaatagtgaggccaaaactaatcaatcacaggctctccagatggtgaatttagcaaagaaac

SEQ ID NO: 83940 - DNA, 74 bp, Homo sapiens
acttaatagtgaggccaaaactaatcaatcacaggctctccagatggtgaatttagcaaagaaactattcaaaa

SEQ ID NO: 83941 - DNA, 76 bp, Homo sapiens
agtgaggccaaaactaatcaatcacaggctctccagatggtgaatttagcaaagaaactattcaaaattctgagtc

SEQ ID NO: 83942 - DNA, 66 bp, Homo sapiens
aaaaaaaaaacccaccctgaatagagaaatcgaatacttgcttttctttcgaccttatgggtagca

SEQ ID NO: 83943 - DNA, 68 bp, Homo sapiens
aaaaacccaccctgaatagagaaatcgaatacttgcttttctttcgaccttatgggtagcacgccgag

SEQ ID NO: 83944 - DNA, 73 bp, Homo sapiens
aatagagaaatcgaatacttgcttttctttcgaccttatgggtagcacgccgagggaggcaccagaagatcta

SEQ ID NO: 83945 - DNA, 73 bp, Homo sapiens
tcgaatacttgcttttctttcgaccttatgggtagcacgccgagggaggcaccagaagatctaagcccaaata

SEQ ID NO: 83946 - DNA, 74 bp, Homo sapiens
ttgcttttctttcgaccttatgggtagcacgccgagggaggcaccagaagatctaagcccaaatacgtgatgaa

SEQ ID NO: 83947 - DNA, 74 bp, Homo sapiens
gaccttatgggtagcacgccgagggaggcaccagaagatctaagcccaaatacgtgatgaagagtcgccaaaaa

SEQ ID NO: 83948 - DNA, 79 bp, Homo sapiens
gtagcacgccgagggaggcaccagaagatctaagcccaaatacgtgatgaagagtcgccaaaaagcatgtggatgaata

SEQ ID NO: 83949 - DNA, 76 bp, Homo sapiens
acgccgagggaggcaccagaagatctaagcccaaatacgtgatgaagagtcgccaaaaagcatgtggatgaataaa

SEQ ID NO: 83950 - DNA, 77 bp, Homo sapiens
accagaagatctaagcccaaatacgtgatgaagagtcgccaaaaagcatgtggatgaataaactgttgtggcgtgaa

SEQ ID NO: 83951 - DNA, 80 bp, Homo sapiens
agatctaagcccaaatacgtgatgaagagtcgccaaaaagcatgtggatgaataaactgttgtggcgtgaatctgccagc

SEQ ID NO: 83952 - DNA, 80 bp, Homo sapiens
aaatacgtgatgaagagtcgccaaaaagcatgtggatgaataaactgttgtggcgtgaatctgccagccagaggacagaa

SEQ ID NO: 83953 - DNA, 83 bp, Homo sapiens
atgaagagtcgccaaaaagcatgtggatgaataaactgttgtggcgtgaatctgccagccagaggacagaacacaacatgctg

SEQ ID NO: 83954 - DNA, 81 bp, Homo sapiens
aaaaagcatgtggatgaataaactgttgtggcgtgaatctgccagccagaggacagaacacaacatgctggggcttggctg

SEQ ID NO: 83955 - DNA, 81 bp, Homo sapiens
ggatgaataaactgttgtggcgtgaatctgccagccagaggacagaacacaacatgctggggcttggctgtcctaacatgt

SEQ ID NO: 83956 - DNA, 79 bp, Homo sapiens
ataaactgttgtggcgtgaatctgccagccagaggacagaacacaacatgctggggcttggctgtcctaacatgtttta

SEQ ID NO: 83957 - DNA, 79 bp, Homo sapiens
cgtgaatctgccagccagaggacagaacacaacatgctggggcttggctgtcctaacatgttttactatgtacatttaa

SEQ ID NO: 83958 - DNA, 76 bp, Homo sapiens
ccagccagaggacagaacacaacatgctggggcttggctgtcctaacatgttttactatgtacatttaaatagtct

SEQ ID NO: 83959 - DNA, 75 bp, Homo sapiens
agaggacagaacacaacatgctggggcttggctgtcctaacatgttttactatgtacatttaaatagtcttgaaa

SEQ ID NO: 83960 - DNA, 72 bp, Homo sapiens
aacacaacatgctggggcttggctgtcctaacatgttttactatgtacatttaaatagtcttgaaagggaaa

SEQ ID NO: 83961 - DNA, 68 bp, Homo sapiens
gggcttggctgtcctaacatgttttactatgtacatttaaatagtcttgaaagggaaaaggaaagaag

SEQ ID NO: 83962 - DNA, 67 bp, Homo sapiens
ggctgtcctaacatgttttactatgtacatttaaatagtcttgaaagggaaaaggaaagaagggaaa

SEQ ID NO: 83963 - DNA, 63 bp, Homo sapiens
ctatgtacatttaaatagtcttgaaagggaaaaggaaagaagggaaaaggtggagggtttggg

SEQ ID NO: 83964 - DNA, 59 bp, Homo sapiens
ttaaatagtcttgaaagggaaaaggaaagaagggaaaaggtggagggtttggggggttt

SEQ ID NO: 83965 - DNA, 57 bp, Homo sapiens
gaaagggaaaaggaaagaagggaaaaggtggagggtttggggggttttttttaatat

SEQ ID NO: 83966 - DNA, 66 bp, Homo sapiens
atattaaaaaaaaagtttgccagaaattctcatacttgggtcacaaataaaagtactttcctatta

SEQ ID NO: 83967 - DNA, 65 bp, Homo sapiens
aaaaagtttgccagaaattctcatacttgggtcacaaataaaagtactttcctattattaaaaaa

SEQ ID NO: 83968 - DNA, 67 bp, Homo sapiens
ctcatacttgggtcacaaataaaagtactttcctattattaaaaaaaagagaatctagttcttaggc

SEQ ID NO: 83969 - DNA, 68 bp, Homo sapiens
aaaacttgagcattcaaaaagtgtaagttaatttaaaatgggtcttactttgtattctggaattgaca

SEQ ID NO: 83970 - DNA, 68 bp, Homo sapiens
gcattcaaaaagtgtaagttaatttaaaatgggtcttactttgtattctggaattgacaaaaggtgga

SEQ ID NO: 83971 - DNA, 71 bp, Homo sapiens
gtgtaagttaatttaaaatgggtcttactttgtattctggaattgacaaaaggtggagagagattgtcatg

SEQ ID NO: 83972 - DNA, 72 bp, Homo sapiens
ttaatttaaaatgggtcttactttgtattctggaattgacaaaaggtggagagagattgtcatgtgacccaa

SEQ ID NO: 83973 - DNA, 73 bp, Homo sapiens
aaatgggtcttactttgtattctggaattgacaaaaggtggagagagattgtcatgtgacccaaggtccctgc

SEQ ID NO: 83974 - DNA, 79 bp, Homo sapiens
tactttgtattctggaattgacaaaaggtggagagagattgtcatgtgacccaaggtccctgctggtcatgtggtcata

SEQ ID NO: 83975 - DNA, 78 bp, Homo sapiens
aattgacaaaaggtggagagagattgtcatgtgacccaaggtccctgctggtcatgtggtcatagggagtcccatctc

SEQ ID NO: 83976 - DNA, 77 bp, Homo sapiens
aaaaggtggagagagattgtcatgtgacccaaggtccctgctggtcatgtggtcatagggagtcccatctccatagt

SEQ ID NO: 83977 - DNA, 77 bp, Homo sapiens
agattgtcatgtgacccaaggtccctgctggtcatgtggtcatagggagtcccatctccatagttctgtaaataaaa

SEQ ID NO: 83978 - DNA, 78 bp, Homo sapiens
tgtgacccaaggtccctgctggtcatgtggtcatagggagtcccatctccatagttctgtaaataaaatgacagtgta

SEQ ID NO: 83979 - DNA, 76 bp, Homo sapiens
gtccctgctggtcatgtggtcatagggagtcccatctccatagttctgtaaataaaatgacagtgtaagttattat

SEQ ID NO: 83980 - DNA, 75 bp, Homo sapiens
ctggtcatgtggtcatagggagtcccatctccatagttctgtaaataaaatgacagtgtaagttattattttata

SEQ ID NO: 83981 - DNA, 73 bp, Homo sapiens
accttctgtttgtcaatttacatatgtgggatgtctggttgtgggagaaaagattagatatacttaccctgga

SEQ ID NO: 83982 - DNA, 73 bp, Homo sapiens
tttgtcaatttacatatgtgggatgtctggttgtgggagaaaagattagatatacttaccctggacgggcttg

SEQ ID NO: 83983 - DNA, 75 bp, Homo sapiens
ttacatatgtgggatgtctggttgtgggagaaaagattagatatacttaccctggacgggcttggatgtcctcca

SEQ ID NO: 83984 - DNA, 71 bp, Homo sapiens
gggatgtctggttgtgggagaaaagattagatatacttaccctggacgggcttggatgtcctccattcccc

SEQ ID NO: 83985 - DNA, 71 bp, Homo sapiens
ttgtgggagaaaagattagatatacttaccctggacgggcttggatgtcctccattcccccaggaccctga

SEQ ID NO: 83986 - DNA, 70 bp, Homo sapiens
aaaagattagatatacttaccctggacgggcttggatgtcctccattcccccaggaccctgagctacttc

SEQ ID NO: 83987 - DNA, 74 bp, Homo sapiens
tatacttaccctggacgggcttggatgtcctccattcccccaggaccctgagctacttctgtcttctacatcta

SEQ ID NO: 83988 - DNA, 73 bp, Homo sapiens
acgggcttggatgtcctccattcccccaggaccctgagctacttctgtcttctacatctagggacaagagaaa

SEQ ID NO: 83989 - DNA, 72 bp, Homo sapiens
atgtcctccattcccccaggaccctgagctacttctgtcttctacatctagggacaagagaaaagttcttta

SEQ ID NO: 83990 - DNA, 70 bp, Homo sapiens
attcccccaggaccctgagctacttctgtcttctacatctagggacaagagaaaagttctttaggctttc

SEQ ID NO: 83991 - DNA, 71 bp, Homo sapiens
accctgagctacttctgtcttctacatctagggacaagagaaaagttctttaggctttcttgcagtaattt

SEQ ID NO: 83992 - DNA, 70 bp, Homo sapiens
agctacttctgtcttctacatctagggacaagagaaaagttctttaggctttcttgcagtaattttttct

SEQ ID NO: 83993 - DNA, 73 bp, Homo sapiens
ttaatcaagagtaagcttttaaaatacaagttacataaatatttacctctgctgtcctcttccatatgaatag

SEQ ID NO: 83994 - DNA, 72 bp, Homo sapiens
caagagtaagcttttaaaatacaagttacataaatatttacctctgctgtcctcttccatatgaataggaag

SEQ ID NO: 83995 - DNA, 71 bp, Homo sapiens
ttaaaatacaagttacataaatatttacctctgctgtcctcttccatatgaataggaagtaataaattccc

SEQ ID NO: 83996 - DNA, 75 bp, Homo sapiens
ttacataaatatttacctctgctgtcctcttccatatgaataggaagtaataaattcccccaatatatctggtga

SEQ ID NO: 83997 - DNA, 73 bp, Homo sapiens
aatatttacctctgctgtcctcttccatatgaataggaagtaataaattcccccaatatatctggtgattaaa

SEQ ID NO: 83998 - DNA, 73 bp, Homo sapiens
cctctgctgtcctcttccatatgaataggaagtaataaattcccccaatatatctggtgattaaaattctaaa

SEQ ID NO: 83999 - DNA, 70 bp, Homo sapiens
cctcttccatatgaataggaagtaataaattcccccaatatatctggtgattaaaattctaaaatactac

SEQ ID NO: 84000 - DNA, 67 bp, Homo sapiens
gaataggaagtaataaattcccccaatatatctggtgattaaaattctaaaatactacttcgtaaac

SEQ ID NO: 84001 - DNA, 65 bp, Homo sapiens
taataaattcccccaatatatctggtgattaaaattctaaaatactacttcgtaaacttttaaag

SEQ ID NO: 84002 - DNA, 68 bp, Homo sapiens
caatatatctggtgattaaaattctaaaatactacttcgtaaacttttaaagtttgtgaactgagacc

SEQ ID NO: 84003 - DNA, 66 bp, Homo sapiens
ctggtgattaaaattctaaaatactacttcgtaaacttttaaagtttgtgaactgagacctccact

SEQ ID NO: 84004 - DNA, 64 bp, Homo sapiens
attctaaaatactacttcgtaaacttttaaagtttgtgaactgagacctccactttaaaaggcc

SEQ ID NO: 84005 - DNA, 63 bp, Homo sapiens
aaaatactacttcgtaaacttttaaagtttgtgaactgagacctccactttaaaaggcctttc

SEQ ID NO: 84006 - DNA, 62 bp, Homo sapiens
ttcgtaaacttttaaagtttgtgaactgagacctccactttaaaaggcctttcttttaaggg

SEQ ID NO: 84007 - DNA, 64 bp, Homo sapiens
ttaaagtttgtgaactgagacctccactttaaaaggcctttcttttaaggggccttccttgtta

SEQ ID NO: 84008 - DNA, 67 bp, Homo sapiens
aactgagacctccactttaaaaggcctttcttttaaggggccttccttgttactctcctgtgctcca

SEQ ID NO: 84009 - DNA, 69 bp, Homo sapiens
aaaggcctttcttttaaggggccttccttgttactctcctgtgctccatggaaacagaacatgagttaa

SEQ ID NO: 84010 - DNA, 74 bp, Homo sapiens
ttaaggggccttccttgttactctcctgtgctccatggaaacagaacatgagttaatgatgaccgtagatttta

SEQ ID NO: 84011 - DNA, 73 bp, Homo sapiens
ccttccttgttactctcctgtgctccatggaaacagaacatgagttaatgatgaccgtagattttaatttatt

SEQ ID NO: 84012 - DNA, 78 bp, Homo sapiens
tgttactctcctgtgctccatggaaacagaacatgagttaatgatgaccgtagattttaatttatttgtatatatcag

SEQ ID NO: 84013 - DNA, 70 bp, Homo sapiens
caattgagtaaataaacagcccagaacatttaacttaacactaagaaaagaatttacatacttgagccag

SEQ ID NO: 84014 - DNA, 70 bp, Homo sapiens
ataaacagcccagaacatttaacttaacactaagaaaagaatttacatacttgagccagtaaaatgtcca

SEQ ID NO: 84015 - DNA, 71 bp, Homo sapiens
agcccagaacatttaacttaacactaagaaaagaatttacatacttgagccagtaaaatgtccacttgcca

SEQ ID NO: 84016 - DNA, 69 bp, Homo sapiens
aacttaacactaagaaaagaatttacatacttgagccagtaaaatgtccacttgccaaagaagttggtc

SEQ ID NO: 84017 - DNA, 70 bp, Homo sapiens
taagaaaagaatttacatacttgagccagtaaaatgtccacttgccaaagaagttggtccatttttccca

SEQ ID NO: 84018 - DNA, 72 bp, Homo sapiens
aaagaatttacatacttgagccagtaaaatgtccacttgccaaagaagttggtccatttttcccactgctca

SEQ ID NO: 84019 - DNA, 73 bp, Homo sapiens
atacttgagccagtaaaatgtccacttgccaaagaagttggtccatttttcccactgctcacaggaggtgaaa

SEQ ID NO: 84020 - DNA, 71 bp, Homo sapiens
agtaaaatgtccacttgccaaagaagttggtccatttttcccactgctcacaggaggtgaaaacatctaaa

SEQ ID NO: 84021 - DNA, 70 bp, Homo sapiens
acttgccaaagaagttggtccatttttcccactgctcacaggaggtgaaaacatctaaaagaaacaaaga

SEQ ID NO: 84022 - DNA, 69 bp, Homo sapiens
caaagaagttggtccatttttcccactgctcacaggaggtgaaaacatctaaaagaaacaaagaaatat

SEQ ID NO: 84023 - DNA, 70 bp, Homo sapiens
ggtccatttttcccactgctcacaggaggtgaaaacatctaaaagaaacaaagaaatattacagttgaaa

SEQ ID NO: 84024 - DNA, 72 bp, Homo sapiens
ctgctcacaggaggtgaaaacatctaaaagaaacaaagaaatattacagttgaaaagaagacacttgtgcct

SEQ ID NO: 84025 - DNA, 75 bp, Homo sapiens
taggatttgcctgtcatatgtgaacccaaataaaaataaaagtgccacctgcactaaattctcatttcgtctcta

SEQ ID NO: 84026 - DNA, 76 bp, Homo sapiens
tgtcatatgtgaacccaaataaaaataaaagtgccacctgcactaaattctcatttcgtctctaacaggagagcaa

SEQ ID NO: 84027 - DNA, 74 bp, Homo sapiens
tgtgaacccaaataaaaataaaagtgccacctgcactaaattctcatttcgtctctaacaggagagcaatttga

SEQ ID NO: 84028 - DNA, 75 bp, Homo sapiens
aaaaataaaagtgccacctgcactaaattctcatttcgtctctaacaggagagcaatttgaagcaagactctctc

SEQ ID NO: 84029 - DNA, 76 bp, Homo sapiens
tctctctcactctcactctctctttcactccctctctctccagcatttatttcgaccctaattggtttccctcttc

SEQ ID NO: 84030 - DNA, 72 bp, Homo sapiens
ctcactctctctttcactccctctctctccagcatttatttcgaccctaattggtttccctcttcttcgacg

SEQ ID NO: 84031 - DNA, 72 bp, Homo sapiens
tctttcactccctctctctccagcatttatttcgaccctaattggtttccctcttcttcgacgtatctagtg

SEQ ID NO: 84032 - DNA, 74 bp, Homo sapiens
ctctctctccagcatttatttcgaccctaattggtttccctcttcttcgacgtatctagtggataatgcacacc

SEQ ID NO: 84033 - DNA, 72 bp, Homo sapiens
agcatttatttcgaccctaattggtttccctcttcttcgacgtatctagtggataatgcacaccttccctga

SEQ ID NO: 84034 - DNA, 73 bp, Homo sapiens
ttatttcgaccctaattggtttccctcttcttcgacgtatctagtggataatgcacaccttccctgagtcaga

SEQ ID NO: 84035 - DNA, 76 bp, Homo sapiens
taattggtttccctcttcttcgacgtatctagtggataatgcacaccttccctgagtcagagcctgcaaaaagcaa

SEQ ID NO: 84036 - DNA, 78 bp, Homo sapiens
tcttcttcgacgtatctagtggataatgcacaccttccctgagtcagagcctgcaaaaagcaaaggaacgaatggaga

SEQ ID NO: 84037 - DNA, 76 bp, Homo sapiens
ttcgacgtatctagtggataatgcacaccttccctgagtcagagcctgcaaaaagcaaaggaacgaatggagaaag

SEQ ID NO: 84038 - DNA, 79 bp, Homo sapiens
tagtggataatgcacaccttccctgagtcagagcctgcaaaaagcaaaggaacgaatggagaaagtgcaacaagcagaa

SEQ ID NO: 84039 - DNA, 75 bp, Homo sapiens
atgcacaccttccctgagtcagagcctgcaaaaagcaaaggaacgaatggagaaagtgcaacaagcagaaagggg

SEQ ID NO: 84040 - DNA, 78 bp, Homo sapiens
tccctgagtcagagcctgcaaaaagcaaaggaacgaatggagaaagtgcaacaagcagaaagggggctgcaaagctgc

SEQ ID NO: 84041 - DNA, 76 bp, Homo sapiens
agagcctgcaaaaagcaaaggaacgaatggagaaagtgcaacaagcagaaagggggctgcaaagctgcctgcctag

SEQ ID NO: 84042 - DNA, 73 bp, Homo sapiens
aagcaaaggaacgaatggagaaagtgcaacaagcagaaagggggctgcaaagctgcctgcctagggctacgtt

SEQ ID NO: 84043 - DNA, 73 bp, Homo sapiens
aatggagaaagtgcaacaagcagaaagggggctgcaaagctgcctgcctagggctacgtttcctggcaaaact

SEQ ID NO: 84044 - DNA, 72 bp, Homo sapiens
aagtgcaacaagcagaaagggggctgcaaagctgcctgcctagggctacgtttcctggcaaaacttccgaaa

SEQ ID NO: 84045 - DNA, 71 bp, Homo sapiens
aagcagaaagggggctgcaaagctgcctgcctagggctacgtttcctggcaaaacttccgaaagccatttc

SEQ ID NO: 84046 - DNA, 72 bp, Homo sapiens
gctgcaaagctgcctgcctagggctacgtttcctggcaaaacttccgaaagccatttctccaaaagaaggtc

SEQ ID NO: 84047 - DNA, 69 bp, Homo sapiens
aaagctgcctgcctagggctacgtttcctggcaaaacttccgaaagccatttctccaaaagaaggtcta

SEQ ID NO: 84048 - DNA, 68 bp, Homo sapiens
ctagggctacgtttcctggcaaaacttccgaaagccatttctccaaaagaaggtctagaagaggagga

SEQ ID NO: 84049 - DNA, 71 bp, Homo sapiens
ttgtttttttcacagctgttgttagtttccaccgttctttcttaccgcactgaaatccagtaaatcactca

SEQ ID NO: 84050 - DNA, 72 bp, Homo sapiens
tttttcacagctgttgttagtttccaccgttctttcttaccgcactgaaatccagtaaatcactcagctctt

SEQ ID NO: 84051 - DNA, 71 bp, Homo sapiens
tgttagtttccaccgttctttcttaccgcactgaaatccagtaaatcactcagctctttgtccgtccctaa

SEQ ID NO: 84052 - DNA, 73 bp, Homo sapiens
tttccaccgttctttcttaccgcactgaaatccagtaaatcactcagctctttgtccgtccctaaggcagcca

SEQ ID NO: 84053 - DNA, 77 bp, Homo sapiens
tctttcttaccgcactgaaatccagtaaatcactcagctctttgtccgtccctaaggcagccattcgctgttggtga

SEQ ID NO: 84054 - DNA, 78 bp, Homo sapiens
actgaaatccagtaaatcactcagctctttgtccgtccctaaggcagccattcgctgttggtgatgcattttagcaaa

SEQ ID NO: 84055 - DNA, 78 bp, Homo sapiens
agtaaatcactcagctctttgtccgtccctaaggcagccattcgctgttggtgatgcattttagcaaaatcacacaaa

SEQ ID NO: 84056 - DNA, 76 bp, Homo sapiens
agctctttgtccgtccctaaggcagccattcgctgttggtgatgcattttagcaaaatcacacaaacctagaaaca

SEQ ID NO: 84057 - DNA, 76 bp, Homo sapiens
tttgtccgtccctaaggcagccattcgctgttggtgatgcattttagcaaaatcacacaaacctagaaacatggaa

SEQ ID NO: 84058 - DNA, 79 bp, Homo sapiens
taaggcagccattcgctgttggtgatgcattttagcaaaatcacacaaacctagaaacatggaaataaccgcaatcaga

SEQ ID NO: 84059 - DNA, 76 bp, Homo sapiens
attcgctgttggtgatgcattttagcaaaatcacacaaacctagaaacatggaaataaccgcaatcagaaaatcca

SEQ ID NO: 84060 - DNA, 67 bp, Homo sapiens
ccgccgggcgcctccgccccgccgagccccgcaggcgccggtacctaccgcccgcgcgcgagaaggg

SEQ ID NO: 84061 - DNA, 70 bp, Homo sapiens
ctccgccccgccgagccccgcaggcgccggtacctaccgcccgcgcgcgagaaggggctctccgtgcacc

SEQ ID NO: 84062 - DNA, 71 bp, Homo sapiens
cgagccccgcaggcgccggtacctaccgcccgcgcgcgagaaggggctctccgtgcaccgccggcgccgag

SEQ ID NO: 84063 - DNA, 71 bp, Homo sapiens
aggcgccggtacctaccgcccgcgcgcgagaaggggctctccgtgcaccgccggcgccgaggcggcgttca

SEQ ID NO: 84064 - DNA, 72 bp, Homo sapiens
cggtacctaccgcccgcgcgcgagaaggggctctccgtgcaccgccggcgccgaggcggcgttcatgtctaa

SEQ ID NO: 84065 - DNA, 73 bp, Homo sapiens
cccgcgcgcgagaaggggctctccgtgcaccgccggcgccgaggcggcgttcatgtctaaccgccgccgccac

SEQ ID NO: 84066 - DNA, 72 bp, Homo sapiens
cgagaaggggctctccgtgcaccgccggcgccgaggcggcgttcatgtctaaccgccgccgccaccgccgcc

SEQ ID NO: 84067 - DNA, 76 bp, Homo sapiens
ctctccgtgcaccgccggcgccgaggcggcgttcatgtctaaccgccgccgccaccgccgccgcctgctcctgcgc

SEQ ID NO: 84068 - DNA, 73 bp, Homo sapiens
accgccggcgccgaggcggcgttcatgtctaaccgccgccgccaccgccgccgcctgctcctgcgcccgctcc

SEQ ID NO: 84069 - DNA, 76 bp, Homo sapiens
aggcggcgttcatgtctaaccgccgccgccaccgccgccgcctgctcctgcgcccgctcccgcgcctgctgcctcc

SEQ ID NO: 84070 - DNA, 75 bp, Homo sapiens
cgttcatgtctaaccgccgccgccaccgccgccgcctgctcctgcgcccgctcccgcgcctgctgcctccccgcc

SEQ ID NO: 84071 - DNA, 74 bp, Homo sapiens
taaccgccgccgccaccgccgccgcctgctcctgcgcccgctcccgcgcctgctgcctccccgccgccgccgcc

SEQ ID NO: 84072 - DNA, 76 bp, Homo sapiens
cgccgccgccgccactacagatccgcagacacacagccaagatccctgactcttaacaccaactctcttctccggg

SEQ ID NO: 84073 - DNA, 75 bp, Homo sapiens
ccgccgccactacagatccgcagacacacagccaagatccctgactcttaacaccaactctcttctccggggagg

SEQ ID NO: 84074 - DNA, 64 bp, Homo sapiens
ggaggggaggggacggagggaaggggggagggggaaacacgccgaggcgcacggaattgcaagt

SEQ ID NO: 84075 - DNA, 68 bp, Homo sapiens
ggacggagggaaggggggagggggaaacacgccgaggcgcacggaattgcaagttcagcaaagaaatg

SEQ ID NO: 84076 - DNA, 67 bp, Homo sapiens
agggaaggggggagggggaaacacgccgaggcgcacggaattgcaagttcagcaaagaaatgggtgg

SEQ ID NO: 84077 - DNA, 68 bp, Homo sapiens
ggggaaacacgccgaggcgcacggaattgcaagttcagcaaagaaatgggtgggggggctccggcggg

SEQ ID NO: 84078 - DNA, 70 bp, Homo sapiens
aacacgccgaggcgcacggaattgcaagttcagcaaagaaatgggtgggggggctccggcggggagacgc

SEQ ID NO: 84079 - DNA, 68 bp, Homo sapiens
acggaattgcaagttcagcaaagaaatgggtgggggggctccggcggggagacgcgacttgctccggg

SEQ ID NO: 84080 - DNA, 70 bp, Homo sapiens
attgcaagttcagcaaagaaatgggtgggggggctccggcggggagacgcgacttgctccgggtcgggca

SEQ ID NO: 84081 - DNA, 70 bp, Homo sapiens
aaagaaatgggtgggggggctccggcggggagacgcgacttgctccgggtcgggcaggctaggatgcatc

SEQ ID NO: 84082 - DNA, 72 bp, Homo sapiens
tgggggggctccggcggggagacgcgacttgctccgggtcgggcaggctaggatgcatccccctcgcaccca

SEQ ID NO: 84083 - DNA, 71 bp, Homo sapiens
ctccggcggggagacgcgacttgctccgggtcgggcaggctaggatgcatccccctcgcacccaccccgag

SEQ ID NO: 84084 - DNA, 70 bp, Homo sapiens
ggagacgcgacttgctccgggtcgggcaggctaggatgcatccccctcgcacccaccccgaggggaaaaa

SEQ ID NO: 84085 - DNA, 66 bp, Homo sapiens
acttgctccgggtcgggcaggctaggatgcatccccctcgcacccaccccgaggggaaaaaaaaaa

SEQ ID NO: 84086 - DNA, 67 bp, Homo sapiens
aaaaaaaaatctcaacacctcccccgcctcgccaaaaaatacaaacgaaaattcatcgagcacctca

SEQ ID NO: 84087 - DNA, 68 bp, Homo sapiens
aaaatctcaacacctcccccgcctcgccaaaaaatacaaacgaaaattcatcgagcacctcatttttc

SEQ ID NO: 84088 - DNA, 72 bp, Homo sapiens
tcccccgcctcgccaaaaaatacaaacgaaaattcatcgagcacctcatttttcctcagatcgtcagttaca

SEQ ID NO: 84089 - DNA, 75 bp, Homo sapiens
gccaaaaaatacaaacgaaaattcatcgagcacctcatttttcctcagatcgtcagttacaatctgaagcctgaa

SEQ ID NO: 84090 - DNA, 74 bp, Homo sapiens
aaaatacaaacgaaaattcatcgagcacctcatttttcctcagatcgtcagttacaatctgaagcctgaacagt

SEQ ID NO: 84091 - DNA, 75 bp, Homo sapiens
aaaattcatcgagcacctcatttttcctcagatcgtcagttacaatctgaagcctgaacagttcagtttttgccc

SEQ ID NO: 84092 - DNA, 76 bp, Homo sapiens
agcacctcatttttcctcagatcgtcagttacaatctgaagcctgaacagttcagtttttgcccgttgcatccctc

SEQ ID NO: 84093 - DNA, 75 bp, Homo sapiens
atttttcctcagatcgtcagttacaatctgaagcctgaacagttcagtttttgcccgttgcatccctcggaggca

SEQ ID NO: 84094 - DNA, 73 bp, Homo sapiens
atcgtcagttacaatctgaagcctgaacagttcagtttttgcccgttgcatccctcggaggcactttgaaatt

SEQ ID NO: 84095 - DNA, 71 bp, Homo sapiens
aatctgaagcctgaacagttcagtttttgcccgttgcatccctcggaggcactttgaaatttattcgagtt

SEQ ID NO: 84096 - DNA, 71 bp, Homo sapiens
aagcctgaacagttcagtttttgcccgttgcatccctcggaggcactttgaaatttattcgagtttacatc

SEQ ID NO: 84097 - DNA, 70 bp, Homo sapiens
ttcagtttttgcccgttgcatccctcggaggcactttgaaatttattcgagtttacatcccctcacttct

SEQ ID NO: 84098 - DNA, 70 bp, Homo sapiens
tttgcccgttgcatccctcggaggcactttgaaatttattcgagtttacatcccctcacttctttctttc

SEQ ID NO: 84099 - DNA, 77 bp, Homo sapiens
tttctcttactctcgttccctctcactcacacatccacacacggcaaagcaagtttatactaggctgcaaatacacg

SEQ ID NO: 84100 - DNA, 70 bp, Homo sapiens
aattcaattacaaacagtttactctgacggcaaattgaaacgttaccttaaatggccacaaatattctca

SEQ ID NO: 84101 - DNA, 71 bp, Homo sapiens
acaaacagtttactctgacggcaaattgaaacgttaccttaaatggccacaaatattctcacaatattcca

SEQ ID NO: 84102 - DNA, 70 bp, Homo sapiens
agtttactctgacggcaaattgaaacgttaccttaaatggccacaaatattctcacaatattccaaggaa

SEQ ID NO: 84103 - DNA, 70 bp, Homo sapiens
gacggcaaattgaaacgttaccttaaatggccacaaatattctcacaatattccaaggaaagagacttta

SEQ ID NO: 84104 - DNA, 69 bp, Homo sapiens
gaaacgttaccttaaatggccacaaatattctcacaatattccaaggaaagagactttaaaaagagaga

SEQ ID NO: 84105 - DNA, 72 bp, Homo sapiens
aatggccacaaatattctcacaatattccaaggaaagagactttaaaaagagagacaaaaatcttctgcaag

SEQ ID NO: 84106 - DNA, 75 bp, Homo sapiens
tcacaatattccaaggaaagagactttaaaaagagagacaaaaatcttctgcaagtacttagtatctcacatgtg

SEQ ID NO: 84107 - DNA, 73 bp, Homo sapiens
ttccaaggaaagagactttaaaaagagagacaaaaatcttctgcaagtacttagtatctcacatgtgtatccc

SEQ ID NO: 84108 - DNA, 72 bp, Homo sapiens
gagactttaaaaagagagacaaaaatcttctgcaagtacttagtatctcacatgtgtatccccaaaaagtat

SEQ ID NO: 84109 - DNA, 74 bp, Homo sapiens
gagagacaaaaatcttctgcaagtacttagtatctcacatgtgtatccccaaaaagtattttaactggtactca

SEQ ID NO: 84110 - DNA, 71 bp, Homo sapiens
aaaaatcttctgcaagtacttagtatctcacatgtgtatccccaaaaagtattttaactggtactcagtcc

SEQ ID NO: 84111 - DNA, 73 bp, Homo sapiens
aagtacttagtatctcacatgtgtatccccaaaaagtattttaactggtactcagtcctgctccagggatatc

SEQ ID NO: 84112 - DNA, 76 bp, Homo sapiens
ttagtatctcacatgtgtatccccaaaaagtattttaactggtactcagtcctgctccagggatatccacagatta

SEQ ID NO: 84113 - DNA, 74 bp, Homo sapiens
acatgtgtatccccaaaaagtattttaactggtactcagtcctgctccagggatatccacagattacaagatta

SEQ ID NO: 84114 - DNA, 75 bp, Homo sapiens
aaaagtattttaactggtactcagtcctgctccagggatatccacagattacaagattatgcacctggctctggt

SEQ ID NO: 84115 - DNA, 78 bp, Homo sapiens
tattttaactggtactcagtcctgctccagggatatccacagattacaagattatgcacctggctctggtttttgcat

SEQ ID NO: 84116 - DNA, 79 bp, Homo sapiens
tactcagtcctgctccagggatatccacagattacaagattatgcacctggctctggtttttgcattttccaccataaa

SEQ ID NO: 84117 - DNA, 77 bp, Homo sapiens
tccagggatatccacagattacaagattatgcacctggctctggtttttgcattttccaccataaaactgcaacaaa

SEQ ID NO: 84118 - DNA, 75 bp, Homo sapiens
atatccacagattacaagattatgcacctggctctggtttttgcattttccaccataaaactgcaacaaaattcc

SEQ ID NO: 84119 - DNA, 72 bp, Homo sapiens
agattacaagattatgcacctggctctggtttttgcattttccaccataaaactgcaacaaaattccctccc

SEQ ID NO: 84120 - DNA, 69 bp, Homo sapiens
attatgcacctggctctggtttttgcattttccaccataaaactgcaacaaaattccctcccccaaaaa

SEQ ID NO: 84121 - DNA, 68 bp, Homo sapiens
gctctggtttttgcattttccaccataaaactgcaacaaaattccctcccccaaaaaagaaatcatta

SEQ ID NO: 84122 - DNA, 65 bp, Homo sapiens
ttttgcattttccaccataaaactgcaacaaaattccctcccccaaaaaagaaatcattaaaaaa

SEQ ID NO: 84123 - DNA, 64 bp, Homo sapiens
aaaaaaaaaatgaacacaggatagttataatttttcctcaaacaattcttgttggtgatttttt

SEQ ID NO: 84124 - DNA, 70 bp, Homo sapiens
tgaacacaggatagttataatttttcctcaaacaattcttgttggtgattttttttcttctctcataaag

SEQ ID NO: 84125 - DNA, 69 bp, Homo sapiens
caggatagttataatttttcctcaaacaattcttgttggtgattttttttcttctctcataaagtctta

SEQ ID NO: 84126 - DNA, 67 bp, Homo sapiens
tttttcctcaaacaattcttgttggtgattttttttcttctctcataaagtcttaaacttgttccaa

SEQ ID NO: 84127 - DNA, 67 bp, Homo sapiens
caaacaattcttgttggtgattttttttcttctctcataaagtcttaaacttgttccaagtttagag

SEQ ID NO: 84128 - DNA, 75 bp, Homo sapiens
tgttggtgattttttttcttctctcataaagtcttaaacttgttccaagtttagaggtgtctcatcatcatcatc

SEQ ID NO: 84129 - DNA, 77 bp, Homo sapiens
ttttttcttctctcataaagtcttaaacttgttccaagtttagaggtgtctcatcatcatcatcctcctcctcatca

SEQ ID NO: 84130 - DNA, 83 bp, Homo sapiens
tcttctctcataaagtcttaaacttgttccaagtttagaggtgtctcatcatcatcatcctcctcctcatcatcatcaccatg

SEQ ID NO: 84131 - DNA, 80 bp, Homo sapiens
taaagtcttaaacttgttccaagtttagaggtgtctcatcatcatcatcctcctcctcatcatcatcaccatggactccc

SEQ ID NO: 84132 - DNA, 85 bp, Homo sapiens
tgttccaagtttagaggtgtctcatcatcatcatcctcctcctcatcatcatcaccatggactcccccgtggagtcacattgata

SEQ ID NO: 84133 - DNA, 84 bp, Homo sapiens
agtttagaggtgtctcatcatcatcatcctcctcctcatcatcatcaccatggactcccccgtggagtcacattgataataata

SEQ ID NO: 84134 - DNA, 83 bp, Homo sapiens
tcatcatcatcatcctcctcctcatcatcatcaccatggactcccccgtggagtcacattgataataataggtttccctgaaa

SEQ ID NO: 84135 - DNA, 79 bp, Homo sapiens
atcatcctcctcctcatcatcatcaccatggactcccccgtggagtcacattgataataataggtttccctgaaagata

SEQ ID NO: 84136 - DNA, 79 bp, Homo sapiens
ctcatcatcatcaccatggactcccccgtggagtcacattgataataataggtttccctgaaagatacattgtaatcca

SEQ ID NO: 84137 - DNA, 77 bp, Homo sapiens
atcatcaccatggactcccccgtggagtcacattgataataataggtttccctgaaagatacattgtaatccattca

SEQ ID NO: 84138 - DNA, 74 bp, Homo sapiens
atggactcccccgtggagtcacattgataataataggtttccctgaaagatacattgtaatccattcacatccg

SEQ ID NO: 84139 - DNA, 73 bp, Homo sapiens
attgataataataggtttccctgaaagatacattgtaatccattcacatccgggaactgcgggcttataaaga

SEQ ID NO: 84140 - DNA, 76 bp, Homo sapiens
aaagatacattgtaatccattcacatccgggaactgcgggcttataaagagaaggagctgcggccgcggctgctcc

SEQ ID NO: 84141 - DNA, 77 bp, Homo sapiens
attgtaatccattcacatccgggaactgcgggcttataaagagaaggagctgcggccgcggctgctcctccagacaa

SEQ ID NO: 84142 - DNA, 74 bp, Homo sapiens
agccaccatgcccgtccaagagataatgttcttagattggtgtttacaaaacatttgctgcagggtggagaaaa

SEQ ID NO: 84143 - DNA, 74 bp, Homo sapiens
atgcccgtccaagagataatgttcttagattggtgtttacaaaacatttgctgcagggtggagaaaagatggtg

SEQ ID NO: 84144 - DNA, 76 bp, Homo sapiens
agataatgttcttagattggtgtttacaaaacatttgctgcagggtggagaaaagatggtggacatgttagaatga

SEQ ID NO: 84145 - DNA, 72 bp, Homo sapiens
tggtttcagtttctactaagatgctaaagtagcccaaatgctggttcctacctccaagggcctcctggagaa

SEQ ID NO: 84146 - DNA, 75 bp, Homo sapiens
tactaagatgctaaagtagcccaaatgctggttcctacctccaagggcctcctggagaagctcgagtagcagttc

SEQ ID NO: 84147 - DNA, 73 bp, Homo sapiens
taaagtagcccaaatgctggttcctacctccaagggcctcctggagaagctcgagtagcagttctcaacccaa

SEQ ID NO: 84148 - DNA, 75 bp, Homo sapiens
aaatgctggttcctacctccaagggcctcctggagaagctcgagtagcagttctcaacccaagtgcatgttacaa

SEQ ID NO: 84149 - DNA, 77 bp, Homo sapiens
ttcctacctccaagggcctcctggagaagctcgagtagcagttctcaacccaagtgcatgttacaatgtcctgagaa

SEQ ID NO: 84150 - DNA, 74 bp, Homo sapiens
aagggcctcctggagaagctcgagtagcagttctcaacccaagtgcatgttacaatgtcctgagaagttttaaa

SEQ ID NO: 84151 - DNA, 75 bp, Homo sapiens
cctcctggagaagctcgagtagcagttctcaacccaagtgcatgttacaatgtcctgagaagttttaaaaaatga

SEQ ID NO: 84152 - DNA, 76 bp, Homo sapiens
ctcgagtagcagttctcaacccaagtgcatgttacaatgtcctgagaagttttaaaaaatgatggctggctttcaa

SEQ ID NO: 84153 - DNA, 74 bp, Homo sapiens
agttctcaacccaagtgcatgttacaatgtcctgagaagttttaaaaaatgatggctggctttcaactgcaccc

SEQ ID NO: 84154 - DNA, 76 bp, Homo sapiens
aagtgcatgttacaatgtcctgagaagttttaaaaaatgatggctggctttcaactgcaccctccatctttgagta

SEQ ID NO: 84155 - DNA, 73 bp, Homo sapiens
atgttacaatgtcctgagaagttttaaaaaatgatggctggctttcaactgcaccctccatctttgagtaatt

SEQ ID NO: 84156 - DNA, 76 bp, Homo sapiens
tgagaagttttaaaaaatgatggctggctttcaactgcaccctccatctttgagtaatttgtcaaaatgatgaaga

SEQ ID NO: 84157 - DNA, 76 bp, Homo sapiens
ttaaaaaatgatggctggctttcaactgcaccctccatctttgagtaatttgtcaaaatgatgaagatgaagggaa

SEQ ID NO: 84158 - DNA, 78 bp, Homo sapiens
aatgatggctggctttcaactgcaccctccatctttgagtaatttgtcaaaatgatgaagatgaagggaaagaggaga

SEQ ID NO: 84159 - DNA, 78 bp, Homo sapiens
tcaactgcaccctccatctttgagtaatttgtcaaaatgatgaagatgaagggaaagaggagaggcacctgtgctatt

SEQ ID NO: 84160 - DNA, 75 bp, Homo sapiens
accctccatctttgagtaatttgtcaaaatgatgaagatgaagggaaagaggagaggcacctgtgctattttctc

SEQ ID NO: 84161 - DNA, 75 bp, Homo sapiens
tttgagtaatttgtcaaaatgatgaagatgaagggaaagaggagaggcacctgtgctattttctccagcctttta

SEQ ID NO: 84162 - DNA, 73 bp, Homo sapiens
aatttgtcaaaatgatgaagatgaagggaaagaggagaggcacctgtgctattttctccagccttttagaaaa

SEQ ID NO: 84163 - DNA, 74 bp, Homo sapiens
aatgatgaagatgaagggaaagaggagaggcacctgtgctattttctccagccttttagaaaacatggtgttgt

SEQ ID NO: 84164 - DNA, 71 bp, Homo sapiens
atgaagggaaagaggagaggcacctgtgctattttctccagccttttagaaaacatggtgttgttcctttg

SEQ ID NO: 84165 - DNA, 74 bp, Homo sapiens
agaggcacctgtgctattttctccagccttttagaaaacatggtgttgttcctttggccgcataagtgccaatc

SEQ ID NO: 84166 - DNA, 74 bp, Homo sapiens
tgtgctattttctccagccttttagaaaacatggtgttgttcctttggccgcataagtgccaatctacaagaaa

SEQ ID NO: 84167 - DNA, 70 bp, Homo sapiens
attttctccagccttttagaaaacatggtgttgttcctttggccgcataagtgccaatctacaagaaagg

SEQ ID NO: 84168 - DNA, 76 bp, Homo sapiens
tttagaaaacatggtgttgttcctttggccgcataagtgccaatctacaagaaaggtgatactgtagacatcaaga

SEQ ID NO: 84169 - DNA, 76 bp, Homo sapiens
aaacatggtgttgttcctttggccgcataagtgccaatctacaagaaaggtgatactgtagacatcaagagaatgg

SEQ ID NO: 84170 - DNA, 77 bp, Homo sapiens
ttcctttggccgcataagtgccaatctacaagaaaggtgatactgtagacatcaagagaatgggcactgttcgaaaa

SEQ ID NO: 84171 - DNA, 73 bp, Homo sapiens
tgtctgacctcagccagaagtcccgtgcaaatcacgaatacccacccagggtggtttataggagagatttatt

SEQ ID NO: 84172 - DNA, 70 bp, Homo sapiens
agccagaagtcccgtgcaaatcacgaatacccacccagggtggtttataggagagatttatttgaagaaa

SEQ ID NO: 84173 - DNA, 72 bp, Homo sapiens
gtgcaaatcacgaatacccacccagggtggtttataggagagatttatttgaagaaatattacaacatataa

SEQ ID NO: 84174 - DNA, 68 bp, Homo sapiens
cccacccagggtggtttataggagagatttatttgaagaaatattacaacatataaaaactacataaa

SEQ ID NO: 84175 - DNA, 72 bp, Homo sapiens
ttataggagagatttatttgaagaaatattacaacatataaaaactacataaagtcttaatttccactcata

SEQ ID NO: 84176 - DNA, 73 bp, Homo sapiens
gaagaaatattacaacatataaaaactacataaagtcttaatttccactcatacagtggtagatttgatataa

SEQ ID NO: 84177 - DNA, 74 bp, Homo sapiens
acaacatataaaaactacataaagtcttaatttccactcatacagtggtagatttgatataatgcataataaaa

SEQ ID NO: 84178 - DNA, 70 bp, Homo sapiens
aaaaactacataaagtcttaatttccactcatacagtggtagatttgatataatgcataataaaaaactt

SEQ ID NO: 84179 - DNA, 72 bp, Homo sapiens
cataaagtcttaatttccactcatacagtggtagatttgatataatgcataataaaaaacttttaaaatcca

SEQ ID NO: 84180 - DNA, 74 bp, Homo sapiens
tttccactcatacagtggtagatttgatataatgcataataaaaaacttttaaaatccagaatgcacaaagtac

SEQ ID NO: 84181 - DNA, 76 bp, Homo sapiens
actcatacagtggtagatttgatataatgcataataaaaaacttttaaaatccagaatgcacaaagtactgcacaa

SEQ ID NO: 84182 - DNA, 77 bp, Homo sapiens
tggtagatttgatataatgcataataaaaaacttttaaaatccagaatgcacaaagtactgcacaatttgatcacta

SEQ ID NO: 84183 - DNA, 75 bp, Homo sapiens
aatgcataataaaaaacttttaaaatccagaatgcacaaagtactgcacaatttgatcactaaatcattagttga

SEQ ID NO: 84184 - DNA, 73 bp, Homo sapiens
aaaaaacttttaaaatccagaatgcacaaagtactgcacaatttgatcactaaatcattagttgataagcgaa

SEQ ID NO: 84185 - DNA, 79 bp, Homo sapiens
ttaaaatccagaatgcacaaagtactgcacaatttgatcactaaatcattagttgataagcgaacctcacacaacagct

SEQ ID NO: 84186 - DNA, 82 bp, Homo sapiens
aatgcacaaagtactgcacaatttgatcactaaatcattagttgataagcgaacctcacacaacagcttcatgtcagccaag

SEQ ID NO: 84187 - DNA, 81 bp, Homo sapiens
acaaagtactgcacaatttgatcactaaatcattagttgataagcgaacctcacacaacagcttcatgtcagccaaggcca

SEQ ID NO: 84188 - DNA, 80 bp, Homo sapiens
aatttgatcactaaatcattagttgataagcgaacctcacacaacagcttcatgtcagccaaggccacaaacaccatgta

SEQ ID NO: 84189 - DNA, 82 bp, Homo sapiens
taaatcattagttgataagcgaacctcacacaacagcttcatgtcagccaaggccacaaacaccatgtaccacacatgtgaa

SEQ ID NO: 84190 - DNA, 80 bp, Homo sapiens
attagttgataagcgaacctcacacaacagcttcatgtcagccaaggccacaaacaccatgtaccacacatgtgaacgga

SEQ ID NO: 84191 - DNA, 82 bp, Homo sapiens
gaacctcacacaacagcttcatgtcagccaaggccacaaacaccatgtaccacacatgtgaacggacagattgacatgttaa

SEQ ID NO: 84192 - DNA, 80 bp, Homo sapiens
acacaacagcttcatgtcagccaaggccacaaacaccatgtaccacacatgtgaacggacagattgacatgttaaaaaca

SEQ ID NO: 84193 - DNA, 80 bp, Homo sapiens
cttcatgtcagccaaggccacaaacaccatgtaccacacatgtgaacggacagattgacatgttaaaaacacaacatcag

SEQ ID NO: 84194 - DNA, 78 bp, Homo sapiens
aaggccacaaacaccatgtaccacacatgtgaacggacagattgacatgttaaaaacacaacatcagtgcatgttggg

SEQ ID NO: 84195 - DNA, 78 bp, Homo sapiens
aaacaccatgtaccacacatgtgaacggacagattgacatgttaaaaacacaacatcagtgcatgttggggattcctg

SEQ ID NO: 84196 - DNA, 80 bp, Homo sapiens
tgtaccacacatgtgaacggacagattgacatgttaaaaacacaacatcagtgcatgttggggattcctggtgccagaaa

SEQ ID NO: 84197 - DNA, 76 bp, Homo sapiens
atgtgaacggacagattgacatgttaaaaacacaacatcagtgcatgttggggattcctggtgccagaaacagggg

SEQ ID NO: 84198 - DNA, 75 bp, Homo sapiens
acagattgacatgttaaaaacacaacatcagtgcatgttggggattcctggtgccagaaacaggggtgacgggag

SEQ ID NO: 84199 - DNA, 74 bp, Homo sapiens
taaaaacacaacatcagtgcatgttggggattcctggtgccagaaacaggggtgacgggagggcagaactagtc

SEQ ID NO: 84200 - DNA, 75 bp, Homo sapiens
aacatcagtgcatgttggggattcctggtgccagaaacaggggtgacgggagggcagaactagtccttagcagct

SEQ ID NO: 84201 - DNA, 72 bp, Homo sapiens
atgttggggattcctggtgccagaaacaggggtgacgggagggcagaactagtccttagcagcttcctcctc

SEQ ID NO: 84202 - DNA, 70 bp, Homo sapiens
attcctggtgccagaaacaggggtgacgggagggcagaactagtccttagcagcttcctcctcctttatt

SEQ ID NO: 84203 - DNA, 69 bp, Homo sapiens
agaaacaggggtgacgggagggcagaactagtccttagcagcttcctcctcctttattttagctgaagg

SEQ ID NO: 84204 - DNA, 69 bp, Homo sapiens
ggtgacgggagggcagaactagtccttagcagcttcctcctcctttattttagctgaagggaaataaaa

SEQ ID NO: 84205 - DNA, 68 bp, Homo sapiens
gggagggcagaactagtccttagcagcttcctcctcctttattttagctgaagggaaataaaaggaaa

SEQ ID NO: 84206 - DNA, 68 bp, Homo sapiens
aactagtccttagcagcttcctcctcctttattttagctgaagggaaataaaaggaaaagtcactctg

SEQ ID NO: 84207 - DNA, 73 bp, Homo sapiens
atgtacccccagagggcagtcaggccccagaggaagcctggcccaccccaccatacctgaggcactctctcgg

SEQ ID NO: 84208 - DNA, 76 bp, Homo sapiens
gcagtcaggccccagaggaagcctggcccaccccaccatacctgaggcactctctcgggctttggccaacatacaa

SEQ ID NO: 84209 - DNA, 75 bp, Homo sapiens
cccagaggaagcctggcccaccccaccatacctgaggcactctctcgggctttggccaacatacaaagcttgatc

SEQ ID NO: 84210 - DNA, 75 bp, Homo sapiens
aggaagcctggcccaccccaccatacctgaggcactctctcgggctttggccaacatacaaagcttgatctccaa

SEQ ID NO: 84211 - DNA, 76 bp, Homo sapiens
accccaccatacctgaggcactctctcgggctttggccaacatacaaagcttgatctccaagccaatggctttggc

SEQ ID NO: 84212 - DNA, 76 bp, Homo sapiens
atacctgaggcactctctcgggctttggccaacatacaaagcttgatctccaagccaatggctttggccaggggcg

SEQ ID NO: 84213 - DNA, 76 bp, Homo sapiens
ctctctcgggctttggccaacatacaaagcttgatctccaagccaatggctttggccaggggcggtggcacggcat

SEQ ID NO: 84214 - DNA, 78 bp, Homo sapiens
ctttggccaacatacaaagcttgatctccaagccaatggctttggccaggggcggtggcacggcattgcccacctgca

SEQ ID NO: 84215 - DNA, 76 bp, Homo sapiens
aacatacaaagcttgatctccaagccaatggctttggccaggggcggtggcacggcattgcccacctgcaggaggg

SEQ ID NO: 84216 - DNA, 75 bp, Homo sapiens
aagcttgatctccaagccaatggctttggccaggggcggtggcacggcattgcccacctgcaggaggggagaagg

SEQ ID NO: 84217 - DNA, 77 bp, Homo sapiens
aagccaatggctttggccaggggcggtggcacggcattgcccacctgcaggaggggagaagggcaatgcctgatgtg

SEQ ID NO: 84218 - DNA, 78 bp, Homo sapiens
tggctttggccaggggcggtggcacggcattgcccacctgcaggaggggagaagggcaatgcctgatgtggacaccca

SEQ ID NO: 84219 - DNA, 75 bp, Homo sapiens
agaagcctccttcctgtccagacccagcgggcgccgccccactgacctgccggtgcttgtccaggatgttgccga

SEQ ID NO: 84220 - DNA, 75 bp, Homo sapiens
ttcctgtccagacccagcgggcgccgccccactgacctgccggtgcttgtccaggatgttgccgaagagccggta

SEQ ID NO: 84221 - DNA, 76 bp, Homo sapiens
tccagacccagcgggcgccgccccactgacctgccggtgcttgtccaggatgttgccgaagagccggtaggtgtca

SEQ ID NO: 84222 - DNA, 74 bp, Homo sapiens
agcgggcgccgccccactgacctgccggtgcttgtccaggatgttgccgaagagccggtaggtgtcagggaagc

SEQ ID NO: 84223 - DNA, 75 bp, Homo sapiens
actgacctgccggtgcttgtccaggatgttgccgaagagccggtaggtgtcagggaagccctgggagcgggcaca

SEQ ID NO: 84224 - DNA, 74 bp, Homo sapiens
cggtgcttgtccaggatgttgccgaagagccggtaggtgtcagggaagccctgggagcgggcacactcccgcac

SEQ ID NO: 84225 - DNA, 76 bp, Homo sapiens
ttgtccaggatgttgccgaagagccggtaggtgtcagggaagccctgggagcgggcacactcccgcacgctcacca

SEQ ID NO: 84226 - DNA, 75 bp, Homo sapiens
atgttgccgaagagccggtaggtgtcagggaagccctgggagcgggcacactcccgcacgctcaccacacggtgc

SEQ ID NO: 84227 - DNA, 76 bp, Homo sapiens
agagccggtaggtgtcagggaagccctgggagcgggcacactcccgcacgctcaccacacggtgctgctctgggtg

SEQ ID NO: 84228 - DNA, 79 bp, Homo sapiens
tgtcagggaagccctgggagcgggcacactcccgcacgctcaccacacggtgctgctctgggtggagcacgcggccctg

SEQ ID NO: 84229 - DNA, 76 bp, Homo sapiens
cctgggagcgggcacactcccgcacgctcaccacacggtgctgctctgggtggagcacgcggccctgggggaaaga

SEQ ID NO: 84230 - DNA, 76 bp, Homo sapiens
agcgggcacactcccgcacgctcaccacacggtgctgctctgggtggagcacgcggccctgggggaaagaggcgcg

SEQ ID NO: 84231 - DNA, 77 bp, Homo sapiens
gcacgctcaccacacggtgctgctctgggtggagcacgcggccctgggggaaagaggcgcggtgggcgagggcagta

SEQ ID NO: 84232 - DNA, 76 bp, Homo sapiens
ctcaccacacggtgctgctctgggtggagcacgcggccctgggggaaagaggcgcggtgggcgagggcagtagcac

SEQ ID NO: 84233 - DNA, 70 bp, Homo sapiens
ccaagtacagggcctgacccaggccctcggatgccccctccccacctacctgcttgcccatgggctcggg

SEQ ID NO: 84234 - DNA, 69 bp, Homo sapiens
ctgacccaggccctcggatgccccctccccacctacctgcttgcccatgggctcggggttggtgacggt

SEQ ID NO: 84235 - DNA, 71 bp, Homo sapiens
ccctcggatgccccctccccacctacctgcttgcccatgggctcggggttggtgacggttgtgctgaagaa

SEQ ID NO: 84236 - DNA, 70 bp, Homo sapiens
ccccctccccacctacctgcttgcccatgggctcggggttggtgacggttgtgctgaagaagccgtccca

SEQ ID NO: 84237 - DNA, 73 bp, Homo sapiens
acctacctgcttgcccatgggctcggggttggtgacggttgtgctgaagaagccgtcccactcgagccttcca

SEQ ID NO: 84238 - DNA, 76 bp, Homo sapiens
ctgcttgcccatgggctcggggttggtgacggttgtgctgaagaagccgtcccactcgagccttccatagaggcca

SEQ ID NO: 84239 - DNA, 74 bp, Homo sapiens
atgggctcggggttggtgacggttgtgctgaagaagccgtcccactcgagccttccatagaggccagcccagtg

SEQ ID NO: 84240 - DNA, 75 bp, Homo sapiens
ttggtgacggttgtgctgaagaagccgtcccactcgagccttccatagaggccagcccagtggttgtgccggttc

SEQ ID NO: 84241 - DNA, 74 bp, Homo sapiens
ttgtgctgaagaagccgtcccactcgagccttccatagaggccagcccagtggttgtgccggttcccggtgtgg

SEQ ID NO: 84242 - DNA, 71 bp, Homo sapiens
aagaagccgtcccactcgagccttccatagaggccagcccagtggttgtgccggttcccggtgtggggcag

SEQ ID NO: 84243 - DNA, 73 bp, Homo sapiens
actcgagccttccatagaggccagcccagtggttgtgccggttcccggtgtggggcaggcaccaggggatgag

SEQ ID NO: 84244 - DNA, 73 bp, Homo sapiens
ttccatagaggccagcccagtggttgtgccggttcccggtgtggggcaggcaccaggggatgagggtgttgaa

SEQ ID NO: 84245 - DNA, 72 bp, Homo sapiens
aggccagcccagtggttgtgccggttcccggtgtggggcaggcaccaggggatgagggtgttgaactgcctg

SEQ ID NO: 84246 - DNA, 71 bp, Homo sapiens
agtggttgtgccggttcccggtgtggggcaggcaccaggggatgagggtgttgaactgcctggctgcgggg

SEQ ID NO: 84247 - DNA, 71 bp, Homo sapiens
ccggttcccggtgtggggcaggcaccaggggatgagggtgttgaactgcctggctgcggggtcgcaggctt

SEQ ID NO: 84248 - DNA, 77 bp, Homo sapiens
tggggcaggcaccaggggatgagggtgttgaactgcctggctgcggggtcgcaggctttgccggctggaagacagga

SEQ ID NO: 84249 - DNA, 77 bp, Homo sapiens
accaggggatgagggtgttgaactgcctggctgcggggtcgcaggctttgccggctggaagacaggacagtgatgag

SEQ ID NO: 84250 - DNA, 81 bp, Homo sapiens
atgagggtgttgaactgcctggctgcggggtcgcaggctttgccggctggaagacaggacagtgatgaggctgcagttgtg

SEQ ID NO: 84251 - DNA, 69 bp, Homo sapiens
agggctctgccttccttcccctcagcccaccgggaaccacaacttacaggacccaccttccacgcagga

SEQ ID NO: 84252 - DNA, 68 bp, Homo sapiens
ccttccttcccctcagcccaccgggaaccacaacttacaggacccaccttccacgcaggagcagaccc

SEQ ID NO: 84253 - DNA, 69 bp, Homo sapiens
ctcagcccaccgggaaccacaacttacaggacccaccttccacgcaggagcagaccccacggagggccc

SEQ ID NO: 84254 - DNA, 69 bp, Homo sapiens
ccaccgggaaccacaacttacaggacccaccttccacgcaggagcagaccccacggagggccccagagc

SEQ ID NO: 84255 - DNA, 72 bp, Homo sapiens
aacttacaggacccaccttccacgcaggagcagaccccacggagggccccagagctgctgcggccgttcttc

SEQ ID NO: 84256 - DNA, 74 bp, Homo sapiens
aggacccaccttccacgcaggagcagaccccacggagggccccagagctgctgcggccgttcttcctgtcatgg

SEQ ID NO: 84257 - DNA, 77 bp, Homo sapiens
ttccacgcaggagcagaccccacggagggccccagagctgctgcggccgttcttcctgtcatggtgggtataccgca

SEQ ID NO: 84258 - DNA, 75 bp, Homo sapiens
agaccccacggagggccccagagctgctgcggccgttcttcctgtcatggtgggtataccgcagcttcctggcca

SEQ ID NO: 84259 - DNA, 80 bp, Homo sapiens
gagggccccagagctgctgcggccgttcttcctgtcatggtgggtataccgcagcttcctggccatggtgccgtctgaga

SEQ ID NO: 84260 - DNA, 81 bp, Homo sapiens
agagctgctgcggccgttcttcctgtcatggtgggtataccgcagcttcctggccatggtgccgtctgagagccgcacctc

SEQ ID NO: 84261 - DNA, 78 bp, Homo sapiens
cggccgttcttcctgtcatggtgggtataccgcagcttcctggccatggtgccgtctgagagccgcacctcgatgttg

SEQ ID NO: 84262 - DNA, 82 bp, Homo sapiens
ttcttcctgtcatggtgggtataccgcagcttcctggccatggtgccgtctgagagccgcacctcgatgttgggcagatcgc

SEQ ID NO: 84263 - DNA, 82 bp, Homo sapiens
atggtgggtataccgcagcttcctggccatggtgccgtctgagagccgcacctcgatgttgggcagatcgcgccagtctgac

SEQ ID NO: 84264 - DNA, 81 bp, Homo sapiens
ataccgcagcttcctggccatggtgccgtctgagagccgcacctcgatgttgggcagatcgcgccagtctgaccctggggc

SEQ ID NO: 84265 - DNA, 79 bp, Homo sapiens
ttcctggccatggtgccgtctgagagccgcacctcgatgttgggcagatcgcgccagtctgaccctggggccaagggga

SEQ ID NO: 84266 - DNA, 82 bp, Homo sapiens
tggtgccgtctgagagccgcacctcgatgttgggcagatcgcgccagtctgaccctggggccaaggggatgtgccgcatgcg

SEQ ID NO: 84267 - DNA, 80 bp, Homo sapiens
agccgcacctcgatgttgggcagatcgcgccagtctgaccctggggccaaggggatgtgccgcatgcgggcagccaccaa

SEQ ID NO: 84268 - DNA, 85 bp, Homo sapiens
gatgttgggcagatcgcgccagtctgaccctggggccaaggggatgtgccgcatgcgggcagccaccaatgcactcatgtcctga

SEQ ID NO: 84269 - DNA, 82 bp, Homo sapiens
agatcgcgccagtctgaccctggggccaaggggatgtgccgcatgcgggcagccaccaatgcactcatgtcctgaaagagtg

SEQ ID NO: 84270 - DNA, 80 bp, Homo sapiens
cgccagtctgaccctggggccaaggggatgtgccgcatgcgggcagccaccaatgcactcatgtcctgaaagagtgtggg

SEQ ID NO: 84271 - DNA, 81 bp, Homo sapiens
tggggccaaggggatgtgccgcatgcgggcagccaccaatgcactcatgtcctgaaagagtgtggggggcccagctgtcac

SEQ ID NO: 84272 - DNA, 77 bp, Homo sapiens
ctgggctgggcctcgaggaggagccgctctgtcagggtgccattaccttacagatgtggtccctgaggatgggctgg

SEQ ID NO: 84273 - DNA, 77 bp, Homo sapiens
ctgggcctcgaggaggagccgctctgtcagggtgccattaccttacagatgtggtccctgaggatgggctggtactg

SEQ ID NO: 84274 - DNA, 76 bp, Homo sapiens
aggaggagccgctctgtcagggtgccattaccttacagatgtggtccctgaggatgggctggtactgtgcgccccg

SEQ ID NO: 84275 - DNA, 79 bp, Homo sapiens
tctgtcagggtgccattaccttacagatgtggtccctgaggatgggctggtactgtgcgccccggagctgcctctggaa

SEQ ID NO: 84276 - DNA, 77 bp, Homo sapiens
ccattaccttacagatgtggtccctgaggatgggctggtactgtgcgccccggagctgcctctggaaccaggactga

SEQ ID NO: 84277 - DNA, 77 bp, Homo sapiens
ccttacagatgtggtccctgaggatgggctggtactgtgcgccccggagctgcctctggaaccaggactgaggctcc

SEQ ID NO: 84278 - DNA, 76 bp, Homo sapiens
tccctgaggatgggctggtactgtgcgccccggagctgcctctggaaccaggactgaggctccccgttgtaggaga

SEQ ID NO: 84279 - DNA, 76 bp, Homo sapiens
aggatgggctggtactgtgcgccccggagctgcctctggaaccaggactgaggctccccgttgtaggagatctcca

SEQ ID NO: 84280 - DNA, 78 bp, Homo sapiens
tactgtgcgccccggagctgcctctggaaccaggactgaggctccccgttgtaggagatctccagtgccgaggctcca

SEQ ID NO: 84281 - DNA, 77 bp, Homo sapiens
ggagctgcctctggaaccaggactgaggctccccgttgtaggagatctccagtgccgaggctccattccgcacctcc

SEQ ID NO: 84282 - DNA, 77 bp, Homo sapiens
gactgaggctccccgttgtaggagatctccagtgccgaggctccattccgcacctccggcaggtcggacatcgtgtc

SEQ ID NO: 84283 - DNA, 77 bp, Homo sapiens
aggctccccgttgtaggagatctccagtgccgaggctccattccgcacctccggcaggtcggacatcgtgtctcgca

SEQ ID NO: 84284 - DNA, 79 bp, Homo sapiens
ttgtaggagatctccagtgccgaggctccattccgcacctccggcaggtcggacatcgtgtctcgcaccgtgatggtcc

SEQ ID NO: 84285 - DNA, 77 bp, Homo sapiens
tctccagtgccgaggctccattccgcacctccggcaggtcggacatcgtgtctcgcaccgtgatggtccggaaagga

SEQ ID NO: 84286 - DNA, 74 bp, Homo sapiens
ctccattccgcacctccggcaggtcggacatcgtgtctcgcaccgtgatggtccggaaaggacccgagctcaac

SEQ ID NO: 84287 - DNA, 75 bp, Homo sapiens
ttccgcacctccggcaggtcggacatcgtgtctcgcaccgtgatggtccggaaaggacccgagctcaacctgcaa

SEQ ID NO: 84288 - DNA, 75 bp, Homo sapiens
ccggcaggtcggacatcgtgtctcgcaccgtgatggtccggaaaggacccgagctcaacctgcaacagaggagga

SEQ ID NO: 84289 - DNA, 75 bp, Homo sapiens
acatcgtgtctcgcaccgtgatggtccggaaaggacccgagctcaacctgcaacagaggaggaggtcaacacctc

SEQ ID NO: 84290 - DNA, 76 bp, Homo sapiens
tactgaggcctgctcggcagtgtgtggaggagcgacgggggccacctacctggttatgttgctcacaaacttcttg

SEQ ID NO: 84291 - DNA, 76 bp, Homo sapiens
tcggcagtgtgtggaggagcgacgggggccacctacctggttatgttgctcacaaacttcttgtcatccaccacca

SEQ ID NO: 84292 - DNA, 74 bp, Homo sapiens
agtgtgtggaggagcgacgggggccacctacctggttatgttgctcacaaacttcttgtcatccaccaccacgc

SEQ ID NO: 84293 - DNA, 76 bp, Homo sapiens
agcgacgggggccacctacctggttatgttgctcacaaacttcttgtcatccaccaccacgctcagctggcaggcc

SEQ ID NO: 84294 - DNA, 76 bp, Homo sapiens
acctacctggttatgttgctcacaaacttcttgtcatccaccaccacgctcagctggcaggcccggggagcaaaca

SEQ ID NO: 84295 - DNA, 79 bp, Homo sapiens
ctggttatgttgctcacaaacttcttgtcatccaccaccacgctcagctggcaggcccggggagcaaacacgtgcagtg

SEQ ID NO: 84296 - DNA, 78 bp, Homo sapiens
tcacaaacttcttgtcatccaccaccacgctcagctggcaggcccggggagcaaacacgtgcagtggctccgggaaca

SEQ ID NO: 84297 - DNA, 76 bp, Homo sapiens
acttcttgtcatccaccaccacgctcagctggcaggcccggggagcaaacacgtgcagtggctccgggaacagagg

SEQ ID NO: 84298 - DNA, 76 bp, Homo sapiens
ccaccacgctcagctggcaggcccggggagcaaacacgtgcagtggctccgggaacagagggagcttctctccagg

SEQ ID NO: 84299 - DNA, 75 bp, Homo sapiens
acgctcagctggcaggcccggggagcaaacacgtgcagtggctccgggaacagagggagcttctctccaggggcc

SEQ ID NO: 84300 - DNA, 75 bp, Homo sapiens
gcccggggagcaaacacgtgcagtggctccgggaacagagggagcttctctccaggggccgcggccaggatgatg

SEQ ID NO: 84301 - DNA, 76 bp, Homo sapiens
agcaaacacgtgcagtggctccgggaacagagggagcttctctccaggggccgcggccaggatgatggcccgcctc

SEQ ID NO: 84302 - DNA, 75 bp, Homo sapiens
acgtgcagtggctccgggaacagagggagcttctctccaggggccgcggccaggatgatggcccgcctcctagtc

SEQ ID NO: 84303 - DNA, 74 bp, Homo sapiens
gggaacagagggagcttctctccaggggccgcggccaggatgatggcccgcctcctagtctgggccacgccgta

SEQ ID NO: 84304 - DNA, 74 bp, Homo sapiens
agagggagcttctctccaggggccgcggccaggatgatggcccgcctcctagtctgggccacgccgtactgacc

SEQ ID NO: 84305 - DNA, 74 bp, Homo sapiens
ttctctccaggggccgcggccaggatgatggcccgcctcctagtctgggccacgccgtactgaccggcctgtgg

SEQ ID NO: 84306 - DNA, 73 bp, Homo sapiens
gcggccaggatgatggcccgcctcctagtctgggccacgccgtactgaccggcctgtgggggagaaggacgga

SEQ ID NO: 84307 - DNA, 71 bp, Homo sapiens
aggatgatggcccgcctcctagtctgggccacgccgtactgaccggcctgtgggggagaaggacggacaac

SEQ ID NO: 84308 - DNA, 83 bp, Homo sapiens
gtcacgtgctggccacatctgtctgcccgccccagccccagggcccacctgcagcacgccgaaggtgcactgatagcccatgc

SEQ ID NO: 84309 - DNA, 81 bp, Homo sapiens
ccacatctgtctgcccgccccagccccagggcccacctgcagcacgccgaaggtgcactgatagcccatgcggaccaggca

SEQ ID NO: 84310 - DNA, 81 bp, Homo sapiens
tctgtctgcccgccccagccccagggcccacctgcagcacgccgaaggtgcactgatagcccatgcggaccaggcagcgga

SEQ ID NO: 84311 - DNA, 81 bp, Homo sapiens
cagccccagggcccacctgcagcacgccgaaggtgcactgatagcccatgcggaccaggcagcggagggtgagcttcagga

SEQ ID NO: 84312 - DNA, 81 bp, Homo sapiens
agggcccacctgcagcacgccgaaggtgcactgatagcccatgcggaccaggcagcggagggtgagcttcaggaccatgga

SEQ ID NO: 84313 - DNA, 82 bp, Homo sapiens
agcacgccgaaggtgcactgatagcccatgcggaccaggcagcggagggtgagcttcaggaccatggagcgcttgaaggaga

SEQ ID NO: 84314 - DNA, 79 bp, Homo sapiens
aaggtgcactgatagcccatgcggaccaggcagcggagggtgagcttcaggaccatggagcgcttgaaggagacaaagt

SEQ ID NO: 84315 - DNA, 79 bp, Homo sapiens
atagcccatgcggaccaggcagcggagggtgagcttcaggaccatggagcgcttgaaggagacaaagttcctgacattc

SEQ ID NO: 84316 - DNA, 79 bp, Homo sapiens
atgcggaccaggcagcggagggtgagcttcaggaccatggagcgcttgaaggagacaaagttcctgacattctccagga

SEQ ID NO: 84317 - DNA, 77 bp, Homo sapiens
aggcagcggagggtgagcttcaggaccatggagcgcttgaaggagacaaagttcctgacattctccaggaggaagaa

SEQ ID NO: 84318 - DNA, 73 bp, Homo sapiens
agggtgagcttcaggaccatggagcgcttgaaggagacaaagttcctgacattctccaggaggaagaaccggg

SEQ ID NO: 84319 - DNA, 71 bp, Homo sapiens
accatggagcgcttgaaggagacaaagttcctgacattctccaggaggaagaaccggggccggtagtagtc

SEQ ID NO: 84320 - DNA, 73 bp, Homo sapiens
gcttgaaggagacaaagttcctgacattctccaggaggaagaaccggggccggtagtagtcgcagtagctgta

SEQ ID NO: 84321 - DNA, 70 bp, Homo sapiens
aaggagacaaagttcctgacattctccaggaggaagaaccggggccggtagtagtcgcagtagctgtagg

SEQ ID NO: 84322 - DNA, 72 bp, Homo sapiens
agttcctgacattctccaggaggaagaaccggggccggtagtagtcgcagtagctgtagggggcaggagaga

SEQ ID NO: 84323 - DNA, 74 bp, Homo sapiens
attctccaggaggaagaaccggggccggtagtagtcgcagtagctgtagggggcaggagagactgcaggagtca

SEQ ID NO: 84324 - DNA, 66 bp, Homo sapiens
acagccccgggccgtctggcaacactggggggcttctacccgtttacctgaggaaggaaaccacca

SEQ ID NO: 84325 - DNA, 67 bp, Homo sapiens
ccgtctggcaacactggggggcttctacccgtttacctgaggaaggaaaccaccagagagtttttga

SEQ ID NO: 84326 - DNA, 65 bp, Homo sapiens
aacactggggggcttctacccgtttacctgaggaaggaaaccaccagagagtttttgaacttgga

SEQ ID NO: 84327 - DNA, 68 bp, Homo sapiens
gcttctacccgtttacctgaggaaggaaaccaccagagagtttttgaacttggagtaggtgcgcgaat

SEQ ID NO: 84328 - DNA, 70 bp, Homo sapiens
gtttacctgaggaaggaaaccaccagagagtttttgaacttggagtaggtgcgcgaattgaagcggttca

SEQ ID NO: 84329 - DNA, 73 bp, Homo sapiens
aggaaggaaaccaccagagagtttttgaacttggagtaggtgcgcgaattgaagcggttcatgccgctgaagc

SEQ ID NO: 84330 - DNA, 74 bp, Homo sapiens
aaaccaccagagagtttttgaacttggagtaggtgcgcgaattgaagcggttcatgccgctgaagccctggcag

SEQ ID NO: 84331 - DNA, 76 bp, Homo sapiens
tttttgaacttggagtaggtgcgcgaattgaagcggttcatgccgctgaagccctggcagggcggcccgccgcaca

SEQ ID NO: 84332 - DNA, 79 bp, Homo sapiens
aacttggagtaggtgcgcgaattgaagcggttcatgccgctgaagccctggcagggcggcccgccgcacagcatctcca

SEQ ID NO: 84333 - DNA, 78 bp, Homo sapiens
aattgaagcggttcatgccgctgaagccctggcagggcggcccgccgcacagcatctccacgtctcccttctggggca

SEQ ID NO: 84334 - DNA, 80 bp, Homo sapiens
gttcatgccgctgaagccctggcagggcggcccgccgcacagcatctccacgtctcccttctggggcagccgctggccgc

SEQ ID NO: 84335 - DNA, 75 bp, Homo sapiens
aagccctggcagggcggcccgccgcacagcatctccacgtctcccttctggggcagccgctggccgcgggagttg

SEQ ID NO: 84336 - DNA, 74 bp, Homo sapiens
agggcggcccgccgcacagcatctccacgtctcccttctggggcagccgctggccgcgggagttggtggtctcc

SEQ ID NO: 84337 - DNA, 78 bp, Homo sapiens
cgcacagcatctccacgtctcccttctggggcagccgctggccgcgggagttggtggtctccccagccatgaccagct

SEQ ID NO: 84338 - DNA, 79 bp, Homo sapiens
agcatctccacgtctcccttctggggcagccgctggccgcgggagttggtggtctccccagccatgaccagcttcagca

SEQ ID NO: 84339 - DNA, 80 bp, Homo sapiens
tctcccttctggggcagccgctggccgcgggagttggtggtctccccagccatgaccagcttcagcaggatgttgcagtc

SEQ ID NO: 84340 - DNA, 83 bp, Homo sapiens
gcagccgctggccgcgggagttggtggtctccccagccatgaccagcttcagcaggatgttgcagtcctctgtgaacactgtg

SEQ ID NO: 84341 - DNA, 81 bp, Homo sapiens
ctggccgcgggagttggtggtctccccagccatgaccagcttcagcaggatgttgcagtcctctgtgaacactgtggagcc

SEQ ID NO: 84342 - DNA, 80 bp, Homo sapiens
gttggtggtctccccagccatgaccagcttcagcaggatgttgcagtcctctgtgaacactgtggagccggggttgttca

SEQ ID NO: 84343 - DNA, 80 bp, Homo sapiens
tctccccagccatgaccagcttcagcaggatgttgcagtcctctgtgaacactgtggagccggggttgttcagccggaac

SEQ ID NO: 84344 - DNA, 78 bp, Homo sapiens
atgaccagcttcagcaggatgttgcagtcctctgtgaacactgtggagccggggttgttcagccggaacgcctgggcc

SEQ ID NO: 84345 - DNA, 77 bp, Homo sapiens
ttcagcaggatgttgcagtcctctgtgaacactgtggagccggggttgttcagccggaacgcctgggccgcagggtc

SEQ ID NO: 84346 - DNA, 75 bp, Homo sapiens
atgttgcagtcctctgtgaacactgtggagccggggttgttcagccggaacgcctgggccgcagggtcccacatc

SEQ ID NO: 84347 - DNA, 75 bp, Homo sapiens
actgtggagccggggttgttcagccggaacgcctgggccgcagggtcccacatctcgatggcccacagcgtgtca

SEQ ID NO: 84348 - DNA, 81 bp, Homo sapiens
ggttgttcagccggaacgcctgggccgcagggtcccacatctcgatggcccacagcgtgtcagagatgcctggcagatcaa

SEQ ID NO: 84349 - DNA, 83 bp, Homo sapiens
ttcagccggaacgcctgggccgcagggtcccacatctcgatggcccacagcgtgtcagagatgcctggcagatcaagcacgaa

SEQ ID NO: 84350 - DNA, 85 bp, Homo sapiens
ctgggccgcagggtcccacatctcgatggcccacagcgtgtcagagatgcctggcagatcaagcacgaagccatgctttcaactc

SEQ ID NO: 84351 - DNA, 75 bp, Homo sapiens
ggtctgggctcaccaggtattcagagatggagcctacgggcgctcacctgcttggtggaatccctccgacaaccc

SEQ ID NO: 84352 - DNA, 74 bp, Homo sapiens
accaggtattcagagatggagcctacgggcgctcacctgcttggtggaatccctccgacaaccccccgcagcca

SEQ ID NO: 84353 - DNA, 75 bp, Homo sapiens
tattcagagatggagcctacgggcgctcacctgcttggtggaatccctccgacaaccccccgcagccagaaaaca

SEQ ID NO: 84354 - DNA, 73 bp, Homo sapiens
atggagcctacgggcgctcacctgcttggtggaatccctccgacaaccccccgcagccagaaaacacatccag

SEQ ID NO: 84355 - DNA, 75 bp, Homo sapiens
gctcacctgcttggtggaatccctccgacaaccccccgcagccagaaaacacatccagggtccgcagcttgggca

SEQ ID NO: 84356 - DNA, 75 bp, Homo sapiens
ttggtggaatccctccgacaaccccccgcagccagaaaacacatccagggtccgcagcttgggcagcttgatctc

SEQ ID NO: 84357 - DNA, 76 bp, Homo sapiens
aatccctccgacaaccccccgcagccagaaaacacatccagggtccgcagcttgggcagcttgatctctatctctg

SEQ ID NO: 84358 - DNA, 80 bp, Homo sapiens
aaccccccgcagccagaaaacacatccagggtccgcagcttgggcagcttgatctctatctctggctcgctcggctcaca

SEQ ID NO: 84359 - DNA, 82 bp, Homo sapiens
gccagaaaacacatccagggtccgcagcttgggcagcttgatctctatctctggctcgctcggctcacaggcttgggacttg

SEQ ID NO: 84360 - DNA, 80 bp, Homo sapiens
aaacacatccagggtccgcagcttgggcagcttgatctctatctctggctcgctcggctcacaggcttgggacttgggct

SEQ ID NO: 84361 - DNA, 79 bp, Homo sapiens
agggtccgcagcttgggcagcttgatctctatctctggctcgctcggctcacaggcttgggacttgggcttgcccttcc

SEQ ID NO: 84362 - DNA, 78 bp, Homo sapiens
agcttgggcagcttgatctctatctctggctcgctcggctcacaggcttgggacttgggcttgcccttccctggggga

SEQ ID NO: 84363 - DNA, 78 bp, Homo sapiens
cttgatctctatctctggctcgctcggctcacaggcttgggacttgggcttgcccttccctgggggagagaggccaga

SEQ ID NO: 84364 - DNA, 76 bp, Homo sapiens
tatctctggctcgctcggctcacaggcttgggacttgggcttgcccttccctgggggagagaggccagaggctaaa

SEQ ID NO: 84365 - DNA, 69 bp, Homo sapiens
cagcctccaagttacagaagaataacttgaaaagaaactcatacaatgacgtaccttttcccttgccct

SEQ ID NO: 84366 - DNA, 66 bp, Homo sapiens
agttacagaagaataacttgaaaagaaactcatacaatgacgtaccttttcccttgcccttccctt

SEQ ID NO: 84367 - DNA, 66 bp, Homo sapiens
aagaataacttgaaaagaaactcatacaatgacgtaccttttcccttgcccttccctttgtttcca

SEQ ID NO: 84368 - DNA, 66 bp, Homo sapiens
ttgaaaagaaactcatacaatgacgtaccttttcccttgcccttccctttgtttccagggctacgg

SEQ ID NO: 84369 - DNA, 67 bp, Homo sapiens
aactcatacaatgacgtaccttttcccttgcccttccctttgtttccagggctacgggcatggttgg

SEQ ID NO: 84370 - DNA, 66 bp, Homo sapiens
acgtaccttttcccttgcccttccctttgtttccagggctacgggcatggttgggaggatcttcaa

SEQ ID NO: 84371 - DNA, 68 bp, Homo sapiens
ttttcccttgcccttccctttgtttccagggctacgggcatggttgggaggatcttcaaagcttttgc

SEQ ID NO: 84372 - DNA, 71 bp, Homo sapiens
ccttccctttgtttccagggctacgggcatggttgggaggatcttcaaagcttttgctctttgcattatag

SEQ ID NO: 84373 - DNA, 74 bp, Homo sapiens
tgtttccagggctacgggcatggttgggaggatcttcaaagcttttgctctttgcattataggcctgaaaagga

SEQ ID NO: 84374 - DNA, 75 bp, Homo sapiens
gggcatggttgggaggatcttcaaagcttttgctctttgcattataggcctgaaaaggagagaactgcaatcgtt

SEQ ID NO: 84375 - DNA, 76 bp, Homo sapiens
tgggaggatcttcaaagcttttgctctttgcattataggcctgaaaaggagagaactgcaatcgtttgggagagaa

SEQ ID NO: 84376 - DNA, 75 bp, Homo sapiens
atcttcaaagcttttgctctttgcattataggcctgaaaaggagagaactgcaatcgtttgggagagaaacgcac

SEQ ID NO: 84377 - DNA, 69 bp, Homo sapiens
ccaactttgaccccgaagccttccctctagcaagcaggggcaccacctcgaggaagtagaagcggttgg

SEQ ID NO: 84378 - DNA, 70 bp, Homo sapiens
tttgaccccgaagccttccctctagcaagcaggggcaccacctcgaggaagtagaagcggttggggccgc

SEQ ID NO: 84379 - DNA, 73 bp, Homo sapiens
ttccctctagcaagcaggggcaccacctcgaggaagtagaagcggttggggccgcccatggagtacacctgga

SEQ ID NO: 84380 - DNA, 75 bp, Homo sapiens
tctagcaagcaggggcaccacctcgaggaagtagaagcggttggggccgcccatggagtacacctggacgcactc

SEQ ID NO: 84381 - DNA, 72 bp, Homo sapiens
caccacctcgaggaagtagaagcggttggggccgcccatggagtacacctggacgcactcgggcaggtcctc

SEQ ID NO: 84382 - DNA, 71 bp, Homo sapiens
aggaagtagaagcggttggggccgcccatggagtacacctggacgcactcgggcaggtcctccccatactc

SEQ ID NO: 84383 - DNA, 74 bp, Homo sapiens
tagaagcggttggggccgcccatggagtacacctggacgcactcgggcaggtcctccccatactccacggtgca

SEQ ID NO: 84384 - DNA, 77 bp, Homo sapiens
gccgcccatggagtacacctggacgcactcgggcaggtcctccccatactccacggtgcagcggccctgcacagcct

SEQ ID NO: 84385 - DNA, 77 bp, Homo sapiens
atggagtacacctggacgcactcgggcaggtcctccccatactccacggtgcagcggccctgcacagccttgaagtc

SEQ ID NO: 84386 - DNA, 75 bp, Homo sapiens
acctggacgcactcgggcaggtcctccccatactccacggtgcagcggccctgcacagccttgaagtccaccacg

SEQ ID NO: 84387 - DNA, 74 bp, Homo sapiens
actcgggcaggtcctccccatactccacggtgcagcggccctgcacagccttgaagtccaccacggcctcctcg

SEQ ID NO: 84388 - DNA, 79 bp, Homo sapiens
tcctccccatactccacggtgcagcggccctgcacagccttgaagtccaccacggcctcctcgtcgctccagtagagca

SEQ ID NO: 84389 - DNA, 79 bp, Homo sapiens
atactccacggtgcagcggccctgcacagccttgaagtccaccacggcctcctcgtcgctccagtagagcaggttgatg

SEQ ID NO: 84390 - DNA, 80 bp, Homo sapiens
agcggccctgcacagccttgaagtccaccacggcctcctcgtcgctccagtagagcaggttgatgtctgcgtggtagctc

SEQ ID NO: 84391 - DNA, 80 bp, Homo sapiens
acagccttgaagtccaccacggcctcctcgtcgctccagtagagcaggttgatgtctgcgtggtagctcgctggagtgga

SEQ ID NO: 84392 - DNA, 80 bp, Homo sapiens
ttgaagtccaccacggcctcctcgtcgctccagtagagcaggttgatgtctgcgtggtagctcgctggagtggacttgtg

SEQ ID NO: 84393 - DNA, 78 bp, Homo sapiens
accacggcctcctcgtcgctccagtagagcaggttgatgtctgcgtggtagctcgctggagtggacttgtgggtgttc

SEQ ID NO: 84394 - DNA, 83 bp, Homo sapiens
tcgctccagtagagcaggttgatgtctgcgtggtagctcgctggagtggacttgtgggtgttctcaggcctgcgagcgggaga

SEQ ID NO: 84395 - DNA, 80 bp, Homo sapiens
agtagagcaggttgatgtctgcgtggtagctcgctggagtggacttgtgggtgttctcaggcctgcgagcgggagaggcc

SEQ ID NO: 84396 - DNA, 78 bp, Homo sapiens
aggttgatgtctgcgtggtagctcgctggagtggacttgtgggtgttctcaggcctgcgagcgggagaggcctcgtta

SEQ ID NO: 84397 - DNA, 77 bp, Homo sapiens
tggtagctcgctggagtggacttgtgggtgttctcaggcctgcgagcgggagaggcctcgttaggagctctcctttg

SEQ ID NO: 84398 - DNA, 76 bp, Homo sapiens
ttctagaagagtctgtggcctcgtggaagaacagaggcctctgctgacctgtagaacttgttgacccggattttga

SEQ ID NO: 84399 - DNA, 79 bp, Homo sapiens
tctgtggcctcgtggaagaacagaggcctctgctgacctgtagaacttgttgacccggattttgatgtcagtctcattg

SEQ ID NO: 84400 - DNA, 76 bp, Homo sapiens
cctcgtggaagaacagaggcctctgctgacctgtagaacttgttgacccggattttgatgtcagtctcattgggcc

SEQ ID NO: 84401 - DNA, 77 bp, Homo sapiens
agaggcctctgctgacctgtagaacttgttgacccggattttgatgtcagtctcattgggcctgccgttgctcttct

SEQ ID NO: 84402 - DNA, 78 bp, Homo sapiens
tgctgacctgtagaacttgttgacccggattttgatgtcagtctcattgggcctgccgttgctcttcttgggacagaa

SEQ ID NO: 84403 - DNA, 76 bp, Homo sapiens
tagaacttgttgacccggattttgatgtcagtctcattgggcctgccgttgctcttcttgggacagaagatctctt

SEQ ID NO: 84404 - DNA, 77 bp, Homo sapiens
ttgttgacccggattttgatgtcagtctcattgggcctgccgttgctcttcttgggacagaagatctctttgatccg

SEQ ID NO: 84405 - DNA, 77 bp, Homo sapiens
attttgatgtcagtctcattgggcctgccgttgctcttcttgggacagaagatctctttgatccggccaattcggta

SEQ ID NO: 84406 - DNA, 75 bp, Homo sapiens
agtctcattgggcctgccgttgctcttcttgggacagaagatctctttgatccggccaattcggtagggctcagg

SEQ ID NO: 84407 - DNA, 76 bp, Homo sapiens
ttgggcctgccgttgctcttcttgggacagaagatctctttgatccggccaattcggtagggctcaggggcatcca

SEQ ID NO: 84408 - DNA, 76 bp, Homo sapiens
ctcttcttgggacagaagatctctttgatccggccaattcggtagggctcaggggcatccaggttgctgcctttga

SEQ ID NO: 84409 - DNA, 77 bp, Homo sapiens
ttgggacagaagatctctttgatccggccaattcggtagggctcaggggcatccaggttgctgcctttgatgtagtc

SEQ ID NO: 84410 - DNA, 75 bp, Homo sapiens
atctctttgatccggccaattcggtagggctcaggggcatccaggttgctgcctttgatgtagtcggagtatttc

SEQ ID NO: 84411 - DNA, 72 bp, Homo sapiens
atccggccaattcggtagggctcaggggcatccaggttgctgcctttgatgtagtcggagtatttccggtag

SEQ ID NO: 84412 - DNA, 74 bp, Homo sapiens
attcggtagggctcaggggcatccaggttgctgcctttgatgtagtcggagtatttccggtagtgctctgggta

SEQ ID NO: 84413 - DNA, 75 bp, Homo sapiens
aggggcatccaggttgctgcctttgatgtagtcggagtatttccggtagtgctctgggtacaggtcctcatccac

SEQ ID NO: 84414 - DNA, 73 bp, Homo sapiens
aggttgctgcctttgatgtagtcggagtatttccggtagtgctctgggtacaggtcctcatccacgggctcct

SEQ ID NO: 84415 - DNA, 71 bp, Homo sapiens
cctttgatgtagtcggagtatttccggtagtgctctgggtacaggtcctcatccacgggctccttccgtgg

SEQ ID NO: 84416 - DNA, 70 bp, Homo sapiens
atgtagtcggagtatttccggtagtgctctgggtacaggtcctcatccacgggctccttccgtgggcgtt

SEQ ID NO: 84417 - DNA, 69 bp, Homo sapiens
agtatttccggtagtgctctgggtacaggtcctcatccacgggctccttccgtgggcgtttcacgggac

SEQ ID NO: 84418 - DNA, 79 bp, Homo sapiens
tagtgctctgggtacaggtcctcatccacgggctccttccgtgggcgtttcacgggactggacagcttgatgctgcaga

SEQ ID NO: 84419 - DNA, 77 bp, Homo sapiens
gggtacaggtcctcatccacgggctccttccgtgggcgtttcacgggactggacagcttgatgctgcagagaagcac

SEQ ID NO: 84420 - DNA, 80 bp, Homo sapiens
atccacgggctccttccgtgggcgtttcacgggactggacagcttgatgctgcagagaagcacccacttgacatcaatga

SEQ ID NO: 84421 - DNA, 79 bp, Homo sapiens
ctccttccgtgggcgtttcacgggactggacagcttgatgctgcagagaagcacccacttgacatcaatgaaccttcca

SEQ ID NO: 84422 - DNA, 82 bp, Homo sapiens
ggcgtttcacgggactggacagcttgatgctgcagagaagcacccacttgacatcaatgaaccttccaccttgcagtggtca

SEQ ID NO: 84423 - DNA, 85 bp, Homo sapiens
acgggactggacagcttgatgctgcagagaagcacccacttgacatcaatgaaccttccaccttgcagtggtcagtcaggcatga

SEQ ID NO: 84424 - DNA, 86 bp, Homo sapiens
agcttgatgctgcagagaagcacccacttgacatcaatgaaccttccaccttgcagtggtcagtcaggcatgactgaccagtgaaa

SEQ ID NO: 84425 - DNA, 84 bp, Homo sapiens
atgctgcagagaagcacccacttgacatcaatgaaccttccaccttgcagtggtcagtcaggcatgactgaccagtgaaaataa

SEQ ID NO: 84426 - DNA, 78 bp, Homo sapiens
aagcacccacttgacatcaatgaaccttccaccttgcagtggtcagtcaggcatgactgaccagtgaaaataaccatt

SEQ ID NO: 84427 - DNA, 78 bp, Homo sapiens
cttgacatcaatgaaccttccaccttgcagtggtcagtcaggcatgactgaccagtgaaaataaccatttaaagtcaa

SEQ ID NO: 84428 - DNA, 78 bp, Homo sapiens
ccttccaccttgcagtggtcagtcaggcatgactgaccagtgaaaataaccatttaaagtcaagcacctgatgaatta

SEQ ID NO: 84429 - DNA, 77 bp, Homo sapiens
accttgcagtggtcagtcaggcatgactgaccagtgaaaataaccatttaaagtcaagcacctgatgaattaaggta

SEQ ID NO: 84430 - DNA, 74 bp, Homo sapiens
agtcaggcatgactgaccagtgaaaataaccatttaaagtcaagcacctgatgaattaaggtaggtgtgtaccc

SEQ ID NO: 84431 - DNA, 72 bp, Homo sapiens
tgactgaccagtgaaaataaccatttaaagtcaagcacctgatgaattaaggtaggtgtgtaccctaagaaa

SEQ ID NO: 84432 - DNA, 70 bp, Homo sapiens
ccagtgaaaataaccatttaaagtcaagcacctgatgaattaaggtaggtgtgtaccctaagaaatgatt

SEQ ID NO: 84433 - DNA, 77 bp, Homo sapiens
aaaaaagatttagctgcagatttagtctcacagtttgaagcacgcattcaccctctgcgcattactggctacggtgg

SEQ ID NO: 84434 - DNA, 82 bp, Homo sapiens
agatttagctgcagatttagtctcacagtttgaagcacgcattcaccctctgcgcattactggctacggtggtggctgacac

SEQ ID NO: 84435 - DNA, 79 bp, Homo sapiens
acagtttgaagcacgcattcaccctctgcgcattactggctacggtggtggctgacactgctcaaataccccaggctcc

SEQ ID NO: 84436 - DNA, 79 bp, Homo sapiens
aagcacgcattcaccctctgcgcattactggctacggtggtggctgacactgctcaaataccccaggctcctgcctccc

SEQ ID NO: 84437 - DNA, 77 bp, Homo sapiens
attcaccctctgcgcattactggctacggtggtggctgacactgctcaaataccccaggctcctgcctcccgactac

SEQ ID NO: 84438 - DNA, 76 bp, Homo sapiens
attactggctacggtggtggctgacactgctcaaataccccaggctcctgcctcccgactacttggcatcttgtgt

SEQ ID NO: 84439 - DNA, 77 bp, Homo sapiens
tggctacggtggtggctgacactgctcaaataccccaggctcctgcctcccgactacttggcatcttgtgtttcctg

SEQ ID NO: 84440 - DNA, 80 bp, Homo sapiens
ctgacactgctcaaataccccaggctcctgcctcccgactacttggcatcttgtgtttcctggcatgtgacgtgggcaga

SEQ ID NO: 84441 - DNA, 78 bp, Homo sapiens
tcaaataccccaggctcctgcctcccgactacttggcatcttgtgtttcctggcatgtgacgtgggcagaagtgacca

SEQ ID NO: 84442 - DNA, 80 bp, Homo sapiens
caggctcctgcctcccgactacttggcatcttgtgtttcctggcatgtgacgtgggcagaagtgaccaaagaggatgtca

SEQ ID NO: 84443 - DNA, 80 bp, Homo sapiens
ctgcctcccgactacttggcatcttgtgtttcctggcatgtgacgtgggcagaagtgaccaaagaggatgtcactgcctg

SEQ ID NO: 84444 - DNA, 79 bp, Homo sapiens
actacttggcatcttgtgtttcctggcatgtgacgtgggcagaagtgaccaaagaggatgtcactgcctggggaatgtc

SEQ ID NO: 84445 - DNA, 79 bp, Homo sapiens
atcttgtgtttcctggcatgtgacgtgggcagaagtgaccaaagaggatgtcactgcctggggaatgtcctgtgtgctt

SEQ ID NO: 84446 - DNA, 78 bp, Homo sapiens
tttcctggcatgtgacgtgggcagaagtgaccaaagaggatgtcactgcctggggaatgtcctgtgtgctttcccttg

SEQ ID NO: 84447 - DNA, 78 bp, Homo sapiens
tgtgacgtgggcagaagtgaccaaagaggatgtcactgcctggggaatgtcctgtgtgctttcccttgggctcaaaca

SEQ ID NO: 84448 - DNA, 75 bp, Homo sapiens
agaagtgaccaaagaggatgtcactgcctggggaatgtcctgtgtgctttcccttgggctcaaacactggcaact

SEQ ID NO: 84449 - DNA, 77 bp, Homo sapiens
aaagaggatgtcactgcctggggaatgtcctgtgtgctttcccttgggctcaaacactggcaacttctgactccagc

SEQ ID NO: 84450 - DNA, 77 bp, Homo sapiens
actgcctggggaatgtcctgtgtgctttcccttgggctcaaacactggcaacttctgactccagcggcccagatatc

SEQ ID NO: 84451 - DNA, 77 bp, Homo sapiens
tgtgctttcccttgggctcaaacactggcaacttctgactccagcggcccagatatccaagggacacaacaggtgga

SEQ ID NO: 84452 - DNA, 75 bp, Homo sapiens
ttcccttgggctcaaacactggcaacttctgactccagcggcccagatatccaagggacacaacaggtggagtcc

SEQ ID NO: 84453 - DNA, 79 bp, Homo sapiens
aaacactggcaacttctgactccagcggcccagatatccaagggacacaacaggtggagtcctctgctgacctgtgatg

SEQ ID NO: 84454 - DNA, 81 bp, Homo sapiens
cttctgactccagcggcccagatatccaagggacacaacaggtggagtcctctgctgacctgtgatgggcacctcgtatga

SEQ ID NO: 84455 - DNA, 81 bp, Homo sapiens
actccagcggcccagatatccaagggacacaacaggtggagtcctctgctgacctgtgatgggcacctcgtatgagcgaga

SEQ ID NO: 84456 - DNA, 80 bp, Homo sapiens
agatatccaagggacacaacaggtggagtcctctgctgacctgtgatgggcacctcgtatgagcgagacagcggctaccg

SEQ ID NO: 84457 - DNA, 78 bp, Homo sapiens
ggacacaacaggtggagtcctctgctgacctgtgatgggcacctcgtatgagcgagacagcggctaccgtggtttttg

SEQ ID NO: 84458 - DNA, 78 bp, Homo sapiens
aacaggtggagtcctctgctgacctgtgatgggcacctcgtatgagcgagacagcggctaccgtggtttttgttgaga

SEQ ID NO: 84459 - DNA, 73 bp, Homo sapiens
ctggctcagcctggagcgccctggccccggctgctccgagggggcacttacttgaacgtgaaggcctcagggg

SEQ ID NO: 84460 - DNA, 71 bp, Homo sapiens
agcgccctggccccggctgctccgagggggcacttacttgaacgtgaaggcctcagggggcaggtacacac

SEQ ID NO: 84461 - DNA, 72 bp, Homo sapiens
cccggctgctccgagggggcacttacttgaacgtgaaggcctcagggggcaggtacacaccatcaccaactc

SEQ ID NO: 84462 - DNA, 72 bp, Homo sapiens
tccgagggggcacttacttgaacgtgaaggcctcagggggcaggtacacaccatcaccaactcggtacagga

SEQ ID NO: 84463 - DNA, 72 bp, Homo sapiens
acttacttgaacgtgaaggcctcagggggcaggtacacaccatcaccaactcggtacaggatgccgttcttg

SEQ ID NO: 84464 - DNA, 74 bp, Homo sapiens
aacgtgaaggcctcagggggcaggtacacaccatcaccaactcggtacaggatgccgttcttggtggctgagta

SEQ ID NO: 84465 - DNA, 74 bp, Homo sapiens
aaggcctcagggggcaggtacacaccatcaccaactcggtacaggatgccgttcttggtggctgagtagtagag

SEQ ID NO: 84466 - DNA, 74 bp, Homo sapiens
aggtacacaccatcaccaactcggtacaggatgccgttcttggtggctgagtagtagaggacccggctatccag

SEQ ID NO: 84467 - DNA, 74 bp, Homo sapiens
accatcaccaactcggtacaggatgccgttcttggtggctgagtagtagaggacccggctatccaggtcctcga

SEQ ID NO: 84468 - DNA, 75 bp, Homo sapiens
aactcggtacaggatgccgttcttggtggctgagtagtagaggacccggctatccaggtcctcgagctgctccag

SEQ ID NO: 84469 - DNA, 75 bp, Homo sapiens
acaggatgccgttcttggtggctgagtagtagaggacccggctatccaggtcctcgagctgctccaggaccctgg

SEQ ID NO: 84470 - DNA, 72 bp, Homo sapiens
ttggtggctgagtagtagaggacccggctatccaggtcctcgagctgctccaggaccctggggatttctttt

SEQ ID NO: 84471 - DNA, 74 bp, Homo sapiens
agtagtagaggacccggctatccaggtcctcgagctgctccaggaccctggggatttctttttgcctcatctca

SEQ ID NO: 84472 - DNA, 75 bp, Homo sapiens
agaggacccggctatccaggtcctcgagctgctccaggaccctggggatttctttttgcctcatctcagccagac

SEQ ID NO: 84473 - DNA, 81 bp, Homo sapiens
tatccaggtcctcgagctgctccaggaccctggggatttctttttgcctcatctcagccagacgggcacagctcacacaga

SEQ ID NO: 84474 - DNA, 80 bp, Homo sapiens
gagctgctccaggaccctggggatttctttttgcctcatctcagccagacgggcacagctcacacagaatctgaaggaaa

SEQ ID NO: 84475 - DNA, 75 bp, Homo sapiens
aggaccctggggatttctttttgcctcatctcagccagacgggcacagctcacacagaatctgaaggaaacaaag

SEQ ID NO: 84476 - DNA, 78 bp, Homo sapiens
ggatttctttttgcctcatctcagccagacgggcacagctcacacagaatctgaaggaaacaaagggacagaaacata

SEQ ID NO: 84477 - DNA, 78 bp, Homo sapiens
tctttttgcctcatctcagccagacgggcacagctcacacagaatctgaaggaaacaaagggacagaaacataaggcc

SEQ ID NO: 84478 - DNA, 76 bp, Homo sapiens
tgggctgaaagtgcctgctgaccccgagtccagccccagtgctcacttgaacttgttgtcctctgttggctgggtt

SEQ ID NO: 84479 - DNA, 73 bp, Homo sapiens
aaagtgcctgctgaccccgagtccagccccagtgctcacttgaacttgttgtcctctgttggctgggtttttg

SEQ ID NO: 84480 - DNA, 70 bp, Homo sapiens
accccgagtccagccccagtgctcacttgaacttgttgtcctctgttggctgggtttttggaggggactc

SEQ ID NO: 84481 - DNA, 73 bp, Homo sapiens
cagccccagtgctcacttgaacttgttgtcctctgttggctgggtttttggaggggactcgaatctcgcgtag

SEQ ID NO: 84482 - DNA, 76 bp, Homo sapiens
gtgctcacttgaacttgttgtcctctgttggctgggtttttggaggggactcgaatctcgcgtagtcttgatcata

SEQ ID NO: 84483 - DNA, 74 bp, Homo sapiens
cttgaacttgttgtcctctgttggctgggtttttggaggggactcgaatctcgcgtagtcttgatcataccaca

SEQ ID NO: 84484 - DNA, 76 bp, Homo sapiens
tgtcctctgttggctgggtttttggaggggactcgaatctcgcgtagtcttgatcataccacagctggtagaagta

SEQ ID NO: 84485 - DNA, 72 bp, Homo sapiens
tgggtttttggaggggactcgaatctcgcgtagtcttgatcataccacagctggtagaagtaggtcttcccg

SEQ ID NO: 84486 - DNA, 73 bp, Homo sapiens
ttttggaggggactcgaatctcgcgtagtcttgatcataccacagctggtagaagtaggtcttcccgtcgtcc

SEQ ID NO: 84487 - DNA, 74 bp, Homo sapiens
actcgaatctcgcgtagtcttgatcataccacagctggtagaagtaggtcttcccgtcgtccccctccagcagg

SEQ ID NO: 84488 - DNA, 74 bp, Homo sapiens
gtagtcttgatcataccacagctggtagaagtaggtcttcccgtcgtccccctccagcagggactcgggatcca

SEQ ID NO: 84489 - DNA, 75 bp, Homo sapiens
ttgatcataccacagctggtagaagtaggtcttcccgtcgtccccctccagcagggactcgggatccatgcctcc

SEQ ID NO: 84490 - DNA, 71 bp, Homo sapiens
acagctggtagaagtaggtcttcccgtcgtccccctccagcagggactcgggatccatgcctcccttggga

SEQ ID NO: 84491 - DNA, 70 bp, Homo sapiens
agaagtaggtcttcccgtcgtccccctccagcagggactcgggatccatgcctcccttgggagataagaa

SEQ ID NO: 84492 - DNA, 74 bp, Homo sapiens
ttcccgtcgtccccctccagcagggactcgggatccatgcctcccttgggagataagaatgcgtgtcaggccag

SEQ ID NO: 84493 - DNA, 73 bp, Homo sapiens
agtgaccctccacgataaggcaggggctcacgagggacaccaggcactcacctccatggcccagttttcggag

SEQ ID NO: 84494 - DNA, 72 bp, Homo sapiens
ataaggcaggggctcacgagggacaccaggcactcacctccatggcccagttttcggagggggctttgtaga

SEQ ID NO: 84495 - DNA, 73 bp, Homo sapiens
gctcacgagggacaccaggcactcacctccatggcccagttttcggagggggctttgtagatgactttcactt

SEQ ID NO: 84496 - DNA, 76 bp, Homo sapiens
gacaccaggcactcacctccatggcccagttttcggagggggctttgtagatgactttcactttgctgtggatata

SEQ ID NO: 84497 - DNA, 77 bp, Homo sapiens
actcacctccatggcccagttttcggagggggctttgtagatgactttcactttgctgtggatatatgaaagctgca

SEQ ID NO: 84498 - DNA, 78 bp, Homo sapiens
atggcccagttttcggagggggctttgtagatgactttcactttgctgtggatatatgaaagctgcatgtcctcacat

SEQ ID NO: 84499 - DNA, 80 bp, Homo sapiens
ttttcggagggggctttgtagatgactttcactttgctgtggatatatgaaagctgcatgtcctcacattcatccaccaa

SEQ ID NO: 84500 - DNA, 84 bp, Homo sapiens
ggctttgtagatgactttcactttgctgtggatatatgaaagctgcatgtcctcacattcatccaccaagaacagctccagagg

SEQ ID NO: 84501 - DNA, 85 bp, Homo sapiens
tgtagatgactttcactttgctgtggatatatgaaagctgcatgtcctcacattcatccaccaagaacagctccagagggtccga

SEQ ID NO: 84502 - DNA, 82 bp, Homo sapiens
tttcactttgctgtggatatatgaaagctgcatgtcctcacattcatccaccaagaacagctccagagggtccgacgtggcc

SEQ ID NO: 84503 - DNA, 81 bp, Homo sapiens
gatatatgaaagctgcatgtcctcacattcatccaccaagaacagctccagagggtccgacgtggccccgaggactgtgtc

SEQ ID NO: 84504 - DNA, 80 bp, Homo sapiens
atgaaagctgcatgtcctcacattcatccaccaagaacagctccagagggtccgacgtggccccgaggactgtgtctgtc

SEQ ID NO: 84505 - DNA, 79 bp, Homo sapiens
tgtcctcacattcatccaccaagaacagctccagagggtccgacgtggccccgaggactgtgtctgtcccagcgcagaa

SEQ ID NO: 84506 - DNA, 76 bp, Homo sapiens
attcatccaccaagaacagctccagagggtccgacgtggccccgaggactgtgtctgtcccagcgcagaaccagtg

SEQ ID NO: 84507 - DNA, 75 bp, Homo sapiens
aacagctccagagggtccgacgtggccccgaggactgtgtctgtcccagcgcagaaccagtgggcgtgaaacatc

SEQ ID NO: 84508 - DNA, 73 bp, Homo sapiens
agagggtccgacgtggccccgaggactgtgtctgtcccagcgcagaaccagtgggcgtgaaacatctgcccgt

SEQ ID NO: 84509 - DNA, 78 bp, Homo sapiens
tccgacgtggccccgaggactgtgtctgtcccagcgcagaaccagtgggcgtgaaacatctgcccgttgctgctgtcc

SEQ ID NO: 84510 - DNA, 80 bp, Homo sapiens
aggactgtgtctgtcccagcgcagaaccagtgggcgtgaaacatctgcccgttgctgctgtcctcccacagcgccgtgac

SEQ ID NO: 84511 - DNA, 81 bp, Homo sapiens
tctgtcccagcgcagaaccagtgggcgtgaaacatctgcccgttgctgctgtcctcccacagcgccgtgaccctggaatca

SEQ ID NO: 84512 - DNA, 79 bp, Homo sapiens
agcgcagaaccagtgggcgtgaaacatctgcccgttgctgctgtcctcccacagcgccgtgaccctggaatcagaagac

SEQ ID NO: 84513 - DNA, 78 bp, Homo sapiens
accagtgggcgtgaaacatctgcccgttgctgctgtcctcccacagcgccgtgaccctggaatcagaagacgggcatg

SEQ ID NO: 84514 - DNA, 81 bp, Homo sapiens
tacttgatgagaaagtgcatgcagaagtcaagcaaaaagaaagatgcaaaccttgctagatacagcggttttgaggaatca

SEQ ID NO: 84515 - DNA, 79 bp, Homo sapiens
aaagtgcatgcagaagtcaagcaaaaagaaagatgcaaaccttgctagatacagcggttttgaggaatcatctggaata

SEQ ID NO: 84516 - DNA, 77 bp, Homo sapiens
aagtcaagcaaaaagaaagatgcaaaccttgctagatacagcggttttgaggaatcatctggaataacagagacaca

SEQ ID NO: 84517 - DNA, 76 bp, Homo sapiens
agcaaaaagaaagatgcaaaccttgctagatacagcggttttgaggaatcatctggaataacagagacacagtccc

SEQ ID NO: 84518 - DNA, 76 bp, Homo sapiens
aagatgcaaaccttgctagatacagcggttttgaggaatcatctggaataacagagacacagtcccccacttccag

SEQ ID NO: 84519 - DNA, 75 bp, Homo sapiens
ctagatacagcggttttgaggaatcatctggaataacagagacacagtcccccacttccagggtttccgcatcaa

SEQ ID NO: 84520 - DNA, 77 bp, Homo sapiens
tacagcggttttgaggaatcatctggaataacagagacacagtcccccacttccagggtttccgcatcaatgcacac

SEQ ID NO: 84521 - DNA, 76 bp, Homo sapiens
gaatcatctggaataacagagacacagtcccccacttccagggtttccgcatcaatgcacaccttcttatagtaac

SEQ ID NO: 84522 - DNA, 74 bp, Homo sapiens
gaataacagagacacagtcccccacttccagggtttccgcatcaatgcacaccttcttatagtaactcttcttc

SEQ ID NO: 84523 - DNA, 75 bp, Homo sapiens
acagagacacagtcccccacttccagggtttccgcatcaatgcacaccttcttatagtaactcttcttcccatca

SEQ ID NO: 84524 - DNA, 77 bp, Homo sapiens
cccacttccagggtttccgcatcaatgcacaccttcttatagtaactcttcttcccatcagtctgaaaatgagagca

SEQ ID NO: 84525 - DNA, 78 bp, Homo sapiens
agggtttccgcatcaatgcacaccttcttatagtaactcttcttcccatcagtctgaaaatgagagcataagttcatg

SEQ ID NO: 84526 - DNA, 82 bp, Homo sapiens
atcaatgcacaccttcttatagtaactcttcttcccatcagtctgaaaatgagagcataagttcatggaggatcattctgag

SEQ ID NO: 84527 - DNA, 73 bp, Homo sapiens
ttattgggaacatggcagtgagctgaccaaggggctccaagggttaccttgacggcttctccgacccaagaga

SEQ ID NO: 84528 - DNA, 74 bp, Homo sapiens
atggcagtgagctgaccaaggggctccaagggttaccttgacggcttctccgacccaagagatgcgattcttgt

SEQ ID NO: 84529 - DNA, 71 bp, Homo sapiens
agctgaccaaggggctccaagggttaccttgacggcttctccgacccaagagatgcgattcttgttctgtt

SEQ ID NO: 84530 - DNA, 71 bp, Homo sapiens
gggctccaagggttaccttgacggcttctccgacccaagagatgcgattcttgttctgtttcttcttcttc

SEQ ID NO: 84531 - DNA, 69 bp, Homo sapiens
aagggttaccttgacggcttctccgacccaagagatgcgattcttgttctgtttcttcttcttcccctg

SEQ ID NO: 84532 - DNA, 71 bp, Homo sapiens
ccttgacggcttctccgacccaagagatgcgattcttgttctgtttcttcttcttcccctggtgcattttt

SEQ ID NO: 84533 - DNA, 71 bp, Homo sapiens
ttctccgacccaagagatgcgattcttgttctgtttcttcttcttcccctggtgcatttttttgggtgacg

SEQ ID NO: 84534 - DNA, 74 bp, Homo sapiens
agatgcgattcttgttctgtttcttcttcttcccctggtgcatttttttgggtgacggcatctctgggatgtta

SEQ ID NO: 84535 - DNA, 74 bp, Homo sapiens
attcttgttctgtttcttcttcttcccctggtgcatttttttgggtgacggcatctctgggatgttatcatcga

SEQ ID NO: 84536 - DNA, 77 bp, Homo sapiens
ttcttcttcttcccctggtgcatttttttgggtgacggcatctctgggatgttatcatcgacttcctcatcgtcatc

SEQ ID NO: 84537 - DNA, 78 bp, Homo sapiens
tcttcccctggtgcatttttttgggtgacggcatctctgggatgttatcatcgacttcctcatcgtcatctgcctcct

SEQ ID NO: 84538 - DNA, 79 bp, Homo sapiens
atttttttgggtgacggcatctctgggatgttatcatcgacttcctcatcgtcatctgcctccttcatggccatattgg

SEQ ID NO: 84539 - DNA, 84 bp, Homo sapiens
tttgggtgacggcatctctgggatgttatcatcgacttcctcatcgtcatctgcctccttcatggccatattgggacacctgca

SEQ ID NO: 84540 - DNA, 85 bp, Homo sapiens
tctctgggatgttatcatcgacttcctcatcgtcatctgcctccttcatggccatattgggacacctgcaatgtcactggttata

SEQ ID NO: 84541 - DNA, 82 bp, Homo sapiens
atgttatcatcgacttcctcatcgtcatctgcctccttcatggccatattgggacacctgcaatgtcactggttatacctaa

SEQ ID NO: 84542 - DNA, 79 bp, Homo sapiens
atcgacttcctcatcgtcatctgcctccttcatggccatattgggacacctgcaatgtcactggttatacctaaggccc

SEQ ID NO: 84543 - DNA, 80 bp, Homo sapiens
cagctggcaagtcctctgccacaggaggaagactcggcctgacctacctccgctcttggcaagcctgcttgctccgtcca

SEQ ID NO: 84544 - DNA, 78 bp, Homo sapiens
aagtcctctgccacaggaggaagactcggcctgacctacctccgctcttggcaagcctgcttgctccgtccactgcca

SEQ ID NO: 84545 - DNA, 75 bp, Homo sapiens
acaggaggaagactcggcctgacctacctccgctcttggcaagcctgcttgctccgtccactgccaccaaattta

SEQ ID NO: 84546 - DNA, 74 bp, Homo sapiens
aggaagactcggcctgacctacctccgctcttggcaagcctgcttgctccgtccactgccaccaaatttaacca

SEQ ID NO: 84547 - DNA, 77 bp, Homo sapiens
tgacctacctccgctcttggcaagcctgcttgctccgtccactgccaccaaatttaaccatgtccttgcaggcttta

SEQ ID NO: 84548 - DNA, 75 bp, Homo sapiens
acctccgctcttggcaagcctgcttgctccgtccactgccaccaaatttaaccatgtccttgcaggctttacatt

SEQ ID NO: 84549 - DNA, 77 bp, Homo sapiens
ttggcaagcctgcttgctccgtccactgccaccaaatttaaccatgtccttgcaggctttacatttcccacactcag

SEQ ID NO: 84550 - DNA, 79 bp, Homo sapiens
tgctccgtccactgccaccaaatttaaccatgtccttgcaggctttacatttcccacactcaggctgctgacacaccta

SEQ ID NO: 84551 - DNA, 76 bp, Homo sapiens
tccactgccaccaaatttaaccatgtccttgcaggctttacatttcccacactcaggctgctgacacacctaaaaa

SEQ ID NO: 84552 - DNA, 74 bp, Homo sapiens
aaatttaaccatgtccttgcaggctttacatttcccacactcaggctgctgacacacctaaaaaatggcattaa

SEQ ID NO: 84553 - DNA, 75 bp, Homo sapiens
accatgtccttgcaggctttacatttcccacactcaggctgctgacacacctaaaaaatggcattaaaaaggcaa

SEQ ID NO: 84554 - DNA, 73 bp, Homo sapiens
aggctttacatttcccacactcaggctgctgacacacctaaaaaatggcattaaaaaggcaaatcagggctgg

SEQ ID NO: 84555 - DNA, 74 bp, Homo sapiens
ggctgggccaccttaggggagcgggagcacccacaggtgaggttacctcacagacgccacatcgccggcgctta

SEQ ID NO: 84556 - DNA, 71 bp, Homo sapiens
accttaggggagcgggagcacccacaggtgaggttacctcacagacgccacatcgccggcgcttaaaggcg

SEQ ID NO: 84557 - DNA, 73 bp, Homo sapiens
agcgggagcacccacaggtgaggttacctcacagacgccacatcgccggcgcttaaaggcgttctccttgtct

SEQ ID NO: 84558 - DNA, 75 bp, Homo sapiens
acccacaggtgaggttacctcacagacgccacatcgccggcgcttaaaggcgttctccttgtcttctctgtcatc

SEQ ID NO: 84559 - DNA, 73 bp, Homo sapiens
aggttacctcacagacgccacatcgccggcgcttaaaggcgttctccttgtcttctctgtcatccttttcaat

SEQ ID NO: 84560 - DNA, 77 bp, Homo sapiens
acagacgccacatcgccggcgcttaaaggcgttctccttgtcttctctgtcatccttttcaatttgctctgcgaaga

SEQ ID NO: 84561 - DNA, 75 bp, Homo sapiens
acatcgccggcgcttaaaggcgttctccttgtcttctctgtcatccttttcaatttgctctgcgaagaaagtatc

SEQ ID NO: 84562 - DNA, 75 bp, Homo sapiens
cttaaaggcgttctccttgtcttctctgtcatccttttcaatttgctctgcgaagaaagtatcgaagatctggta

SEQ ID NO: 84563 - DNA, 78 bp, Homo sapiens
ttctccttgtcttctctgtcatccttttcaatttgctctgcgaagaaagtatcgaagatctggtagaccagcttggtg

SEQ ID NO: 84564 - DNA, 78 bp, Homo sapiens
ttgtcttctctgtcatccttttcaatttgctctgcgaagaaagtatcgaagatctggtagaccagcttggtggtggtg

SEQ ID NO: 84565 - DNA, 74 bp, Homo sapiens
atccttttcaatttgctctgcgaagaaagtatcgaagatctggtagaccagcttggtggtggtggctttcgtgg

SEQ ID NO: 84566 - DNA, 74 bp, Homo sapiens
tttcaatttgctctgcgaagaaagtatcgaagatctggtagaccagcttggtggtggtggctttcgtgggtccc

SEQ ID NO: 84567 - DNA, 73 bp, Homo sapiens
ctctgcgaagaaagtatcgaagatctggtagaccagcttggtggtggtggctttcgtgggtcccctgtccttc

SEQ ID NO: 84568 - DNA, 71 bp, Homo sapiens
aagtatcgaagatctggtagaccagcttggtggtggtggctttcgtgggtcccctgtccttctccctggta

SEQ ID NO: 84569 - DNA, 74 bp, Homo sapiens
agatctggtagaccagcttggtggtggtggctttcgtgggtcccctgtccttctccctggtagaatgcctgatg

SEQ ID NO: 84570 - DNA, 73 bp, Homo sapiens
accagcttggtggtggtggctttcgtgggtcccctgtccttctccctggtagaatgcctgatggtctgccgcc

SEQ ID NO: 84571 - DNA, 75 bp, Homo sapiens
tggtggtggctttcgtgggtcccctgtccttctccctggtagaatgcctgatggtctgccgcctcgcctgggctc

SEQ ID NO: 84572 - DNA, 73 bp, Homo sapiens
tttcgtgggtcccctgtccttctccctggtagaatgcctgatggtctgccgcctcgcctgggctcgcctacgg

SEQ ID NO: 84573 - DNA, 80 bp, Homo sapiens
tgtccttctccctggtagaatgcctgatggtctgccgcctcgcctgggctcgcctacgggagaggttccagcatctcaga

SEQ ID NO: 84574 - DNA, 79 bp, Homo sapiens
ttctccctggtagaatgcctgatggtctgccgcctcgcctgggctcgcctacgggagaggttccagcatctcagaggac

SEQ ID NO: 84575 - DNA, 74 bp, Homo sapiens
tctaccctccccggtctccagtcttcactctggtccctgccgcatccttacctctgtcccagcgtgaccccagc

SEQ ID NO: 84576 - DNA, 80 bp, Homo sapiens
tctccagtcttcactctggtccctgccgcatccttacctctgtcccagcgtgaccccagccagcttgatcaggtcccgca

SEQ ID NO: 84577 - DNA, 82 bp, Homo sapiens
tcactctggtccctgccgcatccttacctctgtcccagcgtgaccccagccagcttgatcaggtcccgcatgcagggtgtca

SEQ ID NO: 84578 - DNA, 80 bp, Homo sapiens
tggtccctgccgcatccttacctctgtcccagcgtgaccccagccagcttgatcaggtcccgcatgcagggtgtcaggaa

SEQ ID NO: 84579 - DNA, 83 bp, Homo sapiens
atccttacctctgtcccagcgtgaccccagccagcttgatcaggtcccgcatgcagggtgtcaggaagatgggctgctcatca

SEQ ID NO: 84580 - DNA, 83 bp, Homo sapiens
cctctgtcccagcgtgaccccagccagcttgatcaggtcccgcatgcagggtgtcaggaagatgggctgctcatcactgtccc

SEQ ID NO: 84581 - DNA, 83 bp, Homo sapiens
tgaccccagccagcttgatcaggtcccgcatgcagggtgtcaggaagatgggctgctcatcactgtccccggcctcgtcataa

SEQ ID NO: 84582 - DNA, 81 bp, Homo sapiens
agcttgatcaggtcccgcatgcagggtgtcaggaagatgggctgctcatcactgtccccggcctcgtcataactctccacc

SEQ ID NO: 84583 - DNA, 82 bp, Homo sapiens
atcaggtcccgcatgcagggtgtcaggaagatgggctgctcatcactgtccccggcctcgtcataactctccacctgctcca

SEQ ID NO: 84584 - DNA, 81 bp, Homo sapiens
atgcagggtgtcaggaagatgggctgctcatcactgtccccggcctcgtcataactctccacctgctccaccacaaactgc

SEQ ID NO: 84585 - DNA, 80 bp, Homo sapiens
aggaagatgggctgctcatcactgtccccggcctcgtcataactctccacctgctccaccacaaactgcgcgtgtcgcag

SEQ ID NO: 84586 - DNA, 80 bp, Homo sapiens
atgggctgctcatcactgtccccggcctcgtcataactctccacctgctccaccacaaactgcgcgtgtcgcaggaggga

SEQ ID NO: 84587 - DNA, 77 bp, Homo sapiens
actgtccccggcctcgtcataactctccacctgctccaccacaaactgcgcgtgtcgcaggagggagtcctctgtga

SEQ ID NO: 84588 - DNA, 78 bp, Homo sapiens
ggcctcgtcataactctccacctgctccaccacaaactgcgcgtgtcgcaggagggagtcctctgtgaagcggttcaa

SEQ ID NO: 84589 - DNA, 78 bp, Homo sapiens
gtcataactctccacctgctccaccacaaactgcgcgtgtcgcaggagggagtcctctgtgaagcggttcaagttgag

SEQ ID NO: 84590 - DNA, 76 bp, Homo sapiens
acctgctccaccacaaactgcgcgtgtcgcaggagggagtcctctgtgaagcggttcaagttgaggccagaaggag

SEQ ID NO: 84591 - DNA, 73 bp, Homo sapiens
accacaaactgcgcgtgtcgcaggagggagtcctctgtgaagcggttcaagttgaggccagaaggaggaaccg

SEQ ID NO: 84592 - DNA, 73 bp, Homo sapiens
cgtgtcgcaggagggagtcctctgtgaagcggttcaagttgaggccagaaggaggaaccgtggtcttgaaaga

SEQ ID NO: 84593 - DNA, 71 bp, Homo sapiens
aggagggagtcctctgtgaagcggttcaagttgaggccagaaggaggaaccgtggtcttgaaagagaacag

SEQ ID NO: 84594 - DNA, 75 bp, Homo sapiens
tctgtgaagcggttcaagttgaggccagaaggaggaaccgtggtcttgaaagagaacaggtttctctcatgctta

SEQ ID NO: 84595 - DNA, 75 bp, Homo sapiens
aagtttccagtgggaatcccggatgctgaggaccctcgatctcttacctcgatcttgttgatcaggtcctcatag

SEQ ID NO: 84596 - DNA, 77 bp, Homo sapiens
tgggaatcccggatgctgaggaccctcgatctcttacctcgatcttgttgatcaggtcctcataggtcgagtcggaa

SEQ ID NO: 84597 - DNA, 81 bp, Homo sapiens
tcccggatgctgaggaccctcgatctcttacctcgatcttgttgatcaggtcctcataggtcgagtcggaattgctctgca

SEQ ID NO: 84598 - DNA, 78 bp, Homo sapiens
aggaccctcgatctcttacctcgatcttgttgatcaggtcctcataggtcgagtcggaattgctctgcaggaactcca

SEQ ID NO: 84599 - DNA, 79 bp, Homo sapiens
cgatctcttacctcgatcttgttgatcaggtcctcataggtcgagtcggaattgctctgcaggaactccaccacaatct

SEQ ID NO: 84600 - DNA, 83 bp, Homo sapiens
atcttgttgatcaggtcctcataggtcgagtcggaattgctctgcaggaactccaccacaatcttgctgatgtagatcttctc

SEQ ID NO: 84601 - DNA, 86 bp, Homo sapiens
gttgatcaggtcctcataggtcgagtcggaattgctctgcaggaactccaccacaatcttgctgatgtagatcttctcctgcatca

SEQ ID NO: 84602 - DNA, 83 bp, Homo sapiens
ataggtcgagtcggaattgctctgcaggaactccaccacaatcttgctgatgtagatcttctcctgcatcagcccaaatatgg

SEQ ID NO: 84603 - DNA, 85 bp, Homo sapiens
agtcggaattgctctgcaggaactccaccacaatcttgctgatgtagatcttctcctgcatcagcccaaatatgggcgcatactc

SEQ ID NO: 84604 - DNA, 85 bp, Homo sapiens
attgctctgcaggaactccaccacaatcttgctgatgtagatcttctcctgcatcagcccaaatatgggcgcatactcgggactg

SEQ ID NO: 84605 - DNA, 84 bp, Homo sapiens
actccaccacaatcttgctgatgtagatcttctcctgcatcagcccaaatatgggcgcatactcgggactgggatccatcagaa

SEQ ID NO: 84606 - DNA, 84 bp, Homo sapiens
acaatcttgctgatgtagatcttctcctgcatcagcccaaatatgggcgcatactcgggactgggatccatcagaatgtattcg

SEQ ID NO: 84607 - DNA, 83 bp, Homo sapiens
atgtagatcttctcctgcatcagcccaaatatgggcgcatactcgggactgggatccatcagaatgtattcggcaaatgctgg

SEQ ID NO: 84608 - DNA, 82 bp, Homo sapiens
ctcctgcatcagcccaaatatgggcgcatactcgggactgggatccatcagaatgtattcggcaaatgctggggtgaacaga

SEQ ID NO: 84609 - DNA, 79 bp, Homo sapiens
atcagcccaaatatgggcgcatactcgggactgggatccatcagaatgtattcggcaaatgctggggtgaacagaggag

SEQ ID NO: 84610 - DNA, 78 bp, Homo sapiens
aaatatgggcgcatactcgggactgggatccatcagaatgtattcggcaaatgctggggtgaacagaggaggtgtgga

SEQ ID NO: 84611 - DNA, 74 bp, Homo sapiens
atactcgggactgggatccatcagaatgtattcggcaaatgctggggtgaacagaggaggtgtggaaaaggggc

SEQ ID NO: 84612 - DNA, 75 bp, Homo sapiens
tgaaggcccctttcagaccccggccagcctatgatgggccacacacttacaggtgctgaagccgatgagggcctt

SEQ ID NO: 84613 - DNA, 76 bp, Homo sapiens
ctttcagaccccggccagcctatgatgggccacacacttacaggtgctgaagccgatgagggccttttcacctcca

SEQ ID NO: 84614 - DNA, 80 bp, Homo sapiens
cggccagcctatgatgggccacacacttacaggtgctgaagccgatgagggccttttcacctccatcaaagccagtgatc

SEQ ID NO: 84615 - DNA, 81 bp, Homo sapiens
tatgatgggccacacacttacaggtgctgaagccgatgagggccttttcacctccatcaaagccagtgatccaccattcat

SEQ ID NO: 84616 - DNA, 77 bp, Homo sapiens
acacacttacaggtgctgaagccgatgagggccttttcacctccatcaaagccagtgatccaccattcatttatggg

SEQ ID NO: 84617 - DNA, 76 bp, Homo sapiens
aggtgctgaagccgatgagggccttttcacctccatcaaagccagtgatccaccattcatttatggggccaagatt

SEQ ID NO: 84618 - DNA, 75 bp, Homo sapiens
aagccgatgagggccttttcacctccatcaaagccagtgatccaccattcatttatggggccaagatttttgcca

SEQ ID NO: 84619 - DNA, 73 bp, Homo sapiens
agggccttttcacctccatcaaagccagtgatccaccattcatttatggggccaagatttttgccattaacac

SEQ ID NO: 84620 - DNA, 76 bp, Homo sapiens
ctccatcaaagccagtgatccaccattcatttatggggccaagatttttgccattaacaccacctagagcagaaaa

SEQ ID NO: 84621 - DNA, 73 bp, Homo sapiens
aaagccagtgatccaccattcatttatggggccaagatttttgccattaacaccacctagagcagaaaaagga

SEQ ID NO: 84622 - DNA, 71 bp, Homo sapiens
caccattcatttatggggccaagatttttgccattaacaccacctagagcagaaaaaggaaatggactaaa

SEQ ID NO: 84623 - DNA, 71 bp, Homo sapiens
atttatggggccaagatttttgccattaacaccacctagagcagaaaaaggaaatggactaaaggctctga

SEQ ID NO: 84624 - DNA, 73 bp, Homo sapiens
ctgtttttaaagtgtgccccaaacataatcccggactattccttaccttcaagagatgggtcatcatcataga

SEQ ID NO: 84625 - DNA, 73 bp, Homo sapiens
tttaaagtgtgccccaaacataatcccggactattccttaccttcaagagatgggtcatcatcatagattggt

SEQ ID NO: 84626 - DNA, 74 bp, Homo sapiens
aaacataatcccggactattccttaccttcaagagatgggtcatcatcatagattggttttgctgaaccagaaa

SEQ ID NO: 84627 - DNA, 75 bp, Homo sapiens
taatcccggactattccttaccttcaagagatgggtcatcatcatagattggttttgctgaaccagaaaagaaga

SEQ ID NO: 84628 - DNA, 76 bp, Homo sapiens
tattccttaccttcaagagatgggtcatcatcatagattggttttgctgaaccagaaaagaagagttcgatattct

SEQ ID NO: 84629 - DNA, 79 bp, Homo sapiens
ttcaagagatgggtcatcatcatagattggttttgctgaaccagaaaagaagagttcgatattcttctcgatgaggccg

SEQ ID NO: 84630 - DNA, 78 bp, Homo sapiens
atgggtcatcatcatagattggttttgctgaaccagaaaagaagagttcgatattcttctcgatgaggccggtgtcga

SEQ ID NO: 84631 - DNA, 77 bp, Homo sapiens
atcatagattggttttgctgaaccagaaaagaagagttcgatattcttctcgatgaggccggtgtcgatgggacaca

SEQ ID NO: 84632 - DNA, 77 bp, Homo sapiens
ttgctgaaccagaaaagaagagttcgatattcttctcgatgaggccggtgtcgatgggacacaggtgaccgtgctta

SEQ ID NO: 84633 - DNA, 76 bp, Homo sapiens
gaaaagaagagttcgatattcttctcgatgaggccggtgtcgatgggacacaggtgaccgtgcttacagtacacac

SEQ ID NO: 84634 - DNA, 77 bp, Homo sapiens
aagagttcgatattcttctcgatgaggccggtgtcgatgggacacaggtgaccgtgcttacagtacacactagacag

SEQ ID NO: 84635 - DNA, 76 bp, Homo sapiens
atattcttctcgatgaggccggtgtcgatgggacacaggtgaccgtgcttacagtacacactagacaggaaacaaa

SEQ ID NO: 84636 - DNA, 78 bp, Homo sapiens
atgaggccggtgtcgatgggacacaggtgaccgtgcttacagtacacactagacaggaaacaaagcacatgcttacca

SEQ ID NO: 84637 - DNA, 79 bp, Homo sapiens
atgtgcctccttccacgaagcaaacatgcacacgaaagtgcacttacctgaagcaggtcagtttgtgctggggaagcgc

SEQ ID NO: 84638 - DNA, 79 bp, Homo sapiens
ttccacgaagcaaacatgcacacgaaagtgcacttacctgaagcaggtcagtttgtgctggggaagcgcctcataactc

SEQ ID NO: 84639 - DNA, 79 bp, Homo sapiens
aaacatgcacacgaaagtgcacttacctgaagcaggtcagtttgtgctggggaagcgcctcataactctcaaagccaga

SEQ ID NO: 84640 - DNA, 76 bp, Homo sapiens
acgaaagtgcacttacctgaagcaggtcagtttgtgctggggaagcgcctcataactctcaaagccagactcgttg

SEQ ID NO: 84641 - DNA, 78 bp, Homo sapiens
acttacctgaagcaggtcagtttgtgctggggaagcgcctcataactctcaaagccagactcgttggcatcaaagatg

SEQ ID NO: 84642 - DNA, 81 bp, Homo sapiens
aagcaggtcagtttgtgctggggaagcgcctcataactctcaaagccagactcgttggcatcaaagatggacagcttctca

SEQ ID NO: 84643 - DNA, 82 bp, Homo sapiens
gtcagtttgtgctggggaagcgcctcataactctcaaagccagactcgttggcatcaaagatggacagcttctcatttgtca

SEQ ID NO: 84644 - DNA, 86 bp, Homo sapiens
gggaagcgcctcataactctcaaagccagactcgttggcatcaaagatggacagcttctcatttgtcagcatctgtggctcatcca

SEQ ID NO: 84645 - DNA, 87 bp, Homo sapiens
tcataactctcaaagccagactcgttggcatcaaagatggacagcttctcatttgtcagcatctgtggctcatccacctgaaggaca

SEQ ID NO: 84646 - DNA, 84 bp, Homo sapiens
tctcaaagccagactcgttggcatcaaagatggacagcttctcatttgtcagcatctgtggctcatccacctgaaggacacggg

SEQ ID NO: 84647 - DNA, 85 bp, Homo sapiens
agactcgttggcatcaaagatggacagcttctcatttgtcagcatctgtggctcatccacctgaaggacacggggctggtgagca

SEQ ID NO: 84648 - DNA, 83 bp, Homo sapiens
atcaaagatggacagcttctcatttgtcagcatctgtggctcatccacctgaaggacacggggctggtgagcagtgggacaag

SEQ ID NO: 84649 - DNA, 82 bp, Homo sapiens
atggacagcttctcatttgtcagcatctgtggctcatccacctgaaggacacggggctggtgagcagtgggacaagggacag

SEQ ID NO: 84650 - DNA, 78 bp, Homo sapiens
atctgtggctcatccacctgaaggacacggggctggtgagcagtgggacaagggacaggcagaggaaggctgggaaga

SEQ ID NO: 84651 - DNA, 76 bp, Homo sapiens
atccacctgaaggacacggggctggtgagcagtgggacaagggacaggcagaggaaggctgggaagagagctgtac

SEQ ID NO: 84652 - DNA, 78 bp, Homo sapiens
tggtgagcagtgggacaagggacaggcagaggaaggctgggaagagagctgtacgtaccgcgtctggtgggtgctgcc

SEQ ID NO: 84653 - DNA, 77 bp, Homo sapiens
tgggacaagggacaggcagaggaaggctgggaagagagctgtacgtaccgcgtctggtgggtgctgcccatatttga

SEQ ID NO: 84654 - DNA, 76 bp, Homo sapiens
acaggcagaggaaggctgggaagagagctgtacgtaccgcgtctggtgggtgctgcccatatttgaggtcagggtc

SEQ ID NO: 84655 - DNA, 74 bp, Homo sapiens
aaggctgggaagagagctgtacgtaccgcgtctggtgggtgctgcccatatttgaggtcagggtcgtccaggta

SEQ ID NO: 84656 - DNA, 75 bp, Homo sapiens
aagagagctgtacgtaccgcgtctggtgggtgctgcccatatttgaggtcagggtcgtccaggtactgcccgcac

SEQ ID NO: 84657 - DNA, 77 bp, Homo sapiens
tgtacgtaccgcgtctggtgggtgctgcccatatttgaggtcagggtcgtccaggtactgcccgcactgaatgcact

SEQ ID NO: 84658 - DNA, 76 bp, Homo sapiens
cgtctggtgggtgctgcccatatttgaggtcagggtcgtccaggtactgcccgcactgaatgcacttgggagggtg

SEQ ID NO: 84659 - DNA, 77 bp, Homo sapiens
tgggtgctgcccatatttgaggtcagggtcgtccaggtactgcccgcactgaatgcacttgggagggtgggtctgtg

SEQ ID NO: 84660 - DNA, 75 bp, Homo sapiens
atatttgaggtcagggtcgtccaggtactgcccgcactgaatgcacttgggagggtgggtctgtgggagcaggaa

SEQ ID NO: 84661 - DNA, 78 bp, Homo sapiens
ggtcagggtcgtccaggtactgcccgcactgaatgcacttgggagggtgggtctgtgggagcaggaacacagatgatg

SEQ ID NO: 84662 - DNA, 85 bp, Homo sapiens
tccaggtactgcccgcactgaatgcacttgggagggtgggtctgtgggagcaggaacacagatgatggcactcagagagcagctc

SEQ ID NO: 84663 - DNA, 86 bp, Homo sapiens
gcactgaatgcacttgggagggtgggtctgtgggagcaggaacacagatgatggcactcagagagcagctcccagccgcctcgtga

SEQ ID NO: 84664 - DNA, 84 bp, Homo sapiens
actgaatgcacttgggagggtgggtctgtgggagcaggaacacagatgatggcactcagagagcagctcccagccgcctcgtga

SEQ ID NO: 84665 - DNA, 84 bp, Homo sapiens
aatgcacttgggagggtgggtctgtgggagcaggaacacagatgatggcactcagagagcagctcccagccgcctcgtgagcgc

SEQ ID NO: 84666 - DNA, 82 bp, Homo sapiens
ggtgggtctgtgggagcaggaacacagatgatggcactcagagagcagctcccagccgcctcgtgagcgccgccaccggctt

SEQ ID NO: 84667 - DNA, 83 bp, Homo sapiens
tgggtctgtgggagcaggaacacagatgatggcactcagagagcagctcccagccgcctcgtgagcgccgccaccggctttat

SEQ ID NO: 84668 - DNA, 83 bp, Homo sapiens
ggagcaggaacacagatgatggcactcagagagcagctcccagccgcctcgtgagcgccgccaccggctttattcccggcaga

SEQ ID NO: 84669 - DNA, 82 bp, Homo sapiens
caggaacacagatgatggcactcagagagcagctcccagccgcctcgtgagcgccgccaccggctttattcccggcagatgt

SEQ ID NO: 84670 - DNA, 81 bp, Homo sapiens
aacacagatgatggcactcagagagcagctcccagccgcctcgtgagcgccgccaccggctttattcccggcagatgttta

SEQ ID NO: 84671 - DNA, 79 bp, Homo sapiens
atgatggcactcagagagcagctcccagccgcctcgtgagcgccgccaccggctttattcccggcagatgtttaccttg

SEQ ID NO: 84672 - DNA, 76 bp, Homo sapiens
agagcagctcccagccgcctcgtgagcgccgccaccggctttattcccggcagatgtttaccttggagttcatgac

SEQ ID NO: 84673 - DNA, 73 bp, Homo sapiens
tcccagccgcctcgtgagcgccgccaccggctttattcccggcagatgtttaccttggagttcatgactgttt

SEQ ID NO: 84674 - DNA, 74 bp, Homo sapiens
gtgagcgccgccaccggctttattcccggcagatgtttaccttggagttcatgactgttttggcgcgagccatt

SEQ ID NO: 84675 - DNA, 70 bp, Homo sapiens
ccgccaccggctttattcccggcagatgtttaccttggagttcatgactgttttggcgcgagccattttt

SEQ ID NO: 84676 - DNA, 68 bp, Homo sapiens
agatgtttaccttggagttcatgactgttttggcgcgagccatttttttctccgttctgggggaaaaa

SEQ ID NO: 84677 - DNA, 66 bp, Homo sapiens
tttaccttggagttcatgactgttttggcgcgagccatttttttctccgttctgggggaaaaaaaa

SEQ ID NO: 84678 - DNA, 71 bp, Homo sapiens
gaaaccccttcccttttgttctagaaccatcattttaacattaccatctgctttcgataatgtcaagaata

SEQ ID NO: 84679 - DNA, 71 bp, Homo sapiens
ccttttgttctagaaccatcattttaacattaccatctgctttcgataatgtcaagaataaattcttacgg

SEQ ID NO: 84680 - DNA, 71 bp, Homo sapiens
ctagaaccatcattttaacattaccatctgctttcgataatgtcaagaataaattcttacggttctttggg

SEQ ID NO: 84681 - DNA, 70 bp, Homo sapiens
catcattttaacattaccatctgctttcgataatgtcaagaataaattcttacggttctttgggggtcgt

SEQ ID NO: 84682 - DNA, 69 bp, Homo sapiens
attaccatctgctttcgataatgtcaagaataaattcttacggttctttgggggtcgttttgcgtctct

SEQ ID NO: 84683 - DNA, 68 bp, Homo sapiens
ctttcgataatgtcaagaataaattcttacggttctttgggggtcgttttgcgtctcttctcctccta

SEQ ID NO: 84684 - DNA, 68 bp, Homo sapiens
ataatgtcaagaataaattcttacggttctttgggggtcgttttgcgtctcttctcctcctacacagg

SEQ ID NO: 84685 - DNA, 65 bp, Homo sapiens
aataaattcttacggttctttgggggtcgttttgcgtctcttctcctcctacacagggaaaacaa

SEQ ID NO: 84686 - DNA, 66 bp, Homo sapiens
ttacggttctttgggggtcgttttgcgtctcttctcctcctacacagggaaaacaaaagaggatta

SEQ ID NO: 84687 - DNA, 68 bp, Homo sapiens
ggtcgttttgcgtctcttctcctcctacacagggaaaacaaaagaggattaaaggctaagagagtgtt

SEQ ID NO: 84688 - DNA, 69 bp, Homo sapiens
ttttgcgtctcttctcctcctacacagggaaaacaaaagaggattaaaggctaagagagtgttttacac

SEQ ID NO: 84689 - DNA, 70 bp, Homo sapiens
ttctcctcctacacagggaaaacaaaagaggattaaaggctaagagagtgttttacacccagatagtgct

SEQ ID NO: 84690 - DNA, 68 bp, Homo sapiens
aaagaaagaaaagtgagacctttaccttttcatcctcgtctttttcatcagaaatctgtggatttact

SEQ ID NO: 84691 - DNA, 69 bp, Homo sapiens
gaaaagtgagacctttaccttttcatcctcgtctttttcatcagaaatctgtggatttactttttcagg

SEQ ID NO: 84692 - DNA, 67 bp, Homo sapiens
agacctttaccttttcatcctcgtctttttcatcagaaatctgtggatttactttttcaggttcttt

SEQ ID NO: 84693 - DNA, 69 bp, Homo sapiens
ttttcatcctcgtctttttcatcagaaatctgtggatttactttttcaggttctttttcttcgggcctc

SEQ ID NO: 84694 - DNA, 69 bp, Homo sapiens
tcgtctttttcatcagaaatctgtggatttactttttcaggttctttttcttcgggcctccgtttggca

SEQ ID NO: 84695 - DNA, 70 bp, Homo sapiens
agaaatctgtggatttactttttcaggttctttttcttcgggcctccgtttggcagctctgcagggtgaa

SEQ ID NO: 84696 - DNA, 73 bp, Homo sapiens
gatttactttttcaggttctttttcttcgggcctccgtttggcagctctgcagggtgaacagatacacagcaa

SEQ ID NO: 84697 - DNA, 77 bp, Homo sapiens
ttcaggttctttttcttcgggcctccgtttggcagctctgcagggtgaacagatacacagcaagtagcagcttagaa

SEQ ID NO: 84698 - DNA, 77 bp, Homo sapiens
ttctttttcttcgggcctccgtttggcagctctgcagggtgaacagatacacagcaagtagcagcttagaaacacta

SEQ ID NO: 84699 - DNA, 76 bp, Homo sapiens
acacctggcctagaacaggctttctactgatccagatgacacaaaagcacaagcattttaaacacttacagatctt

SEQ ID NO: 84700 - DNA, 76 bp, Homo sapiens
tagaacaggctttctactgatccagatgacacaaaagcacaagcattttaaacacttacagatctttgggttgact

SEQ ID NO: 84701 - DNA, 77 bp, Homo sapiens
tttctactgatccagatgacacaaaagcacaagcattttaaacacttacagatctttgggttgacttctgtgcttct

SEQ ID NO: 84702 - DNA, 79 bp, Homo sapiens
actgatccagatgacacaaaagcacaagcattttaaacacttacagatctttgggttgacttctgtgcttcttctcatc

SEQ ID NO: 84703 - DNA, 75 bp, Homo sapiens
acaaaagcacaagcattttaaacacttacagatctttgggttgacttctgtgcttcttctcatcctgacagaaaa

SEQ ID NO: 84704 - DNA, 73 bp, Homo sapiens
acaagcattttaaacacttacagatctttgggttgacttctgtgcttcttctcatcctgacagaaaaataagg

SEQ ID NO: 84705 - DNA, 71 bp, Homo sapiens
ttttaaacacttacagatctttgggttgacttctgtgcttcttctcatcctgacagaaaaataagggggag

SEQ ID NO: 84706 - DNA, 74 bp, Homo sapiens
ttacagatctttgggttgacttctgtgcttcttctcatcctgacagaaaaataagggggaggtagagagataaa

SEQ ID NO: 84707 - DNA, 71 bp, Homo sapiens
gttgacttctgtgcttcttctcatcctgacagaaaaataagggggaggtagagagataaagaagggaaaaa

SEQ ID NO: 84708 - DNA, 69 bp, Homo sapiens
tgtgcttcttctcatcctgacagaaaaataagggggaggtagagagataaagaagggaaaaaattagtt

SEQ ID NO: 84709 - DNA, 70 bp, Homo sapiens
ttctcatcctgacagaaaaataagggggaggtagagagataaagaagggaaaaaattagtttctgagcca

SEQ ID NO: 84710 - DNA, 69 bp, Homo sapiens
aaacaggagcagaagaatgagggggagttcagaaacaaataacccgcctttactttctcgtctccatct

SEQ ID NO: 84711 - DNA, 68 bp, Homo sapiens
agaagaatgagggggagttcagaaacaaataacccgcctttactttctcgtctccatcttcgtcctcg

SEQ ID NO: 84712 - DNA, 71 bp, Homo sapiens
ggggagttcagaaacaaataacccgcctttactttctcgtctccatcttcgtcctcgtcagcctgcacgcc

SEQ ID NO: 84713 - DNA, 72 bp, Homo sapiens
agaaacaaataacccgcctttactttctcgtctccatcttcgtcctcgtcagcctgcacgcctgccctggct

SEQ ID NO: 84714 - DNA, 74 bp, Homo sapiens
aaataacccgcctttactttctcgtctccatcttcgtcctcgtcagcctgcacgcctgccctggcttctctgtc

SEQ ID NO: 84715 - DNA, 77 bp, Homo sapiens
ctttactttctcgtctccatcttcgtcctcgtcagcctgcacgcctgccctggcttctctgtccggctcctccttca

SEQ ID NO: 84716 - DNA, 77 bp, Homo sapiens
ctcgtctccatcttcgtcctcgtcagcctgcacgcctgccctggcttctctgtccggctcctccttcagtttctgtt

SEQ ID NO: 84717 - DNA, 76 bp, Homo sapiens
tcttcgtcctcgtcagcctgcacgcctgccctggcttctctgtccggctcctccttcagtttctgtttgggtgttc

SEQ ID NO: 84718 - DNA, 79 bp, Homo sapiens
tcagcctgcacgcctgccctggcttctctgtccggctcctccttcagtttctgtttgggtgttctgtcacagaagacaa

SEQ ID NO: 84719 - DNA, 76 bp, Homo sapiens
acgcctgccctggcttctctgtccggctcctccttcagtttctgtttgggtgttctgtcacagaagacaacacaca

SEQ ID NO: 84720 - DNA, 79 bp, Homo sapiens
tggcttctctgtccggctcctccttcagtttctgtttgggtgttctgtcacagaagacaacacacacacaggctggtca

SEQ ID NO: 84721 - DNA, 77 bp, Homo sapiens
tgtccggctcctccttcagtttctgtttgggtgttctgtcacagaagacaacacacacacaggctggtcagctcggg

SEQ ID NO: 84722 - DNA, 69 bp, Homo sapiens
accaacccgttattttaccaagatacttatgttagcaattcagtttcacaacaaagcacaaaggcaggt

SEQ ID NO: 84723 - DNA, 74 bp, Homo sapiens
ttattttaccaagatacttatgttagcaattcagtttcacaacaaagcacaaaggcaggttcgctgcacttacg

SEQ ID NO: 84724 - DNA, 72 bp, Homo sapiens
atacttatgttagcaattcagtttcacaacaaagcacaaaggcaggttcgctgcacttacggttctttggtt

SEQ ID NO: 84725 - DNA, 73 bp, Homo sapiens
atgttagcaattcagtttcacaacaaagcacaaaggcaggttcgctgcacttacggttctttggtttgacttc

SEQ ID NO: 84726 - DNA, 71 bp, Homo sapiens
tttcacaacaaagcacaaaggcaggttcgctgcacttacggttctttggtttgacttcggagtctcttttc

SEQ ID NO: 84727 - DNA, 69 bp, Homo sapiens
aacaaagcacaaaggcaggttcgctgcacttacggttctttggtttgacttcggagtctcttttcttcc

SEQ ID NO: 84728 - DNA, 69 bp, Homo sapiens
aaaggcaggttcgctgcacttacggttctttggtttgacttcggagtctcttttcttcctaagttgcag

SEQ ID NO: 84729 - DNA, 68 bp, Homo sapiens
ttcgctgcacttacggttctttggtttgacttcggagtctcttttcttcctaagttgcagggaaaaaa

SEQ ID NO: 84730 - DNA, 65 bp, Homo sapiens
gttctttggtttgacttcggagtctcttttcttcctaagttgcagggaaaaaagacaagttaatt

SEQ ID NO: 84731 - DNA, 65 bp, Homo sapiens
ggtttgacttcggagtctcttttcttcctaagttgcagggaaaaaagacaagttaattttttcca

SEQ ID NO: 84732 - DNA, 64 bp, Homo sapiens
cggagtctcttttcttcctaagttgcagggaaaaaagacaagttaattttttccatttggtttg

SEQ ID NO: 84733 - DNA, 64 bp, Homo sapiens
cttttcttcctaagttgcagggaaaaaagacaagttaattttttccatttggtttggatctttc

SEQ ID NO: 84734 - DNA, 70 bp, Homo sapiens
aattgggaccatataggattaagggagaattaacaaacttagaggtgatagagctttactttttcatctc

SEQ ID NO: 84735 - DNA, 69 bp, Homo sapiens
ataggattaagggagaattaacaaacttagaggtgatagagctttactttttcatctctttcttcttcc

SEQ ID NO: 84736 - DNA, 70 bp, Homo sapiens
agaattaacaaacttagaggtgatagagctttactttttcatctctttcttcttccttttcagtgcgcgt

SEQ ID NO: 84737 - DNA, 70 bp, Homo sapiens
aaacttagaggtgatagagctttactttttcatctctttcttcttccttttcagtgcgcgttcctgattt

SEQ ID NO: 84738 - DNA, 74 bp, Homo sapiens
agaggtgatagagctttactttttcatctctttcttcttccttttcagtgcgcgttcctgattttgctctttca

SEQ ID NO: 84739 - DNA, 71 bp, Homo sapiens
agctttactttttcatctctttcttcttccttttcagtgcgcgttcctgattttgctctttcaggttcttc

SEQ ID NO: 84740 - DNA, 76 bp, Homo sapiens
ttcatctctttcttcttccttttcagtgcgcgttcctgattttgctctttcaggttcttctgcaggaagcggtcta

SEQ ID NO: 84741 - DNA, 77 bp, Homo sapiens
ttcttccttttcagtgcgcgttcctgattttgctctttcaggttcttctgcaggaagcggtctagcaactctgtcaa

SEQ ID NO: 84742 - DNA, 78 bp, Homo sapiens
ttttcagtgcgcgttcctgattttgctctttcaggttcttctgcaggaagcggtctagcaactctgtcaagcaaaata

SEQ ID NO: 84743 - DNA, 76 bp, Homo sapiens
cgttcctgattttgctctttcaggttcttctgcaggaagcggtctagcaactctgtcaagcaaaataacacagacc

SEQ ID NO: 84744 - DNA, 75 bp, Homo sapiens
attttgctctttcaggttcttctgcaggaagcggtctagcaactctgtcaagcaaaataacacagaccccaagtg

SEQ ID NO: 84745 - DNA, 77 bp, Homo sapiens
aggttcttctgcaggaagcggtctagcaactctgtcaagcaaaataacacagaccccaagtgtgagtgccaggagct

SEQ ID NO: 84746 - DNA, 66 bp, Homo sapiens
cggccttaaactttctgaaaaagttttgtgatcaagattacacaactcgtagaacaaaaagaaagg

SEQ ID NO: 84747 - DNA, 69 bp, Homo sapiens
tgaaaaagttttgtgatcaagattacacaactcgtagaacaaaaagaaaggtatagtaactattcttac

SEQ ID NO: 84748 - DNA, 72 bp, Homo sapiens
ttgtgatcaagattacacaactcgtagaacaaaaagaaaggtatagtaactattcttaccgttctctggatg

SEQ ID NO: 84749 - DNA, 69 bp, Homo sapiens
agattacacaactcgtagaacaaaaagaaaggtatagtaactattcttaccgttctctggatgtaactc

SEQ ID NO: 84750 - DNA, 68 bp, Homo sapiens
acaactcgtagaacaaaaagaaaggtatagtaactattcttaccgttctctggatgtaactctacgtc

SEQ ID NO: 84751 - DNA, 71 bp, Homo sapiens
aaaaagaaaggtatagtaactattcttaccgttctctggatgtaactctacgtctcttctcatcctgtgtg

SEQ ID NO: 84752 - DNA, 72 bp, Homo sapiens
aaaggtatagtaactattcttaccgttctctggatgtaactctacgtctcttctcatcctgtgtggagggaa

SEQ ID NO: 84753 - DNA, 73 bp, Homo sapiens
taactattcttaccgttctctggatgtaactctacgtctcttctcatcctgtgtggagggaaggaagaacaaa

SEQ ID NO: 84754 - DNA, 72 bp, Homo sapiens
ttaccgttctctggatgtaactctacgtctcttctcatcctgtgtggagggaaggaagaacaaaaaagatta

SEQ ID NO: 84755 - DNA, 72 bp, Homo sapiens
atgtaactctacgtctcttctcatcctgtgtggagggaaggaagaacaaaaaagattagaatactggtttca

SEQ ID NO: 84756 - DNA, 71 bp, Homo sapiens
tctacgtctcttctcatcctgtgtggagggaaggaagaacaaaaaagattagaatactggtttcaagggaa

SEQ ID NO: 84757 - DNA, 70 bp, Homo sapiens
tcatcctgtgtggagggaaggaagaacaaaaaagattagaatactggtttcaagggaaggtcaacaccaa

SEQ ID NO: 84758 - DNA, 73 bp, Homo sapiens
acaatcatcaaatacaccaagttaaggtagagtcaggaaatgaaagcactggccctacctggtctttgtcttc

SEQ ID NO: 84759 - DNA, 71 bp, Homo sapiens
atcaaatacaccaagttaaggtagagtcaggaaatgaaagcactggccctacctggtctttgtcttcttcc

SEQ ID NO: 84760 - DNA, 73 bp, Homo sapiens
aagttaaggtagagtcaggaaatgaaagcactggccctacctggtctttgtcttcttccttgatggactcatc

SEQ ID NO: 84761 - DNA, 76 bp, Homo sapiens
gtcaggaaatgaaagcactggccctacctggtctttgtcttcttccttgatggactcatccgatttggctctttca

SEQ ID NO: 84762 - DNA, 75 bp, Homo sapiens
aaatgaaagcactggccctacctggtctttgtcttcttccttgatggactcatccgatttggctctttcagactc

SEQ ID NO: 84763 - DNA, 74 bp, Homo sapiens
tggccctacctggtctttgtcttcttccttgatggactcatccgatttggctctttcagactcttcctgaggtt

SEQ ID NO: 84764 - DNA, 73 bp, Homo sapiens
ctggtctttgtcttcttccttgatggactcatccgatttggctctttcagactcttcctgaggtttccgtttg

SEQ ID NO: 84765 - DNA, 77 bp, Homo sapiens
tgtcttcttccttgatggactcatccgatttggctctttcagactcttcctgaggtttccgtttggcagggctgtca

SEQ ID NO: 84766 - DNA, 78 bp, Homo sapiens
cttgatggactcatccgatttggctctttcagactcttcctgaggtttccgtttggcagggctgtcacacacagtgag

SEQ ID NO: 84767 - DNA, 76 bp, Homo sapiens
tccgatttggctctttcagactcttcctgaggtttccgtttggcagggctgtcacacacagtgaggccaaccatta

SEQ ID NO: 84768 - DNA, 76 bp, Homo sapiens
tctttcagactcttcctgaggtttccgtttggcagggctgtcacacacagtgaggccaaccattagtggaacaaga

SEQ ID NO: 84769 - DNA, 73 bp, Homo sapiens
actcttcctgaggtttccgtttggcagggctgtcacacacagtgaggccaaccattagtggaacaagacccta

SEQ ID NO: 84770 - DNA, 66 bp, Homo sapiens
aattccatcccaaaacagccggcccctaaaaaaggcagccgccaatttatcgtatactgacccctt

SEQ ID NO: 84771 - DNA, 68 bp, Homo sapiens
cccaaaacagccggcccctaaaaaaggcagccgccaatttatcgtatactgacccctttgcaaaatga

SEQ ID NO: 84772 - DNA, 72 bp, Homo sapiens
ccctaaaaaaggcagccgccaatttatcgtatactgacccctttgcaaaatgagatgtgatggtggtttgcc

SEQ ID NO: 84773 - DNA, 74 bp, Homo sapiens
aaaaaggcagccgccaatttatcgtatactgacccctttgcaaaatgagatgtgatggtggtttgcctggtgct

SEQ ID NO: 84774 - DNA, 73 bp, Homo sapiens
aatttatcgtatactgacccctttgcaaaatgagatgtgatggtggtttgcctggtgcttttccttgtaatcc

SEQ ID NO: 84775 - DNA, 75 bp, Homo sapiens
tcgtatactgacccctttgcaaaatgagatgtgatggtggtttgcctggtgcttttccttgtaatcctggggcta

SEQ ID NO: 84776 - DNA, 74 bp, Homo sapiens
cctttgcaaaatgagatgtgatggtggtttgcctggtgcttttccttgtaatcctggggctaggtgaaggttca

SEQ ID NO: 84777 - DNA, 75 bp, Homo sapiens
tgagatgtgatggtggtttgcctggtgcttttccttgtaatcctggggctaggtgaaggttcagctgtttaaaga

SEQ ID NO: 84778 - DNA, 70 bp, Homo sapiens
atggtggtttgcctggtgcttttccttgtaatcctggggctaggtgaaggttcagctgtttaaagaagaa

SEQ ID NO: 84779 - DNA, 69 bp, Homo sapiens
cctggtgcttttccttgtaatcctggggctaggtgaaggttcagctgtttaaagaagaaaaagcattaa

SEQ ID NO: 84780 - DNA, 67 bp, Homo sapiens
cttttccttgtaatcctggggctaggtgaaggttcagctgtttaaagaagaaaaagcattaaaaaga

SEQ ID NO: 84781 - DNA, 72 bp, Homo sapiens
aaaacaattaaaaataaaaggaatcatctgctcttacgcttagcctctccatcggacttgctcctcctgggc

SEQ ID NO: 84782 - DNA, 75 bp, Homo sapiens
aaataaaaggaatcatctgctcttacgcttagcctctccatcggacttgctcctcctgggcgtgcgaggtttgga

SEQ ID NO: 84783 - DNA, 74 bp, Homo sapiens
aaaggaatcatctgctcttacgcttagcctctccatcggacttgctcctcctgggcgtgcgaggtttggaaagg

SEQ ID NO: 84784 - DNA, 72 bp, Homo sapiens
tctgctcttacgcttagcctctccatcggacttgctcctcctgggcgtgcgaggtttggaaaggggtttggg

SEQ ID NO: 84785 - DNA, 69 bp, Homo sapiens
ttagcctctccatcggacttgctcctcctgggcgtgcgaggtttggaaaggggtttgggggggctgttg

SEQ ID NO: 84786 - DNA, 71 bp, Homo sapiens
atcggacttgctcctcctgggcgtgcgaggtttggaaaggggtttgggggggctgttggcatctgccattc

SEQ ID NO: 84787 - DNA, 72 bp, Homo sapiens
ttgctcctcctgggcgtgcgaggtttggaaaggggtttgggggggctgttggcatctgccattcccactcta

SEQ ID NO: 84788 - DNA, 69 bp, Homo sapiens
cgtgcgaggtttggaaaggggtttgggggggctgttggcatctgccattcccactctacgggcttcact

SEQ ID NO: 84789 - DNA, 70 bp, Homo sapiens
ttggaaaggggtttgggggggctgttggcatctgccattcccactctacgggcttcacttcttgcttggt

SEQ ID NO: 84790 - DNA, 70 bp, Homo sapiens
gtttgggggggctgttggcatctgccattcccactctacgggcttcacttcttgcttggttcccgttttc

SEQ ID NO: 84791 - DNA, 75 bp, Homo sapiens
gctgttggcatctgccattcccactctacgggcttcacttcttgcttggttcccgttttctagacgtccattcac

SEQ ID NO: 84792 - DNA, 71 bp, Homo sapiens
atctgccattcccactctacgggcttcacttcttgcttggttcccgttttctagacgtccattcacttccc

SEQ ID NO: 84793 - DNA, 68 bp, Homo sapiens
ccactctacgggcttcacttcttgcttggttcccgttttctagacgtccattcacttcccggttgtaa

SEQ ID NO: 84794 - DNA, 72 bp, Homo sapiens
ctacgggcttcacttcttgcttggttcccgttttctagacgtccattcacttcccggttgtaagcatgagca

SEQ ID NO: 84795 - DNA, 71 bp, Homo sapiens
ttcttgcttggttcccgttttctagacgtccattcacttcccggttgtaagcatgagcaccgttctccaag

SEQ ID NO: 84796 - DNA, 70 bp, Homo sapiens
ttggttcccgttttctagacgtccattcacttcccggttgtaagcatgagcaccgttctccaaggacaaa

SEQ ID NO: 84797 - DNA, 71 bp, Homo sapiens
ttttctagacgtccattcacttcccggttgtaagcatgagcaccgttctccaaggacaaatctttatttaa

SEQ ID NO: 84798 - DNA, 69 bp, Homo sapiens
attcacttcccggttgtaagcatgagcaccgttctccaaggacaaatctttatttaaaagggatttgac

SEQ ID NO: 84799 - DNA, 70 bp, Homo sapiens
ggttgtaagcatgagcaccgttctccaaggacaaatctttatttaaaagggatttgactttagccaggta

SEQ ID NO: 84800 - DNA, 69 bp, Homo sapiens
atgagcaccgttctccaaggacaaatctttatttaaaagggatttgactttagccaggtagccctccta

SEQ ID NO: 84801 - DNA, 69 bp, Homo sapiens
ttctccaaggacaaatctttatttaaaagggatttgactttagccaggtagccctcctacagcaggaaa

SEQ ID NO: 84802 - DNA, 67 bp, Homo sapiens
acaaatctttatttaaaagggatttgactttagccaggtagccctcctacagcaggaaaggataatt

SEQ ID NO: 84803 - DNA, 68 bp, Homo sapiens
tctttatttaaaagggatttgactttagccaggtagccctcctacagcaggaaaggataatttaagta

SEQ ID NO: 84804 - DNA, 72 bp, Homo sapiens
ggaggagacatttttctagaggctaggatgctgagaactgacttacctcggataattcttctttacgtaatt

SEQ ID NO: 84805 - DNA, 70 bp, Homo sapiens
atttttctagaggctaggatgctgagaactgacttacctcggataattcttctttacgtaatttggtttc

SEQ ID NO: 84806 - DNA, 72 bp, Homo sapiens
aggctaggatgctgagaactgacttacctcggataattcttctttacgtaatttggtttccaagtcacataa

SEQ ID NO: 84807 - DNA, 70 bp, Homo sapiens
ctgagaactgacttacctcggataattcttctttacgtaatttggtttccaagtcacataactgattctt

SEQ ID NO: 84808 - DNA, 69 bp, Homo sapiens
ctgacttacctcggataattcttctttacgtaatttggtttccaagtcacataactgattctttatttc

SEQ ID NO: 84809 - DNA, 71 bp, Homo sapiens
cctcggataattcttctttacgtaatttggtttccaagtcacataactgattctttatttctgtttgcaga

SEQ ID NO: 84810 - DNA, 73 bp, Homo sapiens
tctttacgtaatttggtttccaagtcacataactgattctttatttctgtttgcagaaattcgtgcaagagat

SEQ ID NO: 84811 - DNA, 74 bp, Homo sapiens
tttggtttccaagtcacataactgattctttatttctgtttgcagaaattcgtgcaagagattcaatttctcct

SEQ ID NO: 84812 - DNA, 77 bp, Homo sapiens
aagtcacataactgattctttatttctgtttgcagaaattcgtgcaagagattcaatttctccttcacacattccta

SEQ ID NO: 84813 - DNA, 75 bp, Homo sapiens
taactgattctttatttctgtttgcagaaattcgtgcaagagattcaatttctccttcacacattcctaagggaa

SEQ ID NO: 84814 - DNA, 74 bp, Homo sapiens
tatttctgtttgcagaaattcgtgcaagagattcaatttctccttcacacattcctaagggaaggatataggtt

SEQ ID NO: 84815 - DNA, 76 bp, Homo sapiens
tgtttgcagaaattcgtgcaagagattcaatttctccttcacacattcctaagggaaggatataggtttagcagta

SEQ ID NO: 84816 - DNA, 73 bp, Homo sapiens
aaattcgtgcaagagattcaatttctccttcacacattcctaagggaaggatataggtttagcagtacccaca

SEQ ID NO: 84817 - DNA, 68 bp, Homo sapiens
gaaaacaaatttctttttatgagccacaaagtgtgtcagtcagatttggtaataagaaaaattttaag

SEQ ID NO: 84818 - DNA, 70 bp, Homo sapiens
tctttttatgagccacaaagtgtgtcagtcagatttggtaataagaaaaattttaaggtggagattacct

SEQ ID NO: 84819 - DNA, 70 bp, Homo sapiens
atgagccacaaagtgtgtcagtcagatttggtaataagaaaaattttaaggtggagattaccttttctgt

SEQ ID NO: 84820 - DNA, 70 bp, Homo sapiens
agtgtgtcagtcagatttggtaataagaaaaattttaaggtggagattaccttttctgttaagctgtctc

SEQ ID NO: 84821 - DNA, 69 bp, Homo sapiens
cagtcagatttggtaataagaaaaattttaaggtggagattaccttttctgttaagctgtctctttcca

SEQ ID NO: 84822 - DNA, 68 bp, Homo sapiens
ataagaaaaattttaaggtggagattaccttttctgttaagctgtctctttccaaatctttgagcctg

SEQ ID NO: 84823 - DNA, 67 bp, Homo sapiens
aaaaattttaaggtggagattaccttttctgttaagctgtctctttccaaatctttgagcctgggag

SEQ ID NO: 84824 - DNA, 69 bp, Homo sapiens
aggtggagattaccttttctgttaagctgtctctttccaaatctttgagcctgggaggaagaaataggg

SEQ ID NO: 84825 - DNA, 70 bp, Homo sapiens
ttttctgttaagctgtctctttccaaatctttgagcctgggaggaagaaataggggagaaaatacaaaca

SEQ ID NO: 84826 - DNA, 70 bp, Homo sapiens
ttaagctgtctctttccaaatctttgagcctgggaggaagaaataggggagaaaatacaaacacttgtta

SEQ ID NO: 84827 - DNA, 69 bp, Homo sapiens
ttccaaatctttgagcctgggaggaagaaataggggagaaaatacaaacacttgttaagcaacttcatt

SEQ ID NO: 84828 - DNA, 72 bp, Homo sapiens
tgagcctgggaggaagaaataggggagaaaatacaaacacttgttaagcaacttcatttgcctgtaagaata

SEQ ID NO: 84829 - DNA, 71 bp, Homo sapiens
agcgccctgcctgtccccctgagtccgtgttcccccccatggtacctaccgcctgcggacatcgtcgggca

SEQ ID NO: 84830 - DNA, 71 bp, Homo sapiens
gtccccctgagtccgtgttcccccccatggtacctaccgcctgcggacatcgtcgggcagcgagatggccg

SEQ ID NO: 84831 - DNA, 71 bp, Homo sapiens
agtccgtgttcccccccatggtacctaccgcctgcggacatcgtcgggcagcgagatggccgggacggcca

SEQ ID NO: 84832 - DNA, 72 bp, Homo sapiens
cccccatggtacctaccgcctgcggacatcgtcgggcagcgagatggccgggacggccagtgtgggcacccg

SEQ ID NO: 84833 - DNA, 73 bp, Homo sapiens
atggtacctaccgcctgcggacatcgtcgggcagcgagatggccgggacggccagtgtgggcacccgggctgg

SEQ ID NO: 84834 - DNA, 75 bp, Homo sapiens
tgcggacatcgtcgggcagcgagatggccgggacggccagtgtgggcacccgggctggggcggtacgcgccggca

SEQ ID NO: 84835 - DNA, 74 bp, Homo sapiens
acatcgtcgggcagcgagatggccgggacggccagtgtgggcacccgggctggggcggtacgcgccggcatctc

SEQ ID NO: 84836 - DNA, 75 bp, Homo sapiens
agcgagatggccgggacggccagtgtgggcacccgggctggggcggtacgcgccggcatctcggaggcttcagca

SEQ ID NO: 84837 - DNA, 73 bp, Homo sapiens
ccgggacggccagtgtgggcacccgggctggggcggtacgcgccggcatctcggaggcttcagcagacgcggc

SEQ ID NO: 84838 - DNA, 75 bp, Homo sapiens
cgggctggggcggtacgcgccggcatctcggaggcttcagcagacgcggcggcggcagcgcaggcgccccggctt

SEQ ID NO: 84839 - DNA, 76 bp, Homo sapiens
cggtacgcgccggcatctcggaggcttcagcagacgcggcggcggcagcgcaggcgccccggcttttcgcgcggaa

SEQ ID NO: 84840 - DNA, 75 bp, Homo sapiens
cggcatctcggaggcttcagcagacgcggcggcggcagcgcaggcgccccggcttttcgcgcggaaaccgatggg

SEQ ID NO: 84841 - DNA, 74 bp, Homo sapiens
tctcggaggcttcagcagacgcggcggcggcagcgcaggcgccccggcttttcgcgcggaaaccgatggggagg

SEQ ID NO: 84842 - DNA, 75 bp, Homo sapiens
ttcagcagacgcggcggcggcagcgcaggcgccccggcttttcgcgcggaaaccgatggggaggggcgatgagcg

SEQ ID NO: 84843 - DNA, 73 bp, Homo sapiens
ggcggcagcgcaggcgccccggcttttcgcgcggaaaccgatggggaggggcgatgagcggaggcggcgtcta

SEQ ID NO: 84844 - DNA, 69 bp, Homo sapiens
caggcgccccggcttttcgcgcggaaaccgatggggaggggcgatgagcggaggcggcgtctaccaccc

SEQ ID NO: 84845 - DNA, 68 bp, Homo sapiens
ccggcttttcgcgcggaaaccgatggggaggggcgatgagcggaggcggcgtctaccaccccagtccg

SEQ ID NO: 84846 - DNA, 69 bp, Homo sapiens
ttcgcgcggaaaccgatggggaggggcgatgagcggaggcggcgtctaccaccccagtccgggcgtggg

SEQ ID NO: 84847 - DNA, 67 bp, Homo sapiens
aaccgatggggaggggcgatgagcggaggcggcgtctaccaccccagtccgggcgtgggggaggagg

SEQ ID NO: 84848 - DNA, 70 bp, Homo sapiens
gcgatgagcggaggcggcgtctaccaccccagtccgggcgtgggggaggaggggatgtaccaaacggaga

SEQ ID NO: 84849 - DNA, 69 bp, Homo sapiens
gaggcggcgtctaccaccccagtccgggcgtgggggaggaggggatgtaccaaacggagagaggcgata

SEQ ID NO: 84850 - DNA, 71 bp, Homo sapiens
tctaccaccccagtccgggcgtgggggaggaggggatgtaccaaacggagagaggcgataccctgtgcaga

SEQ ID NO: 84851 - DNA, 70 bp, Homo sapiens
agtccgggcgtgggggaggaggggatgtaccaaacggagagaggcgataccctgtgcagaaggatggaac

SEQ ID NO: 84852 - DNA, 74 bp, Homo sapiens
tgggggaggaggggatgtaccaaacggagagaggcgataccctgtgcagaaggatggaacggagccggccatgc

SEQ ID NO: 84853 - DNA, 73 bp, Homo sapiens
aggggatgtaccaaacggagagaggcgataccctgtgcagaaggatggaacggagccggccatgcccagggaa

SEQ ID NO: 84854 - DNA, 78 bp, Homo sapiens
taccaaacggagagaggcgataccctgtgcagaaggatggaacggagccggccatgcccagggaacacgcatgcgcaa

SEQ ID NO: 84855 - DNA, 74 bp, Homo sapiens
actcccagctaacccagctttcttgaagagggctccaaaaatcacaggctccagcagagaaaacatgagtttat

SEQ ID NO: 84856 - DNA, 75 bp, Homo sapiens
taacccagctttcttgaagagggctccaaaaatcacaggctccagcagagaaaacatgagtttattaccagatgg

SEQ ID NO: 84857 - DNA, 77 bp, Homo sapiens
tccaaaaatcacaggctccagcagagaaaacatgagtttattaccagatggtggagatggtgggcctcaagtttgga

SEQ ID NO: 84858 - DNA, 77 bp, Homo sapiens
aaatcacaggctccagcagagaaaacatgagtttattaccagatggtggagatggtgggcctcaagtttggaagctg

SEQ ID NO: 84859 - DNA, 73 bp, Homo sapiens
agcagagaaaacatgagtttattaccagatggtggagatggtgggcctcaagtttggaagctgggggatttaa

SEQ ID NO: 84860 - DNA, 70 bp, Homo sapiens
aaaacatgagtttattaccagatggtggagatggtgggcctcaagtttggaagctgggggatttaagggc

SEQ ID NO: 84861 - DNA, 72 bp, Homo sapiens
tttattaccagatggtggagatggtgggcctcaagtttggaagctgggggatttaagggctggattagtgcc

SEQ ID NO: 84862 - DNA, 71 bp, Homo sapiens
gtggagatggtgggcctcaagtttggaagctgggggatttaagggctggattagtgcccctacaaatgttg

SEQ ID NO: 84863 - DNA, 69 bp, Homo sapiens
atggtgggcctcaagtttggaagctgggggatttaagggctggattagtgcccctacaaatgttgggtc

SEQ ID NO: 84864 - DNA, 70 bp, Homo sapiens
aagtttggaagctgggggatttaagggctggattagtgcccctacaaatgttgggtccctcaagatcatg

SEQ ID NO: 84865 - DNA, 72 bp, Homo sapiens
aagctgggggatttaagggctggattagtgcccctacaaatgttgggtccctcaagatcatggttaggctca

SEQ ID NO: 84866 - DNA, 72 bp, Homo sapiens
atttaagggctggattagtgcccctacaaatgttgggtccctcaagatcatggttaggctcacggccaagaa

SEQ ID NO: 84867 - DNA, 72 bp, Homo sapiens
ctggattagtgcccctacaaatgttgggtccctcaagatcatggttaggctcacggccaagaaagaaaaata

SEQ ID NO: 84868 - DNA, 72 bp, Homo sapiens
ctacaaatgttgggtccctcaagatcatggttaggctcacggccaagaaagaaaaataagttcacagaggtg

SEQ ID NO: 84869 - DNA, 72 bp, Homo sapiens
ttgggtccctcaagatcatggttaggctcacggccaagaaagaaaaataagttcacagaggtggggtctcta

SEQ ID NO: 84870 - DNA, 72 bp, Homo sapiens
aagatcatggttaggctcacggccaagaaagaaaaataagttcacagaggtggggtctctagacaggagtaa

SEQ ID NO: 84871 - DNA, 72 bp, Homo sapiens
atggttaggctcacggccaagaaagaaaaataagttcacagaggtggggtctctagacaggagtaaggcaca

SEQ ID NO: 84872 - DNA, 69 bp, Homo sapiens
acggccaagaaagaaaaataagttcacagaggtggggtctctagacaggagtaaggcacacggtgtggg

SEQ ID NO: 84873 - DNA, 73 bp, Homo sapiens
aagaaaaataagttcacagaggtggggtctctagacaggagtaaggcacacggtgtgggtgaggctgacatcc

SEQ ID NO: 84874 - DNA, 75 bp, Homo sapiens
ttcacagaggtggggtctctagacaggagtaaggcacacggtgtgggtgaggctgacatccccctcttggtttca

SEQ ID NO: 84875 - DNA, 73 bp, Homo sapiens
aggtggggtctctagacaggagtaaggcacacggtgtgggtgaggctgacatccccctcttggtttcatcctg

SEQ ID NO: 84876 - DNA, 77 bp, Homo sapiens
ctctagacaggagtaaggcacacggtgtgggtgaggctgacatccccctcttggtttcatcctggagcagggagcag

SEQ ID NO: 84877 - DNA, 75 bp, Homo sapiens
agtaaggcacacggtgtgggtgaggctgacatccccctcttggtttcatcctggagcagggagcaggaggctccc

SEQ ID NO: 84878 - DNA, 79 bp, Homo sapiens
acggtgtgggtgaggctgacatccccctcttggtttcatcctggagcagggagcaggaggctccctctgcagccactgc

SEQ ID NO: 84879 - DNA, 81 bp, Homo sapiens
gtgaggctgacatccccctcttggtttcatcctggagcagggagcaggaggctccctctgcagccactgcctggtccagtc

SEQ ID NO: 84880 - DNA, 78 bp, Homo sapiens
ccctcttggtttcatcctggagcagggagcaggaggctccctctgcagccactgcctggtccagtcctcccaggcagg

SEQ ID NO: 84881 - DNA, 81 bp, Homo sapiens
ttggtttcatcctggagcagggagcaggaggctccctctgcagccactgcctggtccagtcctcccaggcagggctgccat

SEQ ID NO: 84882 - DNA, 86 bp, Homo sapiens
agcagggagcaggaggctccctctgcagccactgcctggtccagtcctcccaggcagggctgccattgtgcctcagcacacgctga

SEQ ID NO: 84883 - DNA, 84 bp, Homo sapiens
aggaggctccctctgcagccactgcctggtccagtcctcccaggcagggctgccattgtgcctcagcacacgctgaacactgaa

SEQ ID NO: 84884 - DNA, 83 bp, Homo sapiens
cctctgcagccactgcctggtccagtcctcccaggcagggctgccattgtgcctcagcacacgctgaacactgaaggggcctg

SEQ ID NO: 84885 - DNA, 79 bp, Homo sapiens
actgcctggtccagtcctcccaggcagggctgccattgtgcctcagcacacgctgaacactgaaggggcctggccttgg

SEQ ID NO: 84886 - DNA, 83 bp, Homo sapiens
caggcagggctgccattgtgcctcagcacacgctgaacactgaaggggcctggccttggtacttctcatggactgtcttcaga

SEQ ID NO: 84887 - DNA, 83 bp, Homo sapiens
tgccattgtgcctcagcacacgctgaacactgaaggggcctggccttggtacttctcatggactgtcttcagaatgggtatga

SEQ ID NO: 84888 - DNA, 80 bp, Homo sapiens
ttgtgcctcagcacacgctgaacactgaaggggcctggccttggtacttctcatggactgtcttcagaatgggtatgagg

SEQ ID NO: 84889 - DNA, 76 bp, Homo sapiens
acacgctgaacactgaaggggcctggccttggtacttctcatggactgtcttcagaatgggtatgaggttctcgaa

SEQ ID NO: 84890 - DNA, 74 bp, Homo sapiens
tggccttggtacttctcatggactgtcttcagaatgggtatgaggttctcgaaggttgggcgaaaggacgcctc

SEQ ID NO: 84891 - DNA, 74 bp, Homo sapiens
atggactgtcttcagaatgggtatgaggttctcgaaggttgggcgaaaggacgcctctgtctcccagcagttct

SEQ ID NO: 84892 - DNA, 79 bp, Homo sapiens
tcttcagaatgggtatgaggttctcgaaggttgggcgaaaggacgcctctgtctcccagcagttcttcatgagatgata

SEQ ID NO: 84893 - DNA, 78 bp, Homo sapiens
tatgaggttctcgaaggttgggcgaaaggacgcctctgtctcccagcagttcttcatgagatgatagacctagaagga

SEQ ID NO: 84894 - DNA, 75 bp, Homo sapiens
ttctcgaaggttgggcgaaaggacgcctctgtctcccagcagttcttcatgagatgatagacctagaaggaaaaa

SEQ ID NO: 84895 - DNA, 70 bp, Homo sapiens
acctagaaggaaaaaccagggctggtgggggctgccctctccacagcaggatagtggggtcagggaaaga

SEQ ID NO: 84896 - DNA, 74 bp, Homo sapiens
tctccacagcaggatagtggggtcagggaaagacaaaggaagtctcacctcacagggacatttgtcgggccgtg

SEQ ID NO: 84897 - DNA, 72 bp, Homo sapiens
aggatagtggggtcagggaaagacaaaggaagtctcacctcacagggacatttgtcgggccgtggcagcctc

SEQ ID NO: 84898 - DNA, 73 bp, Homo sapiens
tcagggaaagacaaaggaagtctcacctcacagggacatttgtcgggccgtggcagcctctcccctcgttcca

SEQ ID NO: 84899 - DNA, 74 bp, Homo sapiens
aagacaaaggaagtctcacctcacagggacatttgtcgggccgtggcagcctctcccctcgttccagcaactca

SEQ ID NO: 84900 - DNA, 77 bp, Homo sapiens
aagtctcacctcacagggacatttgtcgggccgtggcagcctctcccctcgttccagcaactcagtgagtctcagaa

SEQ ID NO: 84901 - DNA, 78 bp, Homo sapiens
acagggacatttgtcgggccgtggcagcctctcccctcgttccagcaactcagtgagtctcagaactgtcatctgacc

SEQ ID NO: 84902 - DNA, 80 bp, Homo sapiens
acatttgtcgggccgtggcagcctctcccctcgttccagcaactcagtgagtctcagaactgtcatctgaccctgagcaa

SEQ ID NO: 84903 - DNA, 85 bp, Homo sapiens
tggcagcctctcccctcgttccagcaactcagtgagtctcagaactgtcatctgaccctgagcaatgcctatgagctcaaggaat

SEQ ID NO: 84904 - DNA, 83 bp, Homo sapiens
ctctcccctcgttccagcaactcagtgagtctcagaactgtcatctgaccctgagcaatgcctatgagctcaaggaatttcta

SEQ ID NO: 84905 - DNA, 84 bp, Homo sapiens
ttccagcaactcagtgagtctcagaactgtcatctgaccctgagcaatgcctatgagctcaaggaatttctacagtataaacaa

SEQ ID NO: 84906 - DNA, 82 bp, Homo sapiens
aactcagtgagtctcagaactgtcatctgaccctgagcaatgcctatgagctcaaggaatttctacagtataaacaagacaa

SEQ ID NO: 84907 - DNA, 80 bp, Homo sapiens
agaactgtcatctgaccctgagcaatgcctatgagctcaaggaatttctacagtataaacaagacaagctcttttcaaga

SEQ ID NO: 84908 - DNA, 73 bp, Homo sapiens
tttctaattgctctagcaaactcccggtggggctgcgggcctggctctcaccgtgggggggctctggctggag

SEQ ID NO: 84909 - DNA, 78 bp, Homo sapiens
tctagcaaactcccggtggggctgcgggcctggctctcaccgtgggggggctctggctggagtcacagtgcgtcagca

SEQ ID NO: 84910 - DNA, 80 bp, Homo sapiens
ggtggggctgcgggcctggctctcaccgtgggggggctctggctggagtcacagtgcgtcagcagctcatacagggtcac

SEQ ID NO: 84911 - DNA, 79 bp, Homo sapiens
tgcgggcctggctctcaccgtgggggggctctggctggagtcacagtgcgtcagcagctcatacagggtcaccccgaag

SEQ ID NO: 84912 - DNA, 81 bp, Homo sapiens
tctcaccgtgggggggctctggctggagtcacagtgcgtcagcagctcatacagggtcaccccgaaggaccagacatctga

SEQ ID NO: 84913 - DNA, 82 bp, Homo sapiens
ggggggctctggctggagtcacagtgcgtcagcagctcatacagggtcaccccgaaggaccagacatctgacgcatagtaga

SEQ ID NO: 84914 - DNA, 82 bp, Homo sapiens
ggctggagtcacagtgcgtcagcagctcatacagggtcaccccgaaggaccagacatctgacgcatagtagaacttatactc

SEQ ID NO: 84915 - DNA, 81 bp, Homo sapiens
agtcacagtgcgtcagcagctcatacagggtcaccccgaaggaccagacatctgacgcatagtagaacttatactccttca

SEQ ID NO: 84916 - DNA, 80 bp, Homo sapiens
cgtcagcagctcatacagggtcaccccgaaggaccagacatctgacgcatagtagaacttatactccttcaggcactctg

SEQ ID NO: 84917 - DNA, 76 bp, Homo sapiens
atacagggtcaccccgaaggaccagacatctgacgcatagtagaacttatactccttcaggcactctggggcatac

SEQ ID NO: 84918 - DNA, 75 bp, Homo sapiens
gtcaccccgaaggaccagacatctgacgcatagtagaacttatactccttcaggcactctggggcatacctaggg

SEQ ID NO: 84919 - DNA, 73 bp, Homo sapiens
aggaccagacatctgacgcatagtagaacttatactccttcaggcactctggggcatacctagggggaggggg

SEQ ID NO: 84920 - DNA, 75 bp, Homo sapiens
atctgacgcatagtagaacttatactccttcaggcactctggggcatacctagggggaggggggcactcaggcca

SEQ ID NO: 84921 - DNA, 70 bp, Homo sapiens
tagtagaacttatactccttcaggcactctggggcatacctagggggaggggggcactcaggccacgggg

SEQ ID NO: 84922 - DNA, 73 bp, Homo sapiens
ctgttccaagtgaccccagcaccccctcagactgcaccccgcctggtcaccagaacacggggctgtccccatc

SEQ ID NO: 84923 - DNA, 74 bp, Homo sapiens
cccagcaccccctcagactgcaccccgcctggtcaccagaacacggggctgtccccatcctcgcgcacgcggta

SEQ ID NO: 84924 - DNA, 74 bp, Homo sapiens
ccctcagactgcaccccgcctggtcaccagaacacggggctgtccccatcctcgcgcacgcggtagtactcgtg

SEQ ID NO: 84925 - DNA, 71 bp, Homo sapiens
caccccgcctggtcaccagaacacggggctgtccccatcctcgcgcacgcggtagtactcgtggccttcgg

SEQ ID NO: 84926 - DNA, 73 bp, Homo sapiens
tggtcaccagaacacggggctgtccccatcctcgcgcacgcggtagtactcgtggccttcgggcacggccttg

SEQ ID NO: 84927 - DNA, 72 bp, Homo sapiens
agaacacggggctgtccccatcctcgcgcacgcggtagtactcgtggccttcgggcacggccttggctaggc

SEQ ID NO: 84928 - DNA, 72 bp, Homo sapiens
ggctgtccccatcctcgcgcacgcggtagtactcgtggccttcgggcacggccttggctaggccaaagtccc

SEQ ID NO: 84929 - DNA, 72 bp, Homo sapiens
atcctcgcgcacgcggtagtactcgtggccttcgggcacggccttggctaggccaaagtccccgatcttgac

SEQ ID NO: 84930 - DNA, 71 bp, Homo sapiens
ggtagtactcgtggccttcgggcacggccttggctaggccaaagtccccgatcttgaccagcctgtcgttg

SEQ ID NO: 84931 - DNA, 76 bp, Homo sapiens
tactcgtggccttcgggcacggccttggctaggccaaagtccccgatcttgaccagcctgtcgttgtccagcagca

SEQ ID NO: 84932 - DNA, 76 bp, Homo sapiens
cttcgggcacggccttggctaggccaaagtccccgatcttgaccagcctgtcgttgtccagcagcacgttgcgcgc

SEQ ID NO: 84933 - DNA, 77 bp, Homo sapiens
ttggctaggccaaagtccccgatcttgaccagcctgtcgttgtccagcagcacgttgcgcgcggctaggtctcggtg

SEQ ID NO: 84934 - DNA, 79 bp, Homo sapiens
aaagtccccgatcttgaccagcctgtcgttgtccagcagcacgttgcgcgcggctaggtctcggtggatgtagtgctgc

SEQ ID NO: 84935 - DNA, 85 bp, Homo sapiens
atcttgaccagcctgtcgttgtccagcagcacgttgcgcgcggctaggtctcggtggatgtagtgctgcgcgtgcagataggcca

SEQ ID NO: 84936 - DNA, 84 bp, Homo sapiens
accagcctgtcgttgtccagcagcacgttgcgcgcggctaggtctcggtggatgtagtgctgcgcgtgcagataggccatgccc

SEQ ID NO: 84937 - DNA, 83 bp, Homo sapiens
tcgttgtccagcagcacgttgcgcgcggctaggtctcggtggatgtagtgctgcgcgtgcagataggccatgccctggggacg

SEQ ID NO: 84938 - DNA, 79 bp, Homo sapiens
acgttgcgcgcggctaggtctcggtggatgtagtgctgcgcgtgcagataggccatgccctggggacggggcagggctc

SEQ ID NO: 84939 - DNA, 79 bp, Homo sapiens
cggctaggtctcggtggatgtagtgctgcgcgtgcagataggccatgccctggggacggggcagggctcgtgagtttca

SEQ ID NO: 84940 - DNA, 78 bp, Homo sapiens
aggtctcggtggatgtagtgctgcgcgtgcagataggccatgccctggggacggggcagggctcgtgagtttcagtgg

SEQ ID NO: 84941 - DNA, 77 bp, Homo sapiens
aagctgaagaggaaggggcaagctccagaagcaggggcggggccgaccaacctcgcagatctgctgggcgaagagca

SEQ ID NO: 84942 - DNA, 80 bp, Homo sapiens
gggcaagctccagaagcaggggcggggccgaccaacctcgcagatctgctgggcgaagagcagcagctgggccagcccga

SEQ ID NO: 84943 - DNA, 83 bp, Homo sapiens
agctccagaagcaggggcggggccgaccaacctcgcagatctgctgggcgaagagcagcagctgggccagcccgatgctgtgc

SEQ ID NO: 84944 - DNA, 80 bp, Homo sapiens
ggcggggccgaccaacctcgcagatctgctgggcgaagagcagcagctgggccagcccgatgctgtgccggggcaggtag

SEQ ID NO: 84945 - DNA, 83 bp, Homo sapiens
accaacctcgcagatctgctgggcgaagagcagcagctgggccagcccgatgctgtgccggggcaggtagtctcggaggctgc

SEQ ID NO: 84946 - DNA, 83 bp, Homo sapiens
cctcgcagatctgctgggcgaagagcagcagctgggccagcccgatgctgtgccggggcaggtagtctcggaggctgcccagg

SEQ ID NO: 84947 - DNA, 80 bp, Homo sapiens
tgggcgaagagcagcagctgggccagcccgatgctgtgccggggcaggtagtctcggaggctgcccaggggcacgtactc

SEQ ID NO: 84948 - DNA, 83 bp, Homo sapiens
cagcagctgggccagcccgatgctgtgccggggcaggtagtctcggaggctgcccaggggcacgtactccatgaccagctgca

SEQ ID NO: 84949 - DNA, 81 bp, Homo sapiens
gccagcccgatgctgtgccggggcaggtagtctcggaggctgcccaggggcacgtactccatgaccagctgcagcgacttc

SEQ ID NO: 84950 - DNA, 81 bp, Homo sapiens
atgctgtgccggggcaggtagtctcggaggctgcccaggggcacgtactccatgaccagctgcagcgacttctcgcctgcc

SEQ ID NO: 84951 - DNA, 79 bp, Homo sapiens
gggcaggtagtctcggaggctgcccaggggcacgtactccatgaccagctgcagcgacttctcgcctgccgcggagagg

SEQ ID NO: 84952 - DNA, 78 bp, Homo sapiens
ggtagtctcggaggctgcccaggggcacgtactccatgaccagctgcagcgacttctcgcctgccgcggagaggggcg

SEQ ID NO: 84953 - DNA, 75 bp, Homo sapiens
ctgcccaggggcacgtactccatgaccagctgcagcgacttctcgcctgccgcggagaggggcggccccggtggg

SEQ ID NO: 84954 - DNA, 71 bp, Homo sapiens
taaccacgccccctcaagtctctaggactcgccgggtcccgcccaccttggtcctcgcagcagcccttgta

SEQ ID NO: 84955 - DNA, 76 bp, Homo sapiens
ccctcaagtctctaggactcgccgggtcccgcccaccttggtcctcgcagcagcccttgtacttgatgatgtgctc

SEQ ID NO: 84956 - DNA, 76 bp, Homo sapiens
agtctctaggactcgccgggtcccgcccaccttggtcctcgcagcagcccttgtacttgatgatgtgctcgtggta

SEQ ID NO: 84957 - DNA, 81 bp, Homo sapiens
gccgggtcccgcccaccttggtcctcgcagcagcccttgtacttgatgatgtgctcgtggtagagcgtgcgcagaatgtca

SEQ ID NO: 84958 - DNA, 85 bp, Homo sapiens
gcccaccttggtcctcgcagcagcccttgtacttgatgatgtgctcgtggtagagcgtgcgcagaatgtcaatctcctgcttcca

SEQ ID NO: 84959 - DNA, 85 bp, Homo sapiens
cttggtcctcgcagcagcccttgtacttgatgatgtgctcgtggtagagcgtgcgcagaatgtcaatctcctgcttccagcccga

SEQ ID NO: 84960 - DNA, 84 bp, Homo sapiens
agcagcccttgtacttgatgatgtgctcgtggtagagcgtgcgcagaatgtcaatctcctgcttccagcccgagcggtgctggg

SEQ ID NO: 84961 - DNA, 84 bp, Homo sapiens
cttgtacttgatgatgtgctcgtggtagagcgtgcgcagaatgtcaatctcctgcttccagcccgagcggtgctgggggccgca

SEQ ID NO: 84962 - DNA, 85 bp, Homo sapiens
atgatgtgctcgtggtagagcgtgcgcagaatgtcaatctcctgcttccagcccgagcggtgctgggggccgcagtctgccttga

SEQ ID NO: 84963 - DNA, 82 bp, Homo sapiens
tggtagagcgtgcgcagaatgtcaatctcctgcttccagcccgagcggtgctgggggccgcagtctgccttgagggctttca

SEQ ID NO: 84964 - DNA, 80 bp, Homo sapiens
gcagaatgtcaatctcctgcttccagcccgagcggtgctgggggccgcagtctgccttgagggctttcaccgccaccatc

SEQ ID NO: 84965 - DNA, 79 bp, Homo sapiens
atgtcaatctcctgcttccagcccgagcggtgctgggggccgcagtctgccttgagggctttcaccgccaccatctcgc

SEQ ID NO: 84966 - DNA, 76 bp, Homo sapiens
ttccagcccgagcggtgctgggggccgcagtctgccttgagggctttcaccgccaccatctcgccagtgccgtcgt

SEQ ID NO: 84967 - DNA, 76 bp, Homo sapiens
agcggtgctgggggccgcagtctgccttgagggctttcaccgccaccatctcgccagtgccgtcgttggtcggatc

SEQ ID NO: 84968 - DNA, 77 bp, Homo sapiens
ggggccgcagtctgccttgagggctttcaccgccaccatctcgccagtgccgtcgttggtcggatcgtagcagtaca

SEQ ID NO: 84969 - DNA, 77 bp, Homo sapiens
gtctgccttgagggctttcaccgccaccatctcgccagtgccgtcgttggtcggatcgtagcagtacaagctgacct

SEQ ID NO: 84970 - DNA, 77 bp, Homo sapiens
ttgagggctttcaccgccaccatctcgccagtgccgtcgttggtcggatcgtagcagtacaagctgaccttgccgaa

SEQ ID NO: 84971 - DNA, 77 bp, Homo sapiens
ttcaccgccaccatctcgccagtgccgtcgttggtcggatcgtagcagtacaagctgaccttgccgaagtgaccctg

SEQ ID NO: 84972 - DNA, 77 bp, Homo sapiens
atctcgccagtgccgtcgttggtcggatcgtagcagtacaagctgaccttgccgaagtgaccctggtcgggagcgca

SEQ ID NO: 84973 - DNA, 74 bp, Homo sapiens
agtgccgtcgttggtcggatcgtagcagtacaagctgaccttgccgaagtgaccctggtcgggagcgcacgagg

SEQ ID NO: 84974 - DNA, 76 bp, Homo sapiens
ttggtcggatcgtagcagtacaagctgaccttgccgaagtgaccctggtcgggagcgcacgagggtcagctccacc

SEQ ID NO: 84975 - DNA, 71 bp, Homo sapiens
tccttcccgaccaggcgggccttttagcagctcaggcccgtccctcacctcgcccagatctcggatctttt

SEQ ID NO: 84976 - DNA, 72 bp, Homo sapiens
ccgaccaggcgggccttttagcagctcaggcccgtccctcacctcgcccagatctcggatctttttcaaata

SEQ ID NO: 84977 - DNA, 73 bp, Homo sapiens
ttttagcagctcaggcccgtccctcacctcgcccagatctcggatctttttcaaatagcgcttgtggaaaacc

SEQ ID NO: 84978 - DNA, 71 bp, Homo sapiens
tcaggcccgtccctcacctcgcccagatctcggatctttttcaaatagcgcttgtggaaaaccgtagggtc

SEQ ID NO: 84979 - DNA, 69 bp, Homo sapiens
ccgtccctcacctcgcccagatctcggatctttttcaaatagcgcttgtggaaaaccgtagggtccgac

SEQ ID NO: 84980 - DNA, 69 bp, Homo sapiens
acctcgcccagatctcggatctttttcaaatagcgcttgtggaaaaccgtagggtccgacgccggtgag

SEQ ID NO: 84981 - DNA, 68 bp, Homo sapiens
atctcggatctttttcaaatagcgcttgtggaaaaccgtagggtccgacgccggtgagtccgggttca

SEQ ID NO: 84982 - DNA, 68 bp, Homo sapiens
ctttttcaaatagcgcttgtggaaaaccgtagggtccgacgccggtgagtccgggttcacagtcaaga

SEQ ID NO: 84983 - DNA, 71 bp, Homo sapiens
cttgtggaaaaccgtagggtccgacgccggtgagtccgggttcacagtcaagacgtcagcaagatctggaa

SEQ ID NO: 84984 - DNA, 70 bp, Homo sapiens
ggaaaaccgtagggtccgacgccggtgagtccgggttcacagtcaagacgtcagcaagatctggaagagt

SEQ ID NO: 84985 - DNA, 72 bp, Homo sapiens
agggtccgacgccggtgagtccgggttcacagtcaagacgtcagcaagatctggaagagttgcggtgggtaa

SEQ ID NO: 84986 - DNA, 72 bp, Homo sapiens
ccggtgagtccgggttcacagtcaagacgtcagcaagatctggaagagttgcggtgggtaaaggcctgaccc

SEQ ID NO: 84987 - DNA, 74 bp, Homo sapiens
agccccgtcccacttccccagggtcccagcactgggatggagctcactgtggggctgcagccgggtgaggtcac

SEQ ID NO: 84988 - DNA, 78 bp, Homo sapiens
acttccccagggtcccagcactgggatggagctcactgtggggctgcagccgggtgaggtcacgcaggatggtgcgga

SEQ ID NO: 84989 - DNA, 81 bp, Homo sapiens
agggtcccagcactgggatggagctcactgtggggctgcagccgggtgaggtcacgcaggatggtgcggaatgatggcctc

SEQ ID NO: 84990 - DNA, 83 bp, Homo sapiens
ctgggatggagctcactgtggggctgcagccgggtgaggtcacgcaggatggtgcggaatgatggcctctgggttggctcata

SEQ ID NO: 84991 - DNA, 83 bp, Homo sapiens
agctcactgtggggctgcagccgggtgaggtcacgcaggatggtgcggaatgatggcctctgggttggctcataggtcagaca

SEQ ID NO: 84992 - DNA, 83 bp, Homo sapiens
gggctgcagccgggtgaggtcacgcaggatggtgcggaatgatggcctctgggttggctcataggtcagacactggctggtga

SEQ ID NO: 84993 - DNA, 81 bp, Homo sapiens
agccgggtgaggtcacgcaggatggtgcggaatgatggcctctgggttggctcataggtcagacactggctggtgagtgtg

SEQ ID NO: 84994 - DNA, 83 bp, Homo sapiens
aggtcacgcaggatggtgcggaatgatggcctctgggttggctcataggtcagacactggctggtgagtgtggccagctgtgg

SEQ ID NO: 84995 - DNA, 82 bp, Homo sapiens
aggatggtgcggaatgatggcctctgggttggctcataggtcagacactggctggtgagtgtggccagctgtgggcaggagg

SEQ ID NO: 84996 - DNA, 82 bp, Homo sapiens
aatgatggcctctgggttggctcataggtcagacactggctggtgagtgtggccagctgtgggcaggagggctcgggcagcc

SEQ ID NO: 84997 - DNA, 83 bp, Homo sapiens
tctgggttggctcataggtcagacactggctggtgagtgtggccagctgtgggcaggagggctcgggcagccggtgctgcctc

SEQ ID NO: 84998 - DNA, 84 bp, Homo sapiens
tcataggtcagacactggctggtgagtgtggccagctgtgggcaggagggctcgggcagccggtgctgcctctggtagaaatgc

SEQ ID NO: 84999 - DNA, 83 bp, Homo sapiens
tcagacactggctggtgagtgtggccagctgtgggcaggagggctcgggcagccggtgctgcctctggtagaaatgctccttc

SEQ ID NO: 85000 - DNA, 79 bp, Homo sapiens
tgagtgtggccagctgtgggcaggagggctcgggcagccggtgctgcctctggtagaaatgctccttctgttgggaaag

SEQ ID NO: 85001 - DNA, 76 bp, Homo sapiens
cagctgtgggcaggagggctcgggcagccggtgctgcctctggtagaaatgctccttctgttgggaaagggaccca

SEQ ID NO: 85002 - DNA, 75 bp, Homo sapiens
caggagggctcgggcagccggtgctgcctctggtagaaatgctccttctgttgggaaagggacccagaggagtca

SEQ ID NO: 85003 - DNA, 75 bp, Homo sapiens
ctcgggcagccggtgctgcctctggtagaaatgctccttctgttgggaaagggacccagaggagtcaacatcctc

SEQ ID NO: 85004 - DNA, 71 bp, Homo sapiens
agcctgggcaattagagtggaacttcgtctcaaaataaaaccaccacactcatgaacctcctttgggaagc

SEQ ID NO: 85005 - DNA, 71 bp, Homo sapiens
aattagagtggaacttcgtctcaaaataaaaccaccacactcatgaacctcctttgggaagccttgtctga

SEQ ID NO: 85006 - DNA, 70 bp, Homo sapiens
agtggaacttcgtctcaaaataaaaccaccacactcatgaacctcctttgggaagccttgtctgacccca

SEQ ID NO: 85007 - DNA, 75 bp, Homo sapiens
tcaaaataaaaccaccacactcatgaacctcctttgggaagccttgtctgaccccactgctgggtgaggcgcatc

SEQ ID NO: 85008 - DNA, 76 bp, Homo sapiens
taaaaccaccacactcatgaacctcctttgggaagccttgtctgaccccactgctgggtgaggcgcatcctcagcc

SEQ ID NO: 85009 - DNA, 75 bp, Homo sapiens
acactcatgaacctcctttgggaagccttgtctgaccccactgctgggtgaggcgcatcctcagcccttcttccc

SEQ ID NO: 85010 - DNA, 76 bp, Homo sapiens
acctcctttgggaagccttgtctgaccccactgctgggtgaggcgcatcctcagcccttcttccccactctgcagc

SEQ ID NO: 85011 - DNA, 78 bp, Homo sapiens
aagccttgtctgaccccactgctgggtgaggcgcatcctcagcccttcttccccactctgcagcctgggcgtctccca

SEQ ID NO: 85012 - DNA, 81 bp, Homo sapiens
tctgaccccactgctgggtgaggcgcatcctcagcccttcttccccactctgcagcctgggcgtctcccatcgctgccctg

SEQ ID NO: 85013 - DNA, 81 bp, Homo sapiens
tgggtgaggcgcatcctcagcccttcttccccactctgcagcctgggcgtctcccatcgctgccctggtcactctgcctaa

SEQ ID NO: 85014 - DNA, 78 bp, Homo sapiens
catcctcagcccttcttccccactctgcagcctgggcgtctcccatcgctgccctggtcactctgcctaaaactgaaa

SEQ ID NO: 85015 - DNA, 77 bp, Homo sapiens
ccttcttccccactctgcagcctgggcgtctcccatcgctgccctggtcactctgcctaaaactgaaatcaagtctc

SEQ ID NO: 85016 - DNA, 79 bp, Homo sapiens
cactctgcagcctgggcgtctcccatcgctgccctggtcactctgcctaaaactgaaatcaagtctcttacttgccttc

SEQ ID NO: 85017 - DNA, 78 bp, Homo sapiens
agcctgggcgtctcccatcgctgccctggtcactctgcctaaaactgaaatcaagtctcttacttgccttctgtgtgc

SEQ ID NO: 85018 - DNA, 81 bp, Homo sapiens
tctcccatcgctgccctggtcactctgcctaaaactgaaatcaagtctcttacttgccttctgtgtgccaggcacaagtga

SEQ ID NO: 85019 - DNA, 79 bp, Homo sapiens
tgccctggtcactctgcctaaaactgaaatcaagtctcttacttgccttctgtgtgccaggcacaagtgacttccacaa

SEQ ID NO: 85020 - DNA, 73 bp, Homo sapiens
taaaactgaaatcaagtctcttacttgccttctgtgtgccaggcacaagtgacttccacaaggacctaaaaag

SEQ ID NO: 85021 - DNA, 74 bp, Homo sapiens
aatcaagtctcttacttgccttctgtgtgccaggcacaagtgacttccacaaggacctaaaaaggctgggacta

SEQ ID NO: 85022 - DNA, 75 bp, Homo sapiens
tcttacttgccttctgtgtgccaggcacaagtgacttccacaaggacctaaaaaggctgggactacattgagccc

SEQ ID NO: 85023 - DNA, 75 bp, Homo sapiens
gtgtgccaggcacaagtgacttccacaaggacctaaaaaggctgggactacattgagccccagcgagtggcccac

SEQ ID NO: 85024 - DNA, 74 bp, Homo sapiens
aggcacaagtgacttccacaaggacctaaaaaggctgggactacattgagccccagcgagtggcccacctgctg

SEQ ID NO: 85025 - DNA, 73 bp, Homo sapiens
acttccacaaggacctaaaaaggctgggactacattgagccccagcgagtggcccacctgctggtagcccaga

SEQ ID NO: 85026 - DNA, 76 bp, Homo sapiens
aaaaggctgggactacattgagccccagcgagtggcccacctgctggtagcccagagagacttgaagtcacgaggc

SEQ ID NO: 85027 - DNA, 80 bp, Homo sapiens
tacattgagccccagcgagtggcccacctgctggtagcccagagagacttgaagtcacgaggccagaagggatgcagctt

SEQ ID NO: 85028 - DNA, 82 bp, Homo sapiens
cccacctgctggtagcccagagagacttgaagtcacgaggccagaagggatgcagctttgagctctgattctgtcctctgga

SEQ ID NO: 85029 - DNA, 82 bp, Homo sapiens
tggtagcccagagagacttgaagtcacgaggccagaagggatgcagctttgagctctgattctgtcctctggatttcttgga

SEQ ID NO: 85030 - DNA, 79 bp, Homo sapiens
cccagagagacttgaagtcacgaggccagaagggatgcagctttgagctctgattctgtcctctggatttcttggaggg

SEQ ID NO: 85031 - DNA, 77 bp, Homo sapiens
cttgaagtcacgaggccagaagggatgcagctttgagctctgattctgtcctctggatttcttggaggggcccccac

SEQ ID NO: 85032 - DNA, 75 bp, Homo sapiens
aggccagaagggatgcagctttgagctctgattctgtcctctggatttcttggaggggcccccactgcggggagg

SEQ ID NO: 85033 - DNA, 74 bp, Homo sapiens
agggatgcagctttgagctctgattctgtcctctggatttcttggaggggcccccactgcggggagggcccaag

SEQ ID NO: 85034 - DNA, 72 bp, Homo sapiens
tttgagctctgattctgtcctctggatttcttggaggggcccccactgcggggagggcccaagggtctccta

SEQ ID NO: 85035 - DNA, 69 bp, Homo sapiens
attctgtcctctggatttcttggaggggcccccactgcggggagggcccaagggtctcctagacatacc

SEQ ID NO: 85036 - DNA, 69 bp, Homo sapiens
tctggatttcttggaggggcccccactgcggggagggcccaagggtctcctagacatacctcggaggga

SEQ ID NO: 85037 - DNA, 71 bp, Homo sapiens
aggggcccccactgcggggagggcccaagggtctcctagacatacctcggagggactgcggctctgcagag

SEQ ID NO: 85038 - DNA, 72 bp, Homo sapiens
actgcggggagggcccaagggtctcctagacatacctcggagggactgcggctctgcagaggggcctctccg

SEQ ID NO: 85039 - DNA, 75 bp, Homo sapiens
agggcccaagggtctcctagacatacctcggagggactgcggctctgcagaggggcctctccgtcaaagcagatc

SEQ ID NO: 85040 - DNA, 76 bp, Homo sapiens
aagggtctcctagacatacctcggagggactgcggctctgcagaggggcctctccgtcaaagcagatctccaggag

SEQ ID NO: 85041 - DNA, 78 bp, Homo sapiens
tagacatacctcggagggactgcggctctgcagaggggcctctccgtcaaagcagatctccaggagggtggcgccaaa

SEQ ID NO: 85042 - DNA, 77 bp, Homo sapiens
gctctgcagaggggcctctccgtcaaagcagatctccaggagggtggcgccaaacccccacttgtccatggcggtgc

SEQ ID NO: 85043 - DNA, 73 bp, Homo sapiens
agaggggcctctccgtcaaagcagatctccaggagggtggcgccaaacccccacttgtccatggcggtgctta

SEQ ID NO: 85044 - DNA, 71 bp, Homo sapiens
aggagggtggcgccaaacccccacttgtccatggcggtgcttaggctgttggccccacctggtaggcattc

SEQ ID NO: 85045 - DNA, 71 bp, Homo sapiens
ccaaacccccacttgtccatggcggtgcttaggctgttggccccacctggtaggcattcgggggccagcca

SEQ ID NO: 85046 - DNA, 69 bp, Homo sapiens
aaaggagcaggggaagccccccactgtgcccaggtcccctcaggtactcaccctccctggagagggcgc

SEQ ID NO: 85047 - DNA, 70 bp, Homo sapiens
aagccccccactgtgcccaggtcccctcaggtactcaccctccctggagagggcgcccaggcccacgcca

SEQ ID NO: 85048 - DNA, 78 bp, Homo sapiens
tgtgcccaggtcccctcaggtactcaccctccctggagagggcgcccaggcccacgccaggatcactcagcttgatga

SEQ ID NO: 85049 - DNA, 74 bp, Homo sapiens
aggtcccctcaggtactcaccctccctggagagggcgcccaggcccacgccaggatcactcagcttgatgaagg

SEQ ID NO: 85050 - DNA, 75 bp, Homo sapiens
aggtactcaccctccctggagagggcgcccaggcccacgccaggatcactcagcttgatgaaggggctggtgccc

SEQ ID NO: 85051 - DNA, 76 bp, Homo sapiens
cctccctggagagggcgcccaggcccacgccaggatcactcagcttgatgaaggggctggtgccctctgccaaccc

SEQ ID NO: 85052 - DNA, 76 bp, Homo sapiens
agggcgcccaggcccacgccaggatcactcagcttgatgaaggggctggtgccctctgccaaccccagccgggcca

SEQ ID NO: 85053 - DNA, 78 bp, Homo sapiens
aggcccacgccaggatcactcagcttgatgaaggggctggtgccctctgccaaccccagccgggccagcaggatgttc

SEQ ID NO: 85054 - DNA, 79 bp, Homo sapiens
atcactcagcttgatgaaggggctggtgccctctgccaaccccagccgggccagcaggatgttccggccacacacatta

SEQ ID NO: 85055 - DNA, 77 bp, Homo sapiens
cttgatgaaggggctggtgccctctgccaaccccagccgggccagcaggatgttccggccacacacattaccatgaa

SEQ ID NO: 85056 - DNA, 75 bp, Homo sapiens
ggctggtgccctctgccaaccccagccgggccagcaggatgttccggccacacacattaccatgaaccaggttct

SEQ ID NO: 85057 - DNA, 76 bp, Homo sapiens
ctctgccaaccccagccgggccagcaggatgttccggccacacacattaccatgaaccaggttcttgttctcctga

SEQ ID NO: 85058 - DNA, 75 bp, Homo sapiens
cccagccgggccagcaggatgttccggccacacacattaccatgaaccaggttcttgttctcctgaggtgggcag

SEQ ID NO: 85059 - DNA, 75 bp, Homo sapiens
ccgggccagcaggatgttccggccacacacattaccatgaaccaggttcttgttctcctgaggtgggcaggagag

SEQ ID NO: 85060 - DNA, 73 bp, Homo sapiens
aggatgttccggccacacacattaccatgaaccaggttcttgttctcctgaggtgggcaggagagggggtgtg

SEQ ID NO: 85061 - DNA, 78 bp, Homo sapiens
tcctggccctccctgaccgacccaggccccacacacaggccacacaccaggtagctgagggcgctggccagctgctgg

SEQ ID NO: 85062 - DNA, 79 bp, Homo sapiens
tccctgaccgacccaggccccacacacaggccacacaccaggtagctgagggcgctggccagctgctgggccaccacca

SEQ ID NO: 85063 - DNA, 81 bp, Homo sapiens
ccaggccccacacacaggccacacaccaggtagctgagggcgctggccagctgctgggccaccaccatcttccaagccatg

SEQ ID NO: 85064 - DNA, 83 bp, Homo sapiens
acacacaggccacacaccaggtagctgagggcgctggccagctgctgggccaccaccatcttccaagccatgggcacatggcc

SEQ ID NO: 85065 - DNA, 80 bp, Homo sapiens
acacaccaggtagctgagggcgctggccagctgctgggccaccaccatcttccaagccatgggcacatggccccgctccc

SEQ ID NO: 85066 - DNA, 84 bp, Homo sapiens
tagctgagggcgctggccagctgctgggccaccaccatcttccaagccatgggcacatggccccgctccctccgcagccacaca

SEQ ID NO: 85067 - DNA, 82 bp, Homo sapiens
agggcgctggccagctgctgggccaccaccatcttccaagccatgggcacatggccccgctccctccgcagccacacatcca

SEQ ID NO: 85068 - DNA, 79 bp, Homo sapiens
ctgctgggccaccaccatcttccaagccatgggcacatggccccgctccctccgcagccacacatccaggggtccgtgc

SEQ ID NO: 85069 - DNA, 77 bp, Homo sapiens
accaccatcttccaagccatgggcacatggccccgctccctccgcagccacacatccaggggtccgtgctccacgta

SEQ ID NO: 85070 - DNA, 79 bp, Homo sapiens
atcttccaagccatgggcacatggccccgctccctccgcagccacacatccaggggtccgtgctccacgtactctgtca

SEQ ID NO: 85071 - DNA, 81 bp, Homo sapiens
tgggcacatggccccgctccctccgcagccacacatccaggggtccgtgctccacgtactctgtcaccatgatatctgtaa

SEQ ID NO: 85072 - DNA, 79 bp, Homo sapiens
atggccccgctccctccgcagccacacatccaggggtccgtgctccacgtactctgtcaccatgatatctgtaaagaca

SEQ ID NO: 85073 - DNA, 82 bp, Homo sapiens
ctccctccgcagccacacatccaggggtccgtgctccacgtactctgtcaccatgatatctgtaaagacacagctgctctgg

SEQ ID NO: 85074 - DNA, 82 bp, Homo sapiens
acacatccaggggtccgtgctccacgtactctgtcaccatgatatctgtaaagacacagctgctctggggcaacctgcctgc

SEQ ID NO: 85075 - DNA, 73 bp, Homo sapiens
tataagtcaggggtggcctgccaaagggggatgggtatggcgggacccactcactttcagggccgcgcacaca

SEQ ID NO: 85076 - DNA, 76 bp, Homo sapiens
gtggcctgccaaagggggatgggtatggcgggacccactcactttcagggccgcgcacacagacgccatgcacgaa

SEQ ID NO: 85077 - DNA, 73 bp, Homo sapiens
aaagggggatgggtatggcgggacccactcactttcagggccgcgcacacagacgccatgcacgaaggccagg

SEQ ID NO: 85078 - DNA, 78 bp, Homo sapiens
atgggtatggcgggacccactcactttcagggccgcgcacacagacgccatgcacgaaggccaggtgcgtgtgggaga

SEQ ID NO: 85079 - DNA, 80 bp, Homo sapiens
cgggacccactcactttcagggccgcgcacacagacgccatgcacgaaggccaggtgcgtgtgggagacctggctcatga

SEQ ID NO: 85080 - DNA, 83 bp, Homo sapiens
actcactttcagggccgcgcacacagacgccatgcacgaaggccaggtgcgtgtgggagacctggctcatgaggctggctgtc

SEQ ID NO: 85081 - DNA, 82 bp, Homo sapiens
agggccgcgcacacagacgccatgcacgaaggccaggtgcgtgtgggagacctggctcatgaggctggctgtctcgtagaag

SEQ ID NO: 85082 - DNA, 81 bp, Homo sapiens
acacagacgccatgcacgaaggccaggtgcgtgtgggagacctggctcatgaggctggctgtctcgtagaaggcctgtggg

SEQ ID NO: 85083 - DNA, 79 bp, Homo sapiens
atgcacgaaggccaggtgcgtgtgggagacctggctcatgaggctggctgtctcgtagaaggcctgtggggaccgggca

SEQ ID NO: 85084 - DNA, 77 bp, Homo sapiens
ccaggtgcgtgtgggagacctggctcatgaggctggctgtctcgtagaaggcctgtggggaccgggcaggtcaggtg

SEQ ID NO: 85085 - DNA, 78 bp, Homo sapiens
cgtgtgggagacctggctcatgaggctggctgtctcgtagaaggcctgtggggaccgggcaggtcaggtggctgcaaa

SEQ ID NO: 85086 - DNA, 76 bp, Homo sapiens
acctggctcatgaggctggctgtctcgtagaaggcctgtggggaccgggcaggtcaggtggctgcaaagccgaccc

SEQ ID NO: 85087 - DNA, 78 bp, Homo sapiens
cacctcctccacagacacacccccaggcctggccctgcccactcaccagggcgatgtcatggtgactagggtccagca

SEQ ID NO: 85088 - DNA, 78 bp, Homo sapiens
acagacacacccccaggcctggccctgcccactcaccagggcgatgtcatggtgactagggtccagcactttgagcac

SEQ ID NO: 85089 - DNA, 78 bp, Homo sapiens
ccccaggcctggccctgcccactcaccagggcgatgtcatggtgactagggtccagcactttgagcaccactcgtagc

SEQ ID NO: 85090 - DNA, 80 bp, Homo sapiens
tggccctgcccactcaccagggcgatgtcatggtgactagggtccagcactttgagcaccactcgtagctcctgcccacg

SEQ ID NO: 85091 - DNA, 79 bp, Homo sapiens
actcaccagggcgatgtcatggtgactagggtccagcactttgagcaccactcgtagctcctgcccacggtccctgcca

SEQ ID NO: 85092 - DNA, 79 bp, Homo sapiens
agggcgatgtcatggtgactagggtccagcactttgagcaccactcgtagctcctgcccacggtccctgccaggcacga

SEQ ID NO: 85093 - DNA, 75 bp, Homo sapiens
atggtgactagggtccagcactttgagcaccactcgtagctcctgcccacggtccctgccaggcacgagggggtc

SEQ ID NO: 85094 - DNA, 77 bp, Homo sapiens
gtccagcactttgagcaccactcgtagctcctgcccacggtccctgccaggcacgagggggtcctcgtcatccatct

SEQ ID NO: 85095 - DNA, 75 bp, Homo sapiens
actttgagcaccactcgtagctcctgcccacggtccctgccaggcacgagggggtcctcgtcatccatcttgccc

SEQ ID NO: 85096 - DNA, 74 bp, Homo sapiens
accactcgtagctcctgcccacggtccctgccaggcacgagggggtcctcgtcatccatcttgccctcctcagg

SEQ ID NO: 85097 - DNA, 73 bp, Homo sapiens
agctcctgcccacggtccctgccaggcacgagggggtcctcgtcatccatcttgccctcctcagggtccccgc

SEQ ID NO: 85098 - DNA, 72 bp, Homo sapiens
acggtccctgccaggcacgagggggtcctcgtcatccatcttgccctcctcagggtccccgctgccctccac

SEQ ID NO: 85099 - DNA, 76 bp, Homo sapiens
gcacgagggggtcctcgtcatccatcttgccctcctcagggtccccgctgccctccactcgcaggcggccctcata

SEQ ID NO: 85100 - DNA, 76 bp, Homo sapiens
gtcctcgtcatccatcttgccctcctcagggtccccgctgccctccactcgcaggcggccctcatacacgttggtc

SEQ ID NO: 85101 - DNA, 75 bp, Homo sapiens
atccatcttgccctcctcagggtccccgctgccctccactcgcaggcggccctcatacacgttggtccttgtgcc

SEQ ID NO: 85102 - DNA, 72 bp, Homo sapiens
agggtccccgctgccctccactcgcaggcggccctcatacacgttggtccttgtgccctggcccaagtggga

SEQ ID NO: 85103 - DNA, 77 bp, Homo sapiens
ccctccactcgcaggcggccctcatacacgttggtccttgtgccctggcccaagtgggacagctgcgggatcatgtg

SEQ ID NO: 85104 - DNA, 79 bp, Homo sapiens
actcgcaggcggccctcatacacgttggtccttgtgccctggcccaagtgggacagctgcgggatcatgtggcacagaa

SEQ ID NO: 85105 - DNA, 80 bp, Homo sapiens
ctcatacacgttggtccttgtgccctggcccaagtgggacagctgcgggatcatgtggcacagaataccgccatggtgaa

SEQ ID NO: 85106 - DNA, 69 bp, Homo sapiens
atccccaggggccctgcccttgccccgggccccttccctgcacccacctgggtgatctccttctggtca

SEQ ID NO: 85107 - DNA, 68 bp, Homo sapiens
ccctgcccttgccccgggccccttccctgcacccacctgggtgatctccttctggtcaacccggtgga

SEQ ID NO: 85108 - DNA, 69 bp, Homo sapiens
cccttgccccgggccccttccctgcacccacctgggtgatctccttctggtcaacccggtggaagctga

SEQ ID NO: 85109 - DNA, 75 bp, Homo sapiens
ccttccctgcacccacctgggtgatctccttctggtcaacccggtggaagctgagctggctgaggttgagtgtcc

SEQ ID NO: 85110 - DNA, 77 bp, Homo sapiens
ctgcacccacctgggtgatctccttctggtcaacccggtggaagctgagctggctgaggttgagtgtcctggggctg

SEQ ID NO: 85111 - DNA, 76 bp, Homo sapiens
tgggtgatctccttctggtcaacccggtggaagctgagctggctgaggttgagtgtcctggggctggcccgagccc

SEQ ID NO: 85112 - DNA, 79 bp, Homo sapiens
ttctggtcaacccggtggaagctgagctggctgaggttgagtgtcctggggctggcccgagccccccgcatgatgatga

SEQ ID NO: 85113 - DNA, 80 bp, Homo sapiens
tcaacccggtggaagctgagctggctgaggttgagtgtcctggggctggcccgagccccccgcatgatgatgagattgga

SEQ ID NO: 85114 - DNA, 78 bp, Homo sapiens
aagctgagctggctgaggttgagtgtcctggggctggcccgagccccccgcatgatgatgagattggaggtttctggg

SEQ ID NO: 85115 - DNA, 78 bp, Homo sapiens
tgaggttgagtgtcctggggctggcccgagccccccgcatgatgatgagattggaggtttctgggggcaggcatcaag

SEQ ID NO: 85116 - DNA, 80 bp, Homo sapiens
ttgagtgtcctggggctggcccgagccccccgcatgatgatgagattggaggtttctgggggcaggcatcaagtcatgga

SEQ ID NO: 85117 - DNA, 77 bp, Homo sapiens
ctggcccgagccccccgcatgatgatgagattggaggtttctgggggcaggcatcaagtcatggagggcgggcctgg

SEQ ID NO: 85118 - DNA, 74 bp, Homo sapiens
ggtttctgggggcaggcatcaagtcatggagggcgggcctgggggagagatgccacatcccacccagaggtccc

SEQ ID NO: 85119 - DNA, 76 bp, Homo sapiens
ggggagagatgccacatcccacccagaggtccccctatcatcgtacctcctggttggggcaggcaacagcgacgca

SEQ ID NO: 85120 - DNA, 77 bp, Homo sapiens
agatgccacatcccacccagaggtccccctatcatcgtacctcctggttggggcaggcaacagcgacgcagagagaa

SEQ ID NO: 85121 - DNA, 77 bp, Homo sapiens
atcccacccagaggtccccctatcatcgtacctcctggttggggcaggcaacagcgacgcagagagaagcagtcatc

SEQ ID NO: 85122 - DNA, 78 bp, Homo sapiens
tccccctatcatcgtacctcctggttggggcaggcaacagcgacgcagagagaagcagtcatccccggccctcagcaa

SEQ ID NO: 85123 - DNA, 83 bp, Homo sapiens
tatcatcgtacctcctggttggggcaggcaacagcgacgcagagagaagcagtcatccccggccctcagcaagcagccctgca

SEQ ID NO: 85124 - DNA, 81 bp, Homo sapiens
cctcctggttggggcaggcaacagcgacgcagagagaagcagtcatccccggccctcagcaagcagccctgcaaggcagcc

SEQ ID NO: 85125 - DNA, 79 bp, Homo sapiens
aggcaacagcgacgcagagagaagcagtcatccccggccctcagcaagcagccctgcaaggcagccccaagttcccgaa

SEQ ID NO: 85126 - DNA, 79 bp, Homo sapiens
acagcgacgcagagagaagcagtcatccccggccctcagcaagcagccctgcaaggcagccccaagttcccgaacgctg

SEQ ID NO: 85127 - DNA, 75 bp, Homo sapiens
agagaagcagtcatccccggccctcagcaagcagccctgcaaggcagccccaagttcccgaacgctggggaagga

SEQ ID NO: 85128 - DNA, 72 bp, Homo sapiens
ccctcagcaagcagccctgcaaggcagccccaagttcccgaacgctggggaaggaccggccccagccctcca

SEQ ID NO: 85129 - DNA, 71 bp, Homo sapiens
aagcagccctgcaaggcagccccaagttcccgaacgctggggaaggaccggccccagccctccagcacgaa

SEQ ID NO: 85130 - DNA, 66 bp, Homo sapiens
aaggcagccccaagttcccgaacgctggggaaggaccggccccagccctccagcacgaaggccccg

SEQ ID NO: 85131 - DNA, 70 bp, Homo sapiens
aagttcccgaacgctggggaaggaccggccccagccctccagcacgaaggccccgtcctgctgctcaatg

SEQ ID NO: 85132 - DNA, 71 bp, Homo sapiens
aaggaccggccccagccctccagcacgaaggccccgtcctgctgctcaatggggaactttcggagccgcaa

SEQ ID NO: 85133 - DNA, 79 bp, Homo sapiens
agccctccagcacgaaggccccgtcctgctgctcaatggggaactttcggagccgcaagctctgcatgccgtctggtgc

SEQ ID NO: 85134 - DNA, 81 bp, Homo sapiens
tccagcacgaaggccccgtcctgctgctcaatggggaactttcggagccgcaagctctgcatgccgtctggtgcctggcag

SEQ ID NO: 85135 - DNA, 80 bp, Homo sapiens
cccgtcctgctgctcaatggggaactttcggagccgcaagctctgcatgccgtctggtgcctggcaggaggtggcagagg

SEQ ID NO: 85136 - DNA, 82 bp, Homo sapiens
tgctcaatggggaactttcggagccgcaagctctgcatgccgtctggtgcctggcaggaggtggcagaggtgggagcagtaa

SEQ ID NO: 85137 - DNA, 79 bp, Homo sapiens
gggaactttcggagccgcaagctctgcatgccgtctggtgcctggcaggaggtggcagaggtgggagcagtaagcaggg

SEQ ID NO: 85138 - DNA, 73 bp, Homo sapiens
ccccagccccagcccccagccctgggctcacctggctacgctgggccactgtgaggatcaggcggtaggggtg

SEQ ID NO: 85139 - DNA, 76 bp, Homo sapiens
agcccccagccctgggctcacctggctacgctgggccactgtgaggatcaggcggtaggggtggctggtgctccag

SEQ ID NO: 85140 - DNA, 79 bp, Homo sapiens
cctgggctcacctggctacgctgggccactgtgaggatcaggcggtaggggtggctggtgctccagtgaatgaggtaca

SEQ ID NO: 85141 - DNA, 77 bp, Homo sapiens
acctggctacgctgggccactgtgaggatcaggcggtaggggtggctggtgctccagtgaatgaggtacaggccgtc

SEQ ID NO: 85142 - DNA, 76 bp, Homo sapiens
ctacgctgggccactgtgaggatcaggcggtaggggtggctggtgctccagtgaatgaggtacaggccgtcctcgg

SEQ ID NO: 85143 - DNA, 77 bp, Homo sapiens
actgtgaggatcaggcggtaggggtggctggtgctccagtgaatgaggtacaggccgtcctcgggccgcagcttggc

SEQ ID NO: 85144 - DNA, 77 bp, Homo sapiens
atcaggcggtaggggtggctggtgctccagtgaatgaggtacaggccgtcctcgggccgcagcttggcctgcacaaa

SEQ ID NO: 85145 - DNA, 78 bp, Homo sapiens
ggtggctggtgctccagtgaatgaggtacaggccgtcctcgggccgcagcttggcctgcacaaatggctccctggaag

SEQ ID NO: 85146 - DNA, 76 bp, Homo sapiens
ctccagtgaatgaggtacaggccgtcctcgggccgcagcttggcctgcacaaatggctccctggaaggtggtccag

SEQ ID NO: 85147 - DNA, 74 bp, Homo sapiens
gtgaatgaggtacaggccgtcctcgggccgcagcttggcctgcacaaatggctccctggaaggtggtccagggg

SEQ ID NO: 85148 - DNA, 75 bp, Homo sapiens
tacaggccgtcctcgggccgcagcttggcctgcacaaatggctccctggaaggtggtccagggggactatcaggc

SEQ ID NO: 85149 - DNA, 73 bp, Homo sapiens
tagttggcacccttggcggtggcccccagcgccccccacccagcactcacagcaggggtccgtggatcccatc

SEQ ID NO: 85150 - DNA, 76 bp, Homo sapiens
ttggcggtggcccccagcgccccccacccagcactcacagcaggggtccgtggatcccatcccggatgctcatcac

SEQ ID NO: 85151 - DNA, 75 bp, Homo sapiens
cccagcgccccccacccagcactcacagcaggggtccgtggatcccatcccggatgctcatcaccagccgtgggg

SEQ ID NO: 85152 - DNA, 76 bp, Homo sapiens
cccacccagcactcacagcaggggtccgtggatcccatcccggatgctcatcaccagccgtgggggagccacctcg

SEQ ID NO: 85153 - DNA, 77 bp, Homo sapiens
actcacagcaggggtccgtggatcccatcccggatgctcatcaccagccgtgggggagccacctcgtggcacaggta

SEQ ID NO: 85154 - DNA, 75 bp, Homo sapiens
aggggtccgtggatcccatcccggatgctcatcaccagccgtgggggagccacctcgtggcacaggtagtggctg

SEQ ID NO: 85155 - DNA, 79 bp, Homo sapiens
tggatcccatcccggatgctcatcaccagccgtgggggagccacctcgtggcacaggtagtggctggagtcggccgtca

SEQ ID NO: 85156 - DNA, 77 bp, Homo sapiens
cggatgctcatcaccagccgtgggggagccacctcgtggcacaggtagtggctggagtcggccgtcaggcggaaata

SEQ ID NO: 85157 - DNA, 74 bp, Homo sapiens
atcaccagccgtgggggagccacctcgtggcacaggtagtggctggagtcggccgtcaggcggaaatagccgtc

SEQ ID NO: 85158 - DNA, 75 bp, Homo sapiens
tgggggagccacctcgtggcacaggtagtggctggagtcggccgtcaggcggaaatagccgtccaccagcgacac

SEQ ID NO: 85159 - DNA, 75 bp, Homo sapiens
acctcgtggcacaggtagtggctggagtcggccgtcaggcggaaatagccgtccaccagcgacacgaaggacagc

SEQ ID NO: 85160 - DNA, 75 bp, Homo sapiens
acaggtagtggctggagtcggccgtcaggcggaaatagccgtccaccagcgacacgaaggacagcgccgcagccc

SEQ ID NO: 85161 - DNA, 75 bp, Homo sapiens
tagtggctggagtcggccgtcaggcggaaatagccgtccaccagcgacacgaaggacagcgccgcagcccgggaa

SEQ ID NO: 85162 - DNA, 75 bp, Homo sapiens
agtcggccgtcaggcggaaatagccgtccaccagcgacacgaaggacagcgccgcagcccgggaaggcaagctca

SEQ ID NO: 85163 - DNA, 78 bp, Homo sapiens
aggcggaaatagccgtccaccagcgacacgaaggacagcgccgcagcccgggaaggcaagctcagctcctgccagcca

SEQ ID NO: 85164 - DNA, 81 bp, Homo sapiens
tagccgtccaccagcgacacgaaggacagcgccgcagcccgggaaggcaagctcagctcctgccagccaggggcgcatcag

SEQ ID NO: 85165 - DNA, 79 bp, Homo sapiens
agcgacacgaaggacagcgccgcagcccgggaaggcaagctcagctcctgccagccaggggcgcatcaggtgggtgtcc

SEQ ID NO: 85166 - DNA, 76 bp, Homo sapiens
agctcctgccagccaggggcgcatcaggtgggtgtcctcccaggccatgatgggccctagcccagcccctaccctg

SEQ ID NO: 85167 - DNA, 76 bp, Homo sapiens
tcccaggccatgatgggccctagcccagcccctaccctgggcctcaccaggcacttgttgtcctgccggtggatgc

SEQ ID NO: 85168 - DNA, 78 bp, Homo sapiens
atgatgggccctagcccagcccctaccctgggcctcaccaggcacttgttgtcctgccggtggatgctgacacagtgc

SEQ ID NO: 85169 - DNA, 80 bp, Homo sapiens
tagcccagcccctaccctgggcctcaccaggcacttgttgtcctgccggtggatgctgacacagtgctctttcagcacca

SEQ ID NO: 85170 - DNA, 80 bp, Homo sapiens
ctaccctgggcctcaccaggcacttgttgtcctgccggtggatgctgacacagtgctctttcagcaccacgtgggtgatg

SEQ ID NO: 85171 - DNA, 79 bp, Homo sapiens
cctcaccaggcacttgttgtcctgccggtggatgctgacacagtgctctttcagcaccacgtgggtgatgtcccggaag

SEQ ID NO: 85172 - DNA, 80 bp, Homo sapiens
cacttgttgtcctgccggtggatgctgacacagtgctctttcagcaccacgtgggtgatgtcccggaagtcacagaagta

SEQ ID NO: 85173 - DNA, 80 bp, Homo sapiens
ttgtcctgccggtggatgctgacacagtgctctttcagcaccacgtgggtgatgtcccggaagtcacagaagtaggccca

SEQ ID NO: 85174 - DNA, 80 bp, Homo sapiens
cggtggatgctgacacagtgctctttcagcaccacgtgggtgatgtcccggaagtcacagaagtaggcccacagtggctc

SEQ ID NO: 85175 - DNA, 76 bp, Homo sapiens
acagtgctctttcagcaccacgtgggtgatgtcccggaagtcacagaagtaggcccacagtggctcccgcggcctg

SEQ ID NO: 85176 - DNA, 76 bp, Homo sapiens
tctttcagcaccacgtgggtgatgtcccggaagtcacagaagtaggcccacagtggctcccgcggcctgtctgccg

SEQ ID NO: 85177 - DNA, 74 bp, Homo sapiens
acgtgggtgatgtcccggaagtcacagaagtaggcccacagtggctcccgcggcctgtctgccggctggccgac

SEQ ID NO: 85178 - DNA, 79 bp, Homo sapiens
tgatgtcccggaagtcacagaagtaggcccacagtggctcccgcggcctgtctgccggctggccgactgccttgtgagc

SEQ ID NO: 85179 - DNA, 76 bp, Homo sapiens
aagtcacagaagtaggcccacagtggctcccgcggcctgtctgccggctggccgactgccttgtgagccttggcct

SEQ ID NO: 85180 - DNA, 75 bp, Homo sapiens
aagtaggcccacagtggctcccgcggcctgtctgccggctggccgactgccttgtgagccttggccttcttccca

SEQ ID NO: 85181 - DNA, 75 bp, Homo sapiens
agtggctcccgcggcctgtctgccggctggccgactgccttgtgagccttggccttcttcccaaacaggctggct

SEQ ID NO: 85182 - DNA, 73 bp, Homo sapiens
cggcctgtctgccggctggccgactgccttgtgagccttggccttcttcccaaacaggctggcttgggggttc

SEQ ID NO: 85183 - DNA, 76 bp, Homo sapiens
tctgccggctggccgactgccttgtgagccttggccttcttcccaaacaggctggcttgggggttcctgccactgc

SEQ ID NO: 85184 - DNA, 74 bp, Homo sapiens
actgccttgtgagccttggccttcttcccaaacaggctggcttgggggttcctgccactgctgccactagaacc

SEQ ID NO: 85185 - DNA, 75 bp, Homo sapiens
ttgtgagccttggccttcttcccaaacaggctggcttgggggttcctgccactgctgccactagaaccctgaaca

SEQ ID NO: 85186 - DNA, 74 bp, Homo sapiens
ttggccttcttcccaaacaggctggcttgggggttcctgccactgctgccactagaaccctgaacacccagcaa

SEQ ID NO: 85187 - DNA, 75 bp, Homo sapiens
aaacaggctggcttgggggttcctgccactgctgccactagaaccctgaacacccagcaagtggggcagaggatg

SEQ ID NO: 85188 - DNA, 68 bp, Homo sapiens
cccagcccaacctgaacccccagggcggaaggggcgccttgctcacctcctccttgttcacctcctcc

SEQ ID NO: 85189 - DNA, 75 bp, Homo sapiens
cagggcggaaggggcgccttgctcacctcctccttgttcacctcctcctctactggccaccactggatgccacca

SEQ ID NO: 85190 - DNA, 77 bp, Homo sapiens
aaggggcgccttgctcacctcctccttgttcacctcctcctctactggccaccactggatgccaccagtgcctgtca

SEQ ID NO: 85191 - DNA, 80 bp, Homo sapiens
ttgctcacctcctccttgttcacctcctcctctactggccaccactggatgccaccagtgcctgtcaccagcacctcgtg

SEQ ID NO: 85192 - DNA, 77 bp, Homo sapiens
tcctccttgttcacctcctcctctactggccaccactggatgccaccagtgcctgtcaccagcacctcgtgggttgg

SEQ ID NO: 85193 - DNA, 76 bp, Homo sapiens
gttcacctcctcctctactggccaccactggatgccaccagtgcctgtcaccagcacctcgtgggttgggggccca

SEQ ID NO: 85194 - DNA, 80 bp, Homo sapiens
tcctctactggccaccactggatgccaccagtgcctgtcaccagcacctcgtgggttgggggcccagcagcagactcagg

SEQ ID NO: 85195 - DNA, 79 bp, Homo sapiens
cactggatgccaccagtgcctgtcaccagcacctcgtgggttgggggcccagcagcagactcagggccagggtctgtag

SEQ ID NO: 85196 - DNA, 77 bp, Homo sapiens
atgccaccagtgcctgtcaccagcacctcgtgggttgggggcccagcagcagactcagggccagggtctgtaggggc

SEQ ID NO: 85197 - DNA, 70 bp, Homo sapiens
acctcgtgggttgggggcccagcagcagactcagggccagggtctgtaggggccaccccactgtcccgga

SEQ ID NO: 85198 - DNA, 74 bp, Homo sapiens
ttgggggcccagcagcagactcagggccagggtctgtaggggccaccccactgtcccggatgtagcagggctcc

SEQ ID NO: 85199 - DNA, 73 bp, Homo sapiens
agcagcagactcagggccagggtctgtaggggccaccccactgtcccggatgtagcagggctccccctcggcc

SEQ ID NO: 85200 - DNA, 70 bp, Homo sapiens
agactcagggccagggtctgtaggggccaccccactgtcccggatgtagcagggctccccctcggcctgg

SEQ ID NO: 85201 - DNA, 72 bp, Homo sapiens
agggtctgtaggggccaccccactgtcccggatgtagcagggctccccctcggcctgggccagcagcctcag

SEQ ID NO: 85202 - DNA, 76 bp, Homo sapiens
ggccaccccactgtcccggatgtagcagggctccccctcggcctgggccagcagcctcaggtggcacacgggcaca

SEQ ID NO: 85203 - DNA, 78 bp, Homo sapiens
actgtcccggatgtagcagggctccccctcggcctgggccagcagcctcaggtggcacacgggcacacgctctgtgcc

SEQ ID NO: 85204 - DNA, 78 bp, Homo sapiens
ccggatgtagcagggctccccctcggcctgggccagcagcctcaggtggcacacgggcacacgctctgtgccgaagcg

SEQ ID NO: 85205 - DNA, 81 bp, Homo sapiens
gcctgggccagcagcctcaggtggcacacgggcacacgctctgtgccgaagcggggtgccagccgctcgagtgtggctagg

SEQ ID NO: 85206 - DNA, 80 bp, Homo sapiens
agcagcctcaggtggcacacgggcacacgctctgtgccgaagcggggtgccagccgctcgagtgtggctaggtatttgac

SEQ ID NO: 85207 - DNA, 79 bp, Homo sapiens
aggtggcacacgggcacacgctctgtgccgaagcggggtgccagccgctcgagtgtggctaggtatttgaccatgacca

SEQ ID NO: 85208 - DNA, 80 bp, Homo sapiens
acacgggcacacgctctgtgccgaagcggggtgccagccgctcgagtgtggctaggtatttgaccatgaccatctgctgg

SEQ ID NO: 85209 - DNA, 80 bp, Homo sapiens
acgctctgtgccgaagcggggtgccagccgctcgagtgtggctaggtatttgaccatgaccatctgctgggagagtcggc

SEQ ID NO: 85210 - DNA, 77 bp, Homo sapiens
aagcggggtgccagccgctcgagtgtggctaggtatttgaccatgaccatctgctgggagagtcggcccggctggaa

SEQ ID NO: 85211 - DNA, 77 bp, Homo sapiens
agccgctcgagtgtggctaggtatttgaccatgaccatctgctgggagagtcggcccggctggaagtcccgcaggaa

SEQ ID NO: 85212 - DNA, 76 bp, Homo sapiens
gtgtggctaggtatttgaccatgaccatctgctgggagagtcggcccggctggaagtcccgcaggaacctgcggaa

SEQ ID NO: 85213 - DNA, 74 bp, Homo sapiens
taggtatttgaccatgaccatctgctgggagagtcggcccggctggaagtcccgcaggaacctgcggaagacgt

SEQ ID NO: 85214 - DNA, 73 bp, Homo sapiens
accatgaccatctgctgggagagtcggcccggctggaagtcccgcaggaacctgcggaagacgttccgaaggc

SEQ ID NO: 85215 - DNA, 73 bp, Homo sapiens
tgctgggagagtcggcccggctggaagtcccgcaggaacctgcggaagacgttccgaaggcgcagccgggtca

SEQ ID NO: 85216 - DNA, 70 bp, Homo sapiens
agagtcggcccggctggaagtcccgcaggaacctgcggaagacgttccgaaggcgcagccgggtcagggc

SEQ ID NO: 85217 - DNA, 76 bp, Homo sapiens
tggaagtcccgcaggaacctgcggaagacgttccgaaggcgcagccgggtcagggcgctgtgctgccggatatgcc

SEQ ID NO: 85218 - DNA, 76 bp, Homo sapiens
gcaggaacctgcggaagacgttccgaaggcgcagccgggtcagggcgctgtgctgccggatatgccggcggaagga

SEQ ID NO: 85219 - DNA, 75 bp, Homo sapiens
aacctgcggaagacgttccgaaggcgcagccgggtcagggcgctgtgctgccggatatgccggcggaaggagcgc

SEQ ID NO: 85220 - DNA, 78 bp, Homo sapiens
aaggcgcagccgggtcagggcgctgtgctgccggatatgccggcggaaggagcgcgggatgcagtccttgaagctggg

SEQ ID NO: 85221 - DNA, 79 bp, Homo sapiens
gtcagggcgctgtgctgccggatatgccggcggaaggagcgcgggatgcagtccttgaagctggggggaaacacagtga

SEQ ID NO: 85222 - DNA, 74 bp, Homo sapiens
atatgccggcggaaggagcgcgggatgcagtccttgaagctggggggaaacacagtgaggggctggtcagggac

SEQ ID NO: 85223 - DNA, 70 bp, Homo sapiens
aggacatttccccctgcctacacagcgtccccaccccattcccagacacctggtcttcttggccacctcc

SEQ ID NO: 85224 - DNA, 74 bp, Homo sapiens
ctgcctacacagcgtccccaccccattcccagacacctggtcttcttggccacctcctccagggggatgccatg

SEQ ID NO: 85225 - DNA, 74 bp, Homo sapiens
tacacagcgtccccaccccattcccagacacctggtcttcttggccacctcctccagggggatgccatggcgga

SEQ ID NO: 85226 - DNA, 75 bp, Homo sapiens
accccattcccagacacctggtcttcttggccacctcctccagggggatgccatggcggagagcgaggtgacaga

SEQ ID NO: 85227 - DNA, 78 bp, Homo sapiens
ttcccagacacctggtcttcttggccacctcctccagggggatgccatggcggagagcgaggtgacagaggtgcagaa

SEQ ID NO: 85228 - DNA, 79 bp, Homo sapiens
ctggtcttcttggccacctcctccagggggatgccatggcggagagcgaggtgacagaggtgcagaaaggccatgccca

SEQ ID NO: 85229 - DNA, 80 bp, Homo sapiens
cacctcctccagggggatgccatggcggagagcgaggtgacagaggtgcagaaaggccatgcccaggctctcattcttaa

SEQ ID NO: 85230 - DNA, 79 bp, Homo sapiens
agggggatgccatggcggagagcgaggtgacagaggtgcagaaaggccatgcccaggctctcattcttaaagtggtgga

SEQ ID NO: 85231 - DNA, 81 bp, Homo sapiens
atgccatggcggagagcgaggtgacagaggtgcagaaaggccatgcccaggctctcattcttaaagtggtggatctcctcc

SEQ ID NO: 85232 - DNA, 79 bp, Homo sapiens
agagcgaggtgacagaggtgcagaaaggccatgcccaggctctcattcttaaagtggtggatctcctcctcggtcgaca

SEQ ID NO: 85233 - DNA, 78 bp, Homo sapiens
acagaggtgcagaaaggccatgcccaggctctcattcttaaagtggtggatctcctcctcggtcgacagctcccacag

SEQ ID NO: 85234 - DNA, 78 bp, Homo sapiens
agaaaggccatgcccaggctctcattcttaaagtggtggatctcctcctcggtcgacagctcccacagtgatgccacg

SEQ ID NO: 85235 - DNA, 80 bp, Homo sapiens
atgcccaggctctcattcttaaagtggtggatctcctcctcggtcgacagctcccacagtgatgccacgtcattcacaaa

SEQ ID NO: 85236 - DNA, 81 bp, Homo sapiens
tcattcttaaagtggtggatctcctcctcggtcgacagctcccacagtgatgccacgtcattcacaaactcatgcttgccc

SEQ ID NO: 85237 - DNA, 80 bp, Homo sapiens
ttaaagtggtggatctcctcctcggtcgacagctcccacagtgatgccacgtcattcacaaactcatgcttgccctggga

SEQ ID NO: 85238 - DNA, 80 bp, Homo sapiens
atctcctcctcggtcgacagctcccacagtgatgccacgtcattcacaaactcatgcttgccctgggaacaggaaattga

SEQ ID NO: 85239 - DNA, 80 bp, Homo sapiens
cctcggtcgacagctcccacagtgatgccacgtcattcacaaactcatgcttgccctgggaacaggaaattgagcagaaa

SEQ ID NO: 85240 - DNA, 80 bp, Homo sapiens
tcccacagtgatgccacgtcattcacaaactcatgcttgccctgggaacaggaaattgagcagaaagggaggtgtgagaa

SEQ ID NO: 85241 - DNA, 76 bp, Homo sapiens
ccctaagtctcccacaaatagtcttgccaccccagccctgctcatacctgctcaaagaggtactcaaatgaggctg

SEQ ID NO: 85242 - DNA, 76 bp, Homo sapiens
ccacaaatagtcttgccaccccagccctgctcatacctgctcaaagaggtactcaaatgaggctgggtccaggagt

SEQ ID NO: 85243 - DNA, 78 bp, Homo sapiens
aatagtcttgccaccccagccctgctcatacctgctcaaagaggtactcaaatgaggctgggtccaggagttgcatcc

SEQ ID NO: 85244 - DNA, 83 bp, Homo sapiens
ccagccctgctcatacctgctcaaagaggtactcaaatgaggctgggtccaggagttgcatcccctgtgctgtctgatctgag

SEQ ID NO: 85245 - DNA, 83 bp, Homo sapiens
tcatacctgctcaaagaggtactcaaatgaggctgggtccaggagttgcatcccctgtgctgtctgatctgaggatgcctcgg

SEQ ID NO: 85246 - DNA, 80 bp, Homo sapiens
tcaaagaggtactcaaatgaggctgggtccaggagttgcatcccctgtgctgtctgatctgaggatgcctcggttcctgg

SEQ ID NO: 85247 - DNA, 78 bp, Homo sapiens
aggtactcaaatgaggctgggtccaggagttgcatcccctgtgctgtctgatctgaggatgcctcggttcctgggggc

SEQ ID NO: 85248 - DNA, 76 bp, Homo sapiens
aggctgggtccaggagttgcatcccctgtgctgtctgatctgaggatgcctcggttcctgggggcccacaacggta

SEQ ID NO: 85249 - DNA, 75 bp, Homo sapiens
aggagttgcatcccctgtgctgtctgatctgaggatgcctcggttcctgggggcccacaacggtacacagccggt

SEQ ID NO: 85250 - DNA, 73 bp, Homo sapiens
atcccctgtgctgtctgatctgaggatgcctcggttcctgggggcccacaacggtacacagccggttcccgag

SEQ ID NO: 85251 - DNA, 78 bp, Homo sapiens
tgtctgatctgaggatgcctcggttcctgggggcccacaacggtacacagccggttcccgaggattcatgccatgcca

SEQ ID NO: 85252 - DNA, 74 bp, Homo sapiens
atctgaggatgcctcggttcctgggggcccacaacggtacacagccggttcccgaggattcatgccatgccagt

SEQ ID NO: 85253 - DNA, 71 bp, Homo sapiens
tcggttcctgggggcccacaacggtacacagccggttcccgaggattcatgccatgccagttccggaaata

SEQ ID NO: 85254 - DNA, 72 bp, Homo sapiens
gggcccacaacggtacacagccggttcccgaggattcatgccatgccagttccggaaataaaacctgcagga

SEQ ID NO: 85255 - DNA, 71 bp, Homo sapiens
acaacggtacacagccggttcccgaggattcatgccatgccagttccggaaataaaacctgcaggaaggag

SEQ ID NO: 85256 - DNA, 73 bp, Homo sapiens
acagccggttcccgaggattcatgccatgccagttccggaaataaaacctgcaggaaggagggacgcagctgg

SEQ ID NO: 85257 - DNA, 80 bp, Homo sapiens
agcttcagcacaggaggggacgagctttgcaaaggtctccacccaccttatgcggaaatatagcatcaggcttgcatctc

SEQ ID NO: 85258 - DNA, 78 bp, Homo sapiens
agcacaggaggggacgagctttgcaaaggtctccacccaccttatgcggaaatatagcatcaggcttgcatctctggg

SEQ ID NO: 85259 - DNA, 80 bp, Homo sapiens
acgagctttgcaaaggtctccacccaccttatgcggaaatatagcatcaggcttgcatctctggggatctctaggatgtg

SEQ ID NO: 85260 - DNA, 79 bp, Homo sapiens
tttgcaaaggtctccacccaccttatgcggaaatatagcatcaggcttgcatctctggggatctctaggatgtggtttg

SEQ ID NO: 85261 - DNA, 77 bp, Homo sapiens
acccaccttatgcggaaatatagcatcaggcttgcatctctggggatctctaggatgtggtttgggggcaaccagac

SEQ ID NO: 85262 - DNA, 80 bp, Homo sapiens
ttatgcggaaatatagcatcaggcttgcatctctggggatctctaggatgtggtttgggggcaaccagacttgggcctga

SEQ ID NO: 85263 - DNA, 80 bp, Homo sapiens
aaatatagcatcaggcttgcatctctggggatctctaggatgtggtttgggggcaaccagacttgggcctgagcatcgaa

SEQ ID NO: 85264 - DNA, 77 bp, Homo sapiens
aggcttgcatctctggggatctctaggatgtggtttgggggcaaccagacttgggcctgagcatcgaagagggcaaa

SEQ ID NO: 85265 - DNA, 77 bp, Homo sapiens
atctctggggatctctaggatgtggtttgggggcaaccagacttgggcctgagcatcgaagagggcaaagagattga

SEQ ID NO: 85266 - DNA, 76 bp, Homo sapiens
atctctaggatgtggtttgggggcaaccagacttgggcctgagcatcgaagagggcaaagagattgaagcaaggag

SEQ ID NO: 85267 - DNA, 78 bp, Homo sapiens
tttgggggcaaccagacttgggcctgagcatcgaagagggcaaagagattgaagcaaggaggagtgatacctggatca

SEQ ID NO: 85268 - DNA, 78 bp, Homo sapiens
aaccagacttgggcctgagcatcgaagagggcaaagagattgaagcaaggaggagtgatacctggatcaggtgagaaa

SEQ ID NO: 85269 - DNA, 77 bp, Homo sapiens
acttgggcctgagcatcgaagagggcaaagagattgaagcaaggaggagtgatacctggatcaggtgagaaacgagg

SEQ ID NO: 85270 - DNA, 78 bp, Homo sapiens
atcgaagagggcaaagagattgaagcaaggaggagtgatacctggatcaggtgagaaacgaggtcaggagtcacgtca

SEQ ID NO: 85271 - DNA, 78 bp, Homo sapiens
ttgcacacccaccccagtccccatggtgccaacgccccagactcaccaactttatgtgcaatgtggatgcagacttcc

SEQ ID NO: 85272 - DNA, 80 bp, Homo sapiens
accccagtccccatggtgccaacgccccagactcaccaactttatgtgcaatgtggatgcagacttcctcagctgtcagc

SEQ ID NO: 85273 - DNA, 85 bp, Homo sapiens
ccatggtgccaacgccccagactcaccaactttatgtgcaatgtggatgcagacttcctcagctgtcagcgatgactcactgaaa

SEQ ID NO: 85274 - DNA, 83 bp, Homo sapiens
aacgccccagactcaccaactttatgtgcaatgtggatgcagacttcctcagctgtcagcgatgactcactgaaagtgaccca

SEQ ID NO: 85275 - DNA, 83 bp, Homo sapiens
agactcaccaactttatgtgcaatgtggatgcagacttcctcagctgtcagcgatgactcactgaaagtgacccagggctccc

SEQ ID NO: 85276 - DNA, 81 bp, Homo sapiens
aactttatgtgcaatgtggatgcagacttcctcagctgtcagcgatgactcactgaaagtgacccagggctccccgccgcc

SEQ ID NO: 85277 - DNA, 81 bp, Homo sapiens
aatgtggatgcagacttcctcagctgtcagcgatgactcactgaaagtgacccagggctccccgccgcctggaccagccca

SEQ ID NO: 85278 - DNA, 82 bp, Homo sapiens
atgcagacttcctcagctgtcagcgatgactcactgaaagtgacccagggctccccgccgcctggaccagcccagtgcagaa

SEQ ID NO: 85279 - DNA, 82 bp, Homo sapiens
tcctcagctgtcagcgatgactcactgaaagtgacccagggctccccgccgcctggaccagcccagtgcagaagcaccttca

SEQ ID NO: 85280 - DNA, 78 bp, Homo sapiens
gatgactcactgaaagtgacccagggctccccgccgcctggaccagcccagtgcagaagcaccttcaggcctcccatg

SEQ ID NO: 85281 - DNA, 79 bp, Homo sapiens
tcactgaaagtgacccagggctccccgccgcctggaccagcccagtgcagaagcaccttcaggcctcccatggcagcca

SEQ ID NO: 85282 - DNA, 78 bp, Homo sapiens
gtgacccagggctccccgccgcctggaccagcccagtgcagaagcaccttcaggcctcccatggcagccatgggctgg

SEQ ID NO: 85283 - DNA, 78 bp, Homo sapiens
ccgccgcctggaccagcccagtgcagaagcaccttcaggcctcccatggcagccatgggctgggctccatccccaacg

SEQ ID NO: 85284 - DNA, 80 bp, Homo sapiens
tggaccagcccagtgcagaagcaccttcaggcctcccatggcagccatgggctgggctccatccccaacgggcttactgc

SEQ ID NO: 85285 - DNA, 78 bp, Homo sapiens
agtgcagaagcaccttcaggcctcccatggcagccatgggctgggctccatccccaacgggcttactgcccctggcca

SEQ ID NO: 85286 - DNA, 75 bp, Homo sapiens
aagcaccttcaggcctcccatggcagccatgggctgggctccatccccaacgggcttactgcccctggccatccc

SEQ ID NO: 85287 - DNA, 78 bp, Homo sapiens
ctcccatggcagccatgggctgggctccatccccaacgggcttactgcccctggccatcccccagtggcgcagaggca

SEQ ID NO: 85288 - DNA, 76 bp, Homo sapiens
agccatgggctgggctccatccccaacgggcttactgcccctggccatcccccagtggcgcagaggcatgctcccg

SEQ ID NO: 85289 - DNA, 78 bp, Homo sapiens
tgggctccatccccaacgggcttactgcccctggccatcccccagtggcgcagaggcatgctcccggcaggtggctca

SEQ ID NO: 85290 - DNA, 77 bp, Homo sapiens
atccccaacgggcttactgcccctggccatcccccagtggcgcagaggcatgctcccggcaggtggctcagctggaa

SEQ ID NO: 85291 - DNA, 76 bp, Homo sapiens
acgggcttactgcccctggccatcccccagtggcgcagaggcatgctcccggcaggtggctcagctggaaagggga

SEQ ID NO: 85292 - DNA, 80 bp, Homo sapiens
ctggccatcccccagtggcgcagaggcatgctcccggcaggtggctcagctggaaaggggacaatctgtcagctcccaag

SEQ ID NO: 85293 - DNA, 74 bp, Homo sapiens
cttaacacacctccccaaaataaccagacaggcagatgtggtcaaacatacctgagggtgagtcctggagctcc

SEQ ID NO: 85294 - DNA, 78 bp, Homo sapiens
ccaaaataaccagacaggcagatgtggtcaaacatacctgagggtgagtcctggagctccctgtgtcaactcaagcaa

SEQ ID NO: 85295 - DNA, 80 bp, Homo sapiens
agacaggcagatgtggtcaaacatacctgagggtgagtcctggagctccctgtgtcaactcaagcaagccacttagcaat

SEQ ID NO: 85296 - DNA, 79 bp, Homo sapiens
agatgtggtcaaacatacctgagggtgagtcctggagctccctgtgtcaactcaagcaagccacttagcaattctgggc

SEQ ID NO: 85297 - DNA, 78 bp, Homo sapiens
gtcaaacatacctgagggtgagtcctggagctccctgtgtcaactcaagcaagccacttagcaattctgggcctcagt

SEQ ID NO: 85298 - DNA, 71 bp, Homo sapiens
agtttccccatctggaaaagggaggtcctcagggtgttgccatcaaaagatggttgtaatgtttcaatata

SEQ ID NO: 85299 - DNA, 74 bp, Homo sapiens
tctggaaaagggaggtcctcagggtgttgccatcaaaagatggttgtaatgtttcaatatagttccgcatatta

SEQ ID NO: 85300 - DNA, 73 bp, Homo sapiens
aaagggaggtcctcagggtgttgccatcaaaagatggttgtaatgtttcaatatagttccgcatattacacat

SEQ ID NO: 85301 - DNA, 79 bp, Homo sapiens
agggtgttgccatcaaaagatggttgtaatgtttcaatatagttccgcatattacacattcagcacagaccctgattca

SEQ ID NO: 85302 - DNA, 81 bp, Homo sapiens
catcaaaagatggttgtaatgtttcaatatagttccgcatattacacattcagcacagaccctgattcaggcacacacaaa

SEQ ID NO: 85303 - DNA, 78 bp, Homo sapiens
aaagatggttgtaatgtttcaatatagttccgcatattacacattcagcacagaccctgattcaggcacacacaaaaa

SEQ ID NO: 85304 - DNA, 80 bp, Homo sapiens
taatgtttcaatatagttccgcatattacacattcagcacagaccctgattcaggcacacacaaaaagaacaaatatgac

SEQ ID NO: 85305 - DNA, 68 bp, Homo sapiens
aaaacctctaaacccggccggcaacggcgggaactgggatgtgcacccaccgggcatcggagcagtcc

SEQ ID NO: 85306 - DNA, 70 bp, Homo sapiens
aaacccggccggcaacggcgggaactgggatgtgcacccaccgggcatcggagcagtcccgaggcaccag

SEQ ID NO: 85307 - DNA, 76 bp, Homo sapiens
aacggcgggaactgggatgtgcacccaccgggcatcggagcagtcccgaggcaccaggtgctcccatccaagtgca

SEQ ID NO: 85308 - DNA, 81 bp, Homo sapiens
aactgggatgtgcacccaccgggcatcggagcagtcccgaggcaccaggtgctcccatccaagtgcagcctgtcaagcgca

SEQ ID NO: 85309 - DNA, 82 bp, Homo sapiens
tgtgcacccaccgggcatcggagcagtcccgaggcaccaggtgctcccatccaagtgcagcctgtcaagcgcagccagtccc

SEQ ID NO: 85310 - DNA, 80 bp, Homo sapiens
catcggagcagtcccgaggcaccaggtgctcccatccaagtgcagcctgtcaagcgcagccagtccccgcggcttcttcc

SEQ ID NO: 85311 - DNA, 80 bp, Homo sapiens
agcagtcccgaggcaccaggtgctcccatccaagtgcagcctgtcaagcgcagccagtccccgcggcttcttcctgagga

SEQ ID NO: 85312 - DNA, 78 bp, Homo sapiens
aggcaccaggtgctcccatccaagtgcagcctgtcaagcgcagccagtccccgcggcttcttcctgaggacctccggc

SEQ ID NO: 85313 - DNA, 77 bp, Homo sapiens
tcccatccaagtgcagcctgtcaagcgcagccagtccccgcggcttcttcctgaggacctccggccgcgctccttcc

SEQ ID NO: 85314 - DNA, 75 bp, Homo sapiens
aagtgcagcctgtcaagcgcagccagtccccgcggcttcttcctgaggacctccggccgcgctccttccgcgccc

SEQ ID NO: 85315 - DNA, 76 bp, Homo sapiens
tcaagcgcagccagtccccgcggcttcttcctgaggacctccggccgcgctccttccgcgcccgcgtccagactca

SEQ ID NO: 85316 - DNA, 71 bp, Homo sapiens
cagtccccgcggcttcttcctgaggacctccggccgcgctccttccgcgcccgcgtccagactcacccttc

SEQ ID NO: 85317 - DNA, 69 bp, Homo sapiens
ccgcggcttcttcctgaggacctccggccgcgctccttccgcgcccgcgtccagactcacccttccggg

SEQ ID NO: 85318 - DNA, 71 bp, Homo sapiens
tgaggacctccggccgcgctccttccgcgcccgcgtccagactcacccttccgggggaacacaagctcgaa

SEQ ID NO: 85319 - DNA, 69 bp, Homo sapiens
tccggccgcgctccttccgcgcccgcgtccagactcacccttccgggggaacacaagctcgaacccgga

SEQ ID NO: 85320 - DNA, 66 bp, Homo sapiens
ctccttccgcgcccgcgtccagactcacccttccgggggaacacaagctcgaacccggacccctcc

SEQ ID NO: 85321 - DNA, 66 bp, Homo sapiens
cgcgcccgcgtccagactcacccttccgggggaacacaagctcgaacccggacccctccccgctcc

SEQ ID NO: 85322 - DNA, 65 bp, Homo sapiens
agactcacccttccgggggaacacaagctcgaacccggacccctccccgctcccgcgggtagcta

SEQ ID NO: 85323 - DNA, 66 bp, Homo sapiens
ccttccgggggaacacaagctcgaacccggacccctccccgctcccgcgggtagctactgcttgtc

SEQ ID NO: 85324 - DNA, 67 bp, Homo sapiens
aacacaagctcgaacccggacccctccccgctcccgcgggtagctactgcttgtcccccgccgagac

SEQ ID NO: 85325 - DNA, 66 bp, Homo sapiens
acccggacccctccccgctcccgcgggtagctactgcttgtcccccgccgagacgcctcctcccat

SEQ ID NO: 85326 - DNA, 70 bp, Homo sapiens
ctccccgctcccgcgggtagctactgcttgtcccccgccgagacgcctcctcccattggccgcctgaaac

SEQ ID NO: 85327 - DNA, 72 bp, Homo sapiens
ccgcgggtagctactgcttgtcccccgccgagacgcctcctcccattggccgcctgaaacgcacacgcccat

SEQ ID NO: 85328 - DNA, 77 bp, Homo sapiens
ggtagctactgcttgtcccccgccgagacgcctcctcccattggccgcctgaaacgcacacgcccattggcagctgc

SEQ ID NO: 85329 - DNA, 74 bp, Homo sapiens
acacaccctctgaggctccccatcgccccaagtccagcacaaaatcttttccactgaattcctttattcagtca

SEQ ID NO: 85330 - DNA, 73 bp, Homo sapiens
tgaggctccccatcgccccaagtccagcacaaaatcttttccactgaattcctttattcagtcaacaaacatt

SEQ ID NO: 85331 - DNA, 73 bp, Homo sapiens
cccatcgccccaagtccagcacaaaatcttttccactgaattcctttattcagtcaacaaacatttccagagc

SEQ ID NO: 85332 - DNA, 72 bp, Homo sapiens
aagtccagcacaaaatcttttccactgaattcctttattcagtcaacaaacatttccagagccccctctgta

SEQ ID NO: 85333 - DNA, 72 bp, Homo sapiens
aaaatcttttccactgaattcctttattcagtcaacaaacatttccagagccccctctgtactgaggcctca

SEQ ID NO: 85334 - DNA, 74 bp, Homo sapiens
ttttccactgaattcctttattcagtcaacaaacatttccagagccccctctgtactgaggcctcagcccagcc

SEQ ID NO: 85335 - DNA, 72 bp, Homo sapiens
aattcctttattcagtcaacaaacatttccagagccccctctgtactgaggcctcagcccagcccccaagga

SEQ ID NO: 85336 - DNA, 72 bp, Homo sapiens
agtcaacaaacatttccagagccccctctgtactgaggcctcagcccagcccccaaggaaccctgaggtcag

SEQ ID NO: 85337 - DNA, 71 bp, Homo sapiens
aaacatttccagagccccctctgtactgaggcctcagcccagcccccaaggaaccctgaggtcaggggaga

SEQ ID NO: 85338 - DNA, 75 bp, Homo sapiens
agagccccctctgtactgaggcctcagcccagcccccaaggaaccctgaggtcaggggagacagctggacacaga

SEQ ID NO: 85339 - DNA, 76 bp, Homo sapiens
tctgtactgaggcctcagcccagcccccaaggaaccctgaggtcaggggagacagctggacacagacacttcccca

SEQ ID NO: 85340 - DNA, 72 bp, Homo sapiens
cctcagcccagcccccaaggaaccctgaggtcaggggagacagctggacacagacacttccccagccccagg

SEQ ID NO: 85341 - DNA, 71 bp, Homo sapiens
ccccaaggaaccctgaggtcaggggagacagctggacacagacacttccccagccccagggccagagtggg

SEQ ID NO: 85342 - DNA, 73 bp, Homo sapiens
aaccctgaggtcaggggagacagctggacacagacacttccccagccccagggccagagtggggctggaggga

SEQ ID NO: 85343 - DNA, 73 bp, Homo sapiens
aggggagacagctggacacagacacttccccagccccagggccagagtggggctggagggaaggacagggcta

SEQ ID NO: 85344 - DNA, 74 bp, Homo sapiens
acagctggacacagacacttccccagccccagggccagagtggggctggagggaaggacagggctacagtagta

SEQ ID NO: 85345 - DNA, 70 bp, Homo sapiens
acagacacttccccagccccagggccagagtggggctggagggaaggacagggctacagtagtagtgggg

SEQ ID NO: 85346 - DNA, 70 bp, Homo sapiens
agccccagggccagagtggggctggagggaaggacagggctacagtagtagtgggggtatatgagggaag

SEQ ID NO: 85347 - DNA, 75 bp, Homo sapiens
gctggagggaaggacagggctacagtagtagtgggggtatatgagggaaggctgcaaggatgtggtagctggagt

SEQ ID NO: 85348 - DNA, 75 bp, Homo sapiens
aaggacagggctacagtagtagtgggggtatatgagggaaggctgcaaggatgtggtagctggagttttgagaga

SEQ ID NO: 85349 - DNA, 76 bp, Homo sapiens
tacagtagtagtgggggtatatgagggaaggctgcaaggatgtggtagctggagttttgagagatggataagagtt

SEQ ID NO: 85350 - DNA, 76 bp, Homo sapiens
tagtagtgggggtatatgagggaaggctgcaaggatgtggtagctggagttttgagagatggataagagttttcca

SEQ ID NO: 85351 - DNA, 76 bp, Homo sapiens
gtatatgagggaaggctgcaaggatgtggtagctggagttttgagagatggataagagttttccaaggaggcaaaa

SEQ ID NO: 85352 - DNA, 75 bp, Homo sapiens
aaggctgcaaggatgtggtagctggagttttgagagatggataagagttttccaaggaggcaaaagtggcagaaa

SEQ ID NO: 85353 - DNA, 77 bp, Homo sapiens
gagatggataagagttttccaaggaggcaaaagtggcagaaaagctttgcaggtgaggaggagcagcagaagcttaa

SEQ ID NO: 85354 - DNA, 78 bp, Homo sapiens
tttccaaggaggcaaaagtggcagaaaagctttgcaggtgaggaggagcagcagaagcttaacctgcatgagaatccc

SEQ ID NO: 85355 - DNA, 80 bp, Homo sapiens
aaagtggcagaaaagctttgcaggtgaggaggagcagcagaagcttaacctgcatgagaatccctctcaccagtcagaaa

SEQ ID NO: 85356 - DNA, 79 bp, Homo sapiens
agaaaagctttgcaggtgaggaggagcagcagaagcttaacctgcatgagaatccctctcaccagtcagaaagttgacc

SEQ ID NO: 85357 - DNA, 83 bp, Homo sapiens
tttgcaggtgaggaggagcagcagaagcttaacctgcatgagaatccctctcaccagtcagaaagttgaccctgcacagccaa

SEQ ID NO: 85358 - DNA, 82 bp, Homo sapiens
gagcagcagaagcttaacctgcatgagaatccctctcaccagtcagaaagttgaccctgcacagccaaggggtaagctctga

SEQ ID NO: 85359 - DNA, 77 bp, Homo sapiens
aagcttaacctgcatgagaatccctctcaccagtcagaaagttgaccctgcacagccaaggggtaagctctgaccat

SEQ ID NO: 85360 - DNA, 78 bp, Homo sapiens
aacctgcatgagaatccctctcaccagtcagaaagttgaccctgcacagccaaggggtaagctctgaccattttgcag

SEQ ID NO: 85361 - DNA, 75 bp, Homo sapiens
aatccctctcaccagtcagaaagttgaccctgcacagccaaggggtaagctctgaccattttgcaggggacagaa

SEQ ID NO: 85362 - DNA, 75 bp, Homo sapiens
accagtcagaaagttgaccctgcacagccaaggggtaagctctgaccattttgcaggggacagaactgagaccca

SEQ ID NO: 85363 - DNA, 72 bp, Homo sapiens
acagccaaggggtaagctctgaccattttgcaggggacagaactgagacccagagagggaaaggaacttgcc

SEQ ID NO: 85364 - DNA, 77 bp, Homo sapiens
ggtaagctctgaccattttgcaggggacagaactgagacccagagagggaaaggaacttgcccactgtcacactgca

SEQ ID NO: 85365 - DNA, 77 bp, Homo sapiens
ctctgaccattttgcaggggacagaactgagacccagagagggaaaggaacttgcccactgtcacactgcatggaag

SEQ ID NO: 85366 - DNA, 75 bp, Homo sapiens
ttttgcaggggacagaactgagacccagagagggaaaggaacttgcccactgtcacactgcatggaaggggcaaa

SEQ ID NO: 85367 - DNA, 75 bp, Homo sapiens
cagagagggaaaggaacttgcccactgtcacactgcatggaaggggcaaaactgtaggctccaatacttgggctc

SEQ ID NO: 85368 - DNA, 76 bp, Homo sapiens
ttgcccactgtcacactgcatggaaggggcaaaactgtaggctccaatacttgggctcttaacctccttactctga

SEQ ID NO: 85369 - DNA, 74 bp, Homo sapiens
aaaactgtaggctccaatacttgggctcttaacctccttactctgagccttctcacgcttggcatgctgttccc

SEQ ID NO: 85370 - DNA, 77 bp, Homo sapiens
aggctccaatacttgggctcttaacctccttactctgagccttctcacgcttggcatgctgttccctctgccaggaa

SEQ ID NO: 85371 - DNA, 77 bp, Homo sapiens
ttgggctcttaacctccttactctgagccttctcacgcttggcatgctgttccctctgccaggaatgcctttccttc

SEQ ID NO: 85372 - DNA, 76 bp, Homo sapiens
ttaacctccttactctgagccttctcacgcttggcatgctgttccctctgccaggaatgcctttccttcccttgat

SEQ ID NO: 85373 - DNA, 76 bp, Homo sapiens
tcacgcttggcatgctgttccctctgccaggaatgcctttccttcccttgattgcgtgaaaagttcctgccaggtt

SEQ ID NO: 85374 - DNA, 75 bp, Homo sapiens
atgctgttccctctgccaggaatgcctttccttcccttgattgcgtgaaaagttcctgccaggtttggtgtcatc

SEQ ID NO: 85375 - DNA, 74 bp, Homo sapiens
ctctgccaggaatgcctttccttcccttgattgcgtgaaaagttcctgccaggtttggtgtcatccctttgtgc

SEQ ID NO: 85376 - DNA, 71 bp, Homo sapiens
ccaggaatgcctttccttcccttgattgcgtgaaaagttcctgccaggtttggtgtcatccctttgtgccc

SEQ ID NO: 85377 - DNA, 71 bp, Homo sapiens
ttccttcccttgattgcgtgaaaagttcctgccaggtttggtgtcatccctttgtgccccttgtagggtga

SEQ ID NO: 85378 - DNA, 72 bp, Homo sapiens
cttgattgcgtgaaaagttcctgccaggtttggtgtcatccctttgtgccccttgtagggtgaggacagaaa

SEQ ID NO: 85379 - DNA, 68 bp, Homo sapiens
aaaagttcctgccaggtttggtgtcatccctttgtgccccttgtagggtgaggacagaaagggtccca

SEQ ID NO: 85380 - DNA, 69 bp, Homo sapiens
aggtttggtgtcatccctttgtgccccttgtagggtgaggacagaaagggtcccattggacaggtggga

SEQ ID NO: 85381 - DNA, 69 bp, Homo sapiens
tttgtgccccttgtagggtgaggacagaaagggtcccattggacaggtgggaaaactgaagccctagga

SEQ ID NO: 85382 - DNA, 72 bp, Homo sapiens
tagggtgaggacagaaagggtcccattggacaggtgggaaaactgaagccctaggacactcagataccatta

SEQ ID NO: 85383 - DNA, 70 bp, Homo sapiens
acagaaagggtcccattggacaggtgggaaaactgaagccctaggacactcagataccattagggtggac

SEQ ID NO: 85384 - DNA, 70 bp, Homo sapiens
aagggtcccattggacaggtgggaaaactgaagccctaggacactcagataccattagggtggactggga

SEQ ID NO: 85385 - DNA, 70 bp, Homo sapiens
ttggacaggtgggaaaactgaagccctaggacactcagataccattagggtggactgggaccccagcctt

SEQ ID NO: 85386 - DNA, 69 bp, Homo sapiens
gggaaaactgaagccctaggacactcagataccattagggtggactgggaccccagcctttcctgcccc

SEQ ID NO: 85387 - DNA, 70 bp, Homo sapiens
ctaggacactcagataccattagggtggactgggaccccagcctttcctgccccctttcaggatcccaaa

SEQ ID NO: 85388 - DNA, 71 bp, Homo sapiens
acactcagataccattagggtggactgggaccccagcctttcctgccccctttcaggatcccaaagagata

SEQ ID NO: 85389 - DNA, 68 bp, Homo sapiens
attagggtggactgggaccccagcctttcctgccccctttcaggatcccaaagagatacacgggctcc

SEQ ID NO: 85390 - DNA, 66 bp, Homo sapiens
actgggaccccagcctttcctgccccctttcaggatcccaaagagatacacgggctcccctaaaag

SEQ ID NO: 85391 - DNA, 70 bp, Homo sapiens
agcctttcctgccccctttcaggatcccaaagagatacacgggctcccctaaaaggcagagtcccagcca

SEQ ID NO: 85392 - DNA, 72 bp, Homo sapiens
ccccctttcaggatcccaaagagatacacgggctcccctaaaaggcagagtcccagccacagcaactgctct

SEQ ID NO: 85393 - DNA, 75 bp, Homo sapiens
tttcaggatcccaaagagatacacgggctcccctaaaaggcagagtcccagccacagcaactgctcttgtccttg

SEQ ID NO: 85394 - DNA, 75 bp, Homo sapiens
acacgggctcccctaaaaggcagagtcccagccacagcaactgctcttgtccttggcttcctccagagaaacaga

SEQ ID NO: 85395 - DNA, 78 bp, Homo sapiens
taaaaggcagagtcccagccacagcaactgctcttgtccttggcttcctccagagaaacagagatcggggagcagaag

SEQ ID NO: 85396 - DNA, 82 bp, Homo sapiens
tcccagccacagcaactgctcttgtccttggcttcctccagagaaacagagatcggggagcagaagtcagatcatacattta

SEQ ID NO: 85397 - DNA, 80 bp, Homo sapiens
acagcaactgctcttgtccttggcttcctccagagaaacagagatcggggagcagaagtcagatcatacatttaaagcta

SEQ ID NO: 85398 - DNA, 80 bp, Homo sapiens
ctgctcttgtccttggcttcctccagagaaacagagatcggggagcagaagtcagatcatacatttaaagctacatgagg

SEQ ID NO: 85399 - DNA, 77 bp, Homo sapiens
ccttggcttcctccagagaaacagagatcggggagcagaagtcagatcatacatttaaagctacatgagggccgggc

SEQ ID NO: 85400 - DNA, 71 bp, Homo sapiens
aaaaaaagctacatgaatgtccccattggaaataagacaggaaactcaaaactaggtgctgtagtcccagc

SEQ ID NO: 85401 - DNA, 69 bp, Homo sapiens
taaaaagagagagacagaaaaggaaactcagggggccagggcttaaggggttgggaagatgcgagagtc

SEQ ID NO: 85402 - DNA, 67 bp, Homo sapiens
agagacagaaaaggaaactcagggggccagggcttaaggggttgggaagatgcgagagtcttaaatt

SEQ ID NO: 85403 - DNA, 65 bp, Homo sapiens
aaaaggaaactcagggggccagggcttaaggggttgggaagatgcgagagtcttaaatttggttc

SEQ ID NO: 85404 - DNA, 67 bp, Homo sapiens
actcagggggccagggcttaaggggttgggaagatgcgagagtcttaaatttggttccttgcttctt

SEQ ID NO: 85405 - DNA, 69 bp, Homo sapiens
agggcttaaggggttgggaagatgcgagagtcttaaatttggttccttgcttctttgggccaggactca

SEQ ID NO: 85406 - DNA, 76 bp, Homo sapiens
ttgggaagatgcgagagtcttaaatttggttccttgcttctttgggccaggactcagagagccccactgacacata

SEQ ID NO: 85407 - DNA, 77 bp, Homo sapiens
aagatgcgagagtcttaaatttggttccttgcttctttgggccaggactcagagagccccactgacacatatgccca

SEQ ID NO: 85408 - DNA, 77 bp, Homo sapiens
tcttaaatttggttccttgcttctttgggccaggactcagagagccccactgacacatatgcccatctgtcttgaac

SEQ ID NO: 85409 - DNA, 79 bp, Homo sapiens
tccttgcttctttgggccaggactcagagagccccactgacacatatgcccatctgtcttgaaccttaacaaattgcaa

SEQ ID NO: 85410 - DNA, 78 bp, Homo sapiens
ttctttgggccaggactcagagagccccactgacacatatgcccatctgtcttgaaccttaacaaattgcaaaggcca

SEQ ID NO: 85411 - DNA, 79 bp, Homo sapiens
aggactcagagagccccactgacacatatgcccatctgtcttgaaccttaacaaattgcaaaggccacaggctattcta

SEQ ID NO: 85412 - DNA, 79 bp, Homo sapiens
agagagccccactgacacatatgcccatctgtcttgaaccttaacaaattgcaaaggccacaggctattctacaggcca

SEQ ID NO: 85413 - DNA, 77 bp, Homo sapiens
actgacacatatgcccatctgtcttgaaccttaacaaattgcaaaggccacaggctattctacaggccacgggagcc

SEQ ID NO: 85414 - DNA, 74 bp, Homo sapiens
acatatgcccatctgtcttgaaccttaacaaattgcaaaggccacaggctattctacaggccacgggagccccc

SEQ ID NO: 85415 - DNA, 74 bp, Homo sapiens
catctgtcttgaaccttaacaaattgcaaaggccacaggctattctacaggccacgggagcccccccaaatgca

SEQ ID NO: 85416 - DNA, 73 bp, Homo sapiens
atctgtcttgaaccttaacaaattgcaaaggccacaggctattctacaggccacgggagcccccccaaatgca

SEQ ID NO: 85417 - DNA, 72 bp, Homo sapiens
aaccttaacaaattgcaaaggccacaggctattctacaggccacgggagcccccccaaatgcaatgtcatgg

SEQ ID NO: 85418 - DNA, 73 bp, Homo sapiens
taacaaattgcaaaggccacaggctattctacaggccacgggagcccccccaaatgcaatgtcatgggggtgt

SEQ ID NO: 85419 - DNA, 72 bp, Homo sapiens
aaattgcaaaggccacaggctattctacaggccacgggagcccccccaaatgcaatgtcatgggggtgttcc

SEQ ID NO: 85420 - DNA, 72 bp, Homo sapiens
acaggctattctacaggccacgggagcccccccaaatgcaatgtcatgggggtgttcctgaagtagaggacc

SEQ ID NO: 85421 - DNA, 73 bp, Homo sapiens
ctattctacaggccacgggagcccccccaaatgcaatgtcatgggggtgttcctgaagtagaggaccctcata

SEQ ID NO: 85422 - DNA, 73 bp, Homo sapiens
tattctacaggccacgggagcccccccaaatgcaatgtcatgggggtgttcctgaagtagaggaccctcataa

SEQ ID NO: 85423 - DNA, 72 bp, Homo sapiens
ccacgggagcccccccaaatgcaatgtcatgggggtgttcctgaagtagaggaccctcataaggcctctgag

SEQ ID NO: 85424 - DNA, 77 bp, Homo sapiens
ccaaatgcaatgtcatgggggtgttcctgaagtagaggaccctcataaggcctctgaggcccagagaggggcagctc

SEQ ID NO: 85425 - DNA, 74 bp, Homo sapiens
aatgtcatgggggtgttcctgaagtagaggaccctcataaggcctctgaggcccagagaggggcagctccgggc

SEQ ID NO: 85426 - DNA, 74 bp, Homo sapiens
ggtgttcctgaagtagaggaccctcataaggcctctgaggcccagagaggggcagctccgggcctaaggtcaca

SEQ ID NO: 85427 - DNA, 78 bp, Homo sapiens
gaggcccagagaggggcagctccgggcctaaggtcacacagccagtcaacagagacctaatccagaggtctgcgggca

SEQ ID NO: 85428 - DNA, 79 bp, Homo sapiens
agaggggcagctccgggcctaaggtcacacagccagtcaacagagacctaatccagaggtctgcgggcaggagctatga

SEQ ID NO: 85429 - DNA, 77 bp, Homo sapiens
agctccgggcctaaggtcacacagccagtcaacagagacctaatccagaggtctgcgggcaggagctatgaaaagga

SEQ ID NO: 85430 - DNA, 77 bp, Homo sapiens
aggtcacacagccagtcaacagagacctaatccagaggtctgcgggcaggagctatgaaaaggacagggagtggtgt

SEQ ID NO: 85431 - DNA, 77 bp, Homo sapiens
acacagccagtcaacagagacctaatccagaggtctgcgggcaggagctatgaaaaggacagggagtggtgtttgcc

SEQ ID NO: 85432 - DNA, 75 bp, Homo sapiens
aacagagacctaatccagaggtctgcgggcaggagctatgaaaaggacagggagtggtgtttgccctctgggtga

SEQ ID NO: 85433 - DNA, 80 bp, Homo sapiens
taatccagaggtctgcgggcaggagctatgaaaaggacagggagtggtgtttgccctctgggtgagcagtgaaggcatga

SEQ ID NO: 85434 - DNA, 80 bp, Homo sapiens
aggtctgcgggcaggagctatgaaaaggacagggagtggtgtttgccctctgggtgagcagtgaaggcatgagtctcaca

SEQ ID NO: 85435 - DNA, 76 bp, Homo sapiens
agctatgaaaaggacagggagtggtgtttgccctctgggtgagcagtgaaggcatgagtctcacacccccggcttc

SEQ ID NO: 85436 - DNA, 74 bp, Homo sapiens
aaaaggacagggagtggtgtttgccctctgggtgagcagtgaaggcatgagtctcacacccccggcttccgctc

SEQ ID NO: 85437 - DNA, 79 bp, Homo sapiens
agggagtggtgtttgccctctgggtgagcagtgaaggcatgagtctcacacccccggcttccgctccacagcatgtcca

SEQ ID NO: 85438 - DNA, 80 bp, Homo sapiens
tttgccctctgggtgagcagtgaaggcatgagtctcacacccccggcttccgctccacagcatgtccagctgggggccca

SEQ ID NO: 85439 - DNA, 83 bp, Homo sapiens
gtgagcagtgaaggcatgagtctcacacccccggcttccgctccacagcatgtccagctgggggcccagggcgctgaatgatg

SEQ ID NO: 85440 - DNA, 78 bp, Homo sapiens
aaggcatgagtctcacacccccggcttccgctccacagcatgtccagctgggggcccagggcgctgaatgatggccgg

SEQ ID NO: 85441 - DNA, 77 bp, Homo sapiens
agtctcacacccccggcttccgctccacagcatgtccagctgggggcccagggcgctgaatgatggccggtcctgtg

SEQ ID NO: 85442 - DNA, 82 bp, Homo sapiens
ctccacagcatgtccagctgggggcccagggcgctgaatgatggccggtcctgtgggctaggggcccagcacagcttcatga

SEQ ID NO: 85443 - DNA, 81 bp, Homo sapiens
tgtccagctgggggcccagggcgctgaatgatggccggtcctgtgggctaggggcccagcacagcttcatgagctcgtgaa

SEQ ID NO: 85444 - DNA, 78 bp, Homo sapiens
gggcccagggcgctgaatgatggccggtcctgtgggctaggggcccagcacagcttcatgagctcgtgaacctgaggg

SEQ ID NO: 85445 - DNA, 77 bp, Homo sapiens
agggcgctgaatgatggccggtcctgtgggctaggggcccagcacagcttcatgagctcgtgaacctgaggggcggg

SEQ ID NO: 85446 - DNA, 77 bp, Homo sapiens
atgatggccggtcctgtgggctaggggcccagcacagcttcatgagctcgtgaacctgaggggcgggggacagataa

SEQ ID NO: 85447 - DNA, 78 bp, Homo sapiens
tgtgggctaggggcccagcacagcttcatgagctcgtgaacctgaggggcgggggacagataatggggtcgtgcctga

SEQ ID NO: 85448 - DNA, 76 bp, Homo sapiens
aaaaaaaaaaaccatgaacgtcaccaccatttatggagcatcgactgtgtgctcggctttgagctgagccctcata

SEQ ID NO: 85449 - DNA, 80 bp, Homo sapiens
aaaaaccatgaacgtcaccaccatttatggagcatcgactgtgtgctcggctttgagctgagccctcataggcacaggtg

SEQ ID NO: 85450 - DNA, 82 bp, Homo sapiens
atttatggagcatcgactgtgtgctcggctttgagctgagccctcataggcacaggtgttcaggagtctaatcttccctcac

SEQ ID NO: 85451 - DNA, 79 bp, Homo sapiens
atcgactgtgtgctcggctttgagctgagccctcataggcacaggtgttcaggagtctaatcttccctcaccctataag

SEQ ID NO: 85452 - DNA, 79 bp, Homo sapiens
tgctcggctttgagctgagccctcataggcacaggtgttcaggagtctaatcttccctcaccctataaggcattactat

SEQ ID NO: 85453 - DNA, 74 bp, Homo sapiens
cctcataggcacaggtgttcaggagtctaatcttccctcaccctataaggcattactattctcattttggaaaa

SEQ ID NO: 85454 - DNA, 70 bp, Homo sapiens
acaggtgttcaggagtctaatcttccctcaccctataaggcattactattctcattttggaaaagggtaa

SEQ ID NO: 85455 - DNA, 70 bp, Homo sapiens
gttcaggagtctaatcttccctcaccctataaggcattactattctcattttggaaaagggtaaactgag

SEQ ID NO: 85456 - DNA, 70 bp, Homo sapiens
ctaatcttccctcaccctataaggcattactattctcattttggaaaagggtaaactgaggctctgaaag

SEQ ID NO: 85457 - DNA, 74 bp, Homo sapiens
accctataaggcattactattctcattttggaaaagggtaaactgaggctctgaaagtgctctgacttgccaca

SEQ ID NO: 85458 - DNA, 77 bp, Homo sapiens
aaggcattactattctcattttggaaaagggtaaactgaggctctgaaagtgctctgacttgccacacagtgagaga

SEQ ID NO: 85459 - DNA, 78 bp, Homo sapiens
tattctcattttggaaaagggtaaactgaggctctgaaagtgctctgacttgccacacagtgagagagtagccaagtg

SEQ ID NO: 85460 - DNA, 76 bp, Homo sapiens
ttggaaaagggtaaactgaggctctgaaagtgctctgacttgccacacagtgagagagtagccaagtgggggccag

SEQ ID NO: 85461 - DNA, 83 bp, Homo sapiens
ctgaggctctgaaagtgctctgacttgccacacagtgagagagtagccaagtgggggccaggatcctcatcggcctcacactc

SEQ ID NO: 85462 - DNA, 81 bp, Homo sapiens
tgaaagtgctctgacttgccacacagtgagagagtagccaagtgggggccaggatcctcatcggcctcacactctagcctt

SEQ ID NO: 85463 - DNA, 81 bp, Homo sapiens
tgacttgccacacagtgagagagtagccaagtgggggccaggatcctcatcggcctcacactctagcctttcttctcagta

SEQ ID NO: 85464 - DNA, 79 bp, Homo sapiens
acacagtgagagagtagccaagtgggggccaggatcctcatcggcctcacactctagcctttcttctcagtacagagac

SEQ ID NO: 85465 - DNA, 79 bp, Homo sapiens
agagtagccaagtgggggccaggatcctcatcggcctcacactctagcctttcttctcagtacagagactcaggcgcca

SEQ ID NO: 85466 - DNA, 80 bp, Homo sapiens
aagtgggggccaggatcctcatcggcctcacactctagcctttcttctcagtacagagactcaggcgccagctggcttgc

SEQ ID NO: 85467 - DNA, 80 bp, Homo sapiens
ccaggatcctcatcggcctcacactctagcctttcttctcagtacagagactcaggcgccagctggcttgcccgagaccc

SEQ ID NO: 85468 - DNA, 77 bp, Homo sapiens
atcggcctcacactctagcctttcttctcagtacagagactcaggcgccagctggcttgcccgagaccccggcccaa

SEQ ID NO: 85469 - DNA, 77 bp, Homo sapiens
actctagcctttcttctcagtacagagactcaggcgccagctggcttgcccgagaccccggcccaatctacagactg

SEQ ID NO: 85470 - DNA, 75 bp, Homo sapiens
cctttcttctcagtacagagactcaggcgccagctggcttgcccgagaccccggcccaatctacagactgggaaa

SEQ ID NO: 85471 - DNA, 78 bp, Homo sapiens
tcagtacagagactcaggcgccagctggcttgcccgagaccccggcccaatctacagactgggaaactgaggctagcc

SEQ ID NO: 85472 - DNA, 78 bp, Homo sapiens
tcaggcgccagctggcttgcccgagaccccggcccaatctacagactgggaaactgaggctagccctgcggcgctcac

SEQ ID NO: 85473 - DNA, 77 bp, Homo sapiens
agctggcttgcccgagaccccggcccaatctacagactgggaaactgaggctagccctgcggcgctcacctcagcag

SEQ ID NO: 85474 - DNA, 78 bp, Homo sapiens
tgcccgagaccccggcccaatctacagactgggaaactgaggctagccctgcggcgctcacctcagcagggcaggcag

SEQ ID NO: 85475 - DNA, 80 bp, Homo sapiens
cccaatctacagactgggaaactgaggctagccctgcggcgctcacctcagcagggcaggcaggaggcgccggcagcctc

SEQ ID NO: 85476 - DNA, 81 bp, Homo sapiens
tctacagactgggaaactgaggctagccctgcggcgctcacctcagcagggcaggcaggaggcgccggcagcctctggccc

SEQ ID NO: 85477 - DNA, 80 bp, Homo sapiens
aaactgaggctagccctgcggcgctcacctcagcagggcaggcaggaggcgccggcagcctctggccctcctccagcagt

SEQ ID NO: 85478 - DNA, 81 bp, Homo sapiens
ggctagccctgcggcgctcacctcagcagggcaggcaggaggcgccggcagcctctggccctcctccagcagttccaagag

SEQ ID NO: 85479 - DNA, 80 bp, Homo sapiens
cggcgctcacctcagcagggcaggcaggaggcgccggcagcctctggccctcctccagcagttccaagaggcggcagagg

SEQ ID NO: 85480 - DNA, 78 bp, Homo sapiens
agcagggcaggcaggaggcgccggcagcctctggccctcctccagcagttccaagaggcggcagagggcggggacatc

SEQ ID NO: 85481 - DNA, 78 bp, Homo sapiens
caggaggcgccggcagcctctggccctcctccagcagttccaagaggcggcagagggcggggacatcccgctcacatc

SEQ ID NO: 85482 - DNA, 80 bp, Homo sapiens
cggcagcctctggccctcctccagcagttccaagaggcggcagagggcggggacatcccgctcacatcccatcatccgca

SEQ ID NO: 85483 - DNA, 79 bp, Homo sapiens
ctccagcagttccaagaggcggcagagggcggggacatcccgctcacatcccatcatccgcaggaactcctggagccaa

SEQ ID NO: 85484 - DNA, 76 bp, Homo sapiens
agttccaagaggcggcagagggcggggacatcccgctcacatcccatcatccgcaggaactcctggagccaaggag

SEQ ID NO: 85485 - DNA, 79 bp, Homo sapiens
ggcagagggcggggacatcccgctcacatcccatcatccgcaggaactcctggagccaaggaggagcgcatgtggtggg

SEQ ID NO: 85486 - DNA, 74 bp, Homo sapiens
ggcgtggagggagaagaaggctgggggctctgggaagccgactcacggccgaggggctgcagcttttgtcgcag

SEQ ID NO: 85487 - DNA, 75 bp, Homo sapiens
ggagaagaaggctgggggctctgggaagccgactcacggccgaggggctgcagcttttgtcgcagtaggtgaaga

SEQ ID NO: 85488 - DNA, 76 bp, Homo sapiens
ctgggggctctgggaagccgactcacggccgaggggctgcagcttttgtcgcagtaggtgaagagctcgtacagga

SEQ ID NO: 85489 - DNA, 75 bp, Homo sapiens
ctctgggaagccgactcacggccgaggggctgcagcttttgtcgcagtaggtgaagagctcgtacaggacgaccc

SEQ ID NO: 85490 - DNA, 75 bp, Homo sapiens
actcacggccgaggggctgcagcttttgtcgcagtaggtgaagagctcgtacaggacgaccccgaagctccagac

SEQ ID NO: 85491 - DNA, 78 bp, Homo sapiens
gaggggctgcagcttttgtcgcagtaggtgaagagctcgtacaggacgaccccgaagctccagacgtctgactggcga

SEQ ID NO: 85492 - DNA, 77 bp, Homo sapiens
agcttttgtcgcagtaggtgaagagctcgtacaggacgaccccgaagctccagacgtctgactggcgagagaagatg

SEQ ID NO: 85493 - DNA, 78 bp, Homo sapiens
ttgtcgcagtaggtgaagagctcgtacaggacgaccccgaagctccagacgtctgactggcgagagaagatgttgtcc

SEQ ID NO: 85494 - DNA, 75 bp, Homo sapiens
aagagctcgtacaggacgaccccgaagctccagacgtctgactggcgagagaagatgttgtccgagagggattcg

SEQ ID NO: 85495 - DNA, 73 bp, Homo sapiens
ctcgtacaggacgaccccgaagctccagacgtctgactggcgagagaagatgttgtccgagagggattcgggg

SEQ ID NO: 85496 - DNA, 74 bp, Homo sapiens
cccgaagctccagacgtctgactggcgagagaagatgttgtccgagagggattcgggggcatacctggagaggg

SEQ ID NO: 85497 - DNA, 75 bp, Homo sapiens
agctccagacgtctgactggcgagagaagatgttgtccgagagggattcgggggcatacctggagaggggacaag

SEQ ID NO: 85498 - DNA, 78 bp, Homo sapiens
tctgactggcgagagaagatgttgtccgagagggattcgggggcatacctggagaggggacaaggtcttgagatgcga

SEQ ID NO: 85499 - DNA, 69 bp, Homo sapiens
agccagagccgtggggaataggggcggagcctaggcgcgggttccccaccagaaaatggggctctggcc

SEQ ID NO: 85500 - DNA, 70 bp, Homo sapiens
gggaataggggcggagcctaggcgcgggttccccaccagaaaatggggctctggcctggctcgcggacca

SEQ ID NO: 85501 - DNA, 71 bp, Homo sapiens
gcggagcctaggcgcgggttccccaccagaaaatggggctctggcctggctcgcggaccacgtagtagtct

SEQ ID NO: 85502 - DNA, 71 bp, Homo sapiens
ctaggcgcgggttccccaccagaaaatggggctctggcctggctcgcggaccacgtagtagtctttgtcaa

SEQ ID NO: 85503 - DNA, 77 bp, Homo sapiens
aaatggggctctggcctggctcgcggaccacgtagtagtctttgtcaagcggcagcagcttagctaggccgaagtca

SEQ ID NO: 85504 - DNA, 80 bp, Homo sapiens
tctggcctggctcgcggaccacgtagtagtctttgtcaagcggcagcagcttagctaggccgaagtcagcgatcttgacg

SEQ ID NO: 85505 - DNA, 81 bp, Homo sapiens
tggctcgcggaccacgtagtagtctttgtcaagcggcagcagcttagctaggccgaagtcagcgatcttgacgtgtgcctc

SEQ ID NO: 85506 - DNA, 80 bp, Homo sapiens
accacgtagtagtctttgtcaagcggcagcagcttagctaggccgaagtcagcgatcttgacgtgtgcctcgctctccac

SEQ ID NO: 85507 - DNA, 82 bp, Homo sapiens
tagtctttgtcaagcggcagcagcttagctaggccgaagtcagcgatcttgacgtgtgcctcgctctccacgaggatgtttc

SEQ ID NO: 85508 - DNA, 80 bp, Homo sapiens
aagcggcagcagcttagctaggccgaagtcagcgatcttgacgtgtgcctcgctctccacgaggatgtttcgggcggcca

SEQ ID NO: 85509 - DNA, 77 bp, Homo sapiens
agcttagctaggccgaagtcagcgatcttgacgtgtgcctcgctctccacgaggatgtttcgggcggccaggtcgcg

SEQ ID NO: 85510 - DNA, 79 bp, Homo sapiens
aggccgaagtcagcgatcttgacgtgtgcctcgctctccacgaggatgtttcgggcggccaggtcgcggtgcacgcagc

SEQ ID NO: 85511 - DNA, 77 bp, Homo sapiens
atcttgacgtgtgcctcgctctccacgaggatgtttcgggcggccaggtcgcggtgcacgcagcggcgggagcccag

SEQ ID NO: 85512 - DNA, 75 bp, Homo sapiens
acgtgtgcctcgctctccacgaggatgtttcgggcggccaggtcgcggtgcacgcagcggcgggagcccaggtac

SEQ ID NO: 85513 - DNA, 78 bp, Homo sapiens
tcgctctccacgaggatgtttcgggcggccaggtcgcggtgcacgcagcggcgggagcccaggtactccatgccctgc

SEQ ID NO: 85514 - DNA, 74 bp, Homo sapiens
cgaggatgtttcgggcggccaggtcgcggtgcacgcagcggcgggagcccaggtactccatgccctgcgggcgg

SEQ ID NO: 85515 - DNA, 79 bp, Homo sapiens
cggccaggtcgcggtgcacgcagcggcgggagcccaggtactccatgccctgcgggcgggcggtgtgagcgtgcagaga

SEQ ID NO: 85516 - DNA, 79 bp, Homo sapiens
aggtcgcggtgcacgcagcggcgggagcccaggtactccatgccctgcgggcgggcggtgtgagcgtgcagagaggatc

SEQ ID NO: 85517 - DNA, 75 bp, Homo sapiens
aggccgtgccagctgaatccccacaagtcccggggcgccccctcgcaccttgcagatctgcgaggaatagagaag

SEQ ID NO: 85518 - DNA, 75 bp, Homo sapiens
agctgaatccccacaagtcccggggcgccccctcgcaccttgcagatctgcgaggaatagagaaggaggcggctg

SEQ ID NO: 85519 - DNA, 76 bp, Homo sapiens
cccacaagtcccggggcgccccctcgcaccttgcagatctgcgaggaatagagaaggaggcggctggcatcgaggc

SEQ ID NO: 85520 - DNA, 82 bp, Homo sapiens
gggcgccccctcgcaccttgcagatctgcgaggaatagagaaggaggcggctggcatcgaggcgcgcgcggtgccgctgcag

SEQ ID NO: 85521 - DNA, 87 bp, Homo sapiens
tcgcaccttgcagatctgcgaggaatagagaaggaggcggctggcatcgaggcgcgcgcggtgccgctgcaggaagtcgcgcaagca

SEQ ID NO: 85522 - DNA, 87 bp, Homo sapiens
ttgcagatctgcgaggaatagagaaggaggcggctggcatcgaggcgcgcgcggtgccgctgcaggaagtcgcgcaagcagccgctg

SEQ ID NO: 85523 - DNA, 82 bp, Homo sapiens
aggaatagagaaggaggcggctggcatcgaggcgcgcgcggtgccgctgcaggaagtcgcgcaagcagccgctgggcaggta

SEQ ID NO: 85524 - DNA, 85 bp, Homo sapiens
tagagaaggaggcggctggcatcgaggcgcgcgcggtgccgctgcaggaagtcgcgcaagcagccgctgggcaggtactccatga

SEQ ID NO: 85525 - DNA, 86 bp, Homo sapiens
ctggcatcgaggcgcgcgcggtgccgctgcaggaagtcgcgcaagcagccgctgggcaggtactccatgaccagccgcaggctctg

SEQ ID NO: 85526 - DNA, 84 bp, Homo sapiens
atcgaggcgcgcgcggtgccgctgcaggaagtcgcgcaagcagccgctgggcaggtactccatgaccagccgcaggctctggcg

SEQ ID NO: 85527 - DNA, 82 bp, Homo sapiens
cggtgccgctgcaggaagtcgcgcaagcagccgctgggcaggtactccatgaccagccgcaggctctggcggcctggagaag

SEQ ID NO: 85528 - DNA, 83 bp, Homo sapiens
aggaagtcgcgcaagcagccgctgggcaggtactccatgaccagccgcaggctctggcggcctggagaaggcaggatctgtca

SEQ ID NO: 85529 - DNA, 85 bp, Homo sapiens
gtcgcgcaagcagccgctgggcaggtactccatgaccagccgcaggctctggcggcctggagaaggcaggatctgtcacagcagg

SEQ ID NO: 85530 - DNA, 82 bp, Homo sapiens
agccgctgggcaggtactccatgaccagccgcaggctctggcggcctggagaaggcaggatctgtcacagcagggcccagcc

SEQ ID NO: 85531 - DNA, 76 bp, Homo sapiens
aaaagcacccatacgtcttggttcactcatccgggagctggctcacccgggccatagctgacaccacgatacttga

SEQ ID NO: 85532 - DNA, 77 bp, Homo sapiens
acccatacgtcttggttcactcatccgggagctggctcacccgggccatagctgacaccacgatacttgacaatgaa

SEQ ID NO: 85533 - DNA, 82 bp, Homo sapiens
ttggttcactcatccgggagctggctcacccgggccatagctgacaccacgatacttgacaatgaaatcactgtgcagtgct

SEQ ID NO: 85534 - DNA, 83 bp, Homo sapiens
atccgggagctggctcacccgggccatagctgacaccacgatacttgacaatgaaatcactgtgcagtgctttgaggatctga

SEQ ID NO: 85535 - DNA, 84 bp, Homo sapiens
gctcacccgggccatagctgacaccacgatacttgacaatgaaatcactgtgcagtgctttgaggatctgaatctcccgctgaa

SEQ ID NO: 85536 - DNA, 83 bp, Homo sapiens
ggccatagctgacaccacgatacttgacaatgaaatcactgtgcagtgctttgaggatctgaatctcccgctgaaagtccctc

SEQ ID NO: 85537 - DNA, 83 bp, Homo sapiens
agctgacaccacgatacttgacaatgaaatcactgtgcagtgctttgaggatctgaatctcccgctgaaagtccctctgctgg

SEQ ID NO: 85538 - DNA, 81 bp, Homo sapiens
acgatacttgacaatgaaatcactgtgcagtgctttgaggatctgaatctcccgctgaaagtccctctgctggtctggccc

SEQ ID NO: 85539 - DNA, 85 bp, Homo sapiens
atgaaatcactgtgcagtgctttgaggatctgaatctcccgctgaaagtccctctgctggtctggcccgctgtgctgcagctgtt

SEQ ID NO: 85540 - DNA, 85 bp, Homo sapiens
tgcagtgctttgaggatctgaatctcccgctgaaagtccctctgctggtctggcccgctgtgctgcagctgtttcacggccacca

SEQ ID NO: 85541 - DNA, 82 bp, Homo sapiens
tttgaggatctgaatctcccgctgaaagtccctctgctggtctggcccgctgtgctgcagctgtttcacggccaccagggca

SEQ ID NO: 85542 - DNA, 81 bp, Homo sapiens
atctgaatctcccgctgaaagtccctctgctggtctggcccgctgtgctgcagctgtttcacggccaccagggcacctgta

SEQ ID NO: 85543 - DNA, 80 bp, Homo sapiens
tgaaagtccctctgctggtctggcccgctgtgctgcagctgtttcacggccaccagggcacctgtattgtcgcctagcgg

SEQ ID NO: 85544 - DNA, 84 bp, Homo sapiens
tctgctggtctggcccgctgtgctgcagctgtttcacggccaccagggcacctgtattgtcgcctagcgggtcatagcggcaca

SEQ ID NO: 85545 - DNA, 83 bp, Homo sapiens
tctggcccgctgtgctgcagctgtttcacggccaccagggcacctgtattgtcgcctagcgggtcatagcggcacagctccac

SEQ ID NO: 85546 - DNA, 82 bp, Homo sapiens
tgctgcagctgtttcacggccaccagggcacctgtattgtcgcctagcgggtcatagcggcacagctccacgctgccaaagt

SEQ ID NO: 85547 - DNA, 79 bp, Homo sapiens
agctgtttcacggccaccagggcacctgtattgtcgcctagcgggtcatagcggcacagctccacgctgccaaagttgc

SEQ ID NO: 85548 - DNA, 76 bp, Homo sapiens
acggccaccagggcacctgtattgtcgcctagcgggtcatagcggcacagctccacgctgccaaagttgccctggg

SEQ ID NO: 85549 - DNA, 77 bp, Homo sapiens
acctgtattgtcgcctagcgggtcatagcggcacagctccacgctgccaaagttgccctgggggatagcgggactga

SEQ ID NO: 85550 - DNA, 78 bp, Homo sapiens
attgtcgcctagcgggtcatagcggcacagctccacgctgccaaagttgccctgggggatagcgggactgatgtccag

SEQ ID NO: 85551 - DNA, 80 bp, Homo sapiens
agcgggtcatagcggcacagctccacgctgccaaagttgccctgggggatagcgggactgatgtccaggcacctggatgc

SEQ ID NO: 85552 - DNA, 76 bp, Homo sapiens
atgctgccctgccctctccaacccaccctggccctgcccaccttaccttgcccagctgtgagatgtacttgaggtg

SEQ ID NO: 85553 - DNA, 76 bp, Homo sapiens
tgccctctccaacccaccctggccctgcccaccttaccttgcccagctgtgagatgtacttgaggtgtctctcctc

SEQ ID NO: 85554 - DNA, 74 bp, Homo sapiens
aacccaccctggccctgcccaccttaccttgcccagctgtgagatgtacttgaggtgtctctcctcgaagatcg

SEQ ID NO: 85555 - DNA, 77 bp, Homo sapiens
gccctgcccaccttaccttgcccagctgtgagatgtacttgaggtgtctctcctcgaagatcgtggggtcttggcag

SEQ ID NO: 85556 - DNA, 79 bp, Homo sapiens
accttaccttgcccagctgtgagatgtacttgaggtgtctctcctcgaagatcgtggggtcttggcaggcatagagctg

SEQ ID NO: 85557 - DNA, 83 bp, Homo sapiens
ttgcccagctgtgagatgtacttgaggtgtctctcctcgaagatcgtggggtcttggcaggcatagagctgggcaccattcca

SEQ ID NO: 85558 - DNA, 84 bp, Homo sapiens
tgtgagatgtacttgaggtgtctctcctcgaagatcgtggggtcttggcaggcatagagctgggcaccattccacagcccatca

SEQ ID NO: 85559 - DNA, 80 bp, Homo sapiens
tacttgaggtgtctctcctcgaagatcgtggggtcttggcaggcatagagctgggcaccattccacagcccatcacgagg

SEQ ID NO: 85560 - DNA, 82 bp, Homo sapiens
tctctcctcgaagatcgtggggtcttggcaggcatagagctgggcaccattccacagcccatcacgaggtgccagggcacca

SEQ ID NO: 85561 - DNA, 79 bp, Homo sapiens
aagatcgtggggtcttggcaggcatagagctgggcaccattccacagcccatcacgaggtgccagggcaccaggtgtgg

SEQ ID NO: 85562 - DNA, 84 bp, Homo sapiens
ttggcaggcatagagctgggcaccattccacagcccatcacgaggtgccagggcaccaggtgtggggtctgagaggagctcata

SEQ ID NO: 85563 - DNA, 82 bp, Homo sapiens
aggcatagagctgggcaccattccacagcccatcacgaggtgccagggcaccaggtgtggggtctgagaggagctcatagtc

SEQ ID NO: 85564 - DNA, 79 bp, Homo sapiens
tgggcaccattccacagcccatcacgaggtgccagggcaccaggtgtggggtctgagaggagctcatagtctggggtgg

SEQ ID NO: 85565 - DNA, 78 bp, Homo sapiens
ttccacagcccatcacgaggtgccagggcaccaggtgtggggtctgagaggagctcatagtctggggtgggggcatgg

SEQ ID NO: 85566 - DNA, 77 bp, Homo sapiens
atcacgaggtgccagggcaccaggtgtggggtctgagaggagctcatagtctggggtgggggcatgggcagtggtaa

SEQ ID NO: 85567 - DNA, 76 bp, Homo sapiens
aatatgacatcacagccctccccacccaacccgtcccagcgggcacctgaagagatgaggctattgaggtcacgaa

SEQ ID NO: 85568 - DNA, 75 bp, Homo sapiens
acatcacagccctccccacccaacccgtcccagcgggcacctgaagagatgaggctattgaggtcacgaatgacg

SEQ ID NO: 85569 - DNA, 73 bp, Homo sapiens
cccacccaacccgtcccagcgggcacctgaagagatgaggctattgaggtcacgaatgacggctcggaaggag

SEQ ID NO: 85570 - DNA, 74 bp, Homo sapiens
aacccgtcccagcgggcacctgaagagatgaggctattgaggtcacgaatgacggctcggaaggagggcctctg

SEQ ID NO: 85571 - DNA, 77 bp, Homo sapiens
agcgggcacctgaagagatgaggctattgaggtcacgaatgacggctcggaaggagggcctctggaccggctcatag

SEQ ID NO: 85572 - DNA, 80 bp, Homo sapiens
aagagatgaggctattgaggtcacgaatgacggctcggaaggagggcctctggaccggctcataggccatgcactgttga

SEQ ID NO: 85573 - DNA, 80 bp, Homo sapiens
aggctattgaggtcacgaatgacggctcggaaggagggcctctggaccggctcataggccatgcactgttgaatcagcag

SEQ ID NO: 85574 - DNA, 80 bp, Homo sapiens
aggtcacgaatgacggctcggaaggagggcctctggaccggctcataggccatgcactgttgaatcagcagggccagctc

SEQ ID NO: 85575 - DNA, 81 bp, Homo sapiens
atgacggctcggaaggagggcctctggaccggctcataggccatgcactgttgaatcagcagggccagctctgtccacttg

SEQ ID NO: 85576 - DNA, 79 bp, Homo sapiens
aaggagggcctctggaccggctcataggccatgcactgttgaatcagcagggccagctctgtccacttgggggccggca

SEQ ID NO: 85577 - DNA, 84 bp, Homo sapiens
tggaccggctcataggccatgcactgttgaatcagcagggccagctctgtccacttgggggccggcagctgctgccggtcctca

SEQ ID NO: 85578 - DNA, 81 bp, Homo sapiens
ataggccatgcactgttgaatcagcagggccagctctgtccacttgggggccggcagctgctgccggtcctcataaaattg

SEQ ID NO: 85579 - DNA, 79 bp, Homo sapiens
atgcactgttgaatcagcagggccagctctgtccacttgggggccggcagctgctgccggtcctcataaaattggagtt

SEQ ID NO: 85580 - DNA, 78 bp, Homo sapiens
ttgaatcagcagggccagctctgtccacttgggggccggcagctgctgccggtcctcataaaattggagtttctgagg

SEQ ID NO: 85581 - DNA, 75 bp, Homo sapiens
agggccagctctgtccacttgggggccggcagctgctgccggtcctcataaaattggagtttctgagggtgagag

SEQ ID NO: 85582 - DNA, 75 bp, Homo sapiens
tccacttgggggccggcagctgctgccggtcctcataaaattggagtttctgagggtgagaggagcagtcggtaa

SEQ ID NO: 85583 - DNA, 74 bp, Homo sapiens
ccggcagctgctgccggtcctcataaaattggagtttctgagggtgagaggagcagtcggtaatccccaaccca

SEQ ID NO: 85584 - DNA, 75 bp, Homo sapiens
ttctgtcaaagtgggggttcggagaccgatgccgggtgaggggctctgaccttagcaggatccagggcactgatg

SEQ ID NO: 85585 - DNA, 77 bp, Homo sapiens
gggttcggagaccgatgccgggtgaggggctctgaccttagcaggatccagggcactgatgggcatggtgacgccac

SEQ ID NO: 85586 - DNA, 77 bp, Homo sapiens
agaccgatgccgggtgaggggctctgaccttagcaggatccagggcactgatgggcatggtgacgccactaaacact

SEQ ID NO: 85587 - DNA, 77 bp, Homo sapiens
ggtgaggggctctgaccttagcaggatccagggcactgatgggcatggtgacgccactaaacacttcccagaccgtg

SEQ ID NO: 85588 - DNA, 78 bp, Homo sapiens
tctgaccttagcaggatccagggcactgatgggcatggtgacgccactaaacacttcccagaccgtggcgccgaagcc

SEQ ID NO: 85589 - DNA, 76 bp, Homo sapiens
ttagcaggatccagggcactgatgggcatggtgacgccactaaacacttcccagaccgtggcgccgaagccccact

SEQ ID NO: 85590 - DNA, 76 bp, Homo sapiens
agggcactgatgggcatggtgacgccactaaacacttcccagaccgtggcgccgaagccccacttgtcagcttcca

SEQ ID NO: 85591 - DNA, 74 bp, Homo sapiens
gggcatggtgacgccactaaacacttcccagaccgtggcgccgaagccccacttgtcagcttccaagctaagtg

SEQ ID NO: 85592 - DNA, 74 bp, Homo sapiens
acgccactaaacacttcccagaccgtggcgccgaagccccacttgtcagcttccaagctaagtgtctgcgcctc

SEQ ID NO: 85593 - DNA, 73 bp, Homo sapiens
aaacacttcccagaccgtggcgccgaagccccacttgtcagcttccaagctaagtgtctgcgcctcccggaga

SEQ ID NO: 85594 - DNA, 74 bp, Homo sapiens
tcccagaccgtggcgccgaagccccacttgtcagcttccaagctaagtgtctgcgcctcccggagacactcggg

SEQ ID NO: 85595 - DNA, 74 bp, Homo sapiens
tggcgccgaagccccacttgtcagcttccaagctaagtgtctgcgcctcccggagacactcgggggccacccag

SEQ ID NO: 85596 - DNA, 72 bp, Homo sapiens
acttgtcagcttccaagctaagtgtctgcgcctcccggagacactcgggggccacccaggggatcctgtcgg

SEQ ID NO: 85597 - DNA, 75 bp, Homo sapiens
agcttccaagctaagtgtctgcgcctcccggagacactcgggggccacccaggggatcctgtcggtgagcactga

SEQ ID NO: 85598 - DNA, 74 bp, Homo sapiens
taagtgtctgcgcctcccggagacactcgggggccacccaggggatcctgtcggtgagcactgagggaatgaaa

SEQ ID NO: 85599 - DNA, 72 bp, Homo sapiens
cctcccggagacactcgggggccacccaggggatcctgtcggtgagcactgagggaatgaaagtgggatcag

SEQ ID NO: 85600 - DNA, 74 bp, Homo sapiens
actgagggaatgaaagtgggatcagggatccacttccttgccctgctcagcccctccctcctccacctccagga

SEQ ID NO: 85601 - DNA, 71 bp, Homo sapiens
acttccttgccctgctcagcccctccctcctccacctccaggaacttactctccaggcttaacacagcggg

SEQ ID NO: 85602 - DNA, 72 bp, Homo sapiens
tgctcagcccctccctcctccacctccaggaacttactctccaggcttaacacagcggggctgaccccaggg

SEQ ID NO: 85603 - DNA, 74 bp, Homo sapiens
tccctcctccacctccaggaacttactctccaggcttaacacagcggggctgaccccagggtcactcagcttga

SEQ ID NO: 85604 - DNA, 73 bp, Homo sapiens
acctccaggaacttactctccaggcttaacacagcggggctgaccccagggtcactcagcttgatgaagggcg

SEQ ID NO: 85605 - DNA, 75 bp, Homo sapiens
aacttactctccaggcttaacacagcggggctgaccccagggtcactcagcttgatgaagggcgggctcccatca

SEQ ID NO: 85606 - DNA, 76 bp, Homo sapiens
tctccaggcttaacacagcggggctgaccccagggtcactcagcttgatgaagggcgggctcccatcagccccctc

SEQ ID NO: 85607 - DNA, 75 bp, Homo sapiens
ttaacacagcggggctgaccccagggtcactcagcttgatgaagggcgggctcccatcagccccctcccgagcca

SEQ ID NO: 85608 - DNA, 74 bp, Homo sapiens
tgaccccagggtcactcagcttgatgaagggcgggctcccatcagccccctcccgagccaggagcaccttccgg

SEQ ID NO: 85609 - DNA, 79 bp, Homo sapiens
gtcactcagcttgatgaagggcgggctcccatcagccccctcccgagccaggagcaccttccgggcagagacattgcca

SEQ ID NO: 85610 - DNA, 76 bp, Homo sapiens
agcttgatgaagggcgggctcccatcagccccctcccgagccaggagcaccttccgggcagagacattgccatggg

SEQ ID NO: 85611 - DNA, 76 bp, Homo sapiens
gcgggctcccatcagccccctcccgagccaggagcaccttccgggcagagacattgccatggggcaggcctttgtc

SEQ ID NO: 85612 - DNA, 74 bp, Homo sapiens
atcagccccctcccgagccaggagcaccttccgggcagagacattgccatggggcaggcctttgtcctcctaag

SEQ ID NO: 85613 - DNA, 75 bp, Homo sapiens
tcccgagccaggagcaccttccgggcagagacattgccatggggcaggcctttgtcctcctaagggggccagaca

SEQ ID NO: 85614 - DNA, 73 bp, Homo sapiens
aggagcaccttccgggcagagacattgccatggggcaggcctttgtcctcctaagggggccagacacaggaaa

SEQ ID NO: 85615 - DNA, 72 bp, Homo sapiens
accttccgggcagagacattgccatggggcaggcctttgtcctcctaagggggccagacacaggaaaatgcc

SEQ ID NO: 85616 - DNA, 78 bp, Homo sapiens
agccttccctgggaatggagggtggagcaggcagaggagcactcaccagatagttgagggcgtaggccagctgtttga

SEQ ID NO: 85617 - DNA, 81 bp, Homo sapiens
tgggaatggagggtggagcaggcagaggagcactcaccagatagttgagggcgtaggccagctgtttgaccacctgcagct

SEQ ID NO: 85618 - DNA, 83 bp, Homo sapiens
tggagggtggagcaggcagaggagcactcaccagatagttgagggcgtaggccagctgtttgaccacctgcagcttccagctg

SEQ ID NO: 85619 - DNA, 82 bp, Homo sapiens
aggcagaggagcactcaccagatagttgagggcgtaggccagctgtttgaccacctgcagcttccagctggctggcaccagg

SEQ ID NO: 85620 - DNA, 79 bp, Homo sapiens
actcaccagatagttgagggcgtaggccagctgtttgaccacctgcagcttccagctggctggcaccaggtggccacgt

SEQ ID NO: 85621 - DNA, 80 bp, Homo sapiens
tagttgagggcgtaggccagctgtttgaccacctgcagcttccagctggctggcaccaggtggccacgttttcgcagata

SEQ ID NO: 85622 - DNA, 82 bp, Homo sapiens
ggcgtaggccagctgtttgaccacctgcagcttccagctggctggcaccaggtggccacgttttcgcagatacatgtctatg

SEQ ID NO: 85623 - DNA, 80 bp, Homo sapiens
agctgtttgaccacctgcagcttccagctggctggcaccaggtggccacgttttcgcagatacatgtctatggcccccag

SEQ ID NO: 85624 - DNA, 78 bp, Homo sapiens
acctgcagcttccagctggctggcaccaggtggccacgttttcgcagatacatgtctatggcccccaggtgtacaaat

SEQ ID NO: 85625 - DNA, 79 bp, Homo sapiens
ttccagctggctggcaccaggtggccacgttttcgcagatacatgtctatggcccccaggtgtacaaattcctgcacca

SEQ ID NO: 85626 - DNA, 78 bp, Homo sapiens
ctggcaccaggtggccacgttttcgcagatacatgtctatggcccccaggtgtacaaattcctgcaccatggtgcctg

SEQ ID NO: 85627 - DNA, 77 bp, Homo sapiens
aggtggccacgttttcgcagatacatgtctatggcccccaggtgtacaaattcctgcaccatggtgcctggttggca

SEQ ID NO: 85628 - DNA, 78 bp, Homo sapiens
acgttttcgcagatacatgtctatggcccccaggtgtacaaattcctgcaccatggtgcctggttggcagcagggaga

SEQ ID NO: 85629 - DNA, 76 bp, Homo sapiens
agatacatgtctatggcccccaggtgtacaaattcctgcaccatggtgcctggttggcagcagggagaggcggggt

SEQ ID NO: 85630 - DNA, 76 bp, Homo sapiens
tatggcccccaggtgtacaaattcctgcaccatggtgcctggttggcagcagggagaggcggggttgggagactga

SEQ ID NO: 85631 - DNA, 82 bp, Homo sapiens
ttcccacaagcattgcccaacccccaggctggcccagcagcctctctgaccatccacagtgctccgtgctgccctcctcaca

SEQ ID NO: 85632 - DNA, 82 bp, Homo sapiens
attgcccaacccccaggctggcccagcagcctctctgaccatccacagtgctccgtgctgccctcctcacacctcatcacac

SEQ ID NO: 85633 - DNA, 86 bp, Homo sapiens
aggctggcccagcagcctctctgaccatccacagtgctccgtgctgccctcctcacacctcatcacaccctgcctgtcacattcta

SEQ ID NO: 85634 - DNA, 86 bp, Homo sapiens
agcagcctctctgaccatccacagtgctccgtgctgccctcctcacacctcatcacaccctgcctgtcacattctaggctctgtcc

SEQ ID NO: 85635 - DNA, 86 bp, Homo sapiens
ctctctgaccatccacagtgctccgtgctgccctcctcacacctcatcacaccctgcctgtcacattctaggctctgtcccagctc

SEQ ID NO: 85636 - DNA, 84 bp, Homo sapiens
atccacagtgctccgtgctgccctcctcacacctcatcacaccctgcctgtcacattctaggctctgtcccagctcctggccca

SEQ ID NO: 85637 - DNA, 83 bp, Homo sapiens
gtgctgccctcctcacacctcatcacaccctgcctgtcacattctaggctctgtcccagctcctggcccatcctagactccca

SEQ ID NO: 85638 - DNA, 82 bp, Homo sapiens
tcctcacacctcatcacaccctgcctgtcacattctaggctctgtcccagctcctggcccatcctagactcccaaccaatga

SEQ ID NO: 85639 - DNA, 79 bp, Homo sapiens
ctcatcacaccctgcctgtcacattctaggctctgtcccagctcctggcccatcctagactcccaaccaatgaaaccaa

SEQ ID NO: 85640 - DNA, 77 bp, Homo sapiens
accctgcctgtcacattctaggctctgtcccagctcctggcccatcctagactcccaaccaatgaaaccaaggctca

SEQ ID NO: 85641 - DNA, 74 bp, Homo sapiens
acattctaggctctgtcccagctcctggcccatcctagactcccaaccaatgaaaccaaggctcagaaaggtta

SEQ ID NO: 85642 - DNA, 74 bp, Homo sapiens
tctgtcccagctcctggcccatcctagactcccaaccaatgaaaccaaggctcagaaaggttacgtgacctgta

SEQ ID NO: 85643 - DNA, 75 bp, Homo sapiens
tcctggcccatcctagactcccaaccaatgaaaccaaggctcagaaaggttacgtgacctgtacaaagctgcaga

SEQ ID NO: 85644 - DNA, 74 bp, Homo sapiens
atcctagactcccaaccaatgaaaccaaggctcagaaaggttacgtgacctgtacaaagctgcagagattagaa

SEQ ID NO: 85645 - DNA, 72 bp, Homo sapiens
ccaaccaatgaaaccaaggctcagaaaggttacgtgacctgtacaaagctgcagagattagaaagccaggtt

SEQ ID NO: 85646 - DNA, 74 bp, Homo sapiens
aaaccaaggctcagaaaggttacgtgacctgtacaaagctgcagagattagaaagccaggtttgtctgacttca

SEQ ID NO: 85647 - DNA, 76 bp, Homo sapiens
ctcagaaaggttacgtgacctgtacaaagctgcagagattagaaagccaggtttgtctgacttcaggtcattctgg

SEQ ID NO: 85648 - DNA, 75 bp, Homo sapiens
aaggttacgtgacctgtacaaagctgcagagattagaaagccaggtttgtctgacttcaggtcattctggggctg

SEQ ID NO: 85649 - DNA, 78 bp, Homo sapiens
acctgtacaaagctgcagagattagaaagccaggtttgtctgacttcaggtcattctggggctggatatgggtgagaa

SEQ ID NO: 85650 - DNA, 78 bp, Homo sapiens
tgcagagattagaaagccaggtttgtctgacttcaggtcattctggggctggatatgggtgagaacctggagccgctt

SEQ ID NO: 85651 - DNA, 75 bp, Homo sapiens
ttagaaagccaggtttgtctgacttcaggtcattctggggctggatatgggtgagaacctggagccgctttccaa

SEQ ID NO: 85652 - DNA, 77 bp, Homo sapiens
aggtttgtctgacttcaggtcattctggggctggatatgggtgagaacctggagccgctttccaaggagtgatgatg

SEQ ID NO: 85653 - DNA, 79 bp, Homo sapiens
ttcaggtcattctggggctggatatgggtgagaacctggagccgctttccaaggagtgatgatggagagacataaataa

SEQ ID NO: 85654 - DNA, 76 bp, Homo sapiens
ttctggggctggatatgggtgagaacctggagccgctttccaaggagtgatgatggagagacataaataaagggta

SEQ ID NO: 85655 - DNA, 76 bp, Homo sapiens
tggatatgggtgagaacctggagccgctttccaaggagtgatgatggagagacataaataaagggtaatgaacacg

SEQ ID NO: 85656 - DNA, 75 bp, Homo sapiens
agaacctggagccgctttccaaggagtgatgatggagagacataaataaagggtaatgaacacggctcccatcca

SEQ ID NO: 85657 - DNA, 75 bp, Homo sapiens
ctggagccgctttccaaggagtgatgatggagagacataaataaagggtaatgaacacggctcccatccagggtg

SEQ ID NO: 85658 - DNA, 75 bp, Homo sapiens
ttccaaggagtgatgatggagagacataaataaagggtaatgaacacggctcccatccagggtggcccagtgtgt

SEQ ID NO: 85659 - DNA, 78 bp, Homo sapiens
tgatggagagacataaataaagggtaatgaacacggctcccatccagggtggcccagtgtgttgctggggctgtcata

SEQ ID NO: 85660 - DNA, 75 bp, Homo sapiens
agacataaataaagggtaatgaacacggctcccatccagggtggcccagtgtgttgctggggctgtcatatagcg

SEQ ID NO: 85661 - DNA, 77 bp, Homo sapiens
ataaagggtaatgaacacggctcccatccagggtggcccagtgtgttgctggggctgtcatatagcggctcagaaca

SEQ ID NO: 85662 - DNA, 79 bp, Homo sapiens
atgaacacggctcccatccagggtggcccagtgtgttgctggggctgtcatatagcggctcagaacagaggtgggaaga

SEQ ID NO: 85663 - DNA, 78 bp, Homo sapiens
atccagggtggcccagtgtgttgctggggctgtcatatagcggctcagaacagaggtgggaagaacagcctagacttg

SEQ ID NO: 85664 - DNA, 78 bp, Homo sapiens
ggtggcccagtgtgttgctggggctgtcatatagcggctcagaacagaggtgggaagaacagcctagacttgggtgag

SEQ ID NO: 85665 - DNA, 78 bp, Homo sapiens
gtgtgttgctggggctgtcatatagcggctcagaacagaggtgggaagaacagcctagacttgggtgaggcaggggtg

SEQ ID NO: 85666 - DNA, 72 bp, Homo sapiens
tatagcggctcagaacagaggtgggaagaacagcctagacttgggtgaggcaggggtggggtgggtgggtgg

SEQ ID NO: 85667 - DNA, 74 bp, Homo sapiens
aagaacagcctagacttgggtgaggcaggggtggggtgggtgggtggggggctctcactgtctccagccatgca

SEQ ID NO: 85668 - DNA, 75 bp, Homo sapiens
tagacttgggtgaggcaggggtggggtgggtgggtggggggctctcactgtctccagccatgcacacgccgtgga

SEQ ID NO: 85669 - DNA, 80 bp, Homo sapiens
tgaggcaggggtggggtgggtgggtggggggctctcactgtctccagccatgcacacgccgtggagcagcacgagatgcc

SEQ ID NO: 85670 - DNA, 79 bp, Homo sapiens
gtggggtgggtgggtggggggctctcactgtctccagccatgcacacgccgtggagcagcacgagatgccggtacgaca

SEQ ID NO: 85671 - DNA, 83 bp, Homo sapiens
gtgggtggggggctctcactgtctccagccatgcacacgccgtggagcagcacgagatgccggtacgacacttggctcatcaa

SEQ ID NO: 85672 - DNA, 89 bp, Homo sapiens
gctctcactgtctccagccatgcacacgccgtggagcagcacgagatgccggtacgacacttggctcatcaagctcgctgcttccagga

SEQ ID NO: 85673 - DNA, 87 bp, Homo sapiens
actgtctccagccatgcacacgccgtggagcagcacgagatgccggtacgacacttggctcatcaagctcgctgcttccaggaatga

SEQ ID NO: 85674 - DNA, 83 bp, Homo sapiens
atgcacacgccgtggagcagcacgagatgccggtacgacacttggctcatcaagctcgctgcttccaggaatgactggggaag

SEQ ID NO: 85675 - DNA, 80 bp, Homo sapiens
acgccgtggagcagcacgagatgccggtacgacacttggctcatcaagctcgctgcttccaggaatgactggggaaggtg

SEQ ID NO: 85676 - DNA, 78 bp, Homo sapiens
agcacgagatgccggtacgacacttggctcatcaagctcgctgcttccaggaatgactggggaaggtgggaagggaga

SEQ ID NO: 85677 - DNA, 78 bp, Homo sapiens
atgccggtacgacacttggctcatcaagctcgctgcttccaggaatgactggggaaggtgggaagggagagaagatgc

SEQ ID NO: 85678 - DNA, 82 bp, Homo sapiens
tctccagccagccccgactccaaaagtctggtccacattgctctcacctccatgcagttcttgtgcttggcatccatgacct

SEQ ID NO: 85679 - DNA, 83 bp, Homo sapiens
agccccgactccaaaagtctggtccacattgctctcacctccatgcagttcttgtgcttggcatccatgaccttcagcagcac

SEQ ID NO: 85680 - DNA, 83 bp, Homo sapiens
aaaagtctggtccacattgctctcacctccatgcagttcttgtgcttggcatccatgaccttcagcagcacctctgtctttcg

SEQ ID NO: 85681 - DNA, 85 bp, Homo sapiens
tctggtccacattgctctcacctccatgcagttcttgtgcttggcatccatgaccttcagcagcacctctgtctttcgggcctcc

SEQ ID NO: 85682 - DNA, 83 bp, Homo sapiens
attgctctcacctccatgcagttcttgtgcttggcatccatgaccttcagcagcacctctgtctttcgggcctccccatccac

SEQ ID NO: 85683 - DNA, 83 bp, Homo sapiens
atgcagttcttgtgcttggcatccatgaccttcagcagcacctctgtctttcgggcctccccatccaccacctcatggcgaca

SEQ ID NO: 85684 - DNA, 81 bp, Homo sapiens
ttcttgtgcttggcatccatgaccttcagcagcacctctgtctttcgggcctccccatccaccacctcatggcgacagccc

SEQ ID NO: 85685 - DNA, 76 bp, Homo sapiens
atccatgaccttcagcagcacctctgtctttcgggcctccccatccaccacctcatggcgacagccccggtaaatc

SEQ ID NO: 85686 - DNA, 75 bp, Homo sapiens
ttcagcagcacctctgtctttcgggcctccccatccaccacctcatggcgacagccccggtaaatcttggtgaag

SEQ ID NO: 85687 - DNA, 70 bp, Homo sapiens
acctctgtctttcgggcctccccatccaccacctcatggcgacagccccggtaaatcttggtgaaggacc

SEQ ID NO: 85688 - DNA, 72 bp, Homo sapiens
tctttcgggcctccccatccaccacctcatggcgacagccccggtaaatcttggtgaaggacccatggccca

SEQ ID NO: 85689 - DNA, 76 bp, Homo sapiens
ccatccaccacctcatggcgacagccccggtaaatcttggtgaaggacccatggcccaggttctcatgctgaatgg

SEQ ID NO: 85690 - DNA, 75 bp, Homo sapiens
accacctcatggcgacagccccggtaaatcttggtgaaggacccatggcccaggttctcatgctgaatggtgagg

SEQ ID NO: 85691 - DNA, 75 bp, Homo sapiens
acagccccggtaaatcttggtgaaggacccatggcccaggttctcatgctgaatggtgaggggacagcagaagag

SEQ ID NO: 85692 - DNA, 77 bp, Homo sapiens
ccggtaaatcttggtgaaggacccatggcccaggttctcatgctgaatggtgaggggacagcagaagaggccagtga

SEQ ID NO: 85693 - DNA, 78 bp, Homo sapiens
tctggaccccagactgaggtatcgcctcatttcccagggcctcttacccactccaggctgtcagcagggatcttgtga

SEQ ID NO: 85694 - DNA, 80 bp, Homo sapiens
agactgaggtatcgcctcatttcccagggcctcttacccactccaggctgtcagcagggatcttgtgaaatgtcatctga

SEQ ID NO: 85695 - DNA, 82 bp, Homo sapiens
tatcgcctcatttcccagggcctcttacccactccaggctgtcagcagggatcttgtgaaatgtcatctgactcagctggta

SEQ ID NO: 85696 - DNA, 79 bp, Homo sapiens
tttcccagggcctcttacccactccaggctgtcagcagggatcttgtgaaatgtcatctgactcagctggtattgggat

SEQ ID NO: 85697 - DNA, 81 bp, Homo sapiens
tcttacccactccaggctgtcagcagggatcttgtgaaatgtcatctgactcagctggtattgggattggggctgaaccaa

SEQ ID NO: 85698 - DNA, 83 bp, Homo sapiens
actccaggctgtcagcagggatcttgtgaaatgtcatctgactcagctggtattgggattggggctgaaccaaggatgatgtg

SEQ ID NO: 85699 - DNA, 83 bp, Homo sapiens
tgtcagcagggatcttgtgaaatgtcatctgactcagctggtattgggattggggctgaaccaaggatgatgtgggtgggctg

SEQ ID NO: 85700 - DNA, 81 bp, Homo sapiens
atcttgtgaaatgtcatctgactcagctggtattgggattggggctgaaccaaggatgatgtgggtgggctgtgacctctc

SEQ ID NO: 85701 - DNA, 80 bp, Homo sapiens
aaatgtcatctgactcagctggtattgggattggggctgaaccaaggatgatgtgggtgggctgtgacctctctggacca

SEQ ID NO: 85702 - DNA, 77 bp, Homo sapiens
actcagctggtattgggattggggctgaaccaaggatgatgtgggtgggctgtgacctctctggaccacgatcaggt

SEQ ID NO: 85703 - DNA, 75 bp, Homo sapiens
tattgggattggggctgaaccaaggatgatgtgggtgggctgtgacctctctggaccacgatcaggttggacttt

SEQ ID NO: 85704 - DNA, 75 bp, Homo sapiens
attggggctgaaccaaggatgatgtgggtgggctgtgacctctctggaccacgatcaggttggacttttctatgg

SEQ ID NO: 85705 - DNA, 76 bp, Homo sapiens
aaccaaggatgatgtgggtgggctgtgacctctctggaccacgatcaggttggacttttctatggggagaggatga

SEQ ID NO: 85706 - DNA, 74 bp, Homo sapiens
atgtgggtgggctgtgacctctctggaccacgatcaggttggacttttctatggggagaggatgagggagaaaa

SEQ ID NO: 85707 - DNA, 75 bp, Homo sapiens
aaccagggatcggttctaccagggattctgggagactcagaagaactcacatctcagaattgtcccatcagaggg

SEQ ID NO: 85708 - DNA, 78 bp, Homo sapiens
tctaccagggattctgggagactcagaagaactcacatctcagaattgtcccatcagaggggtttgtccaggagtgaa

SEQ ID NO: 85709 - DNA, 77 bp, Homo sapiens
attctgggagactcagaagaactcacatctcagaattgtcccatcagaggggtttgtccaggagtgaaattcaccca

SEQ ID NO: 85710 - DNA, 77 bp, Homo sapiens
agactcagaagaactcacatctcagaattgtcccatcagaggggtttgtccaggagtgaaattcacccagaggaaga

SEQ ID NO: 85711 - DNA, 78 bp, Homo sapiens
aagaactcacatctcagaattgtcccatcagaggggtttgtccaggagtgaaattcacccagaggaagagctgagagc

SEQ ID NO: 85712 - DNA, 80 bp, Homo sapiens
tctcagaattgtcccatcagaggggtttgtccaggagtgaaattcacccagaggaagagctgagagctggagagagacta

SEQ ID NO: 85713 - DNA, 80 bp, Homo sapiens
ttgtcccatcagaggggtttgtccaggagtgaaattcacccagaggaagagctgagagctggagagagactaggtgcaga

SEQ ID NO: 85714 - DNA, 84 bp, Homo sapiens
gggtttgtccaggagtgaaattcacccagaggaagagctgagagctggagagagactaggtgcagatgacatggctcacatcta

SEQ ID NO: 85715 - DNA, 89 bp, Homo sapiens
ggagtgaaattcacccagaggaagagctgagagctggagagagactaggtgcagatgacatggctcacatctagctgtgcctagatcaa

SEQ ID NO: 85716 - DNA, 89 bp, Homo sapiens
aaattcacccagaggaagagctgagagctggagagagactaggtgcagatgacatggctcacatctagctgtgcctagatcaagccaga

SEQ ID NO: 85717 - DNA, 88 bp, Homo sapiens
gaagagctgagagctggagagagactaggtgcagatgacatggctcacatctagctgtgcctagatcaagccagacctaaaggttata

SEQ ID NO: 85718 - DNA, 87 bp, Homo sapiens
gagctggagagagactaggtgcagatgacatggctcacatctagctgtgcctagatcaagccagacctaaaggttatatatctctaa

SEQ ID NO: 85719 - DNA, 84 bp, Homo sapiens
agagagactaggtgcagatgacatggctcacatctagctgtgcctagatcaagccagacctaaaggttatatatctctaacttc

SEQ ID NO: 85720 - DNA, 73 bp, Homo sapiens
aaagccagggtcccagatcagccactcattccaggggaggaaggggctcacctttgggtctggggatacagca

SEQ ID NO: 85721 - DNA, 74 bp, Homo sapiens
agatcagccactcattccaggggaggaaggggctcacctttgggtctggggatacagcaggaagtgagggtcac

SEQ ID NO: 85722 - DNA, 72 bp, Homo sapiens
actcattccaggggaggaaggggctcacctttgggtctggggatacagcaggaagtgagggtcactgccacc

SEQ ID NO: 85723 - DNA, 74 bp, Homo sapiens
gggaggaaggggctcacctttgggtctggggatacagcaggaagtgagggtcactgccaccccatctacgtgca

SEQ ID NO: 85724 - DNA, 76 bp, Homo sapiens
gctcacctttgggtctggggatacagcaggaagtgagggtcactgccaccccatctacgtgcagccccccatccca

SEQ ID NO: 85725 - DNA, 75 bp, Homo sapiens
tttgggtctggggatacagcaggaagtgagggtcactgccaccccatctacgtgcagccccccatcccagcaggt

SEQ ID NO: 85726 - DNA, 79 bp, Homo sapiens
atacagcaggaagtgagggtcactgccaccccatctacgtgcagccccccatcccagcaggttgccaggagctctcgaa

SEQ ID NO: 85727 - DNA, 79 bp, Homo sapiens
aagtgagggtcactgccaccccatctacgtgcagccccccatcccagcaggttgccaggagctctcgaagactgctgtg

SEQ ID NO: 85728 - DNA, 77 bp, Homo sapiens
agggtcactgccaccccatctacgtgcagccccccatcccagcaggttgccaggagctctcgaagactgctgtgggg

SEQ ID NO: 85729 - DNA, 79 bp, Homo sapiens
ccatctacgtgcagccccccatcccagcaggttgccaggagctctcgaagactgctgtggggtcggctgaggccaacca

SEQ ID NO: 85730 - DNA, 78 bp, Homo sapiens
tacgtgcagccccccatcccagcaggttgccaggagctctcgaagactgctgtggggtcggctgaggccaaccagaag

SEQ ID NO: 85731 - DNA, 76 bp, Homo sapiens
atcccagcaggttgccaggagctctcgaagactgctgtggggtcggctgaggccaaccagaaggaaggttcctgtg

SEQ ID NO: 85732 - DNA, 75 bp, Homo sapiens
agcaggttgccaggagctctcgaagactgctgtggggtcggctgaggccaaccagaaggaaggttcctgtggggc

SEQ ID NO: 85733 - DNA, 76 bp, Homo sapiens
aggagctctcgaagactgctgtggggtcggctgaggccaaccagaaggaaggttcctgtggggctgcgccggatga

SEQ ID NO: 85734 - DNA, 75 bp, Homo sapiens
actgctgtggggtcggctgaggccaaccagaaggaaggttcctgtggggctgcgccggatgaggcagcccttata

SEQ ID NO: 85735 - DNA, 75 bp, Homo sapiens
ggtcggctgaggccaaccagaaggaaggttcctgtggggctgcgccggatgaggcagcccttataatcaggacca

SEQ ID NO: 85736 - DNA, 73 bp, Homo sapiens
ctgaggccaaccagaaggaaggttcctgtggggctgcgccggatgaggcagcccttataatcaggaccaaggg

SEQ ID NO: 85737 - DNA, 72 bp, Homo sapiens
aaggaaggttcctgtggggctgcgccggatgaggcagcccttataatcaggaccaagggggttctgcaaaga

SEQ ID NO: 85738 - DNA, 73 bp, Homo sapiens
aggttcctgtggggctgcgccggatgaggcagcccttataatcaggaccaagggggttctgcaaagaagagtg

SEQ ID NO: 85739 - DNA, 76 bp, Homo sapiens
tgcgccggatgaggcagcccttataatcaggaccaagggggttctgcaaagaagagtggcccctgagtgggactga

SEQ ID NO: 85740 - DNA, 77 bp, Homo sapiens
cctcctccaggcagccctccactacccaccctagcagtagaccgacctggacacagacagtgaggaggaagctgtca

SEQ ID NO: 85741 - DNA, 75 bp, Homo sapiens
aggcagccctccactacccaccctagcagtagaccgacctggacacagacagtgaggaggaagctgtcaaagtcc

SEQ ID NO: 85742 - DNA, 73 bp, Homo sapiens
cctccactacccaccctagcagtagaccgacctggacacagacagtgaggaggaagctgtcaaagtcctgggg

SEQ ID NO: 85743 - DNA, 77 bp, Homo sapiens
cctagcagtagaccgacctggacacagacagtgaggaggaagctgtcaaagtcctgggggctgcggcggagaacata

SEQ ID NO: 85744 - DNA, 76 bp, Homo sapiens
agtagaccgacctggacacagacagtgaggaggaagctgtcaaagtcctgggggctgcggcggagaacataggagc

SEQ ID NO: 85745 - DNA, 78 bp, Homo sapiens
tggacacagacagtgaggaggaagctgtcaaagtcctgggggctgcggcggagaacataggagccaggacgtgagccc

SEQ ID NO: 85746 - DNA, 76 bp, Homo sapiens
gtgaggaggaagctgtcaaagtcctgggggctgcggcggagaacataggagccaggacgtgagcccccagtcttga

SEQ ID NO: 85747 - DNA, 76 bp, Homo sapiens
aagctgtcaaagtcctgggggctgcggcggagaacataggagccaggacgtgagcccccagtcttgagcttgttga

SEQ ID NO: 85748 - DNA, 75 bp, Homo sapiens
aaagtcctgggggctgcggcggagaacataggagccaggacgtgagcccccagtcttgagcttgttgatggcaaa

SEQ ID NO: 85749 - DNA, 78 bp, Homo sapiens
gggctgcggcggagaacataggagccaggacgtgagcccccagtcttgagcttgttgatggcaaagtccagactgtgg

SEQ ID NO: 85750 - DNA, 76 bp, Homo sapiens
agaacataggagccaggacgtgagcccccagtcttgagcttgttgatggcaaagtccagactgtgggggaaggtga

SEQ ID NO: 85751 - DNA, 75 bp, Homo sapiens
agccaggacgtgagcccccagtcttgagcttgttgatggcaaagtccagactgtgggggaaggtgagagggaatg

SEQ ID NO: 85752 - DNA, 73 bp, Homo sapiens
acgtgagcccccagtcttgagcttgttgatggcaaagtccagactgtgggggaaggtgagagggaatggggag

SEQ ID NO: 85753 - DNA, 74 bp, Homo sapiens
ggccctgagtggccacagaggccgggaatgggggacaggtccttacgtgatggggccgtggcactgctcggcca

SEQ ID NO: 85754 - DNA, 74 bp, Homo sapiens
tggccacagaggccgggaatgggggacaggtccttacgtgatggggccgtggcactgctcggccacttcctcca

SEQ ID NO: 85755 - DNA, 73 bp, Homo sapiens
agaggccgggaatgggggacaggtccttacgtgatggggccgtggcactgctcggccacttcctccagcagcc

SEQ ID NO: 85756 - DNA, 75 bp, Homo sapiens
ggggacaggtccttacgtgatggggccgtggcactgctcggccacttcctccagcagcctcggcggtgccacctc

SEQ ID NO: 85757 - DNA, 78 bp, Homo sapiens
tccttacgtgatggggccgtggcactgctcggccacttcctccagcagcctcggcggtgccacctccttgcagaagaa

SEQ ID NO: 85758 - DNA, 80 bp, Homo sapiens
gtgatggggccgtggcactgctcggccacttcctccagcagcctcggcggtgccacctccttgcagaagaagtgctggga

SEQ ID NO: 85759 - DNA, 80 bp, Homo sapiens
gtggcactgctcggccacttcctccagcagcctcggcggtgccacctccttgcagaagaagtgctgggagtccgtggtca

SEQ ID NO: 85760 - DNA, 77 bp, Homo sapiens
gccacttcctccagcagcctcggcggtgccacctccttgcagaagaagtgctgggagtccgtggtcagccggaagta

SEQ ID NO: 85761 - DNA, 77 bp, Homo sapiens
tccagcagcctcggcggtgccacctccttgcagaagaagtgctgggagtccgtggtcagccggaagtagccgtccac

SEQ ID NO: 85762 - DNA, 75 bp, Homo sapiens
agcctcggcggtgccacctccttgcagaagaagtgctgggagtccgtggtcagccggaagtagccgtccacgagc

SEQ ID NO: 85763 - DNA, 75 bp, Homo sapiens
acctccttgcagaagaagtgctgggagtccgtggtcagccggaagtagccgtccacgagcgccacgaacgacaga

SEQ ID NO: 85764 - DNA, 75 bp, Homo sapiens
agaagaagtgctgggagtccgtggtcagccggaagtagccgtccacgagcgccacgaacgacagagcctcgggca

SEQ ID NO: 85765 - DNA, 74 bp, Homo sapiens
aagtgctgggagtccgtggtcagccggaagtagccgtccacgagcgccacgaacgacagagcctcgggcagccc

SEQ ID NO: 85766 - DNA, 73 bp, Homo sapiens
agtccgtggtcagccggaagtagccgtccacgagcgccacgaacgacagagcctcgggcagccctgggaactc

SEQ ID NO: 85767 - DNA, 74 bp, Homo sapiens
agccggaagtagccgtccacgagcgccacgaacgacagagcctcgggcagccctgggaactcggcctcctgcga

SEQ ID NO: 85768 - DNA, 76 bp, Homo sapiens
cgtccacgagcgccacgaacgacagagcctcgggcagccctgggaactcggcctcctgcgagggacaagcgtcaga

SEQ ID NO: 85769 - DNA, 76 bp, Homo sapiens
gccacgaacgacagagcctcgggcagccctgggaactcggcctcctgcgagggacaagcgtcagagcccagtgaaa

SEQ ID NO: 85770 - DNA, 73 bp, Homo sapiens
aacgacagagcctcgggcagccctgggaactcggcctcctgcgagggacaagcgtcagagcccagtgaaaccc

SEQ ID NO: 85771 - DNA, 69 bp, Homo sapiens
tcccgccctcggggtaaggctgaaggggaggggaatcctgcacccactaaaatctggttgtctgtcctg

SEQ ID NO: 85772 - DNA, 71 bp, Homo sapiens
gggtaaggctgaaggggaggggaatcctgcacccactaaaatctggttgtctgtcctggtaacagtgacca

SEQ ID NO: 85773 - DNA, 73 bp, Homo sapiens
gaaggggaggggaatcctgcacccactaaaatctggttgtctgtcctggtaacagtgaccaggcggtgctctc

SEQ ID NO: 85774 - DNA, 74 bp, Homo sapiens
ggaatcctgcacccactaaaatctggttgtctgtcctggtaacagtgaccaggcggtgctctccggccgggcca

SEQ ID NO: 85775 - DNA, 71 bp, Homo sapiens
acccactaaaatctggttgtctgtcctggtaacagtgaccaggcggtgctctccggccgggccaacgcgcg

SEQ ID NO: 85776 - DNA, 72 bp, Homo sapiens
aaatctggttgtctgtcctggtaacagtgaccaggcggtgctctccggccgggccaacgcgcggggcctgct

SEQ ID NO: 85777 - DNA, 78 bp, Homo sapiens
tgtctgtcctggtaacagtgaccaggcggtgctctccggccgggccaacgcgcggggcctgcttgatgctaatgtcta

SEQ ID NO: 85778 - DNA, 77 bp, Homo sapiens
taacagtgaccaggcggtgctctccggccgggccaacgcgcggggcctgcttgatgctaatgtctacgatttctgga

SEQ ID NO: 85779 - DNA, 74 bp, Homo sapiens
accaggcggtgctctccggccgggccaacgcgcggggcctgcttgatgctaatgtctacgatttctggaaagtc

SEQ ID NO: 85780 - DNA, 76 bp, Homo sapiens
tctccggccgggccaacgcgcggggcctgcttgatgctaatgtctacgatttctggaaagtcgcagaagggctgga

SEQ ID NO: 85781 - DNA, 74 bp, Homo sapiens
ccgggccaacgcgcggggcctgcttgatgctaatgtctacgatttctggaaagtcgcagaagggctggaggacc

SEQ ID NO: 85782 - DNA, 73 bp, Homo sapiens
cggggcctgcttgatgctaatgtctacgatttctggaaagtcgcagaagggctggaggacctgggaaggaggg

SEQ ID NO: 85783 - DNA, 73 bp, Homo sapiens
tgatgctaatgtctacgatttctggaaagtcgcagaagggctggaggacctgggaaggagggggagtaccgaa

SEQ ID NO: 85784 - DNA, 70 bp, Homo sapiens
taatgtctacgatttctggaaagtcgcagaagggctggaggacctgggaaggagggggagtaccgaagtg

SEQ ID NO: 85785 - DNA, 65 bp, Homo sapiens
ccccgcccccacgttggccccgcccagcgggggagtccgccctcacctcctgttctccctgggtc

SEQ ID NO: 85786 - DNA, 69 bp, Homo sapiens
cccacgttggccccgcccagcgggggagtccgccctcacctcctgttctccctgggtccaggcgatgcc

SEQ ID NO: 85787 - DNA, 72 bp, Homo sapiens
cccgcccagcgggggagtccgccctcacctcctgttctccctgggtccaggcgatgccgccgtcaccagcca

SEQ ID NO: 85788 - DNA, 75 bp, Homo sapiens
gggagtccgccctcacctcctgttctccctgggtccaggcgatgccgccgtcaccagccacgcggagcagcccca

SEQ ID NO: 85789 - DNA, 75 bp, Homo sapiens
cctcacctcctgttctccctgggtccaggcgatgccgccgtcaccagccacgcggagcagccccagcccgtcgtg

SEQ ID NO: 85790 - DNA, 75 bp, Homo sapiens
tgttctccctgggtccaggcgatgccgccgtcaccagccacgcggagcagccccagcccgtcgtggccaccaagg

SEQ ID NO: 85791 - DNA, 74 bp, Homo sapiens
tccctgggtccaggcgatgccgccgtcaccagccacgcggagcagccccagcccgtcgtggccaccaagggccc

SEQ ID NO: 85792 - DNA, 73 bp, Homo sapiens
aggcgatgccgccgtcaccagccacgcggagcagccccagcccgtcgtggccaccaagggccccagggaggcc

SEQ ID NO: 85793 - DNA, 72 bp, Homo sapiens
tcaccagccacgcggagcagccccagcccgtcgtggccaccaagggccccagggaggcccacgtggaaggtc

SEQ ID NO: 85794 - DNA, 70 bp, Homo sapiens
agccacgcggagcagccccagcccgtcgtggccaccaagggccccagggaggcccacgtggaaggtctcg

SEQ ID NO: 85795 - DNA, 66 bp, Homo sapiens
agccccagcccgtcgtggccaccaagggccccagggaggcccacgtggaaggtctcggcggccccg

SEQ ID NO: 85796 - DNA, 68 bp, Homo sapiens
cccgtcgtggccaccaagggccccagggaggcccacgtggaaggtctcggcggccccggctggatcca

SEQ ID NO: 85797 - DNA, 72 bp, Homo sapiens
caagggccccagggaggcccacgtggaaggtctcggcggccccggctggatccagccgctccaggtccatga

SEQ ID NO: 85798 - DNA, 74 bp, Homo sapiens
agggaggcccacgtggaaggtctcggcggccccggctggatccagccgctccaggtccatgatgtacttggcca

SEQ ID NO: 85799 - DNA, 77 bp, Homo sapiens
acgtggaaggtctcggcggccccggctggatccagccgctccaggtccatgatgtacttggccatgagcgagtgccg

SEQ ID NO: 85800 - DNA, 81 bp, Homo sapiens
cccggctggatccagccgctccaggtccatgatgtacttggccatgagcgagtgccggtctgcctggcaggcggccacgcg

SEQ ID NO: 85801 - DNA, 83 bp, Homo sapiens
ctggatccagccgctccaggtccatgatgtacttggccatgagcgagtgccggtctgcctggcaggcggccacgcggcgcagg

SEQ ID NO: 85802 - DNA, 84 bp, Homo sapiens
tccaggtccatgatgtacttggccatgagcgagtgccggtctgcctggcaggcggccacgcggcgcagggctctgcgcaccgtc

SEQ ID NO: 85803 - DNA, 83 bp, Homo sapiens
tgatgtacttggccatgagcgagtgccggtctgcctggcaggcggccacgcggcgcagggctctgcgcaccgtcctccgaata

SEQ ID NO: 85804 - DNA, 80 bp, Homo sapiens
acttggccatgagcgagtgccggtctgcctggcaggcggccacgcggcgcagggctctgcgcaccgtcctccgaatacgc

SEQ ID NO: 85805 - DNA, 79 bp, Homo sapiens
tgcctggcaggcggccacgcggcgcagggctctgcgcaccgtcctccgaatacgcctccgcgtcacgaagctcaggccc

SEQ ID NO: 85806 - DNA, 78 bp, Homo sapiens
aggcggccacgcggcgcagggctctgcgcaccgtcctccgaatacgcctccgcgtcacgaagctcaggccctggatca

SEQ ID NO: 85807 - DNA, 79 bp, Homo sapiens
ggcgcagggctctgcgcaccgtcctccgaatacgcctccgcgtcacgaagctcaggccctggatcaggtcgcgcaggct

SEQ ID NO: 85808 - DNA, 77 bp, Homo sapiens
agggctctgcgcaccgtcctccgaatacgcctccgcgtcacgaagctcaggccctggatcaggtcgcgcaggcttgg

SEQ ID NO: 85809 - DNA, 74 bp, Homo sapiens
accgtcctccgaatacgcctccgcgtcacgaagctcaggccctggatcaggtcgcgcaggcttgggggtaggca

SEQ ID NO: 85810 - DNA, 77 bp, Homo sapiens
tccgcgtcacgaagctcaggccctggatcaggtcgcgcaggcttgggggtaggcaggccttgtagctgcaggggttg

SEQ ID NO: 85811 - DNA, 72 bp, Homo sapiens
ccctggatcaggtcgcgcaggcttgggggtaggcaggccttgtagctgcaggggttggaggggagggagccg

SEQ ID NO: 85812 - DNA, 72 bp, Homo sapiens
aggtcgcgcaggcttgggggtaggcaggccttgtagctgcaggggttggaggggagggagccggccctcagc

SEQ ID NO: 85813 - DNA, 69 bp, Homo sapiens
ttgggggtaggcaggccttgtagctgcaggggttggaggggagggagccggccctcagcgtcgggaggg

SEQ ID NO: 85814 - DNA, 69 bp, Homo sapiens
ttgtagctgcaggggttggaggggagggagccggccctcagcgtcgggaggggtccccgcggggacaca

SEQ ID NO: 85815 - DNA, 65 bp, Homo sapiens
gggttggaggggagggagccggccctcagcgtcgggaggggtccccgcggggacacacacaaacc

SEQ ID NO: 85816 - DNA, 67 bp, Homo sapiens
agggagccggccctcagcgtcgggaggggtccccgcggggacacacacaaacccaggctttagccca

SEQ ID NO: 85817 - DNA, 67 bp, Homo sapiens
cggccctcagcgtcgggaggggtccccgcggggacacacacaaacccaggctttagcccaggggctg

SEQ ID NO: 85818 - DNA, 66 bp, Homo sapiens
gggaggggtccccgcggggacacacacaaacccaggctttagcccaggggctggggtgcggcccta

SEQ ID NO: 85819 - DNA, 68 bp, Homo sapiens
cccgcggggacacacacaaacccaggctttagcccaggggctggggtgcggccctagttggggcacca

SEQ ID NO: 85820 - DNA, 73 bp, Homo sapiens
cacacacaaacccaggctttagcccaggggctggggtgcggccctagttggggcaccaggcacacacagactc

SEQ ID NO: 85821 - DNA, 73 bp, Homo sapiens
aaacccaggctttagcccaggggctggggtgcggccctagttggggcaccaggcacacacagactctcattca

SEQ ID NO: 85822 - DNA, 76 bp, Homo sapiens
tttagcccaggggctggggtgcggccctagttggggcaccaggcacacacagactctcattcagggtcaggtatga

SEQ ID NO: 85823 - DNA, 77 bp, Homo sapiens
gtgcggccctagttggggcaccaggcacacacagactctcattcagggtcaggtatgaggaccggacctcagagtag

SEQ ID NO: 85824 - DNA, 77 bp, Homo sapiens
gggcaccaggcacacacagactctcattcagggtcaggtatgaggaccggacctcagagtaggggagggccattggc

SEQ ID NO: 85825 - DNA, 76 bp, Homo sapiens
cacacacagactctcattcagggtcaggtatgaggaccggacctcagagtaggggagggccattggcgcccacagg

SEQ ID NO: 85826 - DNA, 74 bp, Homo sapiens
actctcattcagggtcaggtatgaggaccggacctcagagtaggggagggccattggcgcccacaggtcggaca

SEQ ID NO: 85827 - DNA, 72 bp, Homo sapiens
attcagggtcaggtatgaggaccggacctcagagtaggggagggccattggcgcccacaggtcggacaggga

SEQ ID NO: 85828 - DNA, 70 bp, Homo sapiens
aggtatgaggaccggacctcagagtaggggagggccattggcgcccacaggtcggacagggaccccacag

SEQ ID NO: 85829 - DNA, 68 bp, Homo sapiens
accggacctcagagtaggggagggccattggcgcccacaggtcggacagggaccccacaggcctttta

SEQ ID NO: 85830 - DNA, 68 bp, Homo sapiens
agagtaggggagggccattggcgcccacaggtcggacagggaccccacaggccttttagctgggggag

SEQ ID NO: 85831 - DNA, 70 bp, Homo sapiens
agggccattggcgcccacaggtcggacagggaccccacaggccttttagctgggggaggtcaggtgtctg

SEQ ID NO: 85832 - DNA, 71 bp, Homo sapiens
gtcggacagggaccccacaggccttttagctgggggaggtcaggtgtctgtccagctggagcctgggggtg

SEQ ID NO: 85833 - DNA, 72 bp, Homo sapiens
ccacaggccttttagctgggggaggtcaggtgtctgtccagctggagcctgggggtggagagggctgggttc

SEQ ID NO: 85834 - DNA, 71 bp, Homo sapiens
cttttagctgggggaggtcaggtgtctgtccagctggagcctgggggtggagagggctgggttcgtgggag

SEQ ID NO: 85835 - DNA, 74 bp, Homo sapiens
gaggtcaggtgtctgtccagctggagcctgggggtggagagggctgggttcgtgggaggccctgggtcatagga

SEQ ID NO: 85836 - DNA, 74 bp, Homo sapiens
tgtctgtccagctggagcctgggggtggagagggctgggttcgtgggaggccctgggtcataggaacaccctga

SEQ ID NO: 85837 - DNA, 72 bp, Homo sapiens
ctggagcctgggggtggagagggctgggttcgtgggaggccctgggtcataggaacaccctgaaagcttgca

SEQ ID NO: 85838 - DNA, 71 bp, Homo sapiens
ggggtggagagggctgggttcgtgggaggccctgggtcataggaacaccctgaaagcttgcaggagaactc

SEQ ID NO: 85839 - DNA, 72 bp, Homo sapiens
agagggctgggttcgtgggaggccctgggtcataggaacaccctgaaagcttgcaggagaactccatggtgg

SEQ ID NO: 85840 - DNA, 73 bp, Homo sapiens
ttcgtgggaggccctgggtcataggaacaccctgaaagcttgcaggagaactccatggtgggagcccggcaaa

SEQ ID NO: 85841 - DNA, 73 bp, Homo sapiens
ccctgggtcataggaacaccctgaaagcttgcaggagaactccatggtgggagcccggcaaagccccgatgga

SEQ ID NO: 85842 - DNA, 72 bp, Homo sapiens
ataggaacaccctgaaagcttgcaggagaactccatggtgggagcccggcaaagccccgatggagcccacgt

SEQ ID NO: 85843 - DNA, 75 bp, Homo sapiens
cctgaaagcttgcaggagaactccatggtgggagcccggcaaagccccgatggagcccacgttgctcactcccaa

SEQ ID NO: 85844 - DNA, 76 bp, Homo sapiens
ttgcaggagaactccatggtgggagcccggcaaagccccgatggagcccacgttgctcactcccaagcagaggccg

SEQ ID NO: 85845 - DNA, 74 bp, Homo sapiens
gtgggagcccggcaaagccccgatggagcccacgttgctcactcccaagcagaggccgtccccacagcctggtg

SEQ ID NO: 85846 - DNA, 76 bp, Homo sapiens
aaagccccgatggagcccacgttgctcactcccaagcagaggccgtccccacagcctggtggctctcacctgacag

SEQ ID NO: 85847 - DNA, 82 bp, Homo sapiens
atggagcccacgttgctcactcccaagcagaggccgtccccacagcctggtggctctcacctgacagtcttcagcagctctc

SEQ ID NO: 85848 - DNA, 79 bp, Homo sapiens
acgttgctcactcccaagcagaggccgtccccacagcctggtggctctcacctgacagtcttcagcagctctcccggcc

SEQ ID NO: 85849 - DNA, 78 bp, Homo sapiens
actcccaagcagaggccgtccccacagcctggtggctctcacctgacagtcttcagcagctctcccggccgctgggcc

SEQ ID NO: 85850 - DNA, 81 bp, Homo sapiens
aggccgtccccacagcctggtggctctcacctgacagtcttcagcagctctcccggccgctgggcctgctctcgcgccatc

SEQ ID NO: 85851 - DNA, 81 bp, Homo sapiens
agcctggtggctctcacctgacagtcttcagcagctctcccggccgctgggcctgctctcgcgccatccgggccaggtcca

SEQ ID NO: 85852 - DNA, 80 bp, Homo sapiens
ctctcacctgacagtcttcagcagctctcccggccgctgggcctgctctcgcgccatccgggccaggtccaacacggcca

SEQ ID NO: 85853 - DNA, 80 bp, Homo sapiens
acagtcttcagcagctctcccggccgctgggcctgctctcgcgccatccgggccaggtccaacacggccaggctgagaca

SEQ ID NO: 85854 - DNA, 77 bp, Homo sapiens
tcccggccgctgggcctgctctcgcgccatccgggccaggtccaacacggccaggctgagacactcaccctgctcct

SEQ ID NO: 85855 - DNA, 80 bp, Homo sapiens
ctgggcctgctctcgcgccatccgggccaggtccaacacggccaggctgagacactcaccctgctccttgagactgaggc

SEQ ID NO: 85856 - DNA, 75 bp, Homo sapiens
atccgggccaggtccaacacggccaggctgagacactcaccctgctccttgagactgaggcccacggggaggcgc

SEQ ID NO: 85857 - DNA, 78 bp, Homo sapiens
tccaacacggccaggctgagacactcaccctgctccttgagactgaggcccacggggaggcgcccactcaccaggtca

SEQ ID NO: 85858 - DNA, 78 bp, Homo sapiens
aggctgagacactcaccctgctccttgagactgaggcccacggggaggcgcccactcaccaggtcactgcggtgctgg

SEQ ID NO: 85859 - DNA, 75 bp, Homo sapiens
agacactcaccctgctccttgagactgaggcccacggggaggcgcccactcaccaggtcactgcggtgctggggg

SEQ ID NO: 85860 - DNA, 66 bp, Homo sapiens
ccttggacccccaaccccctgggtcaaaccccaggcagaaccccacctgggcaaagaggtgctcca

SEQ ID NO: 85861 - DNA, 70 bp, Homo sapiens
ccaaccccctgggtcaaaccccaggcagaaccccacctgggcaaagaggtgctccaggactggcaggtca

SEQ ID NO: 85862 - DNA, 74 bp, Homo sapiens
ctgggtcaaaccccaggcagaaccccacctgggcaaagaggtgctccaggactggcaggtcaaggatagcactg

SEQ ID NO: 85863 - DNA, 76 bp, Homo sapiens
ccaggcagaaccccacctgggcaaagaggtgctccaggactggcaggtcaaggatagcactggccaaatccttgcg

SEQ ID NO: 85864 - DNA, 75 bp, Homo sapiens
agaaccccacctgggcaaagaggtgctccaggactggcaggtcaaggatagcactggccaaatccttgcgtagcc

SEQ ID NO: 85865 - DNA, 78 bp, Homo sapiens
gcaaagaggtgctccaggactggcaggtcaaggatagcactggccaaatccttgcgtagcccgaagcggtggcacttc

SEQ ID NO: 85866 - DNA, 79 bp, Homo sapiens
tgctccaggactggcaggtcaaggatagcactggccaaatccttgcgtagcccgaagcggtggcacttctccagcccaa

SEQ ID NO: 85867 - DNA, 76 bp, Homo sapiens
tggcaggtcaaggatagcactggccaaatccttgcgtagcccgaagcggtggcacttctccagcccaaaccaattg

SEQ ID NO: 85868 - DNA, 73 bp, Homo sapiens
ggtcaaggatagcactggccaaatccttgcgtagcccgaagcggtggcacttctccagcccaaaccaattggg

SEQ ID NO: 85869 - DNA, 69 bp, Homo sapiens
actggccaaatccttgcgtagcccgaagcggtggcacttctccagcccaaaccaattggggaagtaaaa

SEQ ID NO: 85870 - DNA, 70 bp, Homo sapiens
aaatccttgcgtagcccgaagcggtggcacttctccagcccaaaccaattggggaagtaaaagctgtgag

SEQ ID NO: 85871 - DNA, 72 bp, Homo sapiens
gtagcccgaagcggtggcacttctccagcccaaaccaattggggaagtaaaagctgtgaggagaggagagaa

SEQ ID NO: 85872 - DNA, 72 bp, Homo sapiens
gtggcacttctccagcccaaaccaattggggaagtaaaagctgtgaggagaggagagaaccctgggatgaaa

SEQ ID NO: 85873 - DNA, 71 bp, Homo sapiens
agatgataaaattgtacaatccctgggggctggggggcacttcctaccgaatcctgtacagcaggacttgg

SEQ ID NO: 85874 - DNA, 71 bp, Homo sapiens
taaaattgtacaatccctgggggctggggggcacttcctaccgaatcctgtacagcaggacttgggtgctg

SEQ ID NO: 85875 - DNA, 73 bp, Homo sapiens
cctgggggctggggggcacttcctaccgaatcctgtacagcaggacttgggtgctggcatcctccacggagaa

SEQ ID NO: 85876 - DNA, 76 bp, Homo sapiens
tggggggcacttcctaccgaatcctgtacagcaggacttgggtgctggcatcctccacggagaagatgtggctcgg

SEQ ID NO: 85877 - DNA, 74 bp, Homo sapiens
acttcctaccgaatcctgtacagcaggacttgggtgctggcatcctccacggagaagatgtggctcggggggaa

SEQ ID NO: 85878 - DNA, 76 bp, Homo sapiens
aatcctgtacagcaggacttgggtgctggcatcctccacggagaagatgtggctcggggggaaccagcaggacagg

SEQ ID NO: 85879 - DNA, 75 bp, Homo sapiens
agcaggacttgggtgctggcatcctccacggagaagatgtggctcggggggaaccagcaggacaggtcctccgtg

SEQ ID NO: 85880 - DNA, 77 bp, Homo sapiens
gtgctggcatcctccacggagaagatgtggctcggggggaaccagcaggacaggtcctccgtggccagagcaaagag

SEQ ID NO: 85881 - DNA, 75 bp, Homo sapiens
ggcatcctccacggagaagatgtggctcggggggaaccagcaggacaggtcctccgtggccagagcaaagaggga

SEQ ID NO: 85882 - DNA, 75 bp, Homo sapiens
agaagatgtggctcggggggaaccagcaggacaggtcctccgtggccagagcaaagagggagtggtacacaggca

SEQ ID NO: 85883 - DNA, 75 bp, Homo sapiens
ctcggggggaaccagcaggacaggtcctccgtggccagagcaaagagggagtggtacacaggcaggatgcctaca

SEQ ID NO: 85884 - DNA, 76 bp, Homo sapiens
aaccagcaggacaggtcctccgtggccagagcaaagagggagtggtacacaggcaggatgcctacaggggatggtc

SEQ ID NO: 85885 - DNA, 77 bp, Homo sapiens
aggacaggtcctccgtggccagagcaaagagggagtggtacacaggcaggatgcctacaggggatggtcccatcagc

SEQ ID NO: 85886 - DNA, 80 bp, Homo sapiens
tccgtggccagagcaaagagggagtggtacacaggcaggatgcctacaggggatggtcccatcagctccctcctgagtca

SEQ ID NO: 85887 - DNA, 81 bp, Homo sapiens
cagccccatccttccctctggcccgatccactagggatgcactcaccgctggccttggcagcctgcacgcacaggtcctca

SEQ ID NO: 85888 - DNA, 80 bp, Homo sapiens
cttccctctggcccgatccactagggatgcactcaccgctggccttggcagcctgcacgcacaggtcctcagccaagtgg

SEQ ID NO: 85889 - DNA, 80 bp, Homo sapiens
tggcccgatccactagggatgcactcaccgctggccttggcagcctgcacgcacaggtcctcagccaagtggtccccaaa

SEQ ID NO: 85890 - DNA, 79 bp, Homo sapiens
atccactagggatgcactcaccgctggccttggcagcctgcacgcacaggtcctcagccaagtggtccccaaaggagaa

SEQ ID NO: 85891 - DNA, 80 bp, Homo sapiens
atgcactcaccgctggccttggcagcctgcacgcacaggtcctcagccaagtggtccccaaaggagaaagataggcgctg

SEQ ID NO: 85892 - DNA, 75 bp, Homo sapiens
ccgctggccttggcagcctgcacgcacaggtcctcagccaagtggtccccaaaggagaaagataggcgctggggg

SEQ ID NO: 85893 - DNA, 73 bp, Homo sapiens
tggcagcctgcacgcacaggtcctcagccaagtggtccccaaaggagaaagataggcgctgggggggcccggg

SEQ ID NO: 85894 - DNA, 67 bp, Homo sapiens
acgcacaggtcctcagccaagtggtccccaaaggagaaagataggcgctgggggggcccggggcccc

SEQ ID NO: 85895 - DNA, 72 bp, Homo sapiens
tcagccaagtggtccccaaaggagaaagataggcgctgggggggcccggggccccgagcgggcagcagcaca

SEQ ID NO: 85896 - DNA, 71 bp, Homo sapiens
agtggtccccaaaggagaaagataggcgctgggggggcccggggccccgagcgggcagcagcacatgcagg

SEQ ID NO: 85897 - DNA, 75 bp, Homo sapiens
agaaagataggcgctgggggggcccggggccccgagcgggcagcagcacatgcagggcaccagcctccgtggaca

SEQ ID NO: 85898 - DNA, 75 bp, Homo sapiens
ataggcgctgggggggcccggggccccgagcgggcagcagcacatgcagggcaccagcctccgtggacaagaggc

SEQ ID NO: 85899 - DNA, 82 bp, Homo sapiens
ggcccggggccccgagcgggcagcagcacatgcagggcaccagcctccgtggacaagaggctgcatgaacgctgagggatca

SEQ ID NO: 85900 - DNA, 83 bp, Homo sapiens
cccgagcgggcagcagcacatgcagggcaccagcctccgtggacaagaggctgcatgaacgctgagggatcaggggcgtctct

SEQ ID NO: 85901 - DNA, 84 bp, Homo sapiens
cagcagcacatgcagggcaccagcctccgtggacaagaggctgcatgaacgctgagggatcaggggcgtctcttcacttggagg

SEQ ID NO: 85902 - DNA, 83 bp, Homo sapiens
atgcagggcaccagcctccgtggacaagaggctgcatgaacgctgagggatcaggggcgtctcttcacttggaggtgccatga

SEQ ID NO: 85903 - DNA, 81 bp, Homo sapiens
accagcctccgtggacaagaggctgcatgaacgctgagggatcaggggcgtctcttcacttggaggtgccatgagtgcaac

SEQ ID NO: 85904 - DNA, 82 bp, Homo sapiens
tccgtggacaagaggctgcatgaacgctgagggatcaggggcgtctcttcacttggaggtgccatgagtgcaacttgcctgg

SEQ ID NO: 85905 - DNA, 82 bp, Homo sapiens
ctgcatgaacgctgagggatcaggggcgtctcttcacttggaggtgccatgagtgcaacttgcctggggcacagagagaaaa

SEQ ID NO: 85906 - DNA, 78 bp, Homo sapiens
aacgctgagggatcaggggcgtctcttcacttggaggtgccatgagtgcaacttgcctggggcacagagagaaaaagc

SEQ ID NO: 85907 - DNA, 77 bp, Homo sapiens
atcaggggcgtctcttcacttggaggtgccatgagtgcaacttgcctggggcacagagagaaaaagcccctcagtcc

SEQ ID NO: 85908 - DNA, 76 bp, Homo sapiens
acttggaggtgccatgagtgcaacttgcctggggcacagagagaaaaagcccctcagtcctggtcagaggggattg

SEQ ID NO: 85909 - DNA, 77 bp, Homo sapiens
atgagtgcaacttgcctggggcacagagagaaaaagcccctcagtcctggtcagaggggattggacttctgagcagg

SEQ ID NO: 85910 - DNA, 73 bp, Homo sapiens
aacttgcctggggcacagagagaaaaagcccctcagtcctggtcagaggggattggacttctgagcagggagg

SEQ ID NO: 85911 - DNA, 74 bp, Homo sapiens
accaccatcctcccccagtgtctgggccgagccctgcggcatcgccagctcttacctagcgggcagggaccctg

SEQ ID NO: 85912 - DNA, 73 bp, Homo sapiens
ccccagtgtctgggccgagccctgcggcatcgccagctcttacctagcgggcagggaccctggactttcgaag

SEQ ID NO: 85913 - DNA, 75 bp, Homo sapiens
tctgggccgagccctgcggcatcgccagctcttacctagcgggcagggaccctggactttcgaagggcgggcaga

SEQ ID NO: 85914 - DNA, 73 bp, Homo sapiens
agccctgcggcatcgccagctcttacctagcgggcagggaccctggactttcgaagggcgggcagagccggga

SEQ ID NO: 85915 - DNA, 73 bp, Homo sapiens
atcgccagctcttacctagcgggcagggaccctggactttcgaagggcgggcagagccgggaggcagcgagag

SEQ ID NO: 85916 - DNA, 71 bp, Homo sapiens
tcttacctagcgggcagggaccctggactttcgaagggcgggcagagccgggaggcagcgagaggaaagtc

SEQ ID NO: 85917 - DNA, 71 bp, Homo sapiens
gcagggaccctggactttcgaagggcgggcagagccgggaggcagcgagaggaaagtcccactcggctcct

SEQ ID NO: 85918 - DNA, 70 bp, Homo sapiens
accctggactttcgaagggcgggcagagccgggaggcagcgagaggaaagtcccactcggctccttcctg

SEQ ID NO: 85919 - DNA, 71 bp, Homo sapiens
tttcgaagggcgggcagagccgggaggcagcgagaggaaagtcccactcggctccttcctgtgtgggcccc

SEQ ID NO: 85920 - DNA, 72 bp, Homo sapiens
agagccgggaggcagcgagaggaaagtcccactcggctccttcctgtgtgggccccttggtttcctgagcca

SEQ ID NO: 85921 - DNA, 73 bp, Homo sapiens
aggcagcgagaggaaagtcccactcggctccttcctgtgtgggccccttggtttcctgagccactgtcattta

SEQ ID NO: 85922 - DNA, 69 bp, Homo sapiens
aggaaagtcccactcggctccttcctgtgtgggccccttggtttcctgagccactgtcatttaccgaaa

SEQ ID NO: 85923 - DNA, 78 bp, Homo sapiens
accacacacaccagccaggcagcctgggctgccaggttcagttcagtgaaatttattggagaatgaaaaaagtcagca

SEQ ID NO: 85924 - DNA, 77 bp, Homo sapiens
ccagccaggcagcctgggctgccaggttcagttcagtgaaatttattggagaatgaaaaaagtcagcattcacctgt

SEQ ID NO: 85925 - DNA, 73 bp, Homo sapiens
ctgccaggttcagttcagtgaaatttattggagaatgaaaaaagtcagcattcacctgtttagtgtacaaaaa

SEQ ID NO: 85926 - DNA, 72 bp, Homo sapiens
gttcagttcagtgaaatttattggagaatgaaaaaagtcagcattcacctgtttagtgtacaaaaaggacac

SEQ ID NO: 85927 - DNA, 71 bp, Homo sapiens
gtgaaatttattggagaatgaaaaaagtcagcattcacctgtttagtgtacaaaaaggacactagatcttt

SEQ ID NO: 85928 - DNA, 72 bp, Homo sapiens
ggagaatgaaaaaagtcagcattcacctgtttagtgtacaaaaaggacactagatcttttaagaaaatatca

SEQ ID NO: 85929 - DNA, 72 bp, Homo sapiens
agtcagcattcacctgtttagtgtacaaaaaggacactagatcttttaagaaaatatcaggaaactgaagac

SEQ ID NO: 85930 - DNA, 74 bp, Homo sapiens
gcattcacctgtttagtgtacaaaaaggacactagatcttttaagaaaatatcaggaaactgaagacgcagata

SEQ ID NO: 85931 - DNA, 74 bp, Homo sapiens
gtgtacaaaaaggacactagatcttttaagaaaatatcaggaaactgaagacgcagatagatgcctttcaattg

SEQ ID NO: 85932 - DNA, 74 bp, Homo sapiens
caaaaaggacactagatcttttaagaaaatatcaggaaactgaagacgcagatagatgcctttcaattgtaaca

SEQ ID NO: 85933 - DNA, 74 bp, Homo sapiens
gatcttttaagaaaatatcaggaaactgaagacgcagatagatgcctttcaattgtaacattttggcaaaagtg

SEQ ID NO: 85934 - DNA, 72 bp, Homo sapiens
aaaatatcaggaaactgaagacgcagatagatgcctttcaattgtaacattttggcaaaagtggaaagttct

SEQ ID NO: 85935 - DNA, 72 bp, Homo sapiens
aggaaactgaagacgcagatagatgcctttcaattgtaacattttggcaaaagtggaaagttcttgtaaaca

SEQ ID NO: 85936 - DNA, 70 bp, Homo sapiens
aagacgcagatagatgcctttcaattgtaacattttggcaaaagtggaaagttcttgtaaacaccaaccc

SEQ ID NO: 85937 - DNA, 69 bp, Homo sapiens
atgcctttcaattgtaacattttggcaaaagtggaaagttcttgtaaacaccaaccccatggctcaaaa

SEQ ID NO: 85938 - DNA, 67 bp, Homo sapiens
caattgtaacattttggcaaaagtggaaagttcttgtaaacaccaaccccatggctcaaaatagttt

SEQ ID NO: 85939 - DNA, 67 bp, Homo sapiens
aacattttggcaaaagtggaaagttcttgtaaacaccaaccccatggctcaaaatagtttttctcca

SEQ ID NO: 85940 - DNA, 68 bp, Homo sapiens
agtggaaagttcttgtaaacaccaaccccatggctcaaaatagtttttctccacagtacaacattaaa

SEQ ID NO: 85941 - DNA, 67 bp, Homo sapiens
aagttcttgtaaacaccaaccccatggctcaaaatagtttttctccacagtacaacattaaaagaaa

SEQ ID NO: 85942 - DNA, 67 bp, Homo sapiens
aaaaaaaatagtatcaataagttagaccatatttaatcagctagaactttgtccaccaacccccaaa

SEQ ID NO: 85943 - DNA, 67 bp, Homo sapiens
agttagaccatatttaatcagctagaactttgtccaccaacccccaaaacacaaaacttttcttagc

SEQ ID NO: 85944 - DNA, 67 bp, Homo sapiens
atttaatcagctagaactttgtccaccaacccccaaaacacaaaacttttcttagcttcataattcc

SEQ ID NO: 85945 - DNA, 66 bp, Homo sapiens
cagctagaactttgtccaccaacccccaaaacacaaaacttttcttagcttcataattccttaaaa

SEQ ID NO: 85946 - DNA, 65 bp, Homo sapiens
ctttgtccaccaacccccaaaacacaaaacttttcttagcttcataattccttaaaaggagaaca

SEQ ID NO: 85947 - DNA, 64 bp, Homo sapiens
ccccaaaacacaaaacttttcttagcttcataattccttaaaaggagaacaaataaacaacaaa

SEQ ID NO: 85948 - DNA, 64 bp, Homo sapiens
aaacacaaaacttttcttagcttcataattccttaaaaggagaacaaataaacaacaaaaacaa

SEQ ID NO: 85949 - DNA, 69 bp, Homo sapiens
aacaacaacaaaaaggcaaattcaactgacagccccttggactggttcccagggcagaggggcgggcag

SEQ ID NO: 85950 - DNA, 68 bp, Homo sapiens
aacaaaaaggcaaattcaactgacagccccttggactggttcccagggcagaggggcgggcagtcccg

SEQ ID NO: 85951 - DNA, 69 bp, Homo sapiens
aaattcaactgacagccccttggactggttcccagggcagaggggcgggcagtcccgggctgggacctc

SEQ ID NO: 85952 - DNA, 72 bp, Homo sapiens
ctgacagccccttggactggttcccagggcagaggggcgggcagtcccgggctgggacctcctgaaatcatc

SEQ ID NO: 85953 - DNA, 71 bp, Homo sapiens
cttggactggttcccagggcagaggggcgggcagtcccgggctgggacctcctgaaatcatcccacctcac

SEQ ID NO: 85954 - DNA, 73 bp, Homo sapiens
ttcccagggcagaggggcgggcagtcccgggctgggacctcctgaaatcatcccacctcaccggtgtctgcag

SEQ ID NO: 85955 - DNA, 76 bp, Homo sapiens
ggcgggcagtcccgggctgggacctcctgaaatcatcccacctcaccggtgtctgcagggctgcctgcgggcgaca

SEQ ID NO: 85956 - DNA, 76 bp, Homo sapiens
agtcccgggctgggacctcctgaaatcatcccacctcaccggtgtctgcagggctgcctgcgggcgacacagcaag

SEQ ID NO: 85957 - DNA, 81 bp, Homo sapiens
tgggacctcctgaaatcatcccacctcaccggtgtctgcagggctgcctgcgggcgacacagcaaggtccagctgactctg

SEQ ID NO: 85958 - DNA, 80 bp, Homo sapiens
aaatcatcccacctcaccggtgtctgcagggctgcctgcgggcgacacagcaaggtccagctgactctggaggcctcctg

SEQ ID NO: 85959 - DNA, 81 bp, Homo sapiens
acctcaccggtgtctgcagggctgcctgcgggcgacacagcaaggtccagctgactctggaggcctcctggagcctgctcg

SEQ ID NO: 85960 - DNA, 81 bp, Homo sapiens
gtgtctgcagggctgcctgcgggcgacacagcaaggtccagctgactctggaggcctcctggagcctgctcggcccttccc

SEQ ID NO: 85961 - DNA, 77 bp, Homo sapiens
agggctgcctgcgggcgacacagcaaggtccagctgactctggaggcctcctggagcctgctcggcccttccccggc

SEQ ID NO: 85962 - DNA, 74 bp, Homo sapiens
ggcgacacagcaaggtccagctgactctggaggcctcctggagcctgctcggcccttccccggcccggcccggc

SEQ ID NO: 85963 - DNA, 69 bp, Homo sapiens
tgactctggaggcctcctggagcctgctcggcccttccccggcccggcccggcccaaagagaaaaacaa

SEQ ID NO: 85964 - DNA, 67 bp, Homo sapiens
ctggaggcctcctggagcctgctcggcccttccccggcccggcccggcccaaagagaaaaacaacaa

SEQ ID NO: 85965 - DNA, 68 bp, Homo sapiens
gcccttccccggcccggcccggcccaaagagaaaaacaacaacagctattgaaacatgaaggatcagt

SEQ ID NO: 85966 - DNA, 71 bp, Homo sapiens
ggcccggcccggcccaaagagaaaaacaacaacagctattgaaacatgaaggatcagtttcctcggagctc

SEQ ID NO: 85967 - DNA, 71 bp, Homo sapiens
cccggcccaaagagaaaaacaacaacagctattgaaacatgaaggatcagtttcctcggagctctgggaac

SEQ ID NO: 85968 - DNA, 69 bp, Homo sapiens
aaagagaaaaacaacaacagctattgaaacatgaaggatcagtttcctcggagctctgggaacccgggg

SEQ ID NO: 85969 - DNA, 70 bp, Homo sapiens
aacaacagctattgaaacatgaaggatcagtttcctcggagctctgggaacccgggggtcccaaaggaga

SEQ ID NO: 85970 - DNA, 71 bp, Homo sapiens
tattgaaacatgaaggatcagtttcctcggagctctgggaacccgggggtcccaaaggagagagactctcg

SEQ ID NO: 85971 - DNA, 69 bp, Homo sapiens
atgaaggatcagtttcctcggagctctgggaacccgggggtcccaaaggagagagactctcgggcaggg

SEQ ID NO: 85972 - DNA, 67 bp, Homo sapiens
agtttcctcggagctctgggaacccgggggtcccaaaggagagagactctcgggcaggggtgggata

SEQ ID NO: 85973 - DNA, 69 bp, Homo sapiens
tctgggaacccgggggtcccaaaggagagagactctcgggcaggggtgggatacactgtgggccctcca

SEQ ID NO: 85974 - DNA, 69 bp, Homo sapiens
aacccgggggtcccaaaggagagagactctcgggcaggggtgggatacactgtgggccctccacagtca

SEQ ID NO: 85975 - DNA, 76 bp, Homo sapiens
aaaggagagagactctcgggcaggggtgggatacactgtgggccctccacagtcagctctttggaagctgtcagga

SEQ ID NO: 85976 - DNA, 76 bp, Homo sapiens
agagactctcgggcaggggtgggatacactgtgggccctccacagtcagctctttggaagctgtcaggaggcaccc

SEQ ID NO: 85977 - DNA, 74 bp, Homo sapiens
gggcaggggtgggatacactgtgggccctccacagtcagctctttggaagctgtcaggaggcacccctccaccc

SEQ ID NO: 85978 - DNA, 72 bp, Homo sapiens
tgtgggccctccacagtcagctctttggaagctgtcaggaggcacccctccaccccccagtttagaaaaata

SEQ ID NO: 85979 - DNA, 71 bp, Homo sapiens
tctttggaagctgtcaggaggcacccctccaccccccagtttagaaaaatagacatctgtatttttgcatt

SEQ ID NO: 85980 - DNA, 71 bp, Homo sapiens
ctgtcaggaggcacccctccaccccccagtttagaaaaatagacatctgtatttttgcatttctgttctcc

SEQ ID NO: 85981 - DNA, 78 bp, Homo sapiens
ccccagtttagaaaaatagacatctgtatttttgcatttctgttctccctgcctgactgctgatggcagcagtgaccc

SEQ ID NO: 85982 - DNA, 84 bp, Homo sapiens
tagacatctgtatttttgcatttctgttctccctgcctgactgctgatggcagcagtgacccccatgtgatccctgggccctga

SEQ ID NO: 85983 - DNA, 83 bp, Homo sapiens
tatttttgcatttctgttctccctgcctgactgctgatggcagcagtgacccccatgtgatccctgggccctgagtcacagcc

SEQ ID NO: 85984 - DNA, 83 bp, Homo sapiens
tttctgttctccctgcctgactgctgatggcagcagtgacccccatgtgatccctgggccctgagtcacagccgccatccacc

SEQ ID NO: 85985 - DNA, 81 bp, Homo sapiens
ccctgcctgactgctgatggcagcagtgacccccatgtgatccctgggccctgagtcacagccgccatccaccccccacca

SEQ ID NO: 85986 - DNA, 77 bp, Homo sapiens
tgatggcagcagtgacccccatgtgatccctgggccctgagtcacagccgccatccaccccccaccacctttccaag

SEQ ID NO: 85987 - DNA, 75 bp, Homo sapiens
agcagtgacccccatgtgatccctgggccctgagtcacagccgccatccaccccccaccacctttccaagtcatg

SEQ ID NO: 85988 - DNA, 77 bp, Homo sapiens
tgtgatccctgggccctgagtcacagccgccatccaccccccaccacctttccaagtcatggcttcattcagcccta

SEQ ID NO: 85989 - DNA, 75 bp, Homo sapiens
ctgagtcacagccgccatccaccccccaccacctttccaagtcatggcttcattcagccctaaatgggaacacac

SEQ ID NO: 85990 - DNA, 74 bp, Homo sapiens
cccaccacctttccaagtcatggcttcattcagccctaaatgggaacacacgcctcagaccccaccatgccctg

SEQ ID NO: 85991 - DNA, 74 bp, Homo sapiens
atggcttcattcagccctaaatgggaacacacgcctcagaccccaccatgccctggggggtccccacatacgca

SEQ ID NO: 85992 - DNA, 74 bp, Homo sapiens
acacgcctcagaccccaccatgccctggggggtccccacatacgcacactcacacacccacacttgcgtggccc

SEQ ID NO: 85993 - DNA, 73 bp, Homo sapiens
ccaccatgccctggggggtccccacatacgcacactcacacacccacacttgcgtggccccccgatgctttgg

SEQ ID NO: 85994 - DNA, 72 bp, Homo sapiens
ctggggggtccccacatacgcacactcacacacccacacttgcgtggccccccgatgctttgggggacacta

SEQ ID NO: 85995 - DNA, 77 bp, Homo sapiens
cccacatacgcacactcacacacccacacttgcgtggccccccgatgctttgggggacactagactaggcacagcaa

SEQ ID NO: 85996 - DNA, 79 bp, Homo sapiens
cacactcacacacccacacttgcgtggccccccgatgctttgggggacactagactaggcacagcaacagagcagcaat

SEQ ID NO: 85997 - DNA, 76 bp, Homo sapiens
acacacccacacttgcgtggccccccgatgctttgggggacactagactaggcacagcaacagagcagcaattggg

SEQ ID NO: 85998 - DNA, 79 bp, Homo sapiens
acacttgcgtggccccccgatgctttgggggacactagactaggcacagcaacagagcagcaattggggtgtctgcaga

SEQ ID NO: 85999 - DNA, 82 bp, Homo sapiens
cccgatgctttgggggacactagactaggcacagcaacagagcagcaattggggtgtctgcagagcctgcacccccagagca

SEQ ID NO: 86000 - DNA, 82 bp, Homo sapiens
ctttgggggacactagactaggcacagcaacagagcagcaattggggtgtctgcagagcctgcacccccagagcaggcagac

SEQ ID NO: 86001 - DNA, 84 bp, Homo sapiens
acactagactaggcacagcaacagagcagcaattggggtgtctgcagagcctgcacccccagagcaggcagacccatcctcctg

SEQ ID NO: 86002 - DNA, 85 bp, Homo sapiens
taggcacagcaacagagcagcaattggggtgtctgcagagcctgcacccccagagcaggcagacccatcctcctggctccccagc

SEQ ID NO: 86003 - DNA, 83 bp, Homo sapiens
aacagagcagcaattggggtgtctgcagagcctgcacccccagagcaggcagacccatcctcctggctccccagctctgccca

SEQ ID NO: 86004 - DNA, 79 bp, Homo sapiens
aattggggtgtctgcagagcctgcacccccagagcaggcagacccatcctcctggctccccagctctgcccatgggtcc

SEQ ID NO: 86005 - DNA, 80 bp, Homo sapiens
gtctgcagagcctgcacccccagagcaggcagacccatcctcctggctccccagctctgcccatgggtccctggggcctc

SEQ ID NO: 86006 - DNA, 76 bp, Homo sapiens
agcaggcagacccatcctcctggctccccagctctgcccatgggtccctggggcctccctgaccccatggcgccca

SEQ ID NO: 86007 - DNA, 76 bp, Homo sapiens
ccatcctcctggctccccagctctgcccatgggtccctggggcctccctgaccccatggcgcccagccctccatca

SEQ ID NO: 86008 - DNA, 75 bp, Homo sapiens
tggctccccagctctgcccatgggtccctggggcctccctgaccccatggcgcccagccctccatcagcccctcc

SEQ ID NO: 86009 - DNA, 75 bp, Homo sapiens
tctgcccatgggtccctggggcctccctgaccccatggcgcccagccctccatcagcccctccctgagtgcaaac

SEQ ID NO: 86010 - DNA, 72 bp, Homo sapiens
atgggtccctggggcctccctgaccccatggcgcccagccctccatcagcccctccctgagtgcaaaccttg

SEQ ID NO: 86011 - DNA, 74 bp, Homo sapiens
accccatggcgcccagccctccatcagcccctccctgagtgcaaaccttggcggtggctctgctaagacgaccc

SEQ ID NO: 86012 - DNA, 73 bp, Homo sapiens
ctccctgagtgcaaaccttggcggtggctctgctaagacgaccccaggacccacaagtggacagagggacgga

SEQ ID NO: 86013 - DNA, 71 bp, Homo sapiens
agtgcaaaccttggcggtggctctgctaagacgaccccaggacccacaagtggacagagggacggagggag

SEQ ID NO: 86014 - DNA, 77 bp, Homo sapiens
ttggcggtggctctgctaagacgaccccaggacccacaagtggacagagggacggagggaggccagcagcatcgaga

SEQ ID NO: 86015 - DNA, 77 bp, Homo sapiens
tgctaagacgaccccaggacccacaagtggacagagggacggagggaggccagcagcatcgagaccacaaggtctca

SEQ ID NO: 86016 - DNA, 75 bp, Homo sapiens
accccaggacccacaagtggacagagggacggagggaggccagcagcatcgagaccacaaggtctcaacagtgtg

SEQ ID NO: 86017 - DNA, 81 bp, Homo sapiens
ggacccacaagtggacagagggacggagggaggccagcagcatcgagaccacaaggtctcaacagtgtggaatgagcagca

SEQ ID NO: 86018 - DNA, 83 bp, Homo sapiens
acagagggacggagggaggccagcagcatcgagaccacaaggtctcaacagtgtggaatgagcagcagcagcaacaaatggga

SEQ ID NO: 86019 - DNA, 83 bp, Homo sapiens
gagggaggccagcagcatcgagaccacaaggtctcaacagtgtggaatgagcagcagcagcaacaaatgggaaaccgaggaca

SEQ ID NO: 86020 - DNA, 83 bp, Homo sapiens
agcagcatcgagaccacaaggtctcaacagtgtggaatgagcagcagcagcaacaaatgggaaaccgaggacatcgcaaagaa

SEQ ID NO: 86021 - DNA, 79 bp, Homo sapiens
atcgagaccacaaggtctcaacagtgtggaatgagcagcagcagcaacaaatgggaaaccgaggacatcgcaaagaaaa

SEQ ID NO: 86022 - DNA, 79 bp, Homo sapiens
acaaggtctcaacagtgtggaatgagcagcagcagcaacaaatgggaaaccgaggacatcgcaaagaaaagtctgacgc

SEQ ID NO: 86023 - DNA, 79 bp, Homo sapiens
aacagtgtggaatgagcagcagcagcaacaaatgggaaaccgaggacatcgcaaagaaaagtctgacgccgctgcggcc

SEQ ID NO: 86024 - DNA, 79 bp, Homo sapiens
gcagcagcagcaacaaatgggaaaccgaggacatcgcaaagaaaagtctgacgccgctgcggccgagtctcaacttgga

SEQ ID NO: 86025 - DNA, 75 bp, Homo sapiens
aatgggaaaccgaggacatcgcaaagaaaagtctgacgccgctgcggccgagtctcaacttggagcacagaaaca

SEQ ID NO: 86026 - DNA, 75 bp, Homo sapiens
aaagaaaagtctgacgccgctgcggccgagtctcaacttggagcacagaaacacagtggcccccgacagctgagg

SEQ ID NO: 86027 - DNA, 80 bp, Homo sapiens
gtctgacgccgctgcggccgagtctcaacttggagcacagaaacacagtggcccccgacagctgagggcctgaaatagca

SEQ ID NO: 86028 - DNA, 79 bp, Homo sapiens
tgcggccgagtctcaacttggagcacagaaacacagtggcccccgacagctgagggcctgaaatagcagggcaggcctg

SEQ ID NO: 86029 - DNA, 76 bp, Homo sapiens
agcacagaaacacagtggcccccgacagctgagggcctgaaatagcagggcaggcctgggggcgctgaaagccctc

SEQ ID NO: 86030 - DNA, 74 bp, Homo sapiens
aaacacagtggcccccgacagctgagggcctgaaatagcagggcaggcctgggggcgctgaaagccctctgccc

SEQ ID NO: 86031 - DNA, 80 bp, Homo sapiens
cgacagctgagggcctgaaatagcagggcaggcctgggggcgctgaaagccctctgcccccttggctctgagcagctgtc

SEQ ID NO: 86032 - DNA, 78 bp, Homo sapiens
ctgagggcctgaaatagcagggcaggcctgggggcgctgaaagccctctgcccccttggctctgagcagctgtctggg

SEQ ID NO: 86033 - DNA, 78 bp, Homo sapiens
aaatagcagggcaggcctgggggcgctgaaagccctctgcccccttggctctgagcagctgtctgggggcaccagctg

SEQ ID NO: 86034 - DNA, 77 bp, Homo sapiens
aggcctgggggcgctgaaagccctctgcccccttggctctgagcagctgtctgggggcaccagctggagttctcaaa

SEQ ID NO: 86035 - DNA, 78 bp, Homo sapiens
cgctgaaagccctctgcccccttggctctgagcagctgtctgggggcaccagctggagttctcaaaatagccacctgg

SEQ ID NO: 86036 - DNA, 77 bp, Homo sapiens
aaagccctctgcccccttggctctgagcagctgtctgggggcaccagctggagttctcaaaatagccacctgggcca

SEQ ID NO: 86037 - DNA, 80 bp, Homo sapiens
cttggctctgagcagctgtctgggggcaccagctggagttctcaaaatagccacctgggccaccctgtttgcttgctgga

SEQ ID NO: 86038 - DNA, 72 bp, Homo sapiens
caccctgtttgcttgctggagcagagaccctgcccaaggaggagaggctggggaaaggggtgcctaaacgta

SEQ ID NO: 86039 - DNA, 75 bp, Homo sapiens
tttgcttgctggagcagagaccctgcccaaggaggagaggctggggaaaggggtgcctaaacgtagagccagaga

SEQ ID NO: 86040 - DNA, 74 bp, Homo sapiens
tgcccaaggaggagaggctggggaaaggggtgcctaaacgtagagccagagaccagcagaggccacctgcccat

SEQ ID NO: 86041 - DNA, 72 bp, Homo sapiens
aaggaggagaggctggggaaaggggtgcctaaacgtagagccagagaccagcagaggccacctgcccattcc

SEQ ID NO: 86042 - DNA, 72 bp, Homo sapiens
gggaaaggggtgcctaaacgtagagccagagaccagcagaggccacctgcccattccccacgccctcagaac

SEQ ID NO: 86043 - DNA, 79 bp, Homo sapiens
tgcctaaacgtagagccagagaccagcagaggccacctgcccattccccacgccctcagaacgcagctgcacctttcga

SEQ ID NO: 86044 - DNA, 77 bp, Homo sapiens
aaacgtagagccagagaccagcagaggccacctgcccattccccacgccctcagaacgcagctgcacctttcgacga

SEQ ID NO: 86045 - DNA, 79 bp, Homo sapiens
agaccagcagaggccacctgcccattccccacgccctcagaacgcagctgcacctttcgacgacctctgtaatactgca

SEQ ID NO: 86046 - DNA, 77 bp, Homo sapiens
aggccacctgcccattccccacgccctcagaacgcagctgcacctttcgacgacctctgtaatactgcaggcaggac

SEQ ID NO: 86047 - DNA, 76 bp, Homo sapiens
cctgcccattccccacgccctcagaacgcagctgcacctttcgacgacctctgtaatactgcaggcaggacccagg

SEQ ID NO: 86048 - DNA, 77 bp, Homo sapiens
acgccctcagaacgcagctgcacctttcgacgacctctgtaatactgcaggcaggacccagggcagcggctagaccc

SEQ ID NO: 86049 - DNA, 77 bp, Homo sapiens
agaacgcagctgcacctttcgacgacctctgtaatactgcaggcaggacccagggcagcggctagaccctgggtgtc

SEQ ID NO: 86050 - DNA, 73 bp, Homo sapiens
acctttcgacgacctctgtaatactgcaggcaggacccagggcagcggctagaccctgggtgtccgaggagag

SEQ ID NO: 86051 - DNA, 77 bp, Homo sapiens
tcgacgacctctgtaatactgcaggcaggacccagggcagcggctagaccctgggtgtccgaggagagggaggcaca

SEQ ID NO: 86052 - DNA, 74 bp, Homo sapiens
taatactgcaggcaggacccagggcagcggctagaccctgggtgtccgaggagagggaggcacaggtttagaaa

SEQ ID NO: 86053 - DNA, 69 bp, Homo sapiens
caggacccagggcagcggctagaccctgggtgtccgaggagagggaggcacaggtttagaaaaaagatt

SEQ ID NO: 86054 - DNA, 70 bp, Homo sapiens
ggcagcggctagaccctgggtgtccgaggagagggaggcacaggtttagaaaaaagattttgcttctctt

SEQ ID NO: 86055 - DNA, 69 bp, Homo sapiens
tagaccctgggtgtccgaggagagggaggcacaggtttagaaaaaagattttgcttctcttttgtacaa

SEQ ID NO: 86056 - DNA, 70 bp, Homo sapiens
tgtccgaggagagggaggcacaggtttagaaaaaagattttgcttctcttttgtacaaaaatagactcaa

SEQ ID NO: 86057 - DNA, 71 bp, Homo sapiens
gagagggaggcacaggtttagaaaaaagattttgcttctcttttgtacaaaaatagactcaagtctcatta

SEQ ID NO: 86058 - DNA, 72 bp, Homo sapiens
aggcacaggtttagaaaaaagattttgcttctcttttgtacaaaaatagactcaagtctcattagcagtagc

SEQ ID NO: 86059 - DNA, 75 bp, Homo sapiens
tgcttctcttttgtacaaaaatagactcaagtctcattagcagtagctaaaagtggctgtctttgtataaaacta

SEQ ID NO: 86060 - DNA, 73 bp, Homo sapiens
ctcttttgtacaaaaatagactcaagtctcattagcagtagctaaaagtggctgtctttgtataaaactagaa

SEQ ID NO: 86061 - DNA, 72 bp, Homo sapiens
aagtctcattagcagtagctaaaagtggctgtctttgtataaaactagaaaaggcaggcgcgccaccccaag

SEQ ID NO: 86062 - DNA, 71 bp, Homo sapiens
attagcagtagctaaaagtggctgtctttgtataaaactagaaaaggcaggcgcgccaccccaagggccta

SEQ ID NO: 86063 - DNA, 70 bp, Homo sapiens
taaaagtggctgtctttgtataaaactagaaaaggcaggcgcgccaccccaagggcctaggagtcttctg

SEQ ID NO: 86064 - DNA, 72 bp, Homo sapiens
tgtctttgtataaaactagaaaaggcaggcgcgccaccccaagggcctaggagtcttctggcgagacaggag

SEQ ID NO: 86065 - DNA, 71 bp, Homo sapiens
ataaaactagaaaaggcaggcgcgccaccccaagggcctaggagtcttctggcgagacaggaggctgaacc

SEQ ID NO: 86066 - DNA, 73 bp, Homo sapiens
aaaaggcaggcgcgccaccccaagggcctaggagtcttctggcgagacaggaggctgaaccccggaggctgca

SEQ ID NO: 86067 - DNA, 74 bp, Homo sapiens
cgcgccaccccaagggcctaggagtcttctggcgagacaggaggctgaaccccggaggctgcagccagggagga

SEQ ID NO: 86068 - DNA, 74 bp, Homo sapiens
aagggcctaggagtcttctggcgagacaggaggctgaaccccggaggctgcagccagggaggaggcagtgggct

SEQ ID NO: 86069 - DNA, 75 bp, Homo sapiens
aggagtcttctggcgagacaggaggctgaaccccggaggctgcagccagggaggaggcagtgggcttcctgggga

SEQ ID NO: 86070 - DNA, 76 bp, Homo sapiens
agacaggaggctgaaccccggaggctgcagccagggaggaggcagtgggcttcctggggagcccatcataagcagg

SEQ ID NO: 86071 - DNA, 78 bp, Homo sapiens
aggctgaaccccggaggctgcagccagggaggaggcagtgggcttcctggggagcccatcataagcagggactgctca

SEQ ID NO: 86072 - DNA, 80 bp, Homo sapiens
gaggctgcagccagggaggaggcagtgggcttcctggggagcccatcataagcagggactgctcaggaagcgcagggagg

SEQ ID NO: 86073 - DNA, 76 bp, Homo sapiens
ccagggaggaggcagtgggcttcctggggagcccatcataagcagggactgctcaggaagcgcagggagggccgag

SEQ ID NO: 86074 - DNA, 78 bp, Homo sapiens
aggcagtgggcttcctggggagcccatcataagcagggactgctcaggaagcgcagggagggccgaggtgggcttgca

SEQ ID NO: 86075 - DNA, 78 bp, Homo sapiens
ttcctggggagcccatcataagcagggactgctcaggaagcgcagggagggccgaggtgggcttgcagccacccgcca

SEQ ID NO: 86076 - DNA, 80 bp, Homo sapiens
tcataagcagggactgctcaggaagcgcagggagggccgaggtgggcttgcagccacccgccagggccagacgtctgcag

SEQ ID NO: 86077 - DNA, 75 bp, Homo sapiens
aagcgcagggagggccgaggtgggcttgcagccacccgccagggccagacgtctgcaggggctgccctgaaagcc

SEQ ID NO: 86078 - DNA, 79 bp, Homo sapiens
gccgaggtgggcttgcagccacccgccagggccagacgtctgcaggggctgccctgaaagccggcggtgctggctcaga

SEQ ID NO: 86079 - DNA, 83 bp, Homo sapiens
tgggcttgcagccacccgccagggccagacgtctgcaggggctgccctgaaagccggcggtgctggctcagatgagcatcttc

SEQ ID NO: 86080 - DNA, 77 bp, Homo sapiens
acccgccagggccagacgtctgcaggggctgccctgaaagccggcggtgctggctcagatgagcatcttcctcgggt

SEQ ID NO: 86081 - DNA, 76 bp, Homo sapiens
ggccagacgtctgcaggggctgccctgaaagccggcggtgctggctcagatgagcatcttcctcgggtttattttt

SEQ ID NO: 86082 - DNA, 74 bp, Homo sapiens
acgtctgcaggggctgccctgaaagccggcggtgctggctcagatgagcatcttcctcgggtttatttttttaa

SEQ ID NO: 86083 - DNA, 66 bp, Homo sapiens
tttttttaaataaatcctctctcaccgccttttgctcccccgaccctcccagatccccgccatcgg

SEQ ID NO: 86084 - DNA, 68 bp, Homo sapiens
ttaaataaatcctctctcaccgccttttgctcccccgaccctcccagatccccgccatcggggagggc

SEQ ID NO: 86085 - DNA, 69 bp, Homo sapiens
ctctctcaccgccttttgctcccccgaccctcccagatccccgccatcggggagggcggctagggccaa

SEQ ID NO: 86086 - DNA, 71 bp, Homo sapiens
ccttttgctcccccgaccctcccagatccccgccatcggggagggcggctagggccaagcctgcagctgcc

SEQ ID NO: 86087 - DNA, 73 bp, Homo sapiens
ccgaccctcccagatccccgccatcggggagggcggctagggccaagcctgcagctgccgctggtcgtactcg

SEQ ID NO: 86088 - DNA, 78 bp, Homo sapiens
agatccccgccatcggggagggcggctagggccaagcctgcagctgccgctggtcgtactcggcgatgagcctcttga

SEQ ID NO: 86089 - DNA, 80 bp, Homo sapiens
catcggggagggcggctagggccaagcctgcagctgccgctggtcgtactcggcgatgagcctcttgatgtgggccagct

SEQ ID NO: 86090 - DNA, 84 bp, Homo sapiens
gggcggctagggccaagcctgcagctgccgctggtcgtactcggcgatgagcctcttgatgtgggccagcttgctgtgcaggta

SEQ ID NO: 86091 - DNA, 87 bp, Homo sapiens
gccaagcctgcagctgccgctggtcgtactcggcgatgagcctcttgatgtgggccagcttgctgtgcaggtactcgcagcggtgct

SEQ ID NO: 86092 - DNA, 86 bp, Homo sapiens
cagctgccgctggtcgtactcggcgatgagcctcttgatgtgggccagcttgctgtgcaggtactcgcagcggtgcttctcctggc

SEQ ID NO: 86093 - DNA, 84 bp, Homo sapiens
tggtcgtactcggcgatgagcctcttgatgtgggccagcttgctgtgcaggtactcgcagcggtgcttctcctggctgtagttg

SEQ ID NO: 86094 - DNA, 84 bp, Homo sapiens
tactcggcgatgagcctcttgatgtgggccagcttgctgtgcaggtactcgcagcggtgcttctcctggctgtagttggtgttg

SEQ ID NO: 86095 - DNA, 83 bp, Homo sapiens
atgagcctcttgatgtgggccagcttgctgtgcaggtactcgcagcggtgcttctcctggctgtagttggtgttggtctgtgg

SEQ ID NO: 86096 - DNA, 84 bp, Homo sapiens
atgtgggccagcttgctgtgcaggtactcgcagcggtgcttctcctggctgtagttggtgttggtctgtgggacagcacagtca

SEQ ID NO: 86097 - DNA, 86 bp, Homo sapiens
cttgctgtgcaggtactcgcagcggtgcttctcctggctgtagttggtgttggtctgtgggacagcacagtcatgctcaggacaga

SEQ ID NO: 86098 - DNA, 82 bp, Homo sapiens
aggtactcgcagcggtgcttctcctggctgtagttggtgttggtctgtgggacagcacagtcatgctcaggacagagccgcc

SEQ ID NO: 86099 - DNA, 74 bp, Homo sapiens
ctgccccgggcccaccctcctccctccagctcccatggctcacttggagcccaccccaacacaagagacactca

SEQ ID NO: 86100 - DNA, 73 bp, Homo sapiens
ccaccctcctccctccagctcccatggctcacttggagcccaccccaacacaagagacactcacctttttgat

SEQ ID NO: 86101 - DNA, 74 bp, Homo sapiens
tccctccagctcccatggctcacttggagcccaccccaacacaagagacactcacctttttgatttttcgatat

SEQ ID NO: 86102 - DNA, 74 bp, Homo sapiens
tcccatggctcacttggagcccaccccaacacaagagacactcacctttttgatttttcgatattcctgcaaaa

SEQ ID NO: 86103 - DNA, 72 bp, Homo sapiens
acttggagcccaccccaacacaagagacactcacctttttgatttttcgatattcctgcaaaatctgccctc

SEQ ID NO: 86104 - DNA, 74 bp, Homo sapiens
caccccaacacaagagacactcacctttttgatttttcgatattcctgcaaaatctgccctcgagtagtctaga

SEQ ID NO: 86105 - DNA, 72 bp, Homo sapiens
acaagagacactcacctttttgatttttcgatattcctgcaaaatctgccctcgagtagtctagaagaaaaa

SEQ ID NO: 86106 - DNA, 70 bp, Homo sapiens
acactcacctttttgatttttcgatattcctgcaaaatctgccctcgagtagtctagaagaaaaacaaaa

SEQ ID NO: 86107 - DNA, 71 bp, Homo sapiens
gatttttcgatattcctgcaaaatctgccctcgagtagtctagaagaaaaacaaaattttgagaaaacaga

SEQ ID NO: 86108 - DNA, 73 bp, Homo sapiens
ttcgatattcctgcaaaatctgccctcgagtagtctagaagaaaaacaaaattttgagaaaacagaatgtgtc

SEQ ID NO: 86109 - DNA, 69 bp, Homo sapiens
aaaatctgccctcgagtagtctagaagaaaaacaaaattttgagaaaacagaatgtgtccccgcctaca

SEQ ID NO: 86110 - DNA, 68 bp, Homo sapiens
tcgagtagtctagaagaaaaacaaaattttgagaaaacagaatgtgtccccgcctacaggaaacccaa

SEQ ID NO: 86111 - DNA, 75 bp, Homo sapiens
cctggctcccgccagagccagggcacagtaggcagcgggggggctctacctcatactcctcggagccctgggaga

SEQ ID NO: 86112 - DNA, 76 bp, Homo sapiens
agagccagggcacagtaggcagcgggggggctctacctcatactcctcggagccctgggagagctgccggagctgg

SEQ ID NO: 86113 - DNA, 77 bp, Homo sapiens
cacagtaggcagcgggggggctctacctcatactcctcggagccctgggagagctgccggagctgggcgtcgagctg

SEQ ID NO: 86114 - DNA, 74 bp, Homo sapiens
agcgggggggctctacctcatactcctcggagccctgggagagctgccggagctgggcgtcgagctgggtgaac

SEQ ID NO: 86115 - DNA, 79 bp, Homo sapiens
ctctacctcatactcctcggagccctgggagagctgccggagctgggcgtcgagctgggtgaaccgccgcgtgatgcgc

SEQ ID NO: 86116 - DNA, 81 bp, Homo sapiens
ctcatactcctcggagccctgggagagctgccggagctgggcgtcgagctgggtgaaccgccgcgtgatgcgctcaatgcg

SEQ ID NO: 86117 - DNA, 81 bp, Homo sapiens
agccctgggagagctgccggagctgggcgtcgagctgggtgaaccgccgcgtgatgcgctcaatgcgggcgtgcaggtcgc

SEQ ID NO: 86118 - DNA, 81 bp, Homo sapiens
agagctgccggagctgggcgtcgagctgggtgaaccgccgcgtgatgcgctcaatgcgggcgtgcaggtcgcggtactcgc

SEQ ID NO: 86119 - DNA, 81 bp, Homo sapiens
agctgggcgtcgagctgggtgaaccgccgcgtgatgcgctcaatgcgggcgtgcaggtcgcggtactcgctgtactcggca

SEQ ID NO: 86120 - DNA, 81 bp, Homo sapiens
tcgagctgggtgaaccgccgcgtgatgcgctcaatgcgggcgtgcaggtcgcggtactcgctgtactcggcattgaagtcg

SEQ ID NO: 86121 - DNA, 80 bp, Homo sapiens
gtgaaccgccgcgtgatgcgctcaatgcgggcgtgcaggtcgcggtactcgctgtactcggcattgaagtcgttcttgta

SEQ ID NO: 86122 - DNA, 84 bp, Homo sapiens
cgtgatgcgctcaatgcgggcgtgcaggtcgcggtactcgctgtactcggcattgaagtcgttcttgtagctctggcgctgctc

SEQ ID NO: 86123 - DNA, 81 bp, Homo sapiens
ctcaatgcgggcgtgcaggtcgcggtactcgctgtactcggcattgaagtcgttcttgtagctctggcgctgctccgaaga

SEQ ID NO: 86124 - DNA, 80 bp, Homo sapiens
gggcgtgcaggtcgcggtactcgctgtactcggcattgaagtcgttcttgtagctctggcgctgctccgaagaggagatg

SEQ ID NO: 86125 - DNA, 79 bp, Homo sapiens
cggtactcgctgtactcggcattgaagtcgttcttgtagctctggcgctgctccgaagaggagatggctgcgtacttcc

SEQ ID NO: 86126 - DNA, 81 bp, Homo sapiens
ctcgctgtactcggcattgaagtcgttcttgtagctctggcgctgctccgaagaggagatggctgcgtacttcctgaaaca

SEQ ID NO: 86127 - DNA, 80 bp, Homo sapiens
tcggcattgaagtcgttcttgtagctctggcgctgctccgaagaggagatggctgcgtacttcctgaaacaggagagagg

SEQ ID NO: 86128 - DNA, 79 bp, Homo sapiens
agtcgttcttgtagctctggcgctgctccgaagaggagatggctgcgtacttcctgaaacaggagagaggggccactga

SEQ ID NO: 86129 - DNA, 81 bp, Homo sapiens
tagctctggcgctgctccgaagaggagatggctgcgtacttcctgaaacaggagagaggggccactgagtggaggctggaa

SEQ ID NO: 86130 - DNA, 72 bp, Homo sapiens
tgggggagggggtctgaacccagaaaagggaggcctggcctgcagggcccagacaaacactcacagcaagta

SEQ ID NO: 86131 - DNA, 76 bp, Homo sapiens
gtctgaacccagaaaagggaggcctggcctgcagggcccagacaaacactcacagcaagtagtcaggcgtctccga

SEQ ID NO: 86132 - DNA, 74 bp, Homo sapiens
agaaaagggaggcctggcctgcagggcccagacaaacactcacagcaagtagtcaggcgtctccgacgtggacg

SEQ ID NO: 86133 - DNA, 76 bp, Homo sapiens
aggcctggcctgcagggcccagacaaacactcacagcaagtagtcaggcgtctccgacgtggacgtgggaacactg

SEQ ID NO: 86134 - DNA, 78 bp, Homo sapiens
tgcagggcccagacaaacactcacagcaagtagtcaggcgtctccgacgtggacgtgggaacactggaaacgctgcag

SEQ ID NO: 86135 - DNA, 74 bp, Homo sapiens
gacaaacactcacagcaagtagtcaggcgtctccgacgtggacgtgggaacactggaaacgctgcaggttccgt

SEQ ID NO: 86136 - DNA, 72 bp, Homo sapiens
actcacagcaagtagtcaggcgtctccgacgtggacgtgggaacactggaaacgctgcaggttccgtttaaa

SEQ ID NO: 86137 - DNA, 68 bp, Homo sapiens
aagtagtcaggcgtctccgacgtggacgtgggaacactggaaacgctgcaggttccgtttaaacctac

SEQ ID NO: 86138 - DNA, 70 bp, Homo sapiens
cgtctccgacgtggacgtgggaacactggaaacgctgcaggttccgtttaaacctacgagagcaaacaca

SEQ ID NO: 86139 - DNA, 69 bp, Homo sapiens
acgtggacgtgggaacactggaaacgctgcaggttccgtttaaacctacgagagcaaacacatacctcc

SEQ ID NO: 86140 - DNA, 75 bp, Homo sapiens
aacactggaaacgctgcaggttccgtttaaacctacgagagcaaacacatacctcctgagtctgcgcccatggca

SEQ ID NO: 86141 - DNA, 73 bp, Homo sapiens
aaacgctgcaggttccgtttaaacctacgagagcaaacacatacctcctgagtctgcgcccatggcaccggtc

SEQ ID NO: 86142 - DNA, 71 bp, Homo sapiens
gggccagtacttagagccccggcaacgccctcctgcctgggcacctacctggggtgtctgctggggctccg

SEQ ID NO: 86143 - DNA, 70 bp, Homo sapiens
tacttagagccccggcaacgccctcctgcctgggcacctacctggggtgtctgctggggctccgggggtg

SEQ ID NO: 86144 - DNA, 75 bp, Homo sapiens
caacgccctcctgcctgggcacctacctggggtgtctgctggggctccgggggtggcatgggtggcaggtgcaca

SEQ ID NO: 86145 - DNA, 76 bp, Homo sapiens
ctcctgcctgggcacctacctggggtgtctgctggggctccgggggtggcatgggtggcaggtgcacagtctggaa

SEQ ID NO: 86146 - DNA, 73 bp, Homo sapiens
acctacctggggtgtctgctggggctccgggggtggcatgggtggcaggtgcacagtctggaagctgggcccg

SEQ ID NO: 86147 - DNA, 76 bp, Homo sapiens
ggtgtctgctggggctccgggggtggcatgggtggcaggtgcacagtctggaagctgggcccggggcttgtcctca

SEQ ID NO: 86148 - DNA, 74 bp, Homo sapiens
tggggctccgggggtggcatgggtggcaggtgcacagtctggaagctgggcccggggcttgtcctcagccgccc

SEQ ID NO: 86149 - DNA, 75 bp, Homo sapiens
gggtggcatgggtggcaggtgcacagtctggaagctgggcccggggcttgtcctcagccgccctctccttgtctt

SEQ ID NO: 86150 - DNA, 76 bp, Homo sapiens
atgggtggcaggtgcacagtctggaagctgggcccggggcttgtcctcagccgccctctccttgtctttgtgcttc

SEQ ID NO: 86151 - DNA, 76 bp, Homo sapiens
tgcacagtctggaagctgggcccggggcttgtcctcagccgccctctccttgtctttgtgcttcttggacttcttc

SEQ ID NO: 86152 - DNA, 73 bp, Homo sapiens
tctggaagctgggcccggggcttgtcctcagccgccctctccttgtctttgtgcttcttggacttcttcttgg

SEQ ID NO: 86153 - DNA, 74 bp, Homo sapiens
ccggggcttgtcctcagccgccctctccttgtctttgtgcttcttggacttcttcttgggcttgctgcgcgagg

SEQ ID NO: 86154 - DNA, 77 bp, Homo sapiens
ttgtcctcagccgccctctccttgtctttgtgcttcttggacttcttcttgggcttgctgcgcgaggggctgccgtg

SEQ ID NO: 86155 - DNA, 77 bp, Homo sapiens
agccgccctctccttgtctttgtgcttcttggacttcttcttgggcttgctgcgcgaggggctgccgtgtggcctgc

SEQ ID NO: 86156 - DNA, 80 bp, Homo sapiens
tccttgtctttgtgcttcttggacttcttcttgggcttgctgcgcgaggggctgccgtgtggcctgctgggctgggcaca

SEQ ID NO: 86157 - DNA, 82 bp, Homo sapiens
tgtgcttcttggacttcttcttgggcttgctgcgcgaggggctgccgtgtggcctgctgggctgggcacagtccgtcagcag

SEQ ID NO: 86158 - DNA, 79 bp, Homo sapiens
acttcttcttgggcttgctgcgcgaggggctgccgtgtggcctgctgggctgggcacagtccgtcagcaggggcaggcc

SEQ ID NO: 86159 - DNA, 82 bp, Homo sapiens
ttgggcttgctgcgcgaggggctgccgtgtggcctgctgggctgggcacagtccgtcagcaggggcaggccgaggcgcacag

SEQ ID NO: 86160 - DNA, 78 bp, Homo sapiens
cgaggggctgccgtgtggcctgctgggctgggcacagtccgtcagcaggggcaggccgaggcgcacagtgggggctgg

SEQ ID NO: 86161 - DNA, 79 bp, Homo sapiens
cgtgtggcctgctgggctgggcacagtccgtcagcaggggcaggccgaggcgcacagtgggggctggggcagccgcctc

SEQ ID NO: 86162 - DNA, 82 bp, Homo sapiens
tgctgggctgggcacagtccgtcagcaggggcaggccgaggcgcacagtgggggctggggcagccgcctctccgtgctcaca

SEQ ID NO: 86163 - DNA, 80 bp, Homo sapiens
tgggcacagtccgtcagcaggggcaggccgaggcgcacagtgggggctggggcagccgcctctccgtgctcacagtctcg

SEQ ID NO: 86164 - DNA, 80 bp, Homo sapiens
tccgtcagcaggggcaggccgaggcgcacagtgggggctggggcagccgcctctccgtgctcacagtctcggccgctgtg

SEQ ID NO: 86165 - DNA, 80 bp, Homo sapiens
caggccgaggcgcacagtgggggctggggcagccgcctctccgtgctcacagtctcggccgctgtggcccaggtcattgc

SEQ ID NO: 86166 - DNA, 81 bp, Homo sapiens
aggcgcacagtgggggctggggcagccgcctctccgtgctcacagtctcggccgctgtggcccaggtcattgctgacatcg

SEQ ID NO: 86167 - DNA, 77 bp, Homo sapiens
agccgcctctccgtgctcacagtctcggccgctgtggcccaggtcattgctgacatcggccagggggtcgtgggccc

SEQ ID NO: 86168 - DNA, 76 bp, Homo sapiens
ctctccgtgctcacagtctcggccgctgtggcccaggtcattgctgacatcggccagggggtcgtgggccctcggg

SEQ ID NO: 86169 - DNA, 76 bp, Homo sapiens
tcacagtctcggccgctgtggcccaggtcattgctgacatcggccagggggtcgtgggccctcgggggctccagcc

SEQ ID NO: 86170 - DNA, 72 bp, Homo sapiens
cggccgctgtggcccaggtcattgctgacatcggccagggggtcgtgggccctcgggggctccagccgcggg

SEQ ID NO: 86171 - DNA, 74 bp, Homo sapiens
aggtcattgctgacatcggccagggggtcgtgggccctcgggggctccagccgcgggggcaggtgagtgctgga

SEQ ID NO: 86172 - DNA, 75 bp, Homo sapiens
attgctgacatcggccagggggtcgtgggccctcgggggctccagccgcgggggcaggtgagtgctggagctgag

SEQ ID NO: 86173 - DNA, 75 bp, Homo sapiens
ggtcgtgggccctcgggggctccagccgcgggggcaggtgagtgctggagctgagggtgtccgtgctggctggtg

SEQ ID NO: 86174 - DNA, 73 bp, Homo sapiens
cctcgggggctccagccgcgggggcaggtgagtgctggagctgagggtgtccgtgctggctggtgggcccggg

SEQ ID NO: 86175 - DNA, 76 bp, Homo sapiens
ccgcgggggcaggtgagtgctggagctgagggtgtccgtgctggctggtgggcccggggtgggcagcaaggcctca

SEQ ID NO: 86176 - DNA, 76 bp, Homo sapiens
aggtgagtgctggagctgagggtgtccgtgctggctggtgggcccggggtgggcagcaaggcctcacggccattgg

SEQ ID NO: 86177 - DNA, 77 bp, Homo sapiens
tggagctgagggtgtccgtgctggctggtgggcccggggtgggcagcaaggcctcacggccattgggcacgcccagc

SEQ ID NO: 86178 - DNA, 75 bp, Homo sapiens
tggtgggcccggggtgggcagcaaggcctcacggccattgggcacgcccagcttcccgttgacggcaggctgagc

SEQ ID NO: 86179 - DNA, 83 bp, Homo sapiens
tgggcagcaaggcctcacggccattgggcacgcccagcttcccgttgacggcaggctgagctctctgagtgaagtgcgatatc

SEQ ID NO: 86180 - DNA, 78 bp, Homo sapiens
aaggcctcacggccattgggcacgcccagcttcccgttgacggcaggctgagctctctgagtgaagtgcgatatccgg

SEQ ID NO: 86181 - DNA, 77 bp, Homo sapiens
cattgggcacgcccagcttcccgttgacggcaggctgagctctctgagtgaagtgcgatatccggggtttcttgttg

SEQ ID NO: 86182 - DNA, 75 bp, Homo sapiens
acgcccagcttcccgttgacggcaggctgagctctctgagtgaagtgcgatatccggggtttcttgttggctagg

SEQ ID NO: 86183 - DNA, 75 bp, Homo sapiens
ccgttgacggcaggctgagctctctgagtgaagtgcgatatccggggtttcttgttggctagggggtcgatgaaa

SEQ ID NO: 86184 - DNA, 76 bp, Homo sapiens
acggcaggctgagctctctgagtgaagtgcgatatccggggtttcttgttggctagggggtcgatgaaatcaggag

SEQ ID NO: 86185 - DNA, 78 bp, Homo sapiens
tctctgagtgaagtgcgatatccggggtttcttgttggctagggggtcgatgaaatcaggaggctgcagccgcttctg

SEQ ID NO: 86186 - DNA, 76 bp, Homo sapiens
agtgaagtgcgatatccggggtttcttgttggctagggggtcgatgaaatcaggaggctgcagccgcttctggaga

SEQ ID NO: 86187 - DNA, 78 bp, Homo sapiens
atatccggggtttcttgttggctagggggtcgatgaaatcaggaggctgcagccgcttctggagaggagcagagatca

SEQ ID NO: 86188 - DNA, 78 bp, Homo sapiens
ggtttcttgttggctagggggtcgatgaaatcaggaggctgcagccgcttctggagaggagcagagatcattttagag

SEQ ID NO: 86189 - DNA, 78 bp, Homo sapiens
acagagtgccctgcaggtgcttgggacagtcaccccaggcatgcctcacttacctgtgggggcgaggccgagcgccca

SEQ ID NO: 86190 - DNA, 75 bp, Homo sapiens
aggtgcttgggacagtcaccccaggcatgcctcacttacctgtgggggcgaggccgagcgcccacgctcgcctgg

SEQ ID NO: 86191 - DNA, 74 bp, Homo sapiens
ttgggacagtcaccccaggcatgcctcacttacctgtgggggcgaggccgagcgcccacgctcgcctggggggc

SEQ ID NO: 86192 - DNA, 77 bp, Homo sapiens
caggcatgcctcacttacctgtgggggcgaggccgagcgcccacgctcgcctggggggctggaggcagcagggtctc

SEQ ID NO: 86193 - DNA, 75 bp, Homo sapiens
atgcctcacttacctgtgggggcgaggccgagcgcccacgctcgcctggggggctggaggcagcagggtctccaa

SEQ ID NO: 86194 - DNA, 76 bp, Homo sapiens
tacctgtgggggcgaggccgagcgcccacgctcgcctggggggctggaggcagcagggtctccaaggaggctgcca

SEQ ID NO: 86195 - DNA, 81 bp, Homo sapiens
aggccgagcgcccacgctcgcctggggggctggaggcagcagggtctccaaggaggctgccagtgctctgtggctggcaca

SEQ ID NO: 86196 - DNA, 82 bp, Homo sapiens
ccacgctcgcctggggggctggaggcagcagggtctccaaggaggctgccagtgctctgtggctggcacagcttcctgcgaa

SEQ ID NO: 86197 - DNA, 82 bp, Homo sapiens
ctggggggctggaggcagcagggtctccaaggaggctgccagtgctctgtggctggcacagcttcctgcgaaggagaggcag

SEQ ID NO: 86198 - DNA, 85 bp, Homo sapiens
tggaggcagcagggtctccaaggaggctgccagtgctctgtggctggcacagcttcctgcgaaggagaggcagggctaggtcaga

SEQ ID NO: 86199 - DNA, 81 bp, Homo sapiens
agggtctccaaggaggctgccagtgctctgtggctggcacagcttcctgcgaaggagaggcagggctaggtcagaaggtgc

SEQ ID NO: 86200 - DNA, 82 bp, Homo sapiens
tccaaggaggctgccagtgctctgtggctggcacagcttcctgcgaaggagaggcagggctaggtcagaaggtgctgagggg

SEQ ID NO: 86201 - DNA, 79 bp, Homo sapiens
ctgccttcatgcgggtggggacatgctgggggatgggaggcggcattaccggacgagcacccgcttcagcagctgctgg

SEQ ID NO: 86202 - DNA, 76 bp, Homo sapiens
atgcgggtggggacatgctgggggatgggaggcggcattaccggacgagcacccgcttcagcagctgctggtcccc

SEQ ID NO: 86203 - DNA, 77 bp, Homo sapiens
acatgctgggggatgggaggcggcattaccggacgagcacccgcttcagcagctgctggtccccctccgagtagcca

SEQ ID NO: 86204 - DNA, 75 bp, Homo sapiens
atgggaggcggcattaccggacgagcacccgcttcagcagctgctggtccccctccgagtagccaggccagtcct

SEQ ID NO: 86205 - DNA, 78 bp, Homo sapiens
cattaccggacgagcacccgcttcagcagctgctggtccccctccgagtagccaggccagtccttctgcacatccttg

SEQ ID NO: 86206 - DNA, 81 bp, Homo sapiens
acgagcacccgcttcagcagctgctggtccccctccgagtagccaggccagtccttctgcacatccttgtacatgcagtcc

SEQ ID NO: 86207 - DNA, 83 bp, Homo sapiens
cttcagcagctgctggtccccctccgagtagccaggccagtccttctgcacatccttgtacatgcagtcctgcagtgtacacg

SEQ ID NO: 86208 - DNA, 81 bp, Homo sapiens
tgctggtccccctccgagtagccaggccagtccttctgcacatccttgtacatgcagtcctgcagtgtacacgtgccgtcc

SEQ ID NO: 86209 - DNA, 83 bp, Homo sapiens
cctccgagtagccaggccagtccttctgcacatccttgtacatgcagtcctgcagtgtacacgtgccgtccttagcactcatg

SEQ ID NO: 86210 - DNA, 84 bp, Homo sapiens
agtagccaggccagtccttctgcacatccttgtacatgcagtcctgcagtgtacacgtgccgtccttagcactcatgttggcca

SEQ ID NO: 86211 - DNA, 85 bp, Homo sapiens
agtccttctgcacatccttgtacatgcagtcctgcagtgtacacgtgccgtccttagcactcatgttggccacctgcaagacaga

SEQ ID NO: 86212 - DNA, 86 bp, Homo sapiens
catccttgtacatgcagtcctgcagtgtacacgtgccgtccttagcactcatgttggccacctgcaagacagagccagccatcact

SEQ ID NO: 86213 - DNA, 86 bp, Homo sapiens
ttgtacatgcagtcctgcagtgtacacgtgccgtccttagcactcatgttggccacctgcaagacagagccagccatcactttgtg

SEQ ID NO: 86214 - DNA, 82 bp, Homo sapiens
agtcctgcagtgtacacgtgccgtccttagcactcatgttggccacctgcaagacagagccagccatcactttgtgggaatc

SEQ ID NO: 86215 - DNA, 76 bp, Homo sapiens
atctgcggagaccactggtaaagacaagacatcggggcggcacccacctgctggaggaggccatccagcgcgtcct

SEQ ID NO: 86216 - DNA, 75 bp, Homo sapiens
agaccactggtaaagacaagacatcggggcggcacccacctgctggaggaggccatccagcgcgtccttgtccgc

SEQ ID NO: 86217 - DNA, 78 bp, Homo sapiens
acatcggggcggcacccacctgctggaggaggccatccagcgcgtccttgtccgcctgcgtcaggccgtccttctgca

SEQ ID NO: 86218 - DNA, 84 bp, Homo sapiens
tggaggaggccatccagcgcgtccttgtccgcctgcgtcaggccgtccttctgcagtcgcagcagcagctcagccttgcggtag

SEQ ID NO: 86219 - DNA, 82 bp, Homo sapiens
ccatccagcgcgtccttgtccgcctgcgtcaggccgtccttctgcagtcgcagcagcagctcagccttgcggtagggccgta

SEQ ID NO: 86220 - DNA, 81 bp, Homo sapiens
cgtccttgtccgcctgcgtcaggccgtccttctgcagtcgcagcagcagctcagccttgcggtagggccgtagtgccagga

SEQ ID NO: 86221 - DNA, 85 bp, Homo sapiens
tgtccgcctgcgtcaggccgtccttctgcagtcgcagcagcagctcagccttgcggtagggccgtagtgccaggaggtgcagcac

SEQ ID NO: 86222 - DNA, 84 bp, Homo sapiens
tcaggccgtccttctgcagtcgcagcagcagctcagccttgcggtagggccgtagtgccaggaggtgcagcactcggtcacgga

SEQ ID NO: 86223 - DNA, 83 bp, Homo sapiens
ttctgcagtcgcagcagcagctcagccttgcggtagggccgtagtgccaggaggtgcagcactcggtcacggaagggcctctg

SEQ ID NO: 86224 - DNA, 78 bp, Homo sapiens
agcagcagctcagccttgcggtagggccgtagtgccaggaggtgcagcactcggtcacggaagggcctctgggacacc

SEQ ID NO: 86225 - DNA, 74 bp, Homo sapiens
agctcagccttgcggtagggccgtagtgccaggaggtgcagcactcggtcacggaagggcctctgggacacccc

SEQ ID NO: 86226 - DNA, 73 bp, Homo sapiens
ttgcggtagggccgtagtgccaggaggtgcagcactcggtcacggaagggcctctgggacaccccgctgcccc

SEQ ID NO: 86227 - DNA, 77 bp, Homo sapiens
tagtgccaggaggtgcagcactcggtcacggaagggcctctgggacaccccgctgcccccactcacggcactggcac

SEQ ID NO: 86228 - DNA, 75 bp, Homo sapiens
aggtgcagcactcggtcacggaagggcctctgggacaccccgctgcccccactcacggcactggcaccactcttc

SEQ ID NO: 86229 - DNA, 75 bp, Homo sapiens
agcactcggtcacggaagggcctctgggacaccccgctgcccccactcacggcactggcaccactcttcctgatg

SEQ ID NO: 86230 - DNA, 76 bp, Homo sapiens
aagggcctctgggacaccccgctgcccccactcacggcactggcaccactcttcctgatggcactcgccaagttga

SEQ ID NO: 86231 - DNA, 76 bp, Homo sapiens
cctctgggacaccccgctgcccccactcacggcactggcaccactcttcctgatggcactcgccaagttgatgggg

SEQ ID NO: 86232 - DNA, 76 bp, Homo sapiens
gctgcccccactcacggcactggcaccactcttcctgatggcactcgccaagttgatgggggttgcccgcttccgg

SEQ ID NO: 86233 - DNA, 75 bp, Homo sapiens
actcacggcactggcaccactcttcctgatggcactcgccaagttgatgggggttgcccgcttccgggagggcac

SEQ ID NO: 86234 - DNA, 77 bp, Homo sapiens
tggcaccactcttcctgatggcactcgccaagttgatgggggttgcccgcttccgggagggcaccgcgtctgttgca

SEQ ID NO: 86235 - DNA, 74 bp, Homo sapiens
actcttcctgatggcactcgccaagttgatgggggttgcccgcttccgggagggcaccgcgtctgttgcacctg

SEQ ID NO: 86236 - DNA, 72 bp, Homo sapiens
atggcactcgccaagttgatgggggttgcccgcttccgggagggcaccgcgtctgttgcacctggggctggt

SEQ ID NO: 86237 - DNA, 68 bp, Homo sapiens
aagttgatgggggttgcccgcttccgggagggcaccgcgtctgttgcacctggggctggtttccgaaa

SEQ ID NO: 86238 - DNA, 68 bp, Homo sapiens
ggttgcccgcttccgggagggcaccgcgtctgttgcacctggggctggtttccgaaactgaaccttct

SEQ ID NO: 86239 - DNA, 72 bp, Homo sapiens
ttccgggagggcaccgcgtctgttgcacctggggctggtttccgaaactgaaccttcttgcctgcaacaaga

SEQ ID NO: 86240 - DNA, 74 bp, Homo sapiens
gcaccgcgtctgttgcacctggggctggtttccgaaactgaaccttcttgcctgcaacaagaatccaagcttta

SEQ ID NO: 86241 - DNA, 73 bp, Homo sapiens
tctgttgcacctggggctggtttccgaaactgaaccttcttgcctgcaacaagaatccaagctttagggaaca

SEQ ID NO: 86242 - DNA, 70 bp, Homo sapiens
acctggggctggtttccgaaactgaaccttcttgcctgcaacaagaatccaagctttagggaacagagag

SEQ ID NO: 86243 - DNA, 79 bp, Homo sapiens
actggcagctgcccggctgccctacagccctgccaaacccactgctcacccaggtagcggcctccagccttgatgacaa

SEQ ID NO: 86244 - DNA, 77 bp, Homo sapiens
ccggctgccctacagccctgccaaacccactgctcacccaggtagcggcctccagccttgatgacaatggcacttcg

SEQ ID NO: 86245 - DNA, 79 bp, Homo sapiens
tacagccctgccaaacccactgctcacccaggtagcggcctccagccttgatgacaatggcacttcggctccgcgtctc

SEQ ID NO: 86246 - DNA, 76 bp, Homo sapiens
ccaaacccactgctcacccaggtagcggcctccagccttgatgacaatggcacttcggctccgcgtctcctcctcc

SEQ ID NO: 86247 - DNA, 78 bp, Homo sapiens
actgctcacccaggtagcggcctccagccttgatgacaatggcacttcggctccgcgtctcctcctccgcctgggcca

SEQ ID NO: 86248 - DNA, 79 bp, Homo sapiens
cccaggtagcggcctccagccttgatgacaatggcacttcggctccgcgtctcctcctccgcctgggccatgctctgcc

SEQ ID NO: 86249 - DNA, 80 bp, Homo sapiens
ccagccttgatgacaatggcacttcggctccgcgtctcctcctccgcctgggccatgctctgccgcgccttctggtagga

SEQ ID NO: 86250 - DNA, 80 bp, Homo sapiens
ttgatgacaatggcacttcggctccgcgtctcctcctccgcctgggccatgctctgccgcgccttctggtaggagtcgtc

SEQ ID NO: 86251 - DNA, 77 bp, Homo sapiens
acttcggctccgcgtctcctcctccgcctgggccatgctctgccgcgccttctggtaggagtcgtcggtggcacaca

SEQ ID NO: 86252 - DNA, 78 bp, Homo sapiens
cgcgtctcctcctccgcctgggccatgctctgccgcgccttctggtaggagtcgtcggtggcacacaccgtgatcttg

SEQ ID NO: 86253 - DNA, 79 bp, Homo sapiens
tcctcctccgcctgggccatgctctgccgcgccttctggtaggagtcgtcggtggcacacaccgtgatcttgtcctgta

SEQ ID NO: 86254 - DNA, 83 bp, Homo sapiens
ggccatgctctgccgcgccttctggtaggagtcgtcggtggcacacaccgtgatcttgtcctgtatgctgcccaggcagtcca

SEQ ID NO: 86255 - DNA, 81 bp, Homo sapiens
tctgccgcgccttctggtaggagtcgtcggtggcacacaccgtgatcttgtcctgtatgctgcccaggcagtccaggtgaa

SEQ ID NO: 86256 - DNA, 77 bp, Homo sapiens
ccttctggtaggagtcgtcggtggcacacaccgtgatcttgtcctgtatgctgcccaggcagtccaggtgaacttcc

SEQ ID NO: 86257 - DNA, 81 bp, Homo sapiens
taggagtcgtcggtggcacacaccgtgatcttgtcctgtatgctgcccaggcagtccaggtgaacttccccatgactgcaa

SEQ ID NO: 86258 - DNA, 82 bp, Homo sapiens
gtggcacacaccgtgatcttgtcctgtatgctgcccaggcagtccaggtgaacttccccatgactgcaagacaaggccagga

SEQ ID NO: 86259 - DNA, 79 bp, Homo sapiens
accgtgatcttgtcctgtatgctgcccaggcagtccaggtgaacttccccatgactgcaagacaaggccaggagctggg

SEQ ID NO: 86260 - DNA, 82 bp, Homo sapiens
ttgtcctgtatgctgcccaggcagtccaggtgaacttccccatgactgcaagacaaggccaggagctggggtcagcagctgg

SEQ ID NO: 86261 - DNA, 78 bp, Homo sapiens
ggtgacctcaagagccggcggggtgctctggggtggggcggcgcctcacctggagacatactgctggatgcagtcgaa

SEQ ID NO: 86262 - DNA, 78 bp, Homo sapiens
aagagccggcggggtgctctggggtggggcggcgcctcacctggagacatactgctggatgcagtcgaagctgccctg

SEQ ID NO: 86263 - DNA, 80 bp, Homo sapiens
tggggcggcgcctcacctggagacatactgctggatgcagtcgaagctgccctgggggttgtcgcggccgatgttggaga

SEQ ID NO: 86264 - DNA, 78 bp, Homo sapiens
cctcacctggagacatactgctggatgcagtcgaagctgccctgggggttgtcgcggccgatgttggagaggtagaag

SEQ ID NO: 86265 - DNA, 77 bp, Homo sapiens
agacatactgctggatgcagtcgaagctgccctgggggttgtcgcggccgatgttggagaggtagaaggagaacgtc

SEQ ID NO: 86266 - DNA, 76 bp, Homo sapiens
actgctggatgcagtcgaagctgccctgggggttgtcgcggccgatgttggagaggtagaaggagaacgtccgcgc

SEQ ID NO: 86267 - DNA, 72 bp, Homo sapiens
agtcgaagctgccctgggggttgtcgcggccgatgttggagaggtagaaggagaacgtccgcgcctctgcgg

SEQ ID NO: 86268 - DNA, 73 bp, Homo sapiens
cctgggggttgtcgcggccgatgttggagaggtagaaggagaacgtccgcgcctctgcggggcagtcaggctg

SEQ ID NO: 86269 - DNA, 74 bp, Homo sapiens
ggttgtcgcggccgatgttggagaggtagaaggagaacgtccgcgcctctgcggggcagtcaggctgggggatg

SEQ ID NO: 86270 - DNA, 78 bp, Homo sapiens
atgttggagaggtagaaggagaacgtccgcgcctctgcggggcagtcaggctgggggatggagatgtgctgcgtggag

SEQ ID NO: 86271 - DNA, 75 bp, Homo sapiens
aggtagaaggagaacgtccgcgcctctgcggggcagtcaggctgggggatggagatgtgctgcgtggagggggag

SEQ ID NO: 86272 - DNA, 74 bp, Homo sapiens
aggagaacgtccgcgcctctgcggggcagtcaggctgggggatggagatgtgctgcgtggagggggagggggtg

SEQ ID NO: 86273 - DNA, 75 bp, Homo sapiens
cctctgcggggcagtcaggctgggggatggagatgtgctgcgtggagggggagggggtgtcactgggaggtcctc

SEQ ID NO: 86274 - DNA, 76 bp, Homo sapiens
gcagtcaggctgggggatggagatgtgctgcgtggagggggagggggtgtcactgggaggtcctcggcaggacagg

SEQ ID NO: 86275 - DNA, 73 bp, Homo sapiens
aggctgggggatggagatgtgctgcgtggagggggagggggtgtcactgggaggtcctcggcaggacaggtcc

SEQ ID NO: 86276 - DNA, 76 bp, Homo sapiens
atggagatgtgctgcgtggagggggagggggtgtcactgggaggtcctcggcaggacaggtccccagcctgcatct

SEQ ID NO: 86277 - DNA, 75 bp, Homo sapiens
cgtggagggggagggggtgtcactgggaggtcctcggcaggacaggtccccagcctgcatcttcctgcatgagtc

SEQ ID NO: 86278 - DNA, 78 bp, Homo sapiens
gagggggtgtcactgggaggtcctcggcaggacaggtccccagcctgcatcttcctgcatgagtccccacagtgcaac

SEQ ID NO: 86279 - DNA, 81 bp, Homo sapiens
tgtcactgggaggtcctcggcaggacaggtccccagcctgcatcttcctgcatgagtccccacagtgcaaccctcacaaca

SEQ ID NO: 86280 - DNA, 80 bp, Homo sapiens
aggtcctcggcaggacaggtccccagcctgcatcttcctgcatgagtccccacagtgcaaccctcacaacaggaatgtgc

SEQ ID NO: 86281 - DNA, 78 bp, Homo sapiens
aggacaggtccccagcctgcatcttcctgcatgagtccccacagtgcaaccctcacaacaggaatgtgctggcccttt

SEQ ID NO: 86282 - DNA, 79 bp, Homo sapiens
cagcctgcatcttcctgcatgagtccccacagtgcaaccctcacaacaggaatgtgctggcccttttccctaaaacaca

SEQ ID NO: 86283 - DNA, 74 bp, Homo sapiens
atgagtccccacagtgcaaccctcacaacaggaatgtgctggcccttttccctaaaacacacccctgctcttca

SEQ ID NO: 86284 - DNA, 74 bp, Homo sapiens
acagtgcaaccctcacaacaggaatgtgctggcccttttccctaaaacacacccctgctcttcagccagtgacg

SEQ ID NO: 86285 - DNA, 76 bp, Homo sapiens
aatgtgctggcccttttccctaaaacacacccctgctcttcagccagtgacgggacaggcagcccatcctcagcaa

SEQ ID NO: 86286 - DNA, 76 bp, Homo sapiens
tggcccttttccctaaaacacacccctgctcttcagccagtgacgggacaggcagcccatcctcagcaacacacac

SEQ ID NO: 86287 - DNA, 79 bp, Homo sapiens
ttccctaaaacacacccctgctcttcagccagtgacgggacaggcagcccatcctcagcaacacacactgcgtagagag

SEQ ID NO: 86288 - DNA, 83 bp, Homo sapiens
ccctgctcttcagccagtgacgggacaggcagcccatcctcagcaacacacactgcgtagagaggggactcaggcacctatgc

SEQ ID NO: 86289 - DNA, 82 bp, Homo sapiens
tcttcagccagtgacgggacaggcagcccatcctcagcaacacacactgcgtagagaggggactcaggcacctatgcgggtg

SEQ ID NO: 86290 - DNA, 80 bp, Homo sapiens
agtgacgggacaggcagcccatcctcagcaacacacactgcgtagagaggggactcaggcacctatgcgggtgggcatgg

SEQ ID NO: 86291 - DNA, 77 bp, Homo sapiens
agcccatcctcagcaacacacactgcgtagagaggggactcaggcacctatgcgggtgggcatggggccaggggccg

SEQ ID NO: 86292 - DNA, 77 bp, Homo sapiens
acacacactgcgtagagaggggactcaggcacctatgcgggtgggcatggggccaggggccgttttcagcagcaaca

SEQ ID NO: 86293 - DNA, 80 bp, Homo sapiens
gtagagaggggactcaggcacctatgcgggtgggcatggggccaggggccgttttcagcagcaacagcactgctgtctga

SEQ ID NO: 86294 - DNA, 84 bp, Homo sapiens
actcaggcacctatgcgggtgggcatggggccaggggccgttttcagcagcaacagcactgctgtctgaggacagtgctcagca

SEQ ID NO: 86295 - DNA, 82 bp, Homo sapiens
acctatgcgggtgggcatggggccaggggccgttttcagcagcaacagcactgctgtctgaggacagtgctcagcacctgcc

SEQ ID NO: 86296 - DNA, 85 bp, Homo sapiens
tgggcatggggccaggggccgttttcagcagcaacagcactgctgtctgaggacagtgctcagcacctgcccagatgcagggccc

SEQ ID NO: 86297 - DNA, 82 bp, Homo sapiens
ggccaggggccgttttcagcagcaacagcactgctgtctgaggacagtgctcagcacctgcccagatgcagggcccccaccc

SEQ ID NO: 86298 - DNA, 84 bp, Homo sapiens
ttttcagcagcaacagcactgctgtctgaggacagtgctcagcacctgcccagatgcagggcccccaccccaatcgtgtgaccc

SEQ ID NO: 86299 - DNA, 80 bp, Homo sapiens
aacagcactgctgtctgaggacagtgctcagcacctgcccagatgcagggcccccaccccaatcgtgtgacccctggaaa

SEQ ID NO: 86300 - DNA, 77 bp, Homo sapiens
tgtctgaggacagtgctcagcacctgcccagatgcagggcccccaccccaatcgtgtgacccctggaaagtggtttg

SEQ ID NO: 86301 - DNA, 75 bp, Homo sapiens
agtgctcagcacctgcccagatgcagggcccccaccccaatcgtgtgacccctggaaagtggtttgtctggacca

SEQ ID NO: 86302 - DNA, 73 bp, Homo sapiens
acctgcccagatgcagggcccccaccccaatcgtgtgacccctggaaagtggtttgtctggaccatgactcac

SEQ ID NO: 86303 - DNA, 69 bp, Homo sapiens
cccaccccaatcgtgtgacccctggaaagtggtttgtctggaccatgactcactttccccaccaccaaa

SEQ ID NO: 86304 - DNA, 71 bp, Homo sapiens
aatcgtgtgacccctggaaagtggtttgtctggaccatgactcactttccccaccaccaaatggacagacc

SEQ ID NO: 86305 - DNA, 73 bp, Homo sapiens
cctggaaagtggtttgtctggaccatgactcactttccccaccaccaaatggacagacctggcctgcgacacc

SEQ ID NO: 86306 - DNA, 74 bp, Homo sapiens
aaagtggtttgtctggaccatgactcactttccccaccaccaaatggacagacctggcctgcgacaccctatga

SEQ ID NO: 86307 - DNA, 76 bp, Homo sapiens
tggaccatgactcactttccccaccaccaaatggacagacctggcctgcgacaccctatgaggtaaaatgcaacaa

SEQ ID NO: 86308 - DNA, 72 bp, Homo sapiens
actcactttccccaccaccaaatggacagacctggcctgcgacaccctatgaggtaaaatgcaacaagaggg

SEQ ID NO: 86309 - DNA, 75 bp, Homo sapiens
accaccaaatggacagacctggcctgcgacaccctatgaggtaaaatgcaacaagaggggcttgggcagccacgc

SEQ ID NO: 86310 - DNA, 74 bp, Homo sapiens
acaccctatgaggtaaaatgcaacaagaggggcttgggcagccacgcgcaactctggcgcccctccttggcgac

SEQ ID NO: 86311 - DNA, 73 bp, Homo sapiens
aggtaaaatgcaacaagaggggcttgggcagccacgcgcaactctggcgcccctccttggcgaccccctctca

SEQ ID NO: 86312 - DNA, 75 bp, Homo sapiens
atgcaacaagaggggcttgggcagccacgcgcaactctggcgcccctccttggcgaccccctctcagcatccccc

SEQ ID NO: 86313 - DNA, 74 bp, Homo sapiens
gggcttgggcagccacgcgcaactctggcgcccctccttggcgaccccctctcagcatccccccacaaaggaca

SEQ ID NO: 86314 - DNA, 75 bp, Homo sapiens
cacgcgcaactctggcgcccctccttggcgaccccctctcagcatccccccacaaaggacatggactccacgtga

SEQ ID NO: 86315 - DNA, 74 bp, Homo sapiens
tctggcgcccctccttggcgaccccctctcagcatccccccacaaaggacatggactccacgtgagtctccatt

SEQ ID NO: 86316 - DNA, 79 bp, Homo sapiens
ctccttggcgaccccctctcagcatccccccacaaaggacatggactccacgtgagtctccatttgctgcagctgtgaa

SEQ ID NO: 86317 - DNA, 81 bp, Homo sapiens
tggcgaccccctctcagcatccccccacaaaggacatggactccacgtgagtctccatttgctgcagctgtgaatcaggta

SEQ ID NO: 86318 - DNA, 84 bp, Homo sapiens
cacaaaggacatggactccacgtgagtctccatttgctgcagctgtgaatcaggtaggcttgtgtcccaggggctcacagatca

SEQ ID NO: 86319 - DNA, 85 bp, Homo sapiens
aggacatggactccacgtgagtctccatttgctgcagctgtgaatcaggtaggcttgtgtcccaggggctcacagatcagaagca

SEQ ID NO: 86320 - DNA, 81 bp, Homo sapiens
agctgtgaatcaggtaggcttgtgtcccaggggctcacagatcagaagcactggcccccaacaagcctgtcatgggtcaca

SEQ ID NO: 86321 - DNA, 79 bp, Homo sapiens
aatcaggtaggcttgtgtcccaggggctcacagatcagaagcactggcccccaacaagcctgtcatgggtcacaccagc

SEQ ID NO: 86322 - DNA, 79 bp, Homo sapiens
cccaggggctcacagatcagaagcactggcccccaacaagcctgtcatgggtcacaccagcctgactttggctgtgccc

SEQ ID NO: 86323 - DNA, 82 bp, Homo sapiens
acagatcagaagcactggcccccaacaagcctgtcatgggtcacaccagcctgactttggctgtgcccctgcagcccagctg

SEQ ID NO: 86324 - DNA, 81 bp, Homo sapiens
aacaagcctgtcatgggtcacaccagcctgactttggctgtgcccctgcagcccagctgggcaaagctccagccctgtctg

SEQ ID NO: 86325 - DNA, 81 bp, Homo sapiens
tcacaccagcctgactttggctgtgcccctgcagcccagctgggcaaagctccagccctgtctgggaggacggacagccag

SEQ ID NO: 86326 - DNA, 78 bp, Homo sapiens
cctgactttggctgtgcccctgcagcccagctgggcaaagctccagccctgtctgggaggacggacagccaggggcag

SEQ ID NO: 86327 - DNA, 80 bp, Homo sapiens
tgtgcccctgcagcccagctgggcaaagctccagccctgtctgggaggacggacagccaggggcaggcaggcggatggac

SEQ ID NO: 86328 - DNA, 78 bp, Homo sapiens
cccagctgggcaaagctccagccctgtctgggaggacggacagccaggggcaggcaggcggatggacggactgcgctg

SEQ ID NO: 86329 - DNA, 77 bp, Homo sapiens
tgggcaaagctccagccctgtctgggaggacggacagccaggggcaggcaggcggatggacggactgcgctggtccc

SEQ ID NO: 86330 - DNA, 78 bp, Homo sapiens
tccagccctgtctgggaggacggacagccaggggcaggcaggcggatggacggactgcgctggtcccggccaggctca

SEQ ID NO: 86331 - DNA, 80 bp, Homo sapiens
ggaggacggacagccaggggcaggcaggcggatggacggactgcgctggtcccggccaggctcagtgcagggcggcatca

SEQ ID NO: 86332 - DNA, 82 bp, Homo sapiens
acggacagccaggggcaggcaggcggatggacggactgcgctggtcccggccaggctcagtgcagggcggcatcacatcaga

SEQ ID NO: 86333 - DNA, 84 bp, Homo sapiens
aggcggatggacggactgcgctggtcccggccaggctcagtgcagggcggcatcacatcagaggccattgcattccaggctgac

SEQ ID NO: 86334 - DNA, 82 bp, Homo sapiens
ctcagtgcagggcggcatcacatcagaggccattgcattccaggctgaccccagaccctctgtcaacagagttggcccttcc

SEQ ID NO: 86335 - DNA, 79 bp, Homo sapiens
ggcggcatcacatcagaggccattgcattccaggctgaccccagaccctctgtcaacagagttggcccttcctaaacta

SEQ ID NO: 86336 - DNA, 78 bp, Homo sapiens
atcacatcagaggccattgcattccaggctgaccccagaccctctgtcaacagagttggcccttcctaaactaatgcc

SEQ ID NO: 86337 - DNA, 76 bp, Homo sapiens
cattgcattccaggctgaccccagaccctctgtcaacagagttggcccttcctaaactaatgcctgggctttggca

SEQ ID NO: 86338 - DNA, 75 bp, Homo sapiens
attccaggctgaccccagaccctctgtcaacagagttggcccttcctaaactaatgcctgggctttggcatgagc

SEQ ID NO: 86339 - DNA, 78 bp, Homo sapiens
gttggcccttcctaaactaatgcctgggctttggcatgagctcctcacagttagactgacacatgaagggcgctcaaa

SEQ ID NO: 86340 - DNA, 79 bp, Homo sapiens
actaatgcctgggctttggcatgagctcctcacagttagactgacacatgaagggcgctcaaatagtccacaaggaggg

SEQ ID NO: 86341 - DNA, 79 bp, Homo sapiens
gggctttggcatgagctcctcacagttagactgacacatgaagggcgctcaaatagtccacaaggaggggacaacatgg

SEQ ID NO: 86342 - DNA, 77 bp, Homo sapiens
atgagctcctcacagttagactgacacatgaagggcgctcaaatagtccacaaggaggggacaacatggggggagcc

SEQ ID NO: 86343 - DNA, 73 bp, Homo sapiens
agttagactgacacatgaagggcgctcaaatagtccacaaggaggggacaacatggggggagccctcaggtct

SEQ ID NO: 86344 - DNA, 72 bp, Homo sapiens
acacatgaagggcgctcaaatagtccacaaggaggggacaacatggggggagccctcaggtcttgtcccctg

SEQ ID NO: 86345 - DNA, 74 bp, Homo sapiens
aagggcgctcaaatagtccacaaggaggggacaacatggggggagccctcaggtcttgtcccctggctgcagca

SEQ ID NO: 86346 - DNA, 70 bp, Homo sapiens
aaatagtccacaaggaggggacaacatggggggagccctcaggtcttgtcccctggctgcagcaccccct

SEQ ID NO: 86347 - DNA, 71 bp, Homo sapiens
aaggaggggacaacatggggggagccctcaggtcttgtcccctggctgcagcacccccttggcacccaagc

SEQ ID NO: 86348 - DNA, 76 bp, Homo sapiens
agccctcaggtcttgtcccctggctgcagcacccccttggcacccaagccccgtctcctcctctgtgacaccatga

SEQ ID NO: 86349 - DNA, 81 bp, Homo sapiens
gctgcagcacccccttggcacccaagccccgtctcctcctctgtgacaccatgagcgcgggagagactgtggctgaatctc

SEQ ID NO: 86350 - DNA, 76 bp, Homo sapiens
acccaagccccgtctcctcctctgtgacaccatgagcgcgggagagactgtggctgaatctcctgccccctcgccc

SEQ ID NO: 86351 - DNA, 85 bp, Homo sapiens
tctgtgacaccatgagcgcgggagagactgtggctgaatctcctgccccctcgcccctgctgagctgcctcatacgcccatggga

SEQ ID NO: 86352 - DNA, 81 bp, Homo sapiens
gggagagactgtggctgaatctcctgccccctcgcccctgctgagctgcctcatacgcccatgggaggctttgcctgcctg

SEQ ID NO: 86353 - DNA, 82 bp, Homo sapiens
actgtggctgaatctcctgccccctcgcccctgctgagctgcctcatacgcccatgggaggctttgcctgcctgtgcctcac

SEQ ID NO: 86354 - DNA, 82 bp, Homo sapiens
aatctcctgccccctcgcccctgctgagctgcctcatacgcccatgggaggctttgcctgcctgtgcctcacctgtgagaca

SEQ ID NO: 86355 - DNA, 83 bp, Homo sapiens
tcgcccctgctgagctgcctcatacgcccatgggaggctttgcctgcctgtgcctcacctgtgagacaggacggggctcctgc

SEQ ID NO: 86356 - DNA, 80 bp, Homo sapiens
ctcatacgcccatgggaggctttgcctgcctgtgcctcacctgtgagacaggacggggctcctgccaccagacacgtgga

SEQ ID NO: 86357 - DNA, 79 bp, Homo sapiens
atgggaggctttgcctgcctgtgcctcacctgtgagacaggacggggctcctgccaccagacacgtggaggagcaccaa

SEQ ID NO: 86358 - DNA, 77 bp, Homo sapiens
ctttgcctgcctgtgcctcacctgtgagacaggacggggctcctgccaccagacacgtggaggagcaccaatccccg

SEQ ID NO: 86359 - DNA, 79 bp, Homo sapiens
tgtgcctcacctgtgagacaggacggggctcctgccaccagacacgtggaggagcaccaatccccggccctgctgtgtg

SEQ ID NO: 86360 - DNA, 75 bp, Homo sapiens
acctgtgagacaggacggggctcctgccaccagacacgtggaggagcaccaatccccggccctgctgtgtggcct

SEQ ID NO: 86361 - DNA, 74 bp, Homo sapiens
acggggctcctgccaccagacacgtggaggagcaccaatccccggccctgctgtgtggccttgactgggacttg

SEQ ID NO: 86362 - DNA, 72 bp, Homo sapiens
ccggccctgctgtgtggccttgactgggacttgtcccctggggtagtgtttggacacacaagggaagccatg

SEQ ID NO: 86363 - DNA, 75 bp, Homo sapiens
tgtgtggccttgactgggacttgtcccctggggtagtgtttggacacacaagggaagccatggctgcacccagcc

SEQ ID NO: 86364 - DNA, 73 bp, Homo sapiens
ggccttgactgggacttgtcccctggggtagtgtttggacacacaagggaagccatggctgcacccagcccag

SEQ ID NO: 86365 - DNA, 75 bp, Homo sapiens
acttgtcccctggggtagtgtttggacacacaagggaagccatggctgcacccagcccagtgccagtccctgctc

SEQ ID NO: 86366 - DNA, 77 bp, Homo sapiens
gggtagtgtttggacacacaagggaagccatggctgcacccagcccagtgccagtccctgctcccaagacaagaaca

SEQ ID NO: 86367 - DNA, 78 bp, Homo sapiens
tgtttggacacacaagggaagccatggctgcacccagcccagtgccagtccctgctcccaagacaagaacagttcctg

SEQ ID NO: 86368 - DNA, 75 bp, Homo sapiens
acacaagggaagccatggctgcacccagcccagtgccagtccctgctcccaagacaagaacagttcctgggttcg

SEQ ID NO: 86369 - DNA, 75 bp, Homo sapiens
agccatggctgcacccagcccagtgccagtccctgctcccaagacaagaacagttcctgggttcggccacttggg

SEQ ID NO: 86370 - DNA, 74 bp, Homo sapiens
cagcccagtgccagtccctgctcccaagacaagaacagttcctgggttcggccacttggggcaggaagagtctg

SEQ ID NO: 86371 - DNA, 73 bp, Homo sapiens
agtgccagtccctgctcccaagacaagaacagttcctgggttcggccacttggggcaggaagagtctggtctg

SEQ ID NO: 86372 - DNA, 73 bp, Homo sapiens
ccctgctcccaagacaagaacagttcctgggttcggccacttggggcaggaagagtctggtctgggcttgcag

SEQ ID NO: 86373 - DNA, 74 bp, Homo sapiens
agacaagaacagttcctgggttcggccacttggggcaggaagagtctggtctgggcttgcaggcagtccctgta

SEQ ID NO: 86374 - DNA, 74 bp, Homo sapiens
agttcctgggttcggccacttggggcaggaagagtctggtctgggcttgcaggcagtccctgtaccagccagtc

SEQ ID NO: 86375 - DNA, 79 bp, Homo sapiens
ttcggccacttggggcaggaagagtctggtctgggcttgcaggcagtccctgtaccagccagtctgcccggcctgcaga

SEQ ID NO: 86376 - DNA, 79 bp, Homo sapiens
ggcaggaagagtctggtctgggcttgcaggcagtccctgtaccagccagtctgcccggcctgcagacccttctccagag

SEQ ID NO: 86377 - DNA, 78 bp, Homo sapiens
aagagtctggtctgggcttgcaggcagtccctgtaccagccagtctgcccggcctgcagacccttctccagaggccca

SEQ ID NO: 86378 - DNA, 74 bp, Homo sapiens
aggcagtccctgtaccagccagtctgcccggcctgcagacccttctccagaggcccatcctgccccttccccag

SEQ ID NO: 86379 - DNA, 77 bp, Homo sapiens
tgtaccagccagtctgcccggcctgcagacccttctccagaggcccatcctgccccttccccaggctgaacactgcc

SEQ ID NO: 86380 - DNA, 73 bp, Homo sapiens
tgcccggcctgcagacccttctccagaggcccatcctgccccttccccaggctgaacactgccccaggaaaaa

SEQ ID NO: 86381 - DNA, 72 bp, Homo sapiens
tgcagacccttctccagaggcccatcctgccccttccccaggctgaacactgccccaggaaaaaagccgtcc

SEQ ID NO: 86382 - DNA, 73 bp, Homo sapiens
ttctccagaggcccatcctgccccttccccaggctgaacactgccccaggaaaaaagccgtcccatctgctgg

SEQ ID NO: 86383 - DNA, 74 bp, Homo sapiens
ccatcctgccccttccccaggctgaacactgccccaggaaaaaagccgtcccatctgctggggtctgcccagca

SEQ ID NO: 86384 - DNA, 74 bp, Homo sapiens
ccttccccaggctgaacactgccccaggaaaaaagccgtcccatctgctggggtctgcccagcatcccctctca

SEQ ID NO: 86385 - DNA, 78 bp, Homo sapiens
gctgaacactgccccaggaaaaaagccgtcccatctgctggggtctgcccagcatcccctctcagcctcgaacatgtc

SEQ ID NO: 86386 - DNA, 75 bp, Homo sapiens
aaaaagccgtcccatctgctggggtctgcccagcatcccctctcagcctcgaacatgtccccctaaggcaggtgc

SEQ ID NO: 86387 - DNA, 80 bp, Homo sapiens
gggtctgcccagcatcccctctcagcctcgaacatgtccccctaaggcaggtgcccttgtccctgtcatgctgatacaga

SEQ ID NO: 86388 - DNA, 78 bp, Homo sapiens
ccctctcagcctcgaacatgtccccctaaggcaggtgcccttgtccctgtcatgctgatacagaaacacaagctgagg

SEQ ID NO: 86389 - DNA, 76 bp, Homo sapiens
cctcgaacatgtccccctaaggcaggtgcccttgtccctgtcatgctgatacagaaacacaagctgaggggtcagg

SEQ ID NO: 86390 - DNA, 78 bp, Homo sapiens
cctaaggcaggtgcccttgtccctgtcatgctgatacagaaacacaagctgaggggtcagggcccaaacagcgtgctg

SEQ ID NO: 86391 - DNA, 77 bp, Homo sapiens
aggtgcccttgtccctgtcatgctgatacagaaacacaagctgaggggtcagggcccaaacagcgtgctggtggagg

SEQ ID NO: 86392 - DNA, 75 bp, Homo sapiens
aagctgaggggtcagggcccaaacagcgtgctggtggagggcaaggccaaagtccattgtgggcccaccatgcca

SEQ ID NO: 86393 - DNA, 77 bp, Homo sapiens
tcagggcccaaacagcgtgctggtggagggcaaggccaaagtccattgtgggcccaccatgccaggccacacctgaa

SEQ ID NO: 86394 - DNA, 76 bp, Homo sapiens
aaacagcgtgctggtggagggcaaggccaaagtccattgtgggcccaccatgccaggccacacctgaacacaaaca

SEQ ID NO: 86395 - DNA, 78 bp, Homo sapiens
aaggccaaagtccattgtgggcccaccatgccaggccacacctgaacacaaacacacatctctatcagggtcagagaa

SEQ ID NO: 86396 - DNA, 84 bp, Homo sapiens
caccatgccaggccacacctgaacacaaacacacatctctatcagggtcagagaaggcagaaacggcctgcactcagcatcgga

SEQ ID NO: 86397 - DNA, 82 bp, Homo sapiens
aggccacacctgaacacaaacacacatctctatcagggtcagagaaggcagaaacggcctgcactcagcatcggagaaatca

SEQ ID NO: 86398 - DNA, 83 bp, Homo sapiens
acctgaacacaaacacacatctctatcagggtcagagaaggcagaaacggcctgcactcagcatcggagaaatcacacacata

SEQ ID NO: 86399 - DNA, 86 bp, Homo sapiens
aacacacatctctatcagggtcagagaaggcagaaacggcctgcactcagcatcggagaaatcacacacatatagcctctgatgat

SEQ ID NO: 86400 - DNA, 86 bp, Homo sapiens
tctctatcagggtcagagaaggcagaaacggcctgcactcagcatcggagaaatcacacacatatagcctctgatgattcaccctc

SEQ ID NO: 86401 - DNA, 83 bp, Homo sapiens
agagaaggcagaaacggcctgcactcagcatcggagaaatcacacacatatagcctctgatgattcaccctcggacagagaaa

SEQ ID NO: 86402 - DNA, 80 bp, Homo sapiens
agaaacggcctgcactcagcatcggagaaatcacacacatatagcctctgatgattcaccctcggacagagaaaccctcc

SEQ ID NO: 86403 - DNA, 80 bp, Homo sapiens
cctgcactcagcatcggagaaatcacacacatatagcctctgatgattcaccctcggacagagaaaccctccccacccgc

SEQ ID NO: 86404 - DNA, 76 bp, Homo sapiens
agcatcggagaaatcacacacatatagcctctgatgattcaccctcggacagagaaaccctccccacccgccccca

SEQ ID NO: 86405 - DNA, 74 bp, Homo sapiens
aaatcacacacatatagcctctgatgattcaccctcggacagagaaaccctccccacccgcccccaccacacaa

SEQ ID NO: 86406 - DNA, 74 bp, Homo sapiens
atatagcctctgatgattcaccctcggacagagaaaccctccccacccgcccccaccacacaaccacacacaca

SEQ ID NO: 86407 - DNA, 74 bp, Homo sapiens
acacacaaacacaacccctccacacacaatctccccacacacaatcccccacaaccacacaatccccacacaca

SEQ ID NO: 86408 - DNA, 73 bp, Homo sapiens
aaacacaacccctccacacacaatctccccacacacaatcccccacaaccacacaatccccacacacacacaa

SEQ ID NO: 86409 - DNA, 71 bp, Homo sapiens
cacacacaaacacaacccctccacacacaatctccccacacacaaccccccacaaccacacaatcccccca

SEQ ID NO: 86410 - DNA, 70 bp, Homo sapiens
acaaacacaacccctccacacacaatctccccacacacaaccccccacaaccacacaatccccccacaca

SEQ ID NO: 86411 - DNA, 70 bp, Homo sapiens
acaacccctccacacacaatctccccacacacaaccccccacaaccacacaatccccccacacacacaaa

SEQ ID NO: 86412 - DNA, 69 bp, Homo sapiens
acacacaaacacaacccctccacacacgatctccctacacacaaccccccacaaccacacaatcccccc

SEQ ID NO: 86413 - DNA, 70 bp, Homo sapiens
acacaacccctccacacacgatctccctacacacaaccccccacaaccacacaatcccccccacacacaa

SEQ ID NO: 86414 - DNA, 69 bp, Homo sapiens
acacacgatctccctacacacaaccccccacaaccacacaatcccccccacacacaaacacaacccctc

SEQ ID NO: 86415 - DNA, 69 bp, Homo sapiens
acacaaccccccacaaccacacaatcccccccacacacaaacacaacccctccatacacaatctcccca

SEQ ID NO: 86416 - DNA, 73 bp, Homo sapiens
acaaccacacaatcccccccacacacaaacacaacccctccatacacaatctccccacacacaaccatacaca

SEQ ID NO: 86417 - DNA, 73 bp, Homo sapiens
acaatcccccccacacacaaacacaacccctccatacacaatctccccacacacaaccatacacacacaatac

SEQ ID NO: 86418 - DNA, 77 bp, Homo sapiens
acacaaacacaacccctccatacacaatctccccacacacaaccatacacacacaatacccaacacatagcgccaca

SEQ ID NO: 86419 - DNA, 78 bp, Homo sapiens
cccacacacaaccatacacacacaatacccaacacatagcgccacacatacaaccaccccgacagcaccacacacaac

SEQ ID NO: 86420 - DNA, 77 bp, Homo sapiens
acacaaccatacacacacaatacccaacacatagcgccacacatacaaccaccccgacagcaccacacacaacctcc

SEQ ID NO: 86421 - DNA, 75 bp, Homo sapiens
acacaatacccaacacatagcgccacacatacaaccaccccgacagcaccacacacaacctcccccacacacaaa

SEQ ID NO: 86422 - DNA, 75 bp, Homo sapiens
tacccaacacatagcgccacacatacaaccaccccgacagcaccacacacaacctcccccacacacaaacacaac

SEQ ID NO: 86423 - DNA, 76 bp, Homo sapiens
atagcgccacacatacaaccaccccgacagcaccacacacaacctcccccacacacaaacacaacccacacacaca

SEQ ID NO: 86424 - DNA, 73 bp, Homo sapiens
acatacaaccaccccgacagcaccacacacaacctcccccacacacaaacacaacccacacacacaacccaca

SEQ ID NO: 86425 - DNA, 74 bp, Homo sapiens
accccgacagcaccacacacaacctcccccacacacaaacacaacccacacacacaacccacacatgcacaacc

SEQ ID NO: 86426 - DNA, 75 bp, Homo sapiens
accacacacaacctcccccacacacaaacacaacccacacacacaacccacacatgcacaacccccacacacaca

SEQ ID NO: 86427 - DNA, 76 bp, Homo sapiens
tcccccacacacaaacacaacccacacacacaacccacacatgcacaacccccacacacacagccacacacaaacc

SEQ ID NO: 86428 - DNA, 76 bp, Homo sapiens
acacaaacacaacccacacacacaacccacacatgcacaacccccacacacacagccacacacaaacccctccaca

SEQ ID NO: 86429 - DNA, 73 bp, Homo sapiens
aacccacacatgcacaacccccacacacacagccacacacaaacccctccacaccaaacccctccacacacaa

SEQ ID NO: 86430 - DNA, 72 bp, Homo sapiens
ccacacacacagccacacacaaacccctccacaccaaacccctccacacacaaacccctacacacaaccaca

SEQ ID NO: 86431 - DNA, 67 bp, Homo sapiens
acacaaacccctccacaccaaacccctccacacacaaacccctacacacaaccacacaaacacaacc

SEQ ID NO: 86432 - DNA, 69 bp, Homo sapiens
tccacaccaaacccctccacacacaaacccctacacacaaccacacaaacacaacccagacataaaccc

SEQ ID NO: 86433 - DNA, 71 bp, Homo sapiens
acacaaacccctacacacaaccacacaaacacaacccagacataaacccccacacagccacacaaacacaa

SEQ ID NO: 86434 - DNA, 76 bp, Homo sapiens
cacacaaccacacaaacacaacccagacataaacccccacacagccacacaaacacaactcacacataaccacaca

SEQ ID NO: 86435 - DNA, 74 bp, Homo sapiens
aacccagacataaacccccacacagccacacaaacacaactcacacataaccacacacacaaccacaacccaca

SEQ ID NO: 86436 - DNA, 74 bp, Homo sapiens
ataaacccccacacagccacacaaacacaactcacacataaccacacacacaaccacaacccacacaaacacaa

SEQ ID NO: 86437 - DNA, 76 bp, Homo sapiens
acacagccacacaaacacaactcacacataaccacacacacaaccacaacccacacaaacacaacccccacacaca

SEQ ID NO: 86438 - DNA, 74 bp, Homo sapiens
acacaaacacaactcacacataaccacacacacaaccacaacccacacaaacacaacccccacacacacaaaca

SEQ ID NO: 86439 - DNA, 75 bp, Homo sapiens
aactcacacataaccacacacacaaccacaacccacacaaacacaacccccacacacacaaacaatccatacaca

SEQ ID NO: 86440 - DNA, 78 bp, Homo sapiens
cacacacaaacacaatccatacacacagaaacacaacctcccacacacaaacaaccacacacgccctgaagcctcagc

SEQ ID NO: 86441 - DNA, 77 bp, Homo sapiens
acaaacacaatccatacacacagaaacacaacctcccacacacaaacaaccacacacgccctgaagcctcagccaga

SEQ ID NO: 86442 - DNA, 78 bp, Homo sapiens
atacacacagaaacacaacctcccacacacaaacaaccacacacgccctgaagcctcagccagagccatgtgggtgac

SEQ ID NO: 86443 - DNA, 76 bp, Homo sapiens
agaaacacaacctcccacacacaaacaaccacacacgccctgaagcctcagccagagccatgtgggtgaccctggc

SEQ ID NO: 86444 - DNA, 81 bp, Homo sapiens
ccacacacaaacaaccacacacgccctgaagcctcagccagagccatgtgggtgaccctggccatccagatctgtcctgct

SEQ ID NO: 86445 - DNA, 80 bp, Homo sapiens
acaaacaaccacacacgccctgaagcctcagccagagccatgtgggtgaccctggccatccagatctgtcctgcttcgac

SEQ ID NO: 86446 - DNA, 80 bp, Homo sapiens
acgccctgaagcctcagccagagccatgtgggtgaccctggccatccagatctgtcctgcttcgacgccactgaggtgtt

SEQ ID NO: 86447 - DNA, 79 bp, Homo sapiens
aagcctcagccagagccatgtgggtgaccctggccatccagatctgtcctgcttcgacgccactgaggtgttttttcac

SEQ ID NO: 86448 - DNA, 78 bp, Homo sapiens
agagccatgtgggtgaccctggccatccagatctgtcctgcttcgacgccactgaggtgttttttcacccaacacaca

SEQ ID NO: 86449 - DNA, 76 bp, Homo sapiens
atgtgggtgaccctggccatccagatctgtcctgcttcgacgccactgaggtgttttttcacccaacacacacagg

SEQ ID NO: 86450 - DNA, 77 bp, Homo sapiens
ctggccatccagatctgtcctgcttcgacgccactgaggtgttttttcacccaacacacacaggtgccaccctgccc

SEQ ID NO: 86451 - DNA, 77 bp, Homo sapiens
agatctgtcctgcttcgacgccactgaggtgttttttcacccaacacacacaggtgccaccctgccctgcctgcacc

SEQ ID NO: 86452 - DNA, 77 bp, Homo sapiens
tctgtcctgcttcgacgccactgaggtgttttttcacccaacacacacaggtgccaccctgccctgcctgcacctcc

SEQ ID NO: 86453 - DNA, 74 bp, Homo sapiens
ttcgacgccactgaggtgttttttcacccaacacacacaggtgccaccctgccctgcctgcacctcccttccca

SEQ ID NO: 86454 - DNA, 74 bp, Homo sapiens
ctgaggtgttttttcacccaacacacacaggtgccaccctgccctgcctgcacctcccttcccagatgtgactt

SEQ ID NO: 86455 - DNA, 73 bp, Homo sapiens
gtgttttttcacccaacacacacaggtgccaccctgccctgcctgcacctcccttcccagatgtgacttttat

SEQ ID NO: 86456 - DNA, 74 bp, Homo sapiens
ttttcacccaacacacacaggtgccaccctgccctgcctgcacctcccttcccagatgtgacttttattctcgt

SEQ ID NO: 86457 - DNA, 76 bp, Homo sapiens
acacacacaggtgccaccctgccctgcctgcacctcccttcccagatgtgacttttattctcgttcatacaagaaa

SEQ ID NO: 86458 - DNA, 74 bp, Homo sapiens
aggtgccaccctgccctgcctgcacctcccttcccagatgtgacttttattctcgttcatacaagaaactggaa

SEQ ID NO: 86459 - DNA, 73 bp, Homo sapiens
accctgccctgcctgcacctcccttcccagatgtgacttttattctcgttcatacaagaaactggaaacacgc

SEQ ID NO: 86460 - DNA, 77 bp, Homo sapiens
tgcctgcacctcccttcccagatgtgacttttattctcgttcatacaagaaactggaaacacgctgctgggatgagg

SEQ ID NO: 86461 - DNA, 76 bp, Homo sapiens
tcccttcccagatgtgacttttattctcgttcatacaagaaactggaaacacgctgctgggatgagggaagctcaa

SEQ ID NO: 86462 - DNA, 76 bp, Homo sapiens
atgtgacttttattctcgttcatacaagaaactggaaacacgctgctgggatgagggaagctcaagtttgtgagag

SEQ ID NO: 86463 - DNA, 75 bp, Homo sapiens
acttttattctcgttcatacaagaaactggaaacacgctgctgggatgagggaagctcaagtttgtgagaggctc

SEQ ID NO: 86464 - DNA, 78 bp, Homo sapiens
tcgttcatacaagaaactggaaacacgctgctgggatgagggaagctcaagtttgtgagaggctctgtggtggccagg

SEQ ID NO: 86465 - DNA, 80 bp, Homo sapiens
aaactggaaacacgctgctgggatgagggaagctcaagtttgtgagaggctctgtggtggccaggtgcacaggtgacatg

SEQ ID NO: 86466 - DNA, 81 bp, Homo sapiens
aaacacgctgctgggatgagggaagctcaagtttgtgagaggctctgtggtggccaggtgcacaggtgacatggtgaccca

SEQ ID NO: 86467 - DNA, 82 bp, Homo sapiens
tttgtgagaggctctgtggtggccaggtgcacaggtgacatggtgacccagaatgagccagccagggaagctggggaccaca

SEQ ID NO: 86468 - DNA, 79 bp, Homo sapiens
tgtggtggccaggtgcacaggtgacatggtgacccagaatgagccagccagggaagctggggaccacacgtccagggaa

SEQ ID NO: 86469 - DNA, 75 bp, Homo sapiens
aggtgcacaggtgacatggtgacccagaatgagccagccagggaagctggggaccacacgtccagggaaaccaaa

SEQ ID NO: 86470 - DNA, 73 bp, Homo sapiens
acaggtgacatggtgacccagaatgagccagccagggaagctggggaccacacgtccagggaaaccaaaaaga

SEQ ID NO: 86471 - DNA, 73 bp, Homo sapiens
atggtgacccagaatgagccagccagggaagctggggaccacacgtccagggaaaccaaaaagagtggctgtg

SEQ ID NO: 86472 - DNA, 72 bp, Homo sapiens
agaatgagccagccagggaagctggggaccacacgtccagggaaaccaaaaagagtggctgtgggaacctga

SEQ ID NO: 86473 - DNA, 69 bp, Homo sapiens
agggaagctggggaccacacgtccagggaaaccaaaaagagtggctgtgggaacctgagcctggcctgg

SEQ ID NO: 86474 - DNA, 70 bp, Homo sapiens
gggaccacacgtccagggaaaccaaaaagagtggctgtgggaacctgagcctggcctgggtggctctccc

SEQ ID NO: 86475 - DNA, 73 bp, Homo sapiens
tccagggaaaccaaaaagagtggctgtgggaacctgagcctggcctgggtggctctcccgccctcctctgtca

SEQ ID NO: 86476 - DNA, 73 bp, Homo sapiens
aaccaaaaagagtggctgtgggaacctgagcctggcctgggtggctctcccgccctcctctgtcatctcttta

SEQ ID NO: 86477 - DNA, 71 bp, Homo sapiens
aacctgagcctggcctgggtggctctcccgccctcctctgtcatctctttaacccccactgccccctgtgg

SEQ ID NO: 86478 - DNA, 73 bp, Homo sapiens
tggcctgggtggctctcccgccctcctctgtcatctctttaacccccactgccccctgtggtcctggcctgag

SEQ ID NO: 86479 - DNA, 74 bp, Homo sapiens
ctctgtcatctctttaacccccactgccccctgtggtcctggcctgaggcccaagttgccagtggctcctgccc

SEQ ID NO: 86480 - DNA, 73 bp, Homo sapiens
tttaacccccactgccccctgtggtcctggcctgaggcccaagttgccagtggctcctgccccacagtgacta

SEQ ID NO: 86481 - DNA, 75 bp, Homo sapiens
actgccccctgtggtcctggcctgaggcccaagttgccagtggctcctgccccacagtgactaagggctgggcac

SEQ ID NO: 86482 - DNA, 78 bp, Homo sapiens
tgaggcccaagttgccagtggctcctgccccacagtgactaagggctgggcaccctcacgtgcagccctgtcccagga

SEQ ID NO: 86483 - DNA, 74 bp, Homo sapiens
agtggctcctgccccacagtgactaagggctgggcaccctcacgtgcagccctgtcccaggaaaaccccagctc

SEQ ID NO: 86484 - DNA, 73 bp, Homo sapiens
acagtgactaagggctgggcaccctcacgtgcagccctgtcccaggaaaaccccagctccacccaggttggca

SEQ ID NO: 86485 - DNA, 73 bp, Homo sapiens
taagggctgggcaccctcacgtgcagccctgtcccaggaaaaccccagctccacccaggttggcaggactcat

SEQ ID NO: 86486 - DNA, 75 bp, Homo sapiens
tgggcaccctcacgtgcagccctgtcccaggaaaaccccagctccacccaggttggcaggactcattctgtcacc

SEQ ID NO: 86487 - DNA, 85 bp, Homo sapiens
attctgtcaccctggcttcaggggagatgccactcagcagagagctggcagtgagaccaggccactgcctgtggcctggggcagc

SEQ ID NO: 86488 - DNA, 86 bp, Homo sapiens
tcaccctggcttcaggggagatgccactcagcagagagctggcagtgagaccaggccactgcctgtggcctggggcagctgtacac

SEQ ID NO: 86489 - DNA, 88 bp, Homo sapiens
gggagatgccactcagcagagagctggcagtgagaccaggccactgcctgtggcctggggcagctgtacacccagtcagcactgacag

SEQ ID NO: 86490 - DNA, 87 bp, Homo sapiens
atgccactcagcagagagctggcagtgagaccaggccactgcctgtggcctggggcagctgtacacccagtcagcactgacagggcc

SEQ ID NO: 86491 - DNA, 83 bp, Homo sapiens
gagctggcagtgagaccaggccactgcctgtggcctggggcagctgtacacccagtcagcactgacagggcccccctgcctga

SEQ ID NO: 86492 - DNA, 79 bp, Homo sapiens
ccactgcctgtggcctggggcagctgtacacccagtcagcactgacagggcccccctgcctgagcctgcccagcaacct

SEQ ID NO: 86493 - DNA, 81 bp, Homo sapiens
tggcctggggcagctgtacacccagtcagcactgacagggcccccctgcctgagcctgcccagcaaccttgcttctctgtg

SEQ ID NO: 86494 - DNA, 78 bp, Homo sapiens
cagctgtacacccagtcagcactgacagggcccccctgcctgagcctgcccagcaaccttgcttctctgtgggtaggg

SEQ ID NO: 86495 - DNA, 77 bp, Homo sapiens
acccagtcagcactgacagggcccccctgcctgagcctgcccagcaaccttgcttctctgtgggtaggggcttcata

SEQ ID NO: 86496 - DNA, 74 bp, Homo sapiens
actgacagggcccccctgcctgagcctgcccagcaaccttgcttctctgtgggtaggggcttcatagtggccct

SEQ ID NO: 86497 - DNA, 77 bp, Homo sapiens
tgagcctgcccagcaaccttgcttctctgtgggtaggggcttcatagtggcccttcaccctgcttggatcttttcca

SEQ ID NO: 86498 - DNA, 75 bp, Homo sapiens
cagcaaccttgcttctctgtgggtaggggcttcatagtggcccttcaccctgcttggatcttttccacacaggtg

SEQ ID NO: 86499 - DNA, 74 bp, Homo sapiens
accttgcttctctgtgggtaggggcttcatagtggcccttcaccctgcttggatcttttccacacaggtgtaga

SEQ ID NO: 86500 - DNA, 75 bp, Homo sapiens
tctgtgggtaggggcttcatagtggcccttcaccctgcttggatcttttccacacaggtgtagacatctgccccc

SEQ ID NO: 86501 - DNA, 75 bp, Homo sapiens
agtggcccttcaccctgcttggatcttttccacacaggtgtagacatctgccccccaaactccatcctagaagca

SEQ ID NO: 86502 - DNA, 73 bp, Homo sapiens
accctgcttggatcttttccacacaggtgtagacatctgccccccaaactccatcctagaagcaggggccagg

SEQ ID NO: 86503 - DNA, 75 bp, Homo sapiens
atcttttccacacaggtgtagacatctgccccccaaactccatcctagaagcaggggccaggtgcagagcccagg

SEQ ID NO: 86504 - DNA, 79 bp, Homo sapiens
tagacatctgccccccaaactccatcctagaagcaggggccaggtgcagagcccagggccaggtgtgcagctgtggcgg

SEQ ID NO: 86505 - DNA, 75 bp, Homo sapiens
cccaaactccatcctagaagcaggggccaggtgcagagcccagggccaggtgtgcagctgtggcggggagtaggg

SEQ ID NO: 86506 - DNA, 78 bp, Homo sapiens
atcctagaagcaggggccaggtgcagagcccagggccaggtgtgcagctgtggcggggagtaggggctgcatgaaggg

SEQ ID NO: 86507 - DNA, 77 bp, Homo sapiens
ggggccaggtgcagagcccagggccaggtgtgcagctgtggcggggagtaggggctgcatgaaggggggtgacacag

SEQ ID NO: 86508 - DNA, 78 bp, Homo sapiens
agggccaggtgtgcagctgtggcggggagtaggggctgcatgaaggggggtgacacaggcctcaaagctgatgctcgg

SEQ ID NO: 86509 - DNA, 82 bp, Homo sapiens
tgtgcagctgtggcggggagtaggggctgcatgaaggggggtgacacaggcctcaaagctgatgctcgggagagtgtcgtgc

SEQ ID NO: 86510 - DNA, 80 bp, Homo sapiens
gcggggagtaggggctgcatgaaggggggtgacacaggcctcaaagctgatgctcgggagagtgtcgtgctgctggcgaa

SEQ ID NO: 86511 - DNA, 78 bp, Homo sapiens
atgaaggggggtgacacaggcctcaaagctgatgctcgggagagtgtcgtgctgctggcgaaaaggggaagacacaca

SEQ ID NO: 86512 - DNA, 81 bp, Homo sapiens
tgacacaggcctcaaagctgatgctcgggagagtgtcgtgctgctggcgaaaaggggaagacacacagagggcatggcggt

SEQ ID NO: 86513 - DNA, 79 bp, Homo sapiens
tcaaagctgatgctcgggagagtgtcgtgctgctggcgaaaaggggaagacacacagagggcatggcggttggcgtcct

SEQ ID NO: 86514 - DNA, 80 bp, Homo sapiens
atgctcgggagagtgtcgtgctgctggcgaaaaggggaagacacacagagggcatggcggttggcgtccttcaggatgca

SEQ ID NO: 86515 - DNA, 77 bp, Homo sapiens
gggagagtgtcgtgctgctggcgaaaaggggaagacacacagagggcatggcggttggcgtccttcaggatgcaggg

SEQ ID NO: 86516 - DNA, 77 bp, Homo sapiens
gtgctgctggcgaaaaggggaagacacacagagggcatggcggttggcgtccttcaggatgcaggggtgagaaggtg

SEQ ID NO: 86517 - DNA, 72 bp, Homo sapiens
aaaaggggaagacacacagagggcatggcggttggcgtccttcaggatgcaggggtgagaaggtggggagag

SEQ ID NO: 86518 - DNA, 74 bp, Homo sapiens
aagacacacagagggcatggcggttggcgtccttcaggatgcaggggtgagaaggtggggagagtgttaggaaa

SEQ ID NO: 86519 - DNA, 71 bp, Homo sapiens
agagggcatggcggttggcgtccttcaggatgcaggggtgagaaggtggggagagtgttaggaaaggtttc

SEQ ID NO: 86520 - DNA, 71 bp, Homo sapiens
gttggcgtccttcaggatgcaggggtgagaaggtggggagagtgttaggaaaggtttcccggagccagaca

SEQ ID NO: 86521 - DNA, 68 bp, Homo sapiens
gggtgagaaggtggggagagtgttaggaaaggtttcccggagccagacaccgaggttctcacaggccc

SEQ ID NO: 86522 - DNA, 68 bp, Homo sapiens
aaggtggggagagtgttaggaaaggtttcccggagccagacaccgaggttctcacaggccctgcctcc

SEQ ID NO: 86523 - DNA, 76 bp, Homo sapiens
agccagacaccgaggttctcacaggccctgcctcccctagcacacgaagcgctatggagccctctgattaacgggc

SEQ ID NO: 86524 - DNA, 73 bp, Homo sapiens
accgaggttctcacaggccctgcctcccctagcacacgaagcgctatggagccctctgattaacgggctgttt

SEQ ID NO: 86525 - DNA, 76 bp, Homo sapiens
acaggccctgcctcccctagcacacgaagcgctatggagccctctgattaacgggctgttttgctgctggttaatg

SEQ ID NO: 86526 - DNA, 76 bp, Homo sapiens
ctgcctcccctagcacacgaagcgctatggagccctctgattaacgggctgttttgctgctggttaatggttacca

SEQ ID NO: 86527 - DNA, 70 bp, Homo sapiens
ggagccctctgattaacgggctgttttgctgctggttaatggttaccagcccgggaccgtggggaagcca

SEQ ID NO: 86528 - DNA, 68 bp, Homo sapiens
attaacgggctgttttgctgctggttaatggttaccagcccgggaccgtggggaagccagcgggatgg

SEQ ID NO: 86529 - DNA, 71 bp, Homo sapiens
ttaatggttaccagcccgggaccgtggggaagccagcgggatgggagcagcccaggaatgcggccactttc

SEQ ID NO: 86530 - DNA, 73 bp, Homo sapiens
ttaccagcccgggaccgtggggaagccagcgggatgggagcagcccaggaatgcggccactttcttcgcacta

SEQ ID NO: 86531 - DNA, 75 bp, Homo sapiens
accgtggggaagccagcgggatgggagcagcccaggaatgcggccactttcttcgcactagccaagagcttgccc

SEQ ID NO: 86532 - DNA, 75 bp, Homo sapiens
aagccagcgggatgggagcagcccaggaatgcggccactttcttcgcactagccaagagcttgcccgggttctgg

SEQ ID NO: 86533 - DNA, 73 bp, Homo sapiens
atgggagcagcccaggaatgcggccactttcttcgcactagccaagagcttgcccgggttctgggacaaggtt

SEQ ID NO: 86534 - DNA, 71 bp, Homo sapiens
agcccaggaatgcggccactttcttcgcactagccaagagcttgcccgggttctgggacaaggtttgaaac

SEQ ID NO: 86535 - DNA, 71 bp, Homo sapiens
aatgcggccactttcttcgcactagccaagagcttgcccgggttctgggacaaggtttgaaacgcagcccc

SEQ ID NO: 86536 - DNA, 73 bp, Homo sapiens
tagccaagagcttgcccgggttctgggacaaggtttgaaacgcagcccctgctcagccttctgaatggggtct

SEQ ID NO: 86537 - DNA, 72 bp, Homo sapiens
agcttgcccgggttctgggacaaggtttgaaacgcagcccctgctcagccttctgaatggggtcttggttgc

SEQ ID NO: 86538 - DNA, 71 bp, Homo sapiens
gggttctgggacaaggtttgaaacgcagcccctgctcagccttctgaatggggtcttggttgctccttggg

SEQ ID NO: 86539 - DNA, 75 bp, Homo sapiens
acaaggtttgaaacgcagcccctgctcagccttctgaatggggtcttggttgctccttggggactgctcatgggc

SEQ ID NO: 86540 - DNA, 76 bp, Homo sapiens
aaacgcagcccctgctcagccttctgaatggggtcttggttgctccttggggactgctcatgggcccagtgaccca

SEQ ID NO: 86541 - DNA, 76 bp, Homo sapiens
cttctgaatggggtcttggttgctccttggggactgctcatgggcccagtgacccacgtaccagtgggctgccatg

SEQ ID NO: 86542 - DNA, 77 bp, Homo sapiens
gtcttggttgctccttggggactgctcatgggcccagtgacccacgtaccagtgggctgccatggggccctcagatg

SEQ ID NO: 86543 - DNA, 80 bp, Homo sapiens
tccttggggactgctcatgggcccagtgacccacgtaccagtgggctgccatggggccctcagatggcccacgcacagca

SEQ ID NO: 86544 - DNA, 81 bp, Homo sapiens
tgctcatgggcccagtgacccacgtaccagtgggctgccatggggccctcagatggcccacgcacagcaggtctgggtatg

SEQ ID NO: 86545 - DNA, 80 bp, Homo sapiens
ccagtgacccacgtaccagtgggctgccatggggccctcagatggcccacgcacagcaggtctgggtatgtctgaggtca

SEQ ID NO: 86546 - DNA, 78 bp, Homo sapiens
acccacgtaccagtgggctgccatggggccctcagatggcccacgcacagcaggtctgggtatgtctgaggtcagtcc

SEQ ID NO: 86547 - DNA, 80 bp, Homo sapiens
tgggctgccatggggccctcagatggcccacgcacagcaggtctgggtatgtctgaggtcagtcccggctccaggttata

SEQ ID NO: 86548 - DNA, 76 bp, Homo sapiens
atggggccctcagatggcccacgcacagcaggtctgggtatgtctgaggtcagtcccggctccaggttatagggtg

SEQ ID NO: 86549 - DNA, 76 bp, Homo sapiens
cctcagatggcccacgcacagcaggtctgggtatgtctgaggtcagtcccggctccaggttatagggtgtggggag

SEQ ID NO: 86550 - DNA, 75 bp, Homo sapiens
acgcacagcaggtctgggtatgtctgaggtcagtcccggctccaggttatagggtgtggggaggagttgccataa

SEQ ID NO: 86551 - DNA, 71 bp, Homo sapiens
aggtctgggtatgtctgaggtcagtcccggctccaggttatagggtgtggggaggagttgccataaaccta

SEQ ID NO: 86552 - DNA, 74 bp, Homo sapiens
tatgtctgaggtcagtcccggctccaggttatagggtgtggggaggagttgccataaacctaagcactagtcca

SEQ ID NO: 86553 - DNA, 77 bp, Homo sapiens
ggctccaggttatagggtgtggggaggagttgccataaacctaagcactagtccatgctcacagacacagagcccag

SEQ ID NO: 86554 - DNA, 78 bp, Homo sapiens
tatagggtgtggggaggagttgccataaacctaagcactagtccatgctcacagacacagagcccaggccacaggggc

SEQ ID NO: 86555 - DNA, 79 bp, Homo sapiens
ataaacctaagcactagtccatgctcacagacacagagcccaggccacaggggctcatcctaggcgcttccgcagggcc

SEQ ID NO: 86556 - DNA, 80 bp, Homo sapiens
ctaagcactagtccatgctcacagacacagagcccaggccacaggggctcatcctaggcgcttccgcagggcccaaaggc

SEQ ID NO: 86557 - DNA, 75 bp, Homo sapiens
acagacacagagcccaggccacaggggctcatcctaggcgcttccgcagggcccaaaggcccgctctgcccttcc

SEQ ID NO: 86558 - DNA, 74 bp, Homo sapiens
aggccacaggggctcatcctaggcgcttccgcagggcccaaaggcccgctctgcccttcccgctgacctgacca

SEQ ID NO: 86559 - DNA, 75 bp, Homo sapiens
gggctcatcctaggcgcttccgcagggcccaaaggcccgctctgcccttcccgctgacctgaccatggccaccag

SEQ ID NO: 86560 - DNA, 73 bp, Homo sapiens
ttccgcagggcccaaaggcccgctctgcccttcccgctgacctgaccatggccaccagggggcgttgcttcca

SEQ ID NO: 86561 - DNA, 76 bp, Homo sapiens
tctgcccttcccgctgacctgaccatggccaccagggggcgttgcttccaccaccgctcaagtccctgccagagtc

SEQ ID NO: 86562 - DNA, 76 bp, Homo sapiens
cgctgacctgaccatggccaccagggggcgttgcttccaccaccgctcaagtccctgccagagtccgttcatctct

SEQ ID NO: 86563 - DNA, 72 bp, Homo sapiens
accatggccaccagggggcgttgcttccaccaccgctcaagtccctgccagagtccgttcatctcttccctt

SEQ ID NO: 86564 - DNA, 72 bp, Homo sapiens
accagggggcgttgcttccaccaccgctcaagtccctgccagagtccgttcatctcttccctttgaaatcca

SEQ ID NO: 86565 - DNA, 75 bp, Homo sapiens
accaccgctcaagtccctgccagagtccgttcatctcttccctttgaaatccatcccaaattggggcctgctgca

SEQ ID NO: 86566 - DNA, 73 bp, Homo sapiens
aagtccctgccagagtccgttcatctcttccctttgaaatccatcccaaattggggcctgctgcactccccac

SEQ ID NO: 86567 - DNA, 73 bp, Homo sapiens
agagtccgttcatctcttccctttgaaatccatcccaaattggggcctgctgcactccccacctgaccccaga

SEQ ID NO: 86568 - DNA, 75 bp, Homo sapiens
ttcatctcttccctttgaaatccatcccaaattggggcctgctgcactccccacctgaccccagacaggagcttg

SEQ ID NO: 86569 - DNA, 78 bp, Homo sapiens
tttgaaatccatcccaaattggggcctgctgcactccccacctgaccccagacaggagcttgggcgatgctggctgac

SEQ ID NO: 86570 - DNA, 80 bp, Homo sapiens
atcccaaattggggcctgctgcactccccacctgaccccagacaggagcttgggcgatgctggctgactggatccatgaa

SEQ ID NO: 86571 - DNA, 79 bp, Homo sapiens
aaattggggcctgctgcactccccacctgaccccagacaggagcttgggcgatgctggctgactggatccatgaaggaa

SEQ ID NO: 86572 - DNA, 77 bp, Homo sapiens
acctgaccccagacaggagcttgggcgatgctggctgactggatccatgaaggaacaccatccagggggcgttccga

SEQ ID NO: 86573 - DNA, 79 bp, Homo sapiens
agacaggagcttgggcgatgctggctgactggatccatgaaggaacaccatccagggggcgttccgacaacgatgagcc

SEQ ID NO: 86574 - DNA, 81 bp, Homo sapiens
atgaaggaacaccatccagggggcgttccgacaacgatgagcccagtgcaggctctgtggcaggctgccggcagcatggcc

SEQ ID NO: 86575 - DNA, 80 bp, Homo sapiens
accatccagggggcgttccgacaacgatgagcccagtgcaggctctgtggcaggctgccggcagcatggcccaggaccaa

SEQ ID NO: 86576 - DNA, 82 bp, Homo sapiens
ttccgacaacgatgagcccagtgcaggctctgtggcaggctgccggcagcatggcccaggaccaagagccccaaagctaaca

SEQ ID NO: 86577 - DNA, 82 bp, Homo sapiens
gatgagcccagtgcaggctctgtggcaggctgccggcagcatggcccaggaccaagagccccaaagctaacagcccactaaa

SEQ ID NO: 86578 - DNA, 81 bp, Homo sapiens
agtgcaggctctgtggcaggctgccggcagcatggcccaggaccaagagccccaaagctaacagcccactaaagtgaagca

SEQ ID NO: 86579 - DNA, 81 bp, Homo sapiens
tctgtggcaggctgccggcagcatggcccaggaccaagagccccaaagctaacagcccactaaagtgaagcagctggccag

SEQ ID NO: 86580 - DNA, 78 bp, Homo sapiens
aggctgccggcagcatggcccaggaccaagagccccaaagctaacagcccactaaagtgaagcagctggccaggcgcg

SEQ ID NO: 86581 - DNA, 76 bp, Homo sapiens
ccctgtctctagaaggaggttagctgtgtagccaccccaggtctctctcagtgacttgggcccctgctacacatgt

SEQ ID NO: 86582 - DNA, 77 bp, Homo sapiens
tctctagaaggaggttagctgtgtagccaccccaggtctctctcagtgacttgggcccctgctacacatgttattag

SEQ ID NO: 86583 - DNA, 77 bp, Homo sapiens
aggttagctgtgtagccaccccaggtctctctcagtgacttgggcccctgctacacatgttattaggctccaggtca

SEQ ID NO: 86584 - DNA, 80 bp, Homo sapiens
gtgtagccaccccaggtctctctcagtgacttgggcccctgctacacatgttattaggctccaggtcaaggcacatggca

SEQ ID NO: 86585 - DNA, 84 bp, Homo sapiens
aggtctctctcagtgacttgggcccctgctacacatgttattaggctccaggtcaaggcacatggcatgctgcacgcaaggaca

SEQ ID NO: 86586 - DNA, 84 bp, Homo sapiens
agtgacttgggcccctgctacacatgttattaggctccaggtcaaggcacatggcatgctgcacgcaaggacaccactgtgtgc

SEQ ID NO: 86587 - DNA, 84 bp, Homo sapiens
ttgggcccctgctacacatgttattaggctccaggtcaaggcacatggcatgctgcacgcaaggacaccactgtgtgcttcggc

SEQ ID NO: 86588 - DNA, 88 bp, Homo sapiens
ctacacatgttattaggctccaggtcaaggcacatggcatgctgcacgcaaggacaccactgtgtgcttcggccatggccaggctgca

SEQ ID NO: 86589 - DNA, 89 bp, Homo sapiens
acatggcatgctgcacgcaaggacaccactgtgtgcttcggccatggccaggctgcagtgtgtcatctgacgggctcgctgagatgggg

SEQ ID NO: 86590 - DNA, 84 bp, Homo sapiens
ctgcacgcaaggacaccactgtgtgcttcggccatggccaggctgcagtgtgtcatctgacgggctcgctgagatgggggttgg

SEQ ID NO: 86591 - DNA, 82 bp, Homo sapiens
aaggacaccactgtgtgcttcggccatggccaggctgcagtgtgtcatctgacgggctcgctgagatgggggttggggatga

SEQ ID NO: 86592 - DNA, 80 bp, Homo sapiens
ctgtgtgcttcggccatggccaggctgcagtgtgtcatctgacgggctcgctgagatgggggttggggatgaggggcccc

SEQ ID NO: 86593 - DNA, 78 bp, Homo sapiens
atggccaggctgcagtgtgtcatctgacgggctcgctgagatgggggttggggatgaggggcccccccactgctcagg

SEQ ID NO: 86594 - DNA, 71 bp, Homo sapiens
atgggggttggggatgaggggcccccccactgctcaggttggggtagaggggcatgggtggtcaggcagca

SEQ ID NO: 86595 - DNA, 80 bp, Homo sapiens
gcccccccactgctcaggttggggtagaggggcatgggtggtcaggcagcagcagaaggcacagagtgactgctgtagga

SEQ ID NO: 86596 - DNA, 81 bp, Homo sapiens
actgctcaggttggggtagaggggcatgggtggtcaggcagcagcagaaggcacagagtgactgctgtaggacaccagagg

SEQ ID NO: 86597 - DNA, 80 bp, Homo sapiens
aggttggggtagaggggcatgggtggtcaggcagcagcagaaggcacagagtgactgctgtaggacaccagagggcactg

SEQ ID NO: 86598 - DNA, 88 bp, Homo sapiens
ggcatgggtggtcaggcagcagcagaaggcacagagtgactgctgtaggacaccagagggcactgtggggctgctctggcagcaagcc

SEQ ID NO: 86599 - DNA, 86 bp, Homo sapiens
gggtggtcaggcagcagcagaaggcacagagtgactgctgtaggacaccagagggcactgtggggctgctctggcagcaagcccag

SEQ ID NO: 86600 - DNA, 83 bp, Homo sapiens
agcagaaggcacagagtgactgctgtaggacaccagagggcactgtggggctgctctggcagcaagcccaggccagcccgccc

SEQ ID NO: 86601 - DNA, 82 bp, Homo sapiens
aaggcacagagtgactgctgtaggacaccagagggcactgtggggctgctctggcagcaagcccaggccagcccgcccctgc

SEQ ID NO: 86602 - DNA, 79 bp, Homo sapiens
gtgactgctgtaggacaccagagggcactgtggggctgctctggcagcaagcccaggccagcccgcccctgcccccaac

SEQ ID NO: 86603 - DNA, 77 bp, Homo sapiens
taggacaccagagggcactgtggggctgctctggcagcaagcccaggccagcccgcccctgcccccaacctctgacc

SEQ ID NO: 86604 - DNA, 77 bp, Homo sapiens
cactgtggggctgctctggcagcaagcccaggccagcccgcccctgcccccaacctctgacccctgagagaatgtcc

SEQ ID NO: 86605 - DNA, 75 bp, Homo sapiens
ctgctctggcagcaagcccaggccagcccgcccctgcccccaacctctgacccctgagagaatgtcctggggaag

SEQ ID NO: 86606 - DNA, 67 bp, Homo sapiens
aggccagcccgcccctgcccccaacctctgacccctgagagaatgtcctggggaaggtaaaaaggag

SEQ ID NO: 86607 - DNA, 66 bp, Homo sapiens
cccctgcccccaacctctgacccctgagagaatgtcctggggaaggtaaaaaggaggtggccaaag

SEQ ID NO: 86608 - DNA, 69 bp, Homo sapiens
tctgacccctgagagaatgtcctggggaaggtaaaaaggaggtggccaaagggtgaccacaagacccaa

SEQ ID NO: 86609 - DNA, 68 bp, Homo sapiens
aatgtcctggggaaggtaaaaaggaggtggccaaagggtgaccacaagacccaactggggctgatgga

SEQ ID NO: 86610 - DNA, 67 bp, Homo sapiens
gggaaggtaaaaaggaggtggccaaagggtgaccacaagacccaactggggctgatggaagtgtggg

SEQ ID NO: 86611 - DNA, 70 bp, Homo sapiens
taaaaaggaggtggccaaagggtgaccacaagacccaactggggctgatggaagtgtggggttgtgtcaa

SEQ ID NO: 86612 - DNA, 75 bp, Homo sapiens
ggtggccaaagggtgaccacaagacccaactggggctgatggaagtgtggggttgtgtcaactggctaggctgca

SEQ ID NO: 86613 - DNA, 76 bp, Homo sapiens
accacaagacccaactggggctgatggaagtgtggggttgtgtcaactggctaggctgcagcccctggagattcat

SEQ ID NO: 86614 - DNA, 76 bp, Homo sapiens
aagacccaactggggctgatggaagtgtggggttgtgtcaactggctaggctgcagcccctggagattcattattc

SEQ ID NO: 86615 - DNA, 77 bp, Homo sapiens
aagtgtggggttgtgtcaactggctaggctgcagcccctggagattcattattccatgacatcccgtctaggggtgc

SEQ ID NO: 86616 - DNA, 78 bp, Homo sapiens
gttgtgtcaactggctaggctgcagcccctggagattcattattccatgacatcccgtctaggggtgccctggaggta

SEQ ID NO: 86617 - DNA, 78 bp, Homo sapiens
ctaggctgcagcccctggagattcattattccatgacatcccgtctaggggtgccctggaggtactctgtggacatgg

SEQ ID NO: 86618 - DNA, 75 bp, Homo sapiens
agcccctggagattcattattccatgacatcccgtctaggggtgccctggaggtactctgtggacatggttacca

SEQ ID NO: 86619 - DNA, 75 bp, Homo sapiens
attcattattccatgacatcccgtctaggggtgccctggaggtactctgtggacatggttaccatccacaaacca

SEQ ID NO: 86620 - DNA, 74 bp, Homo sapiens
acatcccgtctaggggtgccctggaggtactctgtggacatggttaccatccacaaaccagatactgaaagcaa

SEQ ID NO: 86621 - DNA, 75 bp, Homo sapiens
ggtgccctggaggtactctgtggacatggttaccatccacaaaccagatactgaaagcaagtaaaggagatgacc

SEQ ID NO: 86622 - DNA, 75 bp, Homo sapiens
aggtactctgtggacatggttaccatccacaaaccagatactgaaagcaagtaaaggagatgaccctcgatggtc

SEQ ID NO: 86623 - DNA, 76 bp, Homo sapiens
ttaccatccacaaaccagatactgaaagcaagtaaaggagatgaccctcgatggtctgggtggtcccatcgaatca

SEQ ID NO: 86624 - DNA, 74 bp, Homo sapiens
acaaaccagatactgaaagcaagtaaaggagatgaccctcgatggtctgggtggtcccatcgaatcagcccaag

SEQ ID NO: 86625 - DNA, 74 bp, Homo sapiens
atactgaaagcaagtaaaggagatgaccctcgatggtctgggtggtcccatcgaatcagcccaaggccttaaga

SEQ ID NO: 86626 - DNA, 70 bp, Homo sapiens
aagtaaaggagatgaccctcgatggtctgggtggtcccatcgaatcagcccaaggccttaagagggaaac

SEQ ID NO: 86627 - DNA, 70 bp, Homo sapiens
atgaccctcgatggtctgggtggtcccatcgaatcagcccaaggccttaagagggaaactggctggggtt

SEQ ID NO: 86628 - DNA, 71 bp, Homo sapiens
atggtctgggtggtcccatcgaatcagcccaaggccttaagagggaaactggctggggtttggcaggagga

SEQ ID NO: 86629 - DNA, 70 bp, Homo sapiens
ggtggtcccatcgaatcagcccaaggccttaagagggaaactggctggggtttggcaggaggaggaagaa

SEQ ID NO: 86630 - DNA, 72 bp, Homo sapiens
atcgaatcagcccaaggccttaagagggaaactggctggggtttggcaggaggaggaagaaactctgcctga

SEQ ID NO: 86631 - DNA, 73 bp, Homo sapiens
aaggccttaagagggaaactggctggggtttggcaggaggaggaagaaactctgcctgaggactgctccatca

SEQ ID NO: 86632 - DNA, 76 bp, Homo sapiens
taagagggaaactggctggggtttggcaggaggaggaagaaactctgcctgaggactgctccatcagctcctactg

SEQ ID NO: 86633 - DNA, 80 bp, Homo sapiens
actggctggggtttggcaggaggaggaagaaactctgcctgaggactgctccatcagctcctactggaggtctgcagcca

SEQ ID NO: 86634 - DNA, 81 bp, Homo sapiens
ttggcaggaggaggaagaaactctgcctgaggactgctccatcagctcctactggaggtctgcagccagccctgagggtta

SEQ ID NO: 86635 - DNA, 80 bp, Homo sapiens
aggaggaagaaactctgcctgaggactgctccatcagctcctactggaggtctgcagccagccctgagggttacagactc

SEQ ID NO: 86636 - DNA, 81 bp, Homo sapiens
aactctgcctgaggactgctccatcagctcctactggaggtctgcagccagccctgagggttacagactccccagcccaca

SEQ ID NO: 86637 - DNA, 81 bp, Homo sapiens
actgctccatcagctcctactggaggtctgcagccagccctgagggttacagactccccagcccacagtcgtctgagccca

SEQ ID NO: 86638 - DNA, 80 bp, Homo sapiens
agctcctactggaggtctgcagccagccctgagggttacagactccccagcccacagtcgtctgagcccactgcttgcaa

SEQ ID NO: 86639 - DNA, 81 bp, Homo sapiens
tggaggtctgcagccagccctgagggttacagactccccagcccacagtcgtctgagcccactgcttgcaatgcatctttt

SEQ ID NO: 86640 - DNA, 82 bp, Homo sapiens
ccctgagggttacagactccccagcccacagtcgtctgagcccactgcttgcaatgcatctttttatcagcacacacagaca

SEQ ID NO: 86641 - DNA, 86 bp, Homo sapiens
acacagacacacgtctcctagaggctccatgtctctgcagaaccctgggctgcacctggaagcccatggatcatcatgtccatatc

SEQ ID NO: 86642 - DNA, 84 bp, Homo sapiens
acacacgtctcctagaggctccatgtctctgcagaaccctgggctgcacctggaagcccatggatcatcatgtccatatcccca

SEQ ID NO: 86643 - DNA, 89 bp, Homo sapiens
ctagaggctccatgtctctgcagaaccctgggctgcacctggaagcccatggatcatcatgtccatatccccacatccagctgtgcaga

SEQ ID NO: 86644 - DNA, 90 bp, Homo sapiens
atgtctctgcagaaccctgggctgcacctggaagcccatggatcatcatgtccatatccccacatccagctgtgcagagctctcaggctg

SEQ ID NO: 86645 - DNA, 87 bp, Homo sapiens
accctgggctgcacctggaagcccatggatcatcatgtccatatccccacatccagctgtgcagagctctcaggctgtggacagaaa

SEQ ID NO: 86646 - DNA, 88 bp, Homo sapiens
tgcacctggaagcccatggatcatcatgtccatatccccacatccagctgtgcagagctctcaggctgtggacagaaattgatttagg

SEQ ID NO: 86647 - DNA, 86 bp, Homo sapiens
aagcccatggatcatcatgtccatatccccacatccagctgtgcagagctctcaggctgtggacagaaattgatttaggtacaaca

SEQ ID NO: 86648 - DNA, 86 bp, Homo sapiens
tcatcatgtccatatccccacatccagctgtgcagagctctcaggctgtggacagaaattgatttaggtacaacatggtaactcta

SEQ ID NO: 86649 - DNA, 80 bp, Homo sapiens
atatccccacatccagctgtgcagagctctcaggctgtggacagaaattgatttaggtacaacatggtaactctaaaaga

SEQ ID NO: 86650 - DNA, 78 bp, Homo sapiens
ccacatccagctgtgcagagctctcaggctgtggacagaaattgatttaggtacaacatggtaactctaaaagaaaaa

SEQ ID NO: 86651 - DNA, 74 bp, Homo sapiens
cactccagcctagatgcaggggaacctgcaataaaggctagaagaaaaatcaaaccattctaaggcatatcggg

SEQ ID NO: 86652 - DNA, 72 bp, Homo sapiens
tagatgcaggggaacctgcaataaaggctagaagaaaaatcaaaccattctaaggcatatcgggtaggttag

SEQ ID NO: 86653 - DNA, 71 bp, Homo sapiens
ggaacctgcaataaaggctagaagaaaaatcaaaccattctaaggcatatcgggtaggttaggggagatga

SEQ ID NO: 86654 - DNA, 70 bp, Homo sapiens
ataaaggctagaagaaaaatcaaaccattctaaggcatatcgggtaggttaggggagatgaagagtccta

SEQ ID NO: 86655 - DNA, 68 bp, Homo sapiens
agaagaaaaatcaaaccattctaaggcatatcgggtaggttaggggagatgaagagtcctaaaacagg

SEQ ID NO: 86656 - DNA, 68 bp, Homo sapiens
aatcaaaccattctaaggcatatcgggtaggttaggggagatgaagagtcctaaaacagggggtcaaa

SEQ ID NO: 86657 - DNA, 68 bp, Homo sapiens
attctaaggcatatcgggtaggttaggggagatgaagagtcctaaaacagggggtcaaagaaggtaga

SEQ ID NO: 86658 - DNA, 68 bp, Homo sapiens
atatcgggtaggttaggggagatgaagagtcctaaaacagggggtcaaagaaggtagatgactcaccc

SEQ ID NO: 86659 - DNA, 69 bp, Homo sapiens
aggttaggggagatgaagagtcctaaaacagggggtcaaagaaggtagatgactcaccctttctctcat

SEQ ID NO: 86660 - DNA, 69 bp, Homo sapiens
aagagtcctaaaacagggggtcaaagaaggtagatgactcaccctttctctcattccctgatttttcta

SEQ ID NO: 86661 - DNA, 72 bp, Homo sapiens
taaaacagggggtcaaagaaggtagatgactcaccctttctctcattccctgatttttctataagatggtca

SEQ ID NO: 86662 - DNA, 73 bp, Homo sapiens
gtcaaagaaggtagatgactcaccctttctctcattccctgatttttctataagatggtcatttagaagaaaa

SEQ ID NO: 86663 - DNA, 73 bp, Homo sapiens
gaaggtagatgactcaccctttctctcattccctgatttttctataagatggtcatttagaagaaaacatatt

SEQ ID NO: 86664 - DNA, 71 bp, Homo sapiens
gactcaccctttctctcattccctgatttttctataagatggtcatttagaagaaaacatatttcaaaaaa

SEQ ID NO: 86665 - DNA, 73 bp, Homo sapiens
ctctcattccctgatttttctataagatggtcatttagaagaaaacatatttcaaaaaaatgagggtgctgag

SEQ ID NO: 86666 - DNA, 71 bp, Homo sapiens
ccctgatttttctataagatggtcatttagaagaaaacatatttcaaaaaaatgagggtgctgagtttcta

SEQ ID NO: 86667 - DNA, 72 bp, Homo sapiens
aagatggtcatttagaagaaaacatatttcaaaaaaatgagggtgctgagtttctatgaacctctctcccaa

SEQ ID NO: 86668 - DNA, 71 bp, Homo sapiens
gtcatttagaagaaaacatatttcaaaaaaatgagggtgctgagtttctatgaacctctctcccaaccaaa

SEQ ID NO: 86669 - DNA, 70 bp, Homo sapiens
aaaacatatttcaaaaaaatgagggtgctgagtttctatgaacctctctcccaaccaaaatccagacaaa

SEQ ID NO: 86670 - DNA, 71 bp, Homo sapiens
atttcaaaaaaatgagggtgctgagtttctatgaacctctctcccaaccaaaatccagacaaatgtccaag

SEQ ID NO: 86671 - DNA, 73 bp, Homo sapiens
gggtgctgagtttctatgaacctctctcccaaccaaaatccagacaaatgtccaaggtccttgtgtgccctaa

SEQ ID NO: 86672 - DNA, 75 bp, Homo sapiens
agtttctatgaacctctctcccaaccaaaatccagacaaatgtccaaggtccttgtgtgccctaatgcagcagtc

SEQ ID NO: 86673 - DNA, 74 bp, Homo sapiens
atgaacctctctcccaaccaaaatccagacaaatgtccaaggtccttgtgtgccctaatgcagcagtcccctac

SEQ ID NO: 86674 - DNA, 71 bp, Homo sapiens
ctcccaaccaaaatccagacaaatgtccaaggtccttgtgtgccctaatgcagcagtcccctacctttttg

SEQ ID NO: 86675 - DNA, 74 bp, Homo sapiens
aaatccagacaaatgtccaaggtccttgtgtgccctaatgcagcagtcccctacctttttggcaccagcgacta

SEQ ID NO: 86676 - DNA, 72 bp, Homo sapiens
aaatgtccaaggtccttgtgtgccctaatgcagcagtcccctacctttttggcaccagcgactagtttcgtg

SEQ ID NO: 86677 - DNA, 71 bp, Homo sapiens
cacacctggccagaagacaatttttctatggatggtggaagggggacagggagccataggggaggatggtt

SEQ ID NO: 86678 - DNA, 71 bp, Homo sapiens
cagaagacaatttttctatggatggtggaagggggacagggagccataggggaggatggtttccggctgaa

SEQ ID NO: 86679 - DNA, 70 bp, Homo sapiens
aatttttctatggatggtggaagggggacagggagccataggggaggatggtttccggctgaaactgatc

SEQ ID NO: 86680 - DNA, 75 bp, Homo sapiens
ctatggatggtggaagggggacagggagccataggggaggatggtttccggctgaaactgatccacctcagatca

SEQ ID NO: 86681 - DNA, 75 bp, Homo sapiens
tggaagggggacagggagccataggggaggatggtttccggctgaaactgatccacctcagatcaggcattagat

SEQ ID NO: 86682 - DNA, 74 bp, Homo sapiens
cacctcctgctgtgtgggcagttcctaaccagtccagtgctgggggttgggggcccctgccctatcagagtgga

SEQ ID NO: 86683 - DNA, 75 bp, Homo sapiens
tgtgtgggcagttcctaaccagtccagtgctgggggttgggggcccctgccctatcagagtggaagctaggtgca

SEQ ID NO: 86684 - DNA, 78 bp, Homo sapiens
gttcctaaccagtccagtgctgggggttgggggcccctgccctatcagagtggaagctaggtgcacatcgctgcatga

SEQ ID NO: 86685 - DNA, 78 bp, Homo sapiens
taaccagtccagtgctgggggttgggggcccctgccctatcagagtggaagctaggtgcacatcgctgcatgaaggga

SEQ ID NO: 86686 - DNA, 78 bp, Homo sapiens
tgggggttgggggcccctgccctatcagagtggaagctaggtgcacatcgctgcatgaagggagccactgggagagga

SEQ ID NO: 86687 - DNA, 82 bp, Homo sapiens
gggcccctgccctatcagagtggaagctaggtgcacatcgctgcatgaagggagccactgggagaggagagccgcccattgc

SEQ ID NO: 86688 - DNA, 82 bp, Homo sapiens
ccctgccctatcagagtggaagctaggtgcacatcgctgcatgaagggagccactgggagaggagagccgcccattgcccaa

SEQ ID NO: 86689 - DNA, 84 bp, Homo sapiens
cctgccctatcagagtggaagctaggtgcacatcgctgcatgaagggagccactgggagaggagagccgcccattgcccaagca

SEQ ID NO: 86690 - DNA, 86 bp, Homo sapiens
ctatcagagtggaagctaggtgcacatcgctgcatgaagggagccactgggagaggagagccgcccattgcccaagcagcctgtga

SEQ ID NO: 86691 - DNA, 85 bp, Homo sapiens
agtggaagctaggtgcacatcgctgcatgaagggagccactgggagaggagagccgcccattgcccaagcagcctgtgacgtgca

SEQ ID NO: 86692 - DNA, 84 bp, Homo sapiens
ctaggtgcacatcgctgcatgaagggagccactgggagaggagagccgcccattgcccaagcagcctgtgacgtgcacccgaca

SEQ ID NO: 86693 - DNA, 78 bp, Homo sapiens
atgaagggagccactgggagaggagagccgcccattgcccaagcagcctgtgacgtgcacccgacacgtcctggtgtg

SEQ ID NO: 86694 - DNA, 77 bp, Homo sapiens
aagggagccactgggagaggagagccgcccattgcccaagcagcctgtgacgtgcacccgacacgtcctggtgtggc

SEQ ID NO: 86695 - DNA, 78 bp, Homo sapiens
cactgggagaggagagccgcccattgcccaagcagcctgtgacgtgcacccgacacgtcctggtgtggccccagccaa

SEQ ID NO: 86696 - DNA, 76 bp, Homo sapiens
ggagaggagagccgcccattgcccaagcagcctgtgacgtgcacccgacacgtcctggtgtggccccagccaaggg

SEQ ID NO: 86697 - DNA, 75 bp, Homo sapiens
ccgcccattgcccaagcagcctgtgacgtgcacccgacacgtcctggtgtggccccagccaaggggctatcctgg

SEQ ID NO: 86698 - DNA, 73 bp, Homo sapiens
aagcagcctgtgacgtgcacccgacacgtcctggtgtggccccagccaaggggctatcctgggggcctagaac

SEQ ID NO: 86699 - DNA, 72 bp, Homo sapiens
tgtgacgtgcacccgacacgtcctggtgtggccccagccaaggggctatcctgggggcctagaacccagcct

SEQ ID NO: 86700 - DNA, 71 bp, Homo sapiens
acccgacacgtcctggtgtggccccagccaaggggctatcctgggggcctagaacccagccttgcatggtg

SEQ ID NO: 86701 - DNA, 74 bp, Homo sapiens
tggtgtggccccagccaaggggctatcctgggggcctagaacccagccttgcatggtggcagacagggcccaaa

SEQ ID NO: 86702 - DNA, 76 bp, Homo sapiens
cccagccaaggggctatcctgggggcctagaacccagccttgcatggtggcagacagggcccaaacactgccatga

SEQ ID NO: 86703 - DNA, 81 bp, Homo sapiens
ggctatcctgggggcctagaacccagccttgcatggtggcagacagggcccaaacactgccatgagctgctgctgtaccca

SEQ ID NO: 86704 - DNA, 82 bp, Homo sapiens
ggggcctagaacccagccttgcatggtggcagacagggcccaaacactgccatgagctgctgctgtacccagcgagcaagga

SEQ ID NO: 86705 - DNA, 85 bp, Homo sapiens
tagaacccagccttgcatggtggcagacagggcccaaacactgccatgagctgctgctgtacccagcgagcaaggacagacctga

SEQ ID NO: 86706 - DNA, 86 bp, Homo sapiens
ttgcatggtggcagacagggcccaaacactgccatgagctgctgctgtacccagcgagcaaggacagacctgagactataccagtc

SEQ ID NO: 86707 - DNA, 81 bp, Homo sapiens
agacagggcccaaacactgccatgagctgctgctgtacccagcgagcaaggacagacctgagactataccagtcccaagat

SEQ ID NO: 86708 - DNA, 84 bp, Homo sapiens
catgagctgctgctgtacccagcgagcaaggacagacctgagactataccagtcccaagattccaaatatgaatgattaagaca

SEQ ID NO: 86709 - DNA, 78 bp, Homo sapiens
tgctgtacccagcgagcaaggacagacctgagactataccagtcccaagattccaaatatgaatgattaagacaaaaa

SEQ ID NO: 86710 - DNA, 74 bp, Homo sapiens
agcgagcaaggacagacctgagactataccagtcccaagattccaaatatgaatgattaagacaaaaacttacc

SEQ ID NO: 86711 - DNA, 70 bp, Homo sapiens
aaggacagacctgagactataccagtcccaagattccaaatatgaatgattaagacaaaaacttacccct

SEQ ID NO: 86712 - DNA, 70 bp, Homo sapiens
agactataccagtcccaagattccaaatatgaatgattaagacaaaaacttaccccttggcttccttgaa

SEQ ID NO: 86713 - DNA, 70 bp, Homo sapiens
agtcccaagattccaaatatgaatgattaagacaaaaacttaccccttggcttccttgaaatcggataga

SEQ ID NO: 86714 - DNA, 73 bp, Homo sapiens
atatgaatgattaagacaaaaacttaccccttggcttccttgaaatcggatagatggcctcagtgaaacagaa

SEQ ID NO: 86715 - DNA, 70 bp, Homo sapiens
agacaaaaacttaccccttggcttccttgaaatcggatagatggcctcagtgaaacagaatcctataaaa

SEQ ID NO: 86716 - DNA, 68 bp, Homo sapiens
aaacttaccccttggcttccttgaaatcggatagatggcctcagtgaaacagaatcctataaaaaaaa

SEQ ID NO: 86717 - DNA, 64 bp, Homo sapiens
aaaaaaaaggtgaggggaacatcaataaagacattgggaaacccaaagactccctccccaggta

SEQ ID NO: 86718 - DNA, 67 bp, Homo sapiens
aaaggtgaggggaacatcaataaagacattgggaaacccaaagactccctccccaggtatagaagga

SEQ ID NO: 86719 - DNA, 70 bp, Homo sapiens
atcaataaagacattgggaaacccaaagactccctccccaggtatagaaggagcagggtgaagatggtgt

SEQ ID NO: 86720 - DNA, 69 bp, Homo sapiens
aaacccaaagactccctccccaggtatagaaggagcagggtgaagatggtgttctcaggagaggggaaa

SEQ ID NO: 86721 - DNA, 73 bp, Homo sapiens
aagactccctccccaggtatagaaggagcagggtgaagatggtgttctcaggagaggggaaaggaaatgcaca

SEQ ID NO: 86722 - DNA, 75 bp, Homo sapiens
agaaggagcagggtgaagatggtgttctcaggagaggggaaaggaaatgcacacactctgaaaattataggcaag

SEQ ID NO: 86723 - DNA, 74 bp, Homo sapiens
aagatggtgttctcaggagaggggaaaggaaatgcacacactctgaaaattataggcaaggtcaccggagcagg

SEQ ID NO: 86724 - DNA, 73 bp, Homo sapiens
ttctcaggagaggggaaaggaaatgcacacactctgaaaattataggcaaggtcaccggagcagggttttaga

SEQ ID NO: 86725 - DNA, 72 bp, Homo sapiens
ggggaaaggaaatgcacacactctgaaaattataggcaaggtcaccggagcagggttttagaaggatcagta

SEQ ID NO: 86726 - DNA, 74 bp, Homo sapiens
aaatgcacacactctgaaaattataggcaaggtcaccggagcagggttttagaaggatcagtaggagttcctca

SEQ ID NO: 86727 - DNA, 74 bp, Homo sapiens
actctgaaaattataggcaaggtcaccggagcagggttttagaaggatcagtaggagttcctcagatggacaga

SEQ ID NO: 86728 - DNA, 72 bp, Homo sapiens
aaaattataggcaaggtcaccggagcagggttttagaaggatcagtaggagttcctcagatggacagagggc

SEQ ID NO: 86729 - DNA, 75 bp, Homo sapiens
aaggtcaccggagcagggttttagaaggatcagtaggagttcctcagatggacagagggctggggacacatgaca

SEQ ID NO: 86730 - DNA, 75 bp, Homo sapiens
agcagggttttagaaggatcagtaggagttcctcagatggacagagggctggggacacatgacaggtaagaatgg

SEQ ID NO: 86731 - DNA, 79 bp, Homo sapiens
atcagtaggagttcctcagatggacagagggctggggacacatgacaggtaagaatggggcctccagacacaggcaaca

SEQ ID NO: 86732 - DNA, 79 bp, Homo sapiens
ttcctcagatggacagagggctggggacacatgacaggtaagaatggggcctccagacacaggcaacaggctggcggaa

SEQ ID NO: 86733 - DNA, 78 bp, Homo sapiens
agagggctggggacacatgacaggtaagaatggggcctccagacacaggcaacaggctggcggaaggcccaggatgca

SEQ ID NO: 86734 - DNA, 75 bp, Homo sapiens
atgacaggtaagaatggggcctccagacacaggcaacaggctggcggaaggcccaggatgcaggggcggggagtg

SEQ ID NO: 86735 - DNA, 75 bp, Homo sapiens
aacaggctggcggaaggcccaggatgcaggggcggggagtgtgccatccttggaaagccaccaccagcctgtgaa

SEQ ID NO: 86736 - DNA, 73 bp, Homo sapiens
cggaaggcccaggatgcaggggcggggagtgtgccatccttggaaagccaccaccagcctgtgaatccaccgg

SEQ ID NO: 86737 - DNA, 75 bp, Homo sapiens
aggatgcaggggcggggagtgtgccatccttggaaagccaccaccagcctgtgaatccaccgggagagaagggca

SEQ ID NO: 86738 - DNA, 74 bp, Homo sapiens
gggcggggagtgtgccatccttggaaagccaccaccagcctgtgaatccaccgggagagaagggcaaggctcaa

SEQ ID NO: 86739 - DNA, 78 bp, Homo sapiens
ggagtgtgccatccttggaaagccaccaccagcctgtgaatccaccgggagagaagggcaaggctcaaggtgctcaca

SEQ ID NO: 86740 - DNA, 77 bp, Homo sapiens
atccttggaaagccaccaccagcctgtgaatccaccgggagagaagggcaaggctcaaggtgctcacagccctgcca

SEQ ID NO: 86741 - DNA, 77 bp, Homo sapiens
tcaaggtgctcacagccctgccaggaaaaagcaaagacaggtcagggttgaccctggatcatgactctcccaaggac

SEQ ID NO: 86742 - DNA, 74 bp, Homo sapiens
acagccctgccaggaaaaagcaaagacaggtcagggttgaccctggatcatgactctcccaaggacccatacag

SEQ ID NO: 86743 - DNA, 74 bp, Homo sapiens
ccaggaaaaagcaaagacaggtcagggttgaccctggatcatgactctcccaaggacccatacaggcaaaagca

SEQ ID NO: 86744 - DNA, 73 bp, Homo sapiens
aaaagcaaagacaggtcagggttgaccctggatcatgactctcccaaggacccatacaggcaaaagcagcccc

SEQ ID NO: 86745 - DNA, 79 bp, Homo sapiens
gttgaccctggatcatgactctcccaaggacccatacaggcaaaagcagccccctccactctcacagccccagctgatc

SEQ ID NO: 86746 - DNA, 77 bp, Homo sapiens
atcatgactctcccaaggacccatacaggcaaaagcagccccctccactctcacagccccagctgatcccctgaaac

SEQ ID NO: 86747 - DNA, 73 bp, Homo sapiens
aaggacccatacaggcaaaagcagccccctccactctcacagccccagctgatcccctgaaaccaccaaccag

SEQ ID NO: 86748 - DNA, 74 bp, Homo sapiens
atacaggcaaaagcagccccctccactctcacagccccagctgatcccctgaaaccaccaaccaggctaagtcc

SEQ ID NO: 86749 - DNA, 75 bp, Homo sapiens
aagcagccccctccactctcacagccccagctgatcccctgaaaccaccaaccaggctaagtcctgtctcacaaa

SEQ ID NO: 86750 - DNA, 76 bp, Homo sapiens
tccactctcacagccccagctgatcccctgaaaccaccaaccaggctaagtcctgtctcacaaacactggctttta

SEQ ID NO: 86751 - DNA, 72 bp, Homo sapiens
agccccagctgatcccctgaaaccaccaaccaggctaagtcctgtctcacaaacactggcttttaacaacca

SEQ ID NO: 86752 - DNA, 72 bp, Homo sapiens
tgatcccctgaaaccaccaaccaggctaagtcctgtctcacaaacactggcttttaacaaccaggtgggtga

SEQ ID NO: 86753 - DNA, 72 bp, Homo sapiens
aaaccaccaaccaggctaagtcctgtctcacaaacactggcttttaacaaccaggtgggtgagcactgtcta

SEQ ID NO: 86754 - DNA, 77 bp, Homo sapiens
aaccaggctaagtcctgtctcacaaacactggcttttaacaaccaggtgggtgagcactgtctatcagagcaggtgc

SEQ ID NO: 86755 - DNA, 77 bp, Homo sapiens
taagtcctgtctcacaaacactggcttttaacaaccaggtgggtgagcactgtctatcagagcaggtgcggtggggc

SEQ ID NO: 86756 - DNA, 76 bp, Homo sapiens
ctcacaaacactggcttttaacaaccaggtgggtgagcactgtctatcagagcaggtgcggtggggccaccttgga

SEQ ID NO: 86757 - DNA, 83 bp, Homo sapiens
tgagcactgtctatcagagcaggtgcggtggggccaccttggagcctggggtgggagcctgaggcctgcacagctccaccaca

SEQ ID NO: 86758 - DNA, 80 bp, Homo sapiens
tgtctatcagagcaggtgcggtggggccaccttggagcctggggtgggagcctgaggcctgcacagctccaccacacggc

SEQ ID NO: 86759 - DNA, 79 bp, Homo sapiens
gccaccttggagcctggggtgggagcctgaggcctgcacagctccaccacacggccttggggcagtcacatggcttctg

SEQ ID NO: 86760 - DNA, 81 bp, Homo sapiens
agcctggggtgggagcctgaggcctgcacagctccaccacacggccttggggcagtcacatggcttctggacagctggtca

SEQ ID NO: 86761 - DNA, 86 bp, Homo sapiens
tgggagcctgaggcctgcacagctccaccacacggccttggggcagtcacatggcttctggacagctggtcactgagcttggagca

SEQ ID NO: 86762 - DNA, 83 bp, Homo sapiens
aggcctgcacagctccaccacacggccttggggcagtcacatggcttctggacagctggtcactgagcttggagcagtggaat

SEQ ID NO: 86763 - DNA, 77 bp, Homo sapiens
acacggccttggggcagtcacatggcttctggacagctggtcactgagcttggagcagtggaatttccaaggaaaaa

SEQ ID NO: 86764 - DNA, 75 bp, Homo sapiens
acagctggtcactgagcttggagcagtggaatttccaaggaaaaaatatacaaaagagctcaaaataaatactga

SEQ ID NO: 86765 - DNA, 75 bp, Homo sapiens
gtcactgagcttggagcagtggaatttccaaggaaaaaatatacaaaagagctcaaaataaatactgacgcttca

SEQ ID NO: 86766 - DNA, 75 bp, Homo sapiens
ttggagcagtggaatttccaaggaaaaaatatacaaaagagctcaaaataaatactgacgcttcagctattcaga

SEQ ID NO: 86767 - DNA, 73 bp, Homo sapiens
atttccaaggaaaaaatatacaaaagagctcaaaataaatactgacgcttcagctattcagagaccagccttc

SEQ ID NO: 86768 - DNA, 78 bp, Homo sapiens
aaaaaatatacaaaagagctcaaaataaatactgacgcttcagctattcagagaccagccttctggcagtatctgaga

SEQ ID NO: 86769 - DNA, 79 bp, Homo sapiens
atatacaaaagagctcaaaataaatactgacgcttcagctattcagagaccagccttctggcagtatctgagaaagaac

SEQ ID NO: 86770 - DNA, 81 bp, Homo sapiens
caaaataaatactgacgcttcagctattcagagaccagccttctggcagtatctgagaaagaactgcgagccagaggagga

SEQ ID NO: 86771 - DNA, 83 bp, Homo sapiens
taaatactgacgcttcagctattcagagaccagccttctggcagtatctgagaaagaactgcgagccagaggaggactgcacc

SEQ ID NO: 86772 - DNA, 82 bp, Homo sapiens
attcagagaccagccttctggcagtatctgagaaagaactgcgagccagaggaggactgcacctctgcatcttcttccctct

SEQ ID NO: 86773 - DNA, 77 bp, Homo sapiens
tatctgagaaagaactgcgagccagaggaggactgcacctctgcatcttcttccctcttcccaacctggggccctaa

SEQ ID NO: 86774 - DNA, 74 bp, Homo sapiens
aaagaactgcgagccagaggaggactgcacctctgcatcttcttccctcttcccaacctggggccctaagcgta

SEQ ID NO: 86775 - DNA, 76 bp, Homo sapiens
ccagaggaggactgcacctctgcatcttcttccctcttcccaacctggggccctaagcgtagatctcagtgtccca

SEQ ID NO: 86776 - DNA, 77 bp, Homo sapiens
aggactgcacctctgcatcttcttccctcttcccaacctggggccctaagcgtagatctcagtgtcccagatgctac

SEQ ID NO: 86777 - DNA, 78 bp, Homo sapiens
ctctgcatcttcttccctcttcccaacctggggccctaagcgtagatctcagtgtcccagatgctaccccacagcata

SEQ ID NO: 86778 - DNA, 81 bp, Homo sapiens
caacctggggccctaagcgtagatctcagtgtcccagatgctaccccacagcatagccctggctgatcaccatgattcttg

SEQ ID NO: 86779 - DNA, 80 bp, Homo sapiens
ccctaagcgtagatctcagtgtcccagatgctaccccacagcatagccctggctgatcaccatgattcttggtccccaaa

SEQ ID NO: 86780 - DNA, 80 bp, Homo sapiens
agcgtagatctcagtgtcccagatgctaccccacagcatagccctggctgatcaccatgattcttggtccccaaacccac

SEQ ID NO: 86781 - DNA, 78 bp, Homo sapiens
agtgtcccagatgctaccccacagcatagccctggctgatcaccatgattcttggtccccaaacccacccctgcacca

SEQ ID NO: 86782 - DNA, 77 bp, Homo sapiens
agatgctaccccacagcatagccctggctgatcaccatgattcttggtccccaaacccacccctgcaccacctggcc

SEQ ID NO: 86783 - DNA, 76 bp, Homo sapiens
ccacagcatagccctggctgatcaccatgattcttggtccccaaacccacccctgcaccacctggccccactgccc

SEQ ID NO: 86784 - DNA, 75 bp, Homo sapiens
ctggctgatcaccatgattcttggtccccaaacccacccctgcaccacctggccccactgccccactcaggtcca

SEQ ID NO: 86785 - DNA, 73 bp, Homo sapiens
atcaccatgattcttggtccccaaacccacccctgcaccacctggccccactgccccactcaggtccagccca

SEQ ID NO: 86786 - DNA, 73 bp, Homo sapiens
ttcttggtccccaaacccacccctgcaccacctggccccactgccccactcaggtccagcccactgagatgcc

SEQ ID NO: 86787 - DNA, 72 bp, Homo sapiens
aaacccacccctgcaccacctggccccactgccccactcaggtccagcccactgagatgccctcccacccag

SEQ ID NO: 86788 - DNA, 79 bp, Homo sapiens
tgcaccacctggccccactgccccactcaggtccagcccactgagatgccctcccacccaggccttgctcctgtcctca

SEQ ID NO: 86789 - DNA, 76 bp, Homo sapiens
tccagcccactgagatgccctcccacccaggccttgctcctgtcctcatagtaccccgtcctgggctccgtctcca

SEQ ID NO: 86790 - DNA, 75 bp, Homo sapiens
tcccacccaggccttgctcctgtcctcatagtaccccgtcctgggctccgtctccactgctcaggtctcactccc

SEQ ID NO: 86791 - DNA, 74 bp, Homo sapiens
aggccttgctcctgtcctcatagtaccccgtcctgggctccgtctccactgctcaggtctcactccctcccacc

SEQ ID NO: 86792 - DNA, 76 bp, Homo sapiens
tgtcctcatagtaccccgtcctgggctccgtctccactgctcaggtctcactccctcccaccctggtctgcccata

SEQ ID NO: 86793 - DNA, 75 bp, Homo sapiens
atagtaccccgtcctgggctccgtctccactgctcaggtctcactccctcccaccctggtctgcccatagctctc

SEQ ID NO: 86794 - DNA, 77 bp, Homo sapiens
tcctgggctccgtctccactgctcaggtctcactccctcccaccctggtctgcccatagctctccccagagggcaaa

SEQ ID NO: 86795 - DNA, 79 bp, Homo sapiens
tctccactgctcaggtctcactccctcccaccctggtctgcccatagctctccccagagggcaaagcactacttgagtc

SEQ ID NO: 86796 - DNA, 77 bp, Homo sapiens
ctcaggtctcactccctcccaccctggtctgcccatagctctccccagagggcaaagcactacttgagtctggagag

SEQ ID NO: 86797 - DNA, 76 bp, Homo sapiens
tccctcccaccctggtctgcccatagctctccccagagggcaaagcactacttgagtctggagaggcctgtcggaa

SEQ ID NO: 86798 - DNA, 74 bp, Homo sapiens
accctggtctgcccatagctctccccagagggcaaagcactacttgagtctggagaggcctgtcggaagacccg

SEQ ID NO: 86799 - DNA, 73 bp, Homo sapiens
ccatagctctccccagagggcaaagcactacttgagtctggagaggcctgtcggaagacccggggtaagcgga

SEQ ID NO: 86800 - DNA, 75 bp, Homo sapiens
tccccagagggcaaagcactacttgagtctggagaggcctgtcggaagacccggggtaagcggagcagctccaca

SEQ ID NO: 86801 - DNA, 76 bp, Homo sapiens
caaagcactacttgagtctggagaggcctgtcggaagacccggggtaagcggagcagctccacacctgcgacagta

SEQ ID NO: 86802 - DNA, 78 bp, Homo sapiens
tacttgagtctggagaggcctgtcggaagacccggggtaagcggagcagctccacacctgcgacagtatcagagacaa

SEQ ID NO: 86803 - DNA, 76 bp, Homo sapiens
tgtcggaagacccggggtaagcggagcagctccacacctgcgacagtatcagagacaacacctaccccatgggtca

SEQ ID NO: 86804 - DNA, 75 bp, Homo sapiens
agacccggggtaagcggagcagctccacacctgcgacagtatcagagacaacacctaccccatgggtcagcccag

SEQ ID NO: 86805 - DNA, 78 bp, Homo sapiens
taagcggagcagctccacacctgcgacagtatcagagacaacacctaccccatgggtcagcccagggtccgccctctg

SEQ ID NO: 86806 - DNA, 77 bp, Homo sapiens
acagtatcagagacaacacctaccccatgggtcagcccagggtccgccctctggagccactcagcactgttccagga

SEQ ID NO: 86807 - DNA, 77 bp, Homo sapiens
atcagagacaacacctaccccatgggtcagcccagggtccgccctctggagccactcagcactgttccaggactcca

SEQ ID NO: 86808 - DNA, 77 bp, Homo sapiens
acacctaccccatgggtcagcccagggtccgccctctggagccactcagcactgttccaggactccagcttgagatg

SEQ ID NO: 86809 - DNA, 79 bp, Homo sapiens
gtcagcccagggtccgccctctggagccactcagcactgttccaggactccagcttgagatggcacagggccctccaac

SEQ ID NO: 86810 - DNA, 86 bp, Homo sapiens
tctggagccactcagcactgttccaggactccagcttgagatggcacagggccctccaactgctcacatccagtgcccatcagttg

SEQ ID NO: 86811 - DNA, 80 bp, Homo sapiens
actgttccaggactccagcttgagatggcacagggccctccaactgctcacatccagtgcccatcagttgggaaagacag

SEQ ID NO: 86812 - DNA, 84 bp, Homo sapiens
actccagcttgagatggcacagggccctccaactgctcacatccagtgcccatcagttgggaaagacaggagctgctaggagca

SEQ ID NO: 86813 - DNA, 82 bp, Homo sapiens
agatggcacagggccctccaactgctcacatccagtgcccatcagttgggaaagacaggagctgctaggagcagcggaagcc

SEQ ID NO: 86814 - DNA, 82 bp, Homo sapiens
ccctccaactgctcacatccagtgcccatcagttgggaaagacaggagctgctaggagcagcggaagccgcctgggacatga

SEQ ID NO: 86815 - DNA, 84 bp, Homo sapiens
aactgctcacatccagtgcccatcagttgggaaagacaggagctgctaggagcagcggaagccgcctgggacatgagagatggc

SEQ ID NO: 86816 - DNA, 83 bp, Homo sapiens
agtgcccatcagttgggaaagacaggagctgctaggagcagcggaagccgcctgggacatgagagatggctggcctttcagca

SEQ ID NO: 86817 - DNA, 83 bp, Homo sapiens
atcagttgggaaagacaggagctgctaggagcagcggaagccgcctgggacatgagagatggctggcctttcagcacctgctc

SEQ ID NO: 86818 - DNA, 86 bp, Homo sapiens
ctgctaggagcagcggaagccgcctgggacatgagagatggctggcctttcagcacctgctccatgtgtgccctgagccatgggtc

SEQ ID NO: 86819 - DNA, 85 bp, Homo sapiens
agcggaagccgcctgggacatgagagatggctggcctttcagcacctgctccatgtgtgccctgagccatgggtctgcttggcca

SEQ ID NO: 86820 - DNA, 85 bp, Homo sapiens
cctgggacatgagagatggctggcctttcagcacctgctccatgtgtgccctgagccatgggtctgcttggccagcttagaccac

SEQ ID NO: 86821 - DNA, 88 bp, Homo sapiens
atgagagatggctggcctttcagcacctgctccatgtgtgccctgagccatgggtctgcttggccagcttagaccacgcagctgtata

SEQ ID NO: 86822 - DNA, 91 bp, Homo sapiens
agcacctgctccatgtgtgccctgagccatgggtctgcttggccagcttagaccacgcagctgtatacatatgacatgcatagtgcccaga

SEQ ID NO: 86823 - DNA, 89 bp, Homo sapiens
ctccatgtgtgccctgagccatgggtctgcttggccagcttagaccacgcagctgtatacatatgacatgcatagtgcccagagtggga

SEQ ID NO: 86824 - DNA, 86 bp, Homo sapiens
cctgagccatgggtctgcttggccagcttagaccacgcagctgtatacatatgacatgcatagtgcccagagtgggaggcaccgag

SEQ ID NO: 86825 - DNA, 85 bp, Homo sapiens
ggtctgcttggccagcttagaccacgcagctgtatacatatgacatgcatagtgcccagagtgggaggcaccgagtgcctcactt

SEQ ID NO: 86826 - DNA, 85 bp, Homo sapiens
ttggccagcttagaccacgcagctgtatacatatgacatgcatagtgcccagagtgggaggcaccgagtgcctcactttggtcta

SEQ ID NO: 86827 - DNA, 83 bp, Homo sapiens
cttagaccacgcagctgtatacatatgacatgcatagtgcccagagtgggaggcaccgagtgcctcactttggtctaccagga

SEQ ID NO: 86828 - DNA, 79 bp, Homo sapiens
tgtatacatatgacatgcatagtgcccagagtgggaggcaccgagtgcctcactttggtctaccaggagcccccttctt

SEQ ID NO: 86829 - DNA, 78 bp, Homo sapiens
atatgacatgcatagtgcccagagtgggaggcaccgagtgcctcactttggtctaccaggagcccccttctttgccaa

SEQ ID NO: 86830 - DNA, 75 bp, Homo sapiens
tagtgcccagagtgggaggcaccgagtgcctcactttggtctaccaggagcccccttctttgccaagtctctcca

SEQ ID NO: 86831 - DNA, 71 bp, Homo sapiens
agtgggaggcaccgagtgcctcactttggtctaccaggagcccccttctttgccaagtctctccaaggatt

SEQ ID NO: 86832 - DNA, 71 bp, Homo sapiens
accgagtgcctcactttggtctaccaggagcccccttctttgccaagtctctccaaggattttgccaagac

SEQ ID NO: 86833 - DNA, 71 bp, Homo sapiens
tcactttggtctaccaggagcccccttctttgccaagtctctccaaggattttgccaagactccccaagga

SEQ ID NO: 86834 - DNA, 72 bp, Homo sapiens
taccaggagcccccttctttgccaagtctctccaaggattttgccaagactccccaaggattctgctgttta

SEQ ID NO: 86835 - DNA, 70 bp, Homo sapiens
ggagcccccttctttgccaagtctctccaaggattttgccaagactccccaaggattctgctgtttaggg

SEQ ID NO: 86836 - DNA, 73 bp, Homo sapiens
tctttgccaagtctctccaaggattttgccaagactccccaaggattctgctgtttaggggagaacagaggga

SEQ ID NO: 86837 - DNA, 73 bp, Homo sapiens
attttgccaagactccccaaggattctgctgtttaggggagaacagagggatggtgcccctgcacgctaacac

SEQ ID NO: 86838 - DNA, 74 bp, Homo sapiens
aaggattctgctgtttaggggagaacagagggatggtgcccctgcacgctaacaccacccaggccgtgatgccc

SEQ ID NO: 86839 - DNA, 74 bp, Homo sapiens
ctgtttaggggagaacagagggatggtgcccctgcacgctaacaccacccaggccgtgatgccccagaaactgc

SEQ ID NO: 86840 - DNA, 76 bp, Homo sapiens
aacagagggatggtgcccctgcacgctaacaccacccaggccgtgatgccccagaaactgccccatgcttctcaaa

SEQ ID NO: 86841 - DNA, 73 bp, Homo sapiens
acgctaacaccacccaggccgtgatgccccagaaactgccccatgcttctcaaacacgccacccctcaacaaa

SEQ ID NO: 86842 - DNA, 75 bp, Homo sapiens
aggccgtgatgccccagaaactgccccatgcttctcaaacacgccacccctcaacaaatacatgggcccactcca

SEQ ID NO: 86843 - DNA, 77 bp, Homo sapiens
agaaactgccccatgcttctcaaacacgccacccctcaacaaatacatgggcccactccacagcgagcacgattcac

SEQ ID NO: 86844 - DNA, 79 bp, Homo sapiens
ccatgcttctcaaacacgccacccctcaacaaatacatgggcccactccacagcgagcacgattcacggcgcaagccac

SEQ ID NO: 86845 - DNA, 79 bp, Homo sapiens
acccctcaacaaatacatgggcccactccacagcgagcacgattcacggcgcaagccaccactgtccatggtgcaacac

SEQ ID NO: 86846 - DNA, 81 bp, Homo sapiens
aacaaatacatgggcccactccacagcgagcacgattcacggcgcaagccaccactgtccatggtgcaacacgtccatggc

SEQ ID NO: 86847 - DNA, 81 bp, Homo sapiens
tccacagcgagcacgattcacggcgcaagccaccactgtccatggtgcaacacgtccatggcccactcccttgtcctgttc

SEQ ID NO: 86848 - DNA, 77 bp, Homo sapiens
acgattcacggcgcaagccaccactgtccatggtgcaacacgtccatggcccactcccttgtcctgttccaagacca

SEQ ID NO: 86849 - DNA, 78 bp, Homo sapiens
cgcaagccaccactgtccatggtgcaacacgtccatggcccactcccttgtcctgttccaagaccaggaaacagctgc

SEQ ID NO: 86850 - DNA, 79 bp, Homo sapiens
actgtccatggtgcaacacgtccatggcccactcccttgtcctgttccaagaccaggaaacagctgctgcagtcacaag

SEQ ID NO: 86851 - DNA, 78 bp, Homo sapiens
atggtgcaacacgtccatggcccactcccttgtcctgttccaagaccaggaaacagctgctgcagtcacaagggccac

SEQ ID NO: 86852 - DNA, 77 bp, Homo sapiens
cccactcccttgtcctgttccaagaccaggaaacagctgctgcagtcacaagggccactgtgctactgcgacaaggg

SEQ ID NO: 86853 - DNA, 79 bp, Homo sapiens
ttgtcctgttccaagaccaggaaacagctgctgcagtcacaagggccactgtgctactgcgacaaggggggctcgtcta

SEQ ID NO: 86854 - DNA, 81 bp, Homo sapiens
aagaccaggaaacagctgctgcagtcacaagggccactgtgctactgcgacaaggggggctcgtctagagcagctcaggaa

SEQ ID NO: 86855 - DNA, 81 bp, Homo sapiens
aaacagctgctgcagtcacaagggccactgtgctactgcgacaaggggggctcgtctagagcagctcaggaagggctagcc

SEQ ID NO: 86856 - DNA, 76 bp, Homo sapiens
agtcacaagggccactgtgctactgcgacaaggggggctcgtctagagcagctcaggaagggctagccctgtaccc

SEQ ID NO: 86857 - DNA, 74 bp, Homo sapiens
aagggccactgtgctactgcgacaaggggggctcgtctagagcagctcaggaagggctagccctgtaccccaaa

SEQ ID NO: 86858 - DNA, 76 bp, Homo sapiens
tgtgctactgcgacaaggggggctcgtctagagcagctcaggaagggctagccctgtaccccaaaacacgactcaa

SEQ ID NO: 86859 - DNA, 72 bp, Homo sapiens
cgacaaggggggctcgtctagagcagctcaggaagggctagccctgtaccccaaaacacgactcaaccacca

SEQ ID NO: 86860 - DNA, 80 bp, Homo sapiens
gtctagagcagctcaggaagggctagccctgtaccccaaaacacgactcaaccaccagcctgtgctgctactgcagagaa

SEQ ID NO: 86861 - DNA, 74 bp, Homo sapiens
aagggctagccctgtaccccaaaacacgactcaaccaccagcctgtgctgctactgcagagaacaggggacctc

SEQ ID NO: 86862 - DNA, 76 bp, Homo sapiens
tgtaccccaaaacacgactcaaccaccagcctgtgctgctactgcagagaacaggggacctcggcctggctgggac

SEQ ID NO: 86863 - DNA, 74 bp, Homo sapiens
aaaacacgactcaaccaccagcctgtgctgctactgcagagaacaggggacctcggcctggctgggaccttggg

SEQ ID NO: 86864 - DNA, 80 bp, Homo sapiens
aaccaccagcctgtgctgctactgcagagaacaggggacctcggcctggctgggaccttggggaagcagcatctgaatga

SEQ ID NO: 86865 - DNA, 81 bp, Homo sapiens
tgtgctgctactgcagagaacaggggacctcggcctggctgggaccttggggaagcagcatctgaatgacctttgctacaa

SEQ ID NO: 86866 - DNA, 76 bp, Homo sapiens
tactgcagagaacaggggacctcggcctggctgggaccttggggaagcagcatctgaatgacctttgctacaaatt

SEQ ID NO: 86867 - DNA, 72 bp, Homo sapiens
aacaggggacctcggcctggctgggaccttggggaagcagcatctgaatgacctttgctacaaatttggtta

SEQ ID NO: 86868 - DNA, 73 bp, Homo sapiens
acctcggcctggctgggaccttggggaagcagcatctgaatgacctttgctacaaatttggttaaacaggcca

SEQ ID NO: 86869 - DNA, 74 bp, Homo sapiens
tggctgggaccttggggaagcagcatctgaatgacctttgctacaaatttggttaaacaggccaggtggttcac

SEQ ID NO: 86870 - DNA, 67 bp, Homo sapiens
aacagcaacaaaaaagaatttggttaaacacagacatgaaaaagagacctatagggaccaattaagg

SEQ ID NO: 86871 - DNA, 67 bp, Homo sapiens
aaaaagaatttggttaaacacagacatgaaaaagagacctatagggaccaattaaggtgtgaaaaga

SEQ ID NO: 86872 - DNA, 68 bp, Homo sapiens
aatttggttaaacacagacatgaaaaagagacctatagggaccaattaaggtgtgaaaagacaccgga

SEQ ID NO: 86873 - DNA, 73 bp, Homo sapiens
ttaaacacagacatgaaaaagagacctatagggaccaattaaggtgtgaaaagacaccggatgccattactca

SEQ ID NO: 86874 - DNA, 74 bp, Homo sapiens
cagacatgaaaaagagacctatagggaccaattaaggtgtgaaaagacaccggatgccattactcatcaaggaa

SEQ ID NO: 86875 - DNA, 72 bp, Homo sapiens
acatgaaaaagagacctatagggaccaattaaggtgtgaaaagacaccggatgccattactcatcaaggaaa

SEQ ID NO: 86876 - DNA, 74 bp, Homo sapiens
atgaaaaagagacctatagggaccaattaaggtgtgaaaagacaccggatgccattactcatcaaggaaatgca

SEQ ID NO: 86877 - DNA, 74 bp, Homo sapiens
ctatagggaccaattaaggtgtgaaaagacaccggatgccattactcatcaaggaaatgcaaactgtaaccata

SEQ ID NO: 86878 - DNA, 73 bp, Homo sapiens
atagggaccaattaaggtgtgaaaagacaccggatgccattactcatcaaggaaatgcaaactgtaaccatag

SEQ ID NO: 86879 - DNA, 74 bp, Homo sapiens
aattaaggtgtgaaaagacaccggatgccattactcatcaaggaaatgcaaactgtaaccatagtgacctagat

SEQ ID NO: 86880 - DNA, 77 bp, Homo sapiens
ttaaggtgtgaaaagacaccggatgccattactcatcaaggaaatgcaaactgtaaccatagtgacctagattgata

SEQ ID NO: 86881 - DNA, 77 bp, Homo sapiens
aagacaccggatgccattactcatcaaggaaatgcaaactgtaaccatagtgacctagattgatagccataaaaata

SEQ ID NO: 86882 - DNA, 76 bp, Homo sapiens
cggatgccattactcatcaaggaaatgcaaactgtaaccatagtgacctagattgatagccataaaaatattttaa

SEQ ID NO: 86883 - DNA, 78 bp, Homo sapiens
ataaaaaaaaacataaccacactgagatagctctgtacccatcagagcagctaatctaaaagaagctgacaagagcaa

SEQ ID NO: 86884 - DNA, 80 bp, Homo sapiens
aaaaacataaccacactgagatagctctgtacccatcagagcagctaatctaaaagaagctgacaagagcaagtgttggc

SEQ ID NO: 86885 - DNA, 81 bp, Homo sapiens
acactgagatagctctgtacccatcagagcagctaatctaaaagaagctgacaagagcaagtgttggcgaggacccagaac

SEQ ID NO: 86886 - DNA, 80 bp, Homo sapiens
atagctctgtacccatcagagcagctaatctaaaagaagctgacaagagcaagtgttggcgaggacccagaacctctgcc

SEQ ID NO: 86887 - DNA, 77 bp, Homo sapiens
acccatcagagcagctaatctaaaagaagctgacaagagcaagtgttggcgaggacccagaacctctgccgtcgtgg

SEQ ID NO: 86888 - DNA, 75 bp, Homo sapiens
taatctaaaagaagctgacaagagcaagtgttggcgaggacccagaacctctgccgtcgtgggcgggagtggaca

SEQ ID NO: 86889 - DNA, 74 bp, Homo sapiens
taaaagaagctgacaagagcaagtgttggcgaggacccagaacctctgccgtcgtgggcgggagtggacaaggc

SEQ ID NO: 86890 - DNA, 76 bp, Homo sapiens
aagctgacaagagcaagtgttggcgaggacccagaacctctgccgtcgtgggcgggagtggacaaggctcagccac

SEQ ID NO: 86891 - DNA, 78 bp, Homo sapiens
tgacaagagcaagtgttggcgaggacccagaacctctgccgtcgtgggcgggagtggacaaggctcagccactgtgga

SEQ ID NO: 86892 - DNA, 74 bp, Homo sapiens
aagtgttggcgaggacccagaacctctgccgtcgtgggcgggagtggacaaggctcagccactgtggaagccac

SEQ ID NO: 86893 - DNA, 74 bp, Homo sapiens
gaggacccagaacctctgccgtcgtgggcgggagtggacaaggctcagccactgtggaagccacctggcagttt

SEQ ID NO: 86894 - DNA, 73 bp, Homo sapiens
agaacctctgccgtcgtgggcgggagtggacaaggctcagccactgtggaagccacctggcagttttctaaaa

SEQ ID NO: 86895 - DNA, 73 bp, Homo sapiens
tctgccgtcgtgggcgggagtggacaaggctcagccactgtggaagccacctggcagttttctaaaaggttaa

SEQ ID NO: 86896 - DNA, 71 bp, Homo sapiens
gtcgtgggcgggagtggacaaggctcagccactgtggaagccacctggcagttttctaaaaggttaaacaa

SEQ ID NO: 86897 - DNA, 71 bp, Homo sapiens
tcgtgggcgggagtggacaaggctcagccactgtggaagccacctggcagttttctaaaaggttaaacaaa

SEQ ID NO: 86898 - DNA, 67 bp, Homo sapiens
actgtggaagccacctggcagttttctaaaaggttaaacaaagggttaaacacacccagcaattcca

SEQ ID NO: 86899 - DNA, 65 bp, Homo sapiens
ggaagccacctggcagttttctaaaaggttaaacaaagggttaaacacacccagcaattccaccc

SEQ ID NO: 86900 - DNA, 63 bp, Homo sapiens
taaaaggttaaacaaagggttaaacacacccagcaattccaccccgggtatacacccacaaaa

SEQ ID NO: 86901 - DNA, 64 bp, Homo sapiens
aaacaaagggttaaacacacccagcaattccaccccgggtatacacccacaaaaacacacttcc

SEQ ID NO: 86902 - DNA, 66 bp, Homo sapiens
taaacacacccagcaattccaccccgggtatacacccacaaaaacacacttccgtacaaaaactta

SEQ ID NO: 86903 - DNA, 68 bp, Homo sapiens
cgggtatacacccacaaaaacacacttccgtacaaaaacttacacctgaacatttatagcagaattat

SEQ ID NO: 86904 - DNA, 70 bp, Homo sapiens
cccacaaaaacacacttccgtacaaaaacttacacctgaacatttatagcagaattatttagagaatcca

SEQ ID NO: 86905 - DNA, 71 bp, Homo sapiens
acacacttccgtacaaaaacttacacctgaacatttatagcagaattatttagagaatccaaaaagcggca

SEQ ID NO: 86906 - DNA, 71 bp, Homo sapiens
aaacttacacctgaacatttatagcagaattatttagagaatccaaaaagcggcagtagcccaaatgtccg

SEQ ID NO: 86907 - DNA, 74 bp, Homo sapiens
aacatttatagcagaattatttagagaatccaaaaagcggcagtagcccaaatgtccgtcaactggtggagaga

SEQ ID NO: 86908 - DNA, 73 bp, Homo sapiens
agaattatttagagaatccaaaaagcggcagtagcccaaatgtccgtcaactggtggagagagaatcaaacaa

SEQ ID NO: 86909 - DNA, 75 bp, Homo sapiens
tatttagagaatccaaaaagcggcagtagcccaaatgtccgtcaactggtggagagagaatcaaacaatggaata

SEQ ID NO: 86910 - DNA, 75 bp, Homo sapiens
atccaaaaagcggcagtagcccaaatgtccgtcaactggtggagagagaatcaaacaatggaatacagaggacca

SEQ ID NO: 86911 - DNA, 82 bp, Homo sapiens
agagaatcaaacaatggaatacagaggaccatgccaagtgaaagaaggctgcacgtcatgccacaggctgtatgactccatt

SEQ ID NO: 86912 - DNA, 81 bp, Homo sapiens
aaacaatggaatacagaggaccatgccaagtgaaagaaggctgcacgtcatgccacaggctgtatgactccatttctataa

SEQ ID NO: 86913 - DNA, 80 bp, Homo sapiens
aatacagaggaccatgccaagtgaaagaaggctgcacgtcatgccacaggctgtatgactccatttctataaatccccag

SEQ ID NO: 86914 - DNA, 78 bp, Homo sapiens
atgccaagtgaaagaaggctgcacgtcatgccacaggctgtatgactccatttctataaatccccaggtaaggcaaaa

SEQ ID NO: 86915 - DNA, 75 bp, Homo sapiens
aaagaaggctgcacgtcatgccacaggctgtatgactccatttctataaatccccaggtaaggcaaaaccaaaga

SEQ ID NO: 86916 - DNA, 74 bp, Homo sapiens
atgccacaggctgtatgactccatttctataaatccccaggtaaggcaaaaccaaagagacagaaagccgacca

SEQ ID NO: 86917 - DNA, 71 bp, Homo sapiens
atttctataaatccccaggtaaggcaaaaccaaagagacagaaagccgaccagcaggtgtccagggctgga

SEQ ID NO: 86918 - DNA, 71 bp, Homo sapiens
taaatccccaggtaaggcaaaaccaaagagacagaaagccgaccagcaggtgtccagggctggaggtggga

SEQ ID NO: 86919 - DNA, 71 bp, Homo sapiens
ggtaaggcaaaaccaaagagacagaaagccgaccagcaggtgtccagggctggaggtgggagtggggagtg

SEQ ID NO: 86920 - DNA, 74 bp, Homo sapiens
aaccaaagagacagaaagccgaccagcaggtgtccagggctggaggtgggagtggggagtggctgcagccgggc

SEQ ID NO: 86921 - DNA, 74 bp, Homo sapiens
acagaaagccgaccagcaggtgtccagggctggaggtgggagtggggagtggctgcagccgggcgagggtagag

SEQ ID NO: 86922 - DNA, 74 bp, Homo sapiens
gcaggtgtccagggctggaggtgggagtggggagtggctgcagccgggcgagggtagagggtcaaaactcacaa

SEQ ID NO: 86923 - DNA, 72 bp, Homo sapiens
agggctggaggtgggagtggggagtggctgcagccgggcgagggtagagggtcaaaactcacaagatgggac

SEQ ID NO: 86924 - DNA, 71 bp, Homo sapiens
gtgggagtggggagtggctgcagccgggcgagggtagagggtcaaaactcacaagatgggacgttttacag

SEQ ID NO: 86925 - DNA, 74 bp, Homo sapiens
ggagtggctgcagccgggcgagggtagagggtcaaaactcacaagatgggacgttttacaggatgttcgctaca

SEQ ID NO: 86926 - DNA, 70 bp, Homo sapiens
cagccgggcgagggtagagggtcaaaactcacaagatgggacgttttacaggatgttcgctacaccttcc

SEQ ID NO: 86927 - DNA, 69 bp, Homo sapiens
agggtagagggtcaaaactcacaagatgggacgttttacaggatgttcgctacaccttcccaactgccc

SEQ ID NO: 86928 - DNA, 73 bp, Homo sapiens
agagggtcaaaactcacaagatgggacgttttacaggatgttcgctacaccttcccaactgcccttgagctca

SEQ ID NO: 86929 - DNA, 71 bp, Homo sapiens
acaagatgggacgttttacaggatgttcgctacaccttcccaactgcccttgagctcacaggggccgtctt

SEQ ID NO: 86930 - DNA, 72 bp, Homo sapiens
atgggacgttttacaggatgttcgctacaccttcccaactgcccttgagctcacaggggccgtctttgttga

SEQ ID NO: 86931 - DNA, 76 bp, Homo sapiens
ttacaggatgttcgctacaccttcccaactgcccttgagctcacaggggccgtctttgttgactcagggcacagga

SEQ ID NO: 86932 - DNA, 79 bp, Homo sapiens
tacaccttcccaactgcccttgagctcacaggggccgtctttgttgactcagggcacaggagcaacattctctgacaca

SEQ ID NO: 86933 - DNA, 79 bp, Homo sapiens
ttcccaactgcccttgagctcacaggggccgtctttgttgactcagggcacaggagcaacattctctgacacacacacg

SEQ ID NO: 86934 - DNA, 81 bp, Homo sapiens
ttgagctcacaggggccgtctttgttgactcagggcacaggagcaacattctctgacacacacacggcgagttctggaaca

SEQ ID NO: 86935 - DNA, 77 bp, Homo sapiens
acaggggccgtctttgttgactcagggcacaggagcaacattctctgacacacacacggcgagttctggaacagacg

SEQ ID NO: 86936 - DNA, 80 bp, Homo sapiens
tttgttgactcagggcacaggagcaacattctctgacacacacacggcgagttctggaacagacggaggagagtcctgtc

SEQ ID NO: 86937 - DNA, 75 bp, Homo sapiens
agcaacattctctgacacacacacggcgagttctggaacagacggaggagagtcctgtccgttaaccattttcaa

SEQ ID NO: 86938 - DNA, 77 bp, Homo sapiens
tctgacacacacacggcgagttctggaacagacggaggagagtcctgtccgttaaccattttcaatgcacgagtgaa

SEQ ID NO: 86939 - DNA, 72 bp, Homo sapiens
ttctggaacagacggaggagagtcctgtccgttaaccattttcaatgcacgagtgaaagggaactggcgtaa

SEQ ID NO: 86940 - DNA, 72 bp, Homo sapiens
aggagagtcctgtccgttaaccattttcaatgcacgagtgaaagggaactggcgtaagacacaagaaccaca

SEQ ID NO: 86941 - DNA, 71 bp, Homo sapiens
cgttaaccattttcaatgcacgagtgaaagggaactggcgtaagacacaagaaccacacggagcaaaggaa

SEQ ID NO: 86942 - DNA, 74 bp, Homo sapiens
attttcaatgcacgagtgaaagggaactggcgtaagacacaagaaccacacggagcaaaggaagcaccaaggca

SEQ ID NO: 86943 - DNA, 72 bp, Homo sapiens
aaagggaactggcgtaagacacaagaaccacacggagcaaaggaagcaccaaggcagaatggcccagcccac

SEQ ID NO: 86944 - DNA, 72 bp, Homo sapiens
aagaaccacacggagcaaaggaagcaccaaggcagaatggcccagcccaccccactcagggagcccccacaa

SEQ ID NO: 86945 - DNA, 75 bp, Homo sapiens
agcaaaggaagcaccaaggcagaatggcccagcccaccccactcagggagcccccacaaactcatggcaccagtc

SEQ ID NO: 86946 - DNA, 76 bp, Homo sapiens
aggaagcaccaaggcagaatggcccagcccaccccactcagggagcccccacaaactcatggcaccagtcctcatg

SEQ ID NO: 86947 - DNA, 74 bp, Homo sapiens
aaggcagaatggcccagcccaccccactcagggagcccccacaaactcatggcaccagtcctcatgggccccag

SEQ ID NO: 86948 - DNA, 74 bp, Homo sapiens
agcccaccccactcagggagcccccacaaactcatggcaccagtcctcatgggccccaggagcacacgaccaag

SEQ ID NO: 86949 - DNA, 72 bp, Homo sapiens
cccccacaaactcatggcaccagtcctcatgggccccaggagcacacgaccaaggccaggtgggaagggtat

SEQ ID NO: 86950 - DNA, 74 bp, Homo sapiens
acaaactcatggcaccagtcctcatgggccccaggagcacacgaccaaggccaggtgggaagggtattctggag

SEQ ID NO: 86951 - DNA, 74 bp, Homo sapiens
accagtcctcatgggccccaggagcacacgaccaaggccaggtgggaagggtattctggaggagggagcagcag

SEQ ID NO: 86952 - DNA, 75 bp, Homo sapiens
tcatgggccccaggagcacacgaccaaggccaggtgggaagggtattctggaggagggagcagcaggggactgga

SEQ ID NO: 86953 - DNA, 75 bp, Homo sapiens
aggagcacacgaccaaggccaggtgggaagggtattctggaggagggagcagcaggggactggagcaggaactca

SEQ ID NO: 86954 - DNA, 80 bp, Homo sapiens
accaaggccaggtgggaagggtattctggaggagggagcagcaggggactggagcaggaactcagtgcagcagctgcaga

SEQ ID NO: 86955 - DNA, 83 bp, Homo sapiens
ggtattctggaggagggagcagcaggggactggagcaggaactcagtgcagcagctgcagagagcaggtgggccccgtctctc

SEQ ID NO: 86956 - DNA, 82 bp, Homo sapiens
agggagcagcaggggactggagcaggaactcagtgcagcagctgcagagagcaggtgggccccgtctctcgcggtgcaaacc

SEQ ID NO: 86957 - DNA, 82 bp, Homo sapiens
aggggactggagcaggaactcagtgcagcagctgcagagagcaggtgggccccgtctctcgcggtgcaaacctctgcagagg

SEQ ID NO: 86958 - DNA, 82 bp, Homo sapiens
actggagcaggaactcagtgcagcagctgcagagagcaggtgggccccgtctctcgcggtgcaaacctctgcagaggggtcg

SEQ ID NO: 86959 - DNA, 78 bp, Homo sapiens
aactcagtgcagcagctgcagagagcaggtgggccccgtctctcgcggtgcaaacctctgcagaggggtcggcccggg

SEQ ID NO: 86960 - DNA, 75 bp, Homo sapiens
agctgcagagagcaggtgggccccgtctctcgcggtgcaaacctctgcagaggggtcggcccggggctaacacaa

SEQ ID NO: 86961 - DNA, 79 bp, Homo sapiens
aaacctctgcagaggggtcggcccggggctaacacaagcaccctgtctactgtccatgcgaggcctctgcatgtgcagc

SEQ ID NO: 86962 - DNA, 80 bp, Homo sapiens
agaggggtcggcccggggctaacacaagcaccctgtctactgtccatgcgaggcctctgcatgtgcagctgtgagccagg

SEQ ID NO: 86963 - DNA, 84 bp, Homo sapiens
cggggctaacacaagcaccctgtctactgtccatgcgaggcctctgcatgtgcagctgtgagccagggatgagggctcagaaaa

SEQ ID NO: 86964 - DNA, 88 bp, Homo sapiens
ctaacacaagcaccctgtctactgtccatgcgaggcctctgcatgtgcagctgtgagccagggatgagggctcagaaaacagtgatga

SEQ ID NO: 86965 - DNA, 90 bp, Homo sapiens
tgtccatgcgaggcctctgcatgtgcagctgtgagccagggatgagggctcagaaaacagtgatgatgctgaggccagttagggtgacaa

SEQ ID NO: 86966 - DNA, 86 bp, Homo sapiens
cctctgcatgtgcagctgtgagccagggatgagggctcagaaaacagtgatgatgctgaggccagttagggtgacaagggacagga

SEQ ID NO: 86967 - DNA, 76 bp, Homo sapiens
agccagggatgagggctcagaaaacagtgatgatgctgaggccagttagggtgacaagggacaggaaccagttagg

SEQ ID NO: 86968 - DNA, 74 bp, Homo sapiens
ctcagaaaacagtgatgatgctgaggccagttagggtgacaagggacaggaaccagttagggtgcacaaccccc

SEQ ID NO: 86969 - DNA, 71 bp, Homo sapiens
atgatgctgaggccagttagggtgacaagggacaggaaccagttagggtgcacaacccccccaaggaactg

SEQ ID NO: 86970 - DNA, 68 bp, Homo sapiens
aggccagttagggtgacaagggacaggaaccagttagggtgcacaacccccccaaggaactgtgccag

SEQ ID NO: 86971 - DNA, 69 bp, Homo sapiens
ttagggtgacaagggacaggaaccagttagggtgcacaacccccccaaggaactgtgccagggcagccc

SEQ ID NO: 86972 - DNA, 71 bp, Homo sapiens
aagggacaggaaccagttagggtgcacaacccccccaaggaactgtgccagggcagccccagctgtgcaag

SEQ ID NO: 86973 - DNA, 74 bp, Homo sapiens
aaccagttagggtgcacaacccccccaaggaactgtgccagggcagccccagctgtgcaaggctgagggtgaca

SEQ ID NO: 86974 - DNA, 76 bp, Homo sapiens
aactgtgccagggcagccccagctgtgcaaggctgagggtgacaggccttgaacacactggccctcccacccaccc

SEQ ID NO: 86975 - DNA, 77 bp, Homo sapiens
agccccagctgtgcaaggctgagggtgacaggccttgaacacactggccctcccacccaccccgtggctccatgctc

SEQ ID NO: 86976 - DNA, 77 bp, Homo sapiens
agctgtgcaaggctgagggtgacaggccttgaacacactggccctcccacccaccccgtggctccatgctccctgtg

SEQ ID NO: 86977 - DNA, 76 bp, Homo sapiens
tgagggtgacaggccttgaacacactggccctcccacccaccccgtggctccatgctccctgtgggccacgccatc

SEQ ID NO: 86978 - DNA, 76 bp, Homo sapiens
gccttgaacacactggccctcccacccaccccgtggctccatgctccctgtgggccacgccatccagtgaggcatt

SEQ ID NO: 86979 - DNA, 78 bp, Homo sapiens
atgctccctgtgggccacgccatccagtgaggcatttaaccaggttctggtagctgactgtcaggtgggtcaccttca

SEQ ID NO: 86980 - DNA, 76 bp, Homo sapiens
tgggccacgccatccagtgaggcatttaaccaggttctggtagctgactgtcaggtgggtcaccttcaagactcct

SEQ ID NO: 86981 - DNA, 74 bp, Homo sapiens
acgccatccagtgaggcatttaaccaggttctggtagctgactgtcaggtgggtcaccttcaagactcctttct

SEQ ID NO: 86982 - DNA, 74 bp, Homo sapiens
ggcatttaaccaggttctggtagctgactgtcaggtgggtcaccttcaagactcctttcttgccaagtcgctta

SEQ ID NO: 86983 - DNA, 73 bp, Homo sapiens
ttaaccaggttctggtagctgactgtcaggtgggtcaccttcaagactcctttcttgccaagtcgcttatccc

SEQ ID NO: 86984 - DNA, 71 bp, Homo sapiens
actgtcaggtgggtcaccttcaagactcctttcttgccaagtcgcttatcccccaagggtatggagaacaa

SEQ ID NO: 86985 - DNA, 75 bp, Homo sapiens
gtcaccttcaagactcctttcttgccaagtcgcttatcccccaagggtatggagaacaagacttcatgcctcaga

SEQ ID NO: 86986 - DNA, 73 bp, Homo sapiens
aagactcctttcttgccaagtcgcttatcccccaagggtatggagaacaagacttcatgcctcagaggagaag

SEQ ID NO: 86987 - DNA, 74 bp, Homo sapiens
tttcttgccaagtcgcttatcccccaagggtatggagaacaagacttcatgcctcagaggagaagggctgaggg

SEQ ID NO: 86988 - DNA, 76 bp, Homo sapiens
agtcgcttatcccccaagggtatggagaacaagacttcatgcctcagaggagaagggctgaggggccacagagcca

SEQ ID NO: 86989 - DNA, 80 bp, Homo sapiens
aagggtatggagaacaagacttcatgcctcagaggagaagggctgaggggccacagagccagcctttctctatgatgcca

SEQ ID NO: 86990 - DNA, 80 bp, Homo sapiens
agaacaagacttcatgcctcagaggagaagggctgaggggccacagagccagcctttctctatgatgccaggagggctaa

SEQ ID NO: 86991 - DNA, 80 bp, Homo sapiens
agacttcatgcctcagaggagaagggctgaggggccacagagccagcctttctctatgatgccaggagggctaacctcaa

SEQ ID NO: 86992 - DNA, 77 bp, Homo sapiens
agaggagaagggctgaggggccacagagccagcctttctctatgatgccaggagggctaacctcaagtgcctgtccc

SEQ ID NO: 86993 - DNA, 79 bp, Homo sapiens
agaagggctgaggggccacagagccagcctttctctatgatgccaggagggctaacctcaagtgcctgtccccatgaga

SEQ ID NO: 86994 - DNA, 82 bp, Homo sapiens
ccacagagccagcctttctctatgatgccaggagggctaacctcaagtgcctgtccccatgagaggtggccgtcatcatggc

SEQ ID NO: 86995 - DNA, 82 bp, Homo sapiens
ttctctatgatgccaggagggctaacctcaagtgcctgtccccatgagaggtggccgtcatcatggccaggctcccagccac

SEQ ID NO: 86996 - DNA, 81 bp, Homo sapiens
ctaacctcaagtgcctgtccccatgagaggtggccgtcatcatggccaggctcccagccactctggctcacactgtatccc

SEQ ID NO: 86997 - DNA, 82 bp, Homo sapiens
cccatgagaggtggccgtcatcatggccaggctcccagccactctggctcacactgtatccccaccctccagcaggagacca

SEQ ID NO: 86998 - DNA, 79 bp, Homo sapiens
cgtcatcatggccaggctcccagccactctggctcacactgtatccccaccctccagcaggagaccaggcccttgttaa

SEQ ID NO: 86999 - DNA, 77 bp, Homo sapiens
atggccaggctcccagccactctggctcacactgtatccccaccctccagcaggagaccaggcccttgttaacaaca

SEQ ID NO: 87000 - DNA, 78 bp, Homo sapiens
cagccactctggctcacactgtatccccaccctccagcaggagaccaggcccttgttaacaacagagcaattcactcc

SEQ ID NO: 87001 - DNA, 79 bp, Homo sapiens
tctggctcacactgtatccccaccctccagcaggagaccaggcccttgttaacaacagagcaattcactcctaacatca

SEQ ID NO: 87002 - DNA, 79 bp, Homo sapiens
accctccagcaggagaccaggcccttgttaacaacagagcaattcactcctaacatcacgcacgcatgagggtgacaga

SEQ ID NO: 87003 - DNA, 80 bp, Homo sapiens
ccttgttaacaacagagcaattcactcctaacatcacgcacgcatgagggtgacagacacaggacgcacccagccattaa

SEQ ID NO: 87004 - DNA, 82 bp, Homo sapiens
ttaacaacagagcaattcactcctaacatcacgcacgcatgagggtgacagacacaggacgcacccagccattaacagacac

SEQ ID NO: 87005 - DNA, 79 bp, Homo sapiens
aattcactcctaacatcacgcacgcatgagggtgacagacacaggacgcacccagccattaacagacacgggcactaag

SEQ ID NO: 87006 - DNA, 80 bp, Homo sapiens
tcctaacatcacgcacgcatgagggtgacagacacaggacgcacccagccattaacagacacgggcactaaggctaactc

SEQ ID NO: 87007 - DNA, 75 bp, Homo sapiens
acgcatgagggtgacagacacaggacgcacccagccattaacagacacgggcactaaggctaactcccgtctaaa

SEQ ID NO: 87008 - DNA, 74 bp, Homo sapiens
acccagccattaacagacacgggcactaaggctaactcccgtctaaatcatggccagccctgtgcggaccatcg

SEQ ID NO: 87009 - DNA, 74 bp, Homo sapiens
attaacagacacgggcactaaggctaactcccgtctaaatcatggccagccctgtgcggaccatcgggcaggga

SEQ ID NO: 87010 - DNA, 74 bp, Homo sapiens
cactaaggctaactcccgtctaaatcatggccagccctgtgcggaccatcgggcagggacccacctcataagaa

SEQ ID NO: 87011 - DNA, 75 bp, Homo sapiens
ctaactcccgtctaaatcatggccagccctgtgcggaccatcgggcagggacccacctcataagaacgccatgtg

SEQ ID NO: 87012 - DNA, 76 bp, Homo sapiens
ccagccctgtgcggaccatcgggcagggacccacctcataagaacgccatgtggtatctataagcagaaccctaca

SEQ ID NO: 87013 - DNA, 77 bp, Homo sapiens
tgcggaccatcgggcagggacccacctcataagaacgccatgtggtatctataagcagaaccctacagacacgtgaa

SEQ ID NO: 87014 - DNA, 78 bp, Homo sapiens
atcgggcagggacccacctcataagaacgccatgtggtatctataagcagaaccctacagacacgtgaagcagcagga

SEQ ID NO: 87015 - DNA, 76 bp, Homo sapiens
acccacctcataagaacgccatgtggtatctataagcagaaccctacagacacgtgaagcagcaggaaaacgagac

SEQ ID NO: 87016 - DNA, 77 bp, Homo sapiens
ataagaacgccatgtggtatctataagcagaaccctacagacacgtgaagcagcaggaaaacgagactcctaagcca

SEQ ID NO: 87017 - DNA, 74 bp, Homo sapiens
atgtggtatctataagcagaaccctacagacacgtgaagcagcaggaaaacgagactcctaagccagggggaaa

SEQ ID NO: 87018 - DNA, 74 bp, Homo sapiens
atctataagcagaaccctacagacacgtgaagcagcaggaaaacgagactcctaagccagggggaaaatgagtc

SEQ ID NO: 87019 - DNA, 72 bp, Homo sapiens
aaccctacagacacgtgaagcagcaggaaaacgagactcctaagccagggggaaaatgagtcggcacaaaga

SEQ ID NO: 87020 - DNA, 72 bp, Homo sapiens
agacacgtgaagcagcaggaaaacgagactcctaagccagggggaaaatgagtcggcacaaagacgtgggaa

SEQ ID NO: 87021 - DNA, 74 bp, Homo sapiens
aaacgagactcctaagccagggggaaaatgagtcggcacaaagacgtgggaagcacagagatgccgactgaaca

SEQ ID NO: 87022 - DNA, 78 bp, Homo sapiens
aaaatgagtcggcacaaagacgtgggaagcacagagatgccgactgaacagacaggggctttgggacagctactgtga

SEQ ID NO: 87023 - DNA, 76 bp, Homo sapiens
acagagatgccgactgaacagacaggggctttgggacagctactgtgaacttggaatgctccaagcctaaaggaaa

SEQ ID NO: 87024 - DNA, 75 bp, Homo sapiens
atgccgactgaacagacaggggctttgggacagctactgtgaacttggaatgctccaagcctaaaggaaaacagc

SEQ ID NO: 87025 - DNA, 74 bp, Homo sapiens
aacagacaggggctttgggacagctactgtgaacttggaatgctccaagcctaaaggaaaacagctgaagagga

SEQ ID NO: 87026 - DNA, 73 bp, Homo sapiens
ttgggacagctactgtgaacttggaatgctccaagcctaaaggaaaacagctgaagaggaagacgtacgggta

SEQ ID NO: 87027 - DNA, 74 bp, Homo sapiens
ctactgtgaacttggaatgctccaagcctaaaggaaaacagctgaagaggaagacgtacgggtatcgtgagaga

SEQ ID NO: 87028 - DNA, 73 bp, Homo sapiens
aacttggaatgctccaagcctaaaggaaaacagctgaagaggaagacgtacgggtatcgtgagagagccacga

SEQ ID NO: 87029 - DNA, 75 bp, Homo sapiens
ctaaaggaaaacagctgaagaggaagacgtacgggtatcgtgagagagccacgaggggcttctggagctgagaca

SEQ ID NO: 87030 - DNA, 77 bp, Homo sapiens
tgaagaggaagacgtacgggtatcgtgagagagccacgaggggcttctggagctgagacacggaggatcggaatgaa

SEQ ID NO: 87031 - DNA, 74 bp, Homo sapiens
aggaagacgtacgggtatcgtgagagagccacgaggggcttctggagctgagacacggaggatcggaatgaaac

SEQ ID NO: 87032 - DNA, 78 bp, Homo sapiens
tatcgtgagagagccacgaggggcttctggagctgagacacggaggatcggaatgaaacggccactaggtggaagtca

SEQ ID NO: 87033 - DNA, 77 bp, Homo sapiens
agagagccacgaggggcttctggagctgagacacggaggatcggaatgaaacggccactaggtggaagtcacagcag

SEQ ID NO: 87034 - DNA, 78 bp, Homo sapiens
gggcttctggagctgagacacggaggatcggaatgaaacggccactaggtggaagtcacagcaggcaccacagaagaa

SEQ ID NO: 87035 - DNA, 77 bp, Homo sapiens
tctggagctgagacacggaggatcggaatgaaacggccactaggtggaagtcacagcaggcaccacagaagaaaagg

SEQ ID NO: 87036 - DNA, 73 bp, Homo sapiens
acggaggatcggaatgaaacggccactaggtggaagtcacagcaggcaccacagaagaaaagggcagcgaact

SEQ ID NO: 87037 - DNA, 75 bp, Homo sapiens
atcggaatgaaacggccactaggtggaagtcacagcaggcaccacagaagaaaagggcagcgaacttgaagacaa

SEQ ID NO: 87038 - DNA, 74 bp, Homo sapiens
aaacggccactaggtggaagtcacagcaggcaccacagaagaaaagggcagcgaacttgaagacaaagccacag

SEQ ID NO: 87039 - DNA, 77 bp, Homo sapiens
agcaggcaccacagaagaaaagggcagcgaacttgaagacaaagccacaggagccacctagatgaatcccacagtaa

SEQ ID NO: 87040 - DNA, 74 bp, Homo sapiens
aaaagggcagcgaacttgaagacaaagccacaggagccacctagatgaatcccacagtaagaagcctacaggaa

SEQ ID NO: 87041 - DNA, 73 bp, Homo sapiens
aacttgaagacaaagccacaggagccacctagatgaatcccacagtaagaagcctacaggaaacgaacaccac

SEQ ID NO: 87042 - DNA, 72 bp, Homo sapiens
aaagccacaggagccacctagatgaatcccacagtaagaagcctacaggaaacgaacaccacctcggtgacc

SEQ ID NO: 87043 - DNA, 73 bp, Homo sapiens
cctagatgaatcccacagtaagaagcctacaggaaacgaacaccacctcggtgacctgcggacgacagcaggg

SEQ ID NO: 87044 - DNA, 73 bp, Homo sapiens
acagtaagaagcctacaggaaacgaacaccacctcggtgacctgcggacgacagcaggggatcccacgtgcaa

SEQ ID NO: 87045 - DNA, 72 bp, Homo sapiens
aagcctacaggaaacgaacaccacctcggtgacctgcggacgacagcaggggatcccacgtgcaagtaactg

SEQ ID NO: 87046 - DNA, 73 bp, Homo sapiens
aggaaacgaacaccacctcggtgacctgcggacgacagcaggggatcccacgtgcaagtaactggagtcctga

SEQ ID NO: 87047 - DNA, 73 bp, Homo sapiens
accacctcggtgacctgcggacgacagcaggggatcccacgtgcaagtaactggagtcctgagggcaggcggg

SEQ ID NO: 87048 - DNA, 76 bp, Homo sapiens
tgacctgcggacgacagcaggggatcccacgtgcaagtaactggagtcctgagggcaggcgggggatctgagaaaa

SEQ ID NO: 87049 - DNA, 75 bp, Homo sapiens
acgacagcaggggatcccacgtgcaagtaactggagtcctgagggcaggcgggggatctgagaaaagagtggcca

SEQ ID NO: 87050 - DNA, 74 bp, Homo sapiens
atcccacgtgcaagtaactggagtcctgagggcaggcgggggatctgagaaaagagtggccagagattcccaaa

SEQ ID NO: 87051 - DNA, 72 bp, Homo sapiens
aagtaactggagtcctgagggcaggcgggggatctgagaaaagagtggccagagattcccaaatgtaacaaa

SEQ ID NO: 87052 - DNA, 75 bp, Homo sapiens
agtcctgagggcaggcgggggatctgagaaaagagtggccagagattcccaaatgtaacaaatgctataaatcca

SEQ ID NO: 87053 - DNA, 76 bp, Homo sapiens
gcaggcgggggatctgagaaaagagtggccagagattcccaaatgtaacaaatgctataaatccacagacccaaga

SEQ ID NO: 87054 - DNA, 77 bp, Homo sapiens
gatctgagaaaagagtggccagagattcccaaatgtaacaaatgctataaatccacagacccaagaagccttgtcaa

SEQ ID NO: 87055 - DNA, 73 bp, Homo sapiens
agaaaagagtggccagagattcccaaatgtaacaaatgctataaatccacagacccaagaagccttgtcaacc

SEQ ID NO: 87056 - DNA, 70 bp, Homo sapiens
aaatgtaacaaatgctataaatccacagacccaagaagccttgtcaacccccagcaggaaaactaccagg

SEQ ID NO: 87057 - DNA, 74 bp, Homo sapiens
aaatgctataaatccacagacccaagaagccttgtcaacccccagcaggaaaactaccaggtcgtggcgcatca

SEQ ID NO: 87058 - DNA, 76 bp, Homo sapiens
tataaatccacagacccaagaagccttgtcaacccccagcaggaaaactaccaggtcgtggcgcatcatgagcaaa

SEQ ID NO: 87059 - DNA, 78 bp, Homo sapiens
acccaagaagccttgtcaacccccagcaggaaaactaccaggtcgtggcgcatcatgagcaaatcagcacagccacaa

SEQ ID NO: 87060 - DNA, 79 bp, Homo sapiens
aagccttgtcaacccccagcaggaaaactaccaggtcgtggcgcatcatgagcaaatcagcacagccacaacagtcgcc

SEQ ID NO: 87061 - DNA, 81 bp, Homo sapiens
ccagcaggaaaactaccaggtcgtggcgcatcatgagcaaatcagcacagccacaacagtcgccccaagtgccgaggtgcc

SEQ ID NO: 87062 - DNA, 82 bp, Homo sapiens
aaaactaccaggtcgtggcgcatcatgagcaaatcagcacagccacaacagtcgccccaagtgccgaggtgccgacactgca

SEQ ID NO: 87063 - DNA, 87 bp, Homo sapiens
ccaggtcgtggcgcatcatgagcaaatcagcacagccacaacagtcgccccaagtgccgaggtgccgacactgcacatcaggagcca

SEQ ID NO: 87064 - DNA, 85 bp, Homo sapiens
atcatgagcaaatcagcacagccacaacagtcgccccaagtgccgaggtgccgacactgcacatcaggagccagccccgacactg

SEQ ID NO: 87065 - DNA, 80 bp, Homo sapiens
aaatcagcacagccacaacagtcgccccaagtgccgaggtgccgacactgcacatcaggagccagccccgacactgggag

SEQ ID NO: 87066 - DNA, 79 bp, Homo sapiens
ccacaacagtcgccccaagtgccgaggtgccgacactgcacatcaggagccagccccgacactgggagggcatcttcaa

SEQ ID NO: 87067 - DNA, 79 bp, Homo sapiens
acagtcgccccaagtgccgaggtgccgacactgcacatcaggagccagccccgacactgggagggcatcttcaaagtgc

SEQ ID NO: 87068 - DNA, 79 bp, Homo sapiens
aagtgccgaggtgccgacactgcacatcaggagccagccccgacactgggagggcatcttcaaagtgctgagggagaaa

SEQ ID NO: 87069 - DNA, 80 bp, Homo sapiens
cgacactgcacatcaggagccagccccgacactgggagggcatcttcaaagtgctgagggagaaacaccgccagaccaca

SEQ ID NO: 87070 - DNA, 77 bp, Homo sapiens
acatcaggagccagccccgacactgggagggcatcttcaaagtgctgagggagaaacaccgccagaccacaattcca

SEQ ID NO: 87071 - DNA, 77 bp, Homo sapiens
cagccccgacactgggagggcatcttcaaagtgctgagggagaaacaccgccagaccacaattccatgcccagtgaa

SEQ ID NO: 87072 - DNA, 75 bp, Homo sapiens
actgggagggcatcttcaaagtgctgagggagaaacaccgccagaccacaattccatgcccagtgaaaagagaaa

SEQ ID NO: 87073 - DNA, 74 bp, Homo sapiens
catcttcaaagtgctgagggagaaacaccgccagaccacaattccatgcccagtgaaaagagaaagggaaataa

SEQ ID NO: 87074 - DNA, 71 bp, Homo sapiens
aaagtgctgagggagaaacaccgccagaccacaattccatgcccagtgaaaagagaaagggaaataaagat

SEQ ID NO: 87075 - DNA, 71 bp, Homo sapiens
agaaacaccgccagaccacaattccatgcccagtgaaaagagaaagggaaataaagattcgctcaaacaaa

SEQ ID NO: 87076 - DNA, 81 bp, Homo sapiens
tgagagaatcttctgtcagcatctggcctgcactgtgaggaaggttctagaagttcttcagaaggagggagagtgacccta

SEQ ID NO: 87077 - DNA, 77 bp, Homo sapiens
aatcttctgtcagcatctggcctgcactgtgaggaaggttctagaagttcttcagaaggagggagagtgaccctaaa

SEQ ID NO: 87078 - DNA, 75 bp, Homo sapiens
tctggcctgcactgtgaggaaggttctagaagttcttcagaaggagggagagtgaccctaaatggacctatggat

SEQ ID NO: 87079 - DNA, 73 bp, Homo sapiens
actgtgaggaaggttctagaagttcttcagaaggagggagagtgaccctaaatggacctatggatttgcagag

SEQ ID NO: 87080 - DNA, 73 bp, Homo sapiens
aggaaggttctagaagttcttcagaaggagggagagtgaccctaaatggacctatggatttgcagaggatgac

SEQ ID NO: 87081 - DNA, 73 bp, Homo sapiens
aggttctagaagttcttcagaaggagggagagtgaccctaaatggacctatggatttgcagaggatgacgcgg

SEQ ID NO: 87082 - DNA, 80 bp, Homo sapiens
aagttcttcagaaggagggagagtgaccctaaatggacctatggatttgcagaggatgacgcgggcacagtgagcatgca

SEQ ID NO: 87083 - DNA, 80 bp, Homo sapiens
aaggagggagagtgaccctaaatggacctatggatttgcagaggatgacgcgggcacagtgagcatgcatgaatagaaaa

SEQ ID NO: 87084 - DNA, 78 bp, Homo sapiens
agtgaccctaaatggacctatggatttgcagaggatgacgcgggcacagtgagcatgcatgaatagaaaaggcttttt

SEQ ID NO: 87085 - DNA, 82 bp, Homo sapiens
ctatggatttgcagaggatgacgcgggcacagtgagcatgcatgaatagaaaaggcttttttcttatgatgtttctgcaaaa

SEQ ID NO: 87086 - DNA, 82 bp, Homo sapiens
atgacgcgggcacagtgagcatgcatgaatagaaaaggcttttttcttatgatgtttctgcaaaagatcattcaaggcataa

SEQ ID NO: 87087 - DNA, 78 bp, Homo sapiens
acagtgagcatgcatgaatagaaaaggcttttttcttatgatgtttctgcaaaagatcattcaaggcataaattacgg

SEQ ID NO: 87088 - DNA, 78 bp, Homo sapiens
agcatgcatgaatagaaaaggcttttttcttatgatgtttctgcaaaagatcattcaaggcataaattacggtagtga

SEQ ID NO: 87089 - DNA, 74 bp, Homo sapiens
gaatagaaaaggcttttttcttatgatgtttctgcaaaagatcattcaaggcataaattacggtagtgaggctg

SEQ ID NO: 87090 - DNA, 74 bp, Homo sapiens
tttttcttatgatgtttctgcaaaagatcattcaaggcataaattacggtagtgaggctggggttttgaatgtg

SEQ ID NO: 87091 - DNA, 76 bp, Homo sapiens
atcattcaaggcataaattacggtagtgaggctggggttttgaatgtggggtgctaaatagatggtgatgagaaca

SEQ ID NO: 87092 - DNA, 73 bp, Homo sapiens
ataaattacggtagtgaggctggggttttgaatgtggggtgctaaatagatggtgatgagaacacaaggactg

SEQ ID NO: 87093 - DNA, 72 bp, Homo sapiens
cggtagtgaggctggggttttgaatgtggggtgctaaatagatggtgatgagaacacaaggactgggtgggg

SEQ ID NO: 87094 - DNA, 71 bp, Homo sapiens
gggttttgaatgtggggtgctaaatagatggtgatgagaacacaaggactgggtgggggggatgagaaaaa

SEQ ID NO: 87095 - DNA, 72 bp, Homo sapiens
aatgtggggtgctaaatagatggtgatgagaacacaaggactgggtgggggggatgagaaaaaacacagaaa

SEQ ID NO: 87096 - DNA, 75 bp, Homo sapiens
ctaaatagatggtgatgagaacacaaggactgggtgggggggatgagaaaaaacacagaaagcagctggggtgca

SEQ ID NO: 87097 - DNA, 76 bp, Homo sapiens
gtgatgagaacacaaggactgggtgggggggatgagaaaaaacacagaaagcagctggggtgcagtgccctgacaa

SEQ ID NO: 87098 - DNA, 74 bp, Homo sapiens
acaaggactgggtgggggggatgagaaaaaacacagaaagcagctggggtgcagtgccctgacaagccaatcaa

SEQ ID NO: 87099 - DNA, 73 bp, Homo sapiens
actgggtgggggggatgagaaaaaacacagaaagcagctggggtgcagtgccctgacaagccaatcaagggcc

SEQ ID NO: 87100 - DNA, 77 bp, Homo sapiens
atgagaaaaaacacagaaagcagctggggtgcagtgccctgacaagccaatcaagggcccaggaggtgagtgtcggc

SEQ ID NO: 87101 - DNA, 79 bp, Homo sapiens
aaaaacacagaaagcagctggggtgcagtgccctgacaagccaatcaagggcccaggaggtgagtgtcggctgcagaca

SEQ ID NO: 87102 - DNA, 83 bp, Homo sapiens
aaagcagctggggtgcagtgccctgacaagccaatcaagggcccaggaggtgagtgtcggctgcagacaggcagagccagcta

SEQ ID NO: 87103 - DNA, 82 bp, Homo sapiens
tgcagtgccctgacaagccaatcaagggcccaggaggtgagtgtcggctgcagacaggcagagccagctaggtcccttcacg

SEQ ID NO: 87104 - DNA, 79 bp, Homo sapiens
tgacaagccaatcaagggcccaggaggtgagtgtcggctgcagacaggcagagccagctaggtcccttcacggtgggac

SEQ ID NO: 87105 - DNA, 83 bp, Homo sapiens
gtgagtgtcggctgcagacaggcagagccagctaggtcccttcacggtgggaccagctgtcaccctctgtgctcaccagcctg

SEQ ID NO: 87106 - DNA, 77 bp, Homo sapiens
agccagctaggtcccttcacggtgggaccagctgtcaccctctgtgctcaccagcctggcctggtggggacgcctga

SEQ ID NO: 87107 - DNA, 79 bp, Homo sapiens
taggtcccttcacggtgggaccagctgtcaccctctgtgctcaccagcctggcctggtggggacgcctgacagcatgtg

SEQ ID NO: 87108 - DNA, 81 bp, Homo sapiens
ttcacggtgggaccagctgtcaccctctgtgctcaccagcctggcctggtggggacgcctgacagcatgtggcccaccaca

SEQ ID NO: 87109 - DNA, 80 bp, Homo sapiens
accagctgtcaccctctgtgctcaccagcctggcctggtggggacgcctgacagcatgtggcccaccacaccctcttctg

SEQ ID NO: 87110 - DNA, 82 bp, Homo sapiens
ctctgtgctcaccagcctggcctggtggggacgcctgacagcatgtggcccaccacaccctcttctggctgctccctccaga

SEQ ID NO: 87111 - DNA, 79 bp, Homo sapiens
accagcctggcctggtggggacgcctgacagcatgtggcccaccacaccctcttctggctgctccctccagagccaaca

SEQ ID NO: 87112 - DNA, 82 bp, Homo sapiens
ctggtggggacgcctgacagcatgtggcccaccacaccctcttctggctgctccctccagagccaacatgcgtggtgtcatg

SEQ ID NO: 87113 - DNA, 81 bp, Homo sapiens
acgcctgacagcatgtggcccaccacaccctcttctggctgctccctccagagccaacatgcgtggtgtcatggccgaacc

SEQ ID NO: 87114 - DNA, 81 bp, Homo sapiens
acagcatgtggcccaccacaccctcttctggctgctccctccagagccaacatgcgtggtgtcatggccgaacccttgtca

SEQ ID NO: 87115 - DNA, 76 bp, Homo sapiens
ggcccaccacaccctcttctggctgctccctccagagccaacatgcgtggtgtcatggccgaacccttgtcagggg

SEQ ID NO: 87116 - DNA, 77 bp, Homo sapiens
tcttctggctgctccctccagagccaacatgcgtggtgtcatggccgaacccttgtcaggggggccaagcgcctcgt

SEQ ID NO: 87117 - DNA, 75 bp, Homo sapiens
ctccctccagagccaacatgcgtggtgtcatggccgaacccttgtcaggggggccaagcgcctcgttacctcatc

SEQ ID NO: 87118 - DNA, 79 bp, Homo sapiens
tccagagccaacatgcgtggtgtcatggccgaacccttgtcaggggggccaagcgcctcgttacctcatctatgaagca

SEQ ID NO: 87119 - DNA, 77 bp, Homo sapiens
acatgcgtggtgtcatggccgaacccttgtcaggggggccaagcgcctcgttacctcatctatgaagcaggacagag

SEQ ID NO: 87120 - DNA, 76 bp, Homo sapiens
tgtcatggccgaacccttgtcaggggggccaagcgcctcgttacctcatctatgaagcaggacagagggtcaggaa

SEQ ID NO: 87121 - DNA, 74 bp, Homo sapiens
aacccttgtcaggggggccaagcgcctcgttacctcatctatgaagcaggacagagggtcaggaacagactgta

SEQ ID NO: 87122 - DNA, 79 bp, Homo sapiens
gggccaagcgcctcgttacctcatctatgaagcaggacagagggtcaggaacagactgtagcacaggtgatttccctgc

SEQ ID NO: 87123 - DNA, 79 bp, Homo sapiens
cctcgttacctcatctatgaagcaggacagagggtcaggaacagactgtagcacaggtgatttccctgctgccttagaa

SEQ ID NO: 87124 - DNA, 80 bp, Homo sapiens
ttacctcatctatgaagcaggacagagggtcaggaacagactgtagcacaggtgatttccctgctgccttagaagctttg

SEQ ID NO: 87125 - DNA, 77 bp, Homo sapiens
agggtcaggaacagactgtagcacaggtgatttccctgctgccttagaagctttggggttggcctcaggctgcatta

SEQ ID NO: 87126 - DNA, 74 bp, Homo sapiens
tgtagcacaggtgatttccctgctgccttagaagctttggggttggcctcaggctgcattaattaaataacggg

SEQ ID NO: 87127 - DNA, 71 bp, Homo sapiens
tttccctgctgccttagaagctttggggttggcctcaggctgcattaattaaataacggggtaactcagta

SEQ ID NO: 87128 - DNA, 74 bp, Homo sapiens
tgccttagaagctttggggttggcctcaggctgcattaattaaataacggggtaactcagtagcacatgacacc

SEQ ID NO: 87129 - DNA, 77 bp, Homo sapiens
tgcattaattaaataacggggtaactcagtagcacatgacacctgcagggtactgcccatctcacacccaagaacac

SEQ ID NO: 87130 - DNA, 75 bp, Homo sapiens
taattaaataacggggtaactcagtagcacatgacacctgcagggtactgcccatctcacacccaagaacaccca

SEQ ID NO: 87131 - DNA, 82 bp, Homo sapiens
ggtaactcagtagcacatgacacctgcagggtactgcccatctcacacccaagaacacccagcaggggagagccatgcctca

SEQ ID NO: 87132 - DNA, 81 bp, Homo sapiens
agtagcacatgacacctgcagggtactgcccatctcacacccaagaacacccagcaggggagagccatgcctcaggccacc

SEQ ID NO: 87133 - DNA, 80 bp, Homo sapiens
atgacacctgcagggtactgcccatctcacacccaagaacacccagcaggggagagccatgcctcaggccaccgcctgcc

SEQ ID NO: 87134 - DNA, 80 bp, Homo sapiens
ggtactgcccatctcacacccaagaacacccagcaggggagagccatgcctcaggccaccgcctgcccagtctctgtaga

SEQ ID NO: 87135 - DNA, 79 bp, Homo sapiens
atctcacacccaagaacacccagcaggggagagccatgcctcaggccaccgcctgcccagtctctgtagaccctctgag

SEQ ID NO: 87136 - DNA, 78 bp, Homo sapiens
aagaacacccagcaggggagagccatgcctcaggccaccgcctgcccagtctctgtagaccctctgaggggtcatcac

SEQ ID NO: 87137 - DNA, 77 bp, Homo sapiens
agcaggggagagccatgcctcaggccaccgcctgcccagtctctgtagaccctctgaggggtcatcacccccacaag

SEQ ID NO: 87138 - DNA, 76 bp, Homo sapiens
ctcaggccaccgcctgcccagtctctgtagaccctctgaggggtcatcacccccacaagtcctctcaggccctcga

SEQ ID NO: 87139 - DNA, 75 bp, Homo sapiens
ctgcccagtctctgtagaccctctgaggggtcatcacccccacaagtcctctcaggccctcgagtggcaaaaatc

SEQ ID NO: 87140 - DNA, 73 bp, Homo sapiens
tctctgtagaccctctgaggggtcatcacccccacaagtcctctcaggccctcgagtggcaaaaatccaactt

SEQ ID NO: 87141 - DNA, 76 bp, Homo sapiens
tcatcacccccacaagtcctctcaggccctcgagtggcaaaaatccaactttcattacccagcatgaggtatggaa

SEQ ID NO: 87142 - DNA, 74 bp, Homo sapiens
cccacaagtcctctcaggccctcgagtggcaaaaatccaactttcattacccagcatgaggtatggaactggga

SEQ ID NO: 87143 - DNA, 76 bp, Homo sapiens
ccctcgagtggcaaaaatccaactttcattacccagcatgaggtatggaactgggagctcctgagatacaaagtca

SEQ ID NO: 87144 - DNA, 76 bp, Homo sapiens
aaatccaactttcattacccagcatgaggtatggaactgggagctcctgagatacaaagtcacccccgctgctgta

SEQ ID NO: 87145 - DNA, 76 bp, Homo sapiens
aactttcattacccagcatgaggtatggaactgggagctcctgagatacaaagtcacccccgctgctgtacttcag

SEQ ID NO: 87146 - DNA, 77 bp, Homo sapiens
tacccagcatgaggtatggaactgggagctcctgagatacaaagtcacccccgctgctgtacttcaggccagggccc

SEQ ID NO: 87147 - DNA, 73 bp, Homo sapiens
aggtatggaactgggagctcctgagatacaaagtcacccccgctgctgtacttcaggccagggccccaggtgg

SEQ ID NO: 87148 - DNA, 74 bp, Homo sapiens
actgggagctcctgagatacaaagtcacccccgctgctgtacttcaggccagggccccaggtgggagctgggga

SEQ ID NO: 87149 - DNA, 73 bp, Homo sapiens
ctgagatacaaagtcacccccgctgctgtacttcaggccagggccccaggtgggagctggggagcctggtagg

SEQ ID NO: 87150 - DNA, 71 bp, Homo sapiens
aaagtcacccccgctgctgtacttcaggccagggccccaggtgggagctggggagcctggtagggccgcca

SEQ ID NO: 87151 - DNA, 80 bp, Homo sapiens
tgctgtacttcaggccagggccccaggtgggagctggggagcctggtagggccgccacagctggcctgacacagtcagca

SEQ ID NO: 87152 - DNA, 78 bp, Homo sapiens
cttcaggccagggccccaggtgggagctggggagcctggtagggccgccacagctggcctgacacagtcagcaggtca

SEQ ID NO: 87153 - DNA, 78 bp, Homo sapiens
cccaggtgggagctggggagcctggtagggccgccacagctggcctgacacagtcagcaggtcagctgggtcttcaag

SEQ ID NO: 87154 - DNA, 80 bp, Homo sapiens
agctggggagcctggtagggccgccacagctggcctgacacagtcagcaggtcagctgggtcttcaaggccggacaggca

SEQ ID NO: 87155 - DNA, 82 bp, Homo sapiens
ggagcctggtagggccgccacagctggcctgacacagtcagcaggtcagctgggtcttcaaggccggacaggcaggcactga

SEQ ID NO: 87156 - DNA, 84 bp, Homo sapiens
tagggccgccacagctggcctgacacagtcagcaggtcagctgggtcttcaaggccggacaggcaggcactgagctgtgccgag

SEQ ID NO: 87157 - DNA, 81 bp, Homo sapiens
acagtcagcaggtcagctgggtcttcaaggccggacaggcaggcactgagctgtgccgaggctggtgctccccagacccaa

SEQ ID NO: 87158 - DNA, 79 bp, Homo sapiens
gtcttcaaggccggacaggcaggcactgagctgtgccgaggctggtgctccccagacccaactggacttcagaccctga

SEQ ID NO: 87159 - DNA, 79 bp, Homo sapiens
cggacaggcaggcactgagctgtgccgaggctggtgctccccagacccaactggacttcagaccctgactcggagaaca

SEQ ID NO: 87160 - DNA, 78 bp, Homo sapiens
agctgtgccgaggctggtgctccccagacccaactggacttcagaccctgactcggagaacagacctcaacacagcag

SEQ ID NO: 87161 - DNA, 79 bp, Homo sapiens
ccagacccaactggacttcagaccctgactcggagaacagacctcaacacagcagggcagtgatgcctgcgccctgcgg

SEQ ID NO: 87162 - DNA, 81 bp, Homo sapiens
cttcagaccctgactcggagaacagacctcaacacagcagggcagtgatgcctgcgccctgcggtcacttggcctgggcgc

SEQ ID NO: 87163 - DNA, 81 bp, Homo sapiens
tgactcggagaacagacctcaacacagcagggcagtgatgcctgcgccctgcggtcacttggcctgggcgcccactggggc

SEQ ID NO: 87164 - DNA, 80 bp, Homo sapiens
aacagacctcaacacagcagggcagtgatgcctgcgccctgcggtcacttggcctgggcgcccactggggctactgaaca

SEQ ID NO: 87165 - DNA, 80 bp, Homo sapiens
aacacagcagggcagtgatgcctgcgccctgcggtcacttggcctgggcgcccactggggctactgaacacagactggga

SEQ ID NO: 87166 - DNA, 78 bp, Homo sapiens
agtgatgcctgcgccctgcggtcacttggcctgggcgcccactggggctactgaacacagactgggagactcctgtag

SEQ ID NO: 87167 - DNA, 78 bp, Homo sapiens
cctgcgccctgcggtcacttggcctgggcgcccactggggctactgaacacagactgggagactcctgtaggcagctc

SEQ ID NO: 87168 - DNA, 78 bp, Homo sapiens
tcacttggcctgggcgcccactggggctactgaacacagactgggagactcctgtaggcagctccccctcaatgagga

SEQ ID NO: 87169 - DNA, 79 bp, Homo sapiens
tactgaacacagactgggagactcctgtaggcagctccccctcaatgaggacactcctgtaaagacagcaatgcctttg

SEQ ID NO: 87170 - DNA, 75 bp, Homo sapiens
agactgggagactcctgtaggcagctccccctcaatgaggacactcctgtaaagacagcaatgcctttgggaaaa

SEQ ID NO: 87171 - DNA, 73 bp, Homo sapiens
actcctgtaggcagctccccctcaatgaggacactcctgtaaagacagcaatgcctttgggaaaagggtcgag

SEQ ID NO: 87172 - DNA, 76 bp, Homo sapiens
aatgaggacactcctgtaaagacagcaatgcctttgggaaaagggtcgagggtgcagagcctgggaggcagtgaga

SEQ ID NO: 87173 - DNA, 75 bp, Homo sapiens
actcctgtaaagacagcaatgcctttgggaaaagggtcgagggtgcagagcctgggaggcagtgagagtcctcaa

SEQ ID NO: 87174 - DNA, 80 bp, Homo sapiens
taaagacagcaatgcctttgggaaaagggtcgagggtgcagagcctgggaggcagtgagagtcctcaatgctgagacaga

SEQ ID NO: 87175 - DNA, 76 bp, Homo sapiens
aaaagggtcgagggtgcagagcctgggaggcagtgagagtcctcaatgctgagacagaggaaagggtgaggaggaa

SEQ ID NO: 87176 - DNA, 80 bp, Homo sapiens
gtgcagagcctgggaggcagtgagagtcctcaatgctgagacagaggaaagggtgaggaggaacctctccagggccagaa

SEQ ID NO: 87177 - DNA, 77 bp, Homo sapiens
agtgagagtcctcaatgctgagacagaggaaagggtgaggaggaacctctccagggccagaatcccctgatcctctc

SEQ ID NO: 87178 - DNA, 75 bp, Homo sapiens
gtcctcaatgctgagacagaggaaagggtgaggaggaacctctccagggccagaatcccctgatcctctcccctc

SEQ ID NO: 87179 - DNA, 72 bp, Homo sapiens
acagaggaaagggtgaggaggaacctctccagggccagaatcccctgatcctctcccctccggcaaagagca

SEQ ID NO: 87180 - DNA, 70 bp, Homo sapiens
aaagggtgaggaggaacctctccagggccagaatcccctgatcctctcccctccggcaaagagcacttcc

SEQ ID NO: 87181 - DNA, 72 bp, Homo sapiens
aggaacctctccagggccagaatcccctgatcctctcccctccggcaaagagcacttccggggatgaagcaa

SEQ ID NO: 87182 - DNA, 74 bp, Homo sapiens
tctccagggccagaatcccctgatcctctcccctccggcaaagagcacttccggggatgaagcaacaggaagtg

SEQ ID NO: 87183 - DNA, 71 bp, Homo sapiens
aatcccctgatcctctcccctccggcaaagagcacttccggggatgaagcaacaggaagtggcttacgaaa

SEQ ID NO: 87184 - DNA, 72 bp, Homo sapiens
atcctctcccctccggcaaagagcacttccggggatgaagcaacaggaagtggcttacgaaatccacctcca

SEQ ID NO: 87185 - DNA, 72 bp, Homo sapiens
aagagcacttccggggatgaagcaacaggaagtggcttacgaaatccacctccaggccgagtgaccagttta

SEQ ID NO: 87186 - DNA, 73 bp, Homo sapiens
gggatgaagcaacaggaagtggcttacgaaatccacctccaggccgagtgaccagtttacaggaagtgtggtg

SEQ ID NO: 87187 - DNA, 71 bp, Homo sapiens
acaggaagtggcttacgaaatccacctccaggccgagtgaccagtttacaggaagtgtggtgggtgaatct

SEQ ID NO: 87188 - DNA, 72 bp, Homo sapiens
aatccacctccaggccgagtgaccagtttacaggaagtgtggtgggtgaatcttccccagggcacgaggcaa

SEQ ID NO: 87189 - DNA, 74 bp, Homo sapiens
aggccgagtgaccagtttacaggaagtgtggtgggtgaatcttccccagggcacgaggcaatgtctggagccat

SEQ ID NO: 87190 - DNA, 73 bp, Homo sapiens
accagtttacaggaagtgtggtgggtgaatcttccccagggcacgaggcaatgtctggagccatttctggtcc

SEQ ID NO: 87191 - DNA, 75 bp, Homo sapiens
aggaagtgtggtgggtgaatcttccccagggcacgaggcaatgtctggagccatttctggtcctcaccactgagg

SEQ ID NO: 87192 - DNA, 74 bp, Homo sapiens
aatcttccccagggcacgaggcaatgtctggagccatttctggtcctcaccactgagggcggggacagtcccca

SEQ ID NO: 87193 - DNA, 74 bp, Homo sapiens
aatgtctggagccatttctggtcctcaccactgagggcggggacagtccccaccatctggctcgggggaggcca

SEQ ID NO: 87194 - DNA, 75 bp, Homo sapiens
agccatttctggtcctcaccactgagggcggggacagtccccaccatctggctcgggggaggccagggatgctgc

SEQ ID NO: 87195 - DNA, 81 bp, Homo sapiens
ctcaccactgagggcggggacagtccccaccatctggctcgggggaggccagggatgctgctcagcacactgcaggcaaca

SEQ ID NO: 87196 - DNA, 80 bp, Homo sapiens
actgagggcggggacagtccccaccatctggctcgggggaggccagggatgctgctcagcacactgcaggcaacacagaa

SEQ ID NO: 87197 - DNA, 80 bp, Homo sapiens
gggacagtccccaccatctggctcgggggaggccagggatgctgctcagcacactgcaggcaacacagaacctcctgccc

SEQ ID NO: 87198 - DNA, 82 bp, Homo sapiens
accatctggctcgggggaggccagggatgctgctcagcacactgcaggcaacacagaacctcctgccccaaatgtcaagcag

SEQ ID NO: 87199 - DNA, 82 bp, Homo sapiens
ggctcgggggaggccagggatgctgctcagcacactgcaggcaacacagaacctcctgccccaaatgtcaagcagtgcaggg

SEQ ID NO: 87200 - DNA, 84 bp, Homo sapiens
agggatgctgctcagcacactgcaggcaacacagaacctcctgccccaaatgtcaagcagtgcaggggctgagaagccctgggc

SEQ ID NO: 87201 - DNA, 85 bp, Homo sapiens
tgctgctcagcacactgcaggcaacacagaacctcctgccccaaatgtcaagcagtgcaggggctgagaagccctgggctgaccc

SEQ ID NO: 87202 - DNA, 80 bp, Homo sapiens
acactgcaggcaacacagaacctcctgccccaaatgtcaagcagtgcaggggctgagaagccctgggctgaccctgccac

SEQ ID NO: 87203 - DNA, 76 bp, Homo sapiens
aacacagaacctcctgccccaaatgtcaagcagtgcaggggctgagaagccctgggctgaccctgccacgggaagc

SEQ ID NO: 87204 - DNA, 80 bp, Homo sapiens
ctgccccaaatgtcaagcagtgcaggggctgagaagccctgggctgaccctgccacgggaagcgaccatcagagcagaaa

SEQ ID NO: 87205 - DNA, 80 bp, Homo sapiens
aaatgtcaagcagtgcaggggctgagaagccctgggctgaccctgccacgggaagcgaccatcagagcagaaagcagaaa

SEQ ID NO: 87206 - DNA, 79 bp, Homo sapiens
tgcaggggctgagaagccctgggctgaccctgccacgggaagcgaccatcagagcagaaagcagaaaaatctatgggaa

SEQ ID NO: 87207 - DNA, 76 bp, Homo sapiens
ggctgagaagccctgggctgaccctgccacgggaagcgaccatcagagcagaaagcagaaaaatctatgggaaaaa

SEQ ID NO: 87208 - DNA, 75 bp, Homo sapiens
tgccacgggaagcgaccatcagagcagaaagcagaaaaatctatgggaaaaaagacctgctcccttcaacaaata

SEQ ID NO: 87209 - DNA, 73 bp, Homo sapiens
aagcgaccatcagagcagaaagcagaaaaatctatgggaaaaaagacctgctcccttcaacaaatataaaata

SEQ ID NO: 87210 - DNA, 73 bp, Homo sapiens
ccatcagagcagaaagcagaaaaatctatgggaaaaaagacctgctcccttcaacaaatataaaatataaatg

SEQ ID NO: 87211 - DNA, 68 bp, Homo sapiens
gaaagcagaaaaatctatgggaaaaaagacctgctcccttcaacaaatataaaatataaatggaaaag

SEQ ID NO: 87212 - DNA, 67 bp, Homo sapiens
ctatgggaaaaaagacctgctcccttcaacaaatataaaatataaatggaaaagttacgggtgaaga

SEQ ID NO: 87213 - DNA, 67 bp, Homo sapiens
aaagacctgctcccttcaacaaatataaaatataaatggaaaagttacgggtgaagaagaacgtatc

SEQ ID NO: 87214 - DNA, 70 bp, Homo sapiens
gctcccttcaacaaatataaaatataaatggaaaagttacgggtgaagaagaacgtatctgattgttggc

SEQ ID NO: 87215 - DNA, 70 bp, Homo sapiens
aacaaatataaaatataaatggaaaagttacgggtgaagaagaacgtatctgattgttggccaggcatgg

SEQ ID NO: 87216 - DNA, 73 bp, Homo sapiens
atataaatggaaaagttacgggtgaagaagaacgtatctgattgttggccaggcatggtacctcacacctgta

SEQ ID NO: 87217 - DNA, 68 bp, Homo sapiens
aaaaaaaatctaggattgttttaaaaactctccagcaaagacagaaactagggagagggcacagtgaa

SEQ ID NO: 87218 - DNA, 74 bp, Homo sapiens
aaatctaggattgttttaaaaactctccagcaaagacagaaactagggagagggcacagtgaagagatgagaca

SEQ ID NO: 87219 - DNA, 78 bp, Homo sapiens
ttgttttaaaaactctccagcaaagacagaaactagggagagggcacagtgaagagatgagacacacagacagatgga

SEQ ID NO: 87220 - DNA, 78 bp, Homo sapiens
aactctccagcaaagacagaaactagggagagggcacagtgaagagatgagacacacagacagatggacggggcccaa

SEQ ID NO: 87221 - DNA, 77 bp, Homo sapiens
aaagacagaaactagggagagggcacagtgaagagatgagacacacagacagatggacggggcccaatctggccagg

SEQ ID NO: 87222 - DNA, 78 bp, Homo sapiens
aactagggagagggcacagtgaagagatgagacacacagacagatggacggggcccaatctggccaggtcccaggata

SEQ ID NO: 87223 - DNA, 79 bp, Homo sapiens
acagtgaagagatgagacacacagacagatggacggggcccaatctggccaggtcccaggatacctgctaccagcctgg

SEQ ID NO: 87224 - DNA, 78 bp, Homo sapiens
aagagatgagacacacagacagatggacggggcccaatctggccaggtcccaggatacctgctaccagcctggggaca

SEQ ID NO: 87225 - DNA, 76 bp, Homo sapiens
gggcccaatctggccaggtcccaggatacctgctaccagcctggggacaatgaggcccaaggcagcaggtgccaag

SEQ ID NO: 87226 - DNA, 76 bp, Homo sapiens
aggtcccaggatacctgctaccagcctggggacaatgaggcccaaggcagcaggtgccaaggctgccccaaagaca

SEQ ID NO: 87227 - DNA, 77 bp, Homo sapiens
ctaccagcctggggacaatgaggcccaaggcagcaggtgccaaggctgccccaaagacacatgatccttcccaccac

SEQ ID NO: 87228 - DNA, 78 bp, Homo sapiens
gacaatgaggcccaaggcagcaggtgccaaggctgccccaaagacacatgatccttcccaccaccctccagaagcacc

SEQ ID NO: 87229 - DNA, 79 bp, Homo sapiens
cccaaggcagcaggtgccaaggctgccccaaagacacatgatccttcccaccaccctccagaagcacccactcagcaga

SEQ ID NO: 87230 - DNA, 79 bp, Homo sapiens
agcaggtgccaaggctgccccaaagacacatgatccttcccaccaccctccagaagcacccactcagcagaagtgccca

SEQ ID NO: 87231 - DNA, 77 bp, Homo sapiens
aaagacacatgatccttcccaccaccctccagaagcacccactcagcagaagtgcccactctccccaggcagcacgt

SEQ ID NO: 87232 - DNA, 77 bp, Homo sapiens
acatgatccttcccaccaccctccagaagcacccactcagcagaagtgcccactctccccaggcagcacgttctccc

SEQ ID NO: 87233 - DNA, 79 bp, Homo sapiens
ccaccctccagaagcacccactcagcagaagtgcccactctccccaggcagcacgttctccctgctgtctactgggcaa

SEQ ID NO: 87234 - DNA, 80 bp, Homo sapiens
agaagcacccactcagcagaagtgcccactctccccaggcagcacgttctccctgctgtctactgggcaaggcctgccac

SEQ ID NO: 87235 - DNA, 78 bp, Homo sapiens
acccactcagcagaagtgcccactctccccaggcagcacgttctccctgctgtctactgggcaaggcctgccacccca

SEQ ID NO: 87236 - DNA, 78 bp, Homo sapiens
agaagtgcccactctccccaggcagcacgttctccctgctgtctactgggcaaggcctgccaccccacccctgatgca

SEQ ID NO: 87237 - DNA, 78 bp, Homo sapiens
tccccaggcagcacgttctccctgctgtctactgggcaaggcctgccaccccacccctgatgcaggaaatgacagaaa

SEQ ID NO: 87238 - DNA, 79 bp, Homo sapiens
agcacgttctccctgctgtctactgggcaaggcctgccaccccacccctgatgcaggaaatgacagaaaggaatgcatc

SEQ ID NO: 87239 - DNA, 79 bp, Homo sapiens
tgtctactgggcaaggcctgccaccccacccctgatgcaggaaatgacagaaaggaatgcatctgttccttcttcagaa

SEQ ID NO: 87240 - DNA, 81 bp, Homo sapiens
cccacccctgatgcaggaaatgacagaaaggaatgcatctgttccttcttcagaagtccatcttgctgactctcccaagca

SEQ ID NO: 87241 - DNA, 82 bp, Homo sapiens
aaatgacagaaaggaatgcatctgttccttcttcagaagtccatcttgctgactctcccaagcaccagtgtcagcacacacg

SEQ ID NO: 87242 - DNA, 83 bp, Homo sapiens
aaggaatgcatctgttccttcttcagaagtccatcttgctgactctcccaagcaccagtgtcagcacacacgtcctgatctta

SEQ ID NO: 87243 - DNA, 84 bp, Homo sapiens
tgttccttcttcagaagtccatcttgctgactctcccaagcaccagtgtcagcacacacgtcctgatcttacagagctgggtca

SEQ ID NO: 87244 - DNA, 84 bp, Homo sapiens
ttcagaagtccatcttgctgactctcccaagcaccagtgtcagcacacacgtcctgatcttacagagctgggtcaccctgccaa

SEQ ID NO: 87245 - DNA, 82 bp, Homo sapiens
atcttgctgactctcccaagcaccagtgtcagcacacacgtcctgatcttacagagctgggtcaccctgccaagccacggcg

SEQ ID NO: 87246 - DNA, 80 bp, Homo sapiens
actctcccaagcaccagtgtcagcacacacgtcctgatcttacagagctgggtcaccctgccaagccacggcgtgtggtc

SEQ ID NO: 87247 - DNA, 80 bp, Homo sapiens
gtcagcacacacgtcctgatcttacagagctgggtcaccctgccaagccacggcgtgtggtccagcagagggaaggtgaa

SEQ ID NO: 87248 - DNA, 75 bp, Homo sapiens
ctgatcttacagagctgggtcaccctgccaagccacggcgtgtggtccagcagagggaaggtgaagtcccgggaa

SEQ ID NO: 87249 - DNA, 72 bp, Homo sapiens
gtcaccctgccaagccacggcgtgtggtccagcagagggaaggtgaagtcccgggaagagccctggacggtg

SEQ ID NO: 87250 - DNA, 70 bp, Homo sapiens
cggcgtgtggtccagcagagggaaggtgaagtcccgggaagagccctggacggtggcctccccacaacag

SEQ ID NO: 87251 - DNA, 70 bp, Homo sapiens
cccacaacaggccccccctttccagtaaagcacaaatgattgggaaacgctattcaggaatcctccttga

SEQ ID NO: 87252 - DNA, 69 bp, Homo sapiens
aacaggccccccctttccagtaaagcacaaatgattgggaaacgctattcaggaatcctccttgagact

SEQ ID NO: 87253 - DNA, 73 bp, Homo sapiens
ccctttccagtaaagcacaaatgattgggaaacgctattcaggaatcctccttgagacttcctggcaggactg

SEQ ID NO: 87254 - DNA, 78 bp, Homo sapiens
taaagcacaaatgattgggaaacgctattcaggaatcctccttgagacttcctggcaggactggagcaggacattgag

SEQ ID NO: 87255 - DNA, 78 bp, Homo sapiens
atgattgggaaacgctattcaggaatcctccttgagacttcctggcaggactggagcaggacattgaggccacggaga

SEQ ID NO: 87256 - DNA, 77 bp, Homo sapiens
aacgctattcaggaatcctccttgagacttcctggcaggactggagcaggacattgaggccacggagagtttagaca

SEQ ID NO: 87257 - DNA, 78 bp, Homo sapiens
aggaatcctccttgagacttcctggcaggactggagcaggacattgaggccacggagagtttagacagtgactgagtg

SEQ ID NO: 87258 - DNA, 77 bp, Homo sapiens
caggactggagcaggacattgaggccacggagagtttagacagtgactgagtggggctgtctccgtgaactacaaaa

SEQ ID NO: 87259 - DNA, 75 bp, Homo sapiens
agcaggacattgaggccacggagagtttagacagtgactgagtggggctgtctccgtgaactacaaaacaaagga

SEQ ID NO: 87260 - DNA, 74 bp, Homo sapiens
acattgaggccacggagagtttagacagtgactgagtggggctgtctccgtgaactacaaaacaaaggaagatc

SEQ ID NO: 87261 - DNA, 75 bp, Homo sapiens
agagtttagacagtgactgagtggggctgtctccgtgaactacaaaacaaaggaagatctgcccagtgagcttgg

SEQ ID NO: 87262 - DNA, 78 bp, Homo sapiens
ttagacagtgactgagtggggctgtctccgtgaactacaaaacaaaggaagatctgcccagtgagcttggttggctca

SEQ ID NO: 87263 - DNA, 75 bp, Homo sapiens
agtggggctgtctccgtgaactacaaaacaaaggaagatctgcccagtgagcttggttggctcagggacgagcta

SEQ ID NO: 87264 - DNA, 74 bp, Homo sapiens
tgtctccgtgaactacaaaacaaaggaagatctgcccagtgagcttggttggctcagggacgagctagggaact

SEQ ID NO: 87265 - DNA, 76 bp, Homo sapiens
tgaactacaaaacaaaggaagatctgcccagtgagcttggttggctcagggacgagctagggaacttggacagaca

SEQ ID NO: 87266 - DNA, 74 bp, Homo sapiens
aactacaaaacaaaggaagatctgcccagtgagcttggttggctcagggacgagctagggaacttggacagaca

SEQ ID NO: 87267 - DNA, 76 bp, Homo sapiens
aacaaaggaagatctgcccagtgagcttggttggctcagggacgagctagggaacttggacagacacattgtggac

SEQ ID NO: 87268 - DNA, 77 bp, Homo sapiens
aagatctgcccagtgagcttggttggctcagggacgagctagggaacttggacagacacattgtggacctcactggt

SEQ ID NO: 87269 - DNA, 76 bp, Homo sapiens
agtgagcttggttggctcagggacgagctagggaacttggacagacacattgtggacctcactggttccagcctag

SEQ ID NO: 87270 - DNA, 74 bp, Homo sapiens
cttggttggctcagggacgagctagggaacttggacagacacattgtggacctcactggttccagcctagggaa

SEQ ID NO: 87271 - DNA, 74 bp, Homo sapiens
ttggctcagggacgagctagggaacttggacagacacattgtggacctcactggttccagcctagggaaccagg

SEQ ID NO: 87272 - DNA, 78 bp, Homo sapiens
ttggacagacacattgtggacctcactggttccagcctagggaaccaggtggccacggtcagggcagagcagagggca

SEQ ID NO: 87273 - DNA, 75 bp, Homo sapiens
acattgtggacctcactggttccagcctagggaaccaggtggccacggtcagggcagagcagagggcaggaccca

SEQ ID NO: 87274 - DNA, 78 bp, Homo sapiens
tcactggttccagcctagggaaccaggtggccacggtcagggcagagcagagggcaggacccacggcagctcctctgc

SEQ ID NO: 87275 - DNA, 77 bp, Homo sapiens
agcctagggaaccaggtggccacggtcagggcagagcagagggcaggacccacggcagctcctctgccagcctggga

SEQ ID NO: 87276 - DNA, 78 bp, Homo sapiens
aaccaggtggccacggtcagggcagagcagagggcaggacccacggcagctcctctgccagcctgggaggacagatgg

SEQ ID NO: 87277 - DNA, 82 bp, Homo sapiens
acggtcagggcagagcagagggcaggacccacggcagctcctctgccagcctgggaggacagatggtgtgttcagcaggcca

SEQ ID NO: 87278 - DNA, 81 bp, Homo sapiens
agagcagagggcaggacccacggcagctcctctgccagcctgggaggacagatggtgtgttcagcaggccaggtgggcctg

SEQ ID NO: 87279 - DNA, 79 bp, Homo sapiens
agggcaggacccacggcagctcctctgccagcctgggaggacagatggtgtgttcagcaggccaggtgggcctgtaaga

SEQ ID NO: 87280 - DNA, 78 bp, Homo sapiens
ctctgccagcctgggaggacagatggtgtgttcagcaggccaggtgggcctgtaagagcaggaaagggactccaactg

SEQ ID NO: 87281 - DNA, 78 bp, Homo sapiens
tgggaggacagatggtgtgttcagcaggccaggtgggcctgtaagagcaggaaagggactccaactggctacaagcca

SEQ ID NO: 87282 - DNA, 76 bp, Homo sapiens
gatggtgtgttcagcaggccaggtgggcctgtaagagcaggaaagggactccaactggctacaagccaagtgtaat

SEQ ID NO: 87283 - DNA, 77 bp, Homo sapiens
tgtgttcagcaggccaggtgggcctgtaagagcaggaaagggactccaactggctacaagccaagtgtaattcagtg

SEQ ID NO: 87284 - DNA, 75 bp, Homo sapiens
aggtgggcctgtaagagcaggaaagggactccaactggctacaagccaagtgtaattcagtggccggcatagcaa

SEQ ID NO: 87285 - DNA, 74 bp, Homo sapiens
tgtaagagcaggaaagggactccaactggctacaagccaagtgtaattcagtggccggcatagcaagtattttt

SEQ ID NO: 87286 - DNA, 72 bp, Homo sapiens
agcaggaaagggactccaactggctacaagccaagtgtaattcagtggccggcatagcaagtattttttttc

SEQ ID NO: 87287 - DNA, 75 bp, Homo sapiens
accgcacccagcccgcagcagatatttctatctgcattcacgaaggtgcatagaaagcttatggaaaagggtttt

SEQ ID NO: 87288 - DNA, 76 bp, Homo sapiens
agcccgcagcagatatttctatctgcattcacgaaggtgcatagaaagcttatggaaaagggtttttcagaaatct

SEQ ID NO: 87289 - DNA, 75 bp, Homo sapiens
gatatttctatctgcattcacgaaggtgcatagaaagcttatggaaaagggtttttcagaaatcttgtagacaaa

SEQ ID NO: 87290 - DNA, 77 bp, Homo sapiens
tctatctgcattcacgaaggtgcatagaaagcttatggaaaagggtttttcagaaatcttgtagacaaaaatatgca

SEQ ID NO: 87291 - DNA, 73 bp, Homo sapiens
gaaggtgcatagaaagcttatggaaaagggtttttcagaaatcttgtagacaaaaatatgcagattgcccaaa

SEQ ID NO: 87292 - DNA, 74 bp, Homo sapiens
tgcatagaaagcttatggaaaagggtttttcagaaatcttgtagacaaaaatatgcagattgcccaaaactgtg

SEQ ID NO: 87293 - DNA, 72 bp, Homo sapiens
ttatggaaaagggtttttcagaaatcttgtagacaaaaatatgcagattgcccaaaactgtggcctctacac

SEQ ID NO: 87294 - DNA, 76 bp, Homo sapiens
agaaatcttgtagacaaaaatatgcagattgcccaaaactgtggcctctacacgctccacgcaccttgcttgcttt

SEQ ID NO: 87295 - DNA, 77 bp, Homo sapiens
gtagacaaaaatatgcagattgcccaaaactgtggcctctacacgctccacgcaccttgcttgcttttcccaggaca

SEQ ID NO: 87296 - DNA, 82 bp, Homo sapiens
atatgcagattgcccaaaactgtggcctctacacgctccacgcaccttgcttgcttttcccaggacagcacgctgagcaggc

SEQ ID NO: 87297 - DNA, 76 bp, Homo sapiens
aaaactgtggcctctacacgctccacgcaccttgcttgcttttcccaggacagcacgctgagcaggccaccttcct

SEQ ID NO: 87298 - DNA, 77 bp, Homo sapiens
cctctacacgctccacgcaccttgcttgcttttcccaggacagcacgctgagcaggccaccttcctttctgcccaat

SEQ ID NO: 87299 - DNA, 77 bp, Homo sapiens
cttgcttgcttttcccaggacagcacgctgagcaggccaccttcctttctgcccaatttcctgcatccccacttgga

SEQ ID NO: 87300 - DNA, 78 bp, Homo sapiens
ttgcttttcccaggacagcacgctgagcaggccaccttcctttctgcccaatttcctgcatccccacttggagactga

SEQ ID NO: 87301 - DNA, 75 bp, Homo sapiens
aggacagcacgctgagcaggccaccttcctttctgcccaatttcctgcatccccacttggagactgaccctcccc

SEQ ID NO: 87302 - DNA, 74 bp, Homo sapiens
agcaggccaccttcctttctgcccaatttcctgcatccccacttggagactgaccctccccgcaccctcagcaa

SEQ ID NO: 87303 - DNA, 74 bp, Homo sapiens
ttctgcccaatttcctgcatccccacttggagactgaccctccccgcaccctcagcaatcctggatctgttttt

SEQ ID NO: 87304 - DNA, 73 bp, Homo sapiens
tttcctgcatccccacttggagactgaccctccccgcaccctcagcaatcctggatctgtttttttgtcccta

SEQ ID NO: 87305 - DNA, 70 bp, Homo sapiens
acttggagactgaccctccccgcaccctcagcaatcctggatctgtttttttgtccctatggttttgcct

SEQ ID NO: 87306 - DNA, 70 bp, Homo sapiens
actgaccctccccgcaccctcagcaatcctggatctgtttttttgtccctatggttttgcctttccagaa

SEQ ID NO: 87307 - DNA, 73 bp, Homo sapiens
cgcaccctcagcaatcctggatctgtttttttgtccctatggttttgcctttccagaaagtcttatcaatgga

SEQ ID NO: 87308 - DNA, 73 bp, Homo sapiens
agcaatcctggatctgtttttttgtccctatggttttgcctttccagaaagtcttatcaatggaatcacataa

SEQ ID NO: 87309 - DNA, 72 bp, Homo sapiens
atctgtttttttgtccctatggttttgcctttccagaaagtcttatcaatggaatcacataagatgagtttc

SEQ ID NO: 87310 - DNA, 71 bp, Homo sapiens
tttttgtccctatggttttgcctttccagaaagtcttatcaatggaatcacataagatgagtttcccgtgg

SEQ ID NO: 87311 - DNA, 73 bp, Homo sapiens
atggttttgcctttccagaaagtcttatcaatggaatcacataagatgagtttcccgtggtccttgcaacaac

SEQ ID NO: 87312 - DNA, 76 bp, Homo sapiens
tttccagaaagtcttatcaatggaatcacataagatgagtttcccgtggtccttgcaacaactgagcataaacttg

SEQ ID NO: 87313 - DNA, 75 bp, Homo sapiens
atggaatcacataagatgagtttcccgtggtccttgcaacaactgagcataaacttgtggcttaaaacaatggaa

SEQ ID NO: 87314 - DNA, 73 bp, Homo sapiens
cttgcaacaactgagcataaacttgtggcttaaaacaatggaaactggttctctcacggactgggggccagaa

SEQ ID NO: 87315 - DNA, 71 bp, Homo sapiens
aacaactgagcataaacttgtggcttaaaacaatggaaactggttctctcacggactgggggccagaagtc

SEQ ID NO: 87316 - DNA, 72 bp, Homo sapiens
ttaaaacaatggaaactggttctctcacggactgggggccagaagtctgaaatccaagtgttagcaggctcc

SEQ ID NO: 87317 - DNA, 71 bp, Homo sapiens
aatggaaactggttctctcacggactgggggccagaagtctgaaatccaagtgttagcaggctccctcctt

SEQ ID NO: 87318 - DNA, 72 bp, Homo sapiens
gttctctcacggactgggggccagaagtctgaaatccaagtgttagcaggctccctccttttgggggctcta

SEQ ID NO: 87319 - DNA, 69 bp, Homo sapiens
agaagtctgaaatccaagtgttagcaggctccctccttttgggggctctaggggaggacctttcctggc

SEQ ID NO: 87320 - DNA, 68 bp, Homo sapiens
aaatccaagtgttagcaggctccctccttttgggggctctaggggaggacctttcctggcctcttcac

SEQ ID NO: 87321 - DNA, 72 bp, Homo sapiens
agtgttagcaggctccctccttttgggggctctaggggaggacctttcctggcctcttcacctgctgcaggc

SEQ ID NO: 87322 - DNA, 73 bp, Homo sapiens
tccctccttttgggggctctaggggaggacctttcctggcctcttcacctgctgcaggctcaggcactccctg

SEQ ID NO: 87323 - DNA, 79 bp, Homo sapiens
ggggctctaggggaggacctttcctggcctcttcacctgctgcaggctcaggcactccctggcttgtggctgcatcacc

SEQ ID NO: 87324 - DNA, 81 bp, Homo sapiens
gggaggacctttcctggcctcttcacctgctgcaggctcaggcactccctggcttgtggctgcatcaccctaatctctgcc

SEQ ID NO: 87325 - DNA, 81 bp, Homo sapiens
acctttcctggcctcttcacctgctgcaggctcaggcactccctggcttgtggctgcatcaccctaatctctgcccactgg

SEQ ID NO: 87326 - DNA, 86 bp, Homo sapiens
tcttcacctgctgcaggctcaggcactccctggcttgtggctgcatcaccctaatctctgcccactggggtcatgcagccttcaag

SEQ ID NO: 87327 - DNA, 85 bp, Homo sapiens
tgcaggctcaggcactccctggcttgtggctgcatcaccctaatctctgcccactggggtcatgcagccttcaagtcctcttctg

SEQ ID NO: 87328 - DNA, 82 bp, Homo sapiens
aggcactccctggcttgtggctgcatcaccctaatctctgcccactggggtcatgcagccttcaagtcctcttctgtctaca

SEQ ID NO: 87329 - DNA, 82 bp, Homo sapiens
ggcttgtggctgcatcaccctaatctctgcccactggggtcatgcagccttcaagtcctcttctgtctacattaaatctgtc

SEQ ID NO: 87330 - DNA, 81 bp, Homo sapiens
tgcatcaccctaatctctgcccactggggtcatgcagccttcaagtcctcttctgtctacattaaatctgtccctctctta

SEQ ID NO: 87331 - DNA, 79 bp, Homo sapiens
ccactggggtcatgcagccttcaagtcctcttctgtctacattaaatctgtccctctcttacgaggacacttgtgatga

SEQ ID NO: 87332 - DNA, 76 bp, Homo sapiens
ttgtgatgacaaacagggaccacccagataatgcagggtaacctccccatctcaagatccttaacctaatctcatc

SEQ ID NO: 87333 - DNA, 74 bp, Homo sapiens
acaaacagggaccacccagataatgcagggtaacctccccatctcaagatccttaacctaatctcatctgcaaa

SEQ ID NO: 87334 - DNA, 73 bp, Homo sapiens
ctcaagatccttaacctaatctcatctgcaaagtccctttttccacagaaggttacactcacaggttcctgga

SEQ ID NO: 87335 - DNA, 73 bp, Homo sapiens
atccttaacctaatctcatctgcaaagtccctttttccacagaaggttacactcacaggttcctggaatctgc

SEQ ID NO: 87336 - DNA, 79 bp, Homo sapiens
ctaatctcatctgcaaagtccctttttccacagaaggttacactcacaggttcctggaatctgctgtggccatgattca

SEQ ID NO: 87337 - DNA, 74 bp, Homo sapiens
aaagtccctttttccacagaaggttacactcacaggttcctggaatctgctgtggccatgattcagccaaccac

SEQ ID NO: 87338 - DNA, 81 bp, Homo sapiens
aaggttacactcacaggttcctggaatctgctgtggccatgattcagccaaccacctactcagcatgacgcctttgagatc

SEQ ID NO: 87339 - DNA, 86 bp, Homo sapiens
tggaatctgctgtggccatgattcagccaaccacctactcagcatgacgcctttgagatccatcctgtgtgttgccccgcagtata

SEQ ID NO: 87340 - DNA, 82 bp, Homo sapiens
ctgtggccatgattcagccaaccacctactcagcatgacgcctttgagatccatcctgtgtgttgccccgcagtataaatac

SEQ ID NO: 87341 - DNA, 78 bp, Homo sapiens
attcagccaaccacctactcagcatgacgcctttgagatccatcctgtgtgttgccccgcagtataaatacgccacct

SEQ ID NO: 87342 - DNA, 75 bp, Homo sapiens
aaccacctactcagcatgacgcctttgagatccatcctgtgtgttgccccgcagtataaatacgccaccttcccg

SEQ ID NO: 87343 - DNA, 80 bp, Homo sapiens
actcagcatgacgcctttgagatccatcctgtgtgttgccccgcagtataaatacgccaccttcccgtgcatccatttgc

SEQ ID NO: 87344 - DNA, 76 bp, Homo sapiens
atcctgtgtgttgccccgcagtataaatacgccaccttcccgtgcatccatttgctggatgaaggacacaggttgt

SEQ ID NO: 87345 - DNA, 76 bp, Homo sapiens
gtgtgttgccccgcagtataaatacgccaccttcccgtgcatccatttgctggatgaaggacacaggttgtttcca

SEQ ID NO: 87346 - DNA, 75 bp, Homo sapiens
agtataaatacgccaccttcccgtgcatccatttgctggatgaaggacacaggttgtttccagtctggagaatta

SEQ ID NO: 87347 - DNA, 77 bp, Homo sapiens
aatacgccaccttcccgtgcatccatttgctggatgaaggacacaggttgtttccagtctggagaattaatgaatca

SEQ ID NO: 87348 - DNA, 80 bp, Homo sapiens
ttcccgtgcatccatttgctggatgaaggacacaggttgtttccagtctggagaattaatgaatcaagcagctataaata

SEQ ID NO: 87349 - DNA, 81 bp, Homo sapiens
atccatttgctggatgaaggacacaggttgtttccagtctggagaattaatgaatcaagcagctataaatactcatggaca

SEQ ID NO: 87350 - DNA, 75 bp, Homo sapiens
ggttgtttccagtctggagaattaatgaatcaagcagctataaatactcatggacaggtttttctgtggacgtgt

SEQ ID NO: 87351 - DNA, 76 bp, Homo sapiens
tttccagtctggagaattaatgaatcaagcagctataaatactcatggacaggtttttctgtggacgtgttttcat

SEQ ID NO: 87352 - DNA, 75 bp, Homo sapiens
aattaatgaatcaagcagctataaatactcatggacaggtttttctgtggacgtgttttcatttcacttggtgaa

SEQ ID NO: 87353 - DNA, 72 bp, Homo sapiens
tataaatactcatggacaggtttttctgtggacgtgttttcatttcacttggtgaacacccaggagcccgac

SEQ ID NO: 87354 - DNA, 71 bp, Homo sapiens
atggacaggtttttctgtggacgtgttttcatttcacttggtgaacacccaggagcccgactgctgggtta

SEQ ID NO: 87355 - DNA, 71 bp, Homo sapiens
cgtgttttcatttcacttggtgaacacccaggagcccgactgctgggttacagagtaggtgtacatttaat

SEQ ID NO: 87356 - DNA, 73 bp, Homo sapiens
cttggtgaacacccaggagcccgactgctgggttacagagtaggtgtacatttaatttaatatgaaactgcca

SEQ ID NO: 87357 - DNA, 73 bp, Homo sapiens
aggagcccgactgctgggttacagagtaggtgtacatttaatttaatatgaaactgccaggctggctcccaaa

SEQ ID NO: 87358 - DNA, 74 bp, Homo sapiens
ttacagagtaggtgtacatttaatttaatatgaaactgccaggctggctcccaaagttgctgtaccattttgta

SEQ ID NO: 87359 - DNA, 74 bp, Homo sapiens
taggtgtacatttaatttaatatgaaactgccaggctggctcccaaagttgctgtaccattttgtactgccgcc

SEQ ID NO: 87360 - DNA, 76 bp, Homo sapiens
tttaatttaatatgaaactgccaggctggctcccaaagttgctgtaccattttgtactgccgccggcagcgaatga

SEQ ID NO: 87361 - DNA, 79 bp, Homo sapiens
tatgaaactgccaggctggctcccaaagttgctgtaccattttgtactgccgccggcagcgaatgagagttcctgttgc

SEQ ID NO: 87362 - DNA, 77 bp, Homo sapiens
aggctggctcccaaagttgctgtaccattttgtactgccgccggcagcgaatgagagttcctgttgctccccatcca

SEQ ID NO: 87363 - DNA, 79 bp, Homo sapiens
taccattttgtactgccgccggcagcgaatgagagttcctgttgctccccatccacgtcaacatttagtgctgtcagct

SEQ ID NO: 87364 - DNA, 78 bp, Homo sapiens
tactgccgccggcagcgaatgagagttcctgttgctccccatccacgtcaacatttagtgctgtcagcttatttaaaa

SEQ ID NO: 87365 - DNA, 81 bp, Homo sapiens
gcagcgaatgagagttcctgttgctccccatccacgtcaacatttagtgctgtcagcttatttaaaatgtcagccattctg

SEQ ID NO: 87366 - DNA, 76 bp, Homo sapiens
agagttcctgttgctccccatccacgtcaacatttagtgctgtcagcttatttaaaatgtcagccattctggtagg

SEQ ID NO: 87367 - DNA, 81 bp, Homo sapiens
atccacgtcaacatttagtgctgtcagcttatttaaaatgtcagccattctggtaggtgtgtggtgcagtgacagctcgtg

SEQ ID NO: 87368 - DNA, 80 bp, Homo sapiens
aacatttagtgctgtcagcttatttaaaatgtcagccattctggtaggtgtgtggtgcagtgacagctcgtggaggttca

SEQ ID NO: 87369 - DNA, 78 bp, Homo sapiens
tgtcagcttatttaaaatgtcagccattctggtaggtgtgtggtgcagtgacagctcgtggaggttcatgtttgggtt

SEQ ID NO: 87370 - DNA, 82 bp, Homo sapiens
tcagccattctggtaggtgtgtggtgcagtgacagctcgtggaggttcatgtttgggtttccctgctgattaagcatgttga

SEQ ID NO: 87371 - DNA, 81 bp, Homo sapiens
ttctggtaggtgtgtggtgcagtgacagctcgtggaggttcatgtttgggtttccctgctgattaagcatgttgagcatct

SEQ ID NO: 87372 - DNA, 80 bp, Homo sapiens
tggtgcagtgacagctcgtggaggttcatgtttgggtttccctgctgattaagcatgttgagcatctttttacaggctaa

SEQ ID NO: 87373 - DNA, 78 bp, Homo sapiens
acagctcgtggaggttcatgtttgggtttccctgctgattaagcatgttgagcatctttttacaggctaatgtgccat

SEQ ID NO: 87374 - DNA, 79 bp, Homo sapiens
tttgggtttccctgctgattaagcatgttgagcatctttttacaggctaatgtgccattcttctagcttcagtggtgaa

SEQ ID NO: 87375 - DNA, 82 bp, Homo sapiens
ttccctgctgattaagcatgttgagcatctttttacaggctaatgtgccattcttctagcttcagtggtgaagctgtacaaa

SEQ ID NO: 87376 - DNA, 80 bp, Homo sapiens
attaagcatgttgagcatctttttacaggctaatgtgccattcttctagcttcagtggtgaagctgtacaaatctttatc

SEQ ID NO: 87377 - DNA, 76 bp, Homo sapiens
agcatctttttacaggctaatgtgccattcttctagcttcagtggtgaagctgtacaaatctttatcccattttta

SEQ ID NO: 87378 - DNA, 73 bp, Homo sapiens
ctttttacaggctaatgtgccattcttctagcttcagtggtgaagctgtacaaatctttatcccatttttaaa

SEQ ID NO: 87379 - DNA, 72 bp, Homo sapiens
aatgtgccattcttctagcttcagtggtgaagctgtacaaatctttatcccatttttaaaaattgggtcatt

SEQ ID NO: 87380 - DNA, 70 bp, Homo sapiens
ttcttctagcttcagtggtgaagctgtacaaatctttatcccatttttaaaaattgggtcattttcttac

SEQ ID NO: 87381 - DNA, 68 bp, Homo sapiens
gcttcagtggtgaagctgtacaaatctttatcccatttttaaaaattgggtcattttcttactaagtt

SEQ ID NO: 87382 - DNA, 65 bp, Homo sapiens
gaagctgtacaaatctttatcccatttttaaaaattgggtcattttcttactaagttttgaggtt

SEQ ID NO: 87383 - DNA, 61 bp, Homo sapiens
caaatctttatcccatttttaaaaattgggtcattttcttactaagttttgaggttttttt

SEQ ID NO: 87384 - DNA, 69 bp, Homo sapiens
ttttttttttatatacaagagctttatcagataaattttacattttactcctagtccatggcttgtctt

SEQ ID NO: 87385 - DNA, 72 bp, Homo sapiens
tttttatatacaagagctttatcagataaattttacattttactcctagtccatggcttgtcttttcattcc

SEQ ID NO: 87386 - DNA, 75 bp, Homo sapiens
actgcgcctggactgcctttccattctcttaacagtatctctcaaaatacagaagttcttaattttgatggagtg

SEQ ID NO: 87387 - DNA, 72 bp, Homo sapiens
ggactgcctttccattctcttaacagtatctctcaaaatacagaagttcttaattttgatggagtggaattt

SEQ ID NO: 87388 - DNA, 71 bp, Homo sapiens
cctttccattctcttaacagtatctctcaaaatacagaagttcttaattttgatggagtggaatttttcaa

SEQ ID NO: 87389 - DNA, 69 bp, Homo sapiens
ctcttaacagtatctctcaaaatacagaagttcttaattttgatggagtggaatttttcaatttttttc

SEQ ID NO: 87390 - DNA, 63 bp, Homo sapiens
atttttttcttttatgggtgggtcttgattttgtgtcttagttcctcccatctttttggtttt

SEQ ID NO: 87391 - DNA, 66 bp, Homo sapiens
tttcttttatgggtgggtcttgattttgtgtcttagttcctcccatctttttggtttttgttgttg

SEQ ID NO: 87392 - DNA, 72 bp, Homo sapiens
taagcgtgagccatcacactcccatcttttttttaaatagctctattttaggaaaatcctccaaactgccat

SEQ ID NO: 87393 - DNA, 70 bp, Homo sapiens
gccatcacactcccatcttttttttaaatagctctattttaggaaaatcctccaaactgccattctttac

SEQ ID NO: 87394 - DNA, 66 bp, Homo sapiens
ccatcttttttttaaatagctctattttaggaaaatcctccaaactgccattctttaccaactccc

SEQ ID NO: 87395 - DNA, 66 bp, Homo sapiens
ttttttaaatagctctattttaggaaaatcctccaaactgccattctttaccaactcccctctccc

SEQ ID NO: 87396 - DNA, 68 bp, Homo sapiens
tagctctattttaggaaaatcctccaaactgccattctttaccaactcccctctcccctcccaaacta

SEQ ID NO: 87397 - DNA, 69 bp, Homo sapiens
tttaggaaaatcctccaaactgccattctttaccaactcccctctcccctcccaaactagcagctctgg

SEQ ID NO: 87398 - DNA, 72 bp, Homo sapiens
tccaaactgccattctttaccaactcccctctcccctcccaaactagcagctctgggtaactcctgcctaca

SEQ ID NO: 87399 - DNA, 69 bp, Homo sapiens
attctttaccaactcccctctcccctcccaaactagcagctctgggtaactcctgcctacacccgtggc

SEQ ID NO: 87400 - DNA, 73 bp, Homo sapiens
taccaactcccctctcccctcccaaactagcagctctgggtaactcctgcctacacccgtggctgccacagcc

SEQ ID NO: 87401 - DNA, 73 bp, Homo sapiens
tcccctcccaaactagcagctctgggtaactcctgcctacacccgtggctgccacagcccccagtgaagggtc

SEQ ID NO: 87402 - DNA, 76 bp, Homo sapiens
tcccaaactagcagctctgggtaactcctgcctacacccgtggctgccacagcccccagtgaagggtctctcagat

SEQ ID NO: 87403 - DNA, 75 bp, Homo sapiens
aaactagcagctctgggtaactcctgcctacacccgtggctgccacagcccccagtgaagggtctctcagattcc

SEQ ID NO: 87404 - DNA, 75 bp, Homo sapiens
actagcagctctgggtaactcctgcctacacccgtggctgccacagcccccagtgaagggtctctcagattcctt

SEQ ID NO: 87405 - DNA, 77 bp, Homo sapiens
agctctgggtaactcctgcctacacccgtggctgccacagcccccagtgaagggtctctcagattcctttgtctgca

SEQ ID NO: 87406 - DNA, 78 bp, Homo sapiens
tgggtaactcctgcctacacccgtggctgccacagcccccagtgaagggtctctcagattcctttgtctgcatgcacc

SEQ ID NO: 87407 - DNA, 78 bp, Homo sapiens
taactcctgcctacacccgtggctgccacagcccccagtgaagggtctctcagattcctttgtctgcatgcaccctgg

SEQ ID NO: 87408 - DNA, 80 bp, Homo sapiens
ctacacccgtggctgccacagcccccagtgaagggtctctcagattcctttgtctgcatgcaccctgggtcatgaccaca

SEQ ID NO: 87409 - DNA, 84 bp, Homo sapiens
tggctgccacagcccccagtgaagggtctctcagattcctttgtctgcatgcaccctgggtcatgaccacagatgctccctgga

SEQ ID NO: 87410 - DNA, 83 bp, Homo sapiens
tgccacagcccccagtgaagggtctctcagattcctttgtctgcatgcaccctgggtcatgaccacagatgctccctggatat

SEQ ID NO: 87411 - DNA, 81 bp, Homo sapiens
acagcccccagtgaagggtctctcagattcctttgtctgcatgcaccctgggtcatgaccacagatgctccctggatattc

SEQ ID NO: 87412 - DNA, 80 bp, Homo sapiens
cagattcctttgtctgcatgcaccctgggtcatgaccacagatgctccctggatattccccggatgccaccgcccacctg

SEQ ID NO: 87413 - DNA, 80 bp, Homo sapiens
tcctttgtctgcatgcaccctgggtcatgaccacagatgctccctggatattccccggatgccaccgcccacctggcagt

SEQ ID NO: 87414 - DNA, 80 bp, Homo sapiens
tgcaccctgggtcatgaccacagatgctccctggatattccccggatgccaccgcccacctggcagttgcagtgcagggt

SEQ ID NO: 87415 - DNA, 79 bp, Homo sapiens
gtcatgaccacagatgctccctggatattccccggatgccaccgcccacctggcagttgcagtgcagggtttttggaca

SEQ ID NO: 87416 - DNA, 77 bp, Homo sapiens
acagatgctccctggatattccccggatgccaccgcccacctggcagttgcagtgcagggtttttggacactatcca

SEQ ID NO: 87417 - DNA, 73 bp, Homo sapiens
cccggatgccaccgcccacctggcagttgcagtgcagggtttttggacactatccaggtccttcttccagaag

SEQ ID NO: 87418 - DNA, 78 bp, Homo sapiens
acctggcagttgcagtgcagggtttttggacactatccaggtccttcttccagaaggcgctcagcaggtgagcagaaa

SEQ ID NO: 87419 - DNA, 80 bp, Homo sapiens
tgcagggtttttggacactatccaggtccttcttccagaaggcgctcagcaggtgagcagaaagtggcctgtgtctcatg

SEQ ID NO: 87420 - DNA, 78 bp, Homo sapiens
gtttttggacactatccaggtccttcttccagaaggcgctcagcaggtgagcagaaagtggcctgtgtctcatgggaa

SEQ ID NO: 87421 - DNA, 80 bp, Homo sapiens
actatccaggtccttcttccagaaggcgctcagcaggtgagcagaaagtggcctgtgtctcatgggaagcccctcagatg

SEQ ID NO: 87422 - DNA, 82 bp, Homo sapiens
tccttcttccagaaggcgctcagcaggtgagcagaaagtggcctgtgtctcatgggaagcccctcagatgtctgtccattcc

SEQ ID NO: 87423 - DNA, 85 bp, Homo sapiens
agaaggcgctcagcaggtgagcagaaagtggcctgtgtctcatgggaagcccctcagatgtctgtccattcctgcgtcatagctg

SEQ ID NO: 87424 - DNA, 79 bp, Homo sapiens
aggtgagcagaaagtggcctgtgtctcatgggaagcccctcagatgtctgtccattcctgcgtcatagctgggggtggg

SEQ ID NO: 87425 - DNA, 79 bp, Homo sapiens
agcagaaagtggcctgtgtctcatgggaagcccctcagatgtctgtccattcctgcgtcatagctgggggtgggggagc

SEQ ID NO: 87426 - DNA, 80 bp, Homo sapiens
tgtgtctcatgggaagcccctcagatgtctgtccattcctgcgtcatagctgggggtgggggagctgcttggactccctg

SEQ ID NO: 87427 - DNA, 77 bp, Homo sapiens
ggaagcccctcagatgtctgtccattcctgcgtcatagctgggggtgggggagctgcttggactccctgtccgtaga

SEQ ID NO: 87428 - DNA, 76 bp, Homo sapiens
cgtcatagctgggggtgggggagctgcttggactccctgtccgtagaaatcacagccaaatcacacgcaaggactc

SEQ ID NO: 87429 - DNA, 73 bp, Homo sapiens
gggggtgggggagctgcttggactccctgtccgtagaaatcacagccaaatcacacgcaaggactcgtggtac

SEQ ID NO: 87430 - DNA, 77 bp, Homo sapiens
gggagctgcttggactccctgtccgtagaaatcacagccaaatcacacgcaaggactcgtggtaccacagacggcca

SEQ ID NO: 87431 - DNA, 78 bp, Homo sapiens
ttggactccctgtccgtagaaatcacagccaaatcacacgcaaggactcgtggtaccacagacggccagcctccatca

SEQ ID NO: 87432 - DNA, 77 bp, Homo sapiens
ctgtccgtagaaatcacagccaaatcacacgcaaggactcgtggtaccacagacggccagcctccatcactaaccca

SEQ ID NO: 87433 - DNA, 78 bp, Homo sapiens
atcacagccaaatcacacgcaaggactcgtggtaccacagacggccagcctccatcactaacccactctcatcctaaa

SEQ ID NO: 87434 - DNA, 77 bp, Homo sapiens
aaatcacacgcaaggactcgtggtaccacagacggccagcctccatcactaacccactctcatcctaaactgcatgg

SEQ ID NO: 87435 - DNA, 74 bp, Homo sapiens
aaggactcgtggtaccacagacggccagcctccatcactaacccactctcatcctaaactgcatgggatcgggt

SEQ ID NO: 87436 - DNA, 73 bp, Homo sapiens
cctccatcactaacccactctcatcctaaactgcatgggatcgggttccggttgttacaactgaggaaaatga

SEQ ID NO: 87437 - DNA, 73 bp, Homo sapiens
taacccactctcatcctaaactgcatgggatcgggttccggttgttacaactgaggaaaatgaggtactgaga

SEQ ID NO: 87438 - DNA, 73 bp, Homo sapiens
ctcatcctaaactgcatgggatcgggttccggttgttacaactgaggaaaatgaggtactgagagaggacagg

SEQ ID NO: 87439 - DNA, 72 bp, Homo sapiens
atgggatcgggttccggttgttacaactgaggaaaatgaggtactgagagaggacagggctgcccgaggtca

SEQ ID NO: 87440 - DNA, 74 bp, Homo sapiens
atcgggttccggttgttacaactgaggaaaatgaggtactgagagaggacagggctgcccgaggtcacagcaga

SEQ ID NO: 87441 - DNA, 78 bp, Homo sapiens
ttgttacaactgaggaaaatgaggtactgagagaggacagggctgcccgaggtcacagcagacctcatcccaacctca

SEQ ID NO: 87442 - DNA, 75 bp, Homo sapiens
aggaaaatgaggtactgagagaggacagggctgcccgaggtcacagcagacctcatcccaacctcacaggaaaac

SEQ ID NO: 87443 - DNA, 78 bp, Homo sapiens
atgaggtactgagagaggacagggctgcccgaggtcacagcagacctcatcccaacctcacaggaaaactgagccctg

SEQ ID NO: 87444 - DNA, 74 bp, Homo sapiens
agagaggacagggctgcccgaggtcacagcagacctcatcccaacctcacaggaaaactgagccctggggtccc

SEQ ID NO: 87445 - DNA, 76 bp, Homo sapiens
tgcccgaggtcacagcagacctcatcccaacctcacaggaaaactgagccctggggtccccatgaagatttcacaa

SEQ ID NO: 87446 - DNA, 75 bp, Homo sapiens
ctcatcccaacctcacaggaaaactgagccctggggtccccatgaagatttcacaacttatccaacctcacatga

SEQ ID NO: 87447 - DNA, 73 bp, Homo sapiens
aacctcacaggaaaactgagccctggggtccccatgaagatttcacaacttatccaacctcacatgatcccag

SEQ ID NO: 87448 - DNA, 76 bp, Homo sapiens
ctggggtccccatgaagatttcacaacttatccaacctcacatgatcccagggtagcaggatatgacaaacattta

SEQ ID NO: 87449 - DNA, 78 bp, Homo sapiens
catgaagatttcacaacttatccaacctcacatgatcccagggtagcaggatatgacaaacatttactacacaattct

SEQ ID NO: 87450 - DNA, 77 bp, Homo sapiens
agatttcacaacttatccaacctcacatgatcccagggtagcaggatatgacaaacatttactacacaattcttcaa

SEQ ID NO: 87451 - DNA, 79 bp, Homo sapiens
tatccaacctcacatgatcccagggtagcaggatatgacaaacatttactacacaattcttcaagttacagtgcttcta

SEQ ID NO: 87452 - DNA, 78 bp, Homo sapiens
agggtagcaggatatgacaaacatttactacacaattcttcaagttacagtgcttctatgtccctgagccctgcttca

SEQ ID NO: 87453 - DNA, 81 bp, Homo sapiens
atatgacaaacatttactacacaattcttcaagttacagtgcttctatgtccctgagccctgcttcatcagacagacagaa

SEQ ID NO: 87454 - DNA, 79 bp, Homo sapiens
aaacatttactacacaattcttcaagttacagtgcttctatgtccctgagccctgcttcatcagacagacagaagtctc

SEQ ID NO: 87455 - DNA, 79 bp, Homo sapiens
actacacaattcttcaagttacagtgcttctatgtccctgagccctgcttcatcagacagacagaagtctccctccaag

SEQ ID NO: 87456 - DNA, 79 bp, Homo sapiens
tcttcaagttacagtgcttctatgtccctgagccctgcttcatcagacagacagaagtctccctccaagggagggacaa

SEQ ID NO: 87457 - DNA, 79 bp, Homo sapiens
acagtgcttctatgtccctgagccctgcttcatcagacagacagaagtctccctccaagggagggacaagcaccctgcc

SEQ ID NO: 87458 - DNA, 80 bp, Homo sapiens
tatgtccctgagccctgcttcatcagacagacagaagtctccctccaagggagggacaagcaccctgcctgccctgccca

SEQ ID NO: 87459 - DNA, 78 bp, Homo sapiens
atcagacagacagaagtctccctccaagggagggacaagcaccctgcctgccctgcccaccctgcctgcacctccatg

SEQ ID NO: 87460 - DNA, 79 bp, Homo sapiens
tccaagggagggacaagcaccctgcctgccctgcccaccctgcctgcacctccatgggtcaatctccaggcatggccca

SEQ ID NO: 87461 - DNA, 80 bp, Homo sapiens
acaagcaccctgcctgccctgcccaccctgcctgcacctccatgggtcaatctccaggcatggcccaggcctgcttccag

SEQ ID NO: 87462 - DNA, 86 bp, Homo sapiens
tgcctgccctgcccaccctgcctgcacctccatgggtcaatctccaggcatggcccaggcctgcttccaggacagtgcatctcaga

SEQ ID NO: 87463 - DNA, 88 bp, Homo sapiens
cctgcacctccatgggtcaatctccaggcatggcccaggcctgcttccaggacagtgcatctcagagccatgcaacccatgcctggca

SEQ ID NO: 87464 - DNA, 86 bp, Homo sapiens
aatctccaggcatggcccaggcctgcttccaggacagtgcatctcagagccatgcaacccatgcctggcacaagccctcctgccaa

SEQ ID NO: 87465 - DNA, 83 bp, Homo sapiens
atggcccaggcctgcttccaggacagtgcatctcagagccatgcaacccatgcctggcacaagccctcctgccaacaccttaa

SEQ ID NO: 87466 - DNA, 81 bp, Homo sapiens
ctgcttccaggacagtgcatctcagagccatgcaacccatgcctggcacaagccctcctgccaacaccttaactttgcctt

SEQ ID NO: 87467 - DNA, 80 bp, Homo sapiens
tccaggacagtgcatctcagagccatgcaacccatgcctggcacaagccctcctgccaacaccttaactttgcctttccc

SEQ ID NO: 87468 - DNA, 75 bp, Homo sapiens
atctcagagccatgcaacccatgcctggcacaagccctcctgccaacaccttaactttgcctttcccccttatta

SEQ ID NO: 87469 - DNA, 71 bp, Homo sapiens
atgcaacccatgcctggcacaagccctcctgccaacaccttaactttgcctttcccccttattattccacc

SEQ ID NO: 87470 - DNA, 71 bp, Homo sapiens
atgcctggcacaagccctcctgccaacaccttaactttgcctttcccccttattattccaccttttgcatc

SEQ ID NO: 87471 - DNA, 68 bp, Homo sapiens
acaagccctcctgccaacaccttaactttgcctttcccccttattattccaccttttgcatctgcctt

SEQ ID NO: 87472 - DNA, 67 bp, Homo sapiens
ccaacaccttaactttgcctttcccccttattattccaccttttgcatctgcctttcttcaaacagg

SEQ ID NO: 87473 - DNA, 66 bp, Homo sapiens
accttaactttgcctttcccccttattattccaccttttgcatctgcctttcttcaaacagggaaa

SEQ ID NO: 87474 - DNA, 70 bp, Homo sapiens
ctttcccccttattattccaccttttgcatctgcctttcttcaaacagggaaagacgctgtcgtatgtgg

SEQ ID NO: 87475 - DNA, 78 bp, Homo sapiens
tattattccaccttttgcatctgcctttcttcaaacagggaaagacgctgtcgtatgtgggcacctgctgcacaagta

SEQ ID NO: 87476 - DNA, 78 bp, Homo sapiens
accttttgcatctgcctttcttcaaacagggaaagacgctgtcgtatgtgggcacctgctgcacaagtacactccatg

SEQ ID NO: 87477 - DNA, 78 bp, Homo sapiens
atctgcctttcttcaaacagggaaagacgctgtcgtatgtgggcacctgctgcacaagtacactccatgggcacctgg

SEQ ID NO: 87478 - DNA, 81 bp, Homo sapiens
tcttcaaacagggaaagacgctgtcgtatgtgggcacctgctgcacaagtacactccatgggcacctgggccacagtgtca

SEQ ID NO: 87479 - DNA, 80 bp, Homo sapiens
aaagacgctgtcgtatgtgggcacctgctgcacaagtacactccatgggcacctgggccacagtgtcaggcccctctgtc

SEQ ID NO: 87480 - DNA, 80 bp, Homo sapiens
ctgtcgtatgtgggcacctgctgcacaagtacactccatgggcacctgggccacagtgtcaggcccctctgtcccctcta

SEQ ID NO: 87481 - DNA, 82 bp, Homo sapiens
acctgctgcacaagtacactccatgggcacctgggccacagtgtcaggcccctctgtcccctctagcgcactctgcagtgtc

SEQ ID NO: 87482 - DNA, 80 bp, Homo sapiens
acaagtacactccatgggcacctgggccacagtgtcaggcccctctgtcccctctagcgcactctgcagtgtctgaaaca

SEQ ID NO: 87483 - DNA, 81 bp, Homo sapiens
acactccatgggcacctgggccacagtgtcaggcccctctgtcccctctagcgcactctgcagtgtctgaaacagagcaaa

SEQ ID NO: 87484 - DNA, 85 bp, Homo sapiens
ctgggccacagtgtcaggcccctctgtcccctctagcgcactctgcagtgtctgaaacagagcaaatctgcaagtgccagtgtga

SEQ ID NO: 87485 - DNA, 86 bp, Homo sapiens
acagtgtcaggcccctctgtcccctctagcgcactctgcagtgtctgaaacagagcaaatctgcaagtgccagtgtgatgggcaca

SEQ ID NO: 87486 - DNA, 83 bp, Homo sapiens
cctctgtcccctctagcgcactctgcagtgtctgaaacagagcaaatctgcaagtgccagtgtgatgggcacagaatcccgtt

SEQ ID NO: 87487 - DNA, 86 bp, Homo sapiens
ccctctagcgcactctgcagtgtctgaaacagagcaaatctgcaagtgccagtgtgatgggcacagaatcccgtttggcagccaga

SEQ ID NO: 87488 - DNA, 85 bp, Homo sapiens
actctgcagtgtctgaaacagagcaaatctgcaagtgccagtgtgatgggcacagaatcccgtttggcagccagacgctgtggtg

SEQ ID NO: 87489 - DNA, 84 bp, Homo sapiens
agtgtctgaaacagagcaaatctgcaagtgccagtgtgatgggcacagaatcccgtttggcagccagacgctgtggtggctcac

SEQ ID NO: 87490 - DNA, 72 bp, Homo sapiens
aaaacaaaacataacaaaaccggcaaggaagcacatgaggcttcacaaccaatgctcttttgcctccacctg

SEQ ID NO: 87491 - DNA, 76 bp, Homo sapiens
aaacataacaaaaccggcaaggaagcacatgaggcttcacaaccaatgctcttttgcctccacctgtgctcctcaa

SEQ ID NO: 87492 - DNA, 79 bp, Homo sapiens
aaaccggcaaggaagcacatgaggcttcacaaccaatgctcttttgcctccacctgtgctcctcaagaggagtgcaaga

SEQ ID NO: 87493 - DNA, 79 bp, Homo sapiens
ggaagcacatgaggcttcacaaccaatgctcttttgcctccacctgtgctcctcaagaggagtgcaagagtttggtggg

SEQ ID NO: 87494 - DNA, 73 bp, Homo sapiens
ttcacaaccaatgctcttttgcctccacctgtgctcctcaagaggagtgcaagagtttggtggggttttgttt

SEQ ID NO: 87495 - DNA, 71 bp, Homo sapiens
aaccaatgctcttttgcctccacctgtgctcctcaagaggagtgcaagagtttggtggggttttgtttttc

SEQ ID NO: 87496 - DNA, 67 bp, Homo sapiens
tttttctttttaatcattcactaaaactcaccaacaacaggtactggacctaggaattttgaacgga

SEQ ID NO: 87497 - DNA, 67 bp, Homo sapiens
tttttaatcattcactaaaactcaccaacaacaggtactggacctaggaattttgaacggaaggcct

SEQ ID NO: 87498 - DNA, 67 bp, Homo sapiens
attcactaaaactcaccaacaacaggtactggacctaggaattttgaacggaaggccttcgagaaac

SEQ ID NO: 87499 - DNA, 68 bp, Homo sapiens
accaacaacaggtactggacctaggaattttgaacggaaggccttcgagaaactgccctctcaccaaa

SEQ ID NO: 87500 - DNA, 68 bp, Homo sapiens
aacaggtactggacctaggaattttgaacggaaggccttcgagaaactgccctctcaccaaacctgcc

SEQ ID NO: 87501 - DNA, 70 bp, Homo sapiens
acctaggaattttgaacggaaggccttcgagaaactgccctctcaccaaacctgccttctgcccatggtc

SEQ ID NO: 87502 - DNA, 75 bp, Homo sapiens
aaggccttcgagaaactgccctctcaccaaacctgccttctgcccatggtctgcggtgccagataacaactgctt

SEQ ID NO: 87503 - DNA, 75 bp, Homo sapiens
aaactgccctctcaccaaacctgccttctgcccatggtctgcggtgccagataacaactgctttcccccagacaa

SEQ ID NO: 87504 - DNA, 86 bp, Homo sapiens
tgccttctgcccatggtctgcggtgccagataacaactgctttcccccagacaacagtgaccatgatctgatcacatctgacaatg

SEQ ID NO: 87505 - DNA, 85 bp, Homo sapiens
catggtctgcggtgccagataacaactgctttcccccagacaacagtgaccatgatctgatcacatctgacaatggaagaagcta

SEQ ID NO: 87506 - DNA, 81 bp, Homo sapiens
cggtgccagataacaactgctttcccccagacaacagtgaccatgatctgatcacatctgacaatggaagaagctaaggga

SEQ ID NO: 87507 - DNA, 80 bp, Homo sapiens
ataacaactgctttcccccagacaacagtgaccatgatctgatcacatctgacaatggaagaagctaagggactgaccta

SEQ ID NO: 87508 - DNA, 79 bp, Homo sapiens
tttcccccagacaacagtgaccatgatctgatcacatctgacaatggaagaagctaagggactgacctaggtcactggg

SEQ ID NO: 87509 - DNA, 80 bp, Homo sapiens
agacaacagtgaccatgatctgatcacatctgacaatggaagaagctaagggactgacctaggtcactggggtcctccag

SEQ ID NO: 87510 - DNA, 83 bp, Homo sapiens
gtgaccatgatctgatcacatctgacaatggaagaagctaagggactgacctaggtcactggggtcctccagggcacagcatg

SEQ ID NO: 87511 - DNA, 79 bp, Homo sapiens
tcacatctgacaatggaagaagctaagggactgacctaggtcactggggtcctccagggcacagcatgggcctctccta

SEQ ID NO: 87512 - DNA, 77 bp, Homo sapiens
tctgacaatggaagaagctaagggactgacctaggtcactggggtcctccagggcacagcatgggcctctcctagcc

SEQ ID NO: 87513 - DNA, 72 bp, Homo sapiens
aagaagctaagggactgacctaggtcactggggtcctccagggcacagcatgggcctctcctagccctgggt

SEQ ID NO: 87514 - DNA, 74 bp, Homo sapiens
actgacctaggtcactggggtcctccagggcacagcatgggcctctcctagccctgggttcctgacgtttctga

SEQ ID NO: 87515 - DNA, 76 bp, Homo sapiens
taggtcactggggtcctccagggcacagcatgggcctctcctagccctgggttcctgacgtttctgaggtgaatga

SEQ ID NO: 87516 - DNA, 76 bp, Homo sapiens
gtcctccagggcacagcatgggcctctcctagccctgggttcctgacgtttctgaggtgaatgagaacgctctagg

SEQ ID NO: 87517 - DNA, 77 bp, Homo sapiens
acagcatgggcctctcctagccctgggttcctgacgtttctgaggtgaatgagaacgctctagggcctgacatgggc

SEQ ID NO: 87518 - DNA, 78 bp, Homo sapiens
ggttcctgacgtttctgaggtgaatgagaacgctctagggcctgacatgggccatcccctcatcagagcccaggccag

SEQ ID NO: 87519 - DNA, 79 bp, Homo sapiens
gtttctgaggtgaatgagaacgctctagggcctgacatgggccatcccctcatcagagcccaggccaggcctctgtggg

SEQ ID NO: 87520 - DNA, 78 bp, Homo sapiens
tgaatgagaacgctctagggcctgacatgggccatcccctcatcagagcccaggccaggcctctgtgggggttgggtc

SEQ ID NO: 87521 - DNA, 80 bp, Homo sapiens
acatgggccatcccctcatcagagcccaggccaggcctctgtgggggttgggtccctgagaatgcagctctgccttgcca

SEQ ID NO: 87522 - DNA, 80 bp, Homo sapiens
atcccctcatcagagcccaggccaggcctctgtgggggttgggtccctgagaatgcagctctgccttgccactgtgcttc

SEQ ID NO: 87523 - DNA, 80 bp, Homo sapiens
gttgggtccctgagaatgcagctctgccttgccactgtgcttcctgctcaggcagctaggaggtcccaaaccccattcac

SEQ ID NO: 87524 - DNA, 78 bp, Homo sapiens
ctctgccttgccactgtgcttcctgctcaggcagctaggaggtcccaaaccccattcacctccatgggactatttgga

SEQ ID NO: 87525 - DNA, 77 bp, Homo sapiens
actgtgcttcctgctcaggcagctaggaggtcccaaaccccattcacctccatgggactatttggagcccagcagaa

SEQ ID NO: 87526 - DNA, 76 bp, Homo sapiens
ttcctgctcaggcagctaggaggtcccaaaccccattcacctccatgggactatttggagcccagcagaagcggcc

SEQ ID NO: 87527 - DNA, 74 bp, Homo sapiens
agctaggaggtcccaaaccccattcacctccatgggactatttggagcccagcagaagcggcccatgggctctc

SEQ ID NO: 87528 - DNA, 73 bp, Homo sapiens
aggtcccaaaccccattcacctccatgggactatttggagcccagcagaagcggcccatgggctctcctctcc

SEQ ID NO: 87529 - DNA, 75 bp, Homo sapiens
attcacctccatgggactatttggagcccagcagaagcggcccatgggctctcctctccccaggaggcccctcca

SEQ ID NO: 87530 - DNA, 75 bp, Homo sapiens
atgggactatttggagcccagcagaagcggcccatgggctctcctctccccaggaggcccctccaggcctccatc

SEQ ID NO: 87531 - DNA, 76 bp, Homo sapiens
ctatttggagcccagcagaagcggcccatgggctctcctctccccaggaggcccctccaggcctccatctcaactc

SEQ ID NO: 87532 - DNA, 78 bp, Homo sapiens
ccatgggctctcctctccccaggaggcccctccaggcctccatctcaactcccctgcagacaaggccatgtgtgtgcc

SEQ ID NO: 87533 - DNA, 77 bp, Homo sapiens
tcctctccccaggaggcccctccaggcctccatctcaactcccctgcagacaaggccatgtgtgtgccttcgacctg

SEQ ID NO: 87534 - DNA, 78 bp, Homo sapiens
aggaggcccctccaggcctccatctcaactcccctgcagacaaggccatgtgtgtgccttcgacctgtcagtctgtag

SEQ ID NO: 87535 - DNA, 80 bp, Homo sapiens
tccaggcctccatctcaactcccctgcagacaaggccatgtgtgtgccttcgacctgtcagtctgtagggccacctcact

SEQ ID NO: 87536 - DNA, 78 bp, Homo sapiens
cctccatctcaactcccctgcagacaaggccatgtgtgtgccttcgacctgtcagtctgtagggccacctcacttttg

SEQ ID NO: 87537 - DNA, 75 bp, Homo sapiens
aactcccctgcagacaaggccatgtgtgtgccttcgacctgtcagtctgtagggccacctcacttttgggccttc

SEQ ID NO: 87538 - DNA, 77 bp, Homo sapiens
caaggccatgtgtgtgccttcgacctgtcagtctgtagggccacctcacttttgggccttccaagctcaactgctat

SEQ ID NO: 87539 - DNA, 78 bp, Homo sapiens
atgtgtgtgccttcgacctgtcagtctgtagggccacctcacttttgggccttccaagctcaactgctattagagcgc

SEQ ID NO: 87540 - DNA, 76 bp, Homo sapiens
cttcgacctgtcagtctgtagggccacctcacttttgggccttccaagctcaactgctattagagcgcctcctctc

SEQ ID NO: 87541 - DNA, 79 bp, Homo sapiens
tgtcagtctgtagggccacctcacttttgggccttccaagctcaactgctattagagcgcctcctctctgccacactcc

SEQ ID NO: 87542 - DNA, 77 bp, Homo sapiens
tagggccacctcacttttgggccttccaagctcaactgctattagagcgcctcctctctgccacactcccaaggcca

SEQ ID NO: 87543 - DNA, 75 bp, Homo sapiens
acttttgggccttccaagctcaactgctattagagcgcctcctctctgccacactcccaaggccacccgtcctca

SEQ ID NO: 87544 - DNA, 79 bp, Homo sapiens
ccttccaagctcaactgctattagagcgcctcctctctgccacactcccaaggccacccgtcctcagcctcaccacaga

SEQ ID NO: 87545 - DNA, 79 bp, Homo sapiens
aactgctattagagcgcctcctctctgccacactcccaaggccacccgtcctcagcctcaccacagagcagactggccc

SEQ ID NO: 87546 - DNA, 79 bp, Homo sapiens
attagagcgcctcctctctgccacactcccaaggccacccgtcctcagcctcaccacagagcagactggccccttctgc

SEQ ID NO: 87547 - DNA, 80 bp, Homo sapiens
tctctgccacactcccaaggccacccgtcctcagcctcaccacagagcagactggccccttctgccgagccccagtgcac

SEQ ID NO: 87548 - DNA, 76 bp, Homo sapiens
acactcccaaggccacccgtcctcagcctcaccacagagcagactggccccttctgccgagccccagtgcacccaa

SEQ ID NO: 87549 - DNA, 80 bp, Homo sapiens
gtcctcagcctcaccacagagcagactggccccttctgccgagccccagtgcacccaagctttccagctgcctccacctc

SEQ ID NO: 87550 - DNA, 76 bp, Homo sapiens
acagagcagactggccccttctgccgagccccagtgcacccaagctttccagctgcctccacctctcccctgaaaa

SEQ ID NO: 87551 - DNA, 74 bp, Homo sapiens
actggccccttctgccgagccccagtgcacccaagctttccagctgcctccacctctcccctgaaaacagctaa

SEQ ID NO: 87552 - DNA, 77 bp, Homo sapiens
ttctgccgagccccagtgcacccaagctttccagctgcctccacctctcccctgaaaacagctaacactccactatg

SEQ ID NO: 87553 - DNA, 74 bp, Homo sapiens
acccaagctttccagctgcctccacctctcccctgaaaacagctaacactccactatgggagcccatctcctcc

SEQ ID NO: 87554 - DNA, 75 bp, Homo sapiens
tttccagctgcctccacctctcccctgaaaacagctaacactccactatgggagcccatctcctcccagggccag

SEQ ID NO: 87555 - DNA, 72 bp, Homo sapiens
acctctcccctgaaaacagctaacactccactatgggagcccatctcctcccagggccagggagaccaggga

SEQ ID NO: 87556 - DNA, 72 bp, Homo sapiens
ctccactatgggagcccatctcctcccagggccagggagaccagggagaccagggagaccaggtctggcccc

SEQ ID NO: 87557 - DNA, 72 bp, Homo sapiens
tcccagggccagggagaccagggagaccagggagaccaggtctggcccccaactctaaggctcatcttagag

SEQ ID NO: 87558 - DNA, 73 bp, Homo sapiens
agggagaccagggagaccagggagaccaggtctggcccccaactctaaggctcatcttagaggcgagattcag

SEQ ID NO: 87559 - DNA, 74 bp, Homo sapiens
agggagaccagggagaccaggtctggcccccaactctaaggctcatcttagaggcgagattcaggcccagccca

SEQ ID NO: 87560 - DNA, 73 bp, Homo sapiens
agggagaccaggtctggcccccaactctaaggctcatcttagaggcgagattcaggcccagcccagggtgccc

SEQ ID NO: 87561 - DNA, 75 bp, Homo sapiens
tggcccccaactctaaggctcatcttagaggcgagattcaggcccagcccagggtgccccatgaggcctggtggt

SEQ ID NO: 87562 - DNA, 77 bp, Homo sapiens
aactctaaggctcatcttagaggcgagattcaggcccagcccagggtgccccatgaggcctggtggttggaggcaga

SEQ ID NO: 87563 - DNA, 76 bp, Homo sapiens
tcatcttagaggcgagattcaggcccagcccagggtgccccatgaggcctggtggttggaggcagagggtatccct

SEQ ID NO: 87564 - DNA, 74 bp, Homo sapiens
gcgagattcaggcccagcccagggtgccccatgaggcctggtggttggaggcagagggtatcccttgcccaaat

SEQ ID NO: 87565 - DNA, 72 bp, Homo sapiens
attcaggcccagcccagggtgccccatgaggcctggtggttggaggcagagggtatcccttgcccaaattcg

SEQ ID NO: 87566 - DNA, 75 bp, Homo sapiens
agggtgccccatgaggcctggtggttggaggcagagggtatcccttgcccaaattcgtgccacattcacagtcac

SEQ ID NO: 87567 - DNA, 76 bp, Homo sapiens
atgaggcctggtggttggaggcagagggtatcccttgcccaaattcgtgccacattcacagtcactgggaaagcta

SEQ ID NO: 87568 - DNA, 73 bp, Homo sapiens
ctggtggttggaggcagagggtatcccttgcccaaattcgtgccacattcacagtcactgggaaagctacggg

SEQ ID NO: 87569 - DNA, 71 bp, Homo sapiens
gggtatcccttgcccaaattcgtgccacattcacagtcactgggaaagctacggggatgggccgggcgcgg

SEQ ID NO: 87570 - DNA, 72 bp, Homo sapiens
aaaaaaaagaaagcaagctacggggatgaaaacagttaaggcactctcctggatgcatcacgaagcccctca

SEQ ID NO: 87571 - DNA, 75 bp, Homo sapiens
aagaaagcaagctacggggatgaaaacagttaaggcactctcctggatgcatcacgaagcccctcagccactgtt

SEQ ID NO: 87572 - DNA, 77 bp, Homo sapiens
agctacggggatgaaaacagttaaggcactctcctggatgcatcacgaagcccctcagccactgtttctccctgaga

SEQ ID NO: 87573 - DNA, 79 bp, Homo sapiens
atgaaaacagttaaggcactctcctggatgcatcacgaagcccctcagccactgtttctccctgagagcacagccaccc

SEQ ID NO: 87574 - DNA, 80 bp, Homo sapiens
ttaaggcactctcctggatgcatcacgaagcccctcagccactgtttctccctgagagcacagccaccccctgctgacct

SEQ ID NO: 87575 - DNA, 82 bp, Homo sapiens
tggatgcatcacgaagcccctcagccactgtttctccctgagagcacagccaccccctgctgaccttggcaggaagcaacaa

SEQ ID NO: 87576 - DNA, 78 bp, Homo sapiens
atcacgaagcccctcagccactgtttctccctgagagcacagccaccccctgctgaccttggcaggaagcaacaagcc

SEQ ID NO: 87577 - DNA, 80 bp, Homo sapiens
tcagccactgtttctccctgagagcacagccaccccctgctgaccttggcaggaagcaacaagccccacagcacaaacac

SEQ ID NO: 87578 - DNA, 76 bp, Homo sapiens
actgtttctccctgagagcacagccaccccctgctgaccttggcaggaagcaacaagccccacagcacaaacaccc

SEQ ID NO: 87579 - DNA, 77 bp, Homo sapiens
cctgagagcacagccaccccctgctgaccttggcaggaagcaacaagccccacagcacaaacacccccaggctgccc

SEQ ID NO: 87580 - DNA, 75 bp, Homo sapiens
agccaccccctgctgaccttggcaggaagcaacaagccccacagcacaaacacccccaggctgccctgcagaggg

SEQ ID NO: 87581 - DNA, 75 bp, Homo sapiens
tgaccttggcaggaagcaacaagccccacagcacaaacacccccaggctgccctgcagagggggctccacctcgg

SEQ ID NO: 87582 - DNA, 73 bp, Homo sapiens
aggaagcaacaagccccacagcacaaacacccccaggctgccctgcagagggggctccacctcgggtgggagc

SEQ ID NO: 87583 - DNA, 73 bp, Homo sapiens
aacaagccccacagcacaaacacccccaggctgccctgcagagggggctccacctcgggtgggagccctgcaa

SEQ ID NO: 87584 - DNA, 71 bp, Homo sapiens
cacaaacacccccaggctgccctgcagagggggctccacctcgggtgggagccctgcaacctgggaaggaa

SEQ ID NO: 87585 - DNA, 71 bp, Homo sapiens
cccaggctgccctgcagagggggctccacctcgggtgggagccctgcaacctgggaaggaatctggggagg

SEQ ID NO: 87586 - DNA, 70 bp, Homo sapiens
ccctgcagagggggctccacctcgggtgggagccctgcaacctgggaaggaatctggggaggggcttctg

SEQ ID NO: 87587 - DNA, 72 bp, Homo sapiens
gggctccacctcgggtgggagccctgcaacctgggaaggaatctggggaggggcttctgtgtgaagcttagc

SEQ ID NO: 87588 - DNA, 72 bp, Homo sapiens
ccacctcgggtgggagccctgcaacctgggaaggaatctggggaggggcttctgtgtgaagcttagctcagg

SEQ ID NO: 87589 - DNA, 73 bp, Homo sapiens
gccctgcaacctgggaaggaatctggggaggggcttctgtgtgaagcttagctcagggccccaagggcggtca

SEQ ID NO: 87590 - DNA, 72 bp, Homo sapiens
aacctgggaaggaatctggggaggggcttctgtgtgaagcttagctcagggccccaagggcggtcagtgtca

SEQ ID NO: 87591 - DNA, 76 bp, Homo sapiens
aatctggggaggggcttctgtgtgaagcttagctcagggccccaagggcggtcagtgtcaggcactggctcaacag

SEQ ID NO: 87592 - DNA, 78 bp, Homo sapiens
gggcttctgtgtgaagcttagctcagggccccaagggcggtcagtgtcaggcactggctcaacaggggcaggaagaga

SEQ ID NO: 87593 - DNA, 82 bp, Homo sapiens
tgtgtgaagcttagctcagggccccaagggcggtcagtgtcaggcactggctcaacaggggcaggaagagagaggctgctga

SEQ ID NO: 87594 - DNA, 82 bp, Homo sapiens
tcagtgtcaggcactggctcaacaggggcaggaagagagaggctgctgagcacctcgtcctcaggccactctgccccgtttc

SEQ ID NO: 87595 - DNA, 79 bp, Homo sapiens
aggcactggctcaacaggggcaggaagagagaggctgctgagcacctcgtcctcaggccactctgccccgtttctaaca

SEQ ID NO: 87596 - DNA, 78 bp, Homo sapiens
aacaggggcaggaagagagaggctgctgagcacctcgtcctcaggccactctgccccgtttctaacagtctatgtaca

SEQ ID NO: 87597 - DNA, 78 bp, Homo sapiens
ggctgctgagcacctcgtcctcaggccactctgccccgtttctaacagtctatgtacaacagacccacccaagatgta

SEQ ID NO: 87598 - DNA, 73 bp, Homo sapiens
ccactctgccccgtttctaacagtctatgtacaacagacccacccaagatgtactctgtgacccagagtgggg

SEQ ID NO: 87599 - DNA, 74 bp, Homo sapiens
tttctaacagtctatgtacaacagacccacccaagatgtactctgtgacccagagtgggggtgcggtcctggga

SEQ ID NO: 87600 - DNA, 74 bp, Homo sapiens
agtctatgtacaacagacccacccaagatgtactctgtgacccagagtgggggtgcggtcctgggagtgtccac

SEQ ID NO: 87601 - DNA, 76 bp, Homo sapiens
acaacagacccacccaagatgtactctgtgacccagagtgggggtgcggtcctgggagtgtccactgtggatgtga

SEQ ID NO: 87602 - DNA, 76 bp, Homo sapiens
aagatgtactctgtgacccagagtgggggtgcggtcctgggagtgtccactgtggatgtgacccaggtcagaagga

SEQ ID NO: 87603 - DNA, 78 bp, Homo sapiens
gtactctgtgacccagagtgggggtgcggtcctgggagtgtccactgtggatgtgacccaggtcagaaggagatggca

SEQ ID NO: 87604 - DNA, 78 bp, Homo sapiens
agagtgggggtgcggtcctgggagtgtccactgtggatgtgacccaggtcagaaggagatggcagcttgccaagctac

SEQ ID NO: 87605 - DNA, 83 bp, Homo sapiens
tgcggtcctgggagtgtccactgtggatgtgacccaggtcagaaggagatggcagcttgccaagctaccaaggcacacactca

SEQ ID NO: 87606 - DNA, 82 bp, Homo sapiens
tgggagtgtccactgtggatgtgacccaggtcagaaggagatggcagcttgccaagctaccaaggcacacactcaggaccca

SEQ ID NO: 87607 - DNA, 79 bp, Homo sapiens
actgtggatgtgacccaggtcagaaggagatggcagcttgccaagctaccaaggcacacactcaggacccaggaggacc

SEQ ID NO: 87608 - DNA, 77 bp, Homo sapiens
atgtgacccaggtcagaaggagatggcagcttgccaagctaccaaggcacacactcaggacccaggaggaccgtcct

SEQ ID NO: 87609 - DNA, 74 bp, Homo sapiens
agaaggagatggcagcttgccaagctaccaaggcacacactcaggacccaggaggaccgtccttcctcctccgg

SEQ ID NO: 87610 - DNA, 74 bp, Homo sapiens
agatggcagcttgccaagctaccaaggcacacactcaggacccaggaggaccgtccttcctcctccggtggtcg

SEQ ID NO: 87611 - DNA, 71 bp, Homo sapiens
acactcaggacccaggaggaccgtccttcctcctccggtggtcggccacactcaccaaggctgcccctgag

SEQ ID NO: 87612 - DNA, 71 bp, Homo sapiens
aggaggaccgtccttcctcctccggtggtcggccacactcaccaaggctgcccctgaggccctcagagacc

SEQ ID NO: 87613 - DNA, 78 bp, Homo sapiens
ccacactcaccaaggctgcccctgaggccctcagagacccaggcggttctgagaagggagcctgtctctgaagcagaa

SEQ ID NO: 87614 - DNA, 74 bp, Homo sapiens
cctgaggccctcagagacccaggcggttctgagaagggagcctgtctctgaagcagaaaccacgccctttcacg

SEQ ID NO: 87615 - DNA, 72 bp, Homo sapiens
cctcagagacccaggcggttctgagaagggagcctgtctctgaagcagaaaccacgccctttcacggggccc

SEQ ID NO: 87616 - DNA, 73 bp, Homo sapiens
aggcggttctgagaagggagcctgtctctgaagcagaaaccacgccctttcacggggcccctgtgtcacgtca

SEQ ID NO: 87617 - DNA, 77 bp, Homo sapiens
tgagaagggagcctgtctctgaagcagaaaccacgccctttcacggggcccctgtgtcacgtcagccgcctggatga

SEQ ID NO: 87618 - DNA, 78 bp, Homo sapiens
agcctgtctctgaagcagaaaccacgccctttcacggggcccctgtgtcacgtcagccgcctggatgattcacagctc

SEQ ID NO: 87619 - DNA, 75 bp, Homo sapiens
aagcagaaaccacgccctttcacggggcccctgtgtcacgtcagccgcctggatgattcacagctccgcaccgga

SEQ ID NO: 87620 - DNA, 73 bp, Homo sapiens
aaaccacgccctttcacggggcccctgtgtcacgtcagccgcctggatgattcacagctccgcaccggactcg

SEQ ID NO: 87621 - DNA, 77 bp, Homo sapiens
tttcacggggcccctgtgtcacgtcagccgcctggatgattcacagctccgcaccggactcggctcttaccgcctca

SEQ ID NO: 87622 - DNA, 83 bp, Homo sapiens
ccctgtgtcacgtcagccgcctggatgattcacagctccgcaccggactcggctcttaccgcctcatctcattgtctgctcac

SEQ ID NO: 87623 - DNA, 76 bp, Homo sapiens
ctgcaacctctgcaaagcacccaaacccctgtcccagaagataggcaaagatcacagaaaaataagaggatgccaa

SEQ ID NO: 87624 - DNA, 77 bp, Homo sapiens
tctgcaaagcacccaaacccctgtcccagaagataggcaaagatcacagaaaaataagaggatgccaagagaatctg

SEQ ID NO: 87625 - DNA, 75 bp, Homo sapiens
ccaaacccctgtcccagaagataggcaaagatcacagaaaaataagaggatgccaagagaatctggcacccttca

SEQ ID NO: 87626 - DNA, 78 bp, Homo sapiens
tgtcccagaagataggcaaagatcacagaaaaataagaggatgccaagagaatctggcacccttcaaggcatgacccg

SEQ ID NO: 87627 - DNA, 77 bp, Homo sapiens
agaagataggcaaagatcacagaaaaataagaggatgccaagagaatctggcacccttcaaggcatgacccgtggtc

SEQ ID NO: 87628 - DNA, 77 bp, Homo sapiens
atcacagaaaaataagaggatgccaagagaatctggcacccttcaaggcatgacccgtggtccccagccagtactca

SEQ ID NO: 87629 - DNA, 76 bp, Homo sapiens
aaaaataagaggatgccaagagaatctggcacccttcaaggcatgacccgtggtccccagccagtactcactgcaa

SEQ ID NO: 87630 - DNA, 78 bp, Homo sapiens
aggatgccaagagaatctggcacccttcaaggcatgacccgtggtccccagccagtactcactgcaagggtgctctta

SEQ ID NO: 87631 - DNA, 75 bp, Homo sapiens
agagaatctggcacccttcaaggcatgacccgtggtccccagccagtactcactgcaagggtgctcttaggtccc

SEQ ID NO: 87632 - DNA, 73 bp, Homo sapiens
cttcaaggcatgacccgtggtccccagccagtactcactgcaagggtgctcttaggtccccttcccagtttga

SEQ ID NO: 87633 - DNA, 72 bp, Homo sapiens
atgacccgtggtccccagccagtactcactgcaagggtgctcttaggtccccttcccagtttgaacctgcaa

SEQ ID NO: 87634 - DNA, 75 bp, Homo sapiens
agtactcactgcaagggtgctcttaggtccccttcccagtttgaacctgcaacctgggagctgccacatctggac

SEQ ID NO: 87635 - DNA, 74 bp, Homo sapiens
actgcaagggtgctcttaggtccccttcccagtttgaacctgcaacctgggagctgccacatctggacctcagg

SEQ ID NO: 87636 - DNA, 76 bp, Homo sapiens
cttcccagtttgaacctgcaacctgggagctgccacatctggacctcagggatgtgaccttgccagccacaaaggt

SEQ ID NO: 87637 - DNA, 78 bp, Homo sapiens
agtttgaacctgcaacctgggagctgccacatctggacctcagggatgtgaccttgccagccacaaaggttggcatcg

SEQ ID NO: 87638 - DNA, 79 bp, Homo sapiens
aacctgggagctgccacatctggacctcagggatgtgaccttgccagccacaaaggttggcatcgggtcctgcctgcca

SEQ ID NO: 87639 - DNA, 80 bp, Homo sapiens
ggagctgccacatctggacctcagggatgtgaccttgccagccacaaaggttggcatcgggtcctgcctgccacctcacc

SEQ ID NO: 87640 - DNA, 79 bp, Homo sapiens
atctggacctcagggatgtgaccttgccagccacaaaggttggcatcgggtcctgcctgccacctcacccacatgcgcc

SEQ ID NO: 87641 - DNA, 81 bp, Homo sapiens
gatgtgaccttgccagccacaaaggttggcatcgggtcctgcctgccacctcacccacatgcgcctctgcagccaaccaaa

SEQ ID NO: 87642 - DNA, 80 bp, Homo sapiens
tgccagccacaaaggttggcatcgggtcctgcctgccacctcacccacatgcgcctctgcagccaaccaaagccttccaa

SEQ ID NO: 87643 - DNA, 79 bp, Homo sapiens
acaaaggttggcatcgggtcctgcctgccacctcacccacatgcgcctctgcagccaaccaaagccttccaagatgctg

SEQ ID NO: 87644 - DNA, 80 bp, Homo sapiens
atcgggtcctgcctgccacctcacccacatgcgcctctgcagccaaccaaagccttccaagatgctggcctccaccgtca

SEQ ID NO: 87645 - DNA, 88 bp, Homo sapiens
tgcctgccacctcacccacatgcgcctctgcagccaaccaaagccttccaagatgctggcctccaccgtcagctacatgccatgctga

SEQ ID NO: 87646 - DNA, 84 bp, Homo sapiens
acctcacccacatgcgcctctgcagccaaccaaagccttccaagatgctggcctccaccgtcagctacatgccatgctgacacc

SEQ ID NO: 87647 - DNA, 86 bp, Homo sapiens
acatgcgcctctgcagccaaccaaagccttccaagatgctggcctccaccgtcagctacatgccatgctgacacctccgatgcttc

SEQ ID NO: 87648 - DNA, 81 bp, Homo sapiens
agccaaccaaagccttccaagatgctggcctccaccgtcagctacatgccatgctgacacctccgatgcttccaccaccac

SEQ ID NO: 87649 - DNA, 82 bp, Homo sapiens
agccttccaagatgctggcctccaccgtcagctacatgccatgctgacacctccgatgcttccaccaccacgcagtgggtaa

SEQ ID NO: 87650 - DNA, 81 bp, Homo sapiens
aagatgctggcctccaccgtcagctacatgccatgctgacacctccgatgcttccaccaccacgcagtgggtaaatcctaa

SEQ ID NO: 87651 - DNA, 82 bp, Homo sapiens
tccaccgtcagctacatgccatgctgacacctccgatgcttccaccaccacgcagtgggtaaatcctaatcactcaggaaca

SEQ ID NO: 87652 - DNA, 80 bp, Homo sapiens
agctacatgccatgctgacacctccgatgcttccaccaccacgcagtgggtaaatcctaatcactcaggaacacaaagaa

SEQ ID NO: 87653 - DNA, 76 bp, Homo sapiens
atgctgacacctccgatgcttccaccaccacgcagtgggtaaatcctaatcactcaggaacacaaagaaggccctg

SEQ ID NO: 87654 - DNA, 76 bp, Homo sapiens
ctccgatgcttccaccaccacgcagtgggtaaatcctaatcactcaggaacacaaagaaggccctgtgcgtgtaga

SEQ ID NO: 87655 - DNA, 74 bp, Homo sapiens
atgcttccaccaccacgcagtgggtaaatcctaatcactcaggaacacaaagaaggccctgtgcgtgtagaccc

SEQ ID NO: 87656 - DNA, 76 bp, Homo sapiens
accacgcagtgggtaaatcctaatcactcaggaacacaaagaaggccctgtgcgtgtagaccctgctgctcagacc

SEQ ID NO: 87657 - DNA, 75 bp, Homo sapiens
tgggtaaatcctaatcactcaggaacacaaagaaggccctgtgcgtgtagaccctgctgctcagaccccgctacc

SEQ ID NO: 87658 - DNA, 74 bp, Homo sapiens
ctaccccccaccaggagaccccctgagaaaggagtaactgcttctgagccattgcccatatgggctggcattcc

SEQ ID NO: 87659 - DNA, 73 bp, Homo sapiens
agaccccctgagaaaggagtaactgcttctgagccattgcccatatgggctggcattccccataaaaacccat

SEQ ID NO: 87660 - DNA, 76 bp, Homo sapiens
agaaaggagtaactgcttctgagccattgcccatatgggctggcattccccataaaaacccattgagggctccaga

SEQ ID NO: 87661 - DNA, 77 bp, Homo sapiens
agtaactgcttctgagccattgcccatatgggctggcattccccataaaaacccattgagggctccagaggcttctg

SEQ ID NO: 87662 - DNA, 78 bp, Homo sapiens
ttctgagccattgcccatatgggctggcattccccataaaaacccattgagggctccagaggcttctgggaacatctg

SEQ ID NO: 87663 - DNA, 76 bp, Homo sapiens
attgcccatatgggctggcattccccataaaaacccattgagggctccagaggcttctgggaacatctggacaatc

SEQ ID NO: 87664 - DNA, 74 bp, Homo sapiens
tgggctggcattccccataaaaacccattgagggctccagaggcttctgggaacatctggacaatccaaccacc

SEQ ID NO: 87665 - DNA, 72 bp, Homo sapiens
cataaaaacccattgagggctccagaggcttctgggaacatctggacaatccaaccaccccagagagtaggg

SEQ ID NO: 87666 - DNA, 72 bp, Homo sapiens
aaacccattgagggctccagaggcttctgggaacatctggacaatccaaccaccccagagagtagggtcacc

SEQ ID NO: 87667 - DNA, 72 bp, Homo sapiens
agggctccagaggcttctgggaacatctggacaatccaaccaccccagagagtagggtcacccctcaaatgg

SEQ ID NO: 87668 - DNA, 74 bp, Homo sapiens
ttctgggaacatctggacaatccaaccaccccagagagtagggtcacccctcaaatgggcaggcccagtgagga

SEQ ID NO: 87669 - DNA, 74 bp, Homo sapiens
aatccaaccaccccagagagtagggtcacccctcaaatgggcaggcccagtgaggacagagcaagcgttacata

SEQ ID NO: 87670 - DNA, 77 bp, Homo sapiens
cccagagagtagggtcacccctcaaatgggcaggcccagtgaggacagagcaagcgttacatatgtgtcctgaggtg

SEQ ID NO: 87671 - DNA, 81 bp, Homo sapiens
ggcaggcccagtgaggacagagcaagcgttacatatgtgtcctgaggtgggcatcaaggaggtgccacgagagccaggccc

SEQ ID NO: 87672 - DNA, 78 bp, Homo sapiens
aagcgttacatatgtgtcctgaggtgggcatcaaggaggtgccacgagagccaggccccagtcttccttcgtgcttga

SEQ ID NO: 87673 - DNA, 82 bp, Homo sapiens
tacatatgtgtcctgaggtgggcatcaaggaggtgccacgagagccaggccccagtcttccttcgtgcttgaggagcagctg

SEQ ID NO: 87674 - DNA, 78 bp, Homo sapiens
tcctgaggtgggcatcaaggaggtgccacgagagccaggccccagtcttccttcgtgcttgaggagcagctgggtttg

SEQ ID NO: 87675 - DNA, 74 bp, Homo sapiens
atcaaggaggtgccacgagagccaggccccagtcttccttcgtgcttgaggagcagctgggtttgggggacagt

SEQ ID NO: 87676 - DNA, 75 bp, Homo sapiens
aggtgccacgagagccaggccccagtcttccttcgtgcttgaggagcagctgggtttgggggacagttgccctca

SEQ ID NO: 87677 - DNA, 76 bp, Homo sapiens
caggccccagtcttccttcgtgcttgaggagcagctgggtttgggggacagttgccctcagcatggccataaacca

SEQ ID NO: 87678 - DNA, 75 bp, Homo sapiens
agtcttccttcgtgcttgaggagcagctgggtttgggggacagttgccctcagcatggccataaaccaccttgag

SEQ ID NO: 87679 - DNA, 77 bp, Homo sapiens
cttcgtgcttgaggagcagctgggtttgggggacagttgccctcagcatggccataaaccaccttgagtgcttagga

SEQ ID NO: 87680 - DNA, 80 bp, Homo sapiens
gcagctgggtttgggggacagttgccctcagcatggccataaaccaccttgagtgcttaggatgcgcacagatccctgaa

SEQ ID NO: 87681 - DNA, 83 bp, Homo sapiens
tttgggggacagttgccctcagcatggccataaaccaccttgagtgcttaggatgcgcacagatccctgaatgtgctgtctca

SEQ ID NO: 87682 - DNA, 83 bp, Homo sapiens
acagttgccctcagcatggccataaaccaccttgagtgcttaggatgcgcacagatccctgaatgtgctgtctcaggaaaatc

SEQ ID NO: 87683 - DNA, 82 bp, Homo sapiens
ctcagcatggccataaaccaccttgagtgcttaggatgcgcacagatccctgaatgtgctgtctcaggaaaatcctccacct

SEQ ID NO: 87684 - DNA, 79 bp, Homo sapiens
ataaaccaccttgagtgcttaggatgcgcacagatccctgaatgtgctgtctcaggaaaatcctccaccttgctgggtc

SEQ ID NO: 87685 - DNA, 86 bp, Homo sapiens
ttaggatgcgcacagatccctgaatgtgctgtctcaggaaaatcctccaccttgctgggtctgacagaggcagctgcatgaaacca

SEQ ID NO: 87686 - DNA, 81 bp, Homo sapiens
agatccctgaatgtgctgtctcaggaaaatcctccaccttgctgggtctgacagaggcagctgcatgaaaccagcccactt

SEQ ID NO: 87687 - DNA, 78 bp, Homo sapiens
ccttgctgggtctgacagaggcagctgcatgaaaccagcccacttttaactttagagacagaacctgatgtggccacg

SEQ ID NO: 87688 - DNA, 82 bp, Homo sapiens
tctgacagaggcagctgcatgaaaccagcccacttttaactttagagacagaacctgatgtggccacggccaggctgcacta

SEQ ID NO: 87689 - DNA, 78 bp, Homo sapiens
agctgcatgaaaccagcccacttttaactttagagacagaacctgatgtggccacggccaggctgcactagcccctca

SEQ ID NO: 87690 - DNA, 73 bp, Homo sapiens
aaaccagcccacttttaactttagagacagaacctgatgtggccacggccaggctgcactagcccctcaggga

SEQ ID NO: 87691 - DNA, 73 bp, Homo sapiens
acttttaactttagagacagaacctgatgtggccacggccaggctgcactagcccctcagggaggccccaggc

SEQ ID NO: 87692 - DNA, 79 bp, Homo sapiens
tttagagacagaacctgatgtggccacggccaggctgcactagcccctcagggaggccccaggccagataagcactgcc

SEQ ID NO: 87693 - DNA, 83 bp, Homo sapiens
tgatgtggccacggccaggctgcactagcccctcagggaggccccaggccagataagcactgcctgcatcttccactgaggaa

SEQ ID NO: 87694 - DNA, 81 bp, Homo sapiens
tgcactagcccctcagggaggccccaggccagataagcactgcctgcatcttccactgaggaacatctctgggacgaggac

SEQ ID NO: 87695 - DNA, 79 bp, Homo sapiens
ccctcagggaggccccaggccagataagcactgcctgcatcttccactgaggaacatctctgggacgaggacccgtgca

SEQ ID NO: 87696 - DNA, 85 bp, Homo sapiens
aggccccaggccagataagcactgcctgcatcttccactgaggaacatctctgggacgaggacccgtgcagctgcctgatgctca

SEQ ID NO: 87697 - DNA, 86 bp, Homo sapiens
agataagcactgcctgcatcttccactgaggaacatctctgggacgaggacccgtgcagctgcctgatgctcaggttcatcaccaa

SEQ ID NO: 87698 - DNA, 86 bp, Homo sapiens
actgcctgcatcttccactgaggaacatctctgggacgaggacccgtgcagctgcctgatgctcaggttcatcaccaacagcacca

SEQ ID NO: 87699 - DNA, 82 bp, Homo sapiens
ttccactgaggaacatctctgggacgaggacccgtgcagctgcctgatgctcaggttcatcaccaacagcaccaagttgttc

SEQ ID NO: 87700 - DNA, 83 bp, Homo sapiens
acccgtgcagctgcctgatgctcaggttcatcaccaacagcaccaagttgttcctctggagagaatgaatcagtcccttcaga

SEQ ID NO: 87701 - DNA, 80 bp, Homo sapiens
ctcaggttcatcaccaacagcaccaagttgttcctctggagagaatgaatcagtcccttcagatcctcatcctcctgaaa

SEQ ID NO: 87702 - DNA, 82 bp, Homo sapiens
ttcatcaccaacagcaccaagttgttcctctggagagaatgaatcagtcccttcagatcctcatcctcctgaaagttgagca

SEQ ID NO: 87703 - DNA, 79 bp, Homo sapiens
accaagttgttcctctggagagaatgaatcagtcccttcagatcctcatcctcctgaaagttgagcacatggcttctaa

SEQ ID NO: 87704 - DNA, 77 bp, Homo sapiens
atcagtcccttcagatcctcatcctcctgaaagttgagcacatggcttctaacaggcccaggtgcttaccttcggaa

SEQ ID NO: 87705 - DNA, 76 bp, Homo sapiens
ttcagatcctcatcctcctgaaagttgagcacatggcttctaacaggcccaggtgcttaccttcggaacaacggga

SEQ ID NO: 87706 - DNA, 74 bp, Homo sapiens
tcctcctgaaagttgagcacatggcttctaacaggcccaggtgcttaccttcggaacaacgggatcttctatta

SEQ ID NO: 87707 - DNA, 72 bp, Homo sapiens
ttgagcacatggcttctaacaggcccaggtgcttaccttcggaacaacgggatcttctattacccagaaaaa

SEQ ID NO: 87708 - DNA, 68 bp, Homo sapiens
atggcttctaacaggcccaggtgcttaccttcggaacaacgggatcttctattacccagaaaaacaaa

SEQ ID NO: 87709 - DNA, 67 bp, Homo sapiens
aggcccaggtgcttaccttcggaacaacgggatcttctattacccagaaaaacaaagtagagccttc

SEQ ID NO: 87710 - DNA, 67 bp, Homo sapiens
tgcttaccttcggaacaacgggatcttctattacccagaaaaacaaagtagagccttcccggtacaa

SEQ ID NO: 87711 - DNA, 67 bp, Homo sapiens
ttcggaacaacgggatcttctattacccagaaaaacaaagtagagccttcccggtacaatctgtact

SEQ ID NO: 87712 - DNA, 71 bp, Homo sapiens
tctattacccagaaaaacaaagtagagccttcccggtacaatctgtactttcagaatccgaacactcagga

SEQ ID NO: 87713 - DNA, 73 bp, Homo sapiens
aaaaacaaagtagagccttcccggtacaatctgtactttcagaatccgaacactcaggagctgtgctcagaac

SEQ ID NO: 87714 - DNA, 77 bp, Homo sapiens
agtagagccttcccggtacaatctgtactttcagaatccgaacactcaggagctgtgctcagaacctggctggcagg

SEQ ID NO: 87715 - DNA, 80 bp, Homo sapiens
tcccggtacaatctgtactttcagaatccgaacactcaggagctgtgctcagaacctggctggcagggcctgctctgccc

SEQ ID NO: 87716 - DNA, 83 bp, Homo sapiens
atctgtactttcagaatccgaacactcaggagctgtgctcagaacctggctggcagggcctgctctgccccatccagctgtgg

SEQ ID NO: 87717 - DNA, 85 bp, Homo sapiens
tcagaatccgaacactcaggagctgtgctcagaacctggctggcagggcctgctctgccccatccagctgtggtcccagccacca

SEQ ID NO: 87718 - DNA, 83 bp, Homo sapiens
aacactcaggagctgtgctcagaacctggctggcagggcctgctctgccccatccagctgtggtcccagccaccagactccaa

SEQ ID NO: 87719 - DNA, 82 bp, Homo sapiens
tgtgctcagaacctggctggcagggcctgctctgccccatccagctgtggtcccagccaccagactccaacctaccctgaca

SEQ ID NO: 87720 - DNA, 78 bp, Homo sapiens
agaacctggctggcagggcctgctctgccccatccagctgtggtcccagccaccagactccaacctaccctgacagga

SEQ ID NO: 87721 - DNA, 76 bp, Homo sapiens
atccagctgtggtcccagccaccagactccaacctaccctgacaggagccctgtgcctgccggccccacctcactc

SEQ ID NO: 87722 - DNA, 76 bp, Homo sapiens
tcccagccaccagactccaacctaccctgacaggagccctgtgcctgccggccccacctcactctggccacaacca

SEQ ID NO: 87723 - DNA, 75 bp, Homo sapiens
agactccaacctaccctgacaggagccctgtgcctgccggccccacctcactctggccacaaccaggctggcaag

SEQ ID NO: 87724 - DNA, 75 bp, Homo sapiens
aacctaccctgacaggagccctgtgcctgccggccccacctcactctggccacaaccaggctggcaagtgtccac

SEQ ID NO: 87725 - DNA, 77 bp, Homo sapiens
aggagccctgtgcctgccggccccacctcactctggccacaaccaggctggcaagtgtccaccgtggtctctgccca

SEQ ID NO: 87726 - DNA, 77 bp, Homo sapiens
tgtgcctgccggccccacctcactctggccacaaccaggctggcaagtgtccaccgtggtctctgcccagtaataac

SEQ ID NO: 87727 - DNA, 77 bp, Homo sapiens
cccacctcactctggccacaaccaggctggcaagtgtccaccgtggtctctgcccagtaataacctcagcagtgtgg

SEQ ID NO: 87728 - DNA, 78 bp, Homo sapiens
actctggccacaaccaggctggcaagtgtccaccgtggtctctgcccagtaataacctcagcagtgtggtatggtgtg

SEQ ID NO: 87729 - DNA, 79 bp, Homo sapiens
acaaccaggctggcaagtgtccaccgtggtctctgcccagtaataacctcagcagtgtggtatggtgtggacatcctca

SEQ ID NO: 87730 - DNA, 78 bp, Homo sapiens
ctggcaagtgtccaccgtggtctctgcccagtaataacctcagcagtgtggtatggtgtggacatcctcacctggtgg

SEQ ID NO: 87731 - DNA, 78 bp, Homo sapiens
accgtggtctctgcccagtaataacctcagcagtgtggtatggtgtggacatcctcacctggtgggcccatcctgaga

SEQ ID NO: 87732 - DNA, 81 bp, Homo sapiens
tctgcccagtaataacctcagcagtgtggtatggtgtggacatcctcacctggtgggcccatcctgagaaacatgcctgaa

SEQ ID NO: 87733 - DNA, 79 bp, Homo sapiens
agtgtggtatggtgtggacatcctcacctggtgggcccatcctgagaaacatgcctgaaggcacccggcaggtgagcag

SEQ ID NO: 87734 - DNA, 79 bp, Homo sapiens
ggtatggtgtggacatcctcacctggtgggcccatcctgagaaacatgcctgaaggcacccggcaggtgagcagggaga

SEQ ID NO: 87735 - DNA, 77 bp, Homo sapiens
acatcctcacctggtgggcccatcctgagaaacatgcctgaaggcacccggcaggtgagcagggagagaggtaggtc

SEQ ID NO: 87736 - DNA, 75 bp, Homo sapiens
acctggtgggcccatcctgagaaacatgcctgaaggcacccggcaggtgagcagggagagaggtaggtcccagcc

SEQ ID NO: 87737 - DNA, 76 bp, Homo sapiens
atcctgagaaacatgcctgaaggcacccggcaggtgagcagggagagaggtaggtcccagcccgcctctccacctg

SEQ ID NO: 87738 - DNA, 75 bp, Homo sapiens
tgaaggcacccggcaggtgagcagggagagaggtaggtcccagcccgcctctccacctgggtcttatctcacaaa

SEQ ID NO: 87739 - DNA, 72 bp, Homo sapiens
aggtgagcagggagagaggtaggtcccagcccgcctctccacctgggtcttatctcacaaaaggatcggccc

SEQ ID NO: 87740 - DNA, 71 bp, Homo sapiens
gagagaggtaggtcccagcccgcctctccacctgggtcttatctcacaaaaggatcggccctgttattggg

SEQ ID NO: 87741 - DNA, 69 bp, Homo sapiens
aggtaggtcccagcccgcctctccacctgggtcttatctcacaaaaggatcggccctgttattgggtta

SEQ ID NO: 87742 - DNA, 68 bp, Homo sapiens
cccgcctctccacctgggtcttatctcacaaaaggatcggccctgttattgggttaggtcgtgggtaa

SEQ ID NO: 87743 - DNA, 68 bp, Homo sapiens
acctgggtcttatctcacaaaaggatcggccctgttattgggttaggtcgtgggtaagcgtacaccaa

SEQ ID NO: 87744 - DNA, 71 bp, Homo sapiens
atctcacaaaaggatcggccctgttattgggttaggtcgtgggtaagcgtacaccaagatccgccaactga

SEQ ID NO: 87745 - DNA, 68 bp, Homo sapiens
acaaaaggatcggccctgttattgggttaggtcgtgggtaagcgtacaccaagatccgccaactgact

SEQ ID NO: 87746 - DNA, 69 bp, Homo sapiens
ggccctgttattgggttaggtcgtgggtaagcgtacaccaagatccgccaactgacttcttcccagaaa

SEQ ID NO: 87747 - DNA, 73 bp, Homo sapiens
gtcgtgggtaagcgtacaccaagatccgccaactgacttcttcccagaaagatgcccgtccttcagagcaaac

SEQ ID NO: 87748 - DNA, 74 bp, Homo sapiens
gtacaccaagatccgccaactgacttcttcccagaaagatgcccgtccttcagagcaaacggcctgacaagaaa

SEQ ID NO: 87749 - DNA, 75 bp, Homo sapiens
aagatccgccaactgacttcttcccagaaagatgcccgtccttcagagcaaacggcctgacaagaaatgtcacca

SEQ ID NO: 87750 - DNA, 73 bp, Homo sapiens
aactgacttcttcccagaaagatgcccgtccttcagagcaaacggcctgacaagaaatgtcaccaaactggac

SEQ ID NO: 87751 - DNA, 80 bp, Homo sapiens
ttcagagcaaacggcctgacaagaaatgtcaccaaactggactcctccccaccagcagcatagaacccagagcacagctc

SEQ ID NO: 87752 - DNA, 79 bp, Homo sapiens
cctgacaagaaatgtcaccaaactggactcctccccaccagcagcatagaacccagagcacagctcccacagagccaaa

SEQ ID NO: 87753 - DNA, 77 bp, Homo sapiens
aagaaatgtcaccaaactggactcctccccaccagcagcatagaacccagagcacagctcccacagagccaaaagga

SEQ ID NO: 87754 - DNA, 79 bp, Homo sapiens
accaaactggactcctccccaccagcagcatagaacccagagcacagctcccacagagccaaaaggagaccacacagca

SEQ ID NO: 87755 - DNA, 80 bp, Homo sapiens
actcctccccaccagcagcatagaacccagagcacagctcccacagagccaaaaggagaccacacagcaggaagcacgtg

SEQ ID NO: 87756 - DNA, 85 bp, Homo sapiens
agcagcatagaacccagagcacagctcccacagagccaaaaggagaccacacagcaggaagcacgtggcactgccaagctggata

SEQ ID NO: 87757 - DNA, 82 bp, Homo sapiens
atagaacccagagcacagctcccacagagccaaaaggagaccacacagcaggaagcacgtggcactgccaagctggatagga

SEQ ID NO: 87758 - DNA, 85 bp, Homo sapiens
acagctcccacagagccaaaaggagaccacacagcaggaagcacgtggcactgccaagctggataggagctgcagaggcagcctg

SEQ ID NO: 87759 - DNA, 86 bp, Homo sapiens
acagagccaaaaggagaccacacagcaggaagcacgtggcactgccaagctggataggagctgcagaggcagcctgtgaccagcag

SEQ ID NO: 87760 - DNA, 87 bp, Homo sapiens
aaaaggagaccacacagcaggaagcacgtggcactgccaagctggataggagctgcagaggcagcctgtgaccagcagggcatgtgc

SEQ ID NO: 87761 - DNA, 90 bp, Homo sapiens
acacagcaggaagcacgtggcactgccaagctggataggagctgcagaggcagcctgtgaccagcagggcatgtgctggccagggctggc

SEQ ID NO: 87762 - DNA, 87 bp, Homo sapiens
ggaagcacgtggcactgccaagctggataggagctgcagaggcagcctgtgaccagcagggcatgtgctggccagggctggcccagg

SEQ ID NO: 87763 - DNA, 86 bp, Homo sapiens
ggcactgccaagctggataggagctgcagaggcagcctgtgaccagcagggcatgtgctggccagggctggcccagggcaagtccc

SEQ ID NO: 87764 - DNA, 84 bp, Homo sapiens
tggataggagctgcagaggcagcctgtgaccagcagggcatgtgctggccagggctggcccagggcaagtccccaaacctcaga

SEQ ID NO: 87765 - DNA, 81 bp, Homo sapiens
tgcagaggcagcctgtgaccagcagggcatgtgctggccagggctggcccagggcaagtccccaaacctcagagtacccag

SEQ ID NO: 87766 - DNA, 77 bp, Homo sapiens
agcctgtgaccagcagggcatgtgctggccagggctggcccagggcaagtccccaaacctcagagtacccaggaggc

SEQ ID NO: 87767 - DNA, 74 bp, Homo sapiens
accagcagggcatgtgctggccagggctggcccagggcaagtccccaaacctcagagtacccaggaggccctgg

SEQ ID NO: 87768 - DNA, 74 bp, Homo sapiens
atgtgctggccagggctggcccagggcaagtccccaaacctcagagtacccaggaggccctggggctcaggatc

SEQ ID NO: 87769 - DNA, 69 bp, Homo sapiens
agggcaagtccccaaacctcagagtacccaggaggccctggggctcaggatccagggctctagggaggg

SEQ ID NO: 87770 - DNA, 77 bp, Homo sapiens
ccaaacctcagagtacccaggaggccctggggctcaggatccagggctctagggaggggctgcatgctcccagcatc

SEQ ID NO: 87771 - DNA, 77 bp, Homo sapiens
ctcagagtacccaggaggccctggggctcaggatccagggctctagggaggggctgcatgctcccagcatccacggg

SEQ ID NO: 87772 - DNA, 74 bp, Homo sapiens
cccaggaggccctggggctcaggatccagggctctagggaggggctgcatgctcccagcatccacggggcgggg

SEQ ID NO: 87773 - DNA, 81 bp, Homo sapiens
ggctcaggatccagggctctagggaggggctgcatgctcccagcatccacggggcgggggctagaacagaacatgctctgc

SEQ ID NO: 87774 - DNA, 79 bp, Homo sapiens
aggatccagggctctagggaggggctgcatgctcccagcatccacggggcgggggctagaacagaacatgctctgccag

SEQ ID NO: 87775 - DNA, 83 bp, Homo sapiens
tagggaggggctgcatgctcccagcatccacggggcgggggctagaacagaacatgctctgccaggtgctcagcgcccacaca

SEQ ID NO: 87776 - DNA, 82 bp, Homo sapiens
tgcatgctcccagcatccacggggcgggggctagaacagaacatgctctgccaggtgctcagcgcccacacaccctcaaaag

SEQ ID NO: 87777 - DNA, 80 bp, Homo sapiens
ccagcatccacggggcgggggctagaacagaacatgctctgccaggtgctcagcgcccacacaccctcaaaagtctgatc

SEQ ID NO: 87778 - DNA, 78 bp, Homo sapiens
acggggcgggggctagaacagaacatgctctgccaggtgctcagcgcccacacaccctcaaaagtctgatcgcaggga

SEQ ID NO: 87779 - DNA, 80 bp, Homo sapiens
ctagaacagaacatgctctgccaggtgctcagcgcccacacaccctcaaaagtctgatcgcagggaccttctatggaccg

SEQ ID NO: 87780 - DNA, 82 bp, Homo sapiens
acatgctctgccaggtgctcagcgcccacacaccctcaaaagtctgatcgcagggaccttctatggaccgggctgtgcatct

SEQ ID NO: 87781 - DNA, 79 bp, Homo sapiens
ccaggtgctcagcgcccacacaccctcaaaagtctgatcgcagggaccttctatggaccgggctgtgcatcttgagggc

SEQ ID NO: 87782 - DNA, 77 bp, Homo sapiens
agcgcccacacaccctcaaaagtctgatcgcagggaccttctatggaccgggctgtgcatcttgagggccaacttca

SEQ ID NO: 87783 - DNA, 74 bp, Homo sapiens
aaaagtctgatcgcagggaccttctatggaccgggctgtgcatcttgagggccaacttcaagcaaaggaaagcc

SEQ ID NO: 87784 - DNA, 77 bp, Homo sapiens
atcgcagggaccttctatggaccgggctgtgcatcttgagggccaacttcaagcaaaggaaagcctgatcacaggga

SEQ ID NO: 87785 - DNA, 81 bp, Homo sapiens
ggctgtgcatcttgagggccaacttcaagcaaaggaaagcctgatcacagggaccttctatggacagggctgcgcatcttg

SEQ ID NO: 87786 - DNA, 76 bp, Homo sapiens
atcttgagggccaacttcaagcaaaggaaagcctgatcacagggaccttctatggacagggctgcgcatcttgggg

SEQ ID NO: 87787 - DNA, 74 bp, Homo sapiens
aacttcaagcaaaggaaagcctgatcacagggaccttctatggacagggctgcgcatcttgggggccaacttta

SEQ ID NO: 87788 - DNA, 74 bp, Homo sapiens
aagcaaaggaaagcctgatcacagggaccttctatggacagggctgcgcatcttgggggccaactttaagcaaa

SEQ ID NO: 87789 - DNA, 74 bp, Homo sapiens
aaagcctgatcacagggaccttctatggacagggctgcgcatcttgggggccaactttaagcaaaggaggagac

SEQ ID NO: 87790 - DNA, 74 bp, Homo sapiens
acagggaccttctatggacagggctgcgcatcttgggggccaactttaagcaaaggaggagactgaggctcagg

SEQ ID NO: 87791 - DNA, 77 bp, Homo sapiens
ttctatggacagggctgcgcatcttgggggccaactttaagcaaaggaggagactgaggctcagggaagccaggtgc

SEQ ID NO: 87792 - DNA, 76 bp, Homo sapiens
tgcgcatcttgggggccaactttaagcaaaggaggagactgaggctcagggaagccaggtgccttgcttaaggcca

SEQ ID NO: 87793 - DNA, 72 bp, Homo sapiens
atcttgggggccaactttaagcaaaggaggagactgaggctcagggaagccaggtgccttgcttaaggccac

SEQ ID NO: 87794 - DNA, 74 bp, Homo sapiens
aactttaagcaaaggaggagactgaggctcagggaagccaggtgccttgcttaaggccaccagctcagtaagtg

SEQ ID NO: 87795 - DNA, 79 bp, Homo sapiens
ggaggagactgaggctcagggaagccaggtgccttgcttaaggccaccagctcagtaagtggcagggcttgagctgaaa

SEQ ID NO: 87796 - DNA, 79 bp, Homo sapiens
gaggctcagggaagccaggtgccttgcttaaggccaccagctcagtaagtggcagggcttgagctgaaacacaggactc

SEQ ID NO: 87797 - DNA, 77 bp, Homo sapiens
gaagccaggtgccttgcttaaggccaccagctcagtaagtggcagggcttgagctgaaacacaggactctcccaaaa

SEQ ID NO: 87798 - DNA, 77 bp, Homo sapiens
aggtgccttgcttaaggccaccagctcagtaagtggcagggcttgagctgaaacacaggactctcccaaaatgacga

SEQ ID NO: 87799 - DNA, 78 bp, Homo sapiens
ttaaggccaccagctcagtaagtggcagggcttgagctgaaacacaggactctcccaaaatgacgaggcaatggcacc

SEQ ID NO: 87800 - DNA, 81 bp, Homo sapiens
ctcagtaagtggcagggcttgagctgaaacacaggactctcccaaaatgacgaggcaatggcaccctgctatgtcagaatg

SEQ ID NO: 87801 - DNA, 75 bp, Homo sapiens
aaacacaggactctcccaaaatgacgaggcaatggcaccctgctatgtcagaatgtgtcttttctccttccaaac

SEQ ID NO: 87802 - DNA, 77 bp, Homo sapiens
actctcccaaaatgacgaggcaatggcaccctgctatgtcagaatgtgtcttttctccttccaaactgacaaactga

SEQ ID NO: 87803 - DNA, 79 bp, Homo sapiens
aatgacgaggcaatggcaccctgctatgtcagaatgtgtcttttctccttccaaactgacaaactgactcttcacaggc

SEQ ID NO: 87804 - DNA, 80 bp, Homo sapiens
aatggcaccctgctatgtcagaatgtgtcttttctccttccaaactgacaaactgactcttcacaggcgcaggtcatgcg

SEQ ID NO: 87805 - DNA, 78 bp, Homo sapiens
ctatgtcagaatgtgtcttttctccttccaaactgacaaactgactcttcacaggcgcaggtcatgcgtcctggaccg

SEQ ID NO: 87806 - DNA, 77 bp, Homo sapiens
aatgtgtcttttctccttccaaactgacaaactgactcttcacaggcgcaggtcatgcgtcctggaccggctgacca

SEQ ID NO: 87807 - DNA, 81 bp, Homo sapiens
aaactgacaaactgactcttcacaggcgcaggtcatgcgtcctggaccggctgaccagagtcctgaactgaagctgtgcag

SEQ ID NO: 87808 - DNA, 86 bp, Homo sapiens
ttcacaggcgcaggtcatgcgtcctggaccggctgaccagagtcctgaactgaagctgtgcaggcgcgggtccctgcatctgcaga

SEQ ID NO: 87809 - DNA, 81 bp, Homo sapiens
aggtcatgcgtcctggaccggctgaccagagtcctgaactgaagctgtgcaggcgcgggtccctgcatctgcagaccgact

SEQ ID NO: 87810 - DNA, 81 bp, Homo sapiens
ctgaccagagtcctgaactgaagctgtgcaggcgcgggtccctgcatctgcagaccgacttccgtcatcccacctgcaggg

SEQ ID NO: 87811 - DNA, 79 bp, Homo sapiens
agtcctgaactgaagctgtgcaggcgcgggtccctgcatctgcagaccgacttccgtcatcccacctgcagggggtgtg

SEQ ID NO: 87812 - DNA, 81 bp, Homo sapiens
tgaagctgtgcaggcgcgggtccctgcatctgcagaccgacttccgtcatcccacctgcagggggtgtggaggagccttgc

SEQ ID NO: 87813 - DNA, 78 bp, Homo sapiens
aggcgcgggtccctgcatctgcagaccgacttccgtcatcccacctgcagggggtgtggaggagccttgcctgacagc

SEQ ID NO: 87814 - DNA, 80 bp, Homo sapiens
tgcatctgcagaccgacttccgtcatcccacctgcagggggtgtggaggagccttgcctgacagccggagggagctggag

SEQ ID NO: 87815 - DNA, 75 bp, Homo sapiens
accgacttccgtcatcccacctgcagggggtgtggaggagccttgcctgacagccggagggagctggagtctgaa

SEQ ID NO: 87816 - DNA, 78 bp, Homo sapiens
cttccgtcatcccacctgcagggggtgtggaggagccttgcctgacagccggagggagctggagtctgaaatctcagc

SEQ ID NO: 87817 - DNA, 79 bp, Homo sapiens
ctgcagggggtgtggaggagccttgcctgacagccggagggagctggagtctgaaatctcagctgctctttttacagaa

SEQ ID NO: 87818 - DNA, 76 bp, Homo sapiens
ccttgcctgacagccggagggagctggagtctgaaatctcagctgctctttttacagaacgttttgtcacctgcct

SEQ ID NO: 87819 - DNA, 72 bp, Homo sapiens
agtctgaaatctcagctgctctttttacagaacgttttgtcacctgccttcaaataaaagcgcccaatttcg

SEQ ID NO: 87820 - DNA, 72 bp, Homo sapiens
agctgctctttttacagaacgttttgtcacctgccttcaaataaaagcgcccaatttcggctcaaggtgaca

SEQ ID NO: 87821 - DNA, 71 bp, Homo sapiens
tctttttacagaacgttttgtcacctgccttcaaataaaagcgcccaatttcggctcaaggtgacatggat

SEQ ID NO: 87822 - DNA, 81 bp, Homo sapiens
agcgcccaatttcggctcaaggtgacatggattgggtatttgcctagcagctgacacacaccagaaagcaggagacagcag

SEQ ID NO: 87823 - DNA, 84 bp, Homo sapiens
ttcggctcaaggtgacatggattgggtatttgcctagcagctgacacacaccagaaagcaggagacagcaggagctctgccaag

SEQ ID NO: 87824 - DNA, 86 bp, Homo sapiens
acatggattgggtatttgcctagcagctgacacacaccagaaagcaggagacagcaggagctctgccaagtgtgctgtggatctag

SEQ ID NO: 87825 - DNA, 86 bp, Homo sapiens
ttgggtatttgcctagcagctgacacacaccagaaagcaggagacagcaggagctctgccaagtgtgctgtggatctaggtcagaa

SEQ ID NO: 87826 - DNA, 90 bp, Homo sapiens
ctagcagctgacacacaccagaaagcaggagacagcaggagctctgccaagtgtgctgtggatctaggtcagaacatggtgcaggtgtga

SEQ ID NO: 87827 - DNA, 86 bp, Homo sapiens
acacacaccagaaagcaggagacagcaggagctctgccaagtgtgctgtggatctaggtcagaacatggtgcaggtgtgagcgagg

SEQ ID NO: 87828 - DNA, 83 bp, Homo sapiens
aaagcaggagacagcaggagctctgccaagtgtgctgtggatctaggtcagaacatggtgcaggtgtgagcgagggggcgtcc

SEQ ID NO: 87829 - DNA, 82 bp, Homo sapiens
acagcaggagctctgccaagtgtgctgtggatctaggtcagaacatggtgcaggtgtgagcgagggggcgtcctcccaggaa

SEQ ID NO: 87830 - DNA, 82 bp, Homo sapiens
tctgccaagtgtgctgtggatctaggtcagaacatggtgcaggtgtgagcgagggggcgtcctcccaggaacgctagcacaa

SEQ ID NO: 87831 - DNA, 79 bp, Homo sapiens
aagtgtgctgtggatctaggtcagaacatggtgcaggtgtgagcgagggggcgtcctcccaggaacgctagcacaattc

SEQ ID NO: 87832 - DNA, 77 bp, Homo sapiens
tggatctaggtcagaacatggtgcaggtgtgagcgagggggcgtcctcccaggaacgctagcacaattccagaagtt

SEQ ID NO: 87833 - DNA, 77 bp, Homo sapiens
gtcagaacatggtgcaggtgtgagcgagggggcgtcctcccaggaacgctagcacaattccagaagtttcaagagaa

SEQ ID NO: 87834 - DNA, 77 bp, Homo sapiens
gagggggcgtcctcccaggaacgctagcacaattccagaagtttcaagagaatgctgaagttcagccaggtcagaca

SEQ ID NO: 87835 - DNA, 78 bp, Homo sapiens
gtcctcccaggaacgctagcacaattccagaagtttcaagagaatgctgaagttcagccaggtcagacaaccacttga

SEQ ID NO: 87836 - DNA, 78 bp, Homo sapiens
aagtttcaagagaatgctgaagttcagccaggtcagacaaccacttgaccgcggacagatttagagaaagtcatgcag

SEQ ID NO: 87837 - DNA, 80 bp, Homo sapiens
aagagaatgctgaagttcagccaggtcagacaaccacttgaccgcggacagatttagagaaagtcatgcaggcctgggca

SEQ ID NO: 87838 - DNA, 76 bp, Homo sapiens
aggtcagacaaccacttgaccgcggacagatttagagaaagtcatgcaggcctgggcagacctcgggctggccgcc

SEQ ID NO: 87839 - DNA, 72 bp, Homo sapiens
aaccacttgaccgcggacagatttagagaaagtcatgcaggcctgggcagacctcgggctggccgccccggg

SEQ ID NO: 87840 - DNA, 74 bp, Homo sapiens
atttagagaaagtcatgcaggcctgggcagacctcgggctggccgccccgggtgctcccatccccctcatgtta

SEQ ID NO: 87841 - DNA, 67 bp, Homo sapiens
acctcgggctggccgccccgggtgctcccatccccctcatgttagcccctggttcccccaaccacca

SEQ ID NO: 87842 - DNA, 71 bp, Homo sapiens
tggccgccccgggtgctcccatccccctcatgttagcccctggttcccccaaccaccactcactcctgctg

SEQ ID NO: 87843 - DNA, 71 bp, Homo sapiens
ctcccatccccctcatgttagcccctggttcccccaaccaccactcactcctgctgggacgtcaagagccc

SEQ ID NO: 87844 - DNA, 71 bp, Homo sapiens
cctcatgttagcccctggttcccccaaccaccactcactcctgctgggacgtcaagagccccaggttcttg

SEQ ID NO: 87845 - DNA, 74 bp, Homo sapiens
tgttagcccctggttcccccaaccaccactcactcctgctgggacgtcaagagccccaggttcttggctgctgc

SEQ ID NO: 87846 - DNA, 78 bp, Homo sapiens
aaccaccactcactcctgctgggacgtcaagagccccaggttcttggctgctgccatccaagacctgagcctctccca

SEQ ID NO: 87847 - DNA, 79 bp, Homo sapiens
ccaggttcttggctgctgccatccaagacctgagcctctcccagccagctctggcaccttctctagtttcctcagaggg

SEQ ID NO: 87848 - DNA, 81 bp, Homo sapiens
tcttggctgctgccatccaagacctgagcctctcccagccagctctggcaccttctctagtttcctcagaggggaatctta

SEQ ID NO: 87849 - DNA, 75 bp, Homo sapiens
atccaagacctgagcctctcccagccagctctggcaccttctctagtttcctcagaggggaatcttacccaagta

SEQ ID NO: 87850 - DNA, 78 bp, Homo sapiens
tgagcctctcccagccagctctggcaccttctctagtttcctcagaggggaatcttacccaagtatctattggatcac

SEQ ID NO: 87851 - DNA, 78 bp, Homo sapiens
ccagccagctctggcaccttctctagtttcctcagaggggaatcttacccaagtatctattggatcactccctgcaca

SEQ ID NO: 87852 - DNA, 77 bp, Homo sapiens
ttctctagtttcctcagaggggaatcttacccaagtatctattggatcactccctgcacaccccagctgcctgataa

SEQ ID NO: 87853 - DNA, 77 bp, Homo sapiens
tttcctcagaggggaatcttacccaagtatctattggatcactccctgcacaccccagctgcctgataaggccggca

SEQ ID NO: 87854 - DNA, 79 bp, Homo sapiens
ggaatcttacccaagtatctattggatcactccctgcacaccccagctgcctgataaggccggcaggcttagccctgca

SEQ ID NO: 87855 - DNA, 79 bp, Homo sapiens
tacccaagtatctattggatcactccctgcacaccccagctgcctgataaggccggcaggcttagccctgcagccccca

SEQ ID NO: 87856 - DNA, 82 bp, Homo sapiens
tctattggatcactccctgcacaccccagctgcctgataaggccggcaggcttagccctgcagcccccagcagcccacgctg

SEQ ID NO: 87857 - DNA, 80 bp, Homo sapiens
tccctgcacaccccagctgcctgataaggccggcaggcttagccctgcagcccccagcagcccacgctggccccttcatg

SEQ ID NO: 87858 - DNA, 81 bp, Homo sapiens
ccagctgcctgataaggccggcaggcttagccctgcagcccccagcagcccacgctggccccttcatggtactcacactca

SEQ ID NO: 87859 - DNA, 83 bp, Homo sapiens
tgataaggccggcaggcttagccctgcagcccccagcagcccacgctggccccttcatggtactcacactcagtgctgtgtga

SEQ ID NO: 87860 - DNA, 80 bp, Homo sapiens
ggccggcaggcttagccctgcagcccccagcagcccacgctggccccttcatggtactcacactcagtgctgtgtgaccc

SEQ ID NO: 87861 - DNA, 82 bp, Homo sapiens
cccagcagcccacgctggccccttcatggtactcacactcagtgctgtgtgacccctgtgcctactgcagtctagatcctcc

SEQ ID NO: 87862 - DNA, 82 bp, Homo sapiens
cacgctggccccttcatggtactcacactcagtgctgtgtgacccctgtgcctactgcagtctagatcctcctgggatccac

SEQ ID NO: 87863 - DNA, 82 bp, Homo sapiens
ccttcatggtactcacactcagtgctgtgtgacccctgtgcctactgcagtctagatcctcctgggatccacctggccaaca

SEQ ID NO: 87864 - DNA, 81 bp, Homo sapiens
atggtactcacactcagtgctgtgtgacccctgtgcctactgcagtctagatcctcctgggatccacctggccaacacctc

SEQ ID NO: 87865 - DNA, 79 bp, Homo sapiens
tgtgacccctgtgcctactgcagtctagatcctcctgggatccacctggccaacacctcccccaaggcgtcatcagaga

SEQ ID NO: 87866 - DNA, 76 bp, Homo sapiens
cctactgcagtctagatcctcctgggatccacctggccaacacctcccccaaggcgtcatcagagaggctttccaa

SEQ ID NO: 87867 - DNA, 75 bp, Homo sapiens
atcctcctgggatccacctggccaacacctcccccaaggcgtcatcagagaggctttccaactgtgagggctcac

SEQ ID NO: 87868 - DNA, 73 bp, Homo sapiens
atccacctggccaacacctcccccaaggcgtcatcagagaggctttccaactgtgagggctcactggggcccc

SEQ ID NO: 87869 - DNA, 80 bp, Homo sapiens
aaggcgtcatcagagaggctttccaactgtgagggctcactggggccccggcctctggctgtgagcatctcactgattgg

SEQ ID NO: 87870 - DNA, 80 bp, Homo sapiens
atcagagaggctttccaactgtgagggctcactggggccccggcctctggctgtgagcatctcactgattggggtgcgag

SEQ ID NO: 87871 - DNA, 78 bp, Homo sapiens
ttccaactgtgagggctcactggggccccggcctctggctgtgagcatctcactgattggggtgcgaggttggtctct

SEQ ID NO: 87872 - DNA, 75 bp, Homo sapiens
ctcactggggccccggcctctggctgtgagcatctcactgattggggtgcgaggttggtctcttcccacctaaag

SEQ ID NO: 87873 - DNA, 76 bp, Homo sapiens
gcctctggctgtgagcatctcactgattggggtgcgaggttggtctcttcccacctaaaggggagttccaggagga

SEQ ID NO: 87874 - DNA, 75 bp, Homo sapiens
tgtgagcatctcactgattggggtgcgaggttggtctcttcccacctaaaggggagttccaggaggagcagtccc

SEQ ID NO: 87875 - DNA, 71 bp, Homo sapiens
gggtgcgaggttggtctcttcccacctaaaggggagttccaggaggagcagtccctcctgtttctgctgac

SEQ ID NO: 87876 - DNA, 72 bp, Homo sapiens
ttcccacctaaaggggagttccaggaggagcagtccctcctgtttctgctgacccctggggctgatggccta

SEQ ID NO: 87877 - DNA, 76 bp, Homo sapiens
gggagttccaggaggagcagtccctcctgtttctgctgacccctggggctgatggcctagcactaggacaacagaa

SEQ ID NO: 87878 - DNA, 76 bp, Homo sapiens
ttccaggaggagcagtccctcctgtttctgctgacccctggggctgatggcctagcactaggacaacagaataagg

SEQ ID NO: 87879 - DNA, 78 bp, Homo sapiens
tccctcctgtttctgctgacccctggggctgatggcctagcactaggacaacagaataagggcccagacgcgcactga

SEQ ID NO: 87880 - DNA, 82 bp, Homo sapiens
tgtttctgctgacccctggggctgatggcctagcactaggacaacagaataagggcccagacgcgcactgagcagagatatg

SEQ ID NO: 87881 - DNA, 82 bp, Homo sapiens
ccctggggctgatggcctagcactaggacaacagaataagggcccagacgcgcactgagcagagatatggagctggccctga

SEQ ID NO: 87882 - DNA, 85 bp, Homo sapiens
tgatggcctagcactaggacaacagaataagggcccagacgcgcactgagcagagatatggagctggccctgaccacgctgtgga

SEQ ID NO: 87883 - DNA, 82 bp, Homo sapiens
tagcactaggacaacagaataagggcccagacgcgcactgagcagagatatggagctggccctgaccacgctgtggagcccg

SEQ ID NO: 87884 - DNA, 81 bp, Homo sapiens
acaacagaataagggcccagacgcgcactgagcagagatatggagctggccctgaccacgctgtggagcccgtgctggtcc

SEQ ID NO: 87885 - DNA, 81 bp, Homo sapiens
ataagggcccagacgcgcactgagcagagatatggagctggccctgaccacgctgtggagcccgtgctggtccctcaagcc

SEQ ID NO: 87886 - DNA, 85 bp, Homo sapiens
agacgcgcactgagcagagatatggagctggccctgaccacgctgtggagcccgtgctggtccctcaagcctccagccacctgca

SEQ ID NO: 87887 - DNA, 80 bp, Homo sapiens
agagatatggagctggccctgaccacgctgtggagcccgtgctggtccctcaagcctccagccacctgcacgcggggcca

SEQ ID NO: 87888 - DNA, 80 bp, Homo sapiens
tatggagctggccctgaccacgctgtggagcccgtgctggtccctcaagcctccagccacctgcacgcggggccagccag

SEQ ID NO: 87889 - DNA, 81 bp, Homo sapiens
tgaccacgctgtggagcccgtgctggtccctcaagcctccagccacctgcacgcggggccagccaggccaggtgagacaca

SEQ ID NO: 87890 - DNA, 80 bp, Homo sapiens
cgtgctggtccctcaagcctccagccacctgcacgcggggccagccaggccaggtgagacacagccttgcttacacgcca

SEQ ID NO: 87891 - DNA, 84 bp, Homo sapiens
ctccagccacctgcacgcggggccagccaggccaggtgagacacagccttgcttacacgccagctgcgtctgagagcagagaac

SEQ ID NO: 87892 - DNA, 84 bp, Homo sapiens
agccaggccaggtgagacacagccttgcttacacgccagctgcgtctgagagcagagaaccctgctgtcgccttctctcctgga

SEQ ID NO: 87893 - DNA, 81 bp, Homo sapiens
ttacacgccagctgcgtctgagagcagagaaccctgctgtcgccttctctcctggacgcaatctaaaacaatctcaactta

SEQ ID NO: 87894 - DNA, 78 bp, Homo sapiens
agctgcgtctgagagcagagaaccctgctgtcgccttctctcctggacgcaatctaaaacaatctcaacttacaaaaa

SEQ ID NO: 87895 - DNA, 75 bp, Homo sapiens
agcagagaaccctgctgtcgccttctctcctggacgcaatctaaaacaatctcaacttacaaaaaacctgcaaga

SEQ ID NO: 87896 - DNA, 74 bp, Homo sapiens
ctgctgtcgccttctctcctggacgcaatctaaaacaatctcaacttacaaaaaacctgcaagaacagtacaaa

SEQ ID NO: 87897 - DNA, 73 bp, Homo sapiens
cttctctcctggacgcaatctaaaacaatctcaacttacaaaaaacctgcaagaacagtacaaagaacagcca

SEQ ID NO: 87898 - DNA, 72 bp, Homo sapiens
atctaaaacaatctcaacttacaaaaaacctgcaagaacagtacaaagaacagccatattctgtgacgtttc

SEQ ID NO: 87899 - DNA, 74 bp, Homo sapiens
aatctcaacttacaaaaaacctgcaagaacagtacaaagaacagccatattctgtgacgtttctgccacctgcc

SEQ ID NO: 87900 - DNA, 72 bp, Homo sapiens
ttacaaaaaacctgcaagaacagtacaaagaacagccatattctgtgacgtttctgccacctgcccctcccc

SEQ ID NO: 87901 - DNA, 71 bp, Homo sapiens
aagaacagtacaaagaacagccatattctgtgacgtttctgccacctgcccctcccccccacccacgccta

SEQ ID NO: 87902 - DNA, 74 bp, Homo sapiens
tacaaagaacagccatattctgtgacgtttctgccacctgcccctcccccccacccacgcctattatccacata

SEQ ID NO: 87903 - DNA, 74 bp, Homo sapiens
agccatattctgtgacgtttctgccacctgcccctcccccccacccacgcctattatccacatacttagatgta

SEQ ID NO: 87904 - DNA, 75 bp, Homo sapiens
ttctgtgacgtttctgccacctgcccctcccccccacccacgcctattatccacatacttagatgtagcaacaca

SEQ ID NO: 87905 - DNA, 74 bp, Homo sapiens
tttctgccacctgcccctcccccccacccacgcctattatccacatacttagatgtagcaacacacttgcttct

SEQ ID NO: 87906 - DNA, 73 bp, Homo sapiens
cctcccccccacccacgcctattatccacatacttagatgtagcaacacacttgcttcttgaaccatttgagg

SEQ ID NO: 87907 - DNA, 76 bp, Homo sapiens
acccacgcctattatccacatacttagatgtagcaacacacttgcttcttgaaccatttgagggccggctggagac

SEQ ID NO: 87908 - DNA, 78 bp, Homo sapiens
ccacatacttagatgtagcaacacacttgcttcttgaaccatttgagggccggctggagactttgccacactgtgccc

SEQ ID NO: 87909 - DNA, 77 bp, Homo sapiens
agatgtagcaacacacttgcttcttgaaccatttgagggccggctggagactttgccacactgtgcccctaaacgca

SEQ ID NO: 87910 - DNA, 76 bp, Homo sapiens
acttgcttcttgaaccatttgagggccggctggagactttgccacactgtgcccctaaacgcagcatgtttcctga

SEQ ID NO: 87911 - DNA, 74 bp, Homo sapiens
gaaccatttgagggccggctggagactttgccacactgtgcccctaaacgcagcatgtttcctgagagtaaaaa

SEQ ID NO: 87912 - DNA, 76 bp, Homo sapiens
ctggagactttgccacactgtgcccctaaacgcagcatgtttcctgagagtaaaaatactcttctgggccgacaca

SEQ ID NO: 87913 - DNA, 74 bp, Homo sapiens
cccctaaacgcagcatgtttcctgagagtaaaaatactcttctgggccgacacagcagggaccagcttcacatt

SEQ ID NO: 87914 - DNA, 75 bp, Homo sapiens
aaacgcagcatgtttcctgagagtaaaaatactcttctgggccgacacagcagggaccagcttcacatttattat

SEQ ID NO: 87915 - DNA, 75 bp, Homo sapiens
agtaaaaatactcttctgggccgacacagcagggaccagcttcacatttattattaatatgacacttcaagccac

SEQ ID NO: 87916 - DNA, 77 bp, Homo sapiens
actcttctgggccgacacagcagggaccagcttcacatttattattaatatgacacttcaagccaccgtctgtctcc

SEQ ID NO: 87917 - DNA, 79 bp, Homo sapiens
cacagcagggaccagcttcacatttattattaatatgacacttcaagccaccgtctgtctcccaggtcattgcctgact

SEQ ID NO: 87918 - DNA, 78 bp, Homo sapiens
accagcttcacatttattattaatatgacacttcaagccaccgtctgtctcccaggtcattgcctgacttggtggtga

SEQ ID NO: 87919 - DNA, 77 bp, Homo sapiens
acatttattattaatatgacacttcaagccaccgtctgtctcccaggtcattgcctgacttggtggtgacctcacat

SEQ ID NO: 87920 - DNA, 78 bp, Homo sapiens
attattaatatgacacttcaagccaccgtctgtctcccaggtcattgcctgacttggtggtgacctcacattgtcctc

SEQ ID NO: 87921 - DNA, 76 bp, Homo sapiens
acacttcaagccaccgtctgtctcccaggtcattgcctgacttggtggtgacctcacattgtcctccccgcagcgg

SEQ ID NO: 87922 - DNA, 80 bp, Homo sapiens
tgtctcccaggtcattgcctgacttggtggtgacctcacattgtcctccccgcagcgggagcccatgggcagtggcacac

SEQ ID NO: 87923 - DNA, 84 bp, Homo sapiens
gtcattgcctgacttggtggtgacctcacattgtcctccccgcagcgggagcccatgggcagtggcacactgcactcagctgcc

SEQ ID NO: 87924 - DNA, 85 bp, Homo sapiens
acttggtggtgacctcacattgtcctccccgcagcgggagcccatgggcagtggcacactgcactcagctgccctcatcagctgc

SEQ ID NO: 87925 - DNA, 87 bp, Homo sapiens
tcacattgtcctccccgcagcgggagcccatgggcagtggcacactgcactcagctgccctcatcagctgcctctaatctgcaagtt

SEQ ID NO: 87926 - DNA, 86 bp, Homo sapiens
tgggcagtggcacactgcactcagctgccctcatcagctgcctctaatctgcaagtttcttggccattcttcaacattcaatgttt

SEQ ID NO: 87927 - DNA, 83 bp, Homo sapiens
cacactgcactcagctgccctcatcagctgcctctaatctgcaagtttcttggccattcttcaacattcaatgtttttgggta

SEQ ID NO: 87928 - DNA, 80 bp, Homo sapiens
actcagctgccctcatcagctgcctctaatctgcaagtttcttggccattcttcaacattcaatgtttttgggtaacata

SEQ ID NO: 87929 - DNA, 76 bp, Homo sapiens
ccctcatcagctgcctctaatctgcaagtttcttggccattcttcaacattcaatgtttttgggtaacatagaccc

SEQ ID NO: 87930 - DNA, 72 bp, Homo sapiens
cctctaatctgcaagtttcttggccattcttcaacattcaatgtttttgggtaacatagacccctcctcact

SEQ ID NO: 87931 - DNA, 71 bp, Homo sapiens
aatctgcaagtttcttggccattcttcaacattcaatgtttttgggtaacatagacccctcctcactttct

SEQ ID NO: 87932 - DNA, 75 bp, Homo sapiens
tttcttggccattcttcaacattcaatgtttttgggtaacatagacccctcctcactttcttcatcagagtgtgc

SEQ ID NO: 87933 - DNA, 74 bp, Homo sapiens
attcttcaacattcaatgtttttgggtaacatagacccctcctcactttcttcatcagagtgtgctggattttg

SEQ ID NO: 87934 - DNA, 74 bp, Homo sapiens
attcaatgtttttgggtaacatagacccctcctcactttcttcatcagagtgtgctggattttgggtctgcttg

SEQ ID NO: 87935 - DNA, 77 bp, Homo sapiens
gtaacatagacccctcctcactttcttcatcagagtgtgctggattttgggtctgcttggtgtctcctgagaccaaa

SEQ ID NO: 87936 - DNA, 80 bp, Homo sapiens
tagacccctcctcactttcttcatcagagtgtgctggattttgggtctgcttggtgtctcctgagaccaaatgcatggta

SEQ ID NO: 87937 - DNA, 79 bp, Homo sapiens
ctttcttcatcagagtgtgctggattttgggtctgcttggtgtctcctgagaccaaatgcatggtatcttcccggccaa

SEQ ID NO: 87938 - DNA, 82 bp, Homo sapiens
ttcatcagagtgtgctggattttgggtctgcttggtgtctcctgagaccaaatgcatggtatcttcccggccaagagccaca

SEQ ID NO: 87939 - DNA, 78 bp, Homo sapiens
tggattttgggtctgcttggtgtctcctgagaccaaatgcatggtatcttcccggccaagagccacacagtgaccacg

SEQ ID NO: 87940 - DNA, 78 bp, Homo sapiens
gtctgcttggtgtctcctgagaccaaatgcatggtatcttcccggccaagagccacacagtgaccacggccctcggaa

SEQ ID NO: 87941 - DNA, 77 bp, Homo sapiens
agaccaaatgcatggtatcttcccggccaagagccacacagtgaccacggccctcggaaggcatcccaccctcatca

SEQ ID NO: 87942 - DNA, 78 bp, Homo sapiens
aatgcatggtatcttcccggccaagagccacacagtgaccacggccctcggaaggcatcccaccctcatcagccgtga

SEQ ID NO: 87943 - DNA, 79 bp, Homo sapiens
tgagctctgacggcccagacagcgctgccccgtgccacaaccctcctcccctcaaatctcccagcaggtacccactgca

SEQ ID NO: 87944 - DNA, 77 bp, Homo sapiens
tctgacggcccagacagcgctgccccgtgccacaaccctcctcccctcaaatctcccagcaggtacccactgcacac

SEQ ID NO: 87945 - DNA, 75 bp, Homo sapiens
agacagcgctgccccgtgccacaaccctcctcccctcaaatctcccagcaggtacccactgcacacccgcagccc

SEQ ID NO: 87946 - DNA, 72 bp, Homo sapiens
cccgtgccacaaccctcctcccctcaaatctcccagcaggtacccactgcacacccgcagccccaggtgtag

SEQ ID NO: 87947 - DNA, 75 bp, Homo sapiens
acaaccctcctcccctcaaatctcccagcaggtacccactgcacacccgcagccccaggtgtagtgcctgccatc

SEQ ID NO: 87948 - DNA, 80 bp, Homo sapiens
cctcaaatctcccagcaggtacccactgcacacccgcagccccaggtgtagtgcctgccatctgcagtttggctatggtg

SEQ ID NO: 87949 - DNA, 80 bp, Homo sapiens
tcccagcaggtacccactgcacacccgcagccccaggtgtagtgcctgccatctgcagtttggctatggtggccataaaa

SEQ ID NO: 87950 - DNA, 77 bp, Homo sapiens
tacccactgcacacccgcagccccaggtgtagtgcctgccatctgcagtttggctatggtggccataaaaccctggt

SEQ ID NO: 87951 - DNA, 77 bp, Homo sapiens
acacccgcagccccaggtgtagtgcctgccatctgcagtttggctatggtggccataaaaccctggttctatctcca

SEQ ID NO: 87952 - DNA, 76 bp, Homo sapiens
cccaggtgtagtgcctgccatctgcagtttggctatggtggccataaaaccctggttctatctccactggcctggg

SEQ ID NO: 87953 - DNA, 78 bp, Homo sapiens
tgtagtgcctgccatctgcagtttggctatggtggccataaaaccctggttctatctccactggcctggggaggagcc

SEQ ID NO: 87954 - DNA, 74 bp, Homo sapiens
atctgcagtttggctatggtggccataaaaccctggttctatctccactggcctggggaggagccccctctctc

SEQ ID NO: 87955 - DNA, 70 bp, Homo sapiens
gtttggctatggtggccataaaaccctggttctatctccactggcctggggaggagccccctctctcccc

SEQ ID NO: 87956 - DNA, 75 bp, Homo sapiens
tggccataaaaccctggttctatctccactggcctggggaggagccccctctctccccggtctcacacatgctca

SEQ ID NO: 87957 - DNA, 72 bp, Homo sapiens
aaaccctggttctatctccactggcctggggaggagccccctctctccccggtctcacacatgctcaccacc

SEQ ID NO: 87958 - DNA, 81 bp, Homo sapiens
ctggggaggagccccctctctccccggtctcacacatgctcaccaccggcagcaggtgacattctcacacatgctcaccac

SEQ ID NO: 87959 - DNA, 85 bp, Homo sapiens
agccccctctctccccggtctcacacatgctcaccaccggcagcaggtgacattctcacacatgctcaccaccagcagcaggatg

SEQ ID NO: 87960 - DNA, 92 bp, Homo sapiens
tccccggtctcacacatgctcaccaccggcagcaggtgacattctcacacatgctcaccaccagcagcaggatggctagcatcacacatcaa

SEQ ID NO: 87961 - DNA, 94 bp, Homo sapiens
gtctcacacatgctcaccaccggcagcaggtgacattctcacacatgctcaccaccagcagcaggatggctagcatcacacatcaatgtggtta

SEQ ID NO: 87962 - DNA, 91 bp, Homo sapiens
tcaccaccggcagcaggtgacattctcacacatgctcaccaccagcagcaggatggctagcatcacacatcaatgtggttaggctacagta

SEQ ID NO: 87963 - DNA, 90 bp, Homo sapiens
agcaggtgacattctcacacatgctcaccaccagcagcaggatggctagcatcacacatcaatgtggttaggctacagtatccagctgtt

SEQ ID NO: 87964 - DNA, 88 bp, Homo sapiens
attctcacacatgctcaccaccagcagcaggatggctagcatcacacatcaatgtggttaggctacagtatccagctgtttggccaaa

SEQ ID NO: 87965 - DNA, 87 bp, Homo sapiens
acacatgctcaccaccagcagcaggatggctagcatcacacatcaatgtggttaggctacagtatccagctgtttggccaaacaaca

SEQ ID NO: 87966 - DNA, 84 bp, Homo sapiens
accagcagcaggatggctagcatcacacatcaatgtggttaggctacagtatccagctgtttggccaaacaacagtctagatgt

SEQ ID NO: 87967 - DNA, 84 bp, Homo sapiens
aggatggctagcatcacacatcaatgtggttaggctacagtatccagctgtttggccaaacaacagtctagatgttgccatgaa

SEQ ID NO: 87968 - DNA, 79 bp, Homo sapiens
atcacacatcaatgtggttaggctacagtatccagctgtttggccaaacaacagtctagatgttgccatgaaggtattt

SEQ ID NO: 87969 - DNA, 78 bp, Homo sapiens
acatcaatgtggttaggctacagtatccagctgtttggccaaacaacagtctagatgttgccatgaaggtatttttca

SEQ ID NO: 87970 - DNA, 78 bp, Homo sapiens
ggttaggctacagtatccagctgtttggccaaacaacagtctagatgttgccatgaaggtatttttcagatgagatta

SEQ ID NO: 87971 - DNA, 76 bp, Homo sapiens
aggtgtgagtcactctgccaggccaaaatcagtagactttgagtaaagcagatcaccctccaacgtatgggtgggc

SEQ ID NO: 87972 - DNA, 74 bp, Homo sapiens
actctgccaggccaaaatcagtagactttgagtaaagcagatcaccctccaacgtatgggtgggcctcgtccaa

SEQ ID NO: 87973 - DNA, 73 bp, Homo sapiens
ccaaaatcagtagactttgagtaaagcagatcaccctccaacgtatgggtgggcctcgtccaatcagtcgaag

SEQ ID NO: 87974 - DNA, 73 bp, Homo sapiens
agtagactttgagtaaagcagatcaccctccaacgtatgggtgggcctcgtccaatcagtcgaaggcctggag

SEQ ID NO: 87975 - DNA, 75 bp, Homo sapiens
taaagcagatcaccctccaacgtatgggtgggcctcgtccaatcagtcgaaggcctggagggcctctggcagaag

SEQ ID NO: 87976 - DNA, 74 bp, Homo sapiens
atcaccctccaacgtatgggtgggcctcgtccaatcagtcgaaggcctggagggcctctggcagaaggactcta

SEQ ID NO: 87977 - DNA, 77 bp, Homo sapiens
aacgtatgggtgggcctcgtccaatcagtcgaaggcctggagggcctctggcagaaggactctaggcttgagctgca

SEQ ID NO: 87978 - DNA, 79 bp, Homo sapiens
ggcctcgtccaatcagtcgaaggcctggagggcctctggcagaaggactctaggcttgagctgcaacatccactgtaac

SEQ ID NO: 87979 - DNA, 78 bp, Homo sapiens
aatcagtcgaaggcctggagggcctctggcagaaggactctaggcttgagctgcaacatccactgtaacctaggtctc

SEQ ID NO: 87980 - DNA, 78 bp, Homo sapiens
gtcgaaggcctggagggcctctggcagaaggactctaggcttgagctgcaacatccactgtaacctaggtctccagcc

SEQ ID NO: 87981 - DNA, 78 bp, Homo sapiens
agggcctctggcagaaggactctaggcttgagctgcaacatccactgtaacctaggtctccagcctgccgtcctgccc

SEQ ID NO: 87982 - DNA, 79 bp, Homo sapiens
actctaggcttgagctgcaacatccactgtaacctaggtctccagcctgccgtcctgccctgcagattttgaccttgtc

SEQ ID NO: 87983 - DNA, 77 bp, Homo sapiens
ttgagctgcaacatccactgtaacctaggtctccagcctgccgtcctgccctgcagattttgaccttgtccccccaa

SEQ ID NO: 87984 - DNA, 71 bp, Homo sapiens
cactgtaacctaggtctccagcctgccgtcctgccctgcagattttgaccttgtccccccaaccccataaa

SEQ ID NO: 87985 - DNA, 72 bp, Homo sapiens
taacctaggtctccagcctgccgtcctgccctgcagattttgaccttgtccccccaaccccataaatgctta

SEQ ID NO: 87986 - DNA, 72 bp, Homo sapiens
agcctgccgtcctgccctgcagattttgaccttgtccccccaaccccataaatgcttaagccgattcattaa

SEQ ID NO: 87987 - DNA, 70 bp, Homo sapiens
gtcctgccctgcagattttgaccttgtccccccaaccccataaatgcttaagccgattcattaaaataaa

SEQ ID NO: 87988 - DNA, 68 bp, Homo sapiens
agattttgaccttgtccccccaaccccataaatgcttaagccgattcattaaaataaagatggaccag

SEQ ID NO: 87989 - DNA, 68 bp, Homo sapiens
accttgtccccccaaccccataaatgcttaagccgattcattaaaataaagatggaccaggcacaggg

SEQ ID NO: 87990 - DNA, 73 bp, Homo sapiens
cccccaaccccataaatgcttaagccgattcattaaaataaagatggaccaggcacaggggctcatgcctata

SEQ ID NO: 87991 - DNA, 76 bp, Homo sapiens
atatacacacactccctttagattctgttttgagagccctgaccaatacagactcacaggctaccttttgcaaatg

SEQ ID NO: 87992 - DNA, 75 bp, Homo sapiens
acacactccctttagattctgttttgagagccctgaccaatacagactcacaggctaccttttgcaaatggcctg

SEQ ID NO: 87993 - DNA, 77 bp, Homo sapiens
ctttagattctgttttgagagccctgaccaatacagactcacaggctaccttttgcaaatggcctggagcacgacac

SEQ ID NO: 87994 - DNA, 77 bp, Homo sapiens
tgttttgagagccctgaccaatacagactcacaggctaccttttgcaaatggcctggagcacgacactgcccttaaa

SEQ ID NO: 87995 - DNA, 79 bp, Homo sapiens
tgaccaatacagactcacaggctaccttttgcaaatggcctggagcacgacactgcccttaaagtcttcatgttcagat

SEQ ID NO: 87996 - DNA, 75 bp, Homo sapiens
ctaccttttgcaaatggcctggagcacgacactgcccttaaagtcttcatgttcagattgtcccaggctggcttt

SEQ ID NO: 87997 - DNA, 74 bp, Homo sapiens
acgacactgcccttaaagtcttcatgttcagattgtcccaggctggctttttgtactggctcctggctcttccc

SEQ ID NO: 87998 - DNA, 75 bp, Homo sapiens
ttaaagtcttcatgttcagattgtcccaggctggctttttgtactggctcctggctcttccccaacctcctctga

SEQ ID NO: 87999 - DNA, 75 bp, Homo sapiens
atgttcagattgtcccaggctggctttttgtactggctcctggctcttccccaacctcctctgagcccccactga

SEQ ID NO: 88000 - DNA, 75 bp, Homo sapiens
attgtcccaggctggctttttgtactggctcctggctcttccccaacctcctctgagcccccactgagaccatga

SEQ ID NO: 88001 - DNA, 76 bp, Homo sapiens
gctttttgtactggctcctggctcttccccaacctcctctgagcccccactgagaccatgacactaggagaggatc

SEQ ID NO: 88002 - DNA, 78 bp, Homo sapiens
ttgtactggctcctggctcttccccaacctcctctgagcccccactgagaccatgacactaggagaggatccaggctc

SEQ ID NO: 88003 - DNA, 75 bp, Homo sapiens
gctcttccccaacctcctctgagcccccactgagaccatgacactaggagaggatccaggctccacccggcctgt

SEQ ID NO: 88004 - DNA, 76 bp, Homo sapiens
aacctcctctgagcccccactgagaccatgacactaggagaggatccaggctccacccggcctgttctggccacac

SEQ ID NO: 88005 - DNA, 77 bp, Homo sapiens
cctctgagcccccactgagaccatgacactaggagaggatccaggctccacccggcctgttctggccacaccatggg

SEQ ID NO: 88006 - DNA, 76 bp, Homo sapiens
tgagaccatgacactaggagaggatccaggctccacccggcctgttctggccacaccatggggttacctacctctg

SEQ ID NO: 88007 - DNA, 75 bp, Homo sapiens
atgacactaggagaggatccaggctccacccggcctgttctggccacaccatggggttacctacctctgtgagga

SEQ ID NO: 88008 - DNA, 73 bp, Homo sapiens
acactaggagaggatccaggctccacccggcctgttctggccacaccatggggttacctacctctgtgaggag

SEQ ID NO: 88009 - DNA, 74 bp, Homo sapiens
agaggatccaggctccacccggcctgttctggccacaccatggggttacctacctctgtgaggaggccacattc

SEQ ID NO: 88010 - DNA, 74 bp, Homo sapiens
atccaggctccacccggcctgttctggccacaccatggggttacctacctctgtgaggaggccacattcggtga

SEQ ID NO: 88011 - DNA, 72 bp, Homo sapiens
acccggcctgttctggccacaccatggggttacctacctctgtgaggaggccacattcggtgacctggaagc

SEQ ID NO: 88012 - DNA, 75 bp, Homo sapiens
cctgttctggccacaccatggggttacctacctctgtgaggaggccacattcggtgacctggaagcttcctcatc

SEQ ID NO: 88013 - DNA, 76 bp, Homo sapiens
ttctggccacaccatggggttacctacctctgtgaggaggccacattcggtgacctggaagcttcctcatccgtca

SEQ ID NO: 88014 - DNA, 75 bp, Homo sapiens
acaccatggggttacctacctctgtgaggaggccacattcggtgacctggaagcttcctcatccgtcatggtgac

SEQ ID NO: 88015 - DNA, 78 bp, Homo sapiens
ttacctacctctgtgaggaggccacattcggtgacctggaagcttcctcatccgtcatggtgacgctgcttacagagg

SEQ ID NO: 88016 - DNA, 81 bp, Homo sapiens
tgtgaggaggccacattcggtgacctggaagcttcctcatccgtcatggtgacgctgcttacagaggtctcctgcacggga

SEQ ID NO: 88017 - DNA, 80 bp, Homo sapiens
tcggtgacctggaagcttcctcatccgtcatggtgacgctgcttacagaggtctcctgcacgggacagctccccactgcc

SEQ ID NO: 88018 - DNA, 84 bp, Homo sapiens
tggtgacgctgcttacagaggtctcctgcacgggacagctccccactgccctatgtgcaaggacggccattcctgcatggctca

SEQ ID NO: 88019 - DNA, 80 bp, Homo sapiens
cttacagaggtctcctgcacgggacagctccccactgccctatgtgcaaggacggccattcctgcatggctcagcctagg

SEQ ID NO: 88020 - DNA, 78 bp, Homo sapiens
acagctccccactgccctatgtgcaaggacggccattcctgcatggctcagcctaggggtgtccttgaatttgagtgg

SEQ ID NO: 88021 - DNA, 78 bp, Homo sapiens
actgccctatgtgcaaggacggccattcctgcatggctcagcctaggggtgtccttgaatttgagtgggatgaaggaa

SEQ ID NO: 88022 - DNA, 80 bp, Homo sapiens
tatgtgcaaggacggccattcctgcatggctcagcctaggggtgtccttgaatttgagtgggatgaaggaacatatctgt

SEQ ID NO: 88023 - DNA, 77 bp, Homo sapiens
ggccattcctgcatggctcagcctaggggtgtccttgaatttgagtgggatgaaggaacatatctgtttttcataaa

SEQ ID NO: 88024 - DNA, 73 bp, Homo sapiens
catggctcagcctaggggtgtccttgaatttgagtgggatgaaggaacatatctgtttttcataaactaaaac

SEQ ID NO: 88025 - DNA, 70 bp, Homo sapiens
cctaggggtgtccttgaatttgagtgggatgaaggaacatatctgtttttcataaactaaaacgtagcat

SEQ ID NO: 88026 - DNA, 71 bp, Homo sapiens
gtccttgaatttgagtgggatgaaggaacatatctgtttttcataaactaaaacgtagcatttccttccat

SEQ ID NO: 88027 - DNA, 74 bp, Homo sapiens
tgagtgggatgaaggaacatatctgtttttcataaactaaaacgtagcatttccttccatttgaaacataagca

SEQ ID NO: 88028 - DNA, 72 bp, Homo sapiens
gggatgaaggaacatatctgtttttcataaactaaaacgtagcatttccttccatttgaaacataagcaata

SEQ ID NO: 88029 - DNA, 73 bp, Homo sapiens
atctgtttttcataaactaaaacgtagcatttccttccatttgaaacataagcaataagctacagtggtatca

SEQ ID NO: 88030 - DNA, 76 bp, Homo sapiens
tttcataaactaaaacgtagcatttccttccatttgaaacataagcaataagctacagtggtatcagcactatctg

SEQ ID NO: 88031 - DNA, 78 bp, Homo sapiens
actaaaacgtagcatttccttccatttgaaacataagcaataagctacagtggtatcagcactatctgtgcctctgac

SEQ ID NO: 88032 - DNA, 89 bp, Homo sapiens
ataagcaataagctacagtggtatcagcactatctgtgcctctgacgtgctgttagtgcatccaacgatggctgtgctgctatctggaa

SEQ ID NO: 88033 - DNA, 91 bp, Homo sapiens
tatcagcactatctgtgcctctgacgtgctgttagtgcatccaacgatggctgtgctgctatctggaaatgccacttcagctcaccactaa

SEQ ID NO: 88034 - DNA, 89 bp, Homo sapiens
tctgacgtgctgttagtgcatccaacgatggctgtgctgctatctggaaatgccacttcagctcaccactaattatggcagtgagactc

SEQ ID NO: 88035 - DNA, 88 bp, Homo sapiens
ttagtgcatccaacgatggctgtgctgctatctggaaatgccacttcagctcaccactaattatggcagtgagactcgctactcaatc

SEQ ID NO: 88036 - DNA, 86 bp, Homo sapiens
aacgatggctgtgctgctatctggaaatgccacttcagctcaccactaattatggcagtgagactcgctactcaatctcattatta

SEQ ID NO: 88037 - DNA, 86 bp, Homo sapiens
tgtgctgctatctggaaatgccacttcagctcaccactaattatggcagtgagactcgctactcaatctcattattaatgtgttaa

SEQ ID NO: 88038 - DNA, 81 bp, Homo sapiens
ctatctggaaatgccacttcagctcaccactaattatggcagtgagactcgctactcaatctcattattaatgtgttaaaa

SEQ ID NO: 88039 - DNA, 81 bp, Homo sapiens
cacttcagctcaccactaattatggcagtgagactcgctactcaatctcattattaatgtgttaaaagagtcaatctgtta

SEQ ID NO: 88040 - DNA, 80 bp, Homo sapiens
tcaccactaattatggcagtgagactcgctactcaatctcattattaatgtgttaaaagagtcaatctgttactgggtca

SEQ ID NO: 88041 - DNA, 79 bp, Homo sapiens
taattatggcagtgagactcgctactcaatctcattattaatgtgttaaaagagtcaatctgttactgggtcacatatt

SEQ ID NO: 88042 - DNA, 77 bp, Homo sapiens
agtgagactcgctactcaatctcattattaatgtgttaaaagagtcaatctgttactgggtcacatatttcttttga

SEQ ID NO: 88043 - DNA, 77 bp, Homo sapiens
ctcaatctcattattaatgtgttaaaagagtcaatctgttactgggtcacatatttcttttgagcgactgataactc

SEQ ID NO: 88044 - DNA, 76 bp, Homo sapiens
attattaatgtgttaaaagagtcaatctgttactgggtcacatatttcttttgagcgactgataactctcctgaca

SEQ ID NO: 88045 - DNA, 76 bp, Homo sapiens
aatgtgttaaaagagtcaatctgttactgggtcacatatttcttttgagcgactgataactctcctgacacacaag

SEQ ID NO: 88046 - DNA, 79 bp, Homo sapiens
ttactgggtcacatatttcttttgagcgactgataactctcctgacacacaagtgtgccctctcctcctctctgccaaa

SEQ ID NO: 88047 - DNA, 80 bp, Homo sapiens
ttttgagcgactgataactctcctgacacacaagtgtgccctctcctcctctctgccaaaggcatccccagacctctcaa

SEQ ID NO: 88048 - DNA, 78 bp, Homo sapiens
actgataactctcctgacacacaagtgtgccctctcctcctctctgccaaaggcatccccagacctctcaactaccaa

SEQ ID NO: 88049 - DNA, 77 bp, Homo sapiens
tctcctgacacacaagtgtgccctctcctcctctctgccaaaggcatccccagacctctcaactaccaaggagggga

SEQ ID NO: 88050 - DNA, 74 bp, Homo sapiens
aagtgtgccctctcctcctctctgccaaaggcatccccagacctctcaactaccaaggaggggaggtgacagaa

SEQ ID NO: 88051 - DNA, 78 bp, Homo sapiens
tcctcctctctgccaaaggcatccccagacctctcaactaccaaggaggggaggtgacagaagctgaagctggcagag

SEQ ID NO: 88052 - DNA, 80 bp, Homo sapiens
tctgccaaaggcatccccagacctctcaactaccaaggaggggaggtgacagaagctgaagctggcagagggcagctcaa

SEQ ID NO: 88053 - DNA, 80 bp, Homo sapiens
aactaccaaggaggggaggtgacagaagctgaagctggcagagggcagctcaagtcagaaagcagggctggagtccagca

SEQ ID NO: 88054 - DNA, 83 bp, Homo sapiens
gggaggtgacagaagctgaagctggcagagggcagctcaagtcagaaagcagggctggagtccagcagccaggcccaggccca

SEQ ID NO: 88055 - DNA, 85 bp, Homo sapiens
acagaagctgaagctggcagagggcagctcaagtcagaaagcagggctggagtccagcagccaggcccaggcccagctccactgc

SEQ ID NO: 88056 - DNA, 82 bp, Homo sapiens
aagctggcagagggcagctcaagtcagaaagcagggctggagtccagcagccaggcccaggcccagctccactgccctctaa

SEQ ID NO: 88057 - DNA, 82 bp, Homo sapiens
cagctcaagtcagaaagcagggctggagtccagcagccaggcccaggcccagctccactgccctctaagcggcatggccttg

SEQ ID NO: 88058 - DNA, 82 bp, Homo sapiens
tcagaaagcagggctggagtccagcagccaggcccaggcccagctccactgccctctaagcggcatggccttgggtggatga

SEQ ID NO: 88059 - DNA, 82 bp, Homo sapiens
ggctggagtccagcagccaggcccaggcccagctccactgccctctaagcggcatggccttgggtggatgagtgagcctctc

SEQ ID NO: 88060 - DNA, 82 bp, Homo sapiens
agtccagcagccaggcccaggcccagctccactgccctctaagcggcatggccttgggtggatgagtgagcctctctgagcc

SEQ ID NO: 88061 - DNA, 74 bp, Homo sapiens
gcctcagttttctcttctggaaaaatggggccgtgaagtcccactggccaggctgcgatgacaccaggaaaagc

SEQ ID NO: 88062 - DNA, 74 bp, Homo sapiens
tttctcttctggaaaaatggggccgtgaagtcccactggccaggctgcgatgacaccaggaaaagctaggacaa

SEQ ID NO: 88063 - DNA, 72 bp, Homo sapiens
aaaaatggggccgtgaagtcccactggccaggctgcgatgacaccaggaaaagctaggacaagttcattccc

SEQ ID NO: 88064 - DNA, 76 bp, Homo sapiens
aagtcccactggccaggctgcgatgacaccaggaaaagctaggacaagttcattcccccactcctctcatgattcc

SEQ ID NO: 88065 - DNA, 76 bp, Homo sapiens
aggctgcgatgacaccaggaaaagctaggacaagttcattcccccactcctctcatgattcctcccctccaaatga

SEQ ID NO: 88066 - DNA, 72 bp, Homo sapiens
acaccaggaaaagctaggacaagttcattcccccactcctctcatgattcctcccctccaaatgaaaagcca

SEQ ID NO: 88067 - DNA, 71 bp, Homo sapiens
aaaagctaggacaagttcattcccccactcctctcatgattcctcccctccaaatgaaaagccatttcatt

SEQ ID NO: 88068 - DNA, 73 bp, Homo sapiens
aggacaagttcattcccccactcctctcatgattcctcccctccaaatgaaaagccatttcatttgcttccca

SEQ ID NO: 88069 - DNA, 74 bp, Homo sapiens
tctcatgattcctcccctccaaatgaaaagccatttcatttgcttcccactctccaaatgaaaaaccatgacct

SEQ ID NO: 88070 - DNA, 72 bp, Homo sapiens
attcctcccctccaaatgaaaagccatttcatttgcttcccactctccaaatgaaaaaccatgaccttgtca

SEQ ID NO: 88071 - DNA, 76 bp, Homo sapiens
ctccaaatgaaaagccatttcatttgcttcccactctccaaatgaaaaaccatgaccttgtcacctgctgctccta

SEQ ID NO: 88072 - DNA, 75 bp, Homo sapiens
aatgaaaagccatttcatttgcttcccactctccaaatgaaaaaccatgaccttgtcacctgctgctcctaatcc

SEQ ID NO: 88073 - DNA, 74 bp, Homo sapiens
aaagccatttcatttgcttcccactctccaaatgaaaaaccatgaccttgtcacctgctgctcctaatccccag

SEQ ID NO: 88074 - DNA, 74 bp, Homo sapiens
atttgcttcccactctccaaatgaaaaaccatgaccttgtcacctgctgctcctaatccccaggtggcttctaa

SEQ ID NO: 88075 - DNA, 74 bp, Homo sapiens
ttcccactctccaaatgaaaaaccatgaccttgtcacctgctgctcctaatccccaggtggcttctaaagccaa

SEQ ID NO: 88076 - DNA, 76 bp, Homo sapiens
tctccaaatgaaaaaccatgaccttgtcacctgctgctcctaatccccaggtggcttctaaagccaacagtgacaa

SEQ ID NO: 88077 - DNA, 76 bp, Homo sapiens
aaatgaaaaaccatgaccttgtcacctgctgctcctaatccccaggtggcttctaaagccaacagtgacaagcaga

SEQ ID NO: 88078 - DNA, 75 bp, Homo sapiens
aaaaccatgaccttgtcacctgctgctcctaatccccaggtggcttctaaagccaacagtgacaagcagagggaa

SEQ ID NO: 88079 - DNA, 81 bp, Homo sapiens
tcacctgctgctcctaatccccaggtggcttctaaagccaacagtgacaagcagagggaagagcaggctgccttcatcttc

SEQ ID NO: 88080 - DNA, 76 bp, Homo sapiens
ctcctaatccccaggtggcttctaaagccaacagtgacaagcagagggaagagcaggctgccttcatcttcccctc

SEQ ID NO: 88081 - DNA, 76 bp, Homo sapiens
cttctaaagccaacagtgacaagcagagggaagagcaggctgccttcatcttcccctccgagaccagaccacaagg

SEQ ID NO: 88082 - DNA, 76 bp, Homo sapiens
aacagtgacaagcagagggaagagcaggctgccttcatcttcccctccgagaccagaccacaagggtgaccgagaa

SEQ ID NO: 88083 - DNA, 75 bp, Homo sapiens
agcagagggaagagcaggctgccttcatcttcccctccgagaccagaccacaagggtgaccgagaaggaaagatg

SEQ ID NO: 88084 - DNA, 74 bp, Homo sapiens
ccttcatcttcccctccgagaccagaccacaagggtgaccgagaaggaaagatggagcttatcccatggagaca

SEQ ID NO: 88085 - DNA, 74 bp, Homo sapiens
atcttcccctccgagaccagaccacaagggtgaccgagaaggaaagatggagcttatcccatggagacaagcca

SEQ ID NO: 88086 - DNA, 75 bp, Homo sapiens
agaccagaccacaagggtgaccgagaaggaaagatggagcttatcccatggagacaagccacttctacaagtcca

SEQ ID NO: 88087 - DNA, 73 bp, Homo sapiens
acaagggtgaccgagaaggaaagatggagcttatcccatggagacaagccacttctacaagtccagggatttg

SEQ ID NO: 88088 - DNA, 76 bp, Homo sapiens
cgagaaggaaagatggagcttatcccatggagacaagccacttctacaagtccagggatttgtctgagataataaa

SEQ ID NO: 88089 - DNA, 75 bp, Homo sapiens
aaagatggagcttatcccatggagacaagccacttctacaagtccagggatttgtctgagataataaaggaatgg

SEQ ID NO: 88090 - DNA, 74 bp, Homo sapiens
agcttatcccatggagacaagccacttctacaagtccagggatttgtctgagataataaaggaatggggctggg

SEQ ID NO: 88091 - DNA, 75 bp, Homo sapiens
atggagacaagccacttctacaagtccagggatttgtctgagataataaaggaatggggctggggatcccatcag

SEQ ID NO: 88092 - DNA, 74 bp, Homo sapiens
acttctacaagtccagggatttgtctgagataataaaggaatggggctggggatcccatcagggcaattcagaa

SEQ ID NO: 88093 - DNA, 72 bp, Homo sapiens
aagtccagggatttgtctgagataataaaggaatggggctggggatcccatcagggcaattcagaaaccctg

SEQ ID NO: 88094 - DNA, 72 bp, Homo sapiens
atttgtctgagataataaaggaatggggctggggatcccatcagggcaattcagaaaccctggtgaaaagaa

SEQ ID NO: 88095 - DNA, 72 bp, Homo sapiens
taataaaggaatggggctggggatcccatcagggcaattcagaaaccctggtgaaaagaagggccgctgtca

SEQ ID NO: 88096 - DNA, 73 bp, Homo sapiens
atcccatcagggcaattcagaaaccctggtgaaaagaagggccgctgtcaccacagtggcccaccaggccagg

SEQ ID NO: 88097 - DNA, 73 bp, Homo sapiens
tgaaaagaagggccgctgtcaccacagtggcccaccaggccagggggaagctgtgcccacaccttccagaaaa

SEQ ID NO: 88098 - DNA, 73 bp, Homo sapiens
aagggccgctgtcaccacagtggcccaccaggccagggggaagctgtgcccacaccttccagaaaagatgggc

SEQ ID NO: 88099 - DNA, 75 bp, Homo sapiens
gtggcccaccaggccagggggaagctgtgcccacaccttccagaaaagatgggctctgtgctgcggccctgaggg

SEQ ID NO: 88100 - DNA, 75 bp, Homo sapiens
aggccagggggaagctgtgcccacaccttccagaaaagatgggctctgtgctgcggccctgaggggcttgccctg

SEQ ID NO: 88101 - DNA, 78 bp, Homo sapiens
ctgtgcccacaccttccagaaaagatgggctctgtgctgcggccctgaggggcttgccctgggccctgggcagcataa

SEQ ID NO: 88102 - DNA, 79 bp, Homo sapiens
accttccagaaaagatgggctctgtgctgcggccctgaggggcttgccctgggccctgggcagcataacaatgcatctg

SEQ ID NO: 88103 - DNA, 80 bp, Homo sapiens
aaagatgggctctgtgctgcggccctgaggggcttgccctgggccctgggcagcataacaatgcatctggcccctctgaa

SEQ ID NO: 88104 - DNA, 81 bp, Homo sapiens
ctctgtgctgcggccctgaggggcttgccctgggccctgggcagcataacaatgcatctggcccctctgaagccagggctg

SEQ ID NO: 88105 - DNA, 83 bp, Homo sapiens
gccctgaggggcttgccctgggccctgggcagcataacaatgcatctggcccctctgaagccagggctgtgctgtcactgctg

SEQ ID NO: 88106 - DNA, 84 bp, Homo sapiens
gggcttgccctgggccctgggcagcataacaatgcatctggcccctctgaagccagggctgtgctgtcactgctggccagggca

SEQ ID NO: 88107 - DNA, 82 bp, Homo sapiens
cctgggccctgggcagcataacaatgcatctggcccctctgaagccagggctgtgctgtcactgctggccagggcagggagg

SEQ ID NO: 88108 - DNA, 82 bp, Homo sapiens
aacaatgcatctggcccctctgaagccagggctgtgctgtcactgctggccagggcagggagggctggctccccaaatgcag

SEQ ID NO: 88109 - DNA, 81 bp, Homo sapiens
ccctctgaagccagggctgtgctgtcactgctggccagggcagggagggctggctccccaaatgcagggcctggtgctcca

SEQ ID NO: 88110 - DNA, 79 bp, Homo sapiens
aagccagggctgtgctgtcactgctggccagggcagggagggctggctccccaaatgcagggcctggtgctccaacttg

SEQ ID NO: 88111 - DNA, 75 bp, Homo sapiens
actgctggccagggcagggagggctggctccccaaatgcagggcctggtgctccaacttgggtggaaaacagaga

SEQ ID NO: 88112 - DNA, 72 bp, Homo sapiens
cagggagggctggctccccaaatgcagggcctggtgctccaacttgggtggaaaacagagaccctgaactgg

SEQ ID NO: 88113 - DNA, 73 bp, Homo sapiens
agggctggctccccaaatgcagggcctggtgctccaacttgggtggaaaacagagaccctgaactgggagtga

SEQ ID NO: 88114 - DNA, 75 bp, Homo sapiens
aaatgcagggcctggtgctccaacttgggtggaaaacagagaccctgaactgggagtgagctgccgcacttggga

SEQ ID NO: 88115 - DNA, 77 bp, Homo sapiens
ctggtgctccaacttgggtggaaaacagagaccctgaactgggagtgagctgccgcacttgggaggagagagtgaca

SEQ ID NO: 88116 - DNA, 76 bp, Homo sapiens
aacttgggtggaaaacagagaccctgaactgggagtgagctgccgcacttgggaggagagagtgacatgaacatgg

SEQ ID NO: 88117 - DNA, 80 bp, Homo sapiens
tggaaaacagagaccctgaactgggagtgagctgccgcacttgggaggagagagtgacatgaacatggtgtactctcaac

SEQ ID NO: 88118 - DNA, 80 bp, Homo sapiens
accctgaactgggagtgagctgccgcacttgggaggagagagtgacatgaacatggtgtactctcaacctctgacccata

SEQ ID NO: 88119 - DNA, 80 bp, Homo sapiens
actgggagtgagctgccgcacttgggaggagagagtgacatgaacatggtgtactctcaacctctgacccataccggcaa

SEQ ID NO: 88120 - DNA, 79 bp, Homo sapiens
tgccgcacttgggaggagagagtgacatgaacatggtgtactctcaacctctgacccataccggcaacccgacaggcaa

SEQ ID NO: 88121 - DNA, 77 bp, Homo sapiens
acttgggaggagagagtgacatgaacatggtgtactctcaacctctgacccataccggcaacccgacaggcaaggca

SEQ ID NO: 88122 - DNA, 80 bp, Homo sapiens
agagtgacatgaacatggtgtactctcaacctctgacccataccggcaacccgacaggcaaggcacgcagaacgactgca

SEQ ID NO: 88123 - DNA, 79 bp, Homo sapiens
atgaacatggtgtactctcaacctctgacccataccggcaacccgacaggcaaggcacgcagaacgactgcagccagac

SEQ ID NO: 88124 - DNA, 78 bp, Homo sapiens
tgtactctcaacctctgacccataccggcaacccgacaggcaaggcacgcagaacgactgcagccagacggccccaca

SEQ ID NO: 88125 - DNA, 76 bp, Homo sapiens
aacctctgacccataccggcaacccgacaggcaaggcacgcagaacgactgcagccagacggccccacactccaca

SEQ ID NO: 88126 - DNA, 76 bp, Homo sapiens
ataccggcaacccgacaggcaaggcacgcagaacgactgcagccagacggccccacactccacagacgcctggaag

SEQ ID NO: 88127 - DNA, 75 bp, Homo sapiens
aacccgacaggcaaggcacgcagaacgactgcagccagacggccccacactccacagacgcctggaagggaggcg

SEQ ID NO: 88128 - DNA, 79 bp, Homo sapiens
aaggcacgcagaacgactgcagccagacggccccacactccacagacgcctggaagggaggcgtgtgtccagctgtctc

SEQ ID NO: 88129 - DNA, 78 bp, Homo sapiens
agaacgactgcagccagacggccccacactccacagacgcctggaagggaggcgtgtgtccagctgtctccacctgga

SEQ ID NO: 88130 - DNA, 75 bp, Homo sapiens
agccagacggccccacactccacagacgcctggaagggaggcgtgtgtccagctgtctccacctggactcccaag

SEQ ID NO: 88131 - DNA, 76 bp, Homo sapiens
ccacactccacagacgcctggaagggaggcgtgtgtccagctgtctccacctggactcccaaggctcagttggccc

SEQ ID NO: 88132 - DNA, 78 bp, Homo sapiens
tccacagacgcctggaagggaggcgtgtgtccagctgtctccacctggactcccaaggctcagttggccctgcctcag

SEQ ID NO: 88133 - DNA, 76 bp, Homo sapiens
cctggaagggaggcgtgtgtccagctgtctccacctggactcccaaggctcagttggccctgcctcaggccctgcc

SEQ ID NO: 88134 - DNA, 77 bp, Homo sapiens
aggcgtgtgtccagctgtctccacctggactcccaaggctcagttggccctgcctcaggccctgccccagaagtgcc

SEQ ID NO: 88135 - DNA, 73 bp, Homo sapiens
ccacctggactcccaaggctcagttggccctgcctcaggccctgccccagaagtgcccagctccctaacaggg

SEQ ID NO: 88136 - DNA, 72 bp, Homo sapiens
aaggctcagttggccctgcctcaggccctgccccagaagtgcccagctccctaacaggggctagggaagaaa

SEQ ID NO: 88137 - DNA, 74 bp, Homo sapiens
tcaggccctgccccagaagtgcccagctccctaacaggggctagggaagaaagtggcctacaggcccaccagca

SEQ ID NO: 88138 - DNA, 71 bp, Homo sapiens
cccagaagtgcccagctccctaacaggggctagggaagaaagtggcctacaggcccaccagcaaccccatc

SEQ ID NO: 88139 - DNA, 70 bp, Homo sapiens
cccagctccctaacaggggctagggaagaaagtggcctacaggcccaccagcaaccccatccctttctca

SEQ ID NO: 88140 - DNA, 70 bp, Homo sapiens
ctccctaacaggggctagggaagaaagtggcctacaggcccaccagcaaccccatccctttctcatggcc

SEQ ID NO: 88141 - DNA, 71 bp, Homo sapiens
tagggaagaaagtggcctacaggcccaccagcaaccccatccctttctcatggcccgggaaaggcctgctg

SEQ ID NO: 88142 - DNA, 71 bp, Homo sapiens
aagaaagtggcctacaggcccaccagcaaccccatccctttctcatggcccgggaaaggcctgctgggtca

SEQ ID NO: 88143 - DNA, 75 bp, Homo sapiens
tacaggcccaccagcaaccccatccctttctcatggcccgggaaaggcctgctgggtcactgaccactcctcata

SEQ ID NO: 88144 - DNA, 80 bp, Homo sapiens
atccctttctcatggcccgggaaaggcctgctgggtcactgaccactcctcatagctctttgctctcttgtctgcacaca

SEQ ID NO: 88145 - DNA, 84 bp, Homo sapiens
tctcatggcccgggaaaggcctgctgggtcactgaccactcctcatagctctttgctctcttgtctgcacacacagatgtccac

SEQ ID NO: 88146 - DNA, 81 bp, Homo sapiens
cgggaaaggcctgctgggtcactgaccactcctcatagctctttgctctcttgtctgcacacacagatgtccaccagtggg

SEQ ID NO: 88147 - DNA, 84 bp, Homo sapiens
tgggtcactgaccactcctcatagctctttgctctcttgtctgcacacacagatgtccaccagtggggacaatcctgaagacaa

SEQ ID NO: 88148 - DNA, 81 bp, Homo sapiens
accactcctcatagctctttgctctcttgtctgcacacacagatgtccaccagtggggacaatcctgaagacaattgaaag

SEQ ID NO: 88149 - DNA, 78 bp, Homo sapiens
tgcacacacagatgtccaccagtggggacaatcctgaagacaattgaaaggtgatctaacctacgagggcacagtaaa

SEQ ID NO: 88150 - DNA, 75 bp, Homo sapiens
acagatgtccaccagtggggacaatcctgaagacaattgaaaggtgatctaacctacgagggcacagtaaagtga

SEQ ID NO: 88151 - DNA, 74 bp, Homo sapiens
aatcctgaagacaattgaaaggtgatctaacctacgagggcacagtaaagtgagttcatggcctcttgtcccaa

SEQ ID NO: 88152 - DNA, 74 bp, Homo sapiens
aagacaattgaaaggtgatctaacctacgagggcacagtaaagtgagttcatggcctcttgtcccaagcaggta

SEQ ID NO: 88153 - DNA, 74 bp, Homo sapiens
aaaggtgatctaacctacgagggcacagtaaagtgagttcatggcctcttgtcccaagcaggtagacagaaaca

SEQ ID NO: 88154 - DNA, 75 bp, Homo sapiens
ctaacctacgagggcacagtaaagtgagttcatggcctcttgtcccaagcaggtagacagaaacaacaatcagta

SEQ ID NO: 88155 - DNA, 76 bp, Homo sapiens
acagtaaagtgagttcatggcctcttgtcccaagcaggtagacagaaacaacaatcagtaccagaaatccatccaa

SEQ ID NO: 88156 - DNA, 76 bp, Homo sapiens
aaagtgagttcatggcctcttgtcccaagcaggtagacagaaacaacaatcagtaccagaaatccatccaaggaca

SEQ ID NO: 88157 - DNA, 77 bp, Homo sapiens
atggcctcttgtcccaagcaggtagacagaaacaacaatcagtaccagaaatccatccaaggacaggcaggtccaca

SEQ ID NO: 88158 - DNA, 78 bp, Homo sapiens
tgtcccaagcaggtagacagaaacaacaatcagtaccagaaatccatccaaggacaggcaggtccacacagaccagag

SEQ ID NO: 88159 - DNA, 77 bp, Homo sapiens
tagacagaaacaacaatcagtaccagaaatccatccaaggacaggcaggtccacacagaccagaggcccccaagata

SEQ ID NO: 88160 - DNA, 76 bp, Homo sapiens
aaacaacaatcagtaccagaaatccatccaaggacaggcaggtccacacagaccagaggcccccaagatatctcca

SEQ ID NO: 88161 - DNA, 75 bp, Homo sapiens
agtaccagaaatccatccaaggacaggcaggtccacacagaccagaggcccccaagatatctccaggtctttctc

SEQ ID NO: 88162 - DNA, 74 bp, Homo sapiens
aatccatccaaggacaggcaggtccacacagaccagaggcccccaagatatctccaggtctttctcccttattc

SEQ ID NO: 88163 - DNA, 73 bp, Homo sapiens
acaggcaggtccacacagaccagaggcccccaagatatctccaggtctttctcccttattccaacctcactcc

SEQ ID NO: 88164 - DNA, 73 bp, Homo sapiens
ggtccacacagaccagaggcccccaagatatctccaggtctttctcccttattccaacctcactcctcctctc

SEQ ID NO: 88165 - DNA, 74 bp, Homo sapiens
agaggcccccaagatatctccaggtctttctcccttattccaacctcactcctcctctccactgcccagagtga

SEQ ID NO: 88166 - DNA, 75 bp, Homo sapiens
agatatctccaggtctttctcccttattccaacctcactcctcctctccactgcccagagtgaatcgccacaaaa

SEQ ID NO: 88167 - DNA, 73 bp, Homo sapiens
tctccaggtctttctcccttattccaacctcactcctcctctccactgcccagagtgaatcgccacaaaaaaa

SEQ ID NO: 88168 - DNA, 71 bp, Homo sapiens
tttctcccttattccaacctcactcctcctctccactgcccagagtgaatcgccacaaaaaaaagtttctg

SEQ ID NO: 88169 - DNA, 73 bp, Homo sapiens
attccaacctcactcctcctctccactgcccagagtgaatcgccacaaaaaaaagtttctgtttggagactga

SEQ ID NO: 88170 - DNA, 72 bp, Homo sapiens
actcctcctctccactgcccagagtgaatcgccacaaaaaaaagtttctgtttggagactgaggtaggagga

SEQ ID NO: 88171 - DNA, 80 bp, Homo sapiens
agagagagagaaaaaggagagatttggatgtagacggtgccagccatgacagcatcagctcccagcccacgtaggaagga

SEQ ID NO: 88172 - DNA, 76 bp, Homo sapiens
aaaaaggagagatttggatgtagacggtgccagccatgacagcatcagctcccagcccacgtaggaaggaaaggaa

SEQ ID NO: 88173 - DNA, 77 bp, Homo sapiens
agagatttggatgtagacggtgccagccatgacagcatcagctcccagcccacgtaggaaggaaaggaagaaagtta

SEQ ID NO: 88174 - DNA, 73 bp, Homo sapiens
tagacggtgccagccatgacagcatcagctcccagcccacgtaggaaggaaaggaagaaagttagtttctttt

SEQ ID NO: 88175 - DNA, 72 bp, Homo sapiens
tgccagccatgacagcatcagctcccagcccacgtaggaaggaaaggaagaaagttagtttcttttttgttt

SEQ ID NO: 88176 - DNA, 75 bp, Homo sapiens
ccctccccctccccacctgtgctgatgacagaccccactgtccagccttctgggctctgaccaggtggggcatct

SEQ ID NO: 88177 - DNA, 78 bp, Homo sapiens
ccctccccacctgtgctgatgacagaccccactgtccagccttctgggctctgaccaggtggggcatcttcctgtctc

SEQ ID NO: 88178 - DNA, 83 bp, Homo sapiens
tgctgatgacagaccccactgtccagccttctgggctctgaccaggtggggcatcttcctgtctctgccttcagagcttggga

SEQ ID NO: 88179 - DNA, 79 bp, Homo sapiens
atgacagaccccactgtccagccttctgggctctgaccaggtggggcatcttcctgtctctgccttcagagcttgggag

SEQ ID NO: 88180 - DNA, 78 bp, Homo sapiens
acagaccccactgtccagccttctgggctctgaccaggtggggcatcttcctgtctctgccttcagagcttgggaggc

SEQ ID NO: 88181 - DNA, 76 bp, Homo sapiens
accccactgtccagccttctgggctctgaccaggtggggcatcttcctgtctctgccttcagagcttgggaggccc

SEQ ID NO: 88182 - DNA, 75 bp, Homo sapiens
ccttctgggctctgaccaggtggggcatcttcctgtctctgccttcagagcttgggaggccccacccgtacctga

SEQ ID NO: 88183 - DNA, 77 bp, Homo sapiens
ttctgggctctgaccaggtggggcatcttcctgtctctgccttcagagcttgggaggccccacccgtacctgagctg

SEQ ID NO: 88184 - DNA, 78 bp, Homo sapiens
tctgaccaggtggggcatcttcctgtctctgccttcagagcttgggaggccccacccgtacctgagctggagcctcac

SEQ ID NO: 88185 - DNA, 75 bp, Homo sapiens
aggtggggcatcttcctgtctctgccttcagagcttgggaggccccacccgtacctgagctggagcctcaccttc

SEQ ID NO: 88186 - DNA, 77 bp, Homo sapiens
gcatcttcctgtctctgccttcagagcttgggaggccccacccgtacctgagctggagcctcaccttcctccacttc

SEQ ID NO: 88187 - DNA, 75 bp, Homo sapiens
atcttcctgtctctgccttcagagcttgggaggccccacccgtacctgagctggagcctcaccttcctccacttc

SEQ ID NO: 88188 - DNA, 74 bp, Homo sapiens
tctctgccttcagagcttgggaggccccacccgtacctgagctggagcctcaccttcctccacttccctagccg

SEQ ID NO: 88189 - DNA, 72 bp, Homo sapiens
cttgggaggccccacccgtacctgagctggagcctcaccttcctccacttccctagccgggtggcatctgga

SEQ ID NO: 88190 - DNA, 72 bp, Homo sapiens
cccacccgtacctgagctggagcctcaccttcctccacttccctagccgggtggcatctggacaactctacc

SEQ ID NO: 88191 - DNA, 75 bp, Homo sapiens
tacctgagctggagcctcaccttcctccacttccctagccgggtggcatctggacaactctaccctgtacctcta

SEQ ID NO: 88192 - DNA, 76 bp, Homo sapiens
agcctcaccttcctccacttccctagccgggtggcatctggacaactctaccctgtacctctaggcagatgtgatc

SEQ ID NO: 88193 - DNA, 78 bp, Homo sapiens
tcctccacttccctagccgggtggcatctggacaactctaccctgtacctctaggcagatgtgatctcagaaccacca

SEQ ID NO: 88194 - DNA, 78 bp, Homo sapiens
acttccctagccgggtggcatctggacaactctaccctgtacctctaggcagatgtgatctcagaaccaccatgtgcc

SEQ ID NO: 88195 - DNA, 82 bp, Homo sapiens
gtggcatctggacaactctaccctgtacctctaggcagatgtgatctcagaaccaccatgtgcccaggatttgagagttgaa

SEQ ID NO: 88196 - DNA, 79 bp, Homo sapiens
ctctaccctgtacctctaggcagatgtgatctcagaaccaccatgtgcccaggatttgagagttgaaaaagacagcaag

SEQ ID NO: 88197 - DNA, 81 bp, Homo sapiens
tacctctaggcagatgtgatctcagaaccaccatgtgcccaggatttgagagttgaaaaagacagcaaggcagaagtccag

SEQ ID NO: 88198 - DNA, 82 bp, Homo sapiens
agatgtgatctcagaaccaccatgtgcccaggatttgagagttgaaaaagacagcaaggcagaagtccagggcatatggctg

SEQ ID NO: 88199 - DNA, 79 bp, Homo sapiens
aaccaccatgtgcccaggatttgagagttgaaaaagacagcaaggcagaagtccagggcatatggctggcgctaactca

SEQ ID NO: 88200 - DNA, 79 bp, Homo sapiens
atgtgcccaggatttgagagttgaaaaagacagcaaggcagaagtccagggcatatggctggcgctaactcaatcaagg

SEQ ID NO: 88201 - DNA, 79 bp, Homo sapiens
tttgagagttgaaaaagacagcaaggcagaagtccagggcatatggctggcgctaactcaatcaaggtgtgggctataa

SEQ ID NO: 88202 - DNA, 78 bp, Homo sapiens
agcaaggcagaagtccagggcatatggctggcgctaactcaatcaaggtgtgggctataacatgttaggccctgggaa

SEQ ID NO: 88203 - DNA, 79 bp, Homo sapiens
aagtccagggcatatggctggcgctaactcaatcaaggtgtgggctataacatgttaggccctgggaactcatcagcca

SEQ ID NO: 88204 - DNA, 80 bp, Homo sapiens
atatggctggcgctaactcaatcaaggtgtgggctataacatgttaggccctgggaactcatcagccaaggagacagatg

SEQ ID NO: 88205 - DNA, 79 bp, Homo sapiens
ctggcgctaactcaatcaaggtgtgggctataacatgttaggccctgggaactcatcagccaaggagacagatgtggcc

SEQ ID NO: 88206 - DNA, 79 bp, Homo sapiens
aatcaaggtgtgggctataacatgttaggccctgggaactcatcagccaaggagacagatgtggccctgcccattcaga

SEQ ID NO: 88207 - DNA, 79 bp, Homo sapiens
gtgtgggctataacatgttaggccctgggaactcatcagccaaggagacagatgtggccctgcccattcagagcccctg

SEQ ID NO: 88208 - DNA, 79 bp, Homo sapiens
tgggaactcatcagccaaggagacagatgtggccctgcccattcagagcccctgggcacaaatgttggagtagacaaaa

SEQ ID NO: 88209 - DNA, 78 bp, Homo sapiens
actcatcagccaaggagacagatgtggccctgcccattcagagcccctgggcacaaatgttggagtagacaaaaacta

SEQ ID NO: 88210 - DNA, 74 bp, Homo sapiens
atgtggccctgcccattcagagcccctgggcacaaatgttggagtagacaaaaactagagtgacacagggaccc

SEQ ID NO: 88211 - DNA, 73 bp, Homo sapiens
attcagagcccctgggcacaaatgttggagtagacaaaaactagagtgacacagggacccctggcagggctgt

SEQ ID NO: 88212 - DNA, 74 bp, Homo sapiens
cctgggcacaaatgttggagtagacaaaaactagagtgacacagggacccctggcagggctgttctaactgcca

SEQ ID NO: 88213 - DNA, 71 bp, Homo sapiens
aatgttggagtagacaaaaactagagtgacacagggacccctggcagggctgttctaactgccaagggtta

SEQ ID NO: 88214 - DNA, 70 bp, Homo sapiens
agtagacaaaaactagagtgacacagggacccctggcagggctgttctaactgccaagggttagggacca

SEQ ID NO: 88215 - DNA, 74 bp, Homo sapiens
acacagggacccctggcagggctgttctaactgccaagggttagggaccactgagccgagagccgagagcagaa

SEQ ID NO: 88216 - DNA, 80 bp, Homo sapiens
ctggcagggctgttctaactgccaagggttagggaccactgagccgagagccgagagcagaagtgcaggaggcgagctga

SEQ ID NO: 88217 - DNA, 77 bp, Homo sapiens
agggctgttctaactgccaagggttagggaccactgagccgagagccgagagcagaagtgcaggaggcgagctgacc

SEQ ID NO: 88218 - DNA, 80 bp, Homo sapiens
taactgccaagggttagggaccactgagccgagagccgagagcagaagtgcaggaggcgagctgaccccaggagactgca

SEQ ID NO: 88219 - DNA, 79 bp, Homo sapiens
gttagggaccactgagccgagagccgagagcagaagtgcaggaggcgagctgaccccaggagactgcaggccttgtggg

SEQ ID NO: 88220 - DNA, 81 bp, Homo sapiens
actgagccgagagccgagagcagaagtgcaggaggcgagctgaccccaggagactgcaggccttgtggggtggtctgtgga

SEQ ID NO: 88221 - DNA, 79 bp, Homo sapiens
agagccgagagcagaagtgcaggaggcgagctgaccccaggagactgcaggccttgtggggtggtctgtggaggagtgg

SEQ ID NO: 88222 - DNA, 76 bp, Homo sapiens
accccaggagactgcaggccttgtggggtggtctgtggaggagtggggagggtcagtgtctggcatgacaaggctc

SEQ ID NO: 88223 - DNA, 79 bp, Homo sapiens
agactgcaggccttgtggggtggtctgtggaggagtggggagggtcagtgtctggcatgacaaggctcgggagcatctg

SEQ ID NO: 88224 - DNA, 75 bp, Homo sapiens
ccttgtggggtggtctgtggaggagtggggagggtcagtgtctggcatgacaaggctcgggagcatctgggggag

SEQ ID NO: 88225 - DNA, 76 bp, Homo sapiens
ggtggtctgtggaggagtggggagggtcagtgtctggcatgacaaggctcgggagcatctgggggagggcctggcc

SEQ ID NO: 88226 - DNA, 78 bp, Homo sapiens
agtggggagggtcagtgtctggcatgacaaggctcgggagcatctgggggagggcctggccccacgtgcacatcacca

SEQ ID NO: 88227 - DNA, 79 bp, Homo sapiens
agggtcagtgtctggcatgacaaggctcgggagcatctgggggagggcctggccccacgtgcacatcaccagcaccctg

SEQ ID NO: 88228 - DNA, 81 bp, Homo sapiens
tgtctggcatgacaaggctcgggagcatctgggggagggcctggccccacgtgcacatcaccagcaccctgggctgctggg

SEQ ID NO: 88229 - DNA, 78 bp, Homo sapiens
catctgggggagggcctggccccacgtgcacatcaccagcaccctgggctgctggggtgtggagaggaactggcaaca

SEQ ID NO: 88230 - DNA, 78 bp, Homo sapiens
agggcctggccccacgtgcacatcaccagcaccctgggctgctggggtgtggagaggaactggcaacagcagcaaaaa

SEQ ID NO: 88231 - DNA, 80 bp, Homo sapiens
cccacgtgcacatcaccagcaccctgggctgctggggtgtggagaggaactggcaacagcagcaaaaagcccaagcagga

SEQ ID NO: 88232 - DNA, 78 bp, Homo sapiens
acatcaccagcaccctgggctgctggggtgtggagaggaactggcaacagcagcaaaaagcccaagcaggagttggtg

SEQ ID NO: 88233 - DNA, 75 bp, Homo sapiens
agcaccctgggctgctggggtgtggagaggaactggcaacagcagcaaaaagcccaagcaggagttggtgggccc

SEQ ID NO: 88234 - DNA, 75 bp, Homo sapiens
ctgctggggtgtggagaggaactggcaacagcagcaaaaagcccaagcaggagttggtgggccccaccattccca

SEQ ID NO: 88235 - DNA, 75 bp, Homo sapiens
gtgtggagaggaactggcaacagcagcaaaaagcccaagcaggagttggtgggccccaccattcccacccactca

SEQ ID NO: 88236 - DNA, 74 bp, Homo sapiens
aactggcaacagcagcaaaaagcccaagcaggagttggtgggccccaccattcccacccactcactcgcatccc

SEQ ID NO: 88237 - DNA, 75 bp, Homo sapiens
acagcagcaaaaagcccaagcaggagttggtgggccccaccattcccacccactcactcgcatccccatcaggga

SEQ ID NO: 88238 - DNA, 73 bp, Homo sapiens
aaagcccaagcaggagttggtgggccccaccattcccacccactcactcgcatccccatcagggagggcacaa

SEQ ID NO: 88239 - DNA, 78 bp, Homo sapiens
cccaccattcccacccactcactcgcatccccatcagggagggcacaacacccacccagctgccctgagtagcacagc

SEQ ID NO: 88240 - DNA, 79 bp, Homo sapiens
ccacccactcactcgcatccccatcagggagggcacaacacccacccagctgccctgagtagcacagcttgcaacttcc

SEQ ID NO: 88241 - DNA, 81 bp, Homo sapiens
actcactcgcatccccatcagggagggcacaacacccacccagctgccctgagtagcacagcttgcaacttccttgcttca

SEQ ID NO: 88242 - DNA, 80 bp, Homo sapiens
ccatcagggagggcacaacacccacccagctgccctgagtagcacagcttgcaacttccttgcttcaggcgtcaggagga

SEQ ID NO: 88243 - DNA, 75 bp, Homo sapiens
acccacccagctgccctgagtagcacagcttgcaacttccttgcttcaggcgtcaggaggaccctaaaggcttct

SEQ ID NO: 88244 - DNA, 78 bp, Homo sapiens
agtagcacagcttgcaacttccttgcttcaggcgtcaggaggaccctaaaggcttcttggaagcagcgccccgcatga

SEQ ID NO: 88245 - DNA, 76 bp, Homo sapiens
ttgcaacttccttgcttcaggcgtcaggaggaccctaaaggcttcttggaagcagcgccccgcatgagggtgccca

SEQ ID NO: 88246 - DNA, 76 bp, Homo sapiens
ttccttgcttcaggcgtcaggaggaccctaaaggcttcttggaagcagcgccccgcatgagggtgcccagctccca

SEQ ID NO: 88247 - DNA, 77 bp, Homo sapiens
aggcgtcaggaggaccctaaaggcttcttggaagcagcgccccgcatgagggtgcccagctcccactgcagctgaag

SEQ ID NO: 88248 - DNA, 81 bp, Homo sapiens
ttcttggaagcagcgccccgcatgagggtgcccagctcccactgcagctgaaggaggagggccgagagcctgcggagacag

SEQ ID NO: 88249 - DNA, 81 bp, Homo sapiens
agcagcgccccgcatgagggtgcccagctcccactgcagctgaaggaggagggccgagagcctgcggagacagggctggta

SEQ ID NO: 88250 - DNA, 82 bp, Homo sapiens
catgagggtgcccagctcccactgcagctgaaggaggagggccgagagcctgcggagacagggctggtaggcagagtgacag

SEQ ID NO: 88251 - DNA, 82 bp, Homo sapiens
tcccactgcagctgaaggaggagggccgagagcctgcggagacagggctggtaggcagagtgacaggcggcagtggctgccc

SEQ ID NO: 88252 - DNA, 81 bp, Homo sapiens
tgaaggaggagggccgagagcctgcggagacagggctggtaggcagagtgacaggcggcagtggctgccccactgaggaga

SEQ ID NO: 88253 - DNA, 79 bp, Homo sapiens
agggccgagagcctgcggagacagggctggtaggcagagtgacaggcggcagtggctgccccactgaggagaagaggag

SEQ ID NO: 88254 - DNA, 81 bp, Homo sapiens
agcctgcggagacagggctggtaggcagagtgacaggcggcagtggctgccccactgaggagaagaggaggagccacaagc

SEQ ID NO: 88255 - DNA, 81 bp, Homo sapiens
agacagggctggtaggcagagtgacaggcggcagtggctgccccactgaggagaagaggaggagccacaagccctggctga

SEQ ID NO: 88256 - DNA, 84 bp, Homo sapiens
gtaggcagagtgacaggcggcagtggctgccccactgaggagaagaggaggagccacaagccctggctgagtgagcagaagcca

SEQ ID NO: 88257 - DNA, 81 bp, Homo sapiens
gtgacaggcggcagtggctgccccactgaggagaagaggaggagccacaagccctggctgagtgagcagaagccagtcccc

SEQ ID NO: 88258 - DNA, 77 bp, Homo sapiens
actgaggagaagaggaggagccacaagccctggctgagtgagcagaagccagtccccctgccccctgtacgagtggc

SEQ ID NO: 88259 - DNA, 76 bp, Homo sapiens
aagaggaggagccacaagccctggctgagtgagcagaagccagtccccctgccccctgtacgagtggccactctgg

SEQ ID NO: 88260 - DNA, 82 bp, Homo sapiens
tggctgagtgagcagaagccagtccccctgccccctgtacgagtggccactctggggcagtatgcactgcagtggagggatg

SEQ ID NO: 88261 - DNA, 78 bp, Homo sapiens
agtgagcagaagccagtccccctgccccctgtacgagtggccactctggggcagtatgcactgcagtggagggatggg

SEQ ID NO: 88262 - DNA, 78 bp, Homo sapiens
agccagtccccctgccccctgtacgagtggccactctggggcagtatgcactgcagtggagggatggggaggcaggca

SEQ ID NO: 88263 - DNA, 79 bp, Homo sapiens
cccctgtacgagtggccactctggggcagtatgcactgcagtggagggatggggaggcaggcaggtcccacgcgcctca

SEQ ID NO: 88264 - DNA, 78 bp, Homo sapiens
ctcagcttcccaatactgaccaagacctgggctgtaggggagacttggacatggacagcgccagccagggcaggccca

SEQ ID NO: 88265 - DNA, 77 bp, Homo sapiens
cttcccaatactgaccaagacctgggctgtaggggagacttggacatggacagcgccagccagggcaggcccactga

SEQ ID NO: 88266 - DNA, 79 bp, Homo sapiens
caagacctgggctgtaggggagacttggacatggacagcgccagccagggcaggcccactgaggcctcttctgatctta

SEQ ID NO: 88267 - DNA, 79 bp, Homo sapiens
agacttggacatggacagcgccagccagggcaggcccactgaggcctcttctgatcttaccttggactatgaggcttag

SEQ ID NO: 88268 - DNA, 80 bp, Homo sapiens
tggacatggacagcgccagccagggcaggcccactgaggcctcttctgatcttaccttggactatgaggcttagggtgga

SEQ ID NO: 88269 - DNA, 77 bp, Homo sapiens
agcgccagccagggcaggcccactgaggcctcttctgatcttaccttggactatgaggcttagggtggagggctgag

SEQ ID NO: 88270 - DNA, 77 bp, Homo sapiens
agggcaggcccactgaggcctcttctgatcttaccttggactatgaggcttagggtggagggctgaggagcaggctc

SEQ ID NO: 88271 - DNA, 77 bp, Homo sapiens
actgaggcctcttctgatcttaccttggactatgaggcttagggtggagggctgaggagcaggctcccgccacatgg

SEQ ID NO: 88272 - DNA, 77 bp, Homo sapiens
ctcttctgatcttaccttggactatgaggcttagggtggagggctgaggagcaggctcccgccacatgggcctgaaa

SEQ ID NO: 88273 - DNA, 76 bp, Homo sapiens
actatgaggcttagggtggagggctgaggagcaggctcccgccacatgggcctgaaaggggctagcctccgtgagc

SEQ ID NO: 88274 - DNA, 76 bp, Homo sapiens
ctgaggagcaggctcccgccacatgggcctgaaaggggctagcctccgtgagcccctaccctacctgctccacaca

SEQ ID NO: 88275 - DNA, 72 bp, Homo sapiens
ctcccgccacatgggcctgaaaggggctagcctccgtgagcccctaccctacctgctccacacagtgggcgt

SEQ ID NO: 88276 - DNA, 72 bp, Homo sapiens
atgggcctgaaaggggctagcctccgtgagcccctaccctacctgctccacacagtgggcgtttggaggtga

SEQ ID NO: 88277 - DNA, 72 bp, Homo sapiens
cctgaaaggggctagcctccgtgagcccctaccctacctgctccacacagtgggcgtttggaggtgatgtgg

SEQ ID NO: 88278 - DNA, 74 bp, Homo sapiens
gctagcctccgtgagcccctaccctacctgctccacacagtgggcgtttggaggtgatgtgggaggtttatatg

SEQ ID NO: 88279 - DNA, 73 bp, Homo sapiens
ctagcctccgtgagcccctaccctacctgctccacacagtgggcgtttggaggtgatgtgggaggtttatatg

SEQ ID NO: 88280 - DNA, 71 bp, Homo sapiens
cctccgtgagcccctaccctacctgctccacacagtgggcgtttggaggtgatgtgggaggtttatatggg

SEQ ID NO: 88281 - DNA, 75 bp, Homo sapiens
gtgagcccctaccctacctgctccacacagtgggcgtttggaggtgatgtgggaggtttatatggggactgcaga

SEQ ID NO: 88282 - DNA, 75 bp, Homo sapiens
taccctacctgctccacacagtgggcgtttggaggtgatgtgggaggtttatatggggactgcagagggcgtgga

SEQ ID NO: 88283 - DNA, 79 bp, Homo sapiens
acctgctccacacagtgggcgtttggaggtgatgtgggaggtttatatggggactgcagagggcgtggagatgcaggca

SEQ ID NO: 88284 - DNA, 78 bp, Homo sapiens
acagtgggcgtttggaggtgatgtgggaggtttatatggggactgcagagggcgtggagatgcaggcacagtgccacc

SEQ ID NO: 88285 - DNA, 79 bp, Homo sapiens
cgtttggaggtgatgtgggaggtttatatggggactgcagagggcgtggagatgcaggcacagtgccaccgacactcca

SEQ ID NO: 88286 - DNA, 80 bp, Homo sapiens
tttggaggtgatgtgggaggtttatatggggactgcagagggcgtggagatgcaggcacagtgccaccgacactccactc

SEQ ID NO: 88287 - DNA, 78 bp, Homo sapiens
tgggaggtttatatggggactgcagagggcgtggagatgcaggcacagtgccaccgacactccactcggtccccacaa

SEQ ID NO: 88288 - DNA, 77 bp, Homo sapiens
gtttatatggggactgcagagggcgtggagatgcaggcacagtgccaccgacactccactcggtccccacaacctcc

SEQ ID NO: 88289 - DNA, 77 bp, Homo sapiens
actgcagagggcgtggagatgcaggcacagtgccaccgacactccactcggtccccacaacctcccggacagatggg

SEQ ID NO: 88290 - DNA, 75 bp, Homo sapiens
tggagatgcaggcacagtgccaccgacactccactcggtccccacaacctcccggacagatggggttactccctc

SEQ ID NO: 88291 - DNA, 70 bp, Homo sapiens
aggcacagtgccaccgacactccactcggtccccacaacctcccggacagatggggttactccctcctta

SEQ ID NO: 88292 - DNA, 70 bp, Homo sapiens
agtgccaccgacactccactcggtccccacaacctcccggacagatggggttactccctccttatggatg

SEQ ID NO: 88293 - DNA, 67 bp, Homo sapiens
acactccactcggtccccacaacctcccggacagatggggttactccctccttatggatggggaaac

SEQ ID NO: 88294 - DNA, 75 bp, Homo sapiens
aggtgaggccatggctgcgccccacaaaagcacctttcagtactactgggccaaacattagaacttgataccaga

SEQ ID NO: 88295 - DNA, 77 bp, Homo sapiens
aggccatggctgcgccccacaaaagcacctttcagtactactgggccaaacattagaacttgataccagagctgtga

SEQ ID NO: 88296 - DNA, 76 bp, Homo sapiens
cccacaaaagcacctttcagtactactgggccaaacattagaacttgataccagagctgtgacggccatgcctgag

SEQ ID NO: 88297 - DNA, 77 bp, Homo sapiens
aaaagcacctttcagtactactgggccaaacattagaacttgataccagagctgtgacggccatgcctgagtgtgtg

SEQ ID NO: 88298 - DNA, 78 bp, Homo sapiens
tactactgggccaaacattagaacttgataccagagctgtgacggccatgcctgagtgtgtgggcgtggttgtgaaaa

SEQ ID NO: 88299 - DNA, 77 bp, Homo sapiens
ccaaacattagaacttgataccagagctgtgacggccatgcctgagtgtgtgggcgtggttgtgaaaagagccaccc

SEQ ID NO: 88300 - DNA, 78 bp, Homo sapiens
attagaacttgataccagagctgtgacggccatgcctgagtgtgtgggcgtggttgtgaaaagagccacccgtgagcc

SEQ ID NO: 88301 - DNA, 77 bp, Homo sapiens
ataccagagctgtgacggccatgcctgagtgtgtgggcgtggttgtgaaaagagccacccgtgagccccaagaggtg

SEQ ID NO: 88302 - DNA, 76 bp, Homo sapiens
tgtgacggccatgcctgagtgtgtgggcgtggttgtgaaaagagccacccgtgagccccaagaggtggccgggcca

SEQ ID NO: 88303 - DNA, 76 bp, Homo sapiens
atgcctgagtgtgtgggcgtggttgtgaaaagagccacccgtgagccccaagaggtggccgggccactgcctcatc

SEQ ID NO: 88304 - DNA, 75 bp, Homo sapiens
aaagagccacccgtgagccccaagaggtggccgggccactgcctcatccagaaaactcccctgcatgcaggaaga

SEQ ID NO: 88305 - DNA, 85 bp, Homo sapiens
ccactgcctcatccagaaaactcccctgcatgcaggaagagctcaagggctgctgtgcagagacactgggtgaggaaagagctca

SEQ ID NO: 88306 - DNA, 81 bp, Homo sapiens
aaaactcccctgcatgcaggaagagctcaagggctgctgtgcagagacactgggtgaggaaagagctcaaaatctccctga

SEQ ID NO: 88307 - DNA, 83 bp, Homo sapiens
aagagctcaagggctgctgtgcagagacactgggtgaggaaagagctcaaaatctccctgagggatgactcaggagacagaga

SEQ ID NO: 88308 - DNA, 84 bp, Homo sapiens
ctgctgtgcagagacactgggtgaggaaagagctcaaaatctccctgagggatgactcaggagacagagacctgaccagactca

SEQ ID NO: 88309 - DNA, 81 bp, Homo sapiens
agagacactgggtgaggaaagagctcaaaatctccctgagggatgactcaggagacagagacctgaccagactcagcctca

SEQ ID NO: 88310 - DNA, 83 bp, Homo sapiens
gtgaggaaagagctcaaaatctccctgagggatgactcaggagacagagacctgaccagactcagcctcacactgcacccaga

SEQ ID NO: 88311 - DNA, 82 bp, Homo sapiens
aaagagctcaaaatctccctgagggatgactcaggagacagagacctgaccagactcagcctcacactgcacccagagtgct

SEQ ID NO: 88312 - DNA, 81 bp, Homo sapiens
aaatctccctgagggatgactcaggagacagagacctgaccagactcagcctcacactgcacccagagtgcttcctctact

SEQ ID NO: 88313 - DNA, 81 bp, Homo sapiens
agggatgactcaggagacagagacctgaccagactcagcctcacactgcacccagagtgcttcctctacttcctgtggtaa

SEQ ID NO: 88314 - DNA, 81 bp, Homo sapiens
agacagagacctgaccagactcagcctcacactgcacccagagtgcttcctctacttcctgtggtaacagagcctgtcttc

SEQ ID NO: 88315 - DNA, 79 bp, Homo sapiens
agacctgaccagactcagcctcacactgcacccagagtgcttcctctacttcctgtggtaacagagcctgtcttcctgg

SEQ ID NO: 88316 - DNA, 80 bp, Homo sapiens
tcagcctcacactgcacccagagtgcttcctctacttcctgtggtaacagagcctgtcttcctgggctcgagaataaata

SEQ ID NO: 88317 - DNA, 73 bp, Homo sapiens
agagtgcttcctctacttcctgtggtaacagagcctgtcttcctgggctcgagaataaataaaaccaggtcaa

SEQ ID NO: 88318 - DNA, 74 bp, Homo sapiens
tctacttcctgtggtaacagagcctgtcttcctgggctcgagaataaataaaaccaggtcaagtgcaggtaaca

SEQ ID NO: 88319 - DNA, 71 bp, Homo sapiens
tgtggtaacagagcctgtcttcctgggctcgagaataaataaaaccaggtcaagtgcaggtaacaactttt

SEQ ID NO: 88320 - DNA, 68 bp, Homo sapiens
aacagagcctgtcttcctgggctcgagaataaataaaaccaggtcaagtgcaggtaacaacttttttt

SEQ ID NO: 88321 - DNA, 71 bp, Homo sapiens
ttttttttttaccttattagaaacatatagtttggcaggagctacagagatcatgggttggaggcgtggag

SEQ ID NO: 88322 - DNA, 72 bp, Homo sapiens
tttttaccttattagaaacatatagtttggcaggagctacagagatcatgggttggaggcgtggagtagggt

SEQ ID NO: 88323 - DNA, 74 bp, Homo sapiens
attagaaacatatagtttggcaggagctacagagatcatgggttggaggcgtggagtagggttggggtttggca

SEQ ID NO: 88324 - DNA, 76 bp, Homo sapiens
tatagtttggcaggagctacagagatcatgggttggaggcgtggagtagggttggggtttggcacaagtccaggca

SEQ ID NO: 88325 - DNA, 73 bp, Homo sapiens
aggagctacagagatcatgggttggaggcgtggagtagggttggggtttggcacaagtccaggcacaggccct

SEQ ID NO: 88326 - DNA, 71 bp, Homo sapiens
agagatcatgggttggaggcgtggagtagggttggggtttggcacaagtccaggcacaggcccttccccag

SEQ ID NO: 88327 - DNA, 68 bp, Homo sapiens
ggttggaggcgtggagtagggttggggtttggcacaagtccaggcacaggcccttccccagtgtcccc

SEQ ID NO: 88328 - DNA, 71 bp, Homo sapiens
gtggagtagggttggggtttggcacaagtccaggcacaggcccttccccagtgtcccctgccagcaggtgg

SEQ ID NO: 88329 - DNA, 78 bp, Homo sapiens
acaggcccttccccagtgtcccctgccagcaggtggggccagctccaggctgctgctgtccactcaggtggtgcggac

SEQ ID NO: 88330 - DNA, 77 bp, Homo sapiens
cccttccccagtgtcccctgccagcaggtggggccagctccaggctgctgctgtccactcaggtggtgcggactggg

SEQ ID NO: 88331 - DNA, 76 bp, Homo sapiens
aggtggggccagctccaggctgctgctgtccactcaggtggtgcggactgggggaggtccttgccaaggccaggcg

SEQ ID NO: 88332 - DNA, 76 bp, Homo sapiens
ctgctgctgtccactcaggtggtgcggactgggggaggtccttgccaaggccaggcgggtagcacaggaacctgtg

SEQ ID NO: 88333 - DNA, 75 bp, Homo sapiens
tgtccactcaggtggtgcggactgggggaggtccttgccaaggccaggcgggtagcacaggaacctgtggctgtg

SEQ ID NO: 88334 - DNA, 74 bp, Homo sapiens
gtgcggactgggggaggtccttgccaaggccaggcgggtagcacaggaacctgtggctgtggcccgtcatacca

SEQ ID NO: 88335 - DNA, 73 bp, Homo sapiens
ggggaggtccttgccaaggccaggcgggtagcacaggaacctgtggctgtggcccgtcataccaagtcttcca

SEQ ID NO: 88336 - DNA, 77 bp, Homo sapiens
caggcgggtagcacaggaacctgtggctgtggcccgtcataccaagtcttccactatgggcaaacatcacttcaata

SEQ ID NO: 88337 - DNA, 77 bp, Homo sapiens
tagcacaggaacctgtggctgtggcccgtcataccaagtcttccactatgggcaaacatcacttcaataatataaaa

SEQ ID NO: 88338 - DNA, 74 bp, Homo sapiens
aacctgtggctgtggcccgtcataccaagtcttccactatgggcaaacatcacttcaataatataaaaaatcca

SEQ ID NO: 88339 - DNA, 73 bp, Homo sapiens
tgtggcccgtcataccaagtcttccactatgggcaaacatcacttcaataatataaaaaatccagaaggaaaa

SEQ ID NO: 88340 - DNA, 75 bp, Homo sapiens
tcataccaagtcttccactatgggcaaacatcacttcaataatataaaaaatccagaaggaaaagtctagtctga

SEQ ID NO: 88341 - DNA, 74 bp, Homo sapiens
gtcttccactatgggcaaacatcacttcaataatataaaaaatccagaaggaaaagtctagtctgaaatgacaa

SEQ ID NO: 88342 - DNA, 75 bp, Homo sapiens
atgggcaaacatcacttcaataatataaaaaatccagaaggaaaagtctagtctgaaatgacaatgagataccac

SEQ ID NO: 88343 - DNA, 76 bp, Homo sapiens
tataaaaaatccagaaggaaaagtctagtctgaaatgacaatgagataccaccacatgcttattagaatgcccaaa

SEQ ID NO: 88344 - DNA, 77 bp, Homo sapiens
aatccagaaggaaaagtctagtctgaaatgacaatgagataccaccacatgcttattagaatgcccaaaactcagaa

SEQ ID NO: 88345 - DNA, 79 bp, Homo sapiens
aaaagtctagtctgaaatgacaatgagataccaccacatgcttattagaatgcccaaaactcagaacagacagcaccaa

SEQ ID NO: 88346 - DNA, 82 bp, Homo sapiens
aaatgacaatgagataccaccacatgcttattagaatgcccaaaactcagaacagacagcaccaagtgctggtgaggacatg

SEQ ID NO: 88347 - DNA, 80 bp, Homo sapiens
cacatgcttattagaatgcccaaaactcagaacagacagcaccaagtgctggtgaggacatggggcaacaggaacctcat

SEQ ID NO: 88348 - DNA, 78 bp, Homo sapiens
cttattagaatgcccaaaactcagaacagacagcaccaagtgctggtgaggacatggggcaacaggaacctcattcac

SEQ ID NO: 88349 - DNA, 79 bp, Homo sapiens
accaagtgctggtgaggacatggggcaacaggaacctcattcactgccggtggacatgcaaaatggtgcggcctcaaca

SEQ ID NO: 88350 - DNA, 79 bp, Homo sapiens
ggtgaggacatggggcaacaggaacctcattcactgccggtggacatgcaaaatggtgcggcctcaacagattcctgaa

SEQ ID NO: 88351 - DNA, 76 bp, Homo sapiens
atggggcaacaggaacctcattcactgccggtggacatgcaaaatggtgcggcctcaacagattcctgaaaaacta

SEQ ID NO: 88352 - DNA, 74 bp, Homo sapiens
aacaggaacctcattcactgccggtggacatgcaaaatggtgcggcctcaacagattcctgaaaaactaaacta

SEQ ID NO: 88353 - DNA, 76 bp, Homo sapiens
attcactgccggtggacatgcaaaatggtgcggcctcaacagattcctgaaaaactaaactaacatactctcacca

SEQ ID NO: 88354 - DNA, 78 bp, Homo sapiens
tggacatgcaaaatggtgcggcctcaacagattcctgaaaaactaaactaacatactctcaccatccaatgcaataat

SEQ ID NO: 88355 - DNA, 78 bp, Homo sapiens
atgcaaaatggtgcggcctcaacagattcctgaaaaactaaactaacatactctcaccatccaatgcaataattgcac

SEQ ID NO: 88356 - DNA, 75 bp, Homo sapiens
ggcctcaacagattcctgaaaaactaaactaacatactctcaccatccaatgcaataattgcacgccttggtatt

SEQ ID NO: 88357 - DNA, 75 bp, Homo sapiens
aacagattcctgaaaaactaaactaacatactctcaccatccaatgcaataattgcacgccttggtatttgccca

SEQ ID NO: 88358 - DNA, 75 bp, Homo sapiens
aaaaactaaactaacatactctcaccatccaatgcaataattgcacgccttggtatttgcccagaggcactggaa

SEQ ID NO: 88359 - DNA, 81 bp, Homo sapiens
taacatactctcaccatccaatgcaataattgcacgccttggtatttgcccagaggcactggaaacgtgcgtccacatgaa

SEQ ID NO: 88360 - DNA, 77 bp, Homo sapiens
accatccaatgcaataattgcacgccttggtatttgcccagaggcactggaaacgtgcgtccacatgaaaaatacta

SEQ ID NO: 88361 - DNA, 76 bp, Homo sapiens
aatgcaataattgcacgccttggtatttgcccagaggcactggaaacgtgcgtccacatgaaaaatactaattaca

SEQ ID NO: 88362 - DNA, 77 bp, Homo sapiens
tatttgcccagaggcactggaaacgtgcgtccacatgaaaaatactaattacagcagctttatttgtcattgcctaa

SEQ ID NO: 88363 - DNA, 76 bp, Homo sapiens
agaggcactggaaacgtgcgtccacatgaaaaatactaattacagcagctttatttgtcattgcctaaactcagaa

SEQ ID NO: 88364 - DNA, 75 bp, Homo sapiens
aaacgtgcgtccacatgaaaaatactaattacagcagctttatttgtcattgcctaaactcagaagcaaacaaga

SEQ ID NO: 88365 - DNA, 80 bp, Homo sapiens
gaatggataaataaaccatgtcacatccagacaacaggatataacaagaaatgagctaggaaaccatgcaaagacatgaa

SEQ ID NO: 88366 - DNA, 77 bp, Homo sapiens
ataaataaaccatgtcacatccagacaacaggatataacaagaaatgagctaggaaaccatgcaaagacatgaaggg

SEQ ID NO: 88367 - DNA, 79 bp, Homo sapiens
tgtcacatccagacaacaggatataacaagaaatgagctaggaaaccatgcaaagacatgaaggggccttaaaagcata

SEQ ID NO: 88368 - DNA, 74 bp, Homo sapiens
acaacaggatataacaagaaatgagctaggaaaccatgcaaagacatgaaggggccttaaaagcatacgactaa

SEQ ID NO: 88369 - DNA, 75 bp, Homo sapiens
atataacaagaaatgagctaggaaaccatgcaaagacatgaaggggccttaaaagcatacgactaaatcagccag

SEQ ID NO: 88370 - DNA, 75 bp, Homo sapiens
aagaaatgagctaggaaaccatgcaaagacatgaaggggccttaaaagcatacgactaaatcagccagtctagaa

SEQ ID NO: 88371 - DNA, 76 bp, Homo sapiens
ctaggaaaccatgcaaagacatgaaggggccttaaaagcatacgactaaatcagccagtctagaaaggctgcacac

SEQ ID NO: 88372 - DNA, 77 bp, Homo sapiens
aagacatgaaggggccttaaaagcatacgactaaatcagccagtctagaaaggctgcacactgcacagttccaacta

SEQ ID NO: 88373 - DNA, 77 bp, Homo sapiens
atgaaggggccttaaaagcatacgactaaatcagccagtctagaaaggctgcacactgcacagttccaactacagaa

SEQ ID NO: 88374 - DNA, 79 bp, Homo sapiens
taaaagcatacgactaaatcagccagtctagaaaggctgcacactgcacagttccaactacagaacacgctggagaaaa

SEQ ID NO: 88375 - DNA, 77 bp, Homo sapiens
tacgactaaatcagccagtctagaaaggctgcacactgcacagttccaactacagaacacgctggagaaaaacaaaa

SEQ ID NO: 88376 - DNA, 77 bp, Homo sapiens
agccagtctagaaaggctgcacactgcacagttccaactacagaacacgctggagaaaaacaaaactatggagacag

SEQ ID NO: 88377 - DNA, 78 bp, Homo sapiens
acactgcacagttccaactacagaacacgctggagaaaaacaaaactatggagacagtaagagcatcggtggatgcca

SEQ ID NO: 88378 - DNA, 76 bp, Homo sapiens
agttccaactacagaacacgctggagaaaaacaaaactatggagacagtaagagcatcggtggatgccagcgggca

SEQ ID NO: 88379 - DNA, 74 bp, Homo sapiens
agaaaaacaaaactatggagacagtaagagcatcggtggatgccagcgggcagaggggaggaaggggatgagta

SEQ ID NO: 88380 - DNA, 77 bp, Homo sapiens
aactatggagacagtaagagcatcggtggatgccagcgggcagaggggaggaaggggatgagtaggtagagcttgga

SEQ ID NO: 88381 - DNA, 74 bp, Homo sapiens
acagtaagagcatcggtggatgccagcgggcagaggggaggaaggggatgagtaggtagagcttggaggatttt

SEQ ID NO: 88382 - DNA, 73 bp, Homo sapiens
aagagcatcggtggatgccagcgggcagaggggaggaaggggatgagtaggtagagcttggaggatttttggg

SEQ ID NO: 88383 - DNA, 76 bp, Homo sapiens
atgccagcgggcagaggggaggaaggggatgagtaggtagagcttggaggatttttggggcagtgacatgactgtg

SEQ ID NO: 88384 - DNA, 76 bp, Homo sapiens
cagaggggaggaaggggatgagtaggtagagcttggaggatttttggggcagtgacatgactgtgtggcactacca

SEQ ID NO: 88385 - DNA, 80 bp, Homo sapiens
gaaggggatgagtaggtagagcttggaggatttttggggcagtgacatgactgtgtggcactaccatggtggacatgtca

SEQ ID NO: 88386 - DNA, 82 bp, Homo sapiens
ggatgagtaggtagagcttggaggatttttggggcagtgacatgactgtgtggcactaccatggtggacatgtcattataca

SEQ ID NO: 88387 - DNA, 81 bp, Homo sapiens
tagagcttggaggatttttggggcagtgacatgactgtgtggcactaccatggtggacatgtcattatacatttgtctaaa

SEQ ID NO: 88388 - DNA, 79 bp, Homo sapiens
atttttggggcagtgacatgactgtgtggcactaccatggtggacatgtcattatacatttgtctaaacccacagaatg

SEQ ID NO: 88389 - DNA, 80 bp, Homo sapiens
tgtcattatacatttgtctaaacccacagaatgtacagcaccaagagtgtgtcccagtggaaactcagggctccagatga

SEQ ID NO: 88390 - DNA, 78 bp, Homo sapiens
tacatttgtctaaacccacagaatgtacagcaccaagagtgtgtcccagtggaaactcagggctccagatgataaaga

SEQ ID NO: 88391 - DNA, 77 bp, Homo sapiens
gtctaaacccacagaatgtacagcaccaagagtgtgtcccagtggaaactcagggctccagatgataaagacgtcag

SEQ ID NO: 88392 - DNA, 78 bp, Homo sapiens
acagaatgtacagcaccaagagtgtgtcccagtggaaactcagggctccagatgataaagacgtcaggctgggtgtgg

SEQ ID NO: 88393 - DNA, 77 bp, Homo sapiens
aaaaaaaaatgtcagtgcaggctcatccattggaaacaaatgtgccactctgtggggtggatgggacactgagaatg

SEQ ID NO: 88394 - DNA, 78 bp, Homo sapiens
aaaatgtcagtgcaggctcatccattggaaacaaatgtgccactctgtggggtggatgggacactgagaatgggggag

SEQ ID NO: 88395 - DNA, 78 bp, Homo sapiens
aggctcatccattggaaacaaatgtgccactctgtggggtggatgggacactgagaatgggggaggctgcaggtgcgg

SEQ ID NO: 88396 - DNA, 75 bp, Homo sapiens
attggaaacaaatgtgccactctgtggggtggatgggacactgagaatgggggaggctgcaggtgcggggaggcg

SEQ ID NO: 88397 - DNA, 77 bp, Homo sapiens
tgtgccactctgtggggtggatgggacactgagaatgggggaggctgcaggtgcggggaggcggggagaagtatata

SEQ ID NO: 88398 - DNA, 74 bp, Homo sapiens
tctgtggggtggatgggacactgagaatgggggaggctgcaggtgcggggaggcggggagaagtatataggaac

SEQ ID NO: 88399 - DNA, 73 bp, Homo sapiens
atgggacactgagaatgggggaggctgcaggtgcggggaggcggggagaagtatataggaactctaccttcca

SEQ ID NO: 88400 - DNA, 72 bp, Homo sapiens
tgagaatgggggaggctgcaggtgcggggaggcggggagaagtatataggaactctaccttccactcaactt

SEQ ID NO: 88401 - DNA, 74 bp, Homo sapiens
ggaggctgcaggtgcggggaggcggggagaagtatataggaactctaccttccactcaactttgctcagtattg

SEQ ID NO: 88402 - DNA, 72 bp, Homo sapiens
aggcggggagaagtatataggaactctaccttccactcaactttgctcagtattggccagagccaacccgga

SEQ ID NO: 88403 - DNA, 73 bp, Homo sapiens
gtatataggaactctaccttccactcaactttgctcagtattggccagagccaacccggatcactaaaactat

SEQ ID NO: 88404 - DNA, 74 bp, Homo sapiens
taggaactctaccttccactcaactttgctcagtattggccagagccaacccggatcactaaaactatttctga

SEQ ID NO: 88405 - DNA, 73 bp, Homo sapiens
tccactcaactttgctcagtattggccagagccaacccggatcactaaaactatttctgacctaaaattagat

SEQ ID NO: 88406 - DNA, 71 bp, Homo sapiens
aactttgctcagtattggccagagccaacccggatcactaaaactatttctgacctaaaattagatttcga

SEQ ID NO: 88407 - DNA, 72 bp, Homo sapiens
tattggccagagccaacccggatcactaaaactatttctgacctaaaattagatttcgagaagggcttcata

SEQ ID NO: 88408 - DNA, 71 bp, Homo sapiens
agagccaacccggatcactaaaactatttctgacctaaaattagatttcgagaagggcttcatagtagcag

SEQ ID NO: 88409 - DNA, 71 bp, Homo sapiens
atcactaaaactatttctgacctaaaattagatttcgagaagggcttcatagtagcaggacctgacgggac

SEQ ID NO: 88410 - DNA, 69 bp, Homo sapiens
aaaactatttctgacctaaaattagatttcgagaagggcttcatagtagcaggacctgacgggacccta

SEQ ID NO: 88411 - DNA, 74 bp, Homo sapiens
ctaaaattagatttcgagaagggcttcatagtagcaggacctgacgggaccctagggcagtcgcctcagctaga

SEQ ID NO: 88412 - DNA, 75 bp, Homo sapiens
attagatttcgagaagggcttcatagtagcaggacctgacgggaccctagggcagtcgcctcagctagaagacaa

SEQ ID NO: 88413 - DNA, 74 bp, Homo sapiens
aagggcttcatagtagcaggacctgacgggaccctagggcagtcgcctcagctagaagacaaccaggaggtcta

SEQ ID NO: 88414 - DNA, 74 bp, Homo sapiens
atagtagcaggacctgacgggaccctagggcagtcgcctcagctagaagacaaccaggaggtctattcagttag

SEQ ID NO: 88415 - DNA, 71 bp, Homo sapiens
aggacctgacgggaccctagggcagtcgcctcagctagaagacaaccaggaggtctattcagttaggaagg

SEQ ID NO: 88416 - DNA, 70 bp, Homo sapiens
ggaccctagggcagtcgcctcagctagaagacaaccaggaggtctattcagttaggaagggaaaacaaaa

SEQ ID NO: 88417 - DNA, 73 bp, Homo sapiens
agtcgcctcagctagaagacaaccaggaggtctattcagttaggaagggaaaacaaaactgtctttctgatgc

SEQ ID NO: 88418 - DNA, 77 bp, Homo sapiens
tagaagacaaccaggaggtctattcagttaggaagggaaaacaaaactgtctttctgatgccaggcagctgcactca

SEQ ID NO: 88419 - DNA, 74 bp, Homo sapiens
acaaccaggaggtctattcagttaggaagggaaaacaaaactgtctttctgatgccaggcagctgcactcaacg

SEQ ID NO: 88420 - DNA, 80 bp, Homo sapiens
tctattcagttaggaagggaaaacaaaactgtctttctgatgccaggcagctgcactcaacggtgtgagactgcacagta

SEQ ID NO: 88421 - DNA, 84 bp, Homo sapiens
tctttctgatgccaggcagctgcactcaacggtgtgagactgcacagtaccatccaaactcctggatttctatgattctgggaa

SEQ ID NO: 88422 - DNA, 80 bp, Homo sapiens
ccaggcagctgcactcaacggtgtgagactgcacagtaccatccaaactcctggatttctatgattctgggaaaacagaa

SEQ ID NO: 88423 - DNA, 80 bp, Homo sapiens
agctgcactcaacggtgtgagactgcacagtaccatccaaactcctggatttctatgattctgggaaaacagaatcggca

SEQ ID NO: 88424 - DNA, 77 bp, Homo sapiens
aacggtgtgagactgcacagtaccatccaaactcctggatttctatgattctgggaaaacagaatcggcagtgtcac

SEQ ID NO: 88425 - DNA, 78 bp, Homo sapiens
tgcacagtaccatccaaactcctggatttctatgattctgggaaaacagaatcggcagtgtcacgaccaggacagaag

SEQ ID NO: 88426 - DNA, 72 bp, Homo sapiens
aactcctggatttctatgattctgggaaaacagaatcggcagtgtcacgaccaggacagaaggtccggttta

SEQ ID NO: 88427 - DNA, 71 bp, Homo sapiens
gggaaaacagaatcggcagtgtcacgaccaggacagaaggtccggtttagcttcagggaccctgtgagacc

SEQ ID NO: 88428 - DNA, 72 bp, Homo sapiens
aatcggcagtgtcacgaccaggacagaaggtccggtttagcttcagggaccctgtgagaccctccccaatga

SEQ ID NO: 88429 - DNA, 73 bp, Homo sapiens
agtgtcacgaccaggacagaaggtccggtttagcttcagggaccctgtgagaccctccccaatgaccagcagc

SEQ ID NO: 88430 - DNA, 74 bp, Homo sapiens
acagaaggtccggtttagcttcagggaccctgtgagaccctccccaatgaccagcagctgggctggcctctcag

SEQ ID NO: 88431 - DNA, 74 bp, Homo sapiens
aggtccggtttagcttcagggaccctgtgagaccctccccaatgaccagcagctgggctggcctctcaggacat

SEQ ID NO: 88432 - DNA, 79 bp, Homo sapiens
tagcttcagggaccctgtgagaccctccccaatgaccagcagctgggctggcctctcaggacattgctgcccccggatg

SEQ ID NO: 88433 - DNA, 77 bp, Homo sapiens
accctgtgagaccctccccaatgaccagcagctgggctggcctctcaggacattgctgcccccggatgggtagacag

SEQ ID NO: 88434 - DNA, 78 bp, Homo sapiens
tccccaatgaccagcagctgggctggcctctcaggacattgctgcccccggatgggtagacaggctgggttaagaaca

SEQ ID NO: 88435 - DNA, 78 bp, Homo sapiens
aatgaccagcagctgggctggcctctcaggacattgctgcccccggatgggtagacaggctgggttaagaacacagaa

SEQ ID NO: 88436 - DNA, 76 bp, Homo sapiens
tgggctggcctctcaggacattgctgcccccggatgggtagacaggctgggttaagaacacagaaagctgggtgtg

SEQ ID NO: 88437 - DNA, 73 bp, Homo sapiens
acaacaacaaaaacccacacaaatgtgtgcactagggacaaagctaaaggctggctccctcctgcacgccacc

SEQ ID NO: 88438 - DNA, 72 bp, Homo sapiens
aacaaaaacccacacaaatgtgtgcactagggacaaagctaaaggctggctccctcctgcacgccaccctag

SEQ ID NO: 88439 - DNA, 77 bp, Homo sapiens
acaaatgtgtgcactagggacaaagctaaaggctggctccctcctgcacgccaccctaggccactcattctcaagcc

SEQ ID NO: 88440 - DNA, 80 bp, Homo sapiens
tgtgcactagggacaaagctaaaggctggctccctcctgcacgccaccctaggccactcattctcaagcccaggatgcca

SEQ ID NO: 88441 - DNA, 76 bp, Homo sapiens
acaaagctaaaggctggctccctcctgcacgccaccctaggccactcattctcaagcccaggatgccaggagggaa

SEQ ID NO: 88442 - DNA, 76 bp, Homo sapiens
aaaggctggctccctcctgcacgccaccctaggccactcattctcaagcccaggatgccaggagggaagcctggcc

SEQ ID NO: 88443 - DNA, 77 bp, Homo sapiens
tccctcctgcacgccaccctaggccactcattctcaagcccaggatgccaggagggaagcctggcctcagccttaaa

SEQ ID NO: 88444 - DNA, 79 bp, Homo sapiens
accctaggccactcattctcaagcccaggatgccaggagggaagcctggcctcagccttaaagctgaggcagctcttga

SEQ ID NO: 88445 - DNA, 81 bp, Homo sapiens
actcattctcaagcccaggatgccaggagggaagcctggcctcagccttaaagctgaggcagctcttgaggcagtgtcaac

SEQ ID NO: 88446 - DNA, 80 bp, Homo sapiens
ttctcaagcccaggatgccaggagggaagcctggcctcagccttaaagctgaggcagctcttgaggcagtgtcaacgacc

SEQ ID NO: 88447 - DNA, 81 bp, Homo sapiens
atgccaggagggaagcctggcctcagccttaaagctgaggcagctcttgaggcagtgtcaacgacctctcctagctggaga

SEQ ID NO: 88448 - DNA, 81 bp, Homo sapiens
agggaagcctggcctcagccttaaagctgaggcagctcttgaggcagtgtcaacgacctctcctagctggagatcccagca

SEQ ID NO: 88449 - DNA, 85 bp, Homo sapiens
cctcagccttaaagctgaggcagctcttgaggcagtgtcaacgacctctcctagctggagatcccagcagcacacttcactcatc

SEQ ID NO: 88450 - DNA, 85 bp, Homo sapiens
ccttaaagctgaggcagctcttgaggcagtgtcaacgacctctcctagctggagatcccagcagcacacttcactcatcccagca

SEQ ID NO: 88451 - DNA, 84 bp, Homo sapiens
aggcagctcttgaggcagtgtcaacgacctctcctagctggagatcccagcagcacacttcactcatcccagcagggatgggag

SEQ ID NO: 88452 - DNA, 84 bp, Homo sapiens
ttgaggcagtgtcaacgacctctcctagctggagatcccagcagcacacttcactcatcccagcagggatgggagggctcaaca

SEQ ID NO: 88453 - DNA, 82 bp, Homo sapiens
aacgacctctcctagctggagatcccagcagcacacttcactcatcccagcagggatgggagggctcaacaggaatgacaca

SEQ ID NO: 88454 - DNA, 83 bp, Homo sapiens
tcctagctggagatcccagcagcacacttcactcatcccagcagggatgggagggctcaacaggaatgacacaagggccacca

SEQ ID NO: 88455 - DNA, 84 bp, Homo sapiens
agatcccagcagcacacttcactcatcccagcagggatgggagggctcaacaggaatgacacaagggccaccagcagctgctgg

SEQ ID NO: 88456 - DNA, 80 bp, Homo sapiens
acacttcactcatcccagcagggatgggagggctcaacaggaatgacacaagggccaccagcagctgctgggaagtgaaa

SEQ ID NO: 88457 - DNA, 79 bp, Homo sapiens
actcatcccagcagggatgggagggctcaacaggaatgacacaagggccaccagcagctgctgggaagtgaaagcaaaa

SEQ ID NO: 88458 - DNA, 76 bp, Homo sapiens
agggatgggagggctcaacaggaatgacacaagggccaccagcagctgctgggaagtgaaagcaaaacttctatct

SEQ ID NO: 88459 - DNA, 77 bp, Homo sapiens
ggctcaacaggaatgacacaagggccaccagcagctgctgggaagtgaaagcaaaacttctatcttggggcccaaga

SEQ ID NO: 88460 - DNA, 74 bp, Homo sapiens
aacaggaatgacacaagggccaccagcagctgctgggaagtgaaagcaaaacttctatcttggggcccaagaac

SEQ ID NO: 88461 - DNA, 77 bp, Homo sapiens
gcagctgctgggaagtgaaagcaaaacttctatcttggggcccaagaactgagatcagaagattcacttccaactta

SEQ ID NO: 88462 - DNA, 77 bp, Homo sapiens
ggaagtgaaagcaaaacttctatcttggggcccaagaactgagatcagaagattcacttccaacttatgatctgcca

SEQ ID NO: 88463 - DNA, 78 bp, Homo sapiens
acttctatcttggggcccaagaactgagatcagaagattcacttccaacttatgatctgccatttaaaagctgtgtga

SEQ ID NO: 88464 - DNA, 78 bp, Homo sapiens
cccaagaactgagatcagaagattcacttccaacttatgatctgccatttaaaagctgtgtgacctcagtaagacact

SEQ ID NO: 88465 - DNA, 76 bp, Homo sapiens
acttccaacttatgatctgccatttaaaagctgtgtgacctcagtaagacacttaacctctctgggctttgtcaca

SEQ ID NO: 88466 - DNA, 81 bp, Homo sapiens
tatgatctgccatttaaaagctgtgtgacctcagtaagacacttaacctctctgggctttgtcacacagggtgatgatcta

SEQ ID NO: 88467 - DNA, 77 bp, Homo sapiens
tttaaaagctgtgtgacctcagtaagacacttaacctctctgggctttgtcacacagggtgatgatctaacttgcaa

SEQ ID NO: 88468 - DNA, 80 bp, Homo sapiens
tgtgacctcagtaagacacttaacctctctgggctttgtcacacagggtgatgatctaacttgcaaggctgctgaaacaa

SEQ ID NO: 88469 - DNA, 79 bp, Homo sapiens
taagacacttaacctctctgggctttgtcacacagggtgatgatctaacttgcaaggctgctgaaacaacatattaaca

SEQ ID NO: 88470 - DNA, 80 bp, Homo sapiens
acctctctgggctttgtcacacagggtgatgatctaacttgcaaggctgctgaaacaacatattaacagcacaaactgga

SEQ ID NO: 88471 - DNA, 80 bp, Homo sapiens
gctttgtcacacagggtgatgatctaacttgcaaggctgctgaaacaacatattaacagcacaaactggaccctaacata

SEQ ID NO: 88472 - DNA, 77 bp, Homo sapiens
acagggtgatgatctaacttgcaaggctgctgaaacaacatattaacagcacaaactggaccctaacatacccgtga

SEQ ID NO: 88473 - DNA, 78 bp, Homo sapiens
atgatctaacttgcaaggctgctgaaacaacatattaacagcacaaactggaccctaacatacccgtgacctccagca

SEQ ID NO: 88474 - DNA, 77 bp, Homo sapiens
aacttgcaaggctgctgaaacaacatattaacagcacaaactggaccctaacatacccgtgacctccagcatctgcc

SEQ ID NO: 88475 - DNA, 76 bp, Homo sapiens
tgaaacaacatattaacagcacaaactggaccctaacatacccgtgacctccagcatctgcctgtaagcttctaaa

SEQ ID NO: 88476 - DNA, 76 bp, Homo sapiens
atattaacagcacaaactggaccctaacatacccgtgacctccagcatctgcctgtaagcttctaaatgctggaaa

SEQ ID NO: 88477 - DNA, 75 bp, Homo sapiens
acaaactggaccctaacatacccgtgacctccagcatctgcctgtaagcttctaaatgctggaaataaagcaaca

SEQ ID NO: 88478 - DNA, 68 bp, Homo sapiens
caaaacaaaacacaaatacaaatcctgccacgaggaagggggcaaggtctcgggcccctgtagacttc

SEQ ID NO: 88479 - DNA, 68 bp, Homo sapiens
acacaaatacaaatcctgccacgaggaagggggcaaggtctcgggcccctgtagacttcccagggttg

SEQ ID NO: 88480 - DNA, 68 bp, Homo sapiens
atacaaatcctgccacgaggaagggggcaaggtctcgggcccctgtagacttcccagggttggggaga

SEQ ID NO: 88481 - DNA, 67 bp, Homo sapiens
acgaggaagggggcaaggtctcgggcccctgtagacttcccagggttggggagatggtccctcagcc

SEQ ID NO: 88482 - DNA, 72 bp, Homo sapiens
ggcaaggtctcgggcccctgtagacttcccagggttggggagatggtccctcagcccaccgtgtggctgtga

SEQ ID NO: 88483 - DNA, 73 bp, Homo sapiens
tcgggcccctgtagacttcccagggttggggagatggtccctcagcccaccgtgtggctgtgaatgatggact

SEQ ID NO: 88484 - DNA, 80 bp, Homo sapiens
tagacttcccagggttggggagatggtccctcagcccaccgtgtggctgtgaatgatggacttgacatctgaactcatca

SEQ ID NO: 88485 - DNA, 78 bp, Homo sapiens
ttcccagggttggggagatggtccctcagcccaccgtgtggctgtgaatgatggacttgacatctgaactcatcagtt

SEQ ID NO: 88486 - DNA, 79 bp, Homo sapiens
agggttggggagatggtccctcagcccaccgtgtggctgtgaatgatggacttgacatctgaactcatcagttttctca

SEQ ID NO: 88487 - DNA, 74 bp, Homo sapiens
ctgtaaaatgggaataaccccatcctccctttcaggggccacagtcagggcatgagtagccacagccacaccac

SEQ ID NO: 88488 - DNA, 74 bp, Homo sapiens
aaatgggaataaccccatcctccctttcaggggccacagtcagggcatgagtagccacagccacaccacctcac

SEQ ID NO: 88489 - DNA, 81 bp, Homo sapiens
catcctccctttcaggggccacagtcagggcatgagtagccacagccacaccacctcacggcatctgctcccgagacagag

SEQ ID NO: 88490 - DNA, 81 bp, Homo sapiens
tccctttcaggggccacagtcagggcatgagtagccacagccacaccacctcacggcatctgctcccgagacagaggaaca

SEQ ID NO: 88491 - DNA, 81 bp, Homo sapiens
ccacagtcagggcatgagtagccacagccacaccacctcacggcatctgctcccgagacagaggaacagaggggcacaggg

SEQ ID NO: 88492 - DNA, 79 bp, Homo sapiens
agggcatgagtagccacagccacaccacctcacggcatctgctcccgagacagaggaacagaggggcacaggggacaag

SEQ ID NO: 88493 - DNA, 77 bp, Homo sapiens
cacagccacaccacctcacggcatctgctcccgagacagaggaacagaggggcacaggggacaagggctgggagaaa

SEQ ID NO: 88494 - DNA, 75 bp, Homo sapiens
acaccacctcacggcatctgctcccgagacagaggaacagaggggcacaggggacaagggctgggagaaaggaca

SEQ ID NO: 88495 - DNA, 74 bp, Homo sapiens
tcacggcatctgctcccgagacagaggaacagaggggcacaggggacaagggctgggagaaaggacactggggg

SEQ ID NO: 88496 - DNA, 73 bp, Homo sapiens
tgctcccgagacagaggaacagaggggcacaggggacaagggctgggagaaaggacactggggggctctctgg

SEQ ID NO: 88497 - DNA, 71 bp, Homo sapiens
ggaacagaggggcacaggggacaagggctgggagaaaggacactggggggctctctgggtctctaggagaa

SEQ ID NO: 88498 - DNA, 70 bp, Homo sapiens
ggcacaggggacaagggctgggagaaaggacactggggggctctctgggtctctaggagaacccaccagg

SEQ ID NO: 88499 - DNA, 69 bp, Homo sapiens
aggggacaagggctgggagaaaggacactggggggctctctgggtctctaggagaacccaccagggatg

SEQ ID NO: 88500 - DNA, 72 bp, Homo sapiens
acaagggctgggagaaaggacactggggggctctctgggtctctaggagaacccaccagggatggctgatgg

SEQ ID NO: 88501 - DNA, 72 bp, Homo sapiens
aagggctgggagaaaggacactggggggctctctgggtctctaggagaacccaccagggatggctgatggga

SEQ ID NO: 88502 - DNA, 73 bp, Homo sapiens
tgggagaaaggacactggggggctctctgggtctctaggagaacccaccagggatggctgatgggacaggccc

SEQ ID NO: 88503 - DNA, 72 bp, Homo sapiens
aaggacactggggggctctctgggtctctaggagaacccaccagggatggctgatgggacaggccccacaaa

SEQ ID NO: 88504 - DNA, 74 bp, Homo sapiens
ggctctctgggtctctaggagaacccaccagggatggctgatgggacaggccccacaaatggaggaagagcggg

SEQ ID NO: 88505 - DNA, 74 bp, Homo sapiens
tctgggtctctaggagaacccaccagggatggctgatgggacaggccccacaaatggaggaagagcggggccga

SEQ ID NO: 88506 - DNA, 73 bp, Homo sapiens
gtctctaggagaacccaccagggatggctgatgggacaggccccacaaatggaggaagagcggggccgaggga

SEQ ID NO: 88507 - DNA, 74 bp, Homo sapiens
tctaggagaacccaccagggatggctgatgggacaggccccacaaatggaggaagagcggggccgagggagcca

SEQ ID NO: 88508 - DNA, 76 bp, Homo sapiens
accagggatggctgatgggacaggccccacaaatggaggaagagcggggccgagggagccatctgaccacagaaca

SEQ ID NO: 88509 - DNA, 78 bp, Homo sapiens
ctgatgggacaggccccacaaatggaggaagagcggggccgagggagccatctgaccacagaacatgctcagtgacct

SEQ ID NO: 88510 - DNA, 76 bp, Homo sapiens
aggccccacaaatggaggaagagcggggccgagggagccatctgaccacagaacatgctcagtgacctttctcaaa

SEQ ID NO: 88511 - DNA, 80 bp, Homo sapiens
aaatggaggaagagcggggccgagggagccatctgaccacagaacatgctcagtgacctttctcaaaactgcatcaatga

SEQ ID NO: 88512 - DNA, 79 bp, Homo sapiens
agagcggggccgagggagccatctgaccacagaacatgctcagtgacctttctcaaaactgcatcaatgaccccaaata

SEQ ID NO: 88513 - DNA, 80 bp, Homo sapiens
cgagggagccatctgaccacagaacatgctcagtgacctttctcaaaactgcatcaatgaccccaaataatatttagcaa

SEQ ID NO: 88514 - DNA, 81 bp, Homo sapiens
tctgaccacagaacatgctcagtgacctttctcaaaactgcatcaatgaccccaaataatatttagcaaggtgagagcaaa

SEQ ID NO: 88515 - DNA, 78 bp, Homo sapiens
gaacatgctcagtgacctttctcaaaactgcatcaatgaccccaaataatatttagcaaggtgagagcaaacccatta

SEQ ID NO: 88516 - DNA, 74 bp, Homo sapiens
agtgacctttctcaaaactgcatcaatgaccccaaataatatttagcaaggtgagagcaaacccattaagtgct

SEQ ID NO: 88517 - DNA, 75 bp, Homo sapiens
ttctcaaaactgcatcaatgaccccaaataatatttagcaaggtgagagcaaacccattaagtgcttaagcaaaa

SEQ ID NO: 88518 - DNA, 72 bp, Homo sapiens
atgaccccaaataatatttagcaaggtgagagcaaacccattaagtgcttaagcaaaacacgaggccaggtg

SEQ ID NO: 88519 - DNA, 72 bp, Homo sapiens
aaaaaaaaagtgagaccaccagccacgttcctgttcccgccttcctcactcctgagacaggtgtgaccatga

SEQ ID NO: 88520 - DNA, 74 bp, Homo sapiens
aaaagtgagaccaccagccacgttcctgttcccgccttcctcactcctgagacaggtgtgaccatgaggcttcc

SEQ ID NO: 88521 - DNA, 76 bp, Homo sapiens
agccacgttcctgttcccgccttcctcactcctgagacaggtgtgaccatgaggcttcctgtgcatatcgtgggtt

SEQ ID NO: 88522 - DNA, 78 bp, Homo sapiens
ttcctgttcccgccttcctcactcctgagacaggtgtgaccatgaggcttcctgtgcatatcgtgggtttgtaaatga

SEQ ID NO: 88523 - DNA, 76 bp, Homo sapiens
ccttcctcactcctgagacaggtgtgaccatgaggcttcctgtgcatatcgtgggtttgtaaatgaaccccactgg

SEQ ID NO: 88524 - DNA, 77 bp, Homo sapiens
tcctgagacaggtgtgaccatgaggcttcctgtgcatatcgtgggtttgtaaatgaaccccactgggctgtaccaag

SEQ ID NO: 88525 - DNA, 76 bp, Homo sapiens
gtgtgaccatgaggcttcctgtgcatatcgtgggtttgtaaatgaaccccactgggctgtaccaagtgcccttcaa

SEQ ID NO: 88526 - DNA, 74 bp, Homo sapiens
atgaggcttcctgtgcatatcgtgggtttgtaaatgaaccccactgggctgtaccaagtgcccttcaagaggtc

SEQ ID NO: 88527 - DNA, 74 bp, Homo sapiens
tgtgcatatcgtgggtttgtaaatgaaccccactgggctgtaccaagtgcccttcaagaggtccacttctccta

SEQ ID NO: 88528 - DNA, 71 bp, Homo sapiens
tatcgtgggtttgtaaatgaaccccactgggctgtaccaagtgcccttcaagaggtccacttctcctacca

SEQ ID NO: 88529 - DNA, 72 bp, Homo sapiens
ttgtaaatgaaccccactgggctgtaccaagtgcccttcaagaggtccacttctcctaccaccttcacagcc

SEQ ID NO: 88530 - DNA, 76 bp, Homo sapiens
actgggctgtaccaagtgcccttcaagaggtccacttctcctaccaccttcacagccgctccatcaactggctgct

SEQ ID NO: 88531 - DNA, 79 bp, Homo sapiens
taccaagtgcccttcaagaggtccacttctcctaccaccttcacagccgctccatcaactggctgcttgtgacatttga

SEQ ID NO: 88532 - DNA, 79 bp, Homo sapiens
cttcaagaggtccacttctcctaccaccttcacagccgctccatcaactggctgcttgtgacatttgaaatcttacaca

SEQ ID NO: 88533 - DNA, 79 bp, Homo sapiens
agaggtccacttctcctaccaccttcacagccgctccatcaactggctgcttgtgacatttgaaatcttacacacagaa

SEQ ID NO: 88534 - DNA, 79 bp, Homo sapiens
ttctcctaccaccttcacagccgctccatcaactggctgcttgtgacatttgaaatcttacacacagaatccagttttc

SEQ ID NO: 88535 - DNA, 80 bp, Homo sapiens
accttcacagccgctccatcaactggctgcttgtgacatttgaaatcttacacacagaatccagttttctccaggcagga

SEQ ID NO: 88536 - DNA, 81 bp, Homo sapiens
tccatcaactggctgcttgtgacatttgaaatcttacacacagaatccagttttctccaggcaggacctggcacagctttg

SEQ ID NO: 88537 - DNA, 77 bp, Homo sapiens
aaatcttacacacagaatccagttttctccaggcaggacctggcacagctttgttcccagagagtccattctcacaa

SEQ ID NO: 88538 - DNA, 73 bp, Homo sapiens
agttttctccaggcaggacctggcacagctttgttcccagagagtccattctcacaaaaggagagacgggaac

SEQ ID NO: 88539 - DNA, 73 bp, Homo sapiens
aggcaggacctggcacagctttgttcccagagagtccattctcacaaaaggagagacgggaactgggaggttc

SEQ ID NO: 88540 - DNA, 73 bp, Homo sapiens
tttgttcccagagagtccattctcacaaaaggagagacgggaactgggaggttccctcaaggaagcagctgtg

SEQ ID NO: 88541 - DNA, 72 bp, Homo sapiens
agtccattctcacaaaaggagagacgggaactgggaggttccctcaaggaagcagctgtgtgttggggccga

SEQ ID NO: 88542 - DNA, 71 bp, Homo sapiens
acaaaaggagagacgggaactgggaggttccctcaaggaagcagctgtgtgttggggccgatggagaggtc

SEQ ID NO: 88543 - DNA, 72 bp, Homo sapiens
agagacgggaactgggaggttccctcaaggaagcagctgtgtgttggggccgatggagaggtcgactggtcc

SEQ ID NO: 88544 - DNA, 71 bp, Homo sapiens
aactgggaggttccctcaaggaagcagctgtgtgttggggccgatggagaggtcgactggtcccctgggaa

SEQ ID NO: 88545 - DNA, 74 bp, Homo sapiens
ttccctcaaggaagcagctgtgtgttggggccgatggagaggtcgactggtcccctgggaaggtcggcataaca

SEQ ID NO: 88546 - DNA, 76 bp, Homo sapiens
agcagctgtgtgttggggccgatggagaggtcgactggtcccctgggaaggtcggcataacactggtgccctgcaa

SEQ ID NO: 88547 - DNA, 73 bp, Homo sapiens
tgtgttggggccgatggagaggtcgactggtcccctgggaaggtcggcataacactggtgccctgcaacctct

SEQ ID NO: 88548 - DNA, 74 bp, Homo sapiens
atggagaggtcgactggtcccctgggaaggtcggcataacactggtgccctgcaacctcttggcgagctctccc

SEQ ID NO: 88549 - DNA, 75 bp, Homo sapiens
aggtcgactggtcccctgggaaggtcggcataacactggtgccctgcaacctcttggcgagctctccctgtgcca

SEQ ID NO: 88550 - DNA, 77 bp, Homo sapiens
cctgggaaggtcggcataacactggtgccctgcaacctcttggcgagctctccctgtgccaggccccgggcagcatg

SEQ ID NO: 88551 - DNA, 78 bp, Homo sapiens
aaggtcggcataacactggtgccctgcaacctcttggcgagctctccctgtgccaggccccgggcagcatggcagagg

SEQ ID NO: 88552 - DNA, 78 bp, Homo sapiens
ataacactggtgccctgcaacctcttggcgagctctccctgtgccaggccccgggcagcatggcagagggtggtcttg

SEQ ID NO: 88553 - DNA, 79 bp, Homo sapiens
tgcaacctcttggcgagctctccctgtgccaggccccgggcagcatggcagagggtggtcttgggctggaacataccat

SEQ ID NO: 88554 - DNA, 79 bp, Homo sapiens
tccctgtgccaggccccgggcagcatggcagagggtggtcttgggctggaacataccattgtgcaaaatagctctggga

SEQ ID NO: 88555 - DNA, 77 bp, Homo sapiens
aggccccgggcagcatggcagagggtggtcttgggctggaacataccattgtgcaaaatagctctgggaactgtcag

SEQ ID NO: 88556 - DNA, 79 bp, Homo sapiens
cagcatggcagagggtggtcttgggctggaacataccattgtgcaaaatagctctgggaactgtcaggggccatacaaa

SEQ ID NO: 88557 - DNA, 77 bp, Homo sapiens
tcttgggctggaacataccattgtgcaaaatagctctgggaactgtcaggggccatacaaagctcactatttttcaa

SEQ ID NO: 88558 - DNA, 74 bp, Homo sapiens
aacataccattgtgcaaaatagctctgggaactgtcaggggccatacaaagctcactatttttcaactcaaaaa

SEQ ID NO: 88559 - DNA, 74 bp, Homo sapiens
attgtgcaaaatagctctgggaactgtcaggggccatacaaagctcactatttttcaactcaaaaacactgctt

SEQ ID NO: 88560 - DNA, 73 bp, Homo sapiens
tagctctgggaactgtcaggggccatacaaagctcactatttttcaactcaaaaacactgctttagcttttta

SEQ ID NO: 88561 - DNA, 71 bp, Homo sapiens
aactgtcaggggccatacaaagctcactatttttcaactcaaaaacactgctttagctttttaatacgtca

SEQ ID NO: 88562 - DNA, 74 bp, Homo sapiens
caaagctcactatttttcaactcaaaaacactgctttagctttttaatacgtcactgaggtacactgaagcata

SEQ ID NO: 88563 - DNA, 72 bp, Homo sapiens
tatttttcaactcaaaaacactgctttagctttttaatacgtcactgaggtacactgaagcatacccaagac

SEQ ID NO: 88564 - DNA, 73 bp, Homo sapiens
ctcaaaaacactgctttagctttttaatacgtcactgaggtacactgaagcatacccaagactctcaaaaaca

SEQ ID NO: 88565 - DNA, 74 bp, Homo sapiens
actgaggtacactgaagcatacccaagactctcaaaaacagcctaatacagtttgagtgcttcaaaaaatacca

SEQ ID NO: 88566 - DNA, 74 bp, Homo sapiens
tacactgaagcatacccaagactctcaaaaacagcctaatacagtttgagtgcttcaaaaaataccagccaatt

SEQ ID NO: 88567 - DNA, 78 bp, Homo sapiens
tcaaaaacagcctaatacagtttgagtgcttcaaaaaataccagccaatttgcacacagatcacactcaggaaagtga

SEQ ID NO: 88568 - DNA, 79 bp, Homo sapiens
acagcctaatacagtttgagtgcttcaaaaaataccagccaatttgcacacagatcacactcaggaaagtgaacacatg

SEQ ID NO: 88569 - DNA, 81 bp, Homo sapiens
aataccagccaatttgcacacagatcacactcaggaaagtgaacacatggcggctgctcgccaaattcaactccacagagt

SEQ ID NO: 88570 - DNA, 84 bp, Homo sapiens
atcacactcaggaaagtgaacacatggcggctgctcgccaaattcaactccacagagttgactctgtgactccacagagcagaa

SEQ ID NO: 88571 - DNA, 82 bp, Homo sapiens
aaagtgaacacatggcggctgctcgccaaattcaactccacagagttgactctgtgactccacagagcagaacctgcaggga

SEQ ID NO: 88572 - DNA, 83 bp, Homo sapiens
aacacatggcggctgctcgccaaattcaactccacagagttgactctgtgactccacagagcagaacctgcagggaagcaggc

SEQ ID NO: 88573 - DNA, 81 bp, Homo sapiens
ctgctcgccaaattcaactccacagagttgactctgtgactccacagagcagaacctgcagggaagcaggccaacctccaa

SEQ ID NO: 88574 - DNA, 77 bp, Homo sapiens
aaattcaactccacagagttgactctgtgactccacagagcagaacctgcagggaagcaggccaacctccaaccacc

SEQ ID NO: 88575 - DNA, 77 bp, Homo sapiens
cagagttgactctgtgactccacagagcagaacctgcagggaagcaggccaacctccaaccaccgaacttgggccaa

SEQ ID NO: 88576 - DNA, 75 bp, Homo sapiens
actctgtgactccacagagcagaacctgcagggaagcaggccaacctccaaccaccgaacttgggccaaaactca

SEQ ID NO: 88577 - DNA, 75 bp, Homo sapiens
actccacagagcagaacctgcagggaagcaggccaacctccaaccaccgaacttgggccaaaactcacagcagga

SEQ ID NO: 88578 - DNA, 74 bp, Homo sapiens
agaacctgcagggaagcaggccaacctccaaccaccgaacttgggccaaaactcacagcaggagaggcaatgcc

SEQ ID NO: 88579 - DNA, 74 bp, Homo sapiens
aggccaacctccaaccaccgaacttgggccaaaactcacagcaggagaggcaatgccgtcccatcccaagcatg

SEQ ID NO: 88580 - DNA, 76 bp, Homo sapiens
aaccaccgaacttgggccaaaactcacagcaggagaggcaatgccgtcccatcccaagcatgtgggcgcacaccca

SEQ ID NO: 88581 - DNA, 78 bp, Homo sapiens
aaaactcacagcaggagaggcaatgccgtcccatcccaagcatgtgggcgcacacccaggagaagaacgagcgggcca

SEQ ID NO: 88582 - DNA, 77 bp, Homo sapiens
aggagaggcaatgccgtcccatcccaagcatgtgggcgcacacccaggagaagaacgagcgggccacgacactgttc

SEQ ID NO: 88583 - DNA, 81 bp, Homo sapiens
ccatcccaagcatgtgggcgcacacccaggagaagaacgagcgggccacgacactgttctcgccagctatgcctgtgggca

SEQ ID NO: 88584 - DNA, 83 bp, Homo sapiens
atgtgggcgcacacccaggagaagaacgagcgggccacgacactgttctcgccagctatgcctgtgggcagcaagcagcacac

SEQ ID NO: 88585 - DNA, 80 bp, Homo sapiens
agaagaacgagcgggccacgacactgttctcgccagctatgcctgtgggcagcaagcagcacacctccaggggccacgta

SEQ ID NO: 88586 - DNA, 82 bp, Homo sapiens
ccacgacactgttctcgccagctatgcctgtgggcagcaagcagcacacctccaggggccacgtagacaacctgtgacacag

SEQ ID NO: 88587 - DNA, 82 bp, Homo sapiens
acactgttctcgccagctatgcctgtgggcagcaagcagcacacctccaggggccacgtagacaacctgtgacacagtgaac

SEQ ID NO: 88588 - DNA, 80 bp, Homo sapiens
agctatgcctgtgggcagcaagcagcacacctccaggggccacgtagacaacctgtgacacagtgaaccccactccacgc

SEQ ID NO: 88589 - DNA, 73 bp, Homo sapiens
aagcagcacacctccaggggccacgtagacaacctgtgacacagtgaaccccactccacgccaaaccacccaa

SEQ ID NO: 88590 - DNA, 71 bp, Homo sapiens
ctccaggggccacgtagacaacctgtgacacagtgaaccccactccacgccaaaccacccaatgggaaaca

SEQ ID NO: 88591 - DNA, 72 bp, Homo sapiens
gggccacgtagacaacctgtgacacagtgaaccccactccacgccaaaccacccaatgggaaacagtggtga

SEQ ID NO: 88592 - DNA, 75 bp, Homo sapiens
aacctgtgacacagtgaaccccactccacgccaaaccacccaatgggaaacagtggtgagcacagccatggacca

SEQ ID NO: 88593 - DNA, 75 bp, Homo sapiens
acagtgaaccccactccacgccaaaccacccaatgggaaacagtggtgagcacagccatggaccacagagagtaa

SEQ ID NO: 88594 - DNA, 76 bp, Homo sapiens
actccacgccaaaccacccaatgggaaacagtggtgagcacagccatggaccacagagagtaacgcaagtgggcaa

SEQ ID NO: 88595 - DNA, 79 bp, Homo sapiens
aaacagtggtgagcacagccatggaccacagagagtaacgcaagtgggcaaaacacatgagaagccaccaagcagaccc

SEQ ID NO: 88596 - DNA, 80 bp, Homo sapiens
tgggcaaaacacatgagaagccaccaagcagacccggatgagagcaatactgtgtgtgcccagcaccaacaccaaattaa

SEQ ID NO: 88597 - DNA, 80 bp, Homo sapiens
acatgagaagccaccaagcagacccggatgagagcaatactgtgtgtgcccagcaccaacaccaaattaagaggaatcaa

SEQ ID NO: 88598 - DNA, 76 bp, Homo sapiens
aagccaccaagcagacccggatgagagcaatactgtgtgtgcccagcaccaacaccaaattaagaggaatcaaaaa

SEQ ID NO: 88599 - DNA, 78 bp, Homo sapiens
atgagagcaatactgtgtgtgcccagcaccaacaccaaattaagaggaatcaaaaaccctgctgagcgagagaacgtg

SEQ ID NO: 88600 - DNA, 74 bp, Homo sapiens
atactgtgtgtgcccagcaccaacaccaaattaagaggaatcaaaaaccctgctgagcgagagaacgtgggaaa

SEQ ID NO: 88601 - DNA, 71 bp, Homo sapiens
agcaccaacaccaaattaagaggaatcaaaaaccctgctgagcgagagaacgtgggaaagggcctgggatg

SEQ ID NO: 88602 - DNA, 69 bp, Homo sapiens
aacaccaaattaagaggaatcaaaaaccctgctgagcgagagaacgtgggaaagggcctgggatgggcc

SEQ ID NO: 88603 - DNA, 72 bp, Homo sapiens
ttaagaggaatcaaaaaccctgctgagcgagagaacgtgggaaagggcctgggatgggcccactgttggcga

SEQ ID NO: 88604 - DNA, 69 bp, Homo sapiens
aaaaaccctgctgagcgagagaacgtgggaaagggcctgggatgggcccactgttggcgaggaggggcc

SEQ ID NO: 88605 - DNA, 74 bp, Homo sapiens
tgagcgagagaacgtgggaaagggcctgggatgggcccactgttggcgaggaggggcccacgcctcaacaatga

SEQ ID NO: 88606 - DNA, 70 bp, Homo sapiens
aacgtgggaaagggcctgggatgggcccactgttggcgaggaggggcccacgcctcaacaatgaggcgga

SEQ ID NO: 88607 - DNA, 70 bp, Homo sapiens
aaagggcctgggatgggcccactgttggcgaggaggggcccacgcctcaacaatgaggcggaccctccaa

SEQ ID NO: 88608 - DNA, 75 bp, Homo sapiens
aggaggggcccacgcctcaacaatgaggcggaccctccaacgtgcctcacacttcaaggcagctcttccaggcca

SEQ ID NO: 88609 - DNA, 75 bp, Homo sapiens
cctcaacaatgaggcggaccctccaacgtgcctcacacttcaaggcagctcttccaggccagccggggccttgga

SEQ ID NO: 88610 - DNA, 75 bp, Homo sapiens
acaatgaggcggaccctccaacgtgcctcacacttcaaggcagctcttccaggccagccggggccttggagtgag

SEQ ID NO: 88611 - DNA, 77 bp, Homo sapiens
cctcacacttcaaggcagctcttccaggccagccggggccttggagtgaggggccactggcagaagggagcaagaca

SEQ ID NO: 88612 - DNA, 75 bp, Homo sapiens
acttcaaggcagctcttccaggccagccggggccttggagtgaggggccactggcagaagggagcaagacactgg

SEQ ID NO: 88613 - DNA, 77 bp, Homo sapiens
tcttccaggccagccggggccttggagtgaggggccactggcagaagggagcaagacactggtccacggcacagcca

SEQ ID NO: 88614 - DNA, 78 bp, Homo sapiens
aggccagccggggccttggagtgaggggccactggcagaagggagcaagacactggtccacggcacagccagctcaga

SEQ ID NO: 88615 - DNA, 80 bp, Homo sapiens
gggccactggcagaagggagcaagacactggtccacggcacagccagctcagagccaggcggatgagacgggggccaagc

SEQ ID NO: 88616 - DNA, 79 bp, Homo sapiens
actggcagaagggagcaagacactggtccacggcacagccagctcagagccaggcggatgagacgggggccaagccagg

SEQ ID NO: 88617 - DNA, 79 bp, Homo sapiens
agcaagacactggtccacggcacagccagctcagagccaggcggatgagacgggggccaagccaggggccggctactca

SEQ ID NO: 88618 - DNA, 79 bp, Homo sapiens
actggtccacggcacagccagctcagagccaggcggatgagacgggggccaagccaggggccggctactcacgagtgca

SEQ ID NO: 88619 - DNA, 80 bp, Homo sapiens
acagccagctcagagccaggcggatgagacgggggccaagccaggggccggctactcacgagtgcacacgaggacagcca

SEQ ID NO: 88620 - DNA, 79 bp, Homo sapiens
ctcagagccaggcggatgagacgggggccaagccaggggccggctactcacgagtgcacacgaggacagccaggattca

SEQ ID NO: 88621 - DNA, 76 bp, Homo sapiens
aggcggatgagacgggggccaagccaggggccggctactcacgagtgcacacgaggacagccaggattcactagga

SEQ ID NO: 88622 - DNA, 78 bp, Homo sapiens
ggggccaagccaggggccggctactcacgagtgcacacgaggacagccaggattcactaggacaggatctgcccaatc

SEQ ID NO: 88623 - DNA, 79 bp, Homo sapiens
aagccaggggccggctactcacgagtgcacacgaggacagccaggattcactaggacaggatctgcccaatcccaggca

SEQ ID NO: 88624 - DNA, 80 bp, Homo sapiens
ctactcacgagtgcacacgaggacagccaggattcactaggacaggatctgcccaatcccaggcacttcccactggtcca

SEQ ID NO: 88625 - DNA, 76 bp, Homo sapiens
aggattcactaggacaggatctgcccaatcccaggcacttcccactggtccatctgacacacctgggggcccaaga

SEQ ID NO: 88626 - DNA, 78 bp, Homo sapiens
atctgcccaatcccaggcacttcccactggtccatctgacacacctgggggcccaagaggtgatggcatcacataaaa

SEQ ID NO: 88627 - DNA, 75 bp, Homo sapiens
ttcccactggtccatctgacacacctgggggcccaagaggtgatggcatcacataaaagcaaaagaaacttgaaa

SEQ ID NO: 88628 - DNA, 74 bp, Homo sapiens
atctgacacacctgggggcccaagaggtgatggcatcacataaaagcaaaagaaacttgaaaccaccaatccag

SEQ ID NO: 88629 - DNA, 71 bp, Homo sapiens
acctgggggcccaagaggtgatggcatcacataaaagcaaaagaaacttgaaaccaccaatccaggcaaat

SEQ ID NO: 88630 - DNA, 74 bp, Homo sapiens
aagaggtgatggcatcacataaaagcaaaagaaacttgaaaccaccaatccaggcaaattcggactctcccaca

SEQ ID NO: 88631 - DNA, 73 bp, Homo sapiens
atggcatcacataaaagcaaaagaaacttgaaaccaccaatccaggcaaattcggactctcccacaaatggtc

SEQ ID NO: 88632 - DNA, 69 bp, Homo sapiens
aaaagcaaaagaaacttgaaaccaccaatccaggcaaattcggactctcccacaaatggtccatccttg

SEQ ID NO: 88633 - DNA, 71 bp, Homo sapiens
aaagaaacttgaaaccaccaatccaggcaaattcggactctcccacaaatggtccatccttggggagcatc

SEQ ID NO: 88634 - DNA, 74 bp, Homo sapiens
ttgaaaccaccaatccaggcaaattcggactctcccacaaatggtccatccttggggagcatctcccccacatc

SEQ ID NO: 88635 - DNA, 74 bp, Homo sapiens
aatccaggcaaattcggactctcccacaaatggtccatccttggggagcatctcccccacatcctcaacctcca

SEQ ID NO: 88636 - DNA, 73 bp, Homo sapiens
aaattcggactctcccacaaatggtccatccttggggagcatctcccccacatcctcaacctccagctacgtg

SEQ ID NO: 88637 - DNA, 76 bp, Homo sapiens
cacaaatggtccatccttggggagcatctcccccacatcctcaacctccagctacgtgtctgcgggtgggcaggaa

SEQ ID NO: 88638 - DNA, 75 bp, Homo sapiens
atggtccatccttggggagcatctcccccacatcctcaacctccagctacgtgtctgcgggtgggcaggaaggag

SEQ ID NO: 88639 - DNA, 78 bp, Homo sapiens
gggagcatctcccccacatcctcaacctccagctacgtgtctgcgggtgggcaggaaggaggggaggcagcatgggca

SEQ ID NO: 88640 - DNA, 77 bp, Homo sapiens
ccccacatcctcaacctccagctacgtgtctgcgggtgggcaggaaggaggggaggcagcatgggcaccagtgacca

SEQ ID NO: 88641 - DNA, 78 bp, Homo sapiens
atcctcaacctccagctacgtgtctgcgggtgggcaggaaggaggggaggcagcatgggcaccagtgaccaggacagc

SEQ ID NO: 88642 - DNA, 75 bp, Homo sapiens
agctacgtgtctgcgggtgggcaggaaggaggggaggcagcatgggcaccagtgaccaggacagccctttccaaa

SEQ ID NO: 88643 - DNA, 74 bp, Homo sapiens
gtgtctgcgggtgggcaggaaggaggggaggcagcatgggcaccagtgaccaggacagccctttccaaaagaag

SEQ ID NO: 88644 - DNA, 75 bp, Homo sapiens
gggaggcagcatgggcaccagtgaccaggacagccctttccaaaagaaggccctgaacacagtcaagaggaagag

SEQ ID NO: 88645 - DNA, 72 bp, Homo sapiens
atgggcaccagtgaccaggacagccctttccaaaagaaggccctgaacacagtcaagaggaagaggaagaaa

SEQ ID NO: 88646 - DNA, 70 bp, Homo sapiens
agaggaagaggaagaaacactggggcctggcgggcaggtcctggggcctcatgagggtggtttggggtca

SEQ ID NO: 88647 - DNA, 72 bp, Homo sapiens
gaagaaacactggggcctggcgggcaggtcctggggcctcatgagggtggtttggggtcagaagacacacga

SEQ ID NO: 88648 - DNA, 73 bp, Homo sapiens
acactggggcctggcgggcaggtcctggggcctcatgagggtggtttggggtcagaagacacacgatcaggaa

SEQ ID NO: 88649 - DNA, 74 bp, Homo sapiens
ctggcgggcaggtcctggggcctcatgagggtggtttggggtcagaagacacacgatcaggaaccaggcgtcac

SEQ ID NO: 88650 - DNA, 72 bp, Homo sapiens
aggtcctggggcctcatgagggtggtttggggtcagaagacacacgatcaggaaccaggcgtcacccccaga

SEQ ID NO: 88651 - DNA, 75 bp, Homo sapiens
gggcctcatgagggtggtttggggtcagaagacacacgatcaggaaccaggcgtcacccccagaggctgctggag

SEQ ID NO: 88652 - DNA, 75 bp, Homo sapiens
atgagggtggtttggggtcagaagacacacgatcaggaaccaggcgtcacccccagaggctgctggagtgcgtcc

SEQ ID NO: 88653 - DNA, 79 bp, Homo sapiens
gtttggggtcagaagacacacgatcaggaaccaggcgtcacccccagaggctgctggagtgcgtcccacagaggcatga

SEQ ID NO: 88654 - DNA, 82 bp, Homo sapiens
acgatcaggaaccaggcgtcacccccagaggctgctggagtgcgtcccacagaggcatgagcagcacctggcatggggacaa

SEQ ID NO: 88655 - DNA, 82 bp, Homo sapiens
atcaggaaccaggcgtcacccccagaggctgctggagtgcgtcccacagaggcatgagcagcacctggcatggggacaagga

SEQ ID NO: 88656 - DNA, 85 bp, Homo sapiens
agaggctgctggagtgcgtcccacagaggcatgagcagcacctggcatggggacaaggagcttacagcaagtgggaggtgctctg

SEQ ID NO: 88657 - DNA, 85 bp, Homo sapiens
ctggagtgcgtcccacagaggcatgagcagcacctggcatggggacaaggagcttacagcaagtgggaggtgctctggtgctcta

SEQ ID NO: 88658 - DNA, 86 bp, Homo sapiens
cacagaggcatgagcagcacctggcatggggacaaggagcttacagcaagtgggaggtgctctggtgctctacgctaagctgcctg

SEQ ID NO: 88659 - DNA, 85 bp, Homo sapiens
aggcatgagcagcacctggcatggggacaaggagcttacagcaagtgggaggtgctctggtgctctacgctaagctgcctggtgc

SEQ ID NO: 88660 - DNA, 81 bp, Homo sapiens
agcacctggcatggggacaaggagcttacagcaagtgggaggtgctctggtgctctacgctaagctgcctggtgccccaca

SEQ ID NO: 88661 - DNA, 78 bp, Homo sapiens
gggacaaggagcttacagcaagtgggaggtgctctggtgctctacgctaagctgcctggtgccccacagctccacggg

SEQ ID NO: 88662 - DNA, 80 bp, Homo sapiens
agcttacagcaagtgggaggtgctctggtgctctacgctaagctgcctggtgccccacagctccacggggcaggagcacc

SEQ ID NO: 88663 - DNA, 78 bp, Homo sapiens
tctggtgctctacgctaagctgcctggtgccccacagctccacggggcaggagcacccgggaggctcctaccaccaca

SEQ ID NO: 88664 - DNA, 78 bp, Homo sapiens
tctacgctaagctgcctggtgccccacagctccacggggcaggagcacccgggaggctcctaccaccacagccagata

SEQ ID NO: 88665 - DNA, 78 bp, Homo sapiens
tgcctggtgccccacagctccacggggcaggagcacccgggaggctcctaccaccacagccagatagcccattgagga

SEQ ID NO: 88666 - DNA, 76 bp, Homo sapiens
cccacagctccacggggcaggagcacccgggaggctcctaccaccacagccagatagcccattgaggacgcacacc

SEQ ID NO: 88667 - DNA, 75 bp, Homo sapiens
cacggggcaggagcacccgggaggctcctaccaccacagccagatagcccattgaggacgcacacccccagtcca

SEQ ID NO: 88668 - DNA, 76 bp, Homo sapiens
aggagcacccgggaggctcctaccaccacagccagatagcccattgaggacgcacacccccagtccagcacccaga

SEQ ID NO: 88669 - DNA, 78 bp, Homo sapiens
gaggctcctaccaccacagccagatagcccattgaggacgcacacccccagtccagcacccagaggtgaatgaaggat

SEQ ID NO: 88670 - DNA, 78 bp, Homo sapiens
acagccagatagcccattgaggacgcacacccccagtccagcacccagaggtgaatgaaggattccaggacagcaagg

SEQ ID NO: 88671 - DNA, 78 bp, Homo sapiens
attgaggacgcacacccccagtccagcacccagaggtgaatgaaggattccaggacagcaagggagacacatgaccac

SEQ ID NO: 88672 - DNA, 77 bp, Homo sapiens
gtccagcacccagaggtgaatgaaggattccaggacagcaagggagacacatgaccaccctagggtggaccatggaa

SEQ ID NO: 88673 - DNA, 76 bp, Homo sapiens
aatgaaggattccaggacagcaagggagacacatgaccaccctagggtggaccatggaacagctgtgggtacacaa

SEQ ID NO: 88674 - DNA, 76 bp, Homo sapiens
aagggagacacatgaccaccctagggtggaccatggaacagctgtgggtacacaaaggctccctggagccatcatc

SEQ ID NO: 88675 - DNA, 77 bp, Homo sapiens
acacatgaccaccctagggtggaccatggaacagctgtgggtacacaaaggctccctggagccatcatccgtggaga

SEQ ID NO: 88676 - DNA, 77 bp, Homo sapiens
tagggtggaccatggaacagctgtgggtacacaaaggctccctggagccatcatccgtggagagcaccaactacgtc

SEQ ID NO: 88677 - DNA, 78 bp, Homo sapiens
aacagctgtgggtacacaaaggctccctggagccatcatccgtggagagcaccaactacgtcttctgagttgtgggca

SEQ ID NO: 88678 - DNA, 77 bp, Homo sapiens
ggtacacaaaggctccctggagccatcatccgtggagagcaccaactacgtcttctgagttgtgggcaggccaggag

SEQ ID NO: 88679 - DNA, 75 bp, Homo sapiens
atcatccgtggagagcaccaactacgtcttctgagttgtgggcaggccaggaggggagggaggtgtcccaggtga

SEQ ID NO: 88680 - DNA, 74 bp, Homo sapiens
gtggagagcaccaactacgtcttctgagttgtgggcaggccaggaggggagggaggtgtcccaggtgagggcca

SEQ ID NO: 88681 - DNA, 71 bp, Homo sapiens
accaactacgtcttctgagttgtgggcaggccaggaggggagggaggtgtcccaggtgagggccaggcctg

SEQ ID NO: 88682 - DNA, 76 bp, Homo sapiens
tcttctgagttgtgggcaggccaggaggggagggaggtgtcccaggtgagggccaggcctgtggtgactgtgcctc

SEQ ID NO: 88683 - DNA, 77 bp, Homo sapiens
tgtgggcaggccaggaggggagggaggtgtcccaggtgagggccaggcctgtggtgactgtgcctcgcagtgggcag

SEQ ID NO: 88684 - DNA, 75 bp, Homo sapiens
aggggagggaggtgtcccaggtgagggccaggcctgtggtgactgtgcctcgcagtgggcagggctgccagaacc

SEQ ID NO: 88685 - DNA, 81 bp, Homo sapiens
aggtgtcccaggtgagggccaggcctgtggtgactgtgcctcgcagtgggcagggctgccagaacccagcagtgagctcac

SEQ ID NO: 88686 - DNA, 82 bp, Homo sapiens
gtgagggccaggcctgtggtgactgtgcctcgcagtgggcagggctgccagaacccagcagtgagctcaccttagtcaattc

SEQ ID NO: 88687 - DNA, 82 bp, Homo sapiens
aggcctgtggtgactgtgcctcgcagtgggcagggctgccagaacccagcagtgagctcaccttagtcaattctgccagcgg

SEQ ID NO: 88688 - DNA, 81 bp, Homo sapiens
tgcctcgcagtgggcagggctgccagaacccagcagtgagctcaccttagtcaattctgccagcgggcacccccaccacca

SEQ ID NO: 88689 - DNA, 75 bp, Homo sapiens
agggctgccagaacccagcagtgagctcaccttagtcaattctgccagcgggcacccccaccaccagggaaatcc

SEQ ID NO: 88690 - DNA, 76 bp, Homo sapiens
agaacccagcagtgagctcaccttagtcaattctgccagcgggcacccccaccaccagggaaatcctgcaaccagc

SEQ ID NO: 88691 - DNA, 79 bp, Homo sapiens
agtgagctcaccttagtcaattctgccagcgggcacccccaccaccagggaaatcctgcaaccagccgcatcaggagca

SEQ ID NO: 88692 - DNA, 75 bp, Homo sapiens
aattctgccagcgggcacccccaccaccagggaaatcctgcaaccagccgcatcaggagcagacgtttataacta

SEQ ID NO: 88693 - DNA, 74 bp, Homo sapiens
ggcacccccaccaccagggaaatcctgcaaccagccgcatcaggagcagacgtttataactaaaagatcaaata

SEQ ID NO: 88694 - DNA, 73 bp, Homo sapiens
accaccagggaaatcctgcaaccagccgcatcaggagcagacgtttataactaaaagatcaaatatccccaac

SEQ ID NO: 88695 - DNA, 73 bp, Homo sapiens
aaatcctgcaaccagccgcatcaggagcagacgtttataactaaaagatcaaatatccccaaccacaaaagtc

SEQ ID NO: 88696 - DNA, 71 bp, Homo sapiens
aaccagccgcatcaggagcagacgtttataactaaaagatcaaatatccccaaccacaaaagtcccagtaa

SEQ ID NO: 88697 - DNA, 69 bp, Homo sapiens
agacgtttataactaaaagatcaaatatccccaaccacaaaagtcccagtaatccacacatgggacttc

SEQ ID NO: 88698 - DNA, 75 bp, Homo sapiens
atcaaatatccccaaccacaaaagtcccagtaatccacacatgggacttcccaaaatcccatctctgagagatga

SEQ ID NO: 88699 - DNA, 75 bp, Homo sapiens
ccaaccacaaaagtcccagtaatccacacatgggacttcccaaaatcccatctctgagagatgacaactgaagaa

SEQ ID NO: 88700 - DNA, 75 bp, Homo sapiens
aaaagtcccagtaatccacacatgggacttcccaaaatcccatctctgagagatgacaactgaagaagccgagga

SEQ ID NO: 88701 - DNA, 77 bp, Homo sapiens
taatccacacatgggacttcccaaaatcccatctctgagagatgacaactgaagaagccgaggaggaagagacggtg

SEQ ID NO: 88702 - DNA, 76 bp, Homo sapiens
gacttcccaaaatcccatctctgagagatgacaactgaagaagccgaggaggaagagacggtgtttaaatgagaga

SEQ ID NO: 88703 - DNA, 75 bp, Homo sapiens
aaaatcccatctctgagagatgacaactgaagaagccgaggaggaagagacggtgtttaaatgagagagagggcc

SEQ ID NO: 88704 - DNA, 77 bp, Homo sapiens
aggaagagacggtgtttaaatgagagagagggcccaatgacaacggacaccagacacctgccacttgtcatgttgca

SEQ ID NO: 88705 - DNA, 79 bp, Homo sapiens
agacggtgtttaaatgagagagagggcccaatgacaacggacaccagacacctgccacttgtcatgttgcagatgccag

SEQ ID NO: 88706 - DNA, 81 bp, Homo sapiens
taaatgagagagagggcccaatgacaacggacaccagacacctgccacttgtcatgttgcagatgccaggaggaggagtgg

SEQ ID NO: 88707 - DNA, 78 bp, Homo sapiens
agagggcccaatgacaacggacaccagacacctgccacttgtcatgttgcagatgccaggaggaggagtgggaacacg

SEQ ID NO: 88708 - DNA, 81 bp, Homo sapiens
atgacaacggacaccagacacctgccacttgtcatgttgcagatgccaggaggaggagtgggaacacggggtggcagcatg

SEQ ID NO: 88709 - DNA, 81 bp, Homo sapiens
agacacctgccacttgtcatgttgcagatgccaggaggaggagtgggaacacggggtggcagcatgggttagtgttctgca

SEQ ID NO: 88710 - DNA, 73 bp, Homo sapiens
atgccaggaggaggagtgggaacacggggtggcagcatgggttagtgttctgcaaagaaacccaatgaccttc

SEQ ID NO: 88711 - DNA, 69 bp, Homo sapiens
aggagtgggaacacggggtggcagcatgggttagtgttctgcaaagaaacccaatgaccttcctgtttt

SEQ ID NO: 88712 - DNA, 73 bp, Homo sapiens
aacacggggtggcagcatgggttagtgttctgcaaagaaacccaatgaccttcctgtttttgcttctgagaca

SEQ ID NO: 88713 - DNA, 71 bp, Homo sapiens
agcatgggttagtgttctgcaaagaaacccaatgaccttcctgtttttgcttctgagacaacttagggaag

SEQ ID NO: 88714 - DNA, 69 bp, Homo sapiens
ttagtgttctgcaaagaaacccaatgaccttcctgtttttgcttctgagacaacttagggaaggagttt

SEQ ID NO: 88715 - DNA, 68 bp, Homo sapiens
aaagaaacccaatgaccttcctgtttttgcttctgagacaacttagggaaggagttttgggccatcaa

SEQ ID NO: 88716 - DNA, 71 bp, Homo sapiens
aatgaccttcctgtttttgcttctgagacaacttagggaaggagttttgggccatcaatgcggaatccaaa

SEQ ID NO: 88717 - DNA, 70 bp, Homo sapiens
cttcctgtttttgcttctgagacaacttagggaaggagttttgggccatcaatgcggaatccaaaagccc

SEQ ID NO: 88718 - DNA, 70 bp, Homo sapiens
tttgggccatcaatgcggaatccaaaagcccctgtcttgggaaaccacggggccacctggccgggtgtgc

SEQ ID NO: 88719 - DNA, 71 bp, Homo sapiens
aatgcggaatccaaaagcccctgtcttgggaaaccacggggccacctggccgggtgtgccaatgcccagca

SEQ ID NO: 88720 - DNA, 70 bp, Homo sapiens
aagcccctgtcttgggaaaccacggggccacctggccgggtgtgccaatgcccagcagagcttcggttat

SEQ ID NO: 88721 - DNA, 71 bp, Homo sapiens
ctgtcttgggaaaccacggggccacctggccgggtgtgccaatgcccagcagagcttcggttattaacagg

SEQ ID NO: 88722 - DNA, 73 bp, Homo sapiens
aaaccacggggccacctggccgggtgtgccaatgcccagcagagcttcggttattaacagggcaggccagcgc

SEQ ID NO: 88723 - DNA, 80 bp, Homo sapiens
acctggccgggtgtgccaatgcccagcagagcttcggttattaacagggcaggccagcgctccaggcaggcagctcggca

SEQ ID NO: 88724 - DNA, 82 bp, Homo sapiens
aatgcccagcagagcttcggttattaacagggcaggccagcgctccaggcaggcagctcggcacttccagtggctgcacacc

SEQ ID NO: 88725 - DNA, 81 bp, Homo sapiens
agagcttcggttattaacagggcaggccagcgctccaggcaggcagctcggcacttccagtggctgcacacccaccacaca

SEQ ID NO: 88726 - DNA, 82 bp, Homo sapiens
gttattaacagggcaggccagcgctccaggcaggcagctcggcacttccagtggctgcacacccaccacacacaggcacagg

SEQ ID NO: 88727 - DNA, 85 bp, Homo sapiens
aggccagcgctccaggcaggcagctcggcacttccagtggctgcacacccaccacacacaggcacagggctgggaggcactgctc

SEQ ID NO: 88728 - DNA, 84 bp, Homo sapiens
tccaggcaggcagctcggcacttccagtggctgcacacccaccacacacaggcacagggctgggaggcactgctcggctccctg

SEQ ID NO: 88729 - DNA, 81 bp, Homo sapiens
aggcagctcggcacttccagtggctgcacacccaccacacacaggcacagggctgggaggcactgctcggctccctgggcc

SEQ ID NO: 88730 - DNA, 80 bp, Homo sapiens
acttccagtggctgcacacccaccacacacaggcacagggctgggaggcactgctcggctccctgggccctgccagagtg

SEQ ID NO: 88731 - DNA, 81 bp, Homo sapiens
tgcacacccaccacacacaggcacagggctgggaggcactgctcggctccctgggccctgccagagtggctccctatcact

SEQ ID NO: 88732 - DNA, 77 bp, Homo sapiens
gcacagggctgggaggcactgctcggctccctgggccctgccagagtggctccctatcacttgcttattttataaag

SEQ ID NO: 88733 - DNA, 76 bp, Homo sapiens
tgggaggcactgctcggctccctgggccctgccagagtggctccctatcacttgcttattttataaagtggcactt

SEQ ID NO: 88734 - DNA, 76 bp, Homo sapiens
tgctcggctccctgggccctgccagagtggctccctatcacttgcttattttataaagtggcactttacagctggt

SEQ ID NO: 88735 - DNA, 74 bp, Homo sapiens
ctgggccctgccagagtggctccctatcacttgcttattttataaagtggcactttacagctggtttaatgtgg

SEQ ID NO: 88736 - DNA, 72 bp, Homo sapiens
ccagagtggctccctatcacttgcttattttataaagtggcactttacagctggtttaatgtggtaaaacag

SEQ ID NO: 88737 - DNA, 70 bp, Homo sapiens
ctccctatcacttgcttattttataaagtggcactttacagctggtttaatgtggtaaaacaggaacctg

SEQ ID NO: 88738 - DNA, 69 bp, Homo sapiens
cacttgcttattttataaagtggcactttacagctggtttaatgtggtaaaacaggaacctggcttaaa

SEQ ID NO: 88739 - DNA, 66 bp, Homo sapiens
ttataaagtggcactttacagctggtttaatgtggtaaaacaggaacctggcttaaaaagaaaagg

SEQ ID NO: 88740 - DNA, 66 bp, Homo sapiens
agtggcactttacagctggtttaatgtggtaaaacaggaacctggcttaaaaagaaaagggaactc

SEQ ID NO: 88741 - DNA, 70 bp, Homo sapiens
tacagctggtttaatgtggtaaaacaggaacctggcttaaaaagaaaagggaactcgcactgtgccaggc

SEQ ID NO: 88742 - DNA, 71 bp, Homo sapiens
ttaatgtggtaaaacaggaacctggcttaaaaagaaaagggaactcgcactgtgccaggctggcacccagc

SEQ ID NO: 88743 - DNA, 72 bp, Homo sapiens
aaaacaggaacctggcttaaaaagaaaagggaactcgcactgtgccaggctggcacccagcgcagggacatc

SEQ ID NO: 88744 - DNA, 74 bp, Homo sapiens
cttaaaaagaaaagggaactcgcactgtgccaggctggcacccagcgcagggacatccctgtaagcatccgtgg

SEQ ID NO: 88745 - DNA, 78 bp, Homo sapiens
agaaaagggaactcgcactgtgccaggctggcacccagcgcagggacatccctgtaagcatccgtggtctggagagtg

SEQ ID NO: 88746 - DNA, 81 bp, Homo sapiens
aactcgcactgtgccaggctggcacccagcgcagggacatccctgtaagcatccgtggtctggagagtgtccagtggcacc

SEQ ID NO: 88747 - DNA, 80 bp, Homo sapiens
tggcacccagcgcagggacatccctgtaagcatccgtggtctggagagtgtccagtggcaccgcccgcccagcagtcagg

SEQ ID NO: 88748 - DNA, 76 bp, Homo sapiens
cctgtaagcatccgtggtctggagagtgtccagtggcaccgcccgcccagcagtcagggccgcgggtatctttatg

SEQ ID NO: 88749 - DNA, 77 bp, Homo sapiens
atccgtggtctggagagtgtccagtggcaccgcccgcccagcagtcagggccgcgggtatctttatggcatctggga

SEQ ID NO: 88750 - DNA, 77 bp, Homo sapiens
ctggagagtgtccagtggcaccgcccgcccagcagtcagggccgcgggtatctttatggcatctgggagggagcacc

SEQ ID NO: 88751 - DNA, 73 bp, Homo sapiens
cgcccagcagtcagggccgcgggtatctttatggcatctgggagggagcacccccaccctggggtgataagtg

SEQ ID NO: 88752 - DNA, 72 bp, Homo sapiens
tcagggccgcgggtatctttatggcatctgggagggagcacccccaccctggggtgataagtgggatgaaaa

SEQ ID NO: 88753 - DNA, 72 bp, Homo sapiens
gggtatctttatggcatctgggagggagcacccccaccctggggtgataagtgggatgaaaagaaggtgaca

SEQ ID NO: 88754 - DNA, 71 bp, Homo sapiens
tttatggcatctgggagggagcacccccaccctggggtgataagtgggatgaaaagaaggtgacagagttt

SEQ ID NO: 88755 - DNA, 69 bp, Homo sapiens
ggagggagcacccccaccctggggtgataagtgggatgaaaagaaggtgacagagtttttctgtcttat

SEQ ID NO: 88756 - DNA, 68 bp, Homo sapiens
acccccaccctggggtgataagtgggatgaaaagaaggtgacagagtttttctgtcttatttctggaa

SEQ ID NO: 88757 - DNA, 72 bp, Homo sapiens
ataagtgggatgaaaagaaggtgacagagtttttctgtcttatttctggaaaaggcaactggcaaagctgga

SEQ ID NO: 88758 - DNA, 73 bp, Homo sapiens
atgaaaagaaggtgacagagtttttctgtcttatttctggaaaaggcaactggcaaagctggagaacagcaag

SEQ ID NO: 88759 - DNA, 74 bp, Homo sapiens
acagagtttttctgtcttatttctggaaaaggcaactggcaaagctggagaacagcaagggagtgaagcagacc

SEQ ID NO: 88760 - DNA, 76 bp, Homo sapiens
ttatttctggaaaaggcaactggcaaagctggagaacagcaagggagtgaagcagacccataggagcgagggagcc

SEQ ID NO: 88761 - DNA, 76 bp, Homo sapiens
aaaaggcaactggcaaagctggagaacagcaagggagtgaagcagacccataggagcgagggagccccagcaagtg

SEQ ID NO: 88762 - DNA, 75 bp, Homo sapiens
aaagctggagaacagcaagggagtgaagcagacccataggagcgagggagccccagcaagtggggggcacgtctg

SEQ ID NO: 88763 - DNA, 77 bp, Homo sapiens
aacagcaagggagtgaagcagacccataggagcgagggagccccagcaagtggggggcacgtctggccaggctctga

SEQ ID NO: 88764 - DNA, 75 bp, Homo sapiens
aagggagtgaagcagacccataggagcgagggagccccagcaagtggggggcacgtctggccaggctctgaggaa

SEQ ID NO: 88765 - DNA, 76 bp, Homo sapiens
agacccataggagcgagggagccccagcaagtggggggcacgtctggccaggctctgaggaactgagctgcccgta

SEQ ID NO: 88766 - DNA, 76 bp, Homo sapiens
taggagcgagggagccccagcaagtggggggcacgtctggccaggctctgaggaactgagctgcccgtactgggaa

SEQ ID NO: 88767 - DNA, 77 bp, Homo sapiens
cccagcaagtggggggcacgtctggccaggctctgaggaactgagctgcccgtactgggaatcccaggcaggatgtg

SEQ ID NO: 88768 - DNA, 76 bp, Homo sapiens
aagtggggggcacgtctggccaggctctgaggaactgagctgcccgtactgggaatcccaggcaggatgtgggctc

SEQ ID NO: 88769 - DNA, 79 bp, Homo sapiens
aggctctgaggaactgagctgcccgtactgggaatcccaggcaggatgtgggctcttggaggtgatggaacagacagaa

SEQ ID NO: 88770 - DNA, 79 bp, Homo sapiens
aatcccaggcaggatgtgggctcttggaggtgatggaacagacagaacaggctattgcaggacacacgttcctcctcac

SEQ ID NO: 88771 - DNA, 76 bp, Homo sapiens
aggatgtgggctcttggaggtgatggaacagacagaacaggctattgcaggacacacgttcctcctcacccggccc

SEQ ID NO: 88772 - DNA, 76 bp, Homo sapiens
agacagaacaggctattgcaggacacacgttcctcctcacccggccccaccacatgttcatctagtaacagttcac

SEQ ID NO: 88773 - DNA, 76 bp, Homo sapiens
acaggctattgcaggacacacgttcctcctcacccggccccaccacatgttcatctagtaacagttcaccaagtga

SEQ ID NO: 88774 - DNA, 76 bp, Homo sapiens
aggacacacgttcctcctcacccggccccaccacatgttcatctagtaacagttcaccaagtgagctgatgtggcc

SEQ ID NO: 88775 - DNA, 77 bp, Homo sapiens
ttcctcctcacccggccccaccacatgttcatctagtaacagttcaccaagtgagctgatgtggccccagacaccca

SEQ ID NO: 88776 - DNA, 77 bp, Homo sapiens
acccggccccaccacatgttcatctagtaacagttcaccaagtgagctgatgtggccccagacacccagagctcagg

SEQ ID NO: 88777 - DNA, 82 bp, Homo sapiens
accacatgttcatctagtaacagttcaccaagtgagctgatgtggccccagacacccagagctcagggtacgtgcagagcca

SEQ ID NO: 88778 - DNA, 84 bp, Homo sapiens
atctagtaacagttcaccaagtgagctgatgtggccccagacacccagagctcagggtacgtgcagagccacggctgctgagca

SEQ ID NO: 88779 - DNA, 83 bp, Homo sapiens
acagttcaccaagtgagctgatgtggccccagacacccagagctcagggtacgtgcagagccacggctgctgagcactcaggg

SEQ ID NO: 88780 - DNA, 87 bp, Homo sapiens
agctgatgtggccccagacacccagagctcagggtacgtgcagagccacggctgctgagcactcaggggctgtgaggagatgtctga

SEQ ID NO: 88781 - DNA, 86 bp, Homo sapiens
atgtggccccagacacccagagctcagggtacgtgcagagccacggctgctgagcactcaggggctgtgaggagatgtctgagcag

SEQ ID NO: 88782 - DNA, 85 bp, Homo sapiens
agacacccagagctcagggtacgtgcagagccacggctgctgagcactcaggggctgtgaggagatgtctgagcagtggtgggaa

SEQ ID NO: 88783 - DNA, 81 bp, Homo sapiens
cagagccacggctgctgagcactcaggggctgtgaggagatgtctgagcagtggtgggaagggacgggacctgttactctg

SEQ ID NO: 88784 - DNA, 71 bp, Homo sapiens
aagggacgggacctgttactctggccacctggagccagcgggagtggagaatgggctgttcccaagcaccc

SEQ ID NO: 88785 - DNA, 75 bp, Homo sapiens
ctgttactctggccacctggagccagcgggagtggagaatgggctgttcccaagcacccgcctagggctcagaaa

SEQ ID NO: 88786 - DNA, 75 bp, Homo sapiens
actctggccacctggagccagcgggagtggagaatgggctgttcccaagcacccgcctagggctcagaaacacca

SEQ ID NO: 88787 - DNA, 71 bp, Homo sapiens
agtggagaatgggctgttcccaagcacccgcctagggctcagaaacaccacccttccttgggtcctgccga

SEQ ID NO: 88788 - DNA, 71 bp, Homo sapiens
agaatgggctgttcccaagcacccgcctagggctcagaaacaccacccttccttgggtcctgccgagcttc

SEQ ID NO: 88789 - DNA, 70 bp, Homo sapiens
gttcccaagcacccgcctagggctcagaaacaccacccttccttgggtcctgccgagcttccctcctcag

SEQ ID NO: 88790 - DNA, 69 bp, Homo sapiens
acccgcctagggctcagaaacaccacccttccttgggtcctgccgagcttccctcctcagggagccttc

SEQ ID NO: 88791 - DNA, 74 bp, Homo sapiens
agaaacaccacccttccttgggtcctgccgagcttccctcctcagggagccttccctgctgcaggctggatgag

SEQ ID NO: 88792 - DNA, 80 bp, Homo sapiens
tgggtcctgccgagcttccctcctcagggagccttccctgctgcaggctggatgagggcccacgggactgtcactcatca

SEQ ID NO: 88793 - DNA, 78 bp, Homo sapiens
agcttccctcctcagggagccttccctgctgcaggctggatgagggcccacgggactgtcactcatcactcccgttca

SEQ ID NO: 88794 - DNA, 81 bp, Homo sapiens
tcctcagggagccttccctgctgcaggctggatgagggcccacgggactgtcactcatcactcccgttcagaatgcacctg

SEQ ID NO: 88795 - DNA, 81 bp, Homo sapiens
tgcaggctggatgagggcccacgggactgtcactcatcactcccgttcagaatgcacctggctaactggagtcacacgtgg

SEQ ID NO: 88796 - DNA, 77 bp, Homo sapiens
ctggatgagggcccacgggactgtcactcatcactcccgttcagaatgcacctggctaactggagtcacacgtgggg

SEQ ID NO: 88797 - DNA, 79 bp, Homo sapiens
cccacgggactgtcactcatcactcccgttcagaatgcacctggctaactggagtcacacgtgggggcctggctgctgc

SEQ ID NO: 88798 - DNA, 78 bp, Homo sapiens
actcatcactcccgttcagaatgcacctggctaactggagtcacacgtgggggcctggctgctgcctggccaaggtta

SEQ ID NO: 88799 - DNA, 78 bp, Homo sapiens
tggctaactggagtcacacgtgggggcctggctgctgcctggccaaggttaaggacacacactctggccagacgctag

SEQ ID NO: 88800 - DNA, 78 bp, Homo sapiens
tggagtcacacgtgggggcctggctgctgcctggccaaggttaaggacacacactctggccagacgctaggtctgacc

SEQ ID NO: 88801 - DNA, 78 bp, Homo sapiens
gggcctggctgctgcctggccaaggttaaggacacacactctggccagacgctaggtctgaccccactcctatccatg

SEQ ID NO: 88802 - DNA, 78 bp, Homo sapiens
tgctgcctggccaaggttaaggacacacactctggccagacgctaggtctgaccccactcctatccatgtggacaacc

SEQ ID NO: 88803 - DNA, 77 bp, Homo sapiens
caaggttaaggacacacactctggccagacgctaggtctgaccccactcctatccatgtggacaacccgctcactca

SEQ ID NO: 88804 - DNA, 78 bp, Homo sapiens
ttaaggacacacactctggccagacgctaggtctgaccccactcctatccatgtggacaacccgctcactcacatccc

SEQ ID NO: 88805 - DNA, 78 bp, Homo sapiens
gtctgaccccactcctatccatgtggacaacccgctcactcacatccccccgcctgatccaaggggctcactgaagca

SEQ ID NO: 88806 - DNA, 78 bp, Homo sapiens
atgtggacaacccgctcactcacatccccccgcctgatccaaggggctcactgaagcactgactcctcggcatccagg

SEQ ID NO: 88807 - DNA, 79 bp, Homo sapiens
tcactcacatccccccgcctgatccaaggggctcactgaagcactgactcctcggcatccagggaggcctcgcctggtg

SEQ ID NO: 88808 - DNA, 79 bp, Homo sapiens
acatccccccgcctgatccaaggggctcactgaagcactgactcctcggcatccagggaggcctcgcctggtggctgca

SEQ ID NO: 88809 - DNA, 85 bp, Homo sapiens
gggctcactgaagcactgactcctcggcatccagggaggcctcgcctggtggctgcagcgtgcagaggatctgcgggctgtcacg

SEQ ID NO: 88810 - DNA, 83 bp, Homo sapiens
actcctcggcatccagggaggcctcgcctggtggctgcagcgtgcagaggatctgcgggctgtcacggcggatgcaggggtca

SEQ ID NO: 88811 - DNA, 92 bp, Homo sapiens
tcgcctggtggctgcagcgtgcagaggatctgcgggctgtcacggcggatgcaggggtcaactgtgctggcacctctgctaagcatgcatca

SEQ ID NO: 88812 - DNA, 87 bp, Homo sapiens
cgtgcagaggatctgcgggctgtcacggcggatgcaggggtcaactgtgctggcacctctgctaagcatgcatcacttcattttggc

SEQ ID NO: 88813 - DNA, 86 bp, Homo sapiens
atctgcgggctgtcacggcggatgcaggggtcaactgtgctggcacctctgctaagcatgcatcacttcattttggcctcctcagc

SEQ ID NO: 88814 - DNA, 85 bp, Homo sapiens
atgcaggggtcaactgtgctggcacctctgctaagcatgcatcacttcattttggcctcctcagccacttgtgccaacaggccag

SEQ ID NO: 88815 - DNA, 84 bp, Homo sapiens
aactgtgctggcacctctgctaagcatgcatcacttcattttggcctcctcagccacttgtgccaacaggccagggacggcaca

SEQ ID NO: 88816 - DNA, 83 bp, Homo sapiens
acctctgctaagcatgcatcacttcattttggcctcctcagccacttgtgccaacaggccagggacggcacagagaggctgga

SEQ ID NO: 88817 - DNA, 79 bp, Homo sapiens
atcacttcattttggcctcctcagccacttgtgccaacaggccagggacggcacagagaggctggaggggtgaggctga

SEQ ID NO: 88818 - DNA, 77 bp, Homo sapiens
attttggcctcctcagccacttgtgccaacaggccagggacggcacagagaggctggaggggtgaggctgaggagga

SEQ ID NO: 88819 - DNA, 76 bp, Homo sapiens
cctcagccacttgtgccaacaggccagggacggcacagagaggctggaggggtgaggctgaggaggaggggaggtg

SEQ ID NO: 88820 - DNA, 74 bp, Homo sapiens
ttgtgccaacaggccagggacggcacagagaggctggaggggtgaggctgaggaggaggggaggtgggcaaagg

SEQ ID NO: 88821 - DNA, 77 bp, Homo sapiens
agggacggcacagagaggctggaggggtgaggctgaggaggaggggaggtgggcaaagggcatctgtcagccatcta

SEQ ID NO: 88822 - DNA, 75 bp, Homo sapiens
acagagaggctggaggggtgaggctgaggaggaggggaggtgggcaaagggcatctgtcagccatctacctaagg

SEQ ID NO: 88823 - DNA, 78 bp, Homo sapiens
tggaggggtgaggctgaggaggaggggaggtgggcaaagggcatctgtcagccatctacctaagggtgtgctcactga

SEQ ID NO: 88824 - DNA, 80 bp, Homo sapiens
ggctgaggaggaggggaggtgggcaaagggcatctgtcagccatctacctaagggtgtgctcactgacgcacagaggcca

SEQ ID NO: 88825 - DNA, 81 bp, Homo sapiens
gaggggaggtgggcaaagggcatctgtcagccatctacctaagggtgtgctcactgacgcacagaggccactcctgctctg

SEQ ID NO: 88826 - DNA, 80 bp, Homo sapiens
aagggcatctgtcagccatctacctaagggtgtgctcactgacgcacagaggccactcctgctctgtttttccaaagcaa

SEQ ID NO: 88827 - DNA, 80 bp, Homo sapiens
agccatctacctaagggtgtgctcactgacgcacagaggccactcctgctctgtttttccaaagcaatctgtgactctcg

SEQ ID NO: 88828 - DNA, 79 bp, Homo sapiens
tacctaagggtgtgctcactgacgcacagaggccactcctgctctgtttttccaaagcaatctgtgactctcgggatta

SEQ ID NO: 88829 - DNA, 82 bp, Homo sapiens
tcactgacgcacagaggccactcctgctctgtttttccaaagcaatctgtgactctcgggattacccacatctcaagtcaca

SEQ ID NO: 88830 - DNA, 79 bp, Homo sapiens
acagaggccactcctgctctgtttttccaaagcaatctgtgactctcgggattacccacatctcaagtcacatcctgat

SEQ ID NO: 88831 - DNA, 79 bp, Homo sapiens
gtttttccaaagcaatctgtgactctcgggattacccacatctcaagtcacatcctgattgaaatccatgacgcgtggc

SEQ ID NO: 88832 - DNA, 82 bp, Homo sapiens
agcaatctgtgactctcgggattacccacatctcaagtcacatcctgattgaaatccatgacgcgtggcttgctttgctaaa

SEQ ID NO: 88833 - DNA, 81 bp, Homo sapiens
tctgtgactctcgggattacccacatctcaagtcacatcctgattgaaatccatgacgcgtggcttgctttgctaaatttc

SEQ ID NO: 88834 - DNA, 76 bp, Homo sapiens
attacccacatctcaagtcacatcctgattgaaatccatgacgcgtggcttgctttgctaaatttcccctacattt

SEQ ID NO: 88835 - DNA, 79 bp, Homo sapiens
ccacatctcaagtcacatcctgattgaaatccatgacgcgtggcttgctttgctaaatttcccctacattttctacaga

SEQ ID NO: 88836 - DNA, 80 bp, Homo sapiens
acatcctgattgaaatccatgacgcgtggcttgctttgctaaatttcccctacattttctacagagctcagcattcttca

SEQ ID NO: 88837 - DNA, 77 bp, Homo sapiens
attgaaatccatgacgcgtggcttgctttgctaaatttcccctacattttctacagagctcagcattcttcaactcc

SEQ ID NO: 88838 - DNA, 77 bp, Homo sapiens
atgacgcgtggcttgctttgctaaatttcccctacattttctacagagctcagcattcttcaactcccatctgaaat

SEQ ID NO: 88839 - DNA, 81 bp, Homo sapiens
ttgctttgctaaatttcccctacattttctacagagctcagcattcttcaactcccatctgaaattgccatgtacatctca

SEQ ID NO: 88840 - DNA, 81 bp, Homo sapiens
taaatttcccctacattttctacagagctcagcattcttcaactcccatctgaaattgccatgtacatctcatccctgtca

SEQ ID NO: 88841 - DNA, 80 bp, Homo sapiens
agcattcttcaactcccatctgaaattgccatgtacatctcatccctgtcacgttcatctctgcctgggaggaaggggaa

SEQ ID NO: 88842 - DNA, 80 bp, Homo sapiens
ttcaactcccatctgaaattgccatgtacatctcatccctgtcacgttcatctctgcctgggaggaaggggaagtggcta

SEQ ID NO: 88843 - DNA, 81 bp, Homo sapiens
atctgaaattgccatgtacatctcatccctgtcacgttcatctctgcctgggaggaaggggaagtggctacagactccaga

SEQ ID NO: 88844 - DNA, 80 bp, Homo sapiens
atgtacatctcatccctgtcacgttcatctctgcctgggaggaaggggaagtggctacagactccagaacctgcagcctg

SEQ ID NO: 88845 - DNA, 78 bp, Homo sapiens
tctcatccctgtcacgttcatctctgcctgggaggaaggggaagtggctacagactccagaacctgcagcctgggtcc

SEQ ID NO: 88846 - DNA, 78 bp, Homo sapiens
acgttcatctctgcctgggaggaaggggaagtggctacagactccagaacctgcagcctgggtccggtcatcagagca

SEQ ID NO: 88847 - DNA, 83 bp, Homo sapiens
tgcctgggaggaaggggaagtggctacagactccagaacctgcagcctgggtccggtcatcagagcagtgatgctctctgtca

SEQ ID NO: 88848 - DNA, 84 bp, Homo sapiens
aagtggctacagactccagaacctgcagcctgggtccggtcatcagagcagtgatgctctctgtcattggtcagcagaggttag

SEQ ID NO: 88849 - DNA, 84 bp, Homo sapiens
actccagaacctgcagcctgggtccggtcatcagagcagtgatgctctctgtcattggtcagcagaggttaggcccacctgtca

SEQ ID NO: 88850 - DNA, 84 bp, Homo sapiens
ctgggtccggtcatcagagcagtgatgctctctgtcattggtcagcagaggttaggcccacctgtcaggcctcagaagagcctg

SEQ ID NO: 88851 - DNA, 87 bp, Homo sapiens
tcatcagagcagtgatgctctctgtcattggtcagcagaggttaggcccacctgtcaggcctcagaagagcctggcaccgcccacag

SEQ ID NO: 88852 - DNA, 82 bp, Homo sapiens
tgctctctgtcattggtcagcagaggttaggcccacctgtcaggcctcagaagagcctggcaccgcccacagggtggatcaa

SEQ ID NO: 88853 - DNA, 79 bp, Homo sapiens
tctgtcattggtcagcagaggttaggcccacctgtcaggcctcagaagagcctggcaccgcccacagggtggatcaacg

SEQ ID NO: 88854 - DNA, 73 bp, Homo sapiens
cagaggttaggcccacctgtcaggcctcagaagagcctggcaccgcccacagggtggatcaacgggttaataa

SEQ ID NO: 88855 - DNA, 76 bp, Homo sapiens
ctgtcaggcctcagaagagcctggcaccgcccacagggtggatcaacgggttaataagtcacagcagaaaacctga

SEQ ID NO: 88856 - DNA, 72 bp, Homo sapiens
aagagcctggcaccgcccacagggtggatcaacgggttaataagtcacagcagaaaacctgaggctcgactt

SEQ ID NO: 88857 - DNA, 70 bp, Homo sapiens
caccgcccacagggtggatcaacgggttaataagtcacagcagaaaacctgaggctcgactttaaataaa

SEQ ID NO: 88858 - DNA, 70 bp, Homo sapiens
cccacagggtggatcaacgggttaataagtcacagcagaaaacctgaggctcgactttaaataaacagaa

SEQ ID NO: 88859 - DNA, 74 bp, Homo sapiens
atcaacgggttaataagtcacagcagaaaacctgaggctcgactttaaataaacagaactctcccagctgcatc

SEQ ID NO: 88860 - DNA, 75 bp, Homo sapiens
gttaataagtcacagcagaaaacctgaggctcgactttaaataaacagaactctcccagctgcatccctgccaag

SEQ ID NO: 88861 - DNA, 79 bp, Homo sapiens
actttaaataaacagaactctcccagctgcatccctgccaaggcccgagagtgacactggcacatgagctatatctccc

SEQ ID NO: 88862 - DNA, 80 bp, Homo sapiens
ataaacagaactctcccagctgcatccctgccaaggcccgagagtgacactggcacatgagctatatctccccccaccaa

SEQ ID NO: 88863 - DNA, 81 bp, Homo sapiens
tctcccagctgcatccctgccaaggcccgagagtgacactggcacatgagctatatctccccccaccaacacaccccatgg

SEQ ID NO: 88864 - DNA, 81 bp, Homo sapiens
atccctgccaaggcccgagagtgacactggcacatgagctatatctccccccaccaacacaccccatgggctgtcatgaga

SEQ ID NO: 88865 - DNA, 81 bp, Homo sapiens
aaggcccgagagtgacactggcacatgagctatatctccccccaccaacacaccccatgggctgtcatgagaaacactgca

SEQ ID NO: 88866 - DNA, 83 bp, Homo sapiens
agagtgacactggcacatgagctatatctccccccaccaacacaccccatgggctgtcatgagaaacactgcatataccagaa

SEQ ID NO: 88867 - DNA, 78 bp, Homo sapiens
acatgagctatatctccccccaccaacacaccccatgggctgtcatgagaaacactgcatataccagaacccatttac

SEQ ID NO: 88868 - DNA, 77 bp, Homo sapiens
tatatctccccccaccaacacaccccatgggctgtcatgagaaacactgcatataccagaacccatttactctggga

SEQ ID NO: 88869 - DNA, 77 bp, Homo sapiens
accaacacaccccatgggctgtcatgagaaacactgcatataccagaacccatttactctgggacactctccacgga

SEQ ID NO: 88870 - DNA, 79 bp, Homo sapiens
cccatgggctgtcatgagaaacactgcatataccagaacccatttactctgggacactctccacggagccctgccacca

SEQ ID NO: 88871 - DNA, 79 bp, Homo sapiens
ctgtcatgagaaacactgcatataccagaacccatttactctgggacactctccacggagccctgccaccacctgtcca

SEQ ID NO: 88872 - DNA, 76 bp, Homo sapiens
agaaacactgcatataccagaacccatttactctgggacactctccacggagccctgccaccacctgtccagtgga

SEQ ID NO: 88873 - DNA, 75 bp, Homo sapiens
atataccagaacccatttactctgggacactctccacggagccctgccaccacctgtccagtggacagggcctga

SEQ ID NO: 88874 - DNA, 74 bp, Homo sapiens
acccatttactctgggacactctccacggagccctgccaccacctgtccagtggacagggcctgagggacacaa

SEQ ID NO: 88875 - DNA, 75 bp, Homo sapiens
ctgccaccacctgtccagtggacagggcctgagggacacaaagcccccacagccctgagcacccgaggagccacc

SEQ ID NO: 88876 - DNA, 78 bp, Homo sapiens
tggacagggcctgagggacacaaagcccccacagccctgagcacccgaggagccacctggcctggggatgtgtgatgc

SEQ ID NO: 88877 - DNA, 80 bp, Homo sapiens
tgagggacacaaagcccccacagccctgagcacccgaggagccacctggcctggggatgtgtgatgcctgcgcacaggag

SEQ ID NO: 88878 - DNA, 81 bp, Homo sapiens
acacaaagcccccacagccctgagcacccgaggagccacctggcctggggatgtgtgatgcctgcgcacaggaggctctca

SEQ ID NO: 88879 - DNA, 86 bp, Homo sapiens
acagccctgagcacccgaggagccacctggcctggggatgtgtgatgcctgcgcacaggaggctctcagcccacagctccagcaga

SEQ ID NO: 88880 - DNA, 81 bp, Homo sapiens
acccgaggagccacctggcctggggatgtgtgatgcctgcgcacaggaggctctcagcccacagctccagcagaggaaaaa

SEQ ID NO: 88881 - DNA, 81 bp, Homo sapiens
ccacctggcctggggatgtgtgatgcctgcgcacaggaggctctcagcccacagctccagcagaggaaaaaactcttgcct

SEQ ID NO: 88882 - DNA, 82 bp, Homo sapiens
atgtgtgatgcctgcgcacaggaggctctcagcccacagctccagcagaggaaaaaactcttgccttgtggagacaacccag

SEQ ID NO: 88883 - DNA, 78 bp, Homo sapiens
gcacaggaggctctcagcccacagctccagcagaggaaaaaactcttgccttgtggagacaacccaggctttgactat

SEQ ID NO: 88884 - DNA, 76 bp, Homo sapiens
aggctctcagcccacagctccagcagaggaaaaaactcttgccttgtggagacaacccaggctttgactattctgg

SEQ ID NO: 88885 - DNA, 76 bp, Homo sapiens
agcccacagctccagcagaggaaaaaactcttgccttgtggagacaacccaggctttgactattctgggctgccag

SEQ ID NO: 88886 - DNA, 76 bp, Homo sapiens
tccagcagaggaaaaaactcttgccttgtggagacaacccaggctttgactattctgggctgccagggctgtggga

SEQ ID NO: 88887 - DNA, 76 bp, Homo sapiens
aaaaactcttgccttgtggagacaacccaggctttgactattctgggctgccagggctgtgggagcagcaggtcaa

SEQ ID NO: 88888 - DNA, 80 bp, Homo sapiens
cttgtggagacaacccaggctttgactattctgggctgccagggctgtgggagcagcaggtcaaggttcaggacatctca

SEQ ID NO: 88889 - DNA, 78 bp, Homo sapiens
agacaacccaggctttgactattctgggctgccagggctgtgggagcagcaggtcaaggttcaggacatctcaccctc

SEQ ID NO: 88890 - DNA, 82 bp, Homo sapiens
tttgactattctgggctgccagggctgtgggagcagcaggtcaaggttcaggacatctcaccctcctgccatcatggccaaa

SEQ ID NO: 88891 - DNA, 82 bp, Homo sapiens
tattctgggctgccagggctgtgggagcagcaggtcaaggttcaggacatctcaccctcctgccatcatggccaaacctcag

SEQ ID NO: 88892 - DNA, 80 bp, Homo sapiens
agggctgtgggagcagcaggtcaaggttcaggacatctcaccctcctgccatcatggccaaacctcaggcgactgagaac

SEQ ID NO: 88893 - DNA, 80 bp, Homo sapiens
agcagcaggtcaaggttcaggacatctcaccctcctgccatcatggccaaacctcaggcgactgagaacgatgggcaact

SEQ ID NO: 88894 - DNA, 78 bp, Homo sapiens
aggtcaaggttcaggacatctcaccctcctgccatcatggccaaacctcaggcgactgagaacgatgggcaacttctg

SEQ ID NO: 88895 - DNA, 83 bp, Homo sapiens
ttcaggacatctcaccctcctgccatcatggccaaacctcaggcgactgagaacgatgggcaacttctgtgtgccagagggca

SEQ ID NO: 88896 - DNA, 81 bp, Homo sapiens
accctcctgccatcatggccaaacctcaggcgactgagaacgatgggcaacttctgtgtgccagagggcagtgacatacca

SEQ ID NO: 88897 - DNA, 79 bp, Homo sapiens
aaacctcaggcgactgagaacgatgggcaacttctgtgtgccagagggcagtgacataccaggacatcaggggaacaca

SEQ ID NO: 88898 - DNA, 79 bp, Homo sapiens
actgagaacgatgggcaacttctgtgtgccagagggcagtgacataccaggacatcaggggaacacaagccactgtccc

SEQ ID NO: 88899 - DNA, 76 bp, Homo sapiens
aacttctgtgtgccagagggcagtgacataccaggacatcaggggaacacaagccactgtcccgtagcccccactc

SEQ ID NO: 88900 - DNA, 75 bp, Homo sapiens
agagggcagtgacataccaggacatcaggggaacacaagccactgtcccgtagcccccactcctctcccatcctc

SEQ ID NO: 88901 - DNA, 74 bp, Homo sapiens
agtgacataccaggacatcaggggaacacaagccactgtcccgtagcccccactcctctcccatcctctcctcc

SEQ ID NO: 88902 - DNA, 71 bp, Homo sapiens
accaggacatcaggggaacacaagccactgtcccgtagcccccactcctctcccatcctctcctcccctcc

SEQ ID NO: 88903 - DNA, 80 bp, Homo sapiens
ccctcccctctcctctgtggtgtgctttcttctgcatctgccacagctcacccaacagcaaatgcaatcccaactagtta

SEQ ID NO: 88904 - DNA, 83 bp, Homo sapiens
tctcctctgtggtgtgctttcttctgcatctgccacagctcacccaacagcaaatgcaatcccaactagttaggctcttgtta

SEQ ID NO: 88905 - DNA, 83 bp, Homo sapiens
tgtgctttcttctgcatctgccacagctcacccaacagcaaatgcaatcccaactagttaggctcttgttaggactgaagata

SEQ ID NO: 88906 - DNA, 81 bp, Homo sapiens
ttcttctgcatctgccacagctcacccaacagcaaatgcaatcccaactagttaggctcttgttaggactgaagatagctt

SEQ ID NO: 88907 - DNA, 77 bp, Homo sapiens
ccacagctcacccaacagcaaatgcaatcccaactagttaggctcttgttaggactgaagatagcttttgctattct

SEQ ID NO: 88908 - DNA, 75 bp, Homo sapiens
acccaacagcaaatgcaatcccaactagttaggctcttgttaggactgaagatagcttttgctattcttctctac

SEQ ID NO: 88909 - DNA, 76 bp, Homo sapiens
aaatgcaatcccaactagttaggctcttgttaggactgaagatagcttttgctattcttctctactcaattcttca

SEQ ID NO: 88910 - DNA, 75 bp, Homo sapiens
aatcccaactagttaggctcttgttaggactgaagatagcttttgctattcttctctactcaattcttcatccta

SEQ ID NO: 88911 - DNA, 78 bp, Homo sapiens
agttaggctcttgttaggactgaagatagcttttgctattcttctctactcaattcttcatcctaaggatgctgtggc

SEQ ID NO: 88912 - DNA, 78 bp, Homo sapiens
agatagcttttgctattcttctctactcaattcttcatcctaaggatgctgtggccagtcacaccctcccacgggcaa

SEQ ID NO: 88913 - DNA, 77 bp, Homo sapiens
ttttgctattcttctctactcaattcttcatcctaaggatgctgtggccagtcacaccctcccacgggcaagggcac

SEQ ID NO: 88914 - DNA, 76 bp, Homo sapiens
ttctctactcaattcttcatcctaaggatgctgtggccagtcacaccctcccacgggcaagggcacccggcaataa

SEQ ID NO: 88915 - DNA, 75 bp, Homo sapiens
attcttcatcctaaggatgctgtggccagtcacaccctcccacgggcaagggcacccggcaataagccccagcta

SEQ ID NO: 88916 - DNA, 77 bp, Homo sapiens
taaggatgctgtggccagtcacaccctcccacgggcaagggcacccggcaataagccccagctactgccattactca

SEQ ID NO: 88917 - DNA, 75 bp, Homo sapiens
tgtggccagtcacaccctcccacgggcaagggcacccggcaataagccccagctactgccattactcatcccact

SEQ ID NO: 88918 - DNA, 73 bp, Homo sapiens
gtcacaccctcccacgggcaagggcacccggcaataagccccagctactgccattactcatcccacttcccag

SEQ ID NO: 88919 - DNA, 74 bp, Homo sapiens
cccacgggcaagggcacccggcaataagccccagctactgccattactcatcccacttcccaggcaggcaggaa

SEQ ID NO: 88920 - DNA, 79 bp, Homo sapiens
acccggcaataagccccagctactgccattactcatcccacttcccaggcaggcaggaaggcaggtgtgcagagcactg

SEQ ID NO: 88921 - DNA, 80 bp, Homo sapiens
aataagccccagctactgccattactcatcccacttcccaggcaggcaggaaggcaggtgtgcagagcactgggcagggc

SEQ ID NO: 88922 - DNA, 81 bp, Homo sapiens
agctactgccattactcatcccacttcccaggcaggcaggaaggcaggtgtgcagagcactgggcagggccatagtacctg

SEQ ID NO: 88923 - DNA, 82 bp, Homo sapiens
attactcatcccacttcccaggcaggcaggaaggcaggtgtgcagagcactgggcagggccatagtacctgtgccacacaca

SEQ ID NO: 88924 - DNA, 79 bp, Homo sapiens
ccacacacacacatgctcttcacctcatccagagtttcctaggttttggtgcttcaacagccctcagtaacgcaggctc

SEQ ID NO: 88925 - DNA, 76 bp, Homo sapiens
acatgctcttcacctcatccagagtttcctaggttttggtgcttcaacagccctcagtaacgcaggctccttacta

SEQ ID NO: 88926 - DNA, 77 bp, Homo sapiens
tcttcacctcatccagagtttcctaggttttggtgcttcaacagccctcagtaacgcaggctccttactatgagata

SEQ ID NO: 88927 - DNA, 75 bp, Homo sapiens
agagtttcctaggttttggtgcttcaacagccctcagtaacgcaggctccttactatgagatagcctgggagaga

SEQ ID NO: 88928 - DNA, 76 bp, Homo sapiens
ttcctaggttttggtgcttcaacagccctcagtaacgcaggctccttactatgagatagcctgggagagagctggg

SEQ ID NO: 88929 - DNA, 79 bp, Homo sapiens
tgcttcaacagccctcagtaacgcaggctccttactatgagatagcctgggagagagctggggtttctgtgatgggaaa

SEQ ID NO: 88930 - DNA, 74 bp, Homo sapiens
agtaacgcaggctccttactatgagatagcctgggagagagctggggtttctgtgatgggaaagggctaagccg

SEQ ID NO: 88931 - DNA, 72 bp, Homo sapiens
tccttactatgagatagcctgggagagagctggggtttctgtgatgggaaagggctaagccgggaaaggaaa

SEQ ID NO: 88932 - DNA, 73 bp, Homo sapiens
agagagctggggtttctgtgatgggaaagggctaagccgggaaaggaaacagtgtgtgactggcgccttgcaa

SEQ ID NO: 88933 - DNA, 72 bp, Homo sapiens
ggtttctgtgatgggaaagggctaagccgggaaaggaaacagtgtgtgactggcgccttgcaagccacctaa

SEQ ID NO: 88934 - DNA, 74 bp, Homo sapiens
aaagggctaagccgggaaaggaaacagtgtgtgactggcgccttgcaagccacctaaggcaccaggcacacaca

SEQ ID NO: 88935 - DNA, 74 bp, Homo sapiens
gggaaaggaaacagtgtgtgactggcgccttgcaagccacctaaggcaccaggcacacacaggggaggggagaa

SEQ ID NO: 88936 - DNA, 75 bp, Homo sapiens
gtgactggcgccttgcaagccacctaaggcaccaggcacacacaggggaggggagaagaggacgggagaggagtg

SEQ ID NO: 88937 - DNA, 72 bp, Homo sapiens
ccttgcaagccacctaaggcaccaggcacacacaggggaggggagaagaggacgggagaggagtgggggcca

SEQ ID NO: 88938 - DNA, 72 bp, Homo sapiens
taaggcaccaggcacacacaggggaggggagaagaggacgggagaggagtgggggccacgggatgcggcttg

SEQ ID NO: 88939 - DNA, 70 bp, Homo sapiens
gggaggggagaagaggacgggagaggagtgggggccacgggatgcggcttgtgttcccctgatgtcctgg

SEQ ID NO: 88940 - DNA, 73 bp, Homo sapiens
agaagaggacgggagaggagtgggggccacgggatgcggcttgtgttcccctgatgtcctgggacacagctcc

SEQ ID NO: 88941 - DNA, 71 bp, Homo sapiens
agtgggggccacgggatgcggcttgtgttcccctgatgtcctgggacacagctccctgaaccccaaaacac

SEQ ID NO: 88942 - DNA, 72 bp, Homo sapiens
gatgcggcttgtgttcccctgatgtcctgggacacagctccctgaaccccaaaacaccccacggacaggaaa

SEQ ID NO: 88943 - DNA, 71 bp, Homo sapiens
tgtgttcccctgatgtcctgggacacagctccctgaaccccaaaacaccccacggacaggaaagcaaagta

SEQ ID NO: 88944 - DNA, 72 bp, Homo sapiens
tgatgtcctgggacacagctccctgaaccccaaaacaccccacggacaggaaagcaaagtaaggagaggtga

SEQ ID NO: 88945 - DNA, 73 bp, Homo sapiens
gacacagctccctgaaccccaaaacaccccacggacaggaaagcaaagtaaggagaggtgaatgtgagttgca

SEQ ID NO: 88946 - DNA, 70 bp, Homo sapiens
tccctgaaccccaaaacaccccacggacaggaaagcaaagtaaggagaggtgaatgtgagttgcaggagg

SEQ ID NO: 88947 - DNA, 74 bp, Homo sapiens
aaaacaccccacggacaggaaagcaaagtaaggagaggtgaatgtgagttgcaggaggggctgcaggcactgac

SEQ ID NO: 88948 - DNA, 76 bp, Homo sapiens
acggacaggaaagcaaagtaaggagaggtgaatgtgagttgcaggaggggctgcaggcactgacctgacctcccac

SEQ ID NO: 88949 - DNA, 78 bp, Homo sapiens
aaagcaaagtaaggagaggtgaatgtgagttgcaggaggggctgcaggcactgacctgacctcccacccacaggatga

SEQ ID NO: 88950 - DNA, 77 bp, Homo sapiens
aagtaaggagaggtgaatgtgagttgcaggaggggctgcaggcactgacctgacctcccacccacaggatgacccca

SEQ ID NO: 88951 - DNA, 79 bp, Homo sapiens
aatgtgagttgcaggaggggctgcaggcactgacctgacctcccacccacaggatgaccccacacagcagagggagaaa

SEQ ID NO: 88952 - DNA, 76 bp, Homo sapiens
tgaggcccagagggtggcaccactgtacagtcaggtacccccaccctgtgtcctgctctgtactacacagaccacc

SEQ ID NO: 88953 - DNA, 77 bp, Homo sapiens
agagggtggcaccactgtacagtcaggtacccccaccctgtgtcctgctctgtactacacagaccacccagcacaca

SEQ ID NO: 88954 - DNA, 78 bp, Homo sapiens
accactgtacagtcaggtacccccaccctgtgtcctgctctgtactacacagaccacccagcacacatgtggccaata

SEQ ID NO: 88955 - DNA, 79 bp, Homo sapiens
tacagtcaggtacccccaccctgtgtcctgctctgtactacacagaccacccagcacacatgtggccaataccagtgag

SEQ ID NO: 88956 - DNA, 81 bp, Homo sapiens
ctgtgtcctgctctgtactacacagaccacccagcacacatgtggccaataccagtgaggcaaaggtggcagcctgggccc

SEQ ID NO: 88957 - DNA, 80 bp, Homo sapiens
ctctgtactacacagaccacccagcacacatgtggccaataccagtgaggcaaaggtggcagcctgggccccccatgctg

SEQ ID NO: 88958 - DNA, 80 bp, Homo sapiens
acagaccacccagcacacatgtggccaataccagtgaggcaaaggtggcagcctgggccccccatgctggccctcagcca

SEQ ID NO: 88959 - DNA, 78 bp, Homo sapiens
acacatgtggccaataccagtgaggcaaaggtggcagcctgggccccccatgctggccctcagccatccctgggacaa

SEQ ID NO: 88960 - DNA, 77 bp, Homo sapiens
ccaataccagtgaggcaaaggtggcagcctgggccccccatgctggccctcagccatccctgggacaacagtctaga

SEQ ID NO: 88961 - DNA, 77 bp, Homo sapiens
gtgaggcaaaggtggcagcctgggccccccatgctggccctcagccatccctgggacaacagtctagacacccagaa

SEQ ID NO: 88962 - DNA, 78 bp, Homo sapiens
aaaggtggcagcctgggccccccatgctggccctcagccatccctgggacaacagtctagacacccagaagctctgca

SEQ ID NO: 88963 - DNA, 79 bp, Homo sapiens
tgggccccccatgctggccctcagccatccctgggacaacagtctagacacccagaagctctgcacctaggcccactga

SEQ ID NO: 88964 - DNA, 79 bp, Homo sapiens
atgctggccctcagccatccctgggacaacagtctagacacccagaagctctgcacctaggcccactgacccagcctcc

SEQ ID NO: 88965 - DNA, 77 bp, Homo sapiens
cctcagccatccctgggacaacagtctagacacccagaagctctgcacctaggcccactgacccagcctccctccaa

SEQ ID NO: 88966 - DNA, 75 bp, Homo sapiens
atccctgggacaacagtctagacacccagaagctctgcacctaggcccactgacccagcctccctccaagccctg

SEQ ID NO: 88967 - DNA, 76 bp, Homo sapiens
aacagtctagacacccagaagctctgcacctaggcccactgacccagcctccctccaagccctgggtgcccatgtg

SEQ ID NO: 88968 - DNA, 78 bp, Homo sapiens
acacccagaagctctgcacctaggcccactgacccagcctccctccaagccctgggtgcccatgtgtgcccaggctgc

SEQ ID NO: 88969 - DNA, 81 bp, Homo sapiens
tctgcacctaggcccactgacccagcctccctccaagccctgggtgcccatgtgtgcccaggctgctgcccctggcactca

SEQ ID NO: 88970 - DNA, 84 bp, Homo sapiens
cagcctccctccaagccctgggtgcccatgtgtgcccaggctgctgcccctggcactcaggccatgccacacgcagcagctggg

SEQ ID NO: 88971 - DNA, 86 bp, Homo sapiens
ctgggtgcccatgtgtgcccaggctgctgcccctggcactcaggccatgccacacgcagcagctgggtctgaagcctggcttggaa

SEQ ID NO: 88972 - DNA, 85 bp, Homo sapiens
ccatgtgtgcccaggctgctgcccctggcactcaggccatgccacacgcagcagctgggtctgaagcctggcttggaaccagccc

SEQ ID NO: 88973 - DNA, 83 bp, Homo sapiens
cctggcactcaggccatgccacacgcagcagctgggtctgaagcctggcttggaaccagccccccacagtcaacatggagaca

SEQ ID NO: 88974 - DNA, 84 bp, Homo sapiens
tcaggccatgccacacgcagcagctgggtctgaagcctggcttggaaccagccccccacagtcaacatggagacagccctgctg

SEQ ID NO: 88975 - DNA, 80 bp, Homo sapiens
acacgcagcagctgggtctgaagcctggcttggaaccagccccccacagtcaacatggagacagccctgctggcaccgcc

SEQ ID NO: 88976 - DNA, 77 bp, Homo sapiens
tgggtctgaagcctggcttggaaccagccccccacagtcaacatggagacagccctgctggcaccgccccaggcctg

SEQ ID NO: 88977 - DNA, 76 bp, Homo sapiens
ctgaagcctggcttggaaccagccccccacagtcaacatggagacagccctgctggcaccgccccaggcctgggcc

SEQ ID NO: 88978 - DNA, 74 bp, Homo sapiens
cttggaaccagccccccacagtcaacatggagacagccctgctggcaccgccccaggcctgggccctgtctccc

SEQ ID NO: 88979 - DNA, 76 bp, Homo sapiens
cccacagtcaacatggagacagccctgctggcaccgccccaggcctgggccctgtctcccgcaccctccagcgacc

SEQ ID NO: 88980 - DNA, 74 bp, Homo sapiens
aggcctgggccctgtctcccgcaccctccagcgacctgcctgggccaccctcaaggtgcgcctgctcctaagcc

SEQ ID NO: 88981 - DNA, 75 bp, Homo sapiens
ccctgtctcccgcaccctccagcgacctgcctgggccaccctcaaggtgcgcctgctcctaagccgcctcccaca

SEQ ID NO: 88982 - DNA, 79 bp, Homo sapiens
tcaaggtgcgcctgctcctaagccgcctcccacagtggagggacacccgggctgcttcagagcagactgtggcaagtta

SEQ ID NO: 88983 - DNA, 74 bp, Homo sapiens
tcctaagccgcctcccacagtggagggacacccgggctgcttcagagcagactgtggcaagttaccctctcccc

SEQ ID NO: 88984 - DNA, 72 bp, Homo sapiens
tcccacagtggagggacacccgggctgcttcagagcagactgtggcaagttaccctctcccccagggggaaa

SEQ ID NO: 88985 - DNA, 70 bp, Homo sapiens
agggacacccgggctgcttcagagcagactgtggcaagttaccctctcccccagggggaaagggatccaa

SEQ ID NO: 88986 - DNA, 75 bp, Homo sapiens
ggctgcttcagagcagactgtggcaagttaccctctcccccagggggaaagggatccaaagctcctgtgcctctg

SEQ ID NO: 88987 - DNA, 72 bp, Homo sapiens
ttcagagcagactgtggcaagttaccctctcccccagggggaaagggatccaaagctcctgtgcctctgggg

SEQ ID NO: 88988 - DNA, 74 bp, Homo sapiens
actgtggcaagttaccctctcccccagggggaaagggatccaaagctcctgtgcctctggggtgcagcatcagc

SEQ ID NO: 88989 - DNA, 73 bp, Homo sapiens
gttaccctctcccccagggggaaagggatccaaagctcctgtgcctctggggtgcagcatcagcccagacttc

SEQ ID NO: 88990 - DNA, 79 bp, Homo sapiens
ccagggggaaagggatccaaagctcctgtgcctctggggtgcagcatcagcccagacttctgctcggctgggtgccatg

SEQ ID NO: 88991 - DNA, 82 bp, Homo sapiens
aaagggatccaaagctcctgtgcctctggggtgcagcatcagcccagacttctgctcggctgggtgccatggctcacgcctg

SEQ ID NO: 88992 - DNA, 75 bp, Homo sapiens
agagcaagacctcgtctgaaaaaacaaaagcagacttccgttcaacagcatgtgaacctcaccttgcacacctag

SEQ ID NO: 88993 - DNA, 74 bp, Homo sapiens
tcgtctgaaaaaacaaaagcagacttccgttcaacagcatgtgaacctcaccttgcacacctaggagttcgtta

SEQ ID NO: 88994 - DNA, 73 bp, Homo sapiens
aaacaaaagcagacttccgttcaacagcatgtgaacctcaccttgcacacctaggagttcgttaccctcctca

SEQ ID NO: 88995 - DNA, 77 bp, Homo sapiens
agacttccgttcaacagcatgtgaacctcaccttgcacacctaggagttcgttaccctcctcagctcagagattaga

SEQ ID NO: 88996 - DNA, 78 bp, Homo sapiens
ttcaacagcatgtgaacctcaccttgcacacctaggagttcgttaccctcctcagctcagagattagagggaactctc

SEQ ID NO: 88997 - DNA, 76 bp, Homo sapiens
aacagcatgtgaacctcaccttgcacacctaggagttcgttaccctcctcagctcagagattagagggaactctcc

SEQ ID NO: 88998 - DNA, 75 bp, Homo sapiens
atgtgaacctcaccttgcacacctaggagttcgttaccctcctcagctcagagattagagggaactctccccaca

SEQ ID NO: 88999 - DNA, 74 bp, Homo sapiens
aacctcaccttgcacacctaggagttcgttaccctcctcagctcagagattagagggaactctccccacagaga

SEQ ID NO: 89000 - DNA, 79 bp, Homo sapiens
accttgcacacctaggagttcgttaccctcctcagctcagagattagagggaactctccccacagagatgctatgatca

SEQ ID NO: 89001 - DNA, 80 bp, Homo sapiens
ccttgcacacctaggagttcgttaccctcctcagctcagagattagagggaactctccccacagagatgctatgatcaga

SEQ ID NO: 89002 - DNA, 78 bp, Homo sapiens
acacctaggagttcgttaccctcctcagctcagagattagagggaactctccccacagagatgctatgatcagagggc

SEQ ID NO: 89003 - DNA, 79 bp, Homo sapiens
taggagttcgttaccctcctcagctcagagattagagggaactctccccacagagatgctatgatcagagggccaggga

SEQ ID NO: 89004 - DNA, 77 bp, Homo sapiens
agttcgttaccctcctcagctcagagattagagggaactctccccacagagatgctatgatcagagggccagggacc

SEQ ID NO: 89005 - DNA, 80 bp, Homo sapiens
ttaccctcctcagctcagagattagagggaactctccccacagagatgctatgatcagagggccagggaccctgtctcat

SEQ ID NO: 89006 - DNA, 82 bp, Homo sapiens
tcagagattagagggaactctccccacagagatgctatgatcagagggccagggaccctgtctcattgatcctacgctctac

SEQ ID NO: 89007 - DNA, 80 bp, Homo sapiens
attagagggaactctccccacagagatgctatgatcagagggccagggaccctgtctcattgatcctacgctctacgcca

SEQ ID NO: 89008 - DNA, 85 bp, Homo sapiens
acagagatgctatgatcagagggccagggaccctgtctcattgatcctacgctctacgccagacatcgcctcagaatccttctca

SEQ ID NO: 89009 - DNA, 82 bp, Homo sapiens
tatgatcagagggccagggaccctgtctcattgatcctacgctctacgccagacatcgcctcagaatccttctcaacacggc

SEQ ID NO: 89010 - DNA, 81 bp, Homo sapiens
ctgtctcattgatcctacgctctacgccagacatcgcctcagaatccttctcaacacggctccacttcctatctacaagga

SEQ ID NO: 89011 - DNA, 80 bp, Homo sapiens
tctacgccagacatcgcctcagaatccttctcaacacggctccacttcctatctacaaggagctggcctacaagatggaa

SEQ ID NO: 89012 - DNA, 78 bp, Homo sapiens
atcgcctcagaatccttctcaacacggctccacttcctatctacaaggagctggcctacaagatggaagcgattccta

SEQ ID NO: 89013 - DNA, 76 bp, Homo sapiens
atccttctcaacacggctccacttcctatctacaaggagctggcctacaagatggaagcgattcctacattatggg

SEQ ID NO: 89014 - DNA, 81 bp, Homo sapiens
tccacttcctatctacaaggagctggcctacaagatggaagcgattcctacattatggggtcatgtggctccaggcacatg

SEQ ID NO: 89015 - DNA, 81 bp, Homo sapiens
tatctacaaggagctggcctacaagatggaagcgattcctacattatggggtcatgtggctccaggcacatggccctcgac

SEQ ID NO: 89016 - DNA, 80 bp, Homo sapiens
agctggcctacaagatggaagcgattcctacattatggggtcatgtggctccaggcacatggccctcgaccagtgggagc

SEQ ID NO: 89017 - DNA, 82 bp, Homo sapiens
tacaagatggaagcgattcctacattatggggtcatgtggctccaggcacatggccctcgaccagtgggagcctgtgcacag

SEQ ID NO: 89018 - DNA, 80 bp, Homo sapiens
aagcgattcctacattatggggtcatgtggctccaggcacatggccctcgaccagtgggagcctgtgcacaggtaagaga

SEQ ID NO: 89019 - DNA, 82 bp, Homo sapiens
tacattatggggtcatgtggctccaggcacatggccctcgaccagtgggagcctgtgcacaggtaagagagccagggcagcc

SEQ ID NO: 89020 - DNA, 85 bp, Homo sapiens
atgtggctccaggcacatggccctcgaccagtgggagcctgtgcacaggtaagagagccagggcagcctggagatgagctggaca

SEQ ID NO: 89021 - DNA, 85 bp, Homo sapiens
aggcacatggccctcgaccagtgggagcctgtgcacaggtaagagagccagggcagcctggagatgagctggacacaggctgcca

SEQ ID NO: 89022 - DNA, 85 bp, Homo sapiens
atggccctcgaccagtgggagcctgtgcacaggtaagagagccagggcagcctggagatgagctggacacaggctgccagcactg

SEQ ID NO: 89023 - DNA, 84 bp, Homo sapiens
accagtgggagcctgtgcacaggtaagagagccagggcagcctggagatgagctggacacaggctgccagcactggctgtcccc

SEQ ID NO: 89024 - DNA, 85 bp, Homo sapiens
tgtgcacaggtaagagagccagggcagcctggagatgagctggacacaggctgccagcactggctgtcccctcccacttgccaaa

SEQ ID NO: 89025 - DNA, 82 bp, Homo sapiens
aggtaagagagccagggcagcctggagatgagctggacacaggctgccagcactggctgtcccctcccacttgccaaatcca

SEQ ID NO: 89026 - DNA, 88 bp, Homo sapiens
ggcagcctggagatgagctggacacaggctgccagcactggctgtcccctcccacttgccaaatccagtgtgagctgagcacatttca

SEQ ID NO: 89027 - DNA, 86 bp, Homo sapiens
agatgagctggacacaggctgccagcactggctgtcccctcccacttgccaaatccagtgtgagctgagcacatttcactggaaca

SEQ ID NO: 89028 - DNA, 85 bp, Homo sapiens
agctggacacaggctgccagcactggctgtcccctcccacttgccaaatccagtgtgagctgagcacatttcactggaacaagca

SEQ ID NO: 89029 - DNA, 87 bp, Homo sapiens
tgccagcactggctgtcccctcccacttgccaaatccagtgtgagctgagcacatttcactggaacaagcaggcgtctgagagcatc

SEQ ID NO: 89030 - DNA, 82 bp, Homo sapiens
aaatccagtgtgagctgagcacatttcactggaacaagcaggcgtctgagagcatccaactccaaaaatagtgccaccagga

SEQ ID NO: 89031 - DNA, 82 bp, Homo sapiens
agtgtgagctgagcacatttcactggaacaagcaggcgtctgagagcatccaactccaaaaatagtgccaccaggagaggaa

SEQ ID NO: 89032 - DNA, 78 bp, Homo sapiens
agcacatttcactggaacaagcaggcgtctgagagcatccaactccaaaaatagtgccaccaggagaggaaggaacac

SEQ ID NO: 89033 - DNA, 77 bp, Homo sapiens
actggaacaagcaggcgtctgagagcatccaactccaaaaatagtgccaccaggagaggaaggaacacgctcttcta

SEQ ID NO: 89034 - DNA, 78 bp, Homo sapiens
aagcaggcgtctgagagcatccaactccaaaaatagtgccaccaggagaggaaggaacacgctcttctagctgcaccc

SEQ ID NO: 89035 - DNA, 77 bp, Homo sapiens
agcatccaactccaaaaatagtgccaccaggagaggaaggaacacgctcttctagctgcacccgctccctgccctca

SEQ ID NO: 89036 - DNA, 75 bp, Homo sapiens
aactccaaaaatagtgccaccaggagaggaaggaacacgctcttctagctgcacccgctccctgccctcagatac

SEQ ID NO: 89037 - DNA, 78 bp, Homo sapiens
aaatagtgccaccaggagaggaaggaacacgctcttctagctgcacccgctccctgccctcagatacctccctgcaca

SEQ ID NO: 89038 - DNA, 79 bp, Homo sapiens
aggagaggaaggaacacgctcttctagctgcacccgctccctgccctcagatacctccctgcacagtctgtgcctggcc

SEQ ID NO: 89039 - DNA, 81 bp, Homo sapiens
aacacgctcttctagctgcacccgctccctgccctcagatacctccctgcacagtctgtgcctggcctgtggcagttcaag

SEQ ID NO: 89040 - DNA, 79 bp, Homo sapiens
cccgctccctgccctcagatacctccctgcacagtctgtgcctggcctgtggcagttcaagggtcacacccaactctga

SEQ ID NO: 89041 - DNA, 79 bp, Homo sapiens
tgccctcagatacctccctgcacagtctgtgcctggcctgtggcagttcaagggtcacacccaactctgaaaagggaga

SEQ ID NO: 89042 - DNA, 77 bp, Homo sapiens
agatacctccctgcacagtctgtgcctggcctgtggcagttcaagggtcacacccaactctgaaaagggagagataa

SEQ ID NO: 89043 - DNA, 76 bp, Homo sapiens
acagtctgtgcctggcctgtggcagttcaagggtcacacccaactctgaaaagggagagataacatccccagataa

SEQ ID NO: 89044 - DNA, 73 bp, Homo sapiens
cctgtggcagttcaagggtcacacccaactctgaaaagggagagataacatccccagataagaagagtgaaaa

SEQ ID NO: 89045 - DNA, 76 bp, Homo sapiens
acacccaactctgaaaagggagagataacatccccagataagaagagtgaaaacaggccaagtctgctgccagagc

SEQ ID NO: 89046 - DNA, 76 bp, Homo sapiens
aaaagggagagataacatccccagataagaagagtgaaaacaggccaagtctgctgccagagcctggccacagacc

SEQ ID NO: 89047 - DNA, 81 bp, Homo sapiens
agataagaagagtgaaaacaggccaagtctgctgccagagcctggccacagacccacagccccttggcagagaactgctca

SEQ ID NO: 89048 - DNA, 80 bp, Homo sapiens
agaagagtgaaaacaggccaagtctgctgccagagcctggccacagacccacagccccttggcagagaactgctcaggaa

SEQ ID NO: 89049 - DNA, 79 bp, Homo sapiens
aaacaggccaagtctgctgccagagcctggccacagacccacagccccttggcagagaactgctcaggaagtcctcctc

SEQ ID NO: 89050 - DNA, 81 bp, Homo sapiens
agtctgctgccagagcctggccacagacccacagccccttggcagagaactgctcaggaagtcctcctctgagtctttcaa

SEQ ID NO: 89051 - DNA, 78 bp, Homo sapiens
cctggccacagacccacagccccttggcagagaactgctcaggaagtcctcctctgagtctttcaagccactggtatc

SEQ ID NO: 89052 - DNA, 76 bp, Homo sapiens
agacccacagccccttggcagagaactgctcaggaagtcctcctctgagtctttcaagccactggtatctaacaaa

SEQ ID NO: 89053 - DNA, 79 bp, Homo sapiens
cccttggcagagaactgctcaggaagtcctcctctgagtctttcaagccactggtatctaacaaagaatctaatctgca

SEQ ID NO: 89054 - DNA, 78 bp, Homo sapiens
agaactgctcaggaagtcctcctctgagtctttcaagccactggtatctaacaaagaatctaatctgcacacggcact

SEQ ID NO: 89055 - DNA, 76 bp, Homo sapiens
aggaagtcctcctctgagtctttcaagccactggtatctaacaaagaatctaatctgcacacggcacttgccccga

SEQ ID NO: 89056 - DNA, 76 bp, Homo sapiens
cctctgagtctttcaagccactggtatctaacaaagaatctaatctgcacacggcacttgccccgagctaagaaag

SEQ ID NO: 89057 - DNA, 74 bp, Homo sapiens
ctggtatctaacaaagaatctaatctgcacacggcacttgccccgagctaagaaagttctggaagggtctccta

SEQ ID NO: 89058 - DNA, 73 bp, Homo sapiens
atctaacaaagaatctaatctgcacacggcacttgccccgagctaagaaagttctggaagggtctcctaggtc

SEQ ID NO: 89059 - DNA, 73 bp, Homo sapiens
aatctaatctgcacacggcacttgccccgagctaagaaagttctggaagggtctcctaggtctccccagccca

SEQ ID NO: 89060 - DNA, 70 bp, Homo sapiens
acacggcacttgccccgagctaagaaagttctggaagggtctcctaggtctccccagcccaaggtgagct

SEQ ID NO: 89061 - DNA, 71 bp, Homo sapiens
acttgccccgagctaagaaagttctggaagggtctcctaggtctccccagcccaaggtgagcttgcttctg

SEQ ID NO: 89062 - DNA, 78 bp, Homo sapiens
ttctggaagggtctcctaggtctccccagcccaaggtgagcttgcttctgtggagggagatgcctgcctgcccatgtc

SEQ ID NO: 89063 - DNA, 82 bp, Homo sapiens
tctcctaggtctccccagcccaaggtgagcttgcttctgtggagggagatgcctgcctgcccatgtccaccaccactgcaca

SEQ ID NO: 89064 - DNA, 83 bp, Homo sapiens
cccagcccaaggtgagcttgcttctgtggagggagatgcctgcctgcccatgtccaccaccactgcacaccaagccagtctga

SEQ ID NO: 89065 - DNA, 83 bp, Homo sapiens
aaggtgagcttgcttctgtggagggagatgcctgcctgcccatgtccaccaccactgcacaccaagccagtctgaagccacca

SEQ ID NO: 89066 - DNA, 86 bp, Homo sapiens
ttgcttctgtggagggagatgcctgcctgcccatgtccaccaccactgcacaccaagccagtctgaagccaccatgatctggctgt

SEQ ID NO: 89067 - DNA, 84 bp, Homo sapiens
agggagatgcctgcctgcccatgtccaccaccactgcacaccaagccagtctgaagccaccatgatctggctgttgctggttta

SEQ ID NO: 89068 - DNA, 86 bp, Homo sapiens
atgcctgcctgcccatgtccaccaccactgcacaccaagccagtctgaagccaccatgatctggctgttgctggtttatggtgcac

SEQ ID NO: 89069 - DNA, 83 bp, Homo sapiens
atgtccaccaccactgcacaccaagccagtctgaagccaccatgatctggctgttgctggtttatggtgcacctccccgctgc

SEQ ID NO: 89070 - DNA, 82 bp, Homo sapiens
cactgcacaccaagccagtctgaagccaccatgatctggctgttgctggtttatggtgcacctccccgctgcgaagaagtgg

SEQ ID NO: 89071 - DNA, 82 bp, Homo sapiens
agtctgaagccaccatgatctggctgttgctggtttatggtgcacctccccgctgcgaagaagtgggccatgtgagcgcagg

SEQ ID NO: 89072 - DNA, 81 bp, Homo sapiens
atgatctggctgttgctggtttatggtgcacctccccgctgcgaagaagtgggccatgtgagcgcaggggcttcatccctc

SEQ ID NO: 89073 - DNA, 76 bp, Homo sapiens
acctccccgctgcgaagaagtgggccatgtgagcgcaggggcttcatccctcctgcttcttactggagaaacactc

SEQ ID NO: 89074 - DNA, 76 bp, Homo sapiens
aagtgggccatgtgagcgcaggggcttcatccctcctgcttcttactggagaaacactcctggaggcagccgaacc

SEQ ID NO: 89075 - DNA, 76 bp, Homo sapiens
atgtgagcgcaggggcttcatccctcctgcttcttactggagaaacactcctggaggcagccgaaccctcactggg

SEQ ID NO: 89076 - DNA, 79 bp, Homo sapiens
tcttactggagaaacactcctggaggcagccgaaccctcactgggtgcaatccctctgtgtaggagattgcactgtgta

SEQ ID NO: 89077 - DNA, 78 bp, Homo sapiens
agaaacactcctggaggcagccgaaccctcactgggtgcaatccctctgtgtaggagattgcactgtgtaggttgtgc

SEQ ID NO: 89078 - DNA, 76 bp, Homo sapiens
aaccctcactgggtgcaatccctctgtgtaggagattgcactgtgtaggttgtgccccgccgaacaaccacgcagc

SEQ ID NO: 89079 - DNA, 80 bp, Homo sapiens
actgggtgcaatccctctgtgtaggagattgcactgtgtaggttgtgccccgccgaacaaccacgcagctgaggctcagc

SEQ ID NO: 89080 - DNA, 84 bp, Homo sapiens
agattgcactgtgtaggttgtgccccgccgaacaaccacgcagctgaggctcagctcagagactgcattcagagcccaactaga

SEQ ID NO: 89081 - DNA, 83 bp, Homo sapiens
actgtgtaggttgtgccccgccgaacaaccacgcagctgaggctcagctcagagactgcattcagagcccaactagaatcaga

SEQ ID NO: 89082 - DNA, 83 bp, Homo sapiens
cgccgaacaaccacgcagctgaggctcagctcagagactgcattcagagcccaactagaatcagacacaggttctgcgggccc

SEQ ID NO: 89083 - DNA, 84 bp, Homo sapiens
cagctgaggctcagctcagagactgcattcagagcccaactagaatcagacacaggttctgcgggccccactacccatctggag

SEQ ID NO: 89084 - DNA, 83 bp, Homo sapiens
aggctcagctcagagactgcattcagagcccaactagaatcagacacaggttctgcgggccccactacccatctggaggcaga

SEQ ID NO: 89085 - DNA, 76 bp, Homo sapiens
attcagagcccaactagaatcagacacaggttctgcgggccccactacccatctggaggcagacgcctgaccccca

SEQ ID NO: 89086 - DNA, 75 bp, Homo sapiens
aactagaatcagacacaggttctgcgggccccactacccatctggaggcagacgcctgacccccagctccatccc

SEQ ID NO: 89087 - DNA, 77 bp, Homo sapiens
agacacaggttctgcgggccccactacccatctggaggcagacgcctgacccccagctccatccccagagatgagga

SEQ ID NO: 89088 - DNA, 86 bp, Homo sapiens
actacccatctggaggcagacgcctgacccccagctccatccccagagatgaggatgcagcaggctgaggctgactccatgcggca

SEQ ID NO: 89089 - DNA, 86 bp, Homo sapiens
acgcctgacccccagctccatccccagagatgaggatgcagcaggctgaggctgactccatgcggcagctgctcccaactccacaa

SEQ ID NO: 89090 - DNA, 89 bp, Homo sapiens
cagctccatccccagagatgaggatgcagcaggctgaggctgactccatgcggcagctgctcccaactccacaagggacacacaagcca

SEQ ID NO: 89091 - DNA, 86 bp, Homo sapiens
atgaggatgcagcaggctgaggctgactccatgcggcagctgctcccaactccacaagggacacacaagccagcccttcccatcca

SEQ ID NO: 89092 - DNA, 85 bp, Homo sapiens
aggctgaggctgactccatgcggcagctgctcccaactccacaagggacacacaagccagcccttcccatccaggctgcacatga

SEQ ID NO: 89093 - DNA, 83 bp, Homo sapiens
tgactccatgcggcagctgctcccaactccacaagggacacacaagccagcccttcccatccaggctgcacatgactgtgttt

SEQ ID NO: 89094 - DNA, 80 bp, Homo sapiens
atgcggcagctgctcccaactccacaagggacacacaagccagcccttcccatccaggctgcacatgactgtgttttgtt

SEQ ID NO: 89095 - DNA, 77 bp, Homo sapiens
tcccaactccacaagggacacacaagccagcccttcccatccaggctgcacatgactgtgttttgtttcaaaggtca

SEQ ID NO: 89096 - DNA, 78 bp, Homo sapiens
acaagggacacacaagccagcccttcccatccaggctgcacatgactgtgttttgtttcaaaggtcacatacaggtca

SEQ ID NO: 89097 - DNA, 77 bp, Homo sapiens
acacaagccagcccttcccatccaggctgcacatgactgtgttttgtttcaaaggtcacatacaggtcacaaataaa

SEQ ID NO: 89098 - DNA, 75 bp, Homo sapiens
agcccttcccatccaggctgcacatgactgtgttttgtttcaaaggtcacatacaggtcacaaataaagaggccg

SEQ ID NO: 89099 - DNA, 75 bp, Homo sapiens
atccaggctgcacatgactgtgttttgtttcaaaggtcacatacaggtcacaaataaagaggccggttcccactg

SEQ ID NO: 89100 - DNA, 73 bp, Homo sapiens
acatgactgtgttttgtttcaaaggtcacatacaggtcacaaataaagaggccggttcccactggaggctatg

SEQ ID NO: 89101 - DNA, 76 bp, Homo sapiens
ttttgtttcaaaggtcacatacaggtcacaaataaagaggccggttcccactggaggctatgtcaggattgatgca

SEQ ID NO: 89102 - DNA, 77 bp, Homo sapiens
aaggtcacatacaggtcacaaataaagaggccggttcccactggaggctatgtcaggattgatgcagtccctgagaa

SEQ ID NO: 89103 - DNA, 75 bp, Homo sapiens
acatacaggtcacaaataaagaggccggttcccactggaggctatgtcaggattgatgcagtccctgagaaaaac

SEQ ID NO: 89104 - DNA, 71 bp, Homo sapiens
agaggccggttcccactggaggctatgtcaggattgatgcagtccctgagaaaaactcccggaaaacccag

SEQ ID NO: 89105 - DNA, 73 bp, Homo sapiens
actggaggctatgtcaggattgatgcagtccctgagaaaaactcccggaaaacccagggactcccatgcgggc

SEQ ID NO: 89106 - DNA, 74 bp, Homo sapiens
tatgtcaggattgatgcagtccctgagaaaaactcccggaaaacccagggactcccatgcgggctgagaaacat

SEQ ID NO: 89107 - DNA, 71 bp, Homo sapiens
attgatgcagtccctgagaaaaactcccggaaaacccagggactcccatgcgggctgagaaacattttgag

SEQ ID NO: 89108 - DNA, 73 bp, Homo sapiens
ctgagaaaaactcccggaaaacccagggactcccatgcgggctgagaaacattttgagtttgcatgagatcaa

SEQ ID NO: 89109 - DNA, 71 bp, Homo sapiens
aaaactcccggaaaacccagggactcccatgcgggctgagaaacattttgagtttgcatgagatcaaaata

SEQ ID NO: 89110 - DNA, 75 bp, Homo sapiens
ataaaataaaatacaatacaagagtcagcagccaggagggtagcctgtcccagagtggatgccctcaggttcaag

SEQ ID NO: 89111 - DNA, 76 bp, Homo sapiens
aaaatacaatacaagagtcagcagccaggagggtagcctgtcccagagtggatgccctcaggttcaaggtttgaca

SEQ ID NO: 89112 - DNA, 81 bp, Homo sapiens
atacaagagtcagcagccaggagggtagcctgtcccagagtggatgccctcaggttcaaggtttgacatcatctgcactaa

SEQ ID NO: 89113 - DNA, 81 bp, Homo sapiens
agccaggagggtagcctgtcccagagtggatgccctcaggttcaaggtttgacatcatctgcactaactgtgtgatctcaa

SEQ ID NO: 89114 - DNA, 83 bp, Homo sapiens
tagcctgtcccagagtggatgccctcaggttcaaggtttgacatcatctgcactaactgtgtgatctcaagttagccattatc

SEQ ID NO: 89115 - DNA, 84 bp, Homo sapiens
cagagtggatgccctcaggttcaaggtttgacatcatctgcactaactgtgtgatctcaagttagccattatcttctagatgtc

SEQ ID NO: 89116 - DNA, 82 bp, Homo sapiens
atgccctcaggttcaaggtttgacatcatctgcactaactgtgtgatctcaagttagccattatcttctagatgtcccatta

SEQ ID NO: 89117 - DNA, 81 bp, Homo sapiens
ttcaaggtttgacatcatctgcactaactgtgtgatctcaagttagccattatcttctagatgtcccattagtgaaataaa

SEQ ID NO: 89118 - DNA, 81 bp, Homo sapiens
tttgacatcatctgcactaactgtgtgatctcaagttagccattatcttctagatgtcccattagtgaaataaaggggcca

SEQ ID NO: 89119 - DNA, 74 bp, Homo sapiens
actgtgtgatctcaagttagccattatcttctagatgtcccattagtgaaataaaggggccagaacaaaaggac

SEQ ID NO: 89120 - DNA, 69 bp, Homo sapiens
aagttagccattatcttctagatgtcccattagtgaaataaaggggccagaacaaaaggaccctccaaa

SEQ ID NO: 89121 - DNA, 70 bp, Homo sapiens
attatcttctagatgtcccattagtgaaataaaggggccagaacaaaaggaccctccaaagtctcaactg

SEQ ID NO: 89122 - DNA, 69 bp, Homo sapiens
atgtcccattagtgaaataaaggggccagaacaaaaggaccctccaaagtctcaactggccctggccaa

SEQ ID NO: 89123 - DNA, 77 bp, Homo sapiens
cctggccaacagcaaggcttcacagggctgcctggcactgcacaggggcctgggagcccaaggcccgagcctggccc

SEQ ID NO: 89124 - DNA, 77 bp, Homo sapiens
aacagcaaggcttcacagggctgcctggcactgcacaggggcctgggagcccaaggcccgagcctggccccacgaca

SEQ ID NO: 89125 - DNA, 75 bp, Homo sapiens
acagggctgcctggcactgcacaggggcctgggagcccaaggcccgagcctggccccacgacagtggttccatta

SEQ ID NO: 89126 - DNA, 74 bp, Homo sapiens
ctggcactgcacaggggcctgggagcccaaggcccgagcctggccccacgacagtggttccattaacacaccaa

SEQ ID NO: 89127 - DNA, 70 bp, Homo sapiens
acaggggcctgggagcccaaggcccgagcctggccccacgacagtggttccattaacacaccaactcttc

SEQ ID NO: 89128 - DNA, 73 bp, Homo sapiens
tgggagcccaaggcccgagcctggccccacgacagtggttccattaacacaccaactcttcctgccacacacc

SEQ ID NO: 89129 - DNA, 74 bp, Homo sapiens
aaggcccgagcctggccccacgacagtggttccattaacacaccaactcttcctgccacacacccagctggaca

SEQ ID NO: 89130 - DNA, 74 bp, Homo sapiens
agcctggccccacgacagtggttccattaacacaccaactcttcctgccacacacccagctggacaccctagac

SEQ ID NO: 89131 - DNA, 76 bp, Homo sapiens
acagtggttccattaacacaccaactcttcctgccacacacccagctggacaccctagaccagcggccagcaagct

SEQ ID NO: 89132 - DNA, 77 bp, Homo sapiens
cattaacacaccaactcttcctgccacacacccagctggacaccctagaccagcggccagcaagcttcttttatgaa

SEQ ID NO: 89133 - DNA, 75 bp, Homo sapiens
ccaactcttcctgccacacacccagctggacaccctagaccagcggccagcaagcttcttttatgaagggccaaa

SEQ ID NO: 89134 - DNA, 75 bp, Homo sapiens
ctgccacacacccagctggacaccctagaccagcggccagcaagcttcttttatgaagggccaaagagttggtat

SEQ ID NO: 89135 - DNA, 74 bp, Homo sapiens
acacacccagctggacaccctagaccagcggccagcaagcttcttttatgaagggccaaagagttggtatttca

SEQ ID NO: 89136 - DNA, 74 bp, Homo sapiens
acaccctagaccagcggccagcaagcttcttttatgaagggccaaagagttggtatttcaggctttgtgagcta

SEQ ID NO: 89137 - DNA, 78 bp, Homo sapiens
tagaccagcggccagcaagcttcttttatgaagggccaaagagttggtatttcaggctttgtgagctagacagttgca

SEQ ID NO: 89138 - DNA, 77 bp, Homo sapiens
agcaagcttcttttatgaagggccaaagagttggtatttcaggctttgtgagctagacagttgcagccttggctgcc

SEQ ID NO: 89139 - DNA, 77 bp, Homo sapiens
ttcttttatgaagggccaaagagttggtatttcaggctttgtgagctagacagttgcagccttggctgccgtcacag

SEQ ID NO: 89140 - DNA, 81 bp, Homo sapiens
ttggtatttcaggctttgtgagctagacagttgcagccttggctgccgtcacagggcaagagcagccataaattacaggta

SEQ ID NO: 89141 - DNA, 82 bp, Homo sapiens
ttcaggctttgtgagctagacagttgcagccttggctgccgtcacagggcaagagcagccataaattacaggtaagcaagtg

SEQ ID NO: 89142 - DNA, 84 bp, Homo sapiens
gtgagctagacagttgcagccttggctgccgtcacagggcaagagcagccataaattacaggtaagcaagtgggcagctgtgtc

SEQ ID NO: 89143 - DNA, 80 bp, Homo sapiens
ttgcagccttggctgccgtcacagggcaagagcagccataaattacaggtaagcaagtgggcagctgtgtccctataaaa

SEQ ID NO: 89144 - DNA, 75 bp, Homo sapiens
ctgccgtcacagggcaagagcagccataaattacaggtaagcaagtgggcagctgtgtccctataaaactttatt

SEQ ID NO: 89145 - DNA, 70 bp, Homo sapiens
aaactttatttacaaagacaggtggcaggccagacccagccctttggccacagtttaccaacacgctata

SEQ ID NO: 89146 - DNA, 73 bp, Homo sapiens
ttatttacaaagacaggtggcaggccagacccagccctttggccacagtttaccaacacgctatagtctctag

SEQ ID NO: 89147 - DNA, 74 bp, Homo sapiens
ggtggcaggccagacccagccctttggccacagtttaccaacacgctatagtctctagggttgctgctgaaaaa

SEQ ID NO: 89148 - DNA, 76 bp, Homo sapiens
cctttggccacagtttaccaacacgctatagtctctagggttgctgctgaaaaagatcacactacagcccactctg

SEQ ID NO: 89149 - DNA, 79 bp, Homo sapiens
tatagtctctagggttgctgctgaaaaagatcacactacagcccactctgtccgcgtcctaacaaggcagcaagccttg

SEQ ID NO: 89150 - DNA, 77 bp, Homo sapiens
tagggttgctgctgaaaaagatcacactacagcccactctgtccgcgtcctaacaaggcagcaagccttgttgtggg

SEQ ID NO: 89151 - DNA, 76 bp, Homo sapiens
aaaagatcacactacagcccactctgtccgcgtcctaacaaggcagcaagccttgttgtggggataagcaactata

SEQ ID NO: 89152 - DNA, 79 bp, Homo sapiens
atcacactacagcccactctgtccgcgtcctaacaaggcagcaagccttgttgtggggataagcaactatagcagtgac

SEQ ID NO: 89153 - DNA, 77 bp, Homo sapiens
agcccactctgtccgcgtcctaacaaggcagcaagccttgttgtggggataagcaactatagcagtgaccctgggca

SEQ ID NO: 89154 - DNA, 78 bp, Homo sapiens
cgtcctaacaaggcagcaagccttgttgtggggataagcaactatagcagtgaccctgggcagagcctataggcctca

SEQ ID NO: 89155 - DNA, 78 bp, Homo sapiens
taacaaggcagcaagccttgttgtggggataagcaactatagcagtgaccctgggcagagcctataggcctcagtttc

SEQ ID NO: 89156 - DNA, 76 bp, Homo sapiens
aagccttgttgtggggataagcaactatagcagtgaccctgggcagagcctataggcctcagtttccttgaggaca

SEQ ID NO: 89157 - DNA, 76 bp, Homo sapiens
tgttgtggggataagcaactatagcagtgaccctgggcagagcctataggcctcagtttccttgaggacacaaaaa

SEQ ID NO: 89158 - DNA, 75 bp, Homo sapiens
gggataagcaactatagcagtgaccctgggcagagcctataggcctcagtttccttgaggacacaaaaagagacc

SEQ ID NO: 89159 - DNA, 76 bp, Homo sapiens
actatagcagtgaccctgggcagagcctataggcctcagtttccttgaggacacaaaaagagaccctgtgagtcac

SEQ ID NO: 89160 - DNA, 74 bp, Homo sapiens
agtgaccctgggcagagcctataggcctcagtttccttgaggacacaaaaagagaccctgtgagtcacctctac

SEQ ID NO: 89161 - DNA, 74 bp, Homo sapiens
ctgggcagagcctataggcctcagtttccttgaggacacaaaaagagaccctgtgagtcacctctaccactaat

SEQ ID NO: 89162 - DNA, 74 bp, Homo sapiens
agagcctataggcctcagtttccttgaggacacaaaaagagaccctgtgagtcacctctaccactaattccatg

SEQ ID NO: 89163 - DNA, 72 bp, Homo sapiens
cctataggcctcagtttccttgaggacacaaaaagagaccctgtgagtcacctctaccactaattccatggg

SEQ ID NO: 89164 - DNA, 74 bp, Homo sapiens
tcagtttccttgaggacacaaaaagagaccctgtgagtcacctctaccactaattccatggggaaatggagcaa

SEQ ID NO: 89165 - DNA, 75 bp, Homo sapiens
ttccttgaggacacaaaaagagaccctgtgagtcacctctaccactaattccatggggaaatggagcaaacatga

SEQ ID NO: 89166 - DNA, 75 bp, Homo sapiens
acacaaaaagagaccctgtgagtcacctctaccactaattccatggggaaatggagcaaacatgaggtggacgca

SEQ ID NO: 89167 - DNA, 75 bp, Homo sapiens
agaccctgtgagtcacctctaccactaattccatggggaaatggagcaaacatgaggtggacgcagcccaggttc

SEQ ID NO: 89168 - DNA, 74 bp, Homo sapiens
agtcacctctaccactaattccatggggaaatggagcaaacatgaggtggacgcagcccaggttcccctcaaga

SEQ ID NO: 89169 - DNA, 74 bp, Homo sapiens
taattccatggggaaatggagcaaacatgaggtggacgcagcccaggttcccctcaagatctcgggaataatat

SEQ ID NO: 89170 - DNA, 75 bp, Homo sapiens
gggaaatggagcaaacatgaggtggacgcagcccaggttcccctcaagatctcgggaataatatttcagagtagc

SEQ ID NO: 89171 - DNA, 76 bp, Homo sapiens
atgaggtggacgcagcccaggttcccctcaagatctcgggaataatatttcagagtagccgtgagcaggaggcacc

SEQ ID NO: 89172 - DNA, 73 bp, Homo sapiens
agcccaggttcccctcaagatctcgggaataatatttcagagtagccgtgagcaggaggcacccaccagggcc

SEQ ID NO: 89173 - DNA, 75 bp, Homo sapiens
aagatctcgggaataatatttcagagtagccgtgagcaggaggcacccaccagggcccttccccacagcagccag

SEQ ID NO: 89174 - DNA, 76 bp, Homo sapiens
tcagagtagccgtgagcaggaggcacccaccagggcccttccccacagcagccaggttggaggtcctgtgaaccag

SEQ ID NO: 89175 - DNA, 78 bp, Homo sapiens
tgagcaggaggcacccaccagggcccttccccacagcagccaggttggaggtcctgtgaaccaggcgccctgatgcaa

SEQ ID NO: 89176 - DNA, 77 bp, Homo sapiens
acccaccagggcccttccccacagcagccaggttggaggtcctgtgaaccaggcgccctgatgcaatccagcaggca

SEQ ID NO: 89177 - DNA, 81 bp, Homo sapiens
cccttccccacagcagccaggttggaggtcctgtgaaccaggcgccctgatgcaatccagcaggcatccttatcacagtgc

SEQ ID NO: 89178 - DNA, 83 bp, Homo sapiens
acagcagccaggttggaggtcctgtgaaccaggcgccctgatgcaatccagcaggcatccttatcacagtgcccactgagacc

SEQ ID NO: 89179 - DNA, 79 bp, Homo sapiens
aggttggaggtcctgtgaaccaggcgccctgatgcaatccagcaggcatccttatcacagtgcccactgagaccctaag

SEQ ID NO: 89180 - DNA, 80 bp, Homo sapiens
aggtcctgtgaaccaggcgccctgatgcaatccagcaggcatccttatcacagtgcccactgagaccctaaggtcactcc

SEQ ID NO: 89181 - DNA, 80 bp, Homo sapiens
accaggcgccctgatgcaatccagcaggcatccttatcacagtgcccactgagaccctaaggtcactccctccaggtgta

SEQ ID NO: 89182 - DNA, 79 bp, Homo sapiens
atgcaatccagcaggcatccttatcacagtgcccactgagaccctaaggtcactccctccaggtgtaggggctacaaga

SEQ ID NO: 89183 - DNA, 76 bp, Homo sapiens
atccttatcacagtgcccactgagaccctaaggtcactccctccaggtgtaggggctacaagatccacagcaggaa

SEQ ID NO: 89184 - DNA, 76 bp, Homo sapiens
agtgcccactgagaccctaaggtcactccctccaggtgtaggggctacaagatccacagcaggaagctcattgtac

SEQ ID NO: 89185 - DNA, 71 bp, Homo sapiens
accctaaggtcactccctccaggtgtaggggctacaagatccacagcaggaagctcattgtaccccgaaaa

SEQ ID NO: 89186 - DNA, 72 bp, Homo sapiens
aggtgtaggggctacaagatccacagcaggaagctcattgtaccccgaaaagtcactgttttcagaaaggaa

SEQ ID NO: 89187 - DNA, 69 bp, Homo sapiens
atccacagcaggaagctcattgtaccccgaaaagtcactgttttcagaaaggaaaaaggaacttcccaa

SEQ ID NO: 89188 - DNA, 66 bp, Homo sapiens
aagctcattgtaccccgaaaagtcactgttttcagaaaggaaaaaggaacttcccaacccagctta

SEQ ID NO: 89189 - DNA, 63 bp, Homo sapiens
attgtaccccgaaaagtcactgttttcagaaaggaaaaaggaacttcccaacccagcttaccc

SEQ ID NO: 89190 - DNA, 68 bp, Homo sapiens
tgttttcagaaaggaaaaaggaacttcccaacccagcttaccctcctcaggcctgtgggaggagacaa

SEQ ID NO: 89191 - DNA, 66 bp, Homo sapiens
aaggaaaaaggaacttcccaacccagcttaccctcctcaggcctgtgggaggagacaaggccaccc

SEQ ID NO: 89192 - DNA, 67 bp, Homo sapiens
aacttcccaacccagcttaccctcctcaggcctgtgggaggagacaaggccaccccaagccctttgg

SEQ ID NO: 89193 - DNA, 68 bp, Homo sapiens
acccagcttaccctcctcaggcctgtgggaggagacaaggccaccccaagccctttgggttcctggtg

SEQ ID NO: 89194 - DNA, 69 bp, Homo sapiens
tcctcaggcctgtgggaggagacaaggccaccccaagccctttgggttcctggtggggagtcacccttc

SEQ ID NO: 89195 - DNA, 67 bp, Homo sapiens
tgtgggaggagacaaggccaccccaagccctttgggttcctggtggggagtcacccttccgaaagaa

SEQ ID NO: 89196 - DNA, 66 bp, Homo sapiens
agacaaggccaccccaagccctttgggttcctggtggggagtcacccttccgaaagaagggcaatg

SEQ ID NO: 89197 - DNA, 67 bp, Homo sapiens
cccaagccctttgggttcctggtggggagtcacccttccgaaagaagggcaatgtgatggggtggcc

SEQ ID NO: 89198 - DNA, 66 bp, Homo sapiens
ccctttgggttcctggtggggagtcacccttccgaaagaagggcaatgtgatggggtggccgcccc

SEQ ID NO: 89199 - DNA, 67 bp, Homo sapiens
agtcacccttccgaaagaagggcaatgtgatggggtggccgcccccacccggccccttggcccacag

SEQ ID NO: 89200 - DNA, 68 bp, Homo sapiens
aaagaagggcaatgtgatggggtggccgcccccacccggccccttggcccacaggcccccactaatca

SEQ ID NO: 89201 - DNA, 68 bp, Homo sapiens
aatgtgatggggtggccgcccccacccggccccttggcccacaggcccccactaatcagcctaccctg

SEQ ID NO: 89202 - DNA, 67 bp, Homo sapiens
gggtggccgcccccacccggccccttggcccacaggcccccactaatcagcctaccctggatagagg

SEQ ID NO: 89203 - DNA, 67 bp, Homo sapiens
ccacccggccccttggcccacaggcccccactaatcagcctaccctggatagaggggcccaacctaa

SEQ ID NO: 89204 - DNA, 68 bp, Homo sapiens
ccttggcccacaggcccccactaatcagcctaccctggatagaggggcccaacctaaggtctccaggg

SEQ ID NO: 89205 - DNA, 71 bp, Homo sapiens
acaggcccccactaatcagcctaccctggatagaggggcccaacctaaggtctccagggtgaacacagatg

SEQ ID NO: 89206 - DNA, 73 bp, Homo sapiens
cccactaatcagcctaccctggatagaggggcccaacctaaggtctccagggtgaacacagatggagacacag

SEQ ID NO: 89207 - DNA, 80 bp, Homo sapiens
atagaggggcccaacctaaggtctccagggtgaacacagatggagacacaggccaatgcacgtgcgcgcgcgcgcacata

SEQ ID NO: 89208 - DNA, 72 bp, Homo sapiens
acacacacacactcccctccccaactggaggcctggggctcctcctggaagtaggtggattccacctgccca

SEQ ID NO: 89209 - DNA, 71 bp, Homo sapiens
acactcccctccccaactggaggcctggggctcctcctggaagtaggtggattccacctgcccacaggatc

SEQ ID NO: 89210 - DNA, 71 bp, Homo sapiens
ccaactggaggcctggggctcctcctggaagtaggtggattccacctgcccacaggatcctaagaaaactc

SEQ ID NO: 89211 - DNA, 72 bp, Homo sapiens
aggcctggggctcctcctggaagtaggtggattccacctgcccacaggatcctaagaaaactctgctcctcc

SEQ ID NO: 89212 - DNA, 72 bp, Homo sapiens
gggctcctcctggaagtaggtggattccacctgcccacaggatcctaagaaaactctgctcctcctcttccc

SEQ ID NO: 89213 - DNA, 72 bp, Homo sapiens
tggaagtaggtggattccacctgcccacaggatcctaagaaaactctgctcctcctcttccctcccacccac

SEQ ID NO: 89214 - DNA, 73 bp, Homo sapiens
attccacctgcccacaggatcctaagaaaactctgctcctcctcttccctcccacccaccttcagcaaatgcc

SEQ ID NO: 89215 - DNA, 73 bp, Homo sapiens
cccacaggatcctaagaaaactctgctcctcctcttccctcccacccaccttcagcaaatgcctcagggctag

SEQ ID NO: 89216 - DNA, 72 bp, Homo sapiens
atcctaagaaaactctgctcctcctcttccctcccacccaccttcagcaaatgcctcagggctaggccaagg

SEQ ID NO: 89217 - DNA, 76 bp, Homo sapiens
aaactctgctcctcctcttccctcccacccaccttcagcaaatgcctcagggctaggccaagggcagcagctggac

SEQ ID NO: 89218 - DNA, 73 bp, Homo sapiens
ctcttccctcccacccaccttcagcaaatgcctcagggctaggccaagggcagcagctggacccccccgccca

SEQ ID NO: 89219 - DNA, 75 bp, Homo sapiens
tcccacccaccttcagcaaatgcctcagggctaggccaagggcagcagctggacccccccgcccagccagtgccc

SEQ ID NO: 89220 - DNA, 73 bp, Homo sapiens
acccaccttcagcaaatgcctcagggctaggccaagggcagcagctggacccccccgcccagccagtgccccc

SEQ ID NO: 89221 - DNA, 74 bp, Homo sapiens
accttcagcaaatgcctcagggctaggccaagggcagcagctggacccccccgcccagccagtgccccccagtg

SEQ ID NO: 89222 - DNA, 75 bp, Homo sapiens
agcaaatgcctcagggctaggccaagggcagcagctggacccccccgcccagccagtgccccccagtgggctgtc

SEQ ID NO: 89223 - DNA, 75 bp, Homo sapiens
atgcctcagggctaggccaagggcagcagctggacccccccgcccagccagtgccccccagtgggctgtccctga

SEQ ID NO: 89224 - DNA, 76 bp, Homo sapiens
tcagggctaggccaagggcagcagctggacccccccgcccagccagtgccccccagtgggctgtccctgacctgca

SEQ ID NO: 89225 - DNA, 74 bp, Homo sapiens
taggccaagggcagcagctggacccccccgcccagccagtgccccccagtgggctgtccctgacctgcaggacc

SEQ ID NO: 89226 - DNA, 73 bp, Homo sapiens
ctggacccccccgcccagccagtgccccccagtgggctgtccctgacctgcaggacctccaggccacttctca

SEQ ID NO: 89227 - DNA, 74 bp, Homo sapiens
agtgccccccagtgggctgtccctgacctgcaggacctccaggccacttctcacctggaagagacctcattttc

SEQ ID NO: 89228 - DNA, 74 bp, Homo sapiens
agtgggctgtccctgacctgcaggacctccaggccacttctcacctggaagagacctcattttccacaaaagct

SEQ ID NO: 89229 - DNA, 74 bp, Homo sapiens
tccctgacctgcaggacctccaggccacttctcacctggaagagacctcattttccacaaaagcttaatccaaa

SEQ ID NO: 89230 - DNA, 69 bp, Homo sapiens
aggccacttctcacctggaagagacctcattttccacaaaagcttaatccaaaaagggctaaaaataga

SEQ ID NO: 89231 - DNA, 74 bp, Homo sapiens
ttttccacaaaagcttaatccaaaaagggctaaaaatagagattctgcacccatctgagctctttgcctgagaa

SEQ ID NO: 89232 - DNA, 76 bp, Homo sapiens
atccaaaaagggctaaaaatagagattctgcacccatctgagctctttgcctgagaagggccctgaagcctcagta

SEQ ID NO: 89233 - DNA, 80 bp, Homo sapiens
ctaaaaatagagattctgcacccatctgagctctttgcctgagaagggccctgaagcctcagtacctgcagggctcagaa

SEQ ID NO: 89234 - DNA, 83 bp, Homo sapiens
tagagattctgcacccatctgagctctttgcctgagaagggccctgaagcctcagtacctgcagggctcagaagtcctgccac

SEQ ID NO: 89235 - DNA, 83 bp, Homo sapiens
catctgagctctttgcctgagaagggccctgaagcctcagtacctgcagggctcagaagtcctgccactgagaggctcaacca

SEQ ID NO: 89236 - DNA, 79 bp, Homo sapiens
tctttgcctgagaagggccctgaagcctcagtacctgcagggctcagaagtcctgccactgagaggctcaaccaccctg

SEQ ID NO: 89237 - DNA, 78 bp, Homo sapiens
cctgagaagggccctgaagcctcagtacctgcagggctcagaagtcctgccactgagaggctcaaccaccctggccaa

SEQ ID NO: 89238 - DNA, 77 bp, Homo sapiens
cctgaagcctcagtacctgcagggctcagaagtcctgccactgagaggctcaaccaccctggccaacctcacccaag

SEQ ID NO: 89239 - DNA, 75 bp, Homo sapiens
tacctgcagggctcagaagtcctgccactgagaggctcaaccaccctggccaacctcacccaaggcccttcctaa

SEQ ID NO: 89240 - DNA, 75 bp, Homo sapiens
gctcagaagtcctgccactgagaggctcaaccaccctggccaacctcacccaaggcccttcctaaccctcactgc

SEQ ID NO: 89241 - DNA, 74 bp, Homo sapiens
tcctgccactgagaggctcaaccaccctggccaacctcacccaaggcccttcctaaccctcactgcttacagaa

SEQ ID NO: 89242 - DNA, 72 bp, Homo sapiens
tgagaggctcaaccaccctggccaacctcacccaaggcccttcctaaccctcactgcttacagaaacccatg

SEQ ID NO: 89243 - DNA, 70 bp, Homo sapiens
ccaccctggccaacctcacccaaggcccttcctaaccctcactgcttacagaaacccatgtcccagctgg

SEQ ID NO: 89244 - DNA, 73 bp, Homo sapiens
ctggccaacctcacccaaggcccttcctaaccctcactgcttacagaaacccatgtcccagctgggcacgatg

SEQ ID NO: 89245 - DNA, 76 bp, Homo sapiens
actcggtctcaaaacaaaaagagaaacctgcatcccaacacaggccgggcaaccgcacactggctatgcagaagca

SEQ ID NO: 89246 - DNA, 77 bp, Homo sapiens
acaaaaagagaaacctgcatcccaacacaggccgggcaaccgcacactggctatgcagaagcagggcacgtagccac

SEQ ID NO: 89247 - DNA, 82 bp, Homo sapiens
agagaaacctgcatcccaacacaggccgggcaaccgcacactggctatgcagaagcagggcacgtagccactgtcatctcca

SEQ ID NO: 89248 - DNA, 82 bp, Homo sapiens
atcccaacacaggccgggcaaccgcacactggctatgcagaagcagggcacgtagccactgtcatctccactcagccccagc

SEQ ID NO: 89249 - DNA, 82 bp, Homo sapiens
acaggccgggcaaccgcacactggctatgcagaagcagggcacgtagccactgtcatctccactcagccccagcttccctca

SEQ ID NO: 89250 - DNA, 85 bp, Homo sapiens
aaccgcacactggctatgcagaagcagggcacgtagccactgtcatctccactcagccccagcttccctcactgcagagccacac

SEQ ID NO: 89251 - DNA, 84 bp, Homo sapiens
tatgcagaagcagggcacgtagccactgtcatctccactcagccccagcttccctcactgcagagccacaccgggctctccctg

SEQ ID NO: 89252 - DNA, 81 bp, Homo sapiens
agaagcagggcacgtagccactgtcatctccactcagccccagcttccctcactgcagagccacaccgggctctccctgtc

SEQ ID NO: 89253 - DNA, 78 bp, Homo sapiens
acgtagccactgtcatctccactcagccccagcttccctcactgcagagccacaccgggctctccctgtccctttctc

SEQ ID NO: 89254 - DNA, 81 bp, Homo sapiens
tgtcatctccactcagccccagcttccctcactgcagagccacaccgggctctccctgtccctttctctcacctgagccca

SEQ ID NO: 89255 - DNA, 78 bp, Homo sapiens
actcagccccagcttccctcactgcagagccacaccgggctctccctgtccctttctctcacctgagcccaggtgatc

SEQ ID NO: 89256 - DNA, 78 bp, Homo sapiens
ttccctcactgcagagccacaccgggctctccctgtccctttctctcacctgagcccaggtgatcctgctcgagacct

SEQ ID NO: 89257 - DNA, 78 bp, Homo sapiens
actgcagagccacaccgggctctccctgtccctttctctcacctgagcccaggtgatcctgctcgagaccttcctctg

SEQ ID NO: 89258 - DNA, 77 bp, Homo sapiens
acaccgggctctccctgtccctttctctcacctgagcccaggtgatcctgctcgagaccttcctctgtcacctgtga

SEQ ID NO: 89259 - DNA, 79 bp, Homo sapiens
tctccctgtccctttctctcacctgagcccaggtgatcctgctcgagaccttcctctgtcacctgtgaccaggtgactc

SEQ ID NO: 89260 - DNA, 80 bp, Homo sapiens
tttctctcacctgagcccaggtgatcctgctcgagaccttcctctgtcacctgtgaccaggtgactcctgggtccatcca

SEQ ID NO: 89261 - DNA, 80 bp, Homo sapiens
gagcccaggtgatcctgctcgagaccttcctctgtcacctgtgaccaggtgactcctgggtccatccaggggcatcagag

SEQ ID NO: 89262 - DNA, 78 bp, Homo sapiens
aggtgatcctgctcgagaccttcctctgtcacctgtgaccaggtgactcctgggtccatccaggggcatcagaggccc

SEQ ID NO: 89263 - DNA, 78 bp, Homo sapiens
ctcgagaccttcctctgtcacctgtgaccaggtgactcctgggtccatccaggggcatcagaggccctgcaggtccta

SEQ ID NO: 89264 - DNA, 80 bp, Homo sapiens
cttcctctgtcacctgtgaccaggtgactcctgggtccatccaggggcatcagaggccctgcaggtcctagctctcacag

SEQ ID NO: 89265 - DNA, 83 bp, Homo sapiens
tctgtcacctgtgaccaggtgactcctgggtccatccaggggcatcagaggccctgcaggtcctagctctcacaggacagtca

SEQ ID NO: 89266 - DNA, 83 bp, Homo sapiens
tcacctgtgaccaggtgactcctgggtccatccaggggcatcagaggccctgcaggtcctagctctcacaggacagtcacata

SEQ ID NO: 89267 - DNA, 84 bp, Homo sapiens
ctgtgaccaggtgactcctgggtccatccaggggcatcagaggccctgcaggtcctagctctcacaggacagtcacatacatga

SEQ ID NO: 89268 - DNA, 83 bp, Homo sapiens
caggtgactcctgggtccatccaggggcatcagaggccctgcaggtcctagctctcacaggacagtcacatacatgagggcat

SEQ ID NO: 89269 - DNA, 83 bp, Homo sapiens
tgactcctgggtccatccaggggcatcagaggccctgcaggtcctagctctcacaggacagtcacatacatgagggcatttaa

SEQ ID NO: 89270 - DNA, 82 bp, Homo sapiens
tcctgggtccatccaggggcatcagaggccctgcaggtcctagctctcacaggacagtcacatacatgagggcatttaaatg

SEQ ID NO: 89271 - DNA, 84 bp, Homo sapiens
tccatccaggggcatcagaggccctgcaggtcctagctctcacaggacagtcacatacatgagggcatttaaatggctccaaga

SEQ ID NO: 89272 - DNA, 81 bp, Homo sapiens
gggcatcagaggccctgcaggtcctagctctcacaggacagtcacatacatgagggcatttaaatggctccaagaccaccc

SEQ ID NO: 89273 - DNA, 81 bp, Homo sapiens
atcagaggccctgcaggtcctagctctcacaggacagtcacatacatgagggcatttaaatggctccaagaccaccccaca

SEQ ID NO: 89274 - DNA, 80 bp, Homo sapiens
tgcaggtcctagctctcacaggacagtcacatacatgagggcatttaaatggctccaagaccaccccacacccattaaga

SEQ ID NO: 89275 - DNA, 80 bp, Homo sapiens
tcctagctctcacaggacagtcacatacatgagggcatttaaatggctccaagaccaccccacacccattaagatggcta

SEQ ID NO: 89276 - DNA, 76 bp, Homo sapiens
aggacagtcacatacatgagggcatttaaatggctccaagaccaccccacacccattaagatggctaccatcaaaa

SEQ ID NO: 89277 - DNA, 73 bp, Homo sapiens
acatacatgagggcatttaaatggctccaagaccaccccacacccattaagatggctaccatcaaaaaataac

SEQ ID NO: 89278 - DNA, 70 bp, Homo sapiens
agggcatttaaatggctccaagaccaccccacacccattaagatggctaccatcaaaaaataaccagttc

SEQ ID NO: 89279 - DNA, 70 bp, Homo sapiens
aaatggctccaagaccaccccacacccattaagatggctaccatcaaaaaataaccagttcgggcaagga

SEQ ID NO: 89280 - DNA, 69 bp, Homo sapiens
agaccaccccacacccattaagatggctaccatcaaaaaataaccagttcgggcaaggacgtggcgaaa

SEQ ID NO: 89281 - DNA, 71 bp, Homo sapiens
ccattaagatggctaccatcaaaaaataaccagttcgggcaaggacgtggcgaaaccacaacccttgtgca

SEQ ID NO: 89282 - DNA, 70 bp, Homo sapiens
aagatggctaccatcaaaaaataaccagttcgggcaaggacgtggcgaaaccacaacccttgtgcacggc

SEQ ID NO: 89283 - DNA, 69 bp, Homo sapiens
atcaaaaaataaccagttcgggcaaggacgtggcgaaaccacaacccttgtgcacggctggtgggaatg

SEQ ID NO: 89284 - DNA, 73 bp, Homo sapiens
ctccagcctcggcgatccaacaggtctacttctgggtatgtatccaaaagaactgaaagcaggggtttgaaca

SEQ ID NO: 89285 - DNA, 74 bp, Homo sapiens
tccagcctcggcgatccaacaggtctacttctgggtatgtatccaaaagaactgaaagcaggggtttgaacaga

SEQ ID NO: 89286 - DNA, 73 bp, Homo sapiens
tcggcgatccaacaggtctacttctgggtatgtatccaaaagaactgaaagcaggggtttgaacagatactta

SEQ ID NO: 89287 - DNA, 73 bp, Homo sapiens
aggtctacttctgggtatgtatccaaaagaactgaaagcaggggtttgaacagatacttacatgccctgttca

SEQ ID NO: 89288 - DNA, 76 bp, Homo sapiens
tacttctgggtatgtatccaaaagaactgaaagcaggggtttgaacagatacttacatgccctgttcacagtagca

SEQ ID NO: 89289 - DNA, 78 bp, Homo sapiens
tatgtatccaaaagaactgaaagcaggggtttgaacagatacttacatgccctgttcacagtagcatggttcactaca

SEQ ID NO: 89290 - DNA, 77 bp, Homo sapiens
aactgaaagcaggggtttgaacagatacttacatgccctgttcacagtagcatggttcactacagtcaagaggtgga

SEQ ID NO: 89291 - DNA, 77 bp, Homo sapiens
aagcaggggtttgaacagatacttacatgccctgttcacagtagcatggttcactacagtcaagaggtggaagcaac

SEQ ID NO: 89292 - DNA, 81 bp, Homo sapiens
acccaaatgcccatggacagaggaatggatgagcacgatgtggtccatccacaccacaggacatcagtctggttccctgcc

SEQ ID NO: 89293 - DNA, 83 bp, Homo sapiens
aatgcccatggacagaggaatggatgagcacgatgtggtccatccacaccacaggacatcagtctggttccctgcccactgcc

SEQ ID NO: 89294 - DNA, 81 bp, Homo sapiens
acagaggaatggatgagcacgatgtggtccatccacaccacaggacatcagtctggttccctgcccactgcccaccaccca

SEQ ID NO: 89295 - DNA, 80 bp, Homo sapiens
aatggatgagcacgatgtggtccatccacaccacaggacatcagtctggttccctgcccactgcccaccacccaccatac

SEQ ID NO: 89296 - DNA, 81 bp, Homo sapiens
tggatgagcacgatgtggtccatccacaccacaggacatcagtctggttccctgcccactgcccaccacccaccataccac

SEQ ID NO: 89297 - DNA, 75 bp, Homo sapiens
atgtggtccatccacaccacaggacatcagtctggttccctgcccactgcccaccacccaccataccaccggagg

SEQ ID NO: 89298 - DNA, 74 bp, Homo sapiens
tggtccatccacaccacaggacatcagtctggttccctgcccactgcccaccacccaccataccaccggagggg

SEQ ID NO: 89299 - DNA, 74 bp, Homo sapiens
acaccacaggacatcagtctggttccctgcccactgcccaccacccaccataccaccggagggggcctgatgga

SEQ ID NO: 89300 - DNA, 73 bp, Homo sapiens
acaggacatcagtctggttccctgcccactgcccaccacccaccataccaccggagggggcctgatggagaag

SEQ ID NO: 89301 - DNA, 72 bp, Homo sapiens
atcagtctggttccctgcccactgcccaccacccaccataccaccggagggggcctgatggagaaggtggaa

SEQ ID NO: 89302 - DNA, 72 bp, Homo sapiens
tctggttccctgcccactgcccaccacccaccataccaccggagggggcctgatggagaaggtggaagtaca

SEQ ID NO: 89303 - DNA, 70 bp, Homo sapiens
ttccctgcccactgcccaccacccaccataccaccggagggggcctgatggagaaggtggaagtacaggg

SEQ ID NO: 89304 - DNA, 69 bp, Homo sapiens
actgcccaccacccaccataccaccggagggggcctgatggagaaggtggaagtacagggggccccagc

SEQ ID NO: 89305 - DNA, 70 bp, Homo sapiens
acccaccataccaccggagggggcctgatggagaaggtggaagtacagggggccccagctccctctgaca

SEQ ID NO: 89306 - DNA, 71 bp, Homo sapiens
accggagggggcctgatggagaaggtggaagtacagggggccccagctccctctgacagtgctgtgggctt

SEQ ID NO: 89307 - DNA, 73 bp, Homo sapiens
cctgatggagaaggtggaagtacagggggccccagctccctctgacagtgctgtgggctttccagtgggaaaa

SEQ ID NO: 89308 - DNA, 71 bp, Homo sapiens
aaggtggaagtacagggggccccagctccctctgacagtgctgtgggctttccagtgggaaaattgctaaa

SEQ ID NO: 89309 - DNA, 71 bp, Homo sapiens
aagtacagggggccccagctccctctgacagtgctgtgggctttccagtgggaaaattgctaaagaaacca

SEQ ID NO: 89310 - DNA, 76 bp, Homo sapiens
cccagctccctctgacagtgctgtgggctttccagtgggaaaattgctaaagaaaccaggaagctggccaggcaca

SEQ ID NO: 89311 - DNA, 73 bp, Homo sapiens
tgcaatgagccaaaactaggaagccagttctctatttcagaaaaaaaacaataaaaccctaacagcagagcta

SEQ ID NO: 89312 - DNA, 70 bp, Homo sapiens
caaaactaggaagccagttctctatttcagaaaaaaaacaataaaaccctaacagcagagctataggaga

SEQ ID NO: 89313 - DNA, 70 bp, Homo sapiens
aggaagccagttctctatttcagaaaaaaaacaataaaaccctaacagcagagctataggagaagctatt

SEQ ID NO: 89314 - DNA, 68 bp, Homo sapiens
agttctctatttcagaaaaaaaacaataaaaccctaacagcagagctataggagaagctattttaaat

SEQ ID NO: 89315 - DNA, 68 bp, Homo sapiens
gaaaaaaaacaataaaaccctaacagcagagctataggagaagctattttaaattttggaggctttgc

SEQ ID NO: 89316 - DNA, 69 bp, Homo sapiens
aaacaataaaaccctaacagcagagctataggagaagctattttaaattttggaggctttgctttctgg

SEQ ID NO: 89317 - DNA, 73 bp, Homo sapiens
taacagcagagctataggagaagctattttaaattttggaggctttgctttctgggatcattttttgggtcaa

SEQ ID NO: 89318 - DNA, 70 bp, Homo sapiens
ctataggagaagctattttaaattttggaggctttgctttctgggatcattttttgggtcaacgaggaga

SEQ ID NO: 89319 - DNA, 72 bp, Homo sapiens
aagctattttaaattttggaggctttgctttctgggatcattttttgggtcaacgaggagagcagctgacac

SEQ ID NO: 89320 - DNA, 75 bp, Homo sapiens
tttaaattttggaggctttgctttctgggatcattttttgggtcaacgaggagagcagctgacacctcgtgcaca

SEQ ID NO: 89321 - DNA, 77 bp, Homo sapiens
aggctttgctttctgggatcattttttgggtcaacgaggagagcagctgacacctcgtgcacagccagggagaacaa

SEQ ID NO: 89322 - DNA, 79 bp, Homo sapiens
tttctgggatcattttttgggtcaacgaggagagcagctgacacctcgtgcacagccagggagaacaagcctgtctcac

SEQ ID NO: 89323 - DNA, 79 bp, Homo sapiens
tttttgggtcaacgaggagagcagctgacacctcgtgcacagccagggagaacaagcctgtctcacctctaggacaaca

SEQ ID NO: 89324 - DNA, 80 bp, Homo sapiens
aacgaggagagcagctgacacctcgtgcacagccagggagaacaagcctgtctcacctctaggacaacaccttcacctga

SEQ ID NO: 89325 - DNA, 79 bp, Homo sapiens
agcagctgacacctcgtgcacagccagggagaacaagcctgtctcacctctaggacaacaccttcacctgaattgggaa

SEQ ID NO: 89326 - DNA, 76 bp, Homo sapiens
acacctcgtgcacagccagggagaacaagcctgtctcacctctaggacaacaccttcacctgaattgggaagttga

SEQ ID NO: 89327 - DNA, 75 bp, Homo sapiens
acagccagggagaacaagcctgtctcacctctaggacaacaccttcacctgaattgggaagttgaggctcaggga

SEQ ID NO: 89328 - DNA, 76 bp, Homo sapiens
agaacaagcctgtctcacctctaggacaacaccttcacctgaattgggaagttgaggctcagggagggtgccagca

SEQ ID NO: 89329 - DNA, 76 bp, Homo sapiens
aacaagcctgtctcacctctaggacaacaccttcacctgaattgggaagttgaggctcagggagggtgccagcagc

SEQ ID NO: 89330 - DNA, 77 bp, Homo sapiens
cctgtctcacctctaggacaacaccttcacctgaattgggaagttgaggctcagggagggtgccagcagcctggagc

SEQ ID NO: 89331 - DNA, 76 bp, Homo sapiens
tcacctctaggacaacaccttcacctgaattgggaagttgaggctcagggagggtgccagcagcctggagccccaa

SEQ ID NO: 89332 - DNA, 75 bp, Homo sapiens
aggacaacaccttcacctgaattgggaagttgaggctcagggagggtgccagcagcctggagccccaaattgtca

SEQ ID NO: 89333 - DNA, 79 bp, Homo sapiens
ttcacctgaattgggaagttgaggctcagggagggtgccagcagcctggagccccaaattgtcagtgggagcagcgcca

SEQ ID NO: 89334 - DNA, 78 bp, Homo sapiens
attgggaagttgaggctcagggagggtgccagcagcctggagccccaaattgtcagtgggagcagcgccaccaatgta

SEQ ID NO: 89335 - DNA, 80 bp, Homo sapiens
gaagttgaggctcagggagggtgccagcagcctggagccccaaattgtcagtgggagcagcgccaccaatgtacctgatc

SEQ ID NO: 89336 - DNA, 79 bp, Homo sapiens
aagttgaggctcagggagggtgccagcagcctggagccccaaattgtcagtgggagcagcgccaccaatgtacctgatc

SEQ ID NO: 89337 - DNA, 81 bp, Homo sapiens
ctcagggagggtgccagcagcctggagccccaaattgtcagtgggagcagcgccaccaatgtacctgatccccaatatgca

SEQ ID NO: 89338 - DNA, 81 bp, Homo sapiens
agggtgccagcagcctggagccccaaattgtcagtgggagcagcgccaccaatgtacctgatccccaatatgcagttctca

SEQ ID NO: 89339 - DNA, 81 bp, Homo sapiens
agcctggagccccaaattgtcagtgggagcagcgccaccaatgtacctgatccccaatatgcagttctcagcatccttcaa

SEQ ID NO: 89340 - DNA, 82 bp, Homo sapiens
caaattgtcagtgggagcagcgccaccaatgtacctgatccccaatatgcagttctcagcatccttcaagagagacgcctct

SEQ ID NO: 89341 - DNA, 78 bp, Homo sapiens
agcgccaccaatgtacctgatccccaatatgcagttctcagcatccttcaagagagacgcctctttgtgaaaacattt

SEQ ID NO: 89342 - DNA, 78 bp, Homo sapiens
ccaatgtacctgatccccaatatgcagttctcagcatccttcaagagagacgcctctttgtgaaaacattttcaccaa

SEQ ID NO: 89343 - DNA, 76 bp, Homo sapiens
cccaatatgcagttctcagcatccttcaagagagacgcctctttgtgaaaacattttcaccaacatataaaaagga

SEQ ID NO: 89344 - DNA, 76 bp, Homo sapiens
tatgcagttctcagcatccttcaagagagacgcctctttgtgaaaacattttcaccaacatataaaaaggacacgg

SEQ ID NO: 89345 - DNA, 71 bp, Homo sapiens
atccttcaagagagacgcctctttgtgaaaacattttcaccaacatataaaaaggacacggggcgcaacaa

SEQ ID NO: 89346 - DNA, 75 bp, Homo sapiens
agagacgcctctttgtgaaaacattttcaccaacatataaaaaggacacggggcgcaacaacagcatctcatgaa

SEQ ID NO: 89347 - DNA, 74 bp, Homo sapiens
aaaacattttcaccaacatataaaaaggacacggggcgcaacaacagcatctcatgaagagctgaggcccccga

SEQ ID NO: 89348 - DNA, 76 bp, Homo sapiens
ttcaccaacatataaaaaggacacggggcgcaacaacagcatctcatgaagagctgaggcccccgatgggcctggg

SEQ ID NO: 89349 - DNA, 75 bp, Homo sapiens
tataaaaaggacacggggcgcaacaacagcatctcatgaagagctgaggcccccgatgggcctgggggaaggaca

SEQ ID NO: 89350 - DNA, 75 bp, Homo sapiens
gggcgcaacaacagcatctcatgaagagctgaggcccccgatgggcctgggggaaggacaggggtgttaacagta

SEQ ID NO: 89351 - DNA, 74 bp, Homo sapiens
acagcatctcatgaagagctgaggcccccgatgggcctgggggaaggacaggggtgttaacagtagggtatata

SEQ ID NO: 89352 - DNA, 71 bp, Homo sapiens
atctcatgaagagctgaggcccccgatgggcctgggggaaggacaggggtgttaacagtagggtatatact

SEQ ID NO: 89353 - DNA, 69 bp, Homo sapiens
agctgaggcccccgatgggcctgggggaaggacaggggtgttaacagtagggtatatacttgcggtctc

SEQ ID NO: 89354 - DNA, 69 bp, Homo sapiens
atgggcctgggggaaggacaggggtgttaacagtagggtatatacttgcggtctccccatctgaagaac

SEQ ID NO: 89355 - DNA, 70 bp, Homo sapiens
gggaaggacaggggtgttaacagtagggtatatacttgcggtctccccatctgaagaacggtgagaagga

SEQ ID NO: 89356 - DNA, 75 bp, Homo sapiens
ttaacagtagggtatatacttgcggtctccccatctgaagaacggtgagaaggactgaccacagccctccatcac

SEQ ID NO: 89357 - DNA, 80 bp, Homo sapiens
tatatacttgcggtctccccatctgaagaacggtgagaaggactgaccacagccctccatcaccagcagctcaatttgtc

SEQ ID NO: 89358 - DNA, 80 bp, Homo sapiens
ccatctgaagaacggtgagaaggactgaccacagccctccatcaccagcagctcaatttgtccaaagaggagcaagccaa

SEQ ID NO: 89359 - DNA, 77 bp, Homo sapiens
aacggtgagaaggactgaccacagccctccatcaccagcagctcaatttgtccaaagaggagcaagccaagcggggc

SEQ ID NO: 89360 - DNA, 80 bp, Homo sapiens
aaggactgaccacagccctccatcaccagcagctcaatttgtccaaagaggagcaagccaagcggggctgagctgccttc

SEQ ID NO: 89361 - DNA, 78 bp, Homo sapiens
ccctccatcaccagcagctcaatttgtccaaagaggagcaagccaagcggggctgagctgccttccctggcctcaaaa

SEQ ID NO: 89362 - DNA, 81 bp, Homo sapiens
ccagcagctcaatttgtccaaagaggagcaagccaagcggggctgagctgccttccctggcctcaaaatcgcagcctcata

SEQ ID NO: 89363 - DNA, 79 bp, Homo sapiens
agctcaatttgtccaaagaggagcaagccaagcggggctgagctgccttccctggcctcaaaatcgcagcctcatactc

SEQ ID NO: 89364 - DNA, 80 bp, Homo sapiens
aaagaggagcaagccaagcggggctgagctgccttccctggcctcaaaatcgcagcctcatactccaggctccactcaca

SEQ ID NO: 89365 - DNA, 82 bp, Homo sapiens
agcaagccaagcggggctgagctgccttccctggcctcaaaatcgcagcctcatactccaggctccactcacagacacatgg

SEQ ID NO: 89366 - DNA, 83 bp, Homo sapiens
ccttccctggcctcaaaatcgcagcctcatactccaggctccactcacagacacatgggcatgccaggccgtggcctgtgctg

SEQ ID NO: 89367 - DNA, 84 bp, Homo sapiens
ctggcctcaaaatcgcagcctcatactccaggctccactcacagacacatgggcatgccaggccgtggcctgtgctgggtcacc

SEQ ID NO: 89368 - DNA, 84 bp, Homo sapiens
aaatcgcagcctcatactccaggctccactcacagacacatgggcatgccaggccgtggcctgtgctgggtcacctgcctcacc

SEQ ID NO: 89369 - DNA, 86 bp, Homo sapiens
tactccaggctccactcacagacacatgggcatgccaggccgtggcctgtgctgggtcacctgcctcacctcacctcatcgctcta

SEQ ID NO: 89370 - DNA, 87 bp, Homo sapiens
tccactcacagacacatgggcatgccaggccgtggcctgtgctgggtcacctgcctcacctcacctcatcgctctatgtagcctcac

SEQ ID NO: 89371 - DNA, 84 bp, Homo sapiens
acagacacatgggcatgccaggccgtggcctgtgctgggtcacctgcctcacctcacctcatcgctctatgtagcctcactacg

SEQ ID NO: 89372 - DNA, 81 bp, Homo sapiens
atgccaggccgtggcctgtgctgggtcacctgcctcacctcacctcatcgctctatgtagcctcactacgggacagtggac

SEQ ID NO: 89373 - DNA, 82 bp, Homo sapiens
gtggcctgtgctgggtcacctgcctcacctcacctcatcgctctatgtagcctcactacgggacagtggactggcctgtaca

SEQ ID NO: 89374 - DNA, 83 bp, Homo sapiens
tgtgctgggtcacctgcctcacctcacctcatcgctctatgtagcctcactacgggacagtggactggcctgtacacacacaa

SEQ ID NO: 89375 - DNA, 83 bp, Homo sapiens
acctgcctcacctcacctcatcgctctatgtagcctcactacgggacagtggactggcctgtacacacacaaggcctgcagca

SEQ ID NO: 89376 - DNA, 81 bp, Homo sapiens
atcgctctatgtagcctcactacgggacagtggactggcctgtacacacacaaggcctgcagcatccggacatccccagaa

SEQ ID NO: 89377 - DNA, 81 bp, Homo sapiens
tgtagcctcactacgggacagtggactggcctgtacacacacaaggcctgcagcatccggacatccccagaaccaagcata

SEQ ID NO: 89378 - DNA, 80 bp, Homo sapiens
tacgggacagtggactggcctgtacacacacaaggcctgcagcatccggacatccccagaaccaagcatagtgccaagaa

SEQ ID NO: 89379 - DNA, 79 bp, Homo sapiens
gtggactggcctgtacacacacaaggcctgcagcatccggacatccccagaaccaagcatagtgccaagaacacaaaaa

SEQ ID NO: 89380 - DNA, 79 bp, Homo sapiens
tacacacacaaggcctgcagcatccggacatccccagaaccaagcatagtgccaagaacacaaaaatgcccgaagaata

SEQ ID NO: 89381 - DNA, 76 bp, Homo sapiens
atccggacatccccagaaccaagcatagtgccaagaacacaaaaatgcccgaagaatactgacctgtcaggctcca

SEQ ID NO: 89382 - DNA, 78 bp, Homo sapiens
cccagaaccaagcatagtgccaagaacacaaaaatgcccgaagaatactgacctgtcaggctccacgatgcacagaag

SEQ ID NO: 89383 - DNA, 81 bp, Homo sapiens
aagcatagtgccaagaacacaaaaatgcccgaagaatactgacctgtcaggctccacgatgcacagaaggtgcagcattaa

SEQ ID NO: 89384 - DNA, 78 bp, Homo sapiens
caagaacacaaaaatgcccgaagaatactgacctgtcaggctccacgatgcacagaaggtgcagcattaaaacataaa

SEQ ID NO: 89385 - DNA, 77 bp, Homo sapiens
acacaaaaatgcccgaagaatactgacctgtcaggctccacgatgcacagaaggtgcagcattaaaacataaagtgt

SEQ ID NO: 89386 - DNA, 78 bp, Homo sapiens
ccgaagaatactgacctgtcaggctccacgatgcacagaaggtgcagcattaaaacataaagtgttcagggaagaaga

SEQ ID NO: 89387 - DNA, 79 bp, Homo sapiens
tactgacctgtcaggctccacgatgcacagaaggtgcagcattaaaacataaagtgttcagggaagaagagacgcaaaa

SEQ ID NO: 89388 - DNA, 78 bp, Homo sapiens
aggctccacgatgcacagaaggtgcagcattaaaacataaagtgttcagggaagaagagacgcaaaaccatatgattg

SEQ ID NO: 89389 - DNA, 79 bp, Homo sapiens
cacagaaggtgcagcattaaaacataaagtgttcagggaagaagagacgcaaaaccatatgattgtgccactatgacaa

SEQ ID NO: 89390 - DNA, 74 bp, Homo sapiens
attaaaacataaagtgttcagggaagaagagacgcaaaaccatatgattgtgccactatgacaacacggtacac

SEQ ID NO: 89391 - DNA, 76 bp, Homo sapiens
aaagtgttcagggaagaagagacgcaaaaccatatgattgtgccactatgacaacacggtacacccaggcgagaca

SEQ ID NO: 89392 - DNA, 77 bp, Homo sapiens
aagaagagacgcaaaaccatatgattgtgccactatgacaacacggtacacccaggcgagacagaggagggtgcaaa

SEQ ID NO: 89393 - DNA, 77 bp, Homo sapiens
aaaaccatatgattgtgccactatgacaacacggtacacccaggcgagacagaggagggtgcaaaggtgtcaacaga

SEQ ID NO: 89394 - DNA, 73 bp, Homo sapiens
actatgacaacacggtacacccaggcgagacagaggagggtgcaaaggtgtcaacagaaattacctggggcaa

SEQ ID NO: 89395 - DNA, 73 bp, Homo sapiens
acaacacggtacacccaggcgagacagaggagggtgcaaaggtgtcaacagaaattacctggggcaatgagaa

SEQ ID NO: 89396 - DNA, 75 bp, Homo sapiens
caggcgagacagaggagggtgcaaaggtgtcaacagaaattacctggggcaatgagaacagacttgctaatttta

SEQ ID NO: 89397 - DNA, 72 bp, Homo sapiens
agaggagggtgcaaaggtgtcaacagaaattacctggggcaatgagaacagacttgctaattttaggtacat

SEQ ID NO: 89398 - DNA, 76 bp, Homo sapiens
tgcaaaggtgtcaacagaaattacctggggcaatgagaacagacttgctaattttaggtacattgcaggctttcta

SEQ ID NO: 89399 - DNA, 74 bp, Homo sapiens
tcaacagaaattacctggggcaatgagaacagacttgctaattttaggtacattgcaggctttctaccctgagt

SEQ ID NO: 89400 - DNA, 72 bp, Homo sapiens
aaattacctggggcaatgagaacagacttgctaattttaggtacattgcaggctttctaccctgagttatac

SEQ ID NO: 89401 - DNA, 75 bp, Homo sapiens
caatgagaacagacttgctaattttaggtacattgcaggctttctaccctgagttatactgcttatatagtaaaa

SEQ ID NO: 89402 - DNA, 72 bp, Homo sapiens
aacagacttgctaattttaggtacattgcaggctttctaccctgagttatactgcttatatagtaaaaagga

SEQ ID NO: 89403 - DNA, 69 bp, Homo sapiens
gctaattttaggtacattgcaggctttctaccctgagttatactgcttatatagtaaaaaggaaaaaaa

SEQ ID NO: 89404 - DNA, 66 bp, Homo sapiens
aaaacaaaaaaatcggaattcagttattccacaaacttgaccagaactcgaagccctaccccttca

SEQ ID NO: 89405 - DNA, 69 bp, Homo sapiens
aaaaatcggaattcagttattccacaaacttgaccagaactcgaagccctaccccttcacaaacacatc

SEQ ID NO: 89406 - DNA, 73 bp, Homo sapiens
aatcggaattcagttattccacaaacttgaccagaactcgaagccctaccccttcacaaacacatctgctggc

SEQ ID NO: 89407 - DNA, 75 bp, Homo sapiens
aattcagttattccacaaacttgaccagaactcgaagccctaccccttcacaaacacatctgctggcctggctgc

SEQ ID NO: 89408 - DNA, 75 bp, Homo sapiens
agttattccacaaacttgaccagaactcgaagccctaccccttcacaaacacatctgctggcctggctgcctcag

SEQ ID NO: 89409 - DNA, 77 bp, Homo sapiens
attccacaaacttgaccagaactcgaagccctaccccttcacaaacacatctgctggcctggctgcctcagtcagga

SEQ ID NO: 89410 - DNA, 76 bp, Homo sapiens
aaacttgaccagaactcgaagccctaccccttcacaaacacatctgctggcctggctgcctcagtcaggagccgtg

SEQ ID NO: 89411 - DNA, 79 bp, Homo sapiens
ttgaccagaactcgaagccctaccccttcacaaacacatctgctggcctggctgcctcagtcaggagccgtgtctccac

SEQ ID NO: 89412 - DNA, 78 bp, Homo sapiens
aactcgaagccctaccccttcacaaacacatctgctggcctggctgcctcagtcaggagccgtgtctccacttggtca

SEQ ID NO: 89413 - DNA, 78 bp, Homo sapiens
actcgaagccctaccccttcacaaacacatctgctggcctggctgcctcagtcaggagccgtgtctccacttggtcag

SEQ ID NO: 89414 - DNA, 77 bp, Homo sapiens
aagccctaccccttcacaaacacatctgctggcctggctgcctcagtcaggagccgtgtctccacttggtcaggagg

SEQ ID NO: 89415 - DNA, 80 bp, Homo sapiens
acaaacacatctgctggcctggctgcctcagtcaggagccgtgtctccacttggtcaggagggtccagccctggaggata

SEQ ID NO: 89416 - DNA, 80 bp, Homo sapiens
acatctgctggcctggctgcctcagtcaggagccgtgtctccacttggtcaggagggtccagccctggaggatataatta

SEQ ID NO: 89417 - DNA, 81 bp, Homo sapiens
tggctgcctcagtcaggagccgtgtctccacttggtcaggagggtccagccctggaggatataattagcatcagactctgg

SEQ ID NO: 89418 - DNA, 77 bp, Homo sapiens
agtcaggagccgtgtctccacttggtcaggagggtccagccctggaggatataattagcatcagactctggggccca

SEQ ID NO: 89419 - DNA, 79 bp, Homo sapiens
gtgtctccacttggtcaggagggtccagccctggaggatataattagcatcagactctggggcccactgccaggtcaga

SEQ ID NO: 89420 - DNA, 79 bp, Homo sapiens
tccacttggtcaggagggtccagccctggaggatataattagcatcagactctggggcccactgccaggtcagatggag

SEQ ID NO: 89421 - DNA, 78 bp, Homo sapiens
gggtccagccctggaggatataattagcatcagactctggggcccactgccaggtcagatggaggcgggaggtctcta

SEQ ID NO: 89422 - DNA, 77 bp, Homo sapiens
atataattagcatcagactctggggcccactgccaggtcagatggaggcgggaggtctctaggacgcttttatctgg

SEQ ID NO: 89423 - DNA, 76 bp, Homo sapiens
ggcccactgccaggtcagatggaggcgggaggtctctaggacgcttttatctgggagaatagtctccctgcggatg

SEQ ID NO: 89424 - DNA, 73 bp, Homo sapiens
caggtcagatggaggcgggaggtctctaggacgcttttatctgggagaatagtctccctgcggatggtttatt

SEQ ID NO: 89425 - DNA, 72 bp, Homo sapiens
atggaggcgggaggtctctaggacgcttttatctgggagaatagtctccctgcggatggtttatttggacac

SEQ ID NO: 89426 - DNA, 70 bp, Homo sapiens
aggtctctaggacgcttttatctgggagaatagtctccctgcggatggtttatttggacaccagcttttt

SEQ ID NO: 89427 - DNA, 71 bp, Homo sapiens
taggacgcttttatctgggagaatagtctccctgcggatggtttatttggacaccagcttttttcattaaa

SEQ ID NO: 89428 - DNA, 70 bp, Homo sapiens
tttatctgggagaatagtctccctgcggatggtttatttggacaccagcttttttcattaaaaagcaaag

SEQ ID NO: 89429 - DNA, 70 bp, Homo sapiens
agaatagtctccctgcggatggtttatttggacaccagcttttttcattaaaaagcaaagtgacagccgg

SEQ ID NO: 89430 - DNA, 79 bp, Homo sapiens
aaaaaaaaagcaaagtgacaaaataaccacatgtcatggccatctctgtcattcactgcacctgcaggtcacaggccat

SEQ ID NO: 89431 - DNA, 86 bp, Homo sapiens
caaagtgacaaaataaccacatgtcatggccatctctgtcattcactgcacctgcaggtcacaggccatttggatgcattgttcta

SEQ ID NO: 89432 - DNA, 85 bp, Homo sapiens
acaaaataaccacatgtcatggccatctctgtcattcactgcacctgcaggtcacaggccatttggatgcattgttctacatttc

SEQ ID NO: 89433 - DNA, 84 bp, Homo sapiens
aataaccacatgtcatggccatctctgtcattcactgcacctgcaggtcacaggccatttggatgcattgttctacatttccct

SEQ ID NO: 89434 - DNA, 85 bp, Homo sapiens
accacatgtcatggccatctctgtcattcactgcacctgcaggtcacaggccatttggatgcattgttctacatttccctttgga

SEQ ID NO: 89435 - DNA, 85 bp, Homo sapiens
atgtcatggccatctctgtcattcactgcacctgcaggtcacaggccatttggatgcattgttctacatttccctttggactctg

SEQ ID NO: 89436 - DNA, 84 bp, Homo sapiens
tgtcattcactgcacctgcaggtcacaggccatttggatgcattgttctacatttccctttggactctgtggctgactacacag

SEQ ID NO: 89437 - DNA, 81 bp, Homo sapiens
attcactgcacctgcaggtcacaggccatttggatgcattgttctacatttccctttggactctgtggctgactacacagg

SEQ ID NO: 89438 - DNA, 81 bp, Homo sapiens
cctgcaggtcacaggccatttggatgcattgttctacatttccctttggactctgtggctgactacacaggtgagattgaa

SEQ ID NO: 89439 - DNA, 79 bp, Homo sapiens
cacaggccatttggatgcattgttctacatttccctttggactctgtggctgactacacaggtgagattgaagacaacc

SEQ ID NO: 89440 - DNA, 81 bp, Homo sapiens
atgcattgttctacatttccctttggactctgtggctgactacacaggtgagattgaagacaaccctgtccatgagattca

SEQ ID NO: 89441 - DNA, 79 bp, Homo sapiens
ctacatttccctttggactctgtggctgactacacaggtgagattgaagacaaccctgtccatgagattcagagaccaa

SEQ ID NO: 89442 - DNA, 80 bp, Homo sapiens
tttggactctgtggctgactacacaggtgagattgaagacaaccctgtccatgagattcagagaccaaggagaaagtgta

SEQ ID NO: 89443 - DNA, 79 bp, Homo sapiens
tggctgactacacaggtgagattgaagacaaccctgtccatgagattcagagaccaaggagaaagtgtaacaactgaat

SEQ ID NO: 89444 - DNA, 79 bp, Homo sapiens
actacacaggtgagattgaagacaaccctgtccatgagattcagagaccaaggagaaagtgtaacaactgaattcatca

SEQ ID NO: 89445 - DNA, 79 bp, Homo sapiens
gtgagattgaagacaaccctgtccatgagattcagagaccaaggagaaagtgtaacaactgaattcatcaaggcagaaa

SEQ ID NO: 89446 - DNA, 77 bp, Homo sapiens
agacaaccctgtccatgagattcagagaccaaggagaaagtgtaacaactgaattcatcaaggcagaaagcacaacg

SEQ ID NO: 89447 - DNA, 77 bp, Homo sapiens
tgagattcagagaccaaggagaaagtgtaacaactgaattcatcaaggcagaaagcacaacggggagcaagacccta

SEQ ID NO: 89448 - DNA, 72 bp, Homo sapiens
agaccaaggagaaagtgtaacaactgaattcatcaaggcagaaagcacaacggggagcaagaccctaaaaca

SEQ ID NO: 89449 - DNA, 70 bp, Homo sapiens
aaggagaaagtgtaacaactgaattcatcaaggcagaaagcacaacggggagcaagaccctaaaacaaag

SEQ ID NO: 89450 - DNA, 74 bp, Homo sapiens
tgtaacaactgaattcatcaaggcagaaagcacaacggggagcaagaccctaaaacaaaggacacagaagaggc

SEQ ID NO: 89451 - DNA, 70 bp, Homo sapiens
catcaaggcagaaagcacaacggggagcaagaccctaaaacaaaggacacagaagaggccaaacccaaaa

SEQ ID NO: 89452 - DNA, 70 bp, Homo sapiens
agaaagcacaacggggagcaagaccctaaaacaaaggacacagaagaggccaaacccaaaatgtgcagta

SEQ ID NO: 89453 - DNA, 71 bp, Homo sapiens
aacggggagcaagaccctaaaacaaaggacacagaagaggccaaacccaaaatgtgcagtatcaatcacaa

SEQ ID NO: 89454 - DNA, 74 bp, Homo sapiens
aagaccctaaaacaaaggacacagaagaggccaaacccaaaatgtgcagtatcaatcacaagtctgtgccctgc

SEQ ID NO: 89455 - DNA, 76 bp, Homo sapiens
acaaaggacacagaagaggccaaacccaaaatgtgcagtatcaatcacaagtctgtgccctgccaggtgccttaaa

SEQ ID NO: 89456 - DNA, 78 bp, Homo sapiens
acacagaagaggccaaacccaaaatgtgcagtatcaatcacaagtctgtgccctgccaggtgccttaaacaaggctga

SEQ ID NO: 89457 - DNA, 79 bp, Homo sapiens
gtatcaatcacaagtctgtgccctgccaggtgccttaaacaaggctgatgccccctgagaagcagacctctgaaaacta

SEQ ID NO: 89458 - DNA, 75 bp, Homo sapiens
aagtctgtgccctgccaggtgccttaaacaaggctgatgccccctgagaagcagacctctgaaaactagggtctc

SEQ ID NO: 89459 - DNA, 73 bp, Homo sapiens
cctgccaggtgccttaaacaaggctgatgccccctgagaagcagacctctgaaaactagggtctcttccctgg

SEQ ID NO: 89460 - DNA, 75 bp, Homo sapiens
ccttaaacaaggctgatgccccctgagaagcagacctctgaaaactagggtctcttccctgggcagctgcttcga

SEQ ID NO: 89461 - DNA, 77 bp, Homo sapiens
aggctgatgccccctgagaagcagacctctgaaaactagggtctcttccctgggcagctgcttcgagcccagggcta

SEQ ID NO: 89462 - DNA, 77 bp, Homo sapiens
aagcagacctctgaaaactagggtctcttccctgggcagctgcttcgagcccagggctacgtggagcagagaggcaa

SEQ ID NO: 89463 - DNA, 76 bp, Homo sapiens
aaaactagggtctcttccctgggcagctgcttcgagcccagggctacgtggagcagagaggcaatcctgtttgtca

SEQ ID NO: 89464 - DNA, 79 bp, Homo sapiens
tctcttccctgggcagctgcttcgagcccagggctacgtggagcagagaggcaatcctgtttgtcaggctggcgggttc

SEQ ID NO: 89465 - DNA, 75 bp, Homo sapiens
cttcgagcccagggctacgtggagcagagaggcaatcctgtttgtcaggctggcgggttcctccctcaaggtctc

SEQ ID NO: 89466 - DNA, 75 bp, Homo sapiens
agcagagaggcaatcctgtttgtcaggctggcgggttcctccctcaaggtctcccagtcgggatgtcacaatccg

SEQ ID NO: 89467 - DNA, 73 bp, Homo sapiens
aatcctgtttgtcaggctggcgggttcctccctcaaggtctcccagtcgggatgtcacaatccgggtgtgatg

SEQ ID NO: 89468 - DNA, 73 bp, Homo sapiens
ctggcgggttcctccctcaaggtctcccagtcgggatgtcacaatccgggtgtgatgtcaaaactgcttcaaa

SEQ ID NO: 89469 - DNA, 76 bp, Homo sapiens
tcctccctcaaggtctcccagtcgggatgtcacaatccgggtgtgatgtcaaaactgcttcaaaggtgatgaacta

SEQ ID NO: 89470 - DNA, 74 bp, Homo sapiens
aggtctcccagtcgggatgtcacaatccgggtgtgatgtcaaaactgcttcaaaggtgatgaactacggccttg

SEQ ID NO: 89471 - DNA, 77 bp, Homo sapiens
gggatgtcacaatccgggtgtgatgtcaaaactgcttcaaaggtgatgaactacggccttggccgtgagtcaacaga

SEQ ID NO: 89472 - DNA, 73 bp, Homo sapiens
acaatccgggtgtgatgtcaaaactgcttcaaaggtgatgaactacggccttggccgtgagtcaacagagggg

SEQ ID NO: 89473 - DNA, 71 bp, Homo sapiens
atgtcaaaactgcttcaaaggtgatgaactacggccttggccgtgagtcaacagaggggtgggtttccgag

SEQ ID NO: 89474 - DNA, 71 bp, Homo sapiens
aaaactgcttcaaaggtgatgaactacggccttggccgtgagtcaacagaggggtgggtttccgagtgagc

SEQ ID NO: 89475 - DNA, 78 bp, Homo sapiens
cttggccgtgagtcaacagaggggtgggtttccgagtgagcgctgcctgctgtttacacacaatcacagccacggcaa

SEQ ID NO: 89476 - DNA, 81 bp, Homo sapiens
tgggtttccgagtgagcgctgcctgctgtttacacacaatcacagccacggcaaccagctgaaagcacagtcaagggtcac

SEQ ID NO: 89477 - DNA, 86 bp, Homo sapiens
agtgagcgctgcctgctgtttacacacaatcacagccacggcaaccagctgaaagcacagtcaagggtcacgatgccgagtgcaga

SEQ ID NO: 89478 - DNA, 84 bp, Homo sapiens
cctgctgtttacacacaatcacagccacggcaaccagctgaaagcacagtcaagggtcacgatgccgagtgcagagctcagtcc

SEQ ID NO: 89479 - DNA, 85 bp, Homo sapiens
tgtttacacacaatcacagccacggcaaccagctgaaagcacagtcaagggtcacgatgccgagtgcagagctcagtccctcaca

SEQ ID NO: 89480 - DNA, 85 bp, Homo sapiens
aatcacagccacggcaaccagctgaaagcacagtcaagggtcacgatgccgagtgcagagctcagtccctcacacacactcttgc

SEQ ID NO: 89481 - DNA, 83 bp, Homo sapiens
acggcaaccagctgaaagcacagtcaagggtcacgatgccgagtgcagagctcagtccctcacacacactcttgcctgcctcc

SEQ ID NO: 89482 - DNA, 88 bp, Homo sapiens
agctgaaagcacagtcaagggtcacgatgccgagtgcagagctcagtccctcacacacactcttgcctgcctcctgcagagactgcca

SEQ ID NO: 89483 - DNA, 86 bp, Homo sapiens
acagtcaagggtcacgatgccgagtgcagagctcagtccctcacacacactcttgcctgcctcctgcagagactgccagctcgggc

SEQ ID NO: 89484 - DNA, 88 bp, Homo sapiens
gtcacgatgccgagtgcagagctcagtccctcacacacactcttgcctgcctcctgcagagactgccagctcgggcccacagactcaa

SEQ ID NO: 89485 - DNA, 87 bp, Homo sapiens
agtgcagagctcagtccctcacacacactcttgcctgcctcctgcagagactgccagctcgggcccacagactcaagctggcttgtc

SEQ ID NO: 89486 - DNA, 83 bp, Homo sapiens
agtccctcacacacactcttgcctgcctcctgcagagactgccagctcgggcccacagactcaagctggcttgtcctcttcta

SEQ ID NO: 89487 - DNA, 83 bp, Homo sapiens
acacactcttgcctgcctcctgcagagactgccagctcgggcccacagactcaagctggcttgtcctcttctagcaccttctg

SEQ ID NO: 89488 - DNA, 82 bp, Homo sapiens
cctgcctcctgcagagactgccagctcgggcccacagactcaagctggcttgtcctcttctagcaccttctgggagaatcca

SEQ ID NO: 89489 - DNA, 81 bp, Homo sapiens
tgcagagactgccagctcgggcccacagactcaagctggcttgtcctcttctagcaccttctgggagaatccacccagaac

SEQ ID NO: 89490 - DNA, 76 bp, Homo sapiens
ccagctcgggcccacagactcaagctggcttgtcctcttctagcaccttctgggagaatccacccagaaccaccaa

SEQ ID NO: 89491 - DNA, 75 bp, Homo sapiens
ttctgggagaatccacccagaaccaccaaatgctcaccttgaaacacacaggcaaaccataccctggtgcaccag

SEQ ID NO: 89492 - DNA, 77 bp, Homo sapiens
agaaccaccaaatgctcaccttgaaacacacaggcaaaccataccctggtgcaccagtgggccactcctgatgcctc

SEQ ID NO: 89493 - DNA, 79 bp, Homo sapiens
aatgctcaccttgaaacacacaggcaaaccataccctggtgcaccagtgggccactcctgatgcctcctggcagcccac

SEQ ID NO: 89494 - DNA, 76 bp, Homo sapiens
aggcaaaccataccctggtgcaccagtgggccactcctgatgcctcctggcagcccacctgttccaccccagccca

SEQ ID NO: 89495 - DNA, 78 bp, Homo sapiens
accagtgggccactcctgatgcctcctggcagcccacctgttccaccccagcccatccagcggccacagtccttcaga

SEQ ID NO: 89496 - DNA, 79 bp, Homo sapiens
actcctgatgcctcctggcagcccacctgttccaccccagcccatccagcggccacagtccttcagaggtggcagagcc

SEQ ID NO: 89497 - DNA, 80 bp, Homo sapiens
tcctggcagcccacctgttccaccccagcccatccagcggccacagtccttcagaggtggcagagcccaggccatgacac

SEQ ID NO: 89498 - DNA, 78 bp, Homo sapiens
ccacctgttccaccccagcccatccagcggccacagtccttcagaggtggcagagcccaggccatgacacttggattc

SEQ ID NO: 89499 - DNA, 81 bp, Homo sapiens
ttccaccccagcccatccagcggccacagtccttcagaggtggcagagcccaggccatgacacttggattctgagttctca

SEQ ID NO: 89500 - DNA, 81 bp, Homo sapiens
ccacagtccttcagaggtggcagagcccaggccatgacacttggattctgagttctcagctacttcccagctgggagatcc

SEQ ID NO: 89501 - DNA, 83 bp, Homo sapiens
cagagcccaggccatgacacttggattctgagttctcagctacttcccagctgggagatcctgcctggtgattcagcctcctc

SEQ ID NO: 89502 - DNA, 82 bp, Homo sapiens
ttggattctgagttctcagctacttcccagctgggagatcctgcctggtgattcagcctcctccagagtctccacccatatc

SEQ ID NO: 89503 - DNA, 80 bp, Homo sapiens
agttctcagctacttcccagctgggagatcctgcctggtgattcagcctcctccagagtctccacccatatcctcaccta

SEQ ID NO: 89504 - DNA, 78 bp, Homo sapiens
agctacttcccagctgggagatcctgcctggtgattcagcctcctccagagtctccacccatatcctcacctaagaaa

SEQ ID NO: 89505 - DNA, 79 bp, Homo sapiens
agctgggagatcctgcctggtgattcagcctcctccagagtctccacccatatcctcacctaagaaatgggaactgctc

SEQ ID NO: 89506 - DNA, 78 bp, Homo sapiens
agatcctgcctggtgattcagcctcctccagagtctccacccatatcctcacctaagaaatgggaactgctcccacca

SEQ ID NO: 89507 - DNA, 74 bp, Homo sapiens
attcagcctcctccagagtctccacccatatcctcacctaagaaatgggaactgctcccaccacggggaagatg

SEQ ID NO: 89508 - DNA, 74 bp, Homo sapiens
agtctccacccatatcctcacctaagaaatgggaactgctcccaccacggggaagatgggatgaaatgcagtac

SEQ ID NO: 89509 - DNA, 76 bp, Homo sapiens
atatcctcacctaagaaatgggaactgctcccaccacggggaagatgggatgaaatgcagtactgtgggtggcaca

SEQ ID NO: 89510 - DNA, 76 bp, Homo sapiens
acctaagaaatgggaactgctcccaccacggggaagatgggatgaaatgcagtactgtgggtggcacagccagcac

SEQ ID NO: 89511 - DNA, 77 bp, Homo sapiens
tgggaactgctcccaccacggggaagatgggatgaaatgcagtactgtgggtggcacagccagcactggcggggtgg

SEQ ID NO: 89512 - DNA, 76 bp, Homo sapiens
accacggggaagatgggatgaaatgcagtactgtgggtggcacagccagcactggcggggtggggcaccctccaca

SEQ ID NO: 89513 - DNA, 78 bp, Homo sapiens
aagatgggatgaaatgcagtactgtgggtggcacagccagcactggcggggtggggcaccctccacaggtgtaggtgc

SEQ ID NO: 89514 - DNA, 76 bp, Homo sapiens
aatgcagtactgtgggtggcacagccagcactggcggggtggggcaccctccacaggtgtaggtgcccatcacctt

SEQ ID NO: 89515 - DNA, 75 bp, Homo sapiens
agtactgtgggtggcacagccagcactggcggggtggggcaccctccacaggtgtaggtgcccatcacctttcca

SEQ ID NO: 89516 - DNA, 74 bp, Homo sapiens
tggcacagccagcactggcggggtggggcaccctccacaggtgtaggtgcccatcacctttccactttcttggg

SEQ ID NO: 89517 - DNA, 69 bp, Homo sapiens
agcactggcggggtggggcaccctccacaggtgtaggtgcccatcacctttccactttcttgggggagg

SEQ ID NO: 89518 - DNA, 70 bp, Homo sapiens
ggtggggcaccctccacaggtgtaggtgcccatcacctttccactttcttgggggagggggtccagcata

SEQ ID NO: 89519 - DNA, 75 bp, Homo sapiens
tgtaggtgcccatcacctttccactttcttgggggagggggtccagcatagccagcaaccggaggaatctgctca

SEQ ID NO: 89520 - DNA, 76 bp, Homo sapiens
tcacctttccactttcttgggggagggggtccagcatagccagcaaccggaggaatctgctcagtcactcacgtca

SEQ ID NO: 89521 - DNA, 73 bp, Homo sapiens
actttcttgggggagggggtccagcatagccagcaaccggaggaatctgctcagtcactcacgtcaccaaggt

SEQ ID NO: 89522 - DNA, 76 bp, Homo sapiens
cagcatagccagcaaccggaggaatctgctcagtcactcacgtcaccaaggttcgggcctcttggggacgcggaaa

SEQ ID NO: 89523 - DNA, 73 bp, Homo sapiens
agcaaccggaggaatctgctcagtcactcacgtcaccaaggttcgggcctcttggggacgcggaaagttgcat

SEQ ID NO: 89524 - DNA, 73 bp, Homo sapiens
aggaatctgctcagtcactcacgtcaccaaggttcgggcctcttggggacgcggaaagttgcatttaagtgag

SEQ ID NO: 89525 - DNA, 70 bp, Homo sapiens
actcacgtcaccaaggttcgggcctcttggggacgcggaaagttgcatttaagtgaggctcaggacccca

SEQ ID NO: 89526 - DNA, 69 bp, Homo sapiens
aaggttcgggcctcttggggacgcggaaagttgcatttaagtgaggctcaggaccccagtgtgactccc

SEQ ID NO: 89527 - DNA, 72 bp, Homo sapiens
catttaagtgaggctcaggaccccagtgtgactccccttcaggtcaagacccctgcaacctcaaaagatagt

SEQ ID NO: 89528 - DNA, 72 bp, Homo sapiens
aagtgaggctcaggaccccagtgtgactccccttcaggtcaagacccctgcaacctcaaaagatagtttggc

SEQ ID NO: 89529 - DNA, 73 bp, Homo sapiens
accccagtgtgactccccttcaggtcaagacccctgcaacctcaaaagatagtttggcttgagcactcaagag

SEQ ID NO: 89530 - DNA, 76 bp, Homo sapiens
gtgtgactccccttcaggtcaagacccctgcaacctcaaaagatagtttggcttgagcactcaagaggcagtatgg

SEQ ID NO: 89531 - DNA, 78 bp, Homo sapiens
cttcaggtcaagacccctgcaacctcaaaagatagtttggcttgagcactcaagaggcagtatgggccagtgaggaca

SEQ ID NO: 89532 - DNA, 78 bp, Homo sapiens
ccctgcaacctcaaaagatagtttggcttgagcactcaagaggcagtatgggccagtgaggacagccgagcacccttg

SEQ ID NO: 89533 - DNA, 77 bp, Homo sapiens
aacctcaaaagatagtttggcttgagcactcaagaggcagtatgggccagtgaggacagccgagcacccttggacag

SEQ ID NO: 89534 - DNA, 86 bp, Homo sapiens
ttgagcactcaagaggcagtatgggccagtgaggacagccgagcacccttggacaggtgatgccgcctctcagagcctcatctgtc

SEQ ID NO: 89535 - DNA, 84 bp, Homo sapiens
tcaagaggcagtatgggccagtgaggacagccgagcacccttggacaggtgatgccgcctctcagagcctcatctgtccctgtc

SEQ ID NO: 89536 - DNA, 81 bp, Homo sapiens
tatgggccagtgaggacagccgagcacccttggacaggtgatgccgcctctcagagcctcatctgtccctgtcgtgaaggg

SEQ ID NO: 89537 - DNA, 78 bp, Homo sapiens
gacagccgagcacccttggacaggtgatgccgcctctcagagcctcatctgtccctgtcgtgaagggggaccataaac

SEQ ID NO: 89538 - DNA, 76 bp, Homo sapiens
agcacccttggacaggtgatgccgcctctcagagcctcatctgtccctgtcgtgaagggggaccataaacttcctc

SEQ ID NO: 89539 - DNA, 75 bp, Homo sapiens
acaggtgatgccgcctctcagagcctcatctgtccctgtcgtgaagggggaccataaacttcctctcccggcaag

SEQ ID NO: 89540 - DNA, 76 bp, Homo sapiens
cgcctctcagagcctcatctgtccctgtcgtgaagggggaccataaacttcctctcccggcaagtggtcaagatga

SEQ ID NO: 89541 - DNA, 75 bp, Homo sapiens
atctgtccctgtcgtgaagggggaccataaacttcctctcccggcaagtggtcaagatgatgtgcacccatggga

SEQ ID NO: 89542 - DNA, 74 bp, Homo sapiens
tgtcgtgaagggggaccataaacttcctctcccggcaagtggtcaagatgatgtgcacccatgggaagggatgg

SEQ ID NO: 89543 - DNA, 73 bp, Homo sapiens
accataaacttcctctcccggcaagtggtcaagatgatgtgcacccatgggaagggatgggggtctagcccag

SEQ ID NO: 89544 - DNA, 73 bp, Homo sapiens
aacttcctctcccggcaagtggtcaagatgatgtgcacccatgggaagggatgggggtctagcccagggccaa

SEQ ID NO: 89545 - DNA, 78 bp, Homo sapiens
caagtggtcaagatgatgtgcacccatgggaagggatgggggtctagcccagggccaacaggggcagcactagcacta

SEQ ID NO: 89546 - DNA, 77 bp, Homo sapiens
aagatgatgtgcacccatgggaagggatgggggtctagcccagggccaacaggggcagcactagcactaggtctcta

SEQ ID NO: 89547 - DNA, 75 bp, Homo sapiens
atgtgcacccatgggaagggatgggggtctagcccagggccaacaggggcagcactagcactaggtctctaaaga

SEQ ID NO: 89548 - DNA, 75 bp, Homo sapiens
gggtctagcccagggccaacaggggcagcactagcactaggtctctaaagaaggccttctctgaaaagcaggcag

SEQ ID NO: 89549 - DNA, 76 bp, Homo sapiens
agggccaacaggggcagcactagcactaggtctctaaagaaggccttctctgaaaagcaggcagggctggcaagaa

SEQ ID NO: 89550 - DNA, 77 bp, Homo sapiens
aacaggggcagcactagcactaggtctctaaagaaggccttctctgaaaagcaggcagggctggcaagaagctgccc

SEQ ID NO: 89551 - DNA, 78 bp, Homo sapiens
actagcactaggtctctaaagaaggccttctctgaaaagcaggcagggctggcaagaagctgccctgctcagaaccaa

SEQ ID NO: 89552 - DNA, 75 bp, Homo sapiens
ctaggtctctaaagaaggccttctctgaaaagcaggcagggctggcaagaagctgccctgctcagaaccaagggg

SEQ ID NO: 89553 - DNA, 74 bp, Homo sapiens
aaagaaggccttctctgaaaagcaggcagggctggcaagaagctgccctgctcagaaccaaggggggtgcccac

SEQ ID NO: 89554 - DNA, 74 bp, Homo sapiens
tgaaaagcaggcagggctggcaagaagctgccctgctcagaaccaaggggggtgcccaccgggaagggaagata

SEQ ID NO: 89555 - DNA, 71 bp, Homo sapiens
aggcagggctggcaagaagctgccctgctcagaaccaaggggggtgcccaccgggaagggaagataagtcg

SEQ ID NO: 89556 - DNA, 69 bp, Homo sapiens
caagaagctgccctgctcagaaccaaggggggtgcccaccgggaagggaagataagtcgggcctctggg

SEQ ID NO: 89557 - DNA, 68 bp, Homo sapiens
agctgccctgctcagaaccaaggggggtgcccaccgggaagggaagataagtcgggcctctggggccc

SEQ ID NO: 89558 - DNA, 68 bp, Homo sapiens
agaaccaaggggggtgcccaccgggaagggaagataagtcgggcctctggggccctgctgtgagaatg

SEQ ID NO: 89559 - DNA, 73 bp, Homo sapiens
accgggaagggaagataagtcgggcctctggggccctgctgtgagaatggatcacaggctgaagtaaggctcc

SEQ ID NO: 89560 - DNA, 77 bp, Homo sapiens
aagataagtcgggcctctggggccctgctgtgagaatggatcacaggctgaagtaaggctcctcctgccaccggtgc

SEQ ID NO: 89561 - DNA, 80 bp, Homo sapiens
gcctctggggccctgctgtgagaatggatcacaggctgaagtaaggctcctcctgccaccggtgccaagggtgacatcca

SEQ ID NO: 89562 - DNA, 80 bp, Homo sapiens
ccctgctgtgagaatggatcacaggctgaagtaaggctcctcctgccaccggtgccaagggtgacatccacacagcccac

SEQ ID NO: 89563 - DNA, 77 bp, Homo sapiens
agaatggatcacaggctgaagtaaggctcctcctgccaccggtgccaagggtgacatccacacagcccacccactta

SEQ ID NO: 89564 - DNA, 80 bp, Homo sapiens
atcacaggctgaagtaaggctcctcctgccaccggtgccaagggtgacatccacacagcccacccacttagcagcagaca

SEQ ID NO: 89565 - DNA, 76 bp, Homo sapiens
aagtaaggctcctcctgccaccggtgccaagggtgacatccacacagcccacccacttagcagcagacagtagccc

SEQ ID NO: 89566 - DNA, 80 bp, Homo sapiens
ctcctcctgccaccggtgccaagggtgacatccacacagcccacccacttagcagcagacagtagcccccagcacagctc

SEQ ID NO: 89567 - DNA, 78 bp, Homo sapiens
accggtgccaagggtgacatccacacagcccacccacttagcagcagacagtagcccccagcacagctccagggccac

SEQ ID NO: 89568 - DNA, 79 bp, Homo sapiens
aagggtgacatccacacagcccacccacttagcagcagacagtagcccccagcacagctccagggccacccagaagagc

SEQ ID NO: 89569 - DNA, 81 bp, Homo sapiens
acacagcccacccacttagcagcagacagtagcccccagcacagctccagggccacccagaagagctgagtactggccaca

SEQ ID NO: 89570 - DNA, 80 bp, Homo sapiens
acccacttagcagcagacagtagcccccagcacagctccagggccacccagaagagctgagtactggccacaggcctgag

SEQ ID NO: 89571 - DNA, 84 bp, Homo sapiens
tagcagcagacagtagcccccagcacagctccagggccacccagaagagctgagtactggccacaggcctgaggcacagcaccc

SEQ ID NO: 89572 - DNA, 79 bp, Homo sapiens
agtagcccccagcacagctccagggccacccagaagagctgagtactggccacaggcctgaggcacagcacccctctac

SEQ ID NO: 89573 - DNA, 77 bp, Homo sapiens
gccacccagaagagctgagtactggccacaggcctgaggcacagcacccctctacctccactcccttcacacccttc

SEQ ID NO: 89574 - DNA, 77 bp, Homo sapiens
aagagctgagtactggccacaggcctgaggcacagcacccctctacctccactcccttcacacccttccctgcgaca

SEQ ID NO: 89575 - DNA, 78 bp, Homo sapiens
acacccttccctgcgacagcacaccggccatgcctgggacccttcccccagcagactgcagctccgtgtcacctgctg

SEQ ID NO: 89576 - DNA, 83 bp, Homo sapiens
cctgcgacagcacaccggccatgcctgggacccttcccccagcagactgcagctccgtgtcacctgctggaagcactcactga

SEQ ID NO: 89577 - DNA, 81 bp, Homo sapiens
agcacaccggccatgcctgggacccttcccccagcagactgcagctccgtgtcacctgctggaagcactcactgactgccc

SEQ ID NO: 89578 - DNA, 79 bp, Homo sapiens
atgcctgggacccttcccccagcagactgcagctccgtgtcacctgctggaagcactcactgactgccccacctatacc

SEQ ID NO: 89579 - DNA, 81 bp, Homo sapiens
ttcccccagcagactgcagctccgtgtcacctgctggaagcactcactgactgccccacctatacccctcaccatcattaa

SEQ ID NO: 89580 - DNA, 79 bp, Homo sapiens
agactgcagctccgtgtcacctgctggaagcactcactgactgccccacctatacccctcaccatcattaacgttgacc

SEQ ID NO: 89581 - DNA, 77 bp, Homo sapiens
tccgtgtcacctgctggaagcactcactgactgccccacctatacccctcaccatcattaacgttgaccgccggtga

SEQ ID NO: 89582 - DNA, 75 bp, Homo sapiens
ctgctggaagcactcactgactgccccacctatacccctcaccatcattaacgttgaccgccggtgagttactct

SEQ ID NO: 89583 - DNA, 73 bp, Homo sapiens
cactcactgactgccccacctatacccctcaccatcattaacgttgaccgccggtgagttactcttgctaatt

SEQ ID NO: 89584 - DNA, 76 bp, Homo sapiens
accatcattaacgttgaccgccggtgagttactcttgctaatttctgtgccatccttcctgttcatgaattctgtc

SEQ ID NO: 89585 - DNA, 79 bp, Homo sapiens
accgccggtgagttactcttgctaatttctgtgccatccttcctgttcatgaattctgtctcctgccactagaatgtca

SEQ ID NO: 89586 - DNA, 83 bp, Homo sapiens
agttactcttgctaatttctgtgccatccttcctgttcatgaattctgtctcctgccactagaatgtcagctcgtgacatgag

SEQ ID NO: 89587 - DNA, 84 bp, Homo sapiens
taatttctgtgccatccttcctgttcatgaattctgtctcctgccactagaatgtcagctcgtgacatgaggggcccatctcaa

SEQ ID NO: 89588 - DNA, 83 bp, Homo sapiens
ttcctgttcatgaattctgtctcctgccactagaatgtcagctcgtgacatgaggggcccatctcaatcactggtgggtatcc

SEQ ID NO: 89589 - DNA, 83 bp, Homo sapiens
tagaatgtcagctcgtgacatgaggggcccatctcaatcactggtgggtatcccgccctgagccatgggcactgaccagaggc

SEQ ID NO: 89590 - DNA, 81 bp, Homo sapiens
gggcccatctcaatcactggtgggtatcccgccctgagccatgggcactgaccagaggctcaatcataccaggttagatga

SEQ ID NO: 89591 - DNA, 83 bp, Homo sapiens
atctcaatcactggtgggtatcccgccctgagccatgggcactgaccagaggctcaatcataccaggttagatgagtgatctg

SEQ ID NO: 89592 - DNA, 82 bp, Homo sapiens
tggtgggtatcccgccctgagccatgggcactgaccagaggctcaatcataccaggttagatgagtgatctggagtctccca

SEQ ID NO: 89593 - DNA, 82 bp, Homo sapiens
ccctgagccatgggcactgaccagaggctcaatcataccaggttagatgagtgatctggagtctcccaccggctctgtacga

SEQ ID NO: 89594 - DNA, 80 bp, Homo sapiens
atgggcactgaccagaggctcaatcataccaggttagatgagtgatctggagtctcccaccggctctgtacgaacctcca

SEQ ID NO: 89595 - DNA, 77 bp, Homo sapiens
ctcaatcataccaggttagatgagtgatctggagtctcccaccggctctgtacgaacctccaggcagggaccagccc

SEQ ID NO: 89596 - DNA, 76 bp, Homo sapiens
atgagtgatctggagtctcccaccggctctgtacgaacctccaggcagggaccagccccccaggagccagctctgg

SEQ ID NO: 89597 - DNA, 74 bp, Homo sapiens
gtctcccaccggctctgtacgaacctccaggcagggaccagccccccaggagccagctctgggtccattcacta

SEQ ID NO: 89598 - DNA, 75 bp, Homo sapiens
cggctctgtacgaacctccaggcagggaccagccccccaggagccagctctgggtccattcactaagggctcaga

SEQ ID NO: 89599 - DNA, 77 bp, Homo sapiens
tgtacgaacctccaggcagggaccagccccccaggagccagctctgggtccattcactaagggctcagagcacaaga

SEQ ID NO: 89600 - DNA, 74 bp, Homo sapiens
agccccccaggagccagctctgggtccattcactaagggctcagagcacaagaggggtcaggttattctcctcc

SEQ ID NO: 89601 - DNA, 76 bp, Homo sapiens
agccagctctgggtccattcactaagggctcagagcacaagaggggtcaggttattctcctcccaagaggaagaga

SEQ ID NO: 89602 - DNA, 75 bp, Homo sapiens
tgggtccattcactaagggctcagagcacaagaggggtcaggttattctcctcccaagaggaagagaatctggaa

SEQ ID NO: 89603 - DNA, 75 bp, Homo sapiens
attcactaagggctcagagcacaagaggggtcaggttattctcctcccaagaggaagagaatctggaactcagaa

SEQ ID NO: 89604 - DNA, 76 bp, Homo sapiens
tcagagcacaagaggggtcaggttattctcctcccaagaggaagagaatctggaactcagaaagggtcaggcacca

SEQ ID NO: 89605 - DNA, 72 bp, Homo sapiens
acaagaggggtcaggttattctcctcccaagaggaagagaatctggaactcagaaagggtcaggcaccagga

SEQ ID NO: 89606 - DNA, 75 bp, Homo sapiens
aggttattctcctcccaagaggaagagaatctggaactcagaaagggtcaggcaccaggatcctcacagccctga

SEQ ID NO: 89607 - DNA, 78 bp, Homo sapiens
tcccaagaggaagagaatctggaactcagaaagggtcaggcaccaggatcctcacagccctgagagaaggatctggaa

SEQ ID NO: 89608 - DNA, 77 bp, Homo sapiens
aagagaatctggaactcagaaagggtcaggcaccaggatcctcacagccctgagagaaggatctggaacttgaggga

SEQ ID NO: 89609 - DNA, 79 bp, Homo sapiens
tctggaactcagaaagggtcaggcaccaggatcctcacagccctgagagaaggatctggaacttgagggagcaggtcaa

SEQ ID NO: 89610 - DNA, 79 bp, Homo sapiens
agaaagggtcaggcaccaggatcctcacagccctgagagaaggatctggaacttgagggagcaggtcaagtactgctga

SEQ ID NO: 89611 - DNA, 80 bp, Homo sapiens
caccaggatcctcacagccctgagagaaggatctggaacttgagggagcaggtcaagtactgctgaccccagttctgaga

SEQ ID NO: 89612 - DNA, 78 bp, Homo sapiens
atcctcacagccctgagagaaggatctggaacttgagggagcaggtcaagtactgctgaccccagttctgagaaggat

SEQ ID NO: 89613 - DNA, 78 bp, Homo sapiens
tgagagaaggatctggaacttgagggagcaggtcaagtactgctgaccccagttctgagaaggattcggagatgggag

SEQ ID NO: 89614 - DNA, 76 bp, Homo sapiens
aggtcaagtactgctgaccccagttctgagaaggattcggagatgggaggggtcaggcactcacccatggcctcag

SEQ ID NO: 89615 - DNA, 77 bp, Homo sapiens
agtactgctgaccccagttctgagaaggattcggagatgggaggggtcaggcactcacccatggcctcaggaggcag

SEQ ID NO: 89616 - DNA, 79 bp, Homo sapiens
agttctgagaaggattcggagatgggaggggtcaggcactcacccatggcctcaggaggcaggtggagctgagattcaa

SEQ ID NO: 89617 - DNA, 80 bp, Homo sapiens
agatgggaggggtcaggcactcacccatggcctcaggaggcaggtggagctgagattcaaatggagagaggctctaatcc

SEQ ID NO: 89618 - DNA, 82 bp, Homo sapiens
gtcaggcactcacccatggcctcaggaggcaggtggagctgagattcaaatggagagaggctctaatccccaggcctcctga

SEQ ID NO: 89619 - DNA, 79 bp, Homo sapiens
atggcctcaggaggcaggtggagctgagattcaaatggagagaggctctaatccccaggcctcctgaagcacttcctgg

SEQ ID NO: 89620 - DNA, 75 bp, Homo sapiens
aggtggagctgagattcaaatggagagaggctctaatccccaggcctcctgaagcacttcctgggccctcatttt

SEQ ID NO: 89621 - DNA, 75 bp, Homo sapiens
ctgagattcaaatggagagaggctctaatccccaggcctcctgaagcacttcctgggccctcatttttttctgaa

SEQ ID NO: 89622 - DNA, 71 bp, Homo sapiens
aaatggagagaggctctaatccccaggcctcctgaagcacttcctgggccctcatttttttctgaacaacg

SEQ ID NO: 89623 - DNA, 73 bp, Homo sapiens
ctctaatccccaggcctcctgaagcacttcctgggccctcatttttttctgaacaacggtgtgctcctctcca

SEQ ID NO: 89624 - DNA, 73 bp, Homo sapiens
caggcctcctgaagcacttcctgggccctcatttttttctgaacaacggtgtgctcctctccaccaaggagct

SEQ ID NO: 89625 - DNA, 75 bp, Homo sapiens
tgaagcacttcctgggccctcatttttttctgaacaacggtgtgctcctctccaccaaggagcttgtgatccaaa

SEQ ID NO: 89626 - DNA, 72 bp, Homo sapiens
acttcctgggccctcatttttttctgaacaacggtgtgctcctctccaccaaggagcttgtgatccaaaaga

SEQ ID NO: 89627 - DNA, 76 bp, Homo sapiens
atttttttctgaacaacggtgtgctcctctccaccaaggagcttgtgatccaaaagaggtcactcagcaacagagc

SEQ ID NO: 89628 - DNA, 80 bp, Homo sapiens
tttctgaacaacggtgtgctcctctccaccaaggagcttgtgatccaaaagaggtcactcagcaacagagcccatgcaaa

SEQ ID NO: 89629 - DNA, 80 bp, Homo sapiens
tccaccaaggagcttgtgatccaaaagaggtcactcagcaacagagcccatgcaaacacctaatgatgaactacaaccca

SEQ ID NO: 89630 - DNA, 79 bp, Homo sapiens
aaggagcttgtgatccaaaagaggtcactcagcaacagagcccatgcaaacacctaatgatgaactacaacccaagtgc

SEQ ID NO: 89631 - DNA, 76 bp, Homo sapiens
atccaaaagaggtcactcagcaacagagcccatgcaaacacctaatgatgaactacaacccaagtgcccctgggag

SEQ ID NO: 89632 - DNA, 76 bp, Homo sapiens
aggtcactcagcaacagagcccatgcaaacacctaatgatgaactacaacccaagtgcccctgggagggtcacttc

SEQ ID NO: 89633 - DNA, 75 bp, Homo sapiens
aacagagcccatgcaaacacctaatgatgaactacaacccaagtgcccctgggagggtcacttcctcagactgac

SEQ ID NO: 89634 - DNA, 73 bp, Homo sapiens
tacaacccaagtgcccctgggagggtcacttcctcagactgaccagaggctacttttccaagcaggtgagtaa

SEQ ID NO: 89635 - DNA, 73 bp, Homo sapiens
aagtgcccctgggagggtcacttcctcagactgaccagaggctacttttccaagcaggtgagtaacactgtcc

SEQ ID NO: 89636 - DNA, 74 bp, Homo sapiens
cctgggagggtcacttcctcagactgaccagaggctacttttccaagcaggtgagtaacactgtcctggaagga

SEQ ID NO: 89637 - DNA, 73 bp, Homo sapiens
acttcctcagactgaccagaggctacttttccaagcaggtgagtaacactgtcctggaaggagggggtgtgtc

SEQ ID NO: 89638 - DNA, 72 bp, Homo sapiens
aggctacttttccaagcaggtgagtaacactgtcctggaaggagggggtgtgtccatgcttccactctcccc

SEQ ID NO: 89639 - DNA, 74 bp, Homo sapiens
ttccaagcaggtgagtaacactgtcctggaaggagggggtgtgtccatgcttccactctcccctctcccagaaa

SEQ ID NO: 89640 - DNA, 77 bp, Homo sapiens
agtaacactgtcctggaaggagggggtgtgtccatgcttccactctcccctctcccagaaatcactcatcagagcaa

SEQ ID NO: 89641 - DNA, 76 bp, Homo sapiens
ctggaaggagggggtgtgtccatgcttccactctcccctctcccagaaatcactcatcagagcaaaccgggagatc

SEQ ID NO: 89642 - DNA, 78 bp, Homo sapiens
ggggtgtgtccatgcttccactctcccctctcccagaaatcactcatcagagcaaaccgggagatccacaagaacagc

SEQ ID NO: 89643 - DNA, 80 bp, Homo sapiens
tccatgcttccactctcccctctcccagaaatcactcatcagagcaaaccgggagatccacaagaacagccacctcacaa

SEQ ID NO: 89644 - DNA, 77 bp, Homo sapiens
actctcccctctcccagaaatcactcatcagagcaaaccgggagatccacaagaacagccacctcacaacccatgaa

SEQ ID NO: 89645 - DNA, 75 bp, Homo sapiens
tcccagaaatcactcatcagagcaaaccgggagatccacaagaacagccacctcacaacccatgaaggtttcgtt

SEQ ID NO: 89646 - DNA, 73 bp, Homo sapiens
aaatcactcatcagagcaaaccgggagatccacaagaacagccacctcacaacccatgaaggtttcgttttgt

SEQ ID NO: 89647 - DNA, 71 bp, Homo sapiens
atcagagcaaaccgggagatccacaagaacagccacctcacaacccatgaaggtttcgttttgttttttga

SEQ ID NO: 89648 - DNA, 68 bp, Homo sapiens
accgggagatccacaagaacagccacctcacaacccatgaaggtttcgttttgttttttgacacaggg

SEQ ID NO: 89649 - DNA, 72 bp, Homo sapiens
accacgcccggccatcccatgcaggtttttatattcaaagaaaaacagacacgtagttcatgcctgtaagcc

SEQ ID NO: 89650 - DNA, 75 bp, Homo sapiens
aggaaagaaaaactgcacaaagtccaaggtagagtgagaaggccagcagctatgtgtactgctgcgcctttacct

SEQ ID NO: 89651 - DNA, 77 bp, Homo sapiens
agaaaaactgcacaaagtccaaggtagagtgagaaggccagcagctatgtgtactgctgcgcctttaccttccacca

SEQ ID NO: 89652 - DNA, 80 bp, Homo sapiens
acaaagtccaaggtagagtgagaaggccagcagctatgtgtactgctgcgcctttaccttccaccacgctgctccagctg

SEQ ID NO: 89653 - DNA, 83 bp, Homo sapiens
tagagtgagaaggccagcagctatgtgtactgctgcgcctttaccttccaccacgctgctccagctggctaccaggtcaacac

SEQ ID NO: 89654 - DNA, 82 bp, Homo sapiens
agaaggccagcagctatgtgtactgctgcgcctttaccttccaccacgctgctccagctggctaccaggtcaacaccagagc

SEQ ID NO: 89655 - DNA, 79 bp, Homo sapiens
agctatgtgtactgctgcgcctttaccttccaccacgctgctccagctggctaccaggtcaacaccagagccctctggg

SEQ ID NO: 89656 - DNA, 78 bp, Homo sapiens
tactgctgcgcctttaccttccaccacgctgctccagctggctaccaggtcaacaccagagccctctggggagagaaa

SEQ ID NO: 89657 - DNA, 74 bp, Homo sapiens
tttaccttccaccacgctgctccagctggctaccaggtcaacaccagagccctctggggagagaaaacaggagg

SEQ ID NO: 89658 - DNA, 75 bp, Homo sapiens
accacgctgctccagctggctaccaggtcaacaccagagccctctggggagagaaaacaggagggcttctacctg

SEQ ID NO: 89659 - DNA, 74 bp, Homo sapiens
ctccagctggctaccaggtcaacaccagagccctctggggagagaaaacaggagggcttctacctgggctgttc

SEQ ID NO: 89660 - DNA, 73 bp, Homo sapiens
ctaccaggtcaacaccagagccctctggggagagaaaacaggagggcttctacctgggctgttcccagagcta

SEQ ID NO: 89661 - DNA, 71 bp, Homo sapiens
aacaccagagccctctggggagagaaaacaggagggcttctacctgggctgttcccagagctaggattacc

SEQ ID NO: 89662 - DNA, 72 bp, Homo sapiens
ccctctggggagagaaaacaggagggcttctacctgggctgttcccagagctaggattacctgctcctggga

SEQ ID NO: 89663 - DNA, 73 bp, Homo sapiens
agaaaacaggagggcttctacctgggctgttcccagagctaggattacctgctcctgggagccacagagaaag

SEQ ID NO: 89664 - DNA, 75 bp, Homo sapiens
gggcttctacctgggctgttcccagagctaggattacctgctcctgggagccacagagaaagttccacagcaagt

SEQ ID NO: 89665 - DNA, 75 bp, Homo sapiens
tctacctgggctgttcccagagctaggattacctgctcctgggagccacagagaaagttccacagcaagttcctt

SEQ ID NO: 89666 - DNA, 74 bp, Homo sapiens
ctgttcccagagctaggattacctgctcctgggagccacagagaaagttccacagcaagttcctttctagcccc

SEQ ID NO: 89667 - DNA, 75 bp, Homo sapiens
taggattacctgctcctgggagccacagagaaagttccacagcaagttcctttctagcccctgccacacctgaat

SEQ ID NO: 89668 - DNA, 74 bp, Homo sapiens
ctgctcctgggagccacagagaaagttccacagcaagttcctttctagcccctgccacacctgaatttgtaaaa

SEQ ID NO: 89669 - DNA, 73 bp, Homo sapiens
ccacagagaaagttccacagcaagttcctttctagcccctgccacacctgaatttgtaaaagcctcttcacaa

SEQ ID NO: 89670 - DNA, 70 bp, Homo sapiens
aaagttccacagcaagttcctttctagcccctgccacacctgaatttgtaaaagcctcttcacaattaaa

SEQ ID NO: 89671 - DNA, 68 bp, Homo sapiens
tcctttctagcccctgccacacctgaatttgtaaaagcctcttcacaattaaaaactaaaaataggcc

SEQ ID NO: 89672 - DNA, 72 bp, Homo sapiens
aaattaaaaataaaagccctctccacaagttgcaattggcaaactatataaccacagcatcgaggaatacaa

SEQ ID NO: 89673 - DNA, 72 bp, Homo sapiens
aaaaataaaagccctctccacaagttgcaattggcaaactatataaccacagcatcgaggaatacaaaactc

SEQ ID NO: 89674 - DNA, 78 bp, Homo sapiens
cctctccacaagttgcaattggcaaactatataaccacagcatcgaggaatacaaaactctggcttctgggtgataga

SEQ ID NO: 89675 - DNA, 77 bp, Homo sapiens
aagttgcaattggcaaactatataaccacagcatcgaggaatacaaaactctggcttctgggtgatagagttgtcca

SEQ ID NO: 89676 - DNA, 77 bp, Homo sapiens
aaactatataaccacagcatcgaggaatacaaaactctggcttctgggtgatagagttgtccacatgagagtttgtc

SEQ ID NO: 89677 - DNA, 78 bp, Homo sapiens
atataaccacagcatcgaggaatacaaaactctggcttctgggtgatagagttgtccacatgagagtttgtccataac

SEQ ID NO: 89678 - DNA, 76 bp, Homo sapiens
atcgaggaatacaaaactctggcttctgggtgatagagttgtccacatgagagtttgtccataaccagtatatttc

SEQ ID NO: 89679 - DNA, 75 bp, Homo sapiens
aatacaaaactctggcttctgggtgatagagttgtccacatgagagtttgtccataaccagtatatttctctggt

SEQ ID NO: 89680 - DNA, 76 bp, Homo sapiens
cttctgggtgatagagttgtccacatgagagtttgtccataaccagtatatttctctggttacacaatcaagttct

SEQ ID NO: 89681 - DNA, 76 bp, Homo sapiens
atagagttgtccacatgagagtttgtccataaccagtatatttctctggttacacaatcaagttcttcaagccacc

SEQ ID NO: 89682 - DNA, 75 bp, Homo sapiens
gttgtccacatgagagtttgtccataaccagtatatttctctggttacacaatcaagttcttcaagccaccttcc

SEQ ID NO: 89683 - DNA, 77 bp, Homo sapiens
acatgagagtttgtccataaccagtatatttctctggttacacaatcaagttcttcaagccaccttcctcaagctca

SEQ ID NO: 89684 - DNA, 75 bp, Homo sapiens
agagtttgtccataaccagtatatttctctggttacacaatcaagttcttcaagccaccttcctcaagctcacta

SEQ ID NO: 89685 - DNA, 74 bp, Homo sapiens
tccataaccagtatatttctctggttacacaatcaagttcttcaagccaccttcctcaagctcactacccaaaa

SEQ ID NO: 89686 - DNA, 72 bp, Homo sapiens
ataaccagtatatttctctggttacacaatcaagttcttcaagccaccttcctcaagctcactacccaaaac

SEQ ID NO: 89687 - DNA, 72 bp, Homo sapiens
aaccagtatatttctctggttacacaatcaagttcttcaagccaccttcctcaagctcactacccaaaacca

SEQ ID NO: 89688 - DNA, 76 bp, Homo sapiens
gtatatttctctggttacacaatcaagttcttcaagccaccttcctcaagctcactacccaaaaccacagagagca

SEQ ID NO: 89689 - DNA, 75 bp, Homo sapiens
tttctctggttacacaatcaagttcttcaagccaccttcctcaagctcactacccaaaaccacagagagcacgga

SEQ ID NO: 89690 - DNA, 76 bp, Homo sapiens
tggttacacaatcaagttcttcaagccaccttcctcaagctcactacccaaaaccacagagagcacggagctgccg

SEQ ID NO: 89691 - DNA, 76 bp, Homo sapiens
aatcaagttcttcaagccaccttcctcaagctcactacccaaaaccacagagagcacggagctgccgtgccttaga

SEQ ID NO: 89692 - DNA, 74 bp, Homo sapiens
aagttcttcaagccaccttcctcaagctcactacccaaaaccacagagagcacggagctgccgtgccttagaaa

SEQ ID NO: 89693 - DNA, 74 bp, Homo sapiens
agttcttcaagccaccttcctcaagctcactacccaaaaccacagagagcacggagctgccgtgccttagaaaa

SEQ ID NO: 89694 - DNA, 75 bp, Homo sapiens
accttcctcaagctcactacccaaaaccacagagagcacggagctgccgtgccttagaaaagtccatccactata

SEQ ID NO: 89695 - DNA, 76 bp, Homo sapiens
aagctcactacccaaaaccacagagagcacggagctgccgtgccttagaaaagtccatccactatactgccccatg

SEQ ID NO: 89696 - DNA, 75 bp, Homo sapiens
aaaaccacagagagcacggagctgccgtgccttagaaaagtccatccactatactgccccatgggcaagattaaa

SEQ ID NO: 89697 - DNA, 75 bp, Homo sapiens
agagcacggagctgccgtgccttagaaaagtccatccactatactgccccatgggcaagattaaattcgaaagta

SEQ ID NO: 89698 - DNA, 75 bp, Homo sapiens
agctgccgtgccttagaaaagtccatccactatactgccccatgggcaagattaaattcgaaagtagccaagctg

SEQ ID NO: 89699 - DNA, 74 bp, Homo sapiens
cgtgccttagaaaagtccatccactatactgccccatgggcaagattaaattcgaaagtagccaagctggctgg

SEQ ID NO: 89700 - DNA, 68 bp, Homo sapiens
agaaagaaagaaagtggccaagccacttaaattaccagacagctttttgagaaaaatccaagtttgaa

SEQ ID NO: 89701 - DNA, 68 bp, Homo sapiens
aaagaaagtggccaagccacttaaattaccagacagctttttgagaaaaatccaagtttgaatcaccc

SEQ ID NO: 89702 - DNA, 70 bp, Homo sapiens
gccaagccacttaaattaccagacagctttttgagaaaaatccaagtttgaatcaccccaaaatataatc

SEQ ID NO: 89703 - DNA, 71 bp, Homo sapiens
ttaaattaccagacagctttttgagaaaaatccaagtttgaatcaccccaaaatataatccagccagccaa

SEQ ID NO: 89704 - DNA, 74 bp, Homo sapiens
agacagctttttgagaaaaatccaagtttgaatcaccccaaaatataatccagccagccaagttgctctggatg

SEQ ID NO: 89705 - DNA, 72 bp, Homo sapiens
gaaaaatccaagtttgaatcaccccaaaatataatccagccagccaagttgctctggatggcttggaaaagt

SEQ ID NO: 89706 - DNA, 74 bp, Homo sapiens
atccaagtttgaatcaccccaaaatataatccagccagccaagttgctctggatggcttggaaaagttcttcta

SEQ ID NO: 89707 - DNA, 72 bp, Homo sapiens
aatcaccccaaaatataatccagccagccaagttgctctggatggcttggaaaagttcttctaggaagcccc

SEQ ID NO: 89708 - DNA, 73 bp, Homo sapiens
aaaatataatccagccagccaagttgctctggatggcttggaaaagttcttctaggaagcccctcctggctgg

SEQ ID NO: 89709 - DNA, 76 bp, Homo sapiens
cagccaagttgctctggatggcttggaaaagttcttctaggaagcccctcctggctggtcaacacactgccctaca

SEQ ID NO: 89710 - DNA, 76 bp, Homo sapiens
agttgctctggatggcttggaaaagttcttctaggaagcccctcctggctggtcaacacactgccctacacagctg

SEQ ID NO: 89711 - DNA, 75 bp, Homo sapiens
atggcttggaaaagttcttctaggaagcccctcctggctggtcaacacactgccctacacagctgggctccgagc

SEQ ID NO: 89712 - DNA, 75 bp, Homo sapiens
gttcttctaggaagcccctcctggctggtcaacacactgccctacacagctgggctccgagccagaggagtttaa

SEQ ID NO: 89713 - DNA, 76 bp, Homo sapiens
gaagcccctcctggctggtcaacacactgccctacacagctgggctccgagccagaggagtttaacagtccacagt

SEQ ID NO: 89714 - DNA, 77 bp, Homo sapiens
ctcctggctggtcaacacactgccctacacagctgggctccgagccagaggagtttaacagtccacagttaccttca

SEQ ID NO: 89715 - DNA, 75 bp, Homo sapiens
aacacactgccctacacagctgggctccgagccagaggagtttaacagtccacagttaccttcaccctaacatga

SEQ ID NO: 89716 - DNA, 75 bp, Homo sapiens
cctacacagctgggctccgagccagaggagtttaacagtccacagttaccttcaccctaacatgaggaagatcca

SEQ ID NO: 89717 - DNA, 75 bp, Homo sapiens
ctgggctccgagccagaggagtttaacagtccacagttaccttcaccctaacatgaggaagatccagcttagaga

SEQ ID NO: 89718 - DNA, 74 bp, Homo sapiens
agccagaggagtttaacagtccacagttaccttcaccctaacatgaggaagatccagcttagagaggggatgta

SEQ ID NO: 89719 - DNA, 72 bp, Homo sapiens
agtttaacagtccacagttaccttcaccctaacatgaggaagatccagcttagagaggggatgtaaccaata

SEQ ID NO: 89720 - DNA, 71 bp, Homo sapiens
cacagttaccttcaccctaacatgaggaagatccagcttagagaggggatgtaaccaataccctaaagtaa

SEQ ID NO: 89721 - DNA, 77 bp, Homo sapiens
taacatgaggaagatccagcttagagaggggatgtaaccaataccctaaagtaaaaatagcagtgtgacagcatgag

SEQ ID NO: 89722 - DNA, 76 bp, Homo sapiens
aagatccagcttagagaggggatgtaaccaataccctaaagtaaaaatagcagtgtgacagcatgaggtggacaca

SEQ ID NO: 89723 - DNA, 75 bp, Homo sapiens
ttagagaggggatgtaaccaataccctaaagtaaaaatagcagtgtgacagcatgaggtggacacacaggcggac

SEQ ID NO: 89724 - DNA, 75 bp, Homo sapiens
aataccctaaagtaaaaatagcagtgtgacagcatgaggtggacacacaggcggaccttctggactgaaaagcaa

SEQ ID NO: 89725 - DNA, 81 bp, Homo sapiens
aagtaaaaatagcagtgtgacagcatgaggtggacacacaggcggaccttctggactgaaaagcaagcgagggcagcatca

SEQ ID NO: 89726 - DNA, 84 bp, Homo sapiens
agcagtgtgacagcatgaggtggacacacaggcggaccttctggactgaaaagcaagcgagggcagcatcagagagaaggcgga

SEQ ID NO: 89727 - DNA, 79 bp, Homo sapiens
atgaggtggacacacaggcggaccttctggactgaaaagcaagcgagggcagcatcagagagaaggcggagctcctggt

SEQ ID NO: 89728 - DNA, 78 bp, Homo sapiens
accttctggactgaaaagcaagcgagggcagcatcagagagaaggcggagctcctggttcctaaagcacagaagacag

SEQ ID NO: 89729 - DNA, 79 bp, Homo sapiens
actgaaaagcaagcgagggcagcatcagagagaaggcggagctcctggttcctaaagcacagaagacagtggtgaccag

SEQ ID NO: 89730 - DNA, 79 bp, Homo sapiens
aagcaagcgagggcagcatcagagagaaggcggagctcctggttcctaaagcacagaagacagtggtgaccaggtacca

SEQ ID NO: 89731 - DNA, 77 bp, Homo sapiens
gcatcagagagaaggcggagctcctggttcctaaagcacagaagacagtggtgaccaggtaccaagtccatcgtagt

SEQ ID NO: 89732 - DNA, 75 bp, Homo sapiens
agaaggcggagctcctggttcctaaagcacagaagacagtggtgaccaggtaccaagtccatcgtagttatatga

SEQ ID NO: 89733 - DNA, 77 bp, Homo sapiens
ctcctggttcctaaagcacagaagacagtggtgaccaggtaccaagtccatcgtagttatatgactcacgagctctc

SEQ ID NO: 89734 - DNA, 75 bp, Homo sapiens
ggttcctaaagcacagaagacagtggtgaccaggtaccaagtccatcgtagttatatgactcacgagctctcccc

SEQ ID NO: 89735 - DNA, 76 bp, Homo sapiens
gaagacagtggtgaccaggtaccaagtccatcgtagttatatgactcacgagctctcccccagctgtttctaggaa

SEQ ID NO: 89736 - DNA, 74 bp, Homo sapiens
agtggtgaccaggtaccaagtccatcgtagttatatgactcacgagctctcccccagctgtttctaggaaagcc

SEQ ID NO: 89737 - DNA, 78 bp, Homo sapiens
atcgtagttatatgactcacgagctctcccccagctgtttctaggaaagcctgccttcctgcaggacaagtcagaatc

SEQ ID NO: 89738 - DNA, 75 bp, Homo sapiens
cagctgtttctaggaaagcctgccttcctgcaggacaagtcagaatcgctcagggaaaaagacccagggccagaa

SEQ ID NO: 89739 - DNA, 74 bp, Homo sapiens
tttctaggaaagcctgccttcctgcaggacaagtcagaatcgctcagggaaaaagacccagggccagaattcta

SEQ ID NO: 89740 - DNA, 74 bp, Homo sapiens
aagcctgccttcctgcaggacaagtcagaatcgctcagggaaaaagacccagggccagaattctaccaggaaga

SEQ ID NO: 89741 - DNA, 76 bp, Homo sapiens
caggacaagtcagaatcgctcagggaaaaagacccagggccagaattctaccaggaagagaggctctggctggtca

SEQ ID NO: 89742 - DNA, 75 bp, Homo sapiens
aagtcagaatcgctcagggaaaaagacccagggccagaattctaccaggaagagaggctctggctggtcatgggc

SEQ ID NO: 89743 - DNA, 80 bp, Homo sapiens
tcgctcagggaaaaagacccagggccagaattctaccaggaagagaggctctggctggtcatgggccagcagctgctgtc

SEQ ID NO: 89744 - DNA, 80 bp, Homo sapiens
aaaaagacccagggccagaattctaccaggaagagaggctctggctggtcatgggccagcagctgctgtcgctgccactg

SEQ ID NO: 89745 - DNA, 83 bp, Homo sapiens
agggccagaattctaccaggaagagaggctctggctggtcatgggccagcagctgctgtcgctgccactgtctcctcctcacc

SEQ ID NO: 89746 - DNA, 85 bp, Homo sapiens
taccaggaagagaggctctggctggtcatgggccagcagctgctgtcgctgccactgtctcctcctcacctgcaggggcgcctta

SEQ ID NO: 89747 - DNA, 86 bp, Homo sapiens
agaggctctggctggtcatgggccagcagctgctgtcgctgccactgtctcctcctcacctgcaggggcgccttagcctcatcttg

SEQ ID NO: 89748 - DNA, 83 bp, Homo sapiens
tggtcatgggccagcagctgctgtcgctgccactgtctcctcctcacctgcaggggcgccttagcctcatcttggggagtctt

SEQ ID NO: 89749 - DNA, 81 bp, Homo sapiens
ccagcagctgctgtcgctgccactgtctcctcctcacctgcaggggcgccttagcctcatcttggggagtctttttgacaa

SEQ ID NO: 89750 - DNA, 78 bp, Homo sapiens
agctgctgtcgctgccactgtctcctcctcacctgcaggggcgccttagcctcatcttggggagtctttttgacaagg

SEQ ID NO: 89751 - DNA, 74 bp, Homo sapiens
tcctcacctgcaggggcgccttagcctcatcttggggagtctttttgacaaggtgcgaacttgctctttcaaaa

SEQ ID NO: 89752 - DNA, 71 bp, Homo sapiens
acctgcaggggcgccttagcctcatcttggggagtctttttgacaaggtgcgaacttgctctttcaaaaaa

SEQ ID NO: 89753 - DNA, 71 bp, Homo sapiens
ttagcctcatcttggggagtctttttgacaaggtgcgaacttgctctttcaaaaaaaaatgaaatcctcat

SEQ ID NO: 89754 - DNA, 69 bp, Homo sapiens
agtctttttgacaaggtgcgaacttgctctttcaaaaaaaaatgaaatcctcattccatgaaggggaaa

SEQ ID NO: 89755 - DNA, 67 bp, Homo sapiens
tttcaaaaaaaaatgaaatcctcattccatgaaggggaaaactgcgacaccgggacagggaggaaat

SEQ ID NO: 89756 - DNA, 70 bp, Homo sapiens
aaaatgaaatcctcattccatgaaggggaaaactgcgacaccgggacagggaggaaattgcccaaagaca

SEQ ID NO: 89757 - DNA, 70 bp, Homo sapiens
attccatgaaggggaaaactgcgacaccgggacagggaggaaattgcccaaagacatgggaagaagcacg

SEQ ID NO: 89758 - DNA, 67 bp, Homo sapiens
aaggggaaaactgcgacaccgggacagggaggaaattgcccaaagacatgggaagaagcacggaagg

SEQ ID NO: 89759 - DNA, 69 bp, Homo sapiens
aactgcgacaccgggacagggaggaaattgcccaaagacatgggaagaagcacggaaggggtgggcacc

SEQ ID NO: 89760 - DNA, 69 bp, Homo sapiens
acagggaggaaattgcccaaagacatgggaagaagcacggaaggggtgggcaccgggagagtggtggaa

SEQ ID NO: 89761 - DNA, 68 bp, Homo sapiens
aaattgcccaaagacatgggaagaagcacggaaggggtgggcaccgggagagtggtggaaacgaaaca

SEQ ID NO: 89762 - DNA, 66 bp, Homo sapiens
cccaaagacatgggaagaagcacggaaggggtgggcaccgggagagtggtggaaacgaaacagggg

SEQ ID NO: 89763 - DNA, 65 bp, Homo sapiens
aagaagcacggaaggggtgggcaccgggagagtggtggaaacgaaacagggggaagaaattctcg

SEQ ID NO: 89764 - DNA, 66 bp, Homo sapiens
aaggggtgggcaccgggagagtggtggaaacgaaacagggggaagaaattctcggcttagctaatg

SEQ ID NO: 89765 - DNA, 69 bp, Homo sapiens
ggagagtggtggaaacgaaacagggggaagaaattctcggcttagctaatggagctgaacaagttcggg

SEQ ID NO: 89766 - DNA, 68 bp, Homo sapiens
aaacgaaacagggggaagaaattctcggcttagctaatggagctgaacaagttcggggcaggaagaaa

SEQ ID NO: 89767 - DNA, 72 bp, Homo sapiens
gggaagaaattctcggcttagctaatggagctgaacaagttcggggcaggaagaaagccacattccttccta

SEQ ID NO: 89768 - DNA, 71 bp, Homo sapiens
aaattctcggcttagctaatggagctgaacaagttcggggcaggaagaaagccacattccttcctagttag

SEQ ID NO: 89769 - DNA, 72 bp, Homo sapiens
cttagctaatggagctgaacaagttcggggcaggaagaaagccacattccttcctagttagtctccctcctc

SEQ ID NO: 89770 - DNA, 68 bp, Homo sapiens
agctgaacaagttcggggcaggaagaaagccacattccttcctagttagtctccctcctcccccgccc

SEQ ID NO: 89771 - DNA, 67 bp, Homo sapiens
aagttcggggcaggaagaaagccacattccttcctagttagtctccctcctcccccgcccgcggcac

SEQ ID NO: 89772 - DNA, 65 bp, Homo sapiens
aggaagaaagccacattccttcctagttagtctccctcctcccccgcccgcggcacccccccacc

SEQ ID NO: 89773 - DNA, 76 bp, Homo sapiens
cacacacacacgcagggagcagggctctctgagcccgagactagacccacccccactccctttagggcaatgaagc

SEQ ID NO: 89774 - DNA, 74 bp, Homo sapiens
acacacacgcagggagcagggctctctgagcccgagactagacccacccccactccctttagggcaatgaagcc

SEQ ID NO: 89775 - DNA, 73 bp, Homo sapiens
acacacgcagggagcagggctctctgagcccgagactagacccacccccactccctttagggcaatgaagccc

SEQ ID NO: 89776 - DNA, 71 bp, Homo sapiens
ggagcagggctctctgagcccgagactagacccacccccactccctttagggcaatgaagcccccaatttc

SEQ ID NO: 89777 - DNA, 70 bp, Homo sapiens
agggctctctgagcccgagactagacccacccccactccctttagggcaatgaagcccccaatttccaga

SEQ ID NO: 89778 - DNA, 69 bp, Homo sapiens
ctctctgagcccgagactagacccacccccactccctttagggcaatgaagcccccaatttccagaaaa

SEQ ID NO: 89779 - DNA, 67 bp, Homo sapiens
cgagactagacccacccccactccctttagggcaatgaagcccccaatttccagaaaaggagttaca

SEQ ID NO: 89780 - DNA, 66 bp, Homo sapiens
agactagacccacccccactccctttagggcaatgaagcccccaatttccagaaaaggagttacaa

SEQ ID NO: 89781 - DNA, 65 bp, Homo sapiens
tagacccacccccactccctttagggcaatgaagcccccaatttccagaaaaggagttacaaggt

SEQ ID NO: 89782 - DNA, 64 bp, Homo sapiens
actccctttagggcaatgaagcccccaatttccagaaaaggagttacaaggttcctaaaccact

SEQ ID NO: 89783 - DNA, 65 bp, Homo sapiens
tttagggcaatgaagcccccaatttccagaaaaggagttacaaggttcctaaaccacttcccctc

SEQ ID NO: 89784 - DNA, 63 bp, Homo sapiens
aagcccccaatttccagaaaaggagttacaaggttcctaaaccacttcccctcgggacctgac

SEQ ID NO: 89785 - DNA, 66 bp, Homo sapiens
aatttccagaaaaggagttacaaggttcctaaaccacttcccctcgggacctgaccactggtcatc

SEQ ID NO: 89786 - DNA, 69 bp, Homo sapiens
aaaggagttacaaggttcctaaaccacttcccctcgggacctgaccactggtcatctgcaacttctgac

SEQ ID NO: 89787 - DNA, 71 bp, Homo sapiens
aaggttcctaaaccacttcccctcgggacctgaccactggtcatctgcaacttctgacccagcacagacgg

SEQ ID NO: 89788 - DNA, 70 bp, Homo sapiens
aaaccacttcccctcgggacctgaccactggtcatctgcaacttctgacccagcacagacggggggaggg

SEQ ID NO: 89789 - DNA, 75 bp, Homo sapiens
tcgggacctgaccactggtcatctgcaacttctgacccagcacagacggggggagggggggccatgacacaaaca

SEQ ID NO: 89790 - DNA, 74 bp, Homo sapiens
accactggtcatctgcaacttctgacccagcacagacggggggagggggggccatgacacaaacagaaatgaaa

SEQ ID NO: 89791 - DNA, 72 bp, Homo sapiens
atctgcaacttctgacccagcacagacggggggagggggggccatgacacaaacagaaatgaaaaaggcagg

SEQ ID NO: 89792 - DNA, 71 bp, Homo sapiens
gagggggggccatgacacaaacagaaatgaaaaaggcaggtttctgaccacggccccagatgcgccccaaa

SEQ ID NO: 89793 - DNA, 74 bp, Homo sapiens
catgacacaaacagaaatgaaaaaggcaggtttctgaccacggccccagatgcgccccaaagtcaggcccaaga

SEQ ID NO: 89794 - DNA, 73 bp, Homo sapiens
acagaaatgaaaaaggcaggtttctgaccacggccccagatgcgccccaaagtcaggcccaagagaacataca

SEQ ID NO: 89795 - DNA, 75 bp, Homo sapiens
aatgaaaaaggcaggtttctgaccacggccccagatgcgccccaaagtcaggcccaagagaacatacacagcagc

SEQ ID NO: 89796 - DNA, 73 bp, Homo sapiens
aggtttctgaccacggccccagatgcgccccaaagtcaggcccaagagaacatacacagcagcctcccctccc

SEQ ID NO: 89797 - DNA, 74 bp, Homo sapiens
accacggccccagatgcgccccaaagtcaggcccaagagaacatacacagcagcctcccctccccaccaccagc

SEQ ID NO: 89798 - DNA, 76 bp, Homo sapiens
agatgcgccccaaagtcaggcccaagagaacatacacagcagcctcccctccccaccaccagccaggtggcagaac

SEQ ID NO: 89799 - DNA, 73 bp, Homo sapiens
aaagtcaggcccaagagaacatacacagcagcctcccctccccaccaccagccaggtggcagaaccgaaacgc

SEQ ID NO: 89800 - DNA, 71 bp, Homo sapiens
aacatacacagcagcctcccctccccaccaccagccaggtggcagaaccgaaacgcctcaaacttccccca

SEQ ID NO: 89801 - DNA, 68 bp, Homo sapiens
ctcccctccccaccaccagccaggtggcagaaccgaaacgcctcaaacttcccccagatgggcccaaa

SEQ ID NO: 89802 - DNA, 72 bp, Homo sapiens
caccaccagccaggtggcagaaccgaaacgcctcaaacttcccccagatgggcccaaatcggcctctgagaa

SEQ ID NO: 89803 - DNA, 71 bp, Homo sapiens
agaaccgaaacgcctcaaacttcccccagatgggcccaaatcggcctctgagaagttccagagtcagcggc

SEQ ID NO: 89804 - DNA, 76 bp, Homo sapiens
aacttcccccagatgggcccaaatcggcctctgagaagttccagagtcagcggccagatgtggtagccagagcttc

SEQ ID NO: 89805 - DNA, 77 bp, Homo sapiens
aaatcggcctctgagaagttccagagtcagcggccagatgtggtagccagagcttcctcctgggtggcagggatccc

SEQ ID NO: 89806 - DNA, 79 bp, Homo sapiens
agaagttccagagtcagcggccagatgtggtagccagagcttcctcctgggtggcagggatcccctacatgtgccctga

SEQ ID NO: 89807 - DNA, 79 bp, Homo sapiens
ccagatgtggtagccagagcttcctcctgggtggcagggatcccctacatgtgccctgaggataacatcacagccgccc

SEQ ID NO: 89808 - DNA, 77 bp, Homo sapiens
tagccagagcttcctcctgggtggcagggatcccctacatgtgccctgaggataacatcacagccgcccccaacact

SEQ ID NO: 89809 - DNA, 76 bp, Homo sapiens
tgggtggcagggatcccctacatgtgccctgaggataacatcacagccgcccccaacacttccactctccaaggaa

SEQ ID NO: 89810 - DNA, 75 bp, Homo sapiens
ccctacatgtgccctgaggataacatcacagccgcccccaacacttccactctccaaggaacctctctccggaga

SEQ ID NO: 89811 - DNA, 75 bp, Homo sapiens
atgtgccctgaggataacatcacagccgcccccaacacttccactctccaaggaacctctctccggagagagagg

SEQ ID NO: 89812 - DNA, 73 bp, Homo sapiens
aggataacatcacagccgcccccaacacttccactctccaaggaacctctctccggagagagagggtcacctg

SEQ ID NO: 89813 - DNA, 69 bp, Homo sapiens
acagccgcccccaacacttccactctccaaggaacctctctccggagagagagggtcacctgggggtaa

SEQ ID NO: 89814 - DNA, 69 bp, Homo sapiens
aacacttccactctccaaggaacctctctccggagagagagggtcacctgggggtaaggggagcagaaa

SEQ ID NO: 89815 - DNA, 70 bp, Homo sapiens
actctccaaggaacctctctccggagagagagggtcacctgggggtaaggggagcagaaagctgggacaa

SEQ ID NO: 89816 - DNA, 71 bp, Homo sapiens
aacctctctccggagagagagggtcacctgggggtaaggggagcagaaagctgggacaagctgtcagtttc

SEQ ID NO: 89817 - DNA, 69 bp, Homo sapiens
agggtcacctgggggtaaggggagcagaaagctgggacaagctgtcagtttctgcccaaactccccgtc

SEQ ID NO: 89818 - DNA, 70 bp, Homo sapiens
agcagaaagctgggacaagctgtcagtttctgcccaaactccccgtcccaagaaccaaagtggcccaacc

SEQ ID NO: 89819 - DNA, 69 bp, Homo sapiens
aaagctgggacaagctgtcagtttctgcccaaactccccgtcccaagaaccaaagtggcccaacctgag

SEQ ID NO: 89820 - DNA, 70 bp, Homo sapiens
ctgtcagtttctgcccaaactccccgtcccaagaaccaaagtggcccaacctgagtggcttcatcggaac

SEQ ID NO: 89821 - DNA, 70 bp, Homo sapiens
ttctgcccaaactccccgtcccaagaaccaaagtggcccaacctgagtggcttcatcggaacgcgtcaaa

SEQ ID NO: 89822 - DNA, 73 bp, Homo sapiens
aagaaccaaagtggcccaacctgagtggcttcatcggaacgcgtcaaagccagcccccagctgcaaagccttc

SEQ ID NO: 89823 - DNA, 74 bp, Homo sapiens
aaagtggcccaacctgagtggcttcatcggaacgcgtcaaagccagcccccagctgcaaagccttccacccaga

SEQ ID NO: 89824 - DNA, 75 bp, Homo sapiens
aacctgagtggcttcatcggaacgcgtcaaagccagcccccagctgcaaagccttccacccagacagaacagacc

SEQ ID NO: 89825 - DNA, 75 bp, Homo sapiens
aacgcgtcaaagccagcccccagctgcaaagccttccacccagacagaacagacccccacaagtgcctcgctgac

SEQ ID NO: 89826 - DNA, 73 bp, Homo sapiens
agcccccagctgcaaagccttccacccagacagaacagacccccacaagtgcctcgctgaccaccccctgccg

SEQ ID NO: 89827 - DNA, 74 bp, Homo sapiens
tgcaaagccttccacccagacagaacagacccccacaagtgcctcgctgaccaccccctgccgggcacccagac

SEQ ID NO: 89828 - DNA, 75 bp, Homo sapiens
ttccacccagacagaacagacccccacaagtgcctcgctgaccaccccctgccgggcacccagacgatcgctgct

SEQ ID NO: 89829 - DNA, 75 bp, Homo sapiens
agacagaacagacccccacaagtgcctcgctgaccaccccctgccgggcacccagacgatcgctgcttcccagga

SEQ ID NO: 89830 - DNA, 77 bp, Homo sapiens
ccccacaagtgcctcgctgaccaccccctgccgggcacccagacgatcgctgcttcccaggaggacagacacagtca

SEQ ID NO: 89831 - DNA, 73 bp, Homo sapiens
ctgaccaccccctgccgggcacccagacgatcgctgcttcccaggaggacagacacagtcacccccaccaacg

SEQ ID NO: 89832 - DNA, 74 bp, Homo sapiens
cctgccgggcacccagacgatcgctgcttcccaggaggacagacacagtcacccccaccaacggcgctgccccg

SEQ ID NO: 89833 - DNA, 73 bp, Homo sapiens
atcgctgcttcccaggaggacagacacagtcacccccaccaacggcgctgccccggccccagatggaaaagcc

SEQ ID NO: 89834 - DNA, 70 bp, Homo sapiens
aggaggacagacacagtcacccccaccaacggcgctgccccggccccagatggaaaagcccccagcttcc

SEQ ID NO: 89835 - DNA, 70 bp, Homo sapiens
agacacagtcacccccaccaacggcgctgccccggccccagatggaaaagcccccagcttccccctatca

SEQ ID NO: 89836 - DNA, 68 bp, Homo sapiens
cccaccaacggcgctgccccggccccagatggaaaagcccccagcttccccctatcacggtgccggga

SEQ ID NO: 89837 - DNA, 68 bp, Homo sapiens
aacggcgctgccccggccccagatggaaaagcccccagcttccccctatcacggtgccgggaccgtgc

SEQ ID NO: 89838 - DNA, 71 bp, Homo sapiens
cagcttccccctatcacggtgccgggaccgtgcggcccaccgcctcctcgccccgccgccaggtgcgcaaa

SEQ ID NO: 89839 - DNA, 72 bp, Homo sapiens
ctatcacggtgccgggaccgtgcggcccaccgcctcctcgccccgccgccaggtgcgcaaactggaccctgc

SEQ ID NO: 89840 - DNA, 75 bp, Homo sapiens
tgcggcccaccgcctcctcgccccgccgccaggtgcgcaaactggaccctgcccaggtgcccagcaggccagaaa

SEQ ID NO: 89841 - DNA, 72 bp, Homo sapiens
accgcctcctcgccccgccgccaggtgcgcaaactggaccctgcccaggtgcccagcaggccagaaaggccc

SEQ ID NO: 89842 - DNA, 72 bp, Homo sapiens
ccccgccgccaggtgcgcaaactggaccctgcccaggtgcccagcaggccagaaaggccccggacgccgcca

SEQ ID NO: 89843 - DNA, 73 bp, Homo sapiens
aggtgcgcaaactggaccctgcccaggtgcccagcaggccagaaaggccccggacgccgccaggtgccgacac

SEQ ID NO: 89844 - DNA, 71 bp, Homo sapiens
aaactggaccctgcccaggtgcccagcaggccagaaaggccccggacgccgccaggtgccgacaccgacgc

SEQ ID NO: 89845 - DNA, 69 bp, Homo sapiens
accctgcccaggtgcccagcaggccagaaaggccccggacgccgccaggtgccgacaccgacgcccccc

SEQ ID NO: 89846 - DNA, 69 bp, Homo sapiens
ccagcaggccagaaaggccccggacgccgccaggtgccgacaccgacgccccccgggcccggcgcgcga

SEQ ID NO: 89847 - DNA, 67 bp, Homo sapiens
agaaaggccccggacgccgccaggtgccgacaccgacgccccccgggcccggcgcgcgagtctgggc

SEQ ID NO: 89848 - DNA, 70 bp, Homo sapiens
cccggacgccgccaggtgccgacaccgacgccccccgggcccggcgcgcgagtctgggcccctcagcagc

SEQ ID NO: 89849 - DNA, 69 bp, Homo sapiens
ccaggtgccgacaccgacgccccccgggcccggcgcgcgagtctgggcccctcagcagccccgggccac

SEQ ID NO: 89850 - DNA, 68 bp, Homo sapiens
acaccgacgccccccgggcccggcgcgcgagtctgggcccctcagcagccccgggccacccgcctgta

SEQ ID NO: 89851 - DNA, 71 bp, Homo sapiens
ccccgggcccggcgcgcgagtctgggcccctcagcagccccgggccacccgcctgtattgcctcctagtgc

SEQ ID NO: 89852 - DNA, 74 bp, Homo sapiens
agtctgggcccctcagcagccccgggccacccgcctgtattgcctcctagtgctgagaaggaacgcggttctca

SEQ ID NO: 89853 - DNA, 74 bp, Homo sapiens
cccgggccacccgcctgtattgcctcctagtgctgagaaggaacgcggttctcagcgctccaggccggactggc

SEQ ID NO: 89854 - DNA, 75 bp, Homo sapiens
acccgcctgtattgcctcctagtgctgagaaggaacgcggttctcagcgctccaggccggactggcgcccactcc

SEQ ID NO: 89855 - DNA, 76 bp, Homo sapiens
tattgcctcctagtgctgagaaggaacgcggttctcagcgctccaggccggactggcgcccactccgcgccccgcc

SEQ ID NO: 89856 - DNA, 74 bp, Homo sapiens
tgctgagaaggaacgcggttctcagcgctccaggccggactggcgcccactccgcgccccgccggcccagggac

SEQ ID NO: 89857 - DNA, 69 bp, Homo sapiens
aaggaacgcggttctcagcgctccaggccggactggcgcccactccgcgccccgccggcccagggaccc

SEQ ID NO: 89858 - DNA, 76 bp, Homo sapiens
gttctcagcgctccaggccggactggcgcccactccgcgccccgccggcccagggacccgcgagcagcaccacaga

SEQ ID NO: 89859 - DNA, 73 bp, Homo sapiens
aggccggactggcgcccactccgcgccccgccggcccagggacccgcgagcagcaccacagacctagcgtctc

SEQ ID NO: 89860 - DNA, 73 bp, Homo sapiens
actggcgcccactccgcgccccgccggcccagggacccgcgagcagcaccacagacctagcgtctccgagccc

SEQ ID NO: 89861 - DNA, 75 bp, Homo sapiens
tccgcgccccgccggcccagggacccgcgagcagcaccacagacctagcgtctccgagcccggacgcctcagtga

SEQ ID NO: 89862 - DNA, 75 bp, Homo sapiens
cggcccagggacccgcgagcagcaccacagacctagcgtctccgagcccggacgcctcagtgaggggagcgcgag

SEQ ID NO: 89863 - DNA, 75 bp, Homo sapiens
agggacccgcgagcagcaccacagacctagcgtctccgagcccggacgcctcagtgaggggagcgcgaggccggc

SEQ ID NO: 89864 - DNA, 73 bp, Homo sapiens
agcaccacagacctagcgtctccgagcccggacgcctcagtgaggggagcgcgaggccggcccgcgtccggac

SEQ ID NO: 89865 - DNA, 71 bp, Homo sapiens
acagacctagcgtctccgagcccggacgcctcagtgaggggagcgcgaggccggcccgcgtccggacgttc

SEQ ID NO: 89866 - DNA, 70 bp, Homo sapiens
cgtctccgagcccggacgcctcagtgaggggagcgcgaggccggcccgcgtccggacgttccccactggc

SEQ ID NO: 89867 - DNA, 74 bp, Homo sapiens
gacgcctcagtgaggggagcgcgaggccggcccgcgtccggacgttccccactggcgcgccgggcgccatgcca

SEQ ID NO: 89868 - DNA, 74 bp, Homo sapiens
ctcagtgaggggagcgcgaggccggcccgcgtccggacgttccccactggcgcgccgggcgccatgccactcac

SEQ ID NO: 89869 - DNA, 74 bp, Homo sapiens
gcgaggccggcccgcgtccggacgttccccactggcgcgccgggcgccatgccactcacctgtctggcgcggta

SEQ ID NO: 89870 - DNA, 74 bp, Homo sapiens
cccgcgtccggacgttccccactggcgcgccgggcgccatgccactcacctgtctggcgcggtagctctcgaag

SEQ ID NO: 89871 - DNA, 76 bp, Homo sapiens
tccggacgttccccactggcgcgccgggcgccatgccactcacctgtctggcgcggtagctctcgaaggccctcag

SEQ ID NO: 89872 - DNA, 79 bp, Homo sapiens
actggcgcgccgggcgccatgccactcacctgtctggcgcggtagctctcgaaggccctcagggcactgtcggtgagct

SEQ ID NO: 89873 - DNA, 79 bp, Homo sapiens
cgggcgccatgccactcacctgtctggcgcggtagctctcgaaggccctcagggcactgtcggtgagcttcacgtggaa

SEQ ID NO: 89874 - DNA, 79 bp, Homo sapiens
atgccactcacctgtctggcgcggtagctctcgaaggccctcagggcactgtcggtgagcttcacgtggaacaccgaca

SEQ ID NO: 89875 - DNA, 76 bp, Homo sapiens
acctgtctggcgcggtagctctcgaaggccctcagggcactgtcggtgagcttcacgtggaacaccgacaccttgc

SEQ ID NO: 89876 - DNA, 76 bp, Homo sapiens
ggtagctctcgaaggccctcagggcactgtcggtgagcttcacgtggaacaccgacaccttgctgccgtcgctaac

SEQ ID NO: 89877 - DNA, 75 bp, Homo sapiens
tctcgaaggccctcagggcactgtcggtgagcttcacgtggaacaccgacaccttgctgccgtcgctaacccgcc

SEQ ID NO: 89878 - DNA, 74 bp, Homo sapiens
agggcactgtcggtgagcttcacgtggaacaccgacaccttgctgccgtcgctaacccgcccgcacgacagccc

SEQ ID NO: 89879 - DNA, 75 bp, Homo sapiens
tcggtgagcttcacgtggaacaccgacaccttgctgccgtcgctaacccgcccgcacgacagcccgtagctccta

SEQ ID NO: 89880 - DNA, 73 bp, Homo sapiens
ttcacgtggaacaccgacaccttgctgccgtcgctaacccgcccgcacgacagcccgtagctcctatcctcct

SEQ ID NO: 89881 - DNA, 74 bp, Homo sapiens
aacaccgacaccttgctgccgtcgctaacccgcccgcacgacagcccgtagctcctatcctccttcagcgccgc

SEQ ID NO: 89882 - DNA, 75 bp, Homo sapiens
cccgcccgcacgacagcccgtagctcctatcctccttcagcgccgccatcttgcgaccatctctcccccgcgccc

SEQ ID NO: 89883 - DNA, 73 bp, Homo sapiens
cgacagcccgtagctcctatcctccttcagcgccgccatcttgcgaccatctctcccccgcgcccccttcccg

SEQ ID NO: 89884 - DNA, 76 bp, Homo sapiens
tagctcctatcctccttcagcgccgccatcttgcgaccatctctcccccgcgcccccttcccggctccagcgccgc

SEQ ID NO: 89885 - DNA, 72 bp, Homo sapiens
cgccgccatcttgcgaccatctctcccccgcgcccccttcccggctccagcgccgccacgccggccacgccc

SEQ ID NO: 89886 - DNA, 70 bp, Homo sapiens
ttgcgaccatctctcccccgcgcccccttcccggctccagcgccgccacgccggccacgccccgccccgc

SEQ ID NO: 89887 - DNA, 68 bp, Homo sapiens
ccccgcgcccccttcccggctccagcgccgccacgccggccacgccccgccccgccgcccgctgacgc

SEQ ID NO: 89888 - DNA, 76 bp, Homo sapiens
ccttcccggctccagcgccgccacgccggccacgccccgccccgccgcccgctgacgcgctgcattattcatgaga

SEQ ID NO: 89889 - DNA, 71 bp, Homo sapiens
cacagacaaccttggaagtagcttctttctggttttaaaaagacaccgacattgactttgatatgtttata

SEQ ID NO: 89890 - DNA, 72 bp, Homo sapiens
cttggaagtagcttctttctggttttaaaaagacaccgacattgactttgatatgtttatattatagatata

SEQ ID NO: 89891 - DNA, 72 bp, Homo sapiens
ctttctggttttaaaaagacaccgacattgactttgatatgtttatattatagatataatacataaaacatc

SEQ ID NO: 89892 - DNA, 77 bp, Homo sapiens
taaaaagacaccgacattgactttgatatgtttatattatagatataatacataaaacatctagagtgagactctac

SEQ ID NO: 89893 - DNA, 77 bp, Homo sapiens
caccgacattgactttgatatgtttatattatagatataatacataaaacatctagagtgagactctacgttctccc

SEQ ID NO: 89894 - DNA, 76 bp, Homo sapiens
ttgactttgatatgtttatattatagatataatacataaaacatctagagtgagactctacgttctccccaaaaga

SEQ ID NO: 89895 - DNA, 74 bp, Homo sapiens
tttatattatagatataatacataaaacatctagagtgagactctacgttctccccaaaagaagagaaccaagc

SEQ ID NO: 89896 - DNA, 73 bp, Homo sapiens
attatagatataatacataaaacatctagagtgagactctacgttctccccaaaagaagagaaccaagccgtc

SEQ ID NO: 89897 - DNA, 71 bp, Homo sapiens
aatacataaaacatctagagtgagactctacgttctccccaaaagaagagaaccaagccgtccttccctgc

SEQ ID NO: 89898 - DNA, 71 bp, Homo sapiens
aacatctagagtgagactctacgttctccccaaaagaagagaaccaagccgtccttccctgctcccagccc

SEQ ID NO: 89899 - DNA, 71 bp, Homo sapiens
agactctacgttctccccaaaagaagagaaccaagccgtccttccctgctcccagccccagtgatgcgttg

SEQ ID NO: 89900 - DNA, 70 bp, Homo sapiens
acgttctccccaaaagaagagaaccaagccgtccttccctgctcccagccccagtgatgcgttggcggga

SEQ ID NO: 89901 - DNA, 70 bp, Homo sapiens
aaagaagagaaccaagccgtccttccctgctcccagccccagtgatgcgttggcgggaggccacctccct

SEQ ID NO: 89902 - DNA, 70 bp, Homo sapiens
aaccaagccgtccttccctgctcccagccccagtgatgcgttggcgggaggccacctcccttcccgacca

SEQ ID NO: 89903 - DNA, 73 bp, Homo sapiens
ttccctgctcccagccccagtgatgcgttggcgggaggccacctcccttcccgaccaggagccagggcctctg

SEQ ID NO: 89904 - DNA, 71 bp, Homo sapiens
ccagccccagtgatgcgttggcgggaggccacctcccttcccgaccaggagccagggcctctgggggacaa

SEQ ID NO: 89905 - DNA, 71 bp, Homo sapiens
agtgatgcgttggcgggaggccacctcccttcccgaccaggagccagggcctctgggggacaagccttgtg

SEQ ID NO: 89906 - DNA, 71 bp, Homo sapiens
ttggcgggaggccacctcccttcccgaccaggagccagggcctctgggggacaagccttgtgggcagccca

SEQ ID NO: 89907 - DNA, 68 bp, Homo sapiens
acctcccttcccgaccaggagccagggcctctgggggacaagccttgtgggcagcccaggccggaggg

SEQ ID NO: 89908 - DNA, 70 bp, Homo sapiens
ttcccgaccaggagccagggcctctgggggacaagccttgtgggcagcccaggccggaggggctggggaa

SEQ ID NO: 89909 - DNA, 71 bp, Homo sapiens
agccagggcctctgggggacaagccttgtgggcagcccaggccggaggggctggggaaagctgagggcaaa

SEQ ID NO: 89910 - DNA, 70 bp, Homo sapiens
cctctgggggacaagccttgtgggcagcccaggccggaggggctggggaaagctgagggcaaaggagaac

SEQ ID NO: 89911 - DNA, 69 bp, Homo sapiens
acaagccttgtgggcagcccaggccggaggggctggggaaagctgagggcaaaggagaacccccctcac

SEQ ID NO: 89912 - DNA, 70 bp, Homo sapiens
tgggcagcccaggccggaggggctggggaaagctgagggcaaaggagaacccccctcacctcattggtcc

SEQ ID NO: 89913 - DNA, 68 bp, Homo sapiens
cggaggggctggggaaagctgagggcaaaggagaacccccctcacctcattggtcccccaggatcaaa

SEQ ID NO: 89914 - DNA, 69 bp, Homo sapiens
tggggaaagctgagggcaaaggagaacccccctcacctcattggtcccccaggatcaaaagtaatccca

SEQ ID NO: 89915 - DNA, 66 bp, Homo sapiens
gagggcaaaggagaacccccctcacctcattggtcccccaggatcaaaagtaatcccaaaaccaaa

SEQ ID NO: 89916 - DNA, 64 bp, Homo sapiens
aaaggagaacccccctcacctcattggtcccccaggatcaaaagtaatcccaaaaccaaaagga

SEQ ID NO: 89917 - DNA, 67 bp, Homo sapiens
ccctcacctcattggtcccccaggatcaaaagtaatcccaaaaccaaaaggaaagggagtctcagac

SEQ ID NO: 89918 - DNA, 64 bp, Homo sapiens
attggtcccccaggatcaaaagtaatcccaaaaccaaaaggaaagggagtctcagacccttccc

SEQ ID NO: 89919 - DNA, 66 bp, Homo sapiens
aggatcaaaagtaatcccaaaaccaaaaggaaagggagtctcagacccttcccccagctgccgacg

SEQ ID NO: 89920 - DNA, 68 bp, Homo sapiens
taatcccaaaaccaaaaggaaagggagtctcagacccttcccccagctgccgacggagagtctcattt

SEQ ID NO: 89921 - DNA, 72 bp, Homo sapiens
aagggagtctcagacccttcccccagctgccgacggagagtctcattttggcaagtatccgagcaaaaccaa

SEQ ID NO: 89922 - DNA, 72 bp, Homo sapiens
agtctcagacccttcccccagctgccgacggagagtctcattttggcaagtatccgagcaaaaccaaaacaa

SEQ ID NO: 89923 - DNA, 76 bp, Homo sapiens
aaaacaaaaaccaaataaaatggtggtttagcagagacgcgcacattcacattgcacaaggcactgctggggcaca

SEQ ID NO: 89924 - DNA, 81 bp, Homo sapiens
accaaataaaatggtggtttagcagagacgcgcacattcacattgcacaaggcactgctggggcacagaggccagatacaa

SEQ ID NO: 89925 - DNA, 84 bp, Homo sapiens
taaaatggtggtttagcagagacgcgcacattcacattgcacaaggcactgctggggcacagaggccagatacaagtgttgata

SEQ ID NO: 89926 - DNA, 86 bp, Homo sapiens
gtttagcagagacgcgcacattcacattgcacaaggcactgctggggcacagaggccagatacaagtgttgatatcggctgataaa

SEQ ID NO: 89927 - DNA, 84 bp, Homo sapiens
acgcgcacattcacattgcacaaggcactgctggggcacagaggccagatacaagtgttgatatcggctgataaagcaaaatat

SEQ ID NO: 89928 - DNA, 82 bp, Homo sapiens
ttcacattgcacaaggcactgctggggcacagaggccagatacaagtgttgatatcggctgataaagcaaaatatttggaaa

SEQ ID NO: 89929 - DNA, 80 bp, Homo sapiens
aggcactgctggggcacagaggccagatacaagtgttgatatcggctgataaagcaaaatatttggaaagcttgtcataa

SEQ ID NO: 89930 - DNA, 77 bp, Homo sapiens
ggcacagaggccagatacaagtgttgatatcggctgataaagcaaaatatttggaaagcttgtcataactccggtcc

SEQ ID NO: 89931 - DNA, 75 bp, Homo sapiens
ccagatacaagtgttgatatcggctgataaagcaaaatatttggaaagcttgtcataactccggtccctctggga

SEQ ID NO: 89932 - DNA, 76 bp, Homo sapiens
atatcggctgataaagcaaaatatttggaaagcttgtcataactccggtccctctgggatggactgatcgtgcttc

SEQ ID NO: 89933 - DNA, 79 bp, Homo sapiens
ttgtcataactccggtccctctgggatggactgatcgtgcttcgtgttcctaggcaatgctgaaggcatacagtacaaa

SEQ ID NO: 89934 - DNA, 77 bp, Homo sapiens
taactccggtccctctgggatggactgatcgtgcttcgtgttcctaggcaatgctgaaggcatacagtacaaacaag

SEQ ID NO: 89935 - DNA, 78 bp, Homo sapiens
actgatcgtgcttcgtgttcctaggcaatgctgaaggcatacagtacaaacaaggctgagggtcccagtggcccttca

SEQ ID NO: 89936 - DNA, 75 bp, Homo sapiens
gtgcttcgtgttcctaggcaatgctgaaggcatacagtacaaacaaggctgagggtcccagtggcccttcacccc

SEQ ID NO: 89937 - DNA, 75 bp, Homo sapiens
atgctgaaggcatacagtacaaacaaggctgagggtcccagtggcccttcaccccccatgcccgccccacagcca

SEQ ID NO: 89938 - DNA, 74 bp, Homo sapiens
catacagtacaaacaaggctgagggtcccagtggcccttcaccccccatgcccgccccacagccagatctctag

SEQ ID NO: 89939 - DNA, 73 bp, Homo sapiens
atacagtacaaacaaggctgagggtcccagtggcccttcaccccccatgcccgccccacagccagatctctag

SEQ ID NO: 89940 - DNA, 72 bp, Homo sapiens
agtacaaacaaggctgagggtcccagtggcccttcaccccccatgcccgccccacagccagatctctaggtc

SEQ ID NO: 89941 - DNA, 71 bp, Homo sapiens
aaacaaggctgagggtcccagtggcccttcaccccccatgcccgccccacagccagatctctaggtctccc

SEQ ID NO: 89942 - DNA, 71 bp, Homo sapiens
agggtcccagtggcccttcaccccccatgcccgccccacagccagatctctaggtctccctctcccaccag

SEQ ID NO: 89943 - DNA, 72 bp, Homo sapiens
agtggcccttcaccccccatgcccgccccacagccagatctctaggtctccctctcccaccaggggtataca

SEQ ID NO: 89944 - DNA, 77 bp, Homo sapiens
ttcaccccccatgcccgccccacagccagatctctaggtctccctctcccaccaggggtatacatcctcagagctga

SEQ ID NO: 89945 - DNA, 76 bp, Homo sapiens
agccagatctctaggtctccctctcccaccaggggtatacatcctcagagctgacccacgacctagctttctggtg

SEQ ID NO: 89946 - DNA, 76 bp, Homo sapiens
atctctaggtctccctctcccaccaggggtatacatcctcagagctgacccacgacctagctttctggtgtgactc

SEQ ID NO: 89947 - DNA, 72 bp, Homo sapiens
ccctctcccaccaggggtatacatcctcagagctgacccacgacctagctttctggtgtgactcggggtggg

SEQ ID NO: 89948 - DNA, 75 bp, Homo sapiens
tatacatcctcagagctgacccacgacctagctttctggtgtgactcggggtgggggctcccactggtcacctgg

SEQ ID NO: 89949 - DNA, 71 bp, Homo sapiens
agagctgacccacgacctagctttctggtgtgactcggggtgggggctcccactggtcacctggtgacccc

SEQ ID NO: 89950 - DNA, 71 bp, Homo sapiens
ctttctggtgtgactcggggtgggggctcccactggtcacctggtgacccccatcgcagtgagttccgccc

SEQ ID NO: 89951 - DNA, 68 bp, Homo sapiens
actcggggtgggggctcccactggtcacctggtgacccccatcgcagtgagttccgccccaaggggaa

SEQ ID NO: 89952 - DNA, 73 bp, Homo sapiens
gggctcccactggtcacctggtgacccccatcgcagtgagttccgccccaaggggaagcccagcctatagcag

SEQ ID NO: 89953 - DNA, 73 bp, Homo sapiens
ccactggtcacctggtgacccccatcgcagtgagttccgccccaaggggaagcccagcctatagcaggctggg

SEQ ID NO: 89954 - DNA, 72 bp, Homo sapiens
atcgcagtgagttccgccccaaggggaagcccagcctatagcaggctggggtggggtgtgtgcggagggagg

SEQ ID NO: 89955 - DNA, 72 bp, Homo sapiens
tgagttccgccccaaggggaagcccagcctatagcaggctggggtggggtgtgtgcggagggaggtgggaga

SEQ ID NO: 89956 - DNA, 71 bp, Homo sapiens
aaggggaagcccagcctatagcaggctggggtggggtgtgtgcggagggaggtgggagaggcgtggaacta

SEQ ID NO: 89957 - DNA, 72 bp, Homo sapiens
agcctatagcaggctggggtggggtgtgtgcggagggaggtgggagaggcgtggaactagagaccctccacc

SEQ ID NO: 89958 - DNA, 72 bp, Homo sapiens
aggctggggtggggtgtgtgcggagggaggtgggagaggcgtggaactagagaccctccaccttcatgtaga

SEQ ID NO: 89959 - DNA, 71 bp, Homo sapiens
gtggggtgtgtgcggagggaggtgggagaggcgtggaactagagaccctccaccttcatgtagaactaggg

SEQ ID NO: 89960 - DNA, 68 bp, Homo sapiens
cggagggaggtgggagaggcgtggaactagagaccctccaccttcatgtagaactaggggaacaacct

SEQ ID NO: 89961 - DNA, 69 bp, Homo sapiens
gtgggagaggcgtggaactagagaccctccaccttcatgtagaactaggggaacaaccttaggttccaa

SEQ ID NO: 89962 - DNA, 68 bp, Homo sapiens
gtggaactagagaccctccaccttcatgtagaactaggggaacaaccttaggttccaagccccaagtc

SEQ ID NO: 89963 - DNA, 65 bp, Homo sapiens
aacaaccttaggttccaagccccaagtccctatgtttccacccctttctaaggacaggcgtggag

SEQ ID NO: 89964 - DNA, 68 bp, Homo sapiens
cttaggttccaagccccaagtccctatgtttccacccctttctaaggacaggcgtggaggagcggctg

SEQ ID NO: 89965 - DNA, 69 bp, Homo sapiens
cccaagtccctatgtttccacccctttctaaggacaggcgtggaggagcggctggggctggcgggcttg

SEQ ID NO: 89966 - DNA, 72 bp, Homo sapiens
cctatgtttccacccctttctaaggacaggcgtggaggagcggctggggctggcgggcttgtcgggatctca

SEQ ID NO: 89967 - DNA, 77 bp, Homo sapiens
ttctaaggacaggcgtggaggagcggctggggctggcgggcttgtcgggatctcagctccctgagccctcctcctgc

SEQ ID NO: 89968 - DNA, 77 bp, Homo sapiens
tggaggagcggctggggctggcgggcttgtcgggatctcagctccctgagccctcctcctgccacgggcctgctccc

SEQ ID NO: 89969 - DNA, 76 bp, Homo sapiens
gctggggctggcgggcttgtcgggatctcagctccctgagccctcctcctgccacgggcctgctcccctccttctc

SEQ ID NO: 89970 - DNA, 76 bp, Homo sapiens
ctggcgggcttgtcgggatctcagctccctgagccctcctcctgccacgggcctgctcccctccttctctcatggg

SEQ ID NO: 89971 - DNA, 78 bp, Homo sapiens
ttgtcgggatctcagctccctgagccctcctcctgccacgggcctgctcccctccttctctcatgggggtctgctgta

SEQ ID NO: 89972 - DNA, 75 bp, Homo sapiens
agctccctgagccctcctcctgccacgggcctgctcccctccttctctcatgggggtctgctgtagcctcgggaa

SEQ ID NO: 89973 - DNA, 74 bp, Homo sapiens
agccctcctcctgccacgggcctgctcccctccttctctcatgggggtctgctgtagcctcgggaaggaggcag

SEQ ID NO: 89974 - DNA, 74 bp, Homo sapiens
tgccacgggcctgctcccctccttctctcatgggggtctgctgtagcctcgggaaggaggcaggaaacctccaa

SEQ ID NO: 89975 - DNA, 74 bp, Homo sapiens
tgctcccctccttctctcatgggggtctgctgtagcctcgggaaggaggcaggaaacctccaaataaaatgaca

SEQ ID NO: 89976 - DNA, 73 bp, Homo sapiens
cttctctcatgggggtctgctgtagcctcgggaaggaggcaggaaacctccaaataaaatgacaaggcacgat

SEQ ID NO: 89977 - DNA, 72 bp, Homo sapiens
atgggggtctgctgtagcctcgggaaggaggcaggaaacctccaaataaaatgacaaggcacgatttgctcc

SEQ ID NO: 89978 - DNA, 73 bp, Homo sapiens
ggaaggaggcaggaaacctccaaataaaatgacaaggcacgatttgctccccctactcagtaggcattggagc

SEQ ID NO: 89979 - DNA, 71 bp, Homo sapiens
aggaaacctccaaataaaatgacaaggcacgatttgctccccctactcagtaggcattggagcggtgagtt

SEQ ID NO: 89980 - DNA, 75 bp, Homo sapiens
tccaaataaaatgacaaggcacgatttgctccccctactcagtaggcattggagcggtgagtttgcatttccaag

SEQ ID NO: 89981 - DNA, 75 bp, Homo sapiens
aaaatgacaaggcacgatttgctccccctactcagtaggcattggagcggtgagtttgcatttccaaggcacaag

SEQ ID NO: 89982 - DNA, 74 bp, Homo sapiens
cgatttgctccccctactcagtaggcattggagcggtgagtttgcatttccaaggcacaaggttatcctaaata

SEQ ID NO: 89983 - DNA, 74 bp, Homo sapiens
ccctactcagtaggcattggagcggtgagtttgcatttccaaggcacaaggttatcctaaatactagagttgcc

SEQ ID NO: 89984 - DNA, 73 bp, Homo sapiens
agtaggcattggagcggtgagtttgcatttccaaggcacaaggttatcctaaatactagagttgccgggctcc

SEQ ID NO: 89985 - DNA, 71 bp, Homo sapiens
tttccaaggcacaaggttatcctaaatactagagttgccgggctcccagctcagccccaagaattctcccc

SEQ ID NO: 89986 - DNA, 72 bp, Homo sapiens
cctaaatactagagttgccgggctcccagctcagccccaagaattctcccctcctcgcagggagaagccacc

SEQ ID NO: 89987 - DNA, 72 bp, Homo sapiens
agagttgccgggctcccagctcagccccaagaattctcccctcctcgcagggagaagccaccgcctggcccc

SEQ ID NO: 89988 - DNA, 75 bp, Homo sapiens
ccagctcagccccaagaattctcccctcctcgcagggagaagccaccgcctggccccctcatcttagacgcacca

SEQ ID NO: 89989 - DNA, 71 bp, Homo sapiens
cccaagaattctcccctcctcgcagggagaagccaccgcctggccccctcatcttagacgcaccaagtccg

SEQ ID NO: 89990 - DNA, 74 bp, Homo sapiens
ttctcccctcctcgcagggagaagccaccgcctggccccctcatcttagacgcaccaagtccggcgcagaggaa

SEQ ID NO: 89991 - DNA, 73 bp, Homo sapiens
ctcctcgcagggagaagccaccgcctggccccctcatcttagacgcaccaagtccggcgcagaggaagggagg

SEQ ID NO: 89992 - DNA, 72 bp, Homo sapiens
agaagccaccgcctggccccctcatcttagacgcaccaagtccggcgcagaggaagggaggggacacgcgga

SEQ ID NO: 89993 - DNA, 75 bp, Homo sapiens
tggccccctcatcttagacgcaccaagtccggcgcagaggaagggaggggacacgcggagcaggccaggctttca

SEQ ID NO: 89994 - DNA, 74 bp, Homo sapiens
ccctcatcttagacgcaccaagtccggcgcagaggaagggaggggacacgcggagcaggccaggctttcaggag

SEQ ID NO: 89995 - DNA, 73 bp, Homo sapiens
agacgcaccaagtccggcgcagaggaagggaggggacacgcggagcaggccaggctttcaggaggcaccggaa

SEQ ID NO: 89996 - DNA, 73 bp, Homo sapiens
agtccggcgcagaggaagggaggggacacgcggagcaggccaggctttcaggaggcaccggaatctcctagtc

SEQ ID NO: 89997 - DNA, 74 bp, Homo sapiens
aagggaggggacacgcggagcaggccaggctttcaggaggcaccggaatctcctagtcctggctcgcacggctc

SEQ ID NO: 89998 - DNA, 77 bp, Homo sapiens
acacgcggagcaggccaggctttcaggaggcaccggaatctcctagtcctggctcgcacggctcgggcaagcctcga

SEQ ID NO: 89999 - DNA, 77 bp, Homo sapiens
caggccaggctttcaggaggcaccggaatctcctagtcctggctcgcacggctcgggcaagcctcgagatccggcga

SEQ ID NO: 90000 - DNA, 74 bp, Homo sapiens
aggctttcaggaggcaccggaatctcctagtcctggctcgcacggctcgggcaagcctcgagatccggcgaccc

SEQ ID NO: 90001 - DNA, 72 bp, Homo sapiens
aatctcctagtcctggctcgcacggctcgggcaagcctcgagatccggcgaccccaaaccactccctgggtc

SEQ ID NO: 90002 - DNA, 71 bp, Homo sapiens
tcctggctcgcacggctcgggcaagcctcgagatccggcgaccccaaaccactccctgggtccccgccgga

SEQ ID NO: 90003 - DNA, 68 bp, Homo sapiens
acggctcgggcaagcctcgagatccggcgaccccaaaccactccctgggtccccgccggaggctggcc

SEQ ID NO: 90004 - DNA, 67 bp, Homo sapiens
aagcctcgagatccggcgaccccaaaccactccctgggtccccgccggaggctggcccagggcggtc

SEQ ID NO: 90005 - DNA, 67 bp, Homo sapiens
agatccggcgaccccaaaccactccctgggtccccgccggaggctggcccagggcggtcccacagcc

SEQ ID NO: 90006 - DNA, 71 bp, Homo sapiens
caaaccactccctgggtccccgccggaggctggcccagggcggtcccacagccgcgcgcctcacgcgcagt

SEQ ID NO: 90007 - DNA, 73 bp, Homo sapiens
actccctgggtccccgccggaggctggcccagggcggtcccacagccgcgcgcctcacgcgcagttgcccatg

SEQ ID NO: 90008 - DNA, 75 bp, Homo sapiens
cccgccggaggctggcccagggcggtcccacagccgcgcgcctcacgcgcagttgcccatggccttgaccaagga

SEQ ID NO: 90009 - DNA, 80 bp, Homo sapiens
aggctggcccagggcggtcccacagccgcgcgcctcacgcgcagttgcccatggccttgaccaaggagctctctggcagc

SEQ ID NO: 90010 - DNA, 81 bp, Homo sapiens
cggtcccacagccgcgcgcctcacgcgcagttgcccatggccttgaccaaggagctctctggcagctggcggaagatgccc

SEQ ID NO: 90011 - DNA, 83 bp, Homo sapiens
agccgcgcgcctcacgcgcagttgcccatggccttgaccaaggagctctctggcagctggcggaagatgccccgcagcgtgtc

SEQ ID NO: 90012 - DNA, 82 bp, Homo sapiens
cgcctcacgcgcagttgcccatggccttgaccaaggagctctctggcagctggcggaagatgccccgcagcgtgtccagttc

SEQ ID NO: 90013 - DNA, 81 bp, Homo sapiens
atggccttgaccaaggagctctctggcagctggcggaagatgccccgcagcgtgtccagttcgcggctcagctgttccacc

SEQ ID NO: 90014 - DNA, 80 bp, Homo sapiens
ctggcggaagatgccccgcagcgtgtccagttcgcggctcagctgttccacccgcttgcgcaggcggtcattgtcactgg

SEQ ID NO: 90015 - DNA, 81 bp, Homo sapiens
cccgcagcgtgtccagttcgcggctcagctgttccacccgcttgcgcaggcggtcattgtcactggtcagctccagcacct

SEQ ID NO: 90016 - DNA, 85 bp, Homo sapiens
tgtccagttcgcggctcagctgttccacccgcttgcgcaggcggtcattgtcactggtcagctccagcaccttctgctgcgtctc

SEQ ID NO: 90017 - DNA, 85 bp, Homo sapiens
ttgcgcaggcggtcattgtcactggtcagctccagcaccttctgctgcgtctccacgttgcgctgcttggccttgtcgcggctct

SEQ ID NO: 90018 - DNA, 85 bp, Homo sapiens
aggcggtcattgtcactggtcagctccagcaccttctgctgcgtctccacgttgcgctgcttggccttgtcgcggctcttgcgca

SEQ ID NO: 90019 - DNA, 83 bp, Homo sapiens
actggtcagctccagcaccttctgctgcgtctccacgttgcgctgcttggccttgtcgcggctcttgcgcaccgcgatgttgt

SEQ ID NO: 90020 - DNA, 85 bp, Homo sapiens
tccagcaccttctgctgcgtctccacgttgcgctgcttggccttgtcgcggctcttgcgcaccgcgatgttgttgcgctcgcgcc

SEQ ID NO: 90021 - DNA, 83 bp, Homo sapiens
accttctgctgcgtctccacgttgcgctgcttggccttgtcgcggctcttgcgcaccgcgatgttgttgcgctcgcgccgcac

SEQ ID NO: 90022 - DNA, 80 bp, Homo sapiens
tctccacgttgcgctgcttggccttgtcgcggctcttgcgcaccgcgatgttgttgcgctcgcgccgcacccggtactcg

SEQ ID NO: 90023 - DNA, 79 bp, Homo sapiens
cgctgcttggccttgtcgcggctcttgcgcaccgcgatgttgttgcgctcgcgccgcacccggtactcgttgctgttct

SEQ ID NO: 90024 - DNA, 79 bp, Homo sapiens
ttggccttgtcgcggctcttgcgcaccgcgatgttgttgcgctcgcgccgcacccggtactcgttgctgttcttgtcca

SEQ ID NO: 90025 - DNA, 77 bp, Homo sapiens
ggctcttgcgcaccgcgatgttgttgcgctcgcgccgcacccggtactcgttgctgttcttgtccaccgacttcttg

SEQ ID NO: 90026 - DNA, 74 bp, Homo sapiens
accgcgatgttgttgcgctcgcgccgcacccggtactcgttgctgttcttgtccaccgacttcttggccttgcc

SEQ ID NO: 90027 - DNA, 75 bp, Homo sapiens
tcgcgccgcacccggtactcgttgctgttcttgtccaccgacttcttggccttgcccgcgccgctgccgccactc

SEQ ID NO: 90028 - DNA, 73 bp, Homo sapiens
acccggtactcgttgctgttcttgtccaccgacttcttggccttgcccgcgccgctgccgccactcgcgcgga

SEQ ID NO: 90029 - DNA, 75 bp, Homo sapiens
tcgttgctgttcttgtccaccgacttcttggccttgcccgcgccgctgccgccactcgcgcggaggtcggggtgc

SEQ ID NO: 90030 - DNA, 74 bp, Homo sapiens
ttcttgtccaccgacttcttggccttgcccgcgccgctgccgccactcgcgcggaggtcggggtgcgcggcgcc

SEQ ID NO: 90031 - DNA, 74 bp, Homo sapiens
cgacttcttggccttgcccgcgccgctgccgccactcgcgcggaggtcggggtgcgcggcgcccagccccttga

SEQ ID NO: 90032 - DNA, 76 bp, Homo sapiens
ccttgcccgcgccgctgccgccactcgcgcggaggtcggggtgcgcggcgcccagccccttgagcgcgctgccagg

SEQ ID NO: 90033 - DNA, 76 bp, Homo sapiens
ccgctgccgccactcgcgcggaggtcggggtgcgcggcgcccagccccttgagcgcgctgccagggcccggcaggc

SEQ ID NO: 90034 - DNA, 73 bp, Homo sapiens
aggtcggggtgcgcggcgcccagccccttgagcgcgctgccagggcccggcaggccggcggcaccgagcgcgg

SEQ ID NO: 90035 - DNA, 74 bp, Homo sapiens
gggtgcgcggcgcccagccccttgagcgcgctgccagggcccggcaggccggcggcaccgagcgcgggcgcggg

SEQ ID NO: 90036 - DNA, 74 bp, Homo sapiens
agccccttgagcgcgctgccagggcccggcaggccggcggcaccgagcgcgggcgcggggtgcgggctgggcac

SEQ ID NO: 90037 - DNA, 75 bp, Homo sapiens
ttgagcgcgctgccagggcccggcaggccggcggcaccgagcgcgggcgcggggtgcgggctgggcacgggcgtg

SEQ ID NO: 90038 - DNA, 72 bp, Homo sapiens
tgccagggcccggcaggccggcggcaccgagcgcgggcgcggggtgcgggctgggcacgggcgtgggcggcg

SEQ ID NO: 90039 - DNA, 70 bp, Homo sapiens
ccggcaggccggcggcaccgagcgcgggcgcggggtgcgggctgggcacgggcgtgggcggcggcgtggg

SEQ ID NO: 90040 - DNA, 71 bp, Homo sapiens
caccgagcgcgggcgcggggtgcgggctgggcacgggcgtgggcggcggcgtggggtgaccgggctgcagg

SEQ ID NO: 90041 - DNA, 73 bp, Homo sapiens
gggcgcggggtgcgggctgggcacgggcgtgggcggcggcgtggggtgaccgggctgcaggtgcatggtggtc

SEQ ID NO: 90042 - DNA, 79 bp, Homo sapiens
tgcgggctgggcacgggcgtgggcggcggcgtggggtgaccgggctgcaggtgcatggtggtctggccgcagtgcgcga

SEQ ID NO: 90043 - DNA, 81 bp, Homo sapiens
gcacgggcgtgggcggcggcgtggggtgaccgggctgcaggtgcatggtggtctggccgcagtgcgcgatctggaactgca

SEQ ID NO: 90044 - DNA, 80 bp, Homo sapiens
cgtgggcggcggcgtggggtgaccgggctgcaggtgcatggtggtctggccgcagtgcgcgatctggaactgcaggtgcg

SEQ ID NO: 90045 - DNA, 82 bp, Homo sapiens
tgaccgggctgcaggtgcatggtggtctggccgcagtgcgcgatctggaactgcaggtgcggggcggccaggtgcgcgggcg

SEQ ID NO: 90046 - DNA, 79 bp, Homo sapiens
aggtgcatggtggtctggccgcagtgcgcgatctggaactgcaggtgcggggcggccaggtgcgcgggcggcgggtgcg

SEQ ID NO: 90047 - DNA, 78 bp, Homo sapiens
tggtggtctggccgcagtgcgcgatctggaactgcaggtgcggggcggccaggtgcgcgggcggcgggtgcgggtgcg

SEQ ID NO: 90048 - DNA, 75 bp, Homo sapiens
agtgcgcgatctggaactgcaggtgcggggcggccaggtgcgcgggcggcgggtgcgggtgcgggtgcgagggcg

SEQ ID NO: 90049 - DNA, 73 bp, Homo sapiens
atctggaactgcaggtgcggggcggccaggtgcgcgggcggcgggtgcgggtgcgggtgcgagggcggcggcg

SEQ ID NO: 90050 - DNA, 76 bp, Homo sapiens
ggcggcggcggctggtaagggaagaggccggccagcgccagctgcttggcttcatcctcctcgcggggctcctgct

SEQ ID NO: 90051 - DNA, 80 bp, Homo sapiens
gctggtaagggaagaggccggccagcgccagctgcttggcttcatcctcctcgcggggctcctgcttgatcaccagcggc

SEQ ID NO: 90052 - DNA, 81 bp, Homo sapiens
taagggaagaggccggccagcgccagctgcttggcttcatcctcctcgcggggctcctgcttgatcaccagcggccgcagc

SEQ ID NO: 90053 - DNA, 81 bp, Homo sapiens
ggccggccagcgccagctgcttggcttcatcctcctcgcggggctcctgcttgatcaccagcggccgcagcgccggcgccc

SEQ ID NO: 90054 - DNA, 81 bp, Homo sapiens
gctgcttggcttcatcctcctcgcggggctcctgcttgatcaccagcggccgcagcgccggcgccccgacgcgctcgtaca

SEQ ID NO: 90055 - DNA, 78 bp, Homo sapiens
ttggcttcatcctcctcgcggggctcctgcttgatcaccagcggccgcagcgccggcgccccgacgcgctcgtacagg

SEQ ID NO: 90056 - DNA, 77 bp, Homo sapiens
cctcctcgcggggctcctgcttgatcaccagcggccgcagcgccggcgccccgacgcgctcgtacaggggctccagc

SEQ ID NO: 90057 - DNA, 78 bp, Homo sapiens
ctcctgcttgatcaccagcggccgcagcgccggcgccccgacgcgctcgtacaggggctccagcctgccgtccaggta

SEQ ID NO: 90058 - DNA, 77 bp, Homo sapiens
ttgatcaccagcggccgcagcgccggcgccccgacgcgctcgtacaggggctccagcctgccgtccaggtagccggc

SEQ ID NO: 90059 - DNA, 75 bp, Homo sapiens
cggccgcagcgccggcgccccgacgcgctcgtacaggggctccagcctgccgtccaggtagccggcggccgcgca

SEQ ID NO: 90060 - DNA, 72 bp, Homo sapiens
ccgacgcgctcgtacaggggctccagcctgccgtccaggtagccggcggccgcgcagccgtagccgggcggg

SEQ ID NO: 90061 - DNA, 73 bp, Homo sapiens
tacaggggctccagcctgccgtccaggtagccggcggccgcgcagccgtagccgggcgggggcccgtgcgctc

SEQ ID NO: 90062 - DNA, 72 bp, Homo sapiens
gcctgccgtccaggtagccggcggccgcgcagccgtagccgggcgggggcccgtgcgctcccccgggcatga

SEQ ID NO: 90063 - DNA, 69 bp, Homo sapiens
ccgtccaggtagccggcggccgcgcagccgtagccgggcgggggcccgtgcgctcccccgggcatgacg

SEQ ID NO: 90064 - DNA, 69 bp, Homo sapiens
agccggcggccgcgcagccgtagccgggcgggggcccgtgcgctcccccgggcatgacggcgccgccgg

SEQ ID NO: 90065 - DNA, 68 bp, Homo sapiens
cgcgcagccgtagccgggcgggggcccgtgcgctcccccgggcatgacggcgccgccggggcccgcgg

SEQ ID NO: 90066 - DNA, 66 bp, Homo sapiens
gggcgggggcccgtgcgctcccccgggcatgacggcgccgccggggcccgcgggcgcgcccgggta

SEQ ID NO: 90067 - DNA, 68 bp, Homo sapiens
cccgtgcgctcccccgggcatgacggcgccgccggggcccgcgggcgcgcccgggtagtcaaagtcgc

SEQ ID NO: 90068 - DNA, 67 bp, Homo sapiens
ccccgggcatgacggcgccgccggggcccgcgggcgcgcccgggtagtcaaagtcgccgccgccgcc

SEQ ID NO: 90069 - DNA, 73 bp, Homo sapiens
cgccgccgccgcccgtggggcccacggccgccttggccttctcctgctgccggctgtgctggaacaggtcggc

SEQ ID NO: 90070 - DNA, 73 bp, Homo sapiens
gcccgtggggcccacggccgccttggccttctcctgctgccggctgtgctggaacaggtcggccaggaactcg

SEQ ID NO: 90071 - DNA, 74 bp, Homo sapiens
cccacggccgccttggccttctcctgctgccggctgtgctggaacaggtcggccaggaactcgtcgttgaaggc

SEQ ID NO: 90072 - DNA, 73 bp, Homo sapiens
ccttggccttctcctgctgccggctgtgctggaacaggtcggccaggaactcgtcgttgaaggcggccgggtc

SEQ ID NO: 90073 - DNA, 75 bp, Homo sapiens
cttctcctgctgccggctgtgctggaacaggtcggccaggaactcgtcgttgaaggcggccgggtcgatgtaggc

SEQ ID NO: 90074 - DNA, 77 bp, Homo sapiens
cggctgtgctggaacaggtcggccaggaactcgtcgttgaaggcggccgggtcgatgtaggcgctgatgtcgatgga

SEQ ID NO: 90075 - DNA, 75 bp, Homo sapiens
tggaacaggtcggccaggaactcgtcgttgaaggcggccgggtcgatgtaggcgctgatgtcgatggacgtctcg

SEQ ID NO: 90076 - DNA, 77 bp, Homo sapiens
aggtcggccaggaactcgtcgttgaaggcggccgggtcgatgtaggcgctgatgtcgatggacgtctcgtgctcgca

SEQ ID NO: 90077 - DNA, 80 bp, Homo sapiens
ggaactcgtcgttgaaggcggccgggtcgatgtaggcgctgatgtcgatggacgtctcgtgctcgcagatgccgcccagc

SEQ ID NO: 90078 - DNA, 79 bp, Homo sapiens
gttgaaggcggccgggtcgatgtaggcgctgatgtcgatggacgtctcgtgctcgcagatgccgcccagcggctccggg

SEQ ID NO: 90079 - DNA, 79 bp, Homo sapiens
ccgggtcgatgtaggcgctgatgtcgatggacgtctcgtgctcgcagatgccgcccagcggctccggggcggcaggtgg

SEQ ID NO: 90080 - DNA, 80 bp, Homo sapiens
tgtaggcgctgatgtcgatggacgtctcgtgctcgcagatgccgcccagcggctccggggcggcaggtggggcgggaggc

SEQ ID NO: 90081 - DNA, 77 bp, Homo sapiens
atgtcgatggacgtctcgtgctcgcagatgccgcccagcggctccggggcggcaggtggggcgggaggctgcgcggg

SEQ ID NO: 90082 - DNA, 75 bp, Homo sapiens
acgtctcgtgctcgcagatgccgcccagcggctccggggcggcaggtggggcgggaggctgcgcggggcccgcgc

SEQ ID NO: 90083 - DNA, 71 bp, Homo sapiens
ctcgcagatgccgcccagcggctccggggcggcaggtggggcgggaggctgcgcggggcccgcgccccggg

SEQ ID NO: 90084 - DNA, 67 bp, Homo sapiens
ccagcggctccggggcggcaggtggggcgggaggctgcgcggggcccgcgccccggggaaagccgaa

SEQ ID NO: 90085 - DNA, 70 bp, Homo sapiens
aggtggggcgggaggctgcgcggggcccgcgccccggggaaagccgaaggcggcgctgctgggcgcgtgc

SEQ ID NO: 90086 - DNA, 69 bp, Homo sapiens
ggcgggaggctgcgcggggcccgcgccccggggaaagccgaaggcggcgctgctgggcgcgtgcggggg

SEQ ID NO: 90087 - DNA, 74 bp, Homo sapiens
ggggcccgcgccccggggaaagccgaaggcggcgctgctgggcgcgtgcggggggctctgcaggtggctgctca

SEQ ID NO: 90088 - DNA, 74 bp, Homo sapiens
ccgcgccccggggaaagccgaaggcggcgctgctgggcgcgtgcggggggctctgcaggtggctgctcatcggg

SEQ ID NO: 90089 - DNA, 76 bp, Homo sapiens
gggaaagccgaaggcggcgctgctgggcgcgtgcggggggctctgcaggtggctgctcatcgggggccgcggctcc

SEQ ID NO: 90090 - DNA, 77 bp, Homo sapiens
aaggcggcgctgctgggcgcgtgcggggggctctgcaggtggctgctcatcgggggccgcggctccgcctcgtagaa

SEQ ID NO: 90091 - DNA, 76 bp, Homo sapiens
ggcgcgtgcggggggctctgcaggtggctgctcatcgggggccgcggctccgcctcgtagaagtcggccgactcca

SEQ ID NO: 90092 - DNA, 75 bp, Homo sapiens
gtgcggggggctctgcaggtggctgctcatcgggggccgcggctccgcctcgtagaagtcggccgactccatggg

SEQ ID NO: 90093 - DNA, 73 bp, Homo sapiens
caggtggctgctcatcgggggccgcggctccgcctcgtagaagtcggccgactccatgggggagttagagttc

SEQ ID NO: 90094 - DNA, 73 bp, Homo sapiens
tgctcatcgggggccgcggctccgcctcgtagaagtcggccgactccatgggggagttagagttctcccggca

SEQ ID NO: 90095 - DNA, 73 bp, Homo sapiens
gccgcggctccgcctcgtagaagtcggccgactccatgggggagttagagttctcccggcatggcgagcctcg

SEQ ID NO: 90096 - DNA, 73 bp, Homo sapiens
tccgcctcgtagaagtcggccgactccatgggggagttagagttctcccggcatggcgagcctcggcggcctc

SEQ ID NO: 90097 - DNA, 74 bp, Homo sapiens
cgtagaagtcggccgactccatgggggagttagagttctcccggcatggcgagcctcggcggcctccagcctgc

SEQ ID NO: 90098 - DNA, 73 bp, Homo sapiens
gggagttagagttctcccggcatggcgagcctcggcggcctccagcctgcgcggggcgtcgccgccgcccacc

SEQ ID NO: 90099 - DNA, 72 bp, Homo sapiens
agcctcggcggcctccagcctgcgcggggcgtcgccgccgcccacccggagaccctgctcgcccgcgcccgc

SEQ ID NO: 90100 - DNA, 72 bp, Homo sapiens
tccagcctgcgcggggcgtcgccgccgcccacccggagaccctgctcgcccgcgcccgcgcacctccgggtc

SEQ ID NO: 90101 - DNA, 72 bp, Homo sapiens
tgcgcggggcgtcgccgccgcccacccggagaccctgctcgcccgcgcccgcgcacctccgggtcgcgaatg

SEQ ID NO: 90102 - DNA, 67 bp, Homo sapiens
cgcacgggccgcccctccccccgcctccccggcccctctcacggtgccaagatggcggcggcggcgg

SEQ ID NO: 90103 - DNA, 69 bp, Homo sapiens
ctccccccgcctccccggcccctctcacggtgccaagatggcggcggcggcgggcggcggcagttgccc

SEQ ID NO: 90104 - DNA, 71 bp, Homo sapiens
ctccccggcccctctcacggtgccaagatggcggcggcggcgggcggcggcagttgccccgggcctggctc

SEQ ID NO: 90105 - DNA, 71 bp, Homo sapiens
cccctctcacggtgccaagatggcggcggcggcgggcggcggcagttgccccgggcctggctccgcgcggg

SEQ ID NO: 90106 - DNA, 71 bp, Homo sapiens
acggtgccaagatggcggcggcggcgggcggcggcagttgccccgggcctggctccgcgcggggccgcttc

SEQ ID NO: 90107 - DNA, 67 bp, Homo sapiens
cggcggcggcgggcggcggcagttgccccgggcctggctccgcgcggggccgcttcccgggccggcc

SEQ ID NO: 90108 - DNA, 66 bp, Homo sapiens
cggcgggcggcggcagttgccccgggcctggctccgcgcggggccgcttcccgggccggccgcggg

SEQ ID NO: 90109 - DNA, 66 bp, Homo sapiens
cggcagttgccccgggcctggctccgcgcggggccgcttcccgggccggccgcggggcgccggcgg

SEQ ID NO: 90110 - DNA, 63 bp, Homo sapiens
cccgggcctggctccgcgcggggccgcttcccgggccggccgcggggcgccggcgggggcggg

SEQ ID NO: 90111 - DNA, 64 bp, Homo sapiens
tccgcgcggggccgcttcccgggccggccgcggggcgccggcgggggcgggggccgcggcggac

SEQ ID NO: 90112 - DNA, 62 bp, Homo sapiens
cgcttcccgggccggccgcggggcgccggcgggggcgggggccgcggcggacggggcaacgg

SEQ ID NO: 90113 - DNA, 63 bp, Homo sapiens
gccggccgcggggcgccggcgggggcgggggccgcggcggacggggcaacggggccgaaagag

SEQ ID NO: 90114 - DNA, 65 bp, Homo sapiens
gggcgccggcgggggcgggggccgcggcggacggggcaacggggccgaaagagtgcgggtagctc

SEQ ID NO: 90115 - DNA, 67 bp, Homo sapiens
gggggcgggggccgcggcggacggggcaacggggccgaaagagtgcgggtagctctgcggcgcggcg

SEQ ID NO: 90116 - DNA, 70 bp, Homo sapiens
gccgcggcggacggggcaacggggccgaaagagtgcgggtagctctgcggcgcggcggtggcgcgacggg

SEQ ID NO: 90117 - DNA, 68 bp, Homo sapiens
cggacggggcaacggggccgaaagagtgcgggtagctctgcggcgcggcggtggcgcgacggggccgg

SEQ ID NO: 90118 - DNA, 70 bp, Homo sapiens
aacggggccgaaagagtgcgggtagctctgcggcgcggcggtggcgcgacggggccgggcggagccgagc

SEQ ID NO: 90119 - DNA, 70 bp, Homo sapiens
aaagagtgcgggtagctctgcggcgcggcggtggcgcgacggggccgggcggagccgagcccggggagga

SEQ ID NO: 90120 - DNA, 72 bp, Homo sapiens
gtagctctgcggcgcggcggtggcgcgacggggccgggcggagccgagcccggggaggacacggccctgctc

SEQ ID NO: 90121 - DNA, 69 bp, Homo sapiens
cgcggcggtggcgcgacggggccgggcggagccgagcccggggaggacacggccctgctccgtttgctg

SEQ ID NO: 90122 - DNA, 69 bp, Homo sapiens
ggtggcgcgacggggccgggcggagccgagcccggggaggacacggccctgctccgtttgctggggctc

SEQ ID NO: 90123 - DNA, 66 bp, Homo sapiens
acggggccgggcggagccgagcccggggaggacacggccctgctccgtttgctggggctccgccgg

SEQ ID NO: 90124 - DNA, 70 bp, Homo sapiens
agccgagcccggggaggacacggccctgctccgtttgctggggctccgccggggcctgcgccggctccgc

SEQ ID NO: 90125 - DNA, 71 bp, Homo sapiens
gggaggacacggccctgctccgtttgctggggctccgccggggcctgcgccggctccgccgcctgtgggcc

SEQ ID NO: 90126 - DNA, 70 bp, Homo sapiens
acacggccctgctccgtttgctggggctccgccggggcctgcgccggctccgccgcctgtgggccggccc

SEQ ID NO: 90127 - DNA, 72 bp, Homo sapiens
tgctccgtttgctggggctccgccggggcctgcgccggctccgccgcctgtgggccggcccgcgggtccagc

SEQ ID NO: 90128 - DNA, 67 bp, Homo sapiens
gggctccgccggggcctgcgccggctccgccgcctgtgggccggcccgcgggtccagcggggccggg

SEQ ID NO: 90129 - DNA, 66 bp, Homo sapiens
gggcctgcgccggctccgccgcctgtgggccggcccgcgggtccagcggggccggggacggggtcg

SEQ ID NO: 90130 - DNA, 63 bp, Homo sapiens
ccggctccgccgcctgtgggccggcccgcgggtccagcggggccggggacggggtcggggccg

SEQ ID NO: 90131 - DNA, 63 bp, Homo sapiens
ccgccgcctgtgggccggcccgcgggtccagcggggccggggacggggtcggggccggggctg

SEQ ID NO: 90132 - DNA, 62 bp, Homo sapiens
cggcccgcgggtccagcggggccggggacggggtcggggccggggctggggcccgagtcgag

SEQ ID NO: 90133 - DNA, 66 bp, Homo sapiens
gtccagcggggccggggacggggtcggggccggggctggggcccgagtcgaggctgcgtgccggag

SEQ ID NO: 90134 - DNA, 70 bp, Homo sapiens
gccggggacggggtcggggccggggctggggcccgagtcgaggctgcgtgccggaggaggagagcagtga

SEQ ID NO: 90135 - DNA, 70 bp, Homo sapiens
gggtcggggccggggctggggcccgagtcgaggctgcgtgccggaggaggagagcagtgacggggaatcc

SEQ ID NO: 90136 - DNA, 73 bp, Homo sapiens
cggggctggggcccgagtcgaggctgcgtgccggaggaggagagcagtgacggggaatccgacgaggaggtga

SEQ ID NO: 90137 - DNA, 74 bp, Homo sapiens
ggcccgagtcgaggctgcgtgccggaggaggagagcagtgacggggaatccgacgaggaggtgaggcggttgga

SEQ ID NO: 90138 - DNA, 69 bp, Homo sapiens
ccggaggaggagagcagtgacggggaatccgacgaggaggtgaggcggttggaggcgtccccggcgccg

SEQ ID NO: 90139 - DNA, 70 bp, Homo sapiens
atggaacgagggctttggcactgactgctgtttctcccctccaccccggtcccctaaatcaggagtttca

SEQ ID NO: 90140 - DNA, 68 bp, Homo sapiens
ctttggcactgactgctgtttctcccctccaccccggtcccctaaatcaggagtttcagggttttcat

SEQ ID NO: 90141 - DNA, 70 bp, Homo sapiens
actgactgctgtttctcccctccaccccggtcccctaaatcaggagtttcagggttttcattcagatgaa

SEQ ID NO: 90142 - DNA, 70 bp, Homo sapiens
tgtttctcccctccaccccggtcccctaaatcaggagtttcagggttttcattcagatgaagatgtggcc

SEQ ID NO: 90143 - DNA, 69 bp, Homo sapiens
cctccaccccggtcccctaaatcaggagtttcagggttttcattcagatgaagatgtggcccccagttc

SEQ ID NO: 90144 - DNA, 76 bp, Homo sapiens
cctaaatcaggagtttcagggttttcattcagatgaagatgtggcccccagttccctgcgctctgcgctccgatcc

SEQ ID NO: 90145 - DNA, 78 bp, Homo sapiens
atcaggagtttcagggttttcattcagatgaagatgtggcccccagttccctgcgctctgcgctccgatcccagcgag

SEQ ID NO: 90146 - DNA, 77 bp, Homo sapiens
agggttttcattcagatgaagatgtggcccccagttccctgcgctctgcgctccgatcccagcgaggtgagtgacgg

SEQ ID NO: 90147 - DNA, 78 bp, Homo sapiens
attcagatgaagatgtggcccccagttccctgcgctctgcgctccgatcccagcgaggtgagtgacgggggaactcca

SEQ ID NO: 90148 - DNA, 74 bp, Homo sapiens
atgtggcccccagttccctgcgctctgcgctccgatcccagcgaggtgagtgacgggggaactccacctcttta

SEQ ID NO: 90149 - DNA, 75 bp, Homo sapiens
gttccctgcgctctgcgctccgatcccagcgaggtgagtgacgggggaactccacctctttagcgtcacaggaat

SEQ ID NO: 90150 - DNA, 76 bp, Homo sapiens
ctgcgctctgcgctccgatcccagcgaggtgagtgacgggggaactccacctctttagcgtcacaggaatttatcc

SEQ ID NO: 90151 - DNA, 72 bp, Homo sapiens
ctgtgtgtagggctggcttgatccatctccccacaactattctccttttaggtcgagcgccccgaggtcggg

SEQ ID NO: 90152 - DNA, 74 bp, Homo sapiens
tggcttgatccatctccccacaactattctccttttaggtcgagcgccccgaggtcggggtcgcaagcataaga

SEQ ID NO: 90153 - DNA, 69 bp, Homo sapiens
atctccccacaactattctccttttaggtcgagcgccccgaggtcggggtcgcaagcataagacgaccc

SEQ ID NO: 90154 - DNA, 67 bp, Homo sapiens
actattctccttttaggtcgagcgccccgaggtcggggtcgcaagcataagacgaccccccttcctc

SEQ ID NO: 90155 - DNA, 68 bp, Homo sapiens
tctccttttaggtcgagcgccccgaggtcggggtcgcaagcataagacgaccccccttcctcctcctc

SEQ ID NO: 90156 - DNA, 74 bp, Homo sapiens
tcgagcgccccgaggtcggggtcgcaagcataagacgaccccccttcctcctcctcgcctagcagatgtggctc

SEQ ID NO: 90157 - DNA, 71 bp, Homo sapiens
cccgaggtcggggtcgcaagcataagacgaccccccttcctcctcctcgcctagcagatgtggctcctacc

SEQ ID NO: 90158 - DNA, 71 bp, Homo sapiens
gggtcgcaagcataagacgaccccccttcctcctcctcgcctagcagatgtggctcctacccccccaaaga

SEQ ID NO: 90159 - DNA, 68 bp, Homo sapiens
ataagacgaccccccttcctcctcctcgcctagcagatgtggctcctacccccccaaagacccctgcc

SEQ ID NO: 90160 - DNA, 66 bp, Homo sapiens
cccttcctcctcctcgcctagcagatgtggctcctacccccccaaagacccctgcccggaaacggg

SEQ ID NO: 90161 - DNA, 68 bp, Homo sapiens
tcctcctcgcctagcagatgtggctcctacccccccaaagacccctgcccggaaacggggtgaggaag

SEQ ID NO: 90162 - DNA, 68 bp, Homo sapiens
tggctcctacccccccaaagacccctgcccggaaacggggtgaggaaggcacagaacggatggtgcag

SEQ ID NO: 90163 - DNA, 72 bp, Homo sapiens
caaagacccctgcccggaaacggggtgaggaaggcacagaacggatggtgcaggcactgactgaacttctcc

SEQ ID NO: 90164 - DNA, 73 bp, Homo sapiens
ctgcccggaaacggggtgaggaaggcacagaacggatggtgcaggcactgactgaacttctccggcgggccca

SEQ ID NO: 90165 - DNA, 72 bp, Homo sapiens
aaacggggtgaggaaggcacagaacggatggtgcaggcactgactgaacttctccggcgggcccaggcaccc

SEQ ID NO: 90166 - DNA, 73 bp, Homo sapiens
aggaaggcacagaacggatggtgcaggcactgactgaacttctccggcgggcccaggcaccccaagcaccccg

SEQ ID NO: 90167 - DNA, 72 bp, Homo sapiens
acagaacggatggtgcaggcactgactgaacttctccggcgggcccaggcaccccaagcaccccggagccgg

SEQ ID NO: 90168 - DNA, 74 bp, Homo sapiens
caggcactgactgaacttctccggcgggcccaggcaccccaagcaccccggagccgggcatgtgagccctccac

SEQ ID NO: 90169 - DNA, 71 bp, Homo sapiens
actgactgaacttctccggcgggcccaggcaccccaagcaccccggagccgggcatgtgagccctccaccc

SEQ ID NO: 90170 - DNA, 68 bp, Homo sapiens
cttctccggcgggcccaggcaccccaagcaccccggagccgggcatgtgagccctccaccccccggcg

SEQ ID NO: 90171 - DNA, 68 bp, Homo sapiens
caggcaccccaagcaccccggagccgggcatgtgagccctccaccccccggcggtctcggggacggcc

SEQ ID NO: 90172 - DNA, 66 bp, Homo sapiens
aagcaccccggagccgggcatgtgagccctccaccccccggcggtctcggggacggcccccaggac

SEQ ID NO: 90173 - DNA, 68 bp, Homo sapiens
cccggagccgggcatgtgagccctccaccccccggcggtctcggggacggcccccaggacggccagca

SEQ ID NO: 90174 - DNA, 69 bp, Homo sapiens
atgtgagccctccaccccccggcggtctcggggacggcccccaggacggccagcaggcccctgcaggag

SEQ ID NO: 90175 - DNA, 68 bp, Homo sapiens
ccctccaccccccggcggtctcggggacggcccccaggacggccagcaggcccctgcaggaggaagca

SEQ ID NO: 90176 - DNA, 76 bp, Homo sapiens
gcggtctcggggacggcccccaggacggccagcaggcccctgcaggaggaagcagcaagcagtagtggtggcagaa

SEQ ID NO: 90177 - DNA, 81 bp, Homo sapiens
ggacggcccccaggacggccagcaggcccctgcaggaggaagcagcaagcagtagtggtggcagaagcagctgtgacaatc

SEQ ID NO: 90178 - DNA, 81 bp, Homo sapiens
cggccagcaggcccctgcaggaggaagcagcaagcagtagtggtggcagaagcagctgtgacaatccccaaacctgagccc

SEQ ID NO: 90179 - DNA, 80 bp, Homo sapiens
tgcaggaggaagcagcaagcagtagtggtggcagaagcagctgtgacaatccccaaacctgagcccccacctcctgtggt

SEQ ID NO: 90180 - DNA, 79 bp, Homo sapiens
aagcagcaagcagtagtggtggcagaagcagctgtgacaatccccaaacctgagcccccacctcctgtggttccagtga

SEQ ID NO: 90181 - DNA, 77 bp, Homo sapiens
agtagtggtggcagaagcagctgtgacaatccccaaacctgagcccccacctcctgtggttccagtgaaacatcaga

SEQ ID NO: 90182 - DNA, 80 bp, Homo sapiens
gcagaagcagctgtgacaatccccaaacctgagcccccacctcctgtggttccagtgaaacatcagactggcagctggaa

SEQ ID NO: 90183 - DNA, 78 bp, Homo sapiens
agctgtgacaatccccaaacctgagcccccacctcctgtggttccagtgaaacatcagactggcagctggaaatgcaa

SEQ ID NO: 90184 - DNA, 75 bp, Homo sapiens
acaatccccaaacctgagcccccacctcctgtggttccagtgaaacatcagactggcagctggaaatgcaaggag

SEQ ID NO: 90185 - DNA, 76 bp, Homo sapiens
tgagcccccacctcctgtggttccagtgaaacatcagactggcagctggaaatgcaaggaggggcccggtccagga

SEQ ID NO: 90186 - DNA, 74 bp, Homo sapiens
acctcctgtggttccagtgaaacatcagactggcagctggaaatgcaaggaggggcccggtccaggacctggga

SEQ ID NO: 90187 - DNA, 73 bp, Homo sapiens
gtggttccagtgaaacatcagactggcagctggaaatgcaaggaggggcccggtccaggacctgggaccccca

SEQ ID NO: 90188 - DNA, 72 bp, Homo sapiens
aaacatcagactggcagctggaaatgcaaggaggggcccggtccaggacctgggacccccaggcgtggagga

SEQ ID NO: 90189 - DNA, 72 bp, Homo sapiens
gcagctggaaatgcaaggaggggcccggtccaggacctgggacccccaggcgtggaggacagtcaagccgtg

SEQ ID NO: 90190 - DNA, 69 bp, Homo sapiens
aaatgcaaggaggggcccggtccaggacctgggacccccaggcgtggaggacagtcaagccgtggaggc

SEQ ID NO: 90191 - DNA, 69 bp, Homo sapiens
gggcccggtccaggacctgggacccccaggcgtggaggacagtcaagccgtggaggccgtggaggcagg

SEQ ID NO: 90192 - DNA, 70 bp, Homo sapiens
cggtccaggacctgggacccccaggcgtggaggacagtcaagccgtggaggccgtggaggcaggggccgc

SEQ ID NO: 90193 - DNA, 71 bp, Homo sapiens
tgggacccccaggcgtggaggacagtcaagccgtggaggccgtggaggcaggggccgcggccgaggtggtg

SEQ ID NO: 90194 - DNA, 70 bp, Homo sapiens
cgtggaggacagtcaagccgtggaggccgtggaggcaggggccgcggccgaggtggtgggctcccctttg

SEQ ID NO: 90195 - DNA, 70 bp, Homo sapiens
cgtggaggccgtggaggcaggggccgcggccgaggtggtgggctcccctttgtgatcaagtttgtttcaa

SEQ ID NO: 90196 - DNA, 69 bp, Homo sapiens
tggaggcaggggccgcggccgaggtggtgggctcccctttgtgatcaagtttgtttcaagggccaaaaa

SEQ ID NO: 90197 - DNA, 66 bp, Homo sapiens
gggccgcggccgaggtggtgggctcccctttgtgatcaagtttgtttcaagggccaaaaaagtaaa

SEQ ID NO: 90198 - DNA, 67 bp, Homo sapiens
aggtggtgggctcccctttgtgatcaagtttgtttcaagggccaaaaaagtaaagatgggacaattg

SEQ ID NO: 90199 - DNA, 67 bp, Homo sapiens
ctcccctttgtgatcaagtttgtttcaagggccaaaaaagtaaagatgggacaattgtccttgggac

SEQ ID NO: 90200 - DNA, 70 bp, Homo sapiens
tttgtgatcaagtttgtttcaagggccaaaaaagtaaagatgggacaattgtccttgggactcgaatcag

SEQ ID NO: 90201 - DNA, 67 bp, Homo sapiens
aagtttgtttcaagggccaaaaaagtaaagatgggacaattgtccttgggactcgaatcaggtcaag

SEQ ID NO: 90202 - DNA, 70 bp, Homo sapiens
aaaagtaaagatgggacaattgtccttgggactcgaatcaggtcaaggtcaaggtcaacatgaggaaagt

SEQ ID NO: 90203 - DNA, 74 bp, Homo sapiens
atgggacaattgtccttgggactcgaatcaggtcaaggtcaaggtcaacatgaggaaagttggcaggatgtccc

SEQ ID NO: 90204 - DNA, 73 bp, Homo sapiens
ttgggactcgaatcaggtcaaggtcaaggtcaacatgaggaaagttggcaggatgtcccccaaagaagagttg

SEQ ID NO: 90205 - DNA, 74 bp, Homo sapiens
actcgaatcaggtcaaggtcaaggtcaacatgaggaaagttggcaggatgtcccccaaagaagagttggatctg

SEQ ID NO: 90206 - DNA, 72 bp, Homo sapiens
aaggtcaaggtcaacatgaggaaagttggcaggatgtcccccaaagaagagttggatctggacagggaggga

SEQ ID NO: 90207 - DNA, 71 bp, Homo sapiens
aaggtcaacatgaggaaagttggcaggatgtcccccaaagaagagttggatctggacagggagggagccct

SEQ ID NO: 90208 - DNA, 70 bp, Homo sapiens
aggaaagttggcaggatgtcccccaaagaagagttggatctggacagggagggagcccttgctggaaaaa

SEQ ID NO: 90209 - DNA, 75 bp, Homo sapiens
caaagaagagttggatctggacagggagggagcccttgctggaaaaagcaggaacagaagctggatgacgaggaa

SEQ ID NO: 90210 - DNA, 75 bp, Homo sapiens
aagagttggatctggacagggagggagcccttgctggaaaaagcaggaacagaagctggatgacgaggaagaaga

SEQ ID NO: 90211 - DNA, 75 bp, Homo sapiens
tctggacagggagggagcccttgctggaaaaagcaggaacagaagctggatgacgaggaagaagagaagaaagaa

SEQ ID NO: 90212 - DNA, 77 bp, Homo sapiens
gaagaagaaaaagacaaggagggagaagagaaggaagaaagagctgtagctgaggagatgatgccagctgcggaaaa

SEQ ID NO: 90213 - DNA, 76 bp, Homo sapiens
aaaaagacaaggagggagaagagaaggaagaaagagctgtagctgaggagatgatgccagctgcggaaaaggaaga

SEQ ID NO: 90214 - DNA, 80 bp, Homo sapiens
aaggaagaaagagctgtagctgaggagatgatgccagctgcggaaaaggaagaggcaaagctgccaccaccgcctctgac

SEQ ID NO: 90215 - DNA, 82 bp, Homo sapiens
agaaagagctgtagctgaggagatgatgccagctgcggaaaaggaagaggcaaagctgccaccaccgcctctgactcctcca

SEQ ID NO: 90216 - DNA, 81 bp, Homo sapiens
tagctgaggagatgatgccagctgcggaaaaggaagaggcaaagctgccaccaccgcctctgactcctccagccccttcac

SEQ ID NO: 90217 - DNA, 78 bp, Homo sapiens
agatgatgccagctgcggaaaaggaagaggcaaagctgccaccaccgcctctgactcctccagccccttcacctcctc

SEQ ID NO: 90218 - DNA, 73 bp, Homo sapiens
agctgcggaaaaggaagaggcaaagctgccaccaccgcctctgactcctccagccccttcacctcctccaccc

SEQ ID NO: 90219 - DNA, 71 bp, Homo sapiens
aaggaagaggcaaagctgccaccaccgcctctgactcctccagccccttcacctcctccacccctcccacc

SEQ ID NO: 90220 - DNA, 70 bp, Homo sapiens
aaagctgccaccaccgcctctgactcctccagccccttcacctcctccacccctcccacccccttcgaca

SEQ ID NO: 90221 - DNA, 70 bp, Homo sapiens
accaccgcctctgactcctccagccccttcacctcctccacccctcccacccccttcgacatctcctcca

SEQ ID NO: 90222 - DNA, 69 bp, Homo sapiens
ctgactcctccagccccttcacctcctccacccctcccacccccttcgacatctcctccacccccactc

SEQ ID NO: 90223 - DNA, 69 bp, Homo sapiens
ccttcacctcctccacccctcccacccccttcgacatctcctccacccccactctgccctccaccacca

SEQ ID NO: 90224 - DNA, 67 bp, Homo sapiens
acctcctccacccctcccacccccttcgacatctcctccacccccactctgccctccaccaccaccc

SEQ ID NO: 90225 - DNA, 69 bp, Homo sapiens
ctcccacccccttcgacatctcctccacccccactctgccctccaccaccacccccagtgtccccacca

SEQ ID NO: 90226 - DNA, 71 bp, Homo sapiens
ccttcgacatctcctccacccccactctgccctccaccaccacccccagtgtccccaccacctctaccatc

SEQ ID NO: 90227 - DNA, 70 bp, Homo sapiens
actctgccctccaccaccacccccagtgtccccaccacctctaccatcccctccaccgcctcctgcccaa

SEQ ID NO: 90228 - DNA, 72 bp, Homo sapiens
tccaccaccacccccagtgtccccaccacctctaccatcccctccaccgcctcctgcccaagaggagcagga

SEQ ID NO: 90229 - DNA, 71 bp, Homo sapiens
cccaccacctctaccatcccctccaccgcctcctgcccaagaggagcaggaggaatcccctcctcctgtgg

SEQ ID NO: 90230 - DNA, 72 bp, Homo sapiens
acctctaccatcccctccaccgcctcctgcccaagaggagcaggaggaatcccctcctcctgtggtcccagc

SEQ ID NO: 90231 - DNA, 74 bp, Homo sapiens
gtcccagctacgtgctccaggaagaggggccggcctcccctgactcccagccagcgggcggagcgggaagctgc

SEQ ID NO: 90232 - DNA, 73 bp, Homo sapiens
agctacgtgctccaggaagaggggccggcctcccctgactcccagccagcgggcggagcgggaagctgctcgg

SEQ ID NO: 90233 - DNA, 72 bp, Homo sapiens
aggaagaggggccggcctcccctgactcccagccagcgggcggagcgggaagctgctcgggcagggccagag

SEQ ID NO: 90234 - DNA, 74 bp, Homo sapiens
ccggcctcccctgactcccagccagcgggcggagcgggaagctgctcgggcagggccagagggcacctctcctc

SEQ ID NO: 90235 - DNA, 74 bp, Homo sapiens
agccagcgggcggagcgggaagctgctcgggcagggccagagggcacctctcctcccactccaacccccagcac

SEQ ID NO: 90236 - DNA, 72 bp, Homo sapiens
aagctgctcgggcagggccagagggcacctctcctcccactccaacccccagcaccgccacgggaggccctc

SEQ ID NO: 90237 - DNA, 68 bp, Homo sapiens
ctctcctcccactccaacccccagcaccgccacgggaggccctccggaagacagtcccaccgtggccc

SEQ ID NO: 90238 - DNA, 66 bp, Homo sapiens
aacccccagcaccgccacgggaggccctccggaagacagtcccaccgtggcccccaaaagcaccac

SEQ ID NO: 90239 - DNA, 69 bp, Homo sapiens
ctccggaagacagtcccaccgtggcccccaaaagcaccaccttcctgaagaatatccggcagtttatta

SEQ ID NO: 90240 - DNA, 72 bp, Homo sapiens
cccccaaaagcaccaccttcctgaagaatatccggcagtttattatgcctgtggtgagtgcccgctcctccc

SEQ ID NO: 90241 - DNA, 76 bp, Homo sapiens
aaagcaccaccttcctgaagaatatccggcagtttattatgcctgtggtgagtgcccgctcctcccgtgtcatcaa

SEQ ID NO: 90242 - DNA, 76 bp, Homo sapiens
ctgaagaatatccggcagtttattatgcctgtggtgagtgcccgctcctcccgtgtcatcaagacaccccggcgat

SEQ ID NO: 90243 - DNA, 75 bp, Homo sapiens
aatatccggcagtttattatgcctgtggtgagtgcccgctcctcccgtgtcatcaagacaccccggcgatttatg

SEQ ID NO: 90244 - DNA, 75 bp, Homo sapiens
agtttattatgcctgtggtgagtgcccgctcctcccgtgtcatcaagacaccccggcgatttatggatgaagacc

SEQ ID NO: 90245 - DNA, 72 bp, Homo sapiens
tgtggtgagtgcccgctcctcccgtgtcatcaagacaccccggcgatttatggatgaagacccccccaaacc

SEQ ID NO: 90246 - DNA, 69 bp, Homo sapiens
agtgcccgctcctcccgtgtcatcaagacaccccggcgatttatggatgaagacccccccaaaccccca

SEQ ID NO: 90247 - DNA, 68 bp, Homo sapiens
tcctcccgtgtcatcaagacaccccggcgatttatggatgaagacccccccaaacccccaaaggtgga

SEQ ID NO: 90248 - DNA, 67 bp, Homo sapiens
atcaagacaccccggcgatttatggatgaagacccccccaaacccccaaaggtggaggtctcacctg

SEQ ID NO: 90249 - DNA, 69 bp, Homo sapiens
ggcgatttatggatgaagacccccccaaacccccaaaggtggaggtctcacctgtcctgcgacctccca

SEQ ID NO: 90250 - DNA, 68 bp, Homo sapiens
tttatggatgaagacccccccaaacccccaaaggtggaggtctcacctgtcctgcgacctcccattac

SEQ ID NO: 90251 - DNA, 65 bp, Homo sapiens
aagacccccccaaacccccaaaggtggaggtctcacctgtcctgcgacctcccattaccacctcc

SEQ ID NO: 90252 - DNA, 72 bp, Homo sapiens
aaggtggaggtctcacctgtcctgcgacctcccattaccacctccccacctgttccccaggagccagcacca

SEQ ID NO: 90253 - DNA, 74 bp, Homo sapiens
tctcacctgtcctgcgacctcccattaccacctccccacctgttccccaggagccagcaccagtcccctctcca

SEQ ID NO: 90254 - DNA, 70 bp, Homo sapiens
attaccacctccccacctgttccccaggagccagcaccagtcccctctccaccacgtgccccaactcctc

SEQ ID NO: 90255 - DNA, 71 bp, Homo sapiens
ccacctgttccccaggagccagcaccagtcccctctccaccacgtgccccaactcctccatctaccccagt

SEQ ID NO: 90256 - DNA, 73 bp, Homo sapiens
cccaggagccagcaccagtcccctctccaccacgtgccccaactcctccatctaccccagttccactccctga

SEQ ID NO: 90257 - DNA, 74 bp, Homo sapiens
agccagcaccagtcccctctccaccacgtgccccaactcctccatctaccccagttccactccctgagaagaga

SEQ ID NO: 90258 - DNA, 70 bp, Homo sapiens
accacgtgccccaactcctccatctaccccagttccactccctgagaagagacggtccatcctaagggaa

SEQ ID NO: 90259 - DNA, 70 bp, Homo sapiens
aactcctccatctaccccagttccactccctgagaagagacggtccatcctaagggaacccacatttcgc

SEQ ID NO: 90260 - DNA, 73 bp, Homo sapiens
tctaccccagttccactccctgagaagagacggtccatcctaagggaacccacatttcgctggacctcactga

SEQ ID NO: 90261 - DNA, 70 bp, Homo sapiens
agttccactccctgagaagagacggtccatcctaagggaacccacatttcgctggacctcactgacccgg

SEQ ID NO: 90262 - DNA, 72 bp, Homo sapiens
ctccctgagaagagacggtccatcctaagggaacccacatttcgctggacctcactgacccgggagctgccc

SEQ ID NO: 90263 - DNA, 70 bp, Homo sapiens
agagacggtccatcctaagggaacccacatttcgctggacctcactgacccgggagctgccccctcctcc

SEQ ID NO: 90264 - DNA, 68 bp, Homo sapiens
atcctaagggaacccacatttcgctggacctcactgacccgggagctgccccctcctcccccagcccc

SEQ ID NO: 90265 - DNA, 68 bp, Homo sapiens
aacccacatttcgctggacctcactgacccgggagctgccccctcctcccccagcccctccacctccc

SEQ ID NO: 90266 - DNA, 67 bp, Homo sapiens
ttcgctggacctcactgacccgggagctgccccctcctcccccagcccctccacctcccccggcccc

SEQ ID NO: 90267 - DNA, 65 bp, Homo sapiens
ctcactgacccgggagctgccccctcctcccccagcccctccacctcccccggccccctccccac

SEQ ID NO: 90268 - DNA, 64 bp, Homo sapiens
agcccctccacctcccccggccccctccccaccccctgctcctgccacctcctcccggaggccc

SEQ ID NO: 90269 - DNA, 63 bp, Homo sapiens
acctcccccggccccctccccaccccctgctcctgccacctcctcccggaggcccctactcct

SEQ ID NO: 90270 - DNA, 65 bp, Homo sapiens
ccctccccaccccctgctcctgccacctcctcccggaggcccctactccttcgggcccctcagtt

SEQ ID NO: 90271 - DNA, 65 bp, Homo sapiens
cccaccccctgctcctgccacctcctcccggaggcccctactccttcgggcccctcagtttaccc

SEQ ID NO: 90272 - DNA, 68 bp, Homo sapiens
tgccacctcctcccggaggcccctactccttcgggcccctcagtttaccccaagcgaagcccacctga

SEQ ID NO: 90273 - DNA, 68 bp, Homo sapiens
tcccggaggcccctactccttcgggcccctcagtttaccccaagcgaagcccacctgaagatctacga

SEQ ID NO: 90274 - DNA, 70 bp, Homo sapiens
ctccttcgggcccctcagtttaccccaagcgaagcccacctgaagatctacgaatcggtgcttactcctc

SEQ ID NO: 90275 - DNA, 70 bp, Homo sapiens
ccctcagtttaccccaagcgaagcccacctgaagatctacgaatcggtgcttactcctcctcctcttggg

SEQ ID NO: 90276 - DNA, 73 bp, Homo sapiens
taccccaagcgaagcccacctgaagatctacgaatcggtgcttactcctcctcctcttggggctcctgaagcc

SEQ ID NO: 90277 - DNA, 75 bp, Homo sapiens
aagcccacctgaagatctacgaatcggtgcttactcctcctcctcttggggctcctgaagcccctgagccagagc

SEQ ID NO: 90278 - DNA, 77 bp, Homo sapiens
tgaagatctacgaatcggtgcttactcctcctcctcttggggctcctgaagcccctgagccagagcctcctcctgcc

SEQ ID NO: 90279 - DNA, 77 bp, Homo sapiens
aatcggtgcttactcctcctcctcttggggctcctgaagcccctgagccagagcctcctcctgccgatgactctcca

SEQ ID NO: 90280 - DNA, 80 bp, Homo sapiens
cttactcctcctcctcttggggctcctgaagcccctgagccagagcctcctcctgccgatgactctccagctgagcctga

SEQ ID NO: 90281 - DNA, 82 bp, Homo sapiens
tcctcttggggctcctgaagcccctgagccagagcctcctcctgccgatgactctccagctgagcctgagcctcgggcagtg

SEQ ID NO: 90282 - DNA, 82 bp, Homo sapiens
ctgaagcccctgagccagagcctcctcctgccgatgactctccagctgagcctgagcctcgggcagtgggccgcaccaacca

SEQ ID NO: 90283 - DNA, 82 bp, Homo sapiens
ccctgagccagagcctcctcctgccgatgactctccagctgagcctgagcctcgggcagtgggccgcaccaaccacctcagc

SEQ ID NO: 90284 - DNA, 81 bp, Homo sapiens
cctcctcctgccgatgactctccagctgagcctgagcctcgggcagtgggccgcaccaaccacctcagcctgcctcgattc

SEQ ID NO: 90285 - DNA, 82 bp, Homo sapiens
tgccgatgactctccagctgagcctgagcctcgggcagtgggccgcaccaaccacctcagcctgcctcgattcgcccctgtg

SEQ ID NO: 90286 - DNA, 79 bp, Homo sapiens
actctccagctgagcctgagcctcgggcagtgggccgcaccaaccacctcagcctgcctcgattcgcccctgtggtcac

SEQ ID NO: 90287 - DNA, 76 bp, Homo sapiens
cctgagcctcgggcagtgggccgcaccaaccacctcagcctgcctcgattcgcccctgtggtcaccactcctgtta

SEQ ID NO: 90288 - DNA, 75 bp, Homo sapiens
tcgggcagtgggccgcaccaaccacctcagcctgcctcgattcgcccctgtggtcaccactcctgttaaggccga

SEQ ID NO: 90289 - DNA, 74 bp, Homo sapiens
gtgggccgcaccaaccacctcagcctgcctcgattcgcccctgtggtcaccactcctgttaaggccgaggtgtc

SEQ ID NO: 90290 - DNA, 71 bp, Homo sapiens
aaccacctcagcctgcctcgattcgcccctgtggtcaccactcctgttaaggccgaggtgtcccctcacgg

SEQ ID NO: 90291 - DNA, 76 bp, Homo sapiens
ctgtggtcaccactcctgttaaggccgaggtgtcccctcacggggctccagctctgagcaacgggccacagacaca

SEQ ID NO: 90292 - DNA, 76 bp, Homo sapiens
actcctgttaaggccgaggtgtcccctcacggggctccagctctgagcaacgggccacagacacaggctcagctac

SEQ ID NO: 90293 - DNA, 80 bp, Homo sapiens
aaggccgaggtgtcccctcacggggctccagctctgagcaacgggccacagacacaggctcagctactgcagcccctgca

SEQ ID NO: 90294 - DNA, 83 bp, Homo sapiens
gggctccagctctgagcaacgggccacagacacaggctcagctactgcagcccctgcaggccttgcaaacccagctcctgccc

SEQ ID NO: 90295 - DNA, 83 bp, Homo sapiens
ctctgagcaacgggccacagacacaggctcagctactgcagcccctgcaggccttgcaaacccagctcctgccccaggcacta

SEQ ID NO: 90296 - DNA, 82 bp, Homo sapiens
ccacagacacaggctcagctactgcagcccctgcaggccttgcaaacccagctcctgccccaggcactaccgccaccacagc

SEQ ID NO: 90297 - DNA, 82 bp, Homo sapiens
acacaggctcagctactgcagcccctgcaggccttgcaaacccagctcctgccccaggcactaccgccaccacagccacagc

SEQ ID NO: 90298 - DNA, 83 bp, Homo sapiens
ctgcaggccttgcaaacccagctcctgccccaggcactaccgccaccacagccacagctgcagccaccgccgtcaccacagca

SEQ ID NO: 90299 - DNA, 83 bp, Homo sapiens
ttgcaaacccagctcctgccccaggcactaccgccaccacagccacagctgcagccaccgccgtcaccacagcagatgcctcc

SEQ ID NO: 90300 - DNA, 81 bp, Homo sapiens
gctcctgccccaggcactaccgccaccacagccacagctgcagccaccgccgtcaccacagcagatgcctcccctggaaaa

SEQ ID NO: 90301 - DNA, 79 bp, Homo sapiens
caggcactaccgccaccacagccacagctgcagccaccgccgtcaccacagcagatgcctcccctggaaaaagcccgga

SEQ ID NO: 90302 - DNA, 78 bp, Homo sapiens
actaccgccaccacagccacagctgcagccaccgccgtcaccacagcagatgcctcccctggaaaaagcccggattgc

SEQ ID NO: 90303 - DNA, 76 bp, Homo sapiens
agccacagctgcagccaccgccgtcaccacagcagatgcctcccctggaaaaagcccggattgcgggcgtgggttc

SEQ ID NO: 90304 - DNA, 75 bp, Homo sapiens
agctgcagccaccgccgtcaccacagcagatgcctcccctggaaaaagcccggattgcgggcgtgggttccttgc

SEQ ID NO: 90305 - DNA, 72 bp, Homo sapiens
accgccgtcaccacagcagatgcctcccctggaaaaagcccggattgcgggcgtgggttccttgccgctgtc

SEQ ID NO: 90306 - DNA, 72 bp, Homo sapiens
acagcagatgcctcccctggaaaaagcccggattgcgggcgtgggttccttgccgctgtctggggtagagga

SEQ ID NO: 90307 - DNA, 71 bp, Homo sapiens
tcccctggaaaaagcccggattgcgggcgtgggttccttgccgctgtctggggtagaggagaagatgttca

SEQ ID NO: 90308 - DNA, 72 bp, Homo sapiens
aaaaagcccggattgcgggcgtgggttccttgccgctgtctggggtagaggagaagatgttcagcctcctca

SEQ ID NO: 90309 - DNA, 77 bp, Homo sapiens
attgcgggcgtgggttccttgccgctgtctggggtagaggagaagatgttcagcctcctcaagagagccaaagtgca

SEQ ID NO: 90310 - DNA, 80 bp, Homo sapiens
tgggttccttgccgctgtctggggtagaggagaagatgttcagcctcctcaagagagccaaagtgcagctattcaagatc

SEQ ID NO: 90311 - DNA, 87 bp, Homo sapiens
cttgccgctgtctggggtagaggagaagatgttcagcctcctcaagagagccaaagtgcagctattcaagatcgatcagcagcagca

SEQ ID NO: 90312 - DNA, 88 bp, Homo sapiens
ggtagaggagaagatgttcagcctcctcaagagagccaaagtgcagctattcaagatcgatcagcagcagcagcagaaggtggcagct

SEQ ID NO: 90313 - DNA, 90 bp, Homo sapiens
aggagaagatgttcagcctcctcaagagagccaaagtgcagctattcaagatcgatcagcagcagcagcagaaggtggcagcttccatgc

SEQ ID NO: 90314 - DNA, 90 bp, Homo sapiens
ttcagcctcctcaagagagccaaagtgcagctattcaagatcgatcagcagcagcagcagaaggtggcagcttccatgccggtgagtgtg

SEQ ID NO: 90315 - DNA, 86 bp, Homo sapiens
aagagagccaaagtgcagctattcaagatcgatcagcagcagcagcagaaggtggcagcttccatgccggtgagtgtggtccctgg

SEQ ID NO: 90316 - DNA, 87 bp, Homo sapiens
aagtgcagctattcaagatcgatcagcagcagcagcagaaggtggcagcttccatgccggtgagtgtggtccctgggcccagcggca

SEQ ID NO: 90317 - DNA, 87 bp, Homo sapiens
tcaagatcgatcagcagcagcagcagaaggtggcagcttccatgccggtgagtgtggtccctgggcccagcggcacacccagccatc

SEQ ID NO: 90318 - DNA, 77 bp, Homo sapiens
tccctatctttcctcactgtccagcccctgaccctgtttattccctgccagctgagccctggagggcagatggagga

SEQ ID NO: 90319 - DNA, 76 bp, Homo sapiens
tcctcactgtccagcccctgaccctgtttattccctgccagctgagccctggagggcagatggaggaggtggccgg

SEQ ID NO: 90320 - DNA, 77 bp, Homo sapiens
ccctgaccctgtttattccctgccagctgagccctggagggcagatggaggaggtggccggggctgtcaagcagatc

SEQ ID NO: 90321 - DNA, 79 bp, Homo sapiens
ctgtttattccctgccagctgagccctggagggcagatggaggaggtggccggggctgtcaagcagatctccgacagag

SEQ ID NO: 90322 - DNA, 80 bp, Homo sapiens
ttccctgccagctgagccctggagggcagatggaggaggtggccggggctgtcaagcagatctccgacagaggccctgtc

SEQ ID NO: 90323 - DNA, 79 bp, Homo sapiens
gccctggagggcagatggaggaggtggccggggctgtcaagcagatctccgacagaggccctgtccggtctgaagatga

SEQ ID NO: 90324 - DNA, 79 bp, Homo sapiens
gcagatggaggaggtggccggggctgtcaagcagatctccgacagaggccctgtccggtctgaagatgagtcggtggaa

SEQ ID NO: 90325 - DNA, 78 bp, Homo sapiens
gaggtggccggggctgtcaagcagatctccgacagaggccctgtccggtctgaagatgagtcggtggaagctaagaga

SEQ ID NO: 90326 - DNA, 80 bp, Homo sapiens
gggctgtcaagcagatctccgacagaggccctgtccggtctgaagatgagtcggtggaagctaagagagagcggccctca

SEQ ID NO: 90327 - DNA, 81 bp, Homo sapiens
aagcagatctccgacagaggccctgtccggtctgaagatgagtcggtggaagctaagagagagcggccctcagtatgcatc

SEQ ID NO: 90328 - DNA, 79 bp, Homo sapiens
tccgacagaggccctgtccggtctgaagatgagtcggtggaagctaagagagagcggccctcagtatgcatcgggagga

SEQ ID NO: 90329 - DNA, 76 bp, Homo sapiens
aggccctgtccggtctgaagatgagtcggtggaagctaagagagagcggccctcagtatgcatcgggaggagggcc

SEQ ID NO: 90330 - DNA, 78 bp, Homo sapiens
ggtctgaagatgagtcggtggaagctaagagagagcggccctcagtatgcatcgggaggagggccctgaagaagactg

SEQ ID NO: 90331 - DNA, 73 bp, Homo sapiens
ctgcgggagcgcaagctgcccacacacactccgatttctcccccagggtcccgagtcccctgtgcaaggtccc

SEQ ID NO: 90332 - DNA, 74 bp, Homo sapiens
gcaagctgcccacacacactccgatttctcccccagggtcccgagtcccctgtgcaaggtccccgcatcaaaca

SEQ ID NO: 90333 - DNA, 73 bp, Homo sapiens
cacacacactccgatttctcccccagggtcccgagtcccctgtgcaaggtccccgcatcaaacatgtctgccg

SEQ ID NO: 90334 - DNA, 74 bp, Homo sapiens
acactccgatttctcccccagggtcccgagtcccctgtgcaaggtccccgcatcaaacatgtctgccgtcatgc

SEQ ID NO: 90335 - DNA, 77 bp, Homo sapiens
ccccagggtcccgagtcccctgtgcaaggtccccgcatcaaacatgtctgccgtcatgctgctgtggccctgggtca

SEQ ID NO: 90336 - DNA, 77 bp, Homo sapiens
gggtcccgagtcccctgtgcaaggtccccgcatcaaacatgtctgccgtcatgctgctgtggccctgggtcaggccc

SEQ ID NO: 90337 - DNA, 83 bp, Homo sapiens
tgtgcaaggtccccgcatcaaacatgtctgccgtcatgctgctgtggccctgggtcaggcccgggccatggtgcctgaagatg

SEQ ID NO: 90338 - DNA, 80 bp, Homo sapiens
aaggtccccgcatcaaacatgtctgccgtcatgctgctgtggccctgggtcaggcccgggccatggtgcctgaagatgtc

SEQ ID NO: 90339 - DNA, 83 bp, Homo sapiens
atcaaacatgtctgccgtcatgctgctgtggccctgggtcaggcccgggccatggtgcctgaagatgtccctcgcctcagtgc

SEQ ID NO: 90340 - DNA, 81 bp, Homo sapiens
tctgccgtcatgctgctgtggccctgggtcaggcccgggccatggtgcctgaagatgtccctcgcctcagtgccctccctc

SEQ ID NO: 90341 - DNA, 77 bp, Homo sapiens
tgctgtggccctgggtcaggcccgggccatggtgcctgaagatgtccctcgcctcagtgccctccctctccgggatc

SEQ ID NO: 90342 - DNA, 75 bp, Homo sapiens
tgggtcaggcccgggccatggtgcctgaagatgtccctcgcctcagtgccctccctctccgggatcggcaggacc

SEQ ID NO: 90343 - DNA, 76 bp, Homo sapiens
cccgggccatggtgcctgaagatgtccctcgcctcagtgccctccctctccgggatcggcaggacctcgccacaga

SEQ ID NO: 90344 - DNA, 75 bp, Homo sapiens
atggtgcctgaagatgtccctcgcctcagtgccctccctctccgggatcggcaggacctcgccacagagggtagg

SEQ ID NO: 90345 - DNA, 75 bp, Homo sapiens
tgaagatgtccctcgcctcagtgccctccctctccgggatcggcaggacctcgccacagagggtaggtggggaga

SEQ ID NO: 90346 - DNA, 76 bp, Homo sapiens
cctcagtgccctccctctccgggatcggcaggacctcgccacagagggtaggtggggagactggacagccatgtca

SEQ ID NO: 90347 - DNA, 73 bp, Homo sapiens
ctccctctccgggatcggcaggacctcgccacagagggtaggtggggagactggacagccatgtcaggtttgg

SEQ ID NO: 90348 - DNA, 81 bp, Homo sapiens
aagcctggtggctttgtggctccatcccctcctccctgcctgctgcaatagatacatcatcggcgtccgagactgagagtg

SEQ ID NO: 90349 - DNA, 80 bp, Homo sapiens
tttgtggctccatcccctcctccctgcctgctgcaatagatacatcatcggcgtccgagactgagagtgtcccgtcacgg

SEQ ID NO: 90350 - DNA, 77 bp, Homo sapiens
ctgcctgctgcaatagatacatcatcggcgtccgagactgagagtgtcccgtcacggtcccggcggggaaaggtgga

SEQ ID NO: 90351 - DNA, 73 bp, Homo sapiens
atacatcatcggcgtccgagactgagagtgtcccgtcacggtcccggcggggaaaggtggaggcagcaggccc

SEQ ID NO: 90352 - DNA, 69 bp, Homo sapiens
cggcgtccgagactgagagtgtcccgtcacggtcccggcggggaaaggtggaggcagcaggccctgggg

SEQ ID NO: 90353 - DNA, 71 bp, Homo sapiens
actgagagtgtcccgtcacggtcccggcggggaaaggtggaggcagcaggccctgggggagaatcagagcc

SEQ ID NO: 90354 - DNA, 71 bp, Homo sapiens
cgtcacggtcccggcggggaaaggtggaggcagcaggccctgggggagaatcagagcccacaggttctgga

SEQ ID NO: 90355 - DNA, 70 bp, Homo sapiens
ggtcccggcggggaaaggtggaggcagcaggccctgggggagaatcagagcccacaggttctggagggac

SEQ ID NO: 90356 - DNA, 72 bp, Homo sapiens
aaaggtggaggcagcaggccctgggggagaatcagagcccacaggttctggagggaccctggcccacacacc

SEQ ID NO: 90357 - DNA, 74 bp, Homo sapiens
agcaggccctgggggagaatcagagcccacaggttctggagggaccctggcccacacaccccggcgctcactgc

SEQ ID NO: 90358 - DNA, 75 bp, Homo sapiens
tgggggagaatcagagcccacaggttctggagggaccctggcccacacaccccggcgctcactgccctcccatca

SEQ ID NO: 90359 - DNA, 75 bp, Homo sapiens
atcagagcccacaggttctggagggaccctggcccacacaccccggcgctcactgccctcccatcacggcaagaa

SEQ ID NO: 90360 - DNA, 77 bp, Homo sapiens
aggttctggagggaccctggcccacacaccccggcgctcactgccctcccatcacggcaagaagatgcgcatggctc

SEQ ID NO: 90361 - DNA, 79 bp, Homo sapiens
agggaccctggcccacacaccccggcgctcactgccctcccatcacggcaagaagatgcgcatggctcgatgtggacac

SEQ ID NO: 90362 - DNA, 80 bp, Homo sapiens
cctggcccacacaccccggcgctcactgccctcccatcacggcaagaagatgcgcatggctcgatgtggacactgtcggg

SEQ ID NO: 90363 - DNA, 84 bp, Homo sapiens
ccggcgctcactgccctcccatcacggcaagaagatgcgcatggctcgatgtggacactgtcggggctgcctacgtgtgcagga

SEQ ID NO: 90364 - DNA, 82 bp, Homo sapiens
actgccctcccatcacggcaagaagatgcgcatggctcgatgtggacactgtcggggctgcctacgtgtgcaggactgtggg

SEQ ID NO: 90365 - DNA, 83 bp, Homo sapiens
atcacggcaagaagatgcgcatggctcgatgtggacactgtcggggctgcctacgtgtgcaggactgtgggtcctgtgtcaac

SEQ ID NO: 90366 - DNA, 83 bp, Homo sapiens
aagaagatgcgcatggctcgatgtggacactgtcggggctgcctacgtgtgcaggactgtgggtcctgtgtcaactgcctaga

SEQ ID NO: 90367 - DNA, 80 bp, Homo sapiens
atggctcgatgtggacactgtcggggctgcctacgtgtgcaggactgtgggtcctgtgtcaactgcctagacaagcccaa

SEQ ID NO: 90368 - DNA, 77 bp, Homo sapiens
atgtggacactgtcggggctgcctacgtgtgcaggactgtgggtcctgtgtcaactgcctagacaagcccaagtttg

SEQ ID NO: 90369 - DNA, 74 bp, Homo sapiens
actgtcggggctgcctacgtgtgcaggactgtgggtcctgtgtcaactgcctagacaagcccaagtttgggggc

SEQ ID NO: 90370 - DNA, 73 bp, Homo sapiens
ctacgtgtgcaggactgtgggtcctgtgtcaactgcctagacaagcccaagtttgggggccctaacaccaaga

SEQ ID NO: 90371 - DNA, 76 bp, Homo sapiens
tgggtcctgtgtcaactgcctagacaagcccaagtttgggggccctaacaccaagaagcagtgctgtgtgtgagta

SEQ ID NO: 90372 - DNA, 75 bp, Homo sapiens
aactgcctagacaagcccaagtttgggggccctaacaccaagaagcagtgctgtgtgtgagtagctggggcgtga

SEQ ID NO: 90373 - DNA, 76 bp, Homo sapiens
tagacaagcccaagtttgggggccctaacaccaagaagcagtgctgtgtgtgagtagctggggcgtgacctcattc

SEQ ID NO: 90374 - DNA, 72 bp, Homo sapiens
aagtttgggggccctaacaccaagaagcagtgctgtgtgtgagtagctggggcgtgacctcattcccgtggt

SEQ ID NO: 90375 - DNA, 74 bp, Homo sapiens
tgtggagagcttcctctcttcccccagaccaccagtcccctaccctggtgacgtgctgctcccctccccagata

SEQ ID NO: 90376 - DNA, 70 bp, Homo sapiens
ctctcttcccccagaccaccagtcccctaccctggtgacgtgctgctcccctccccagataccggaagtg

SEQ ID NO: 90377 - DNA, 72 bp, Homo sapiens
ccagaccaccagtcccctaccctggtgacgtgctgctcccctccccagataccggaagtgtgacaaaataga

SEQ ID NO: 90378 - DNA, 71 bp, Homo sapiens
agtcccctaccctggtgacgtgctgctcccctccccagataccggaagtgtgacaaaatagaggctcggaa

SEQ ID NO: 90379 - DNA, 74 bp, Homo sapiens
taccctggtgacgtgctgctcccctccccagataccggaagtgtgacaaaatagaggctcggaagatggaacga

SEQ ID NO: 90380 - DNA, 73 bp, Homo sapiens
gtgctgctcccctccccagataccggaagtgtgacaaaatagaggctcggaagatggaacgactggctaaaaa

SEQ ID NO: 90381 - DNA, 71 bp, Homo sapiens
ctccccagataccggaagtgtgacaaaatagaggctcggaagatggaacgactggctaaaaaaggtgacga

SEQ ID NO: 90382 - DNA, 70 bp, Homo sapiens
ataccggaagtgtgacaaaatagaggctcggaagatggaacgactggctaaaaaaggtgacgagctttaa

SEQ ID NO: 90383 - DNA, 71 bp, Homo sapiens
aagtgtgacaaaatagaggctcggaagatggaacgactggctaaaaaaggtgacgagctttaaggagcatt

SEQ ID NO: 90384 - DNA, 71 bp, Homo sapiens
aaatagaggctcggaagatggaacgactggctaaaaaaggtgacgagctttaaggagcatttcttctcaaa

SEQ ID NO: 90385 - DNA, 69 bp, Homo sapiens
agatggaacgactggctaaaaaaggtgacgagctttaaggagcatttcttctcaaaaccgtgttagagt

SEQ ID NO: 90386 - DNA, 69 bp, Homo sapiens
aacgactggctaaaaaaggtgacgagctttaaggagcatttcttctcaaaaccgtgttagagtttgtgc

SEQ ID NO: 90387 - DNA, 75 bp, Homo sapiens
atgtccctggctgagctcaaatcctactaagtcccctgttcccgcagccggacgatagtgaagacgctgttgccc

SEQ ID NO: 90388 - DNA, 74 bp, Homo sapiens
ctgagctcaaatcctactaagtcccctgttcccgcagccggacgatagtgaagacgctgttgccctgggattcc

SEQ ID NO: 90389 - DNA, 74 bp, Homo sapiens
actaagtcccctgttcccgcagccggacgatagtgaagacgctgttgccctgggattccgatgaatctcctgag

SEQ ID NO: 90390 - DNA, 65 bp, Homo sapiens
tgaggcctcccctggtcctccaggcccacgccggggggcgggagctggggggccccgggaggagg

SEQ ID NO: 90391 - DNA, 65 bp, Homo sapiens
cctggtcctccaggcccacgccggggggcgggagctggggggccccgggaggaggtggtggccca

SEQ ID NO: 90392 - DNA, 65 bp, Homo sapiens
tcctccaggcccacgccggggggcgggagctggggggccccgggaggaggtggtggcccacccag

SEQ ID NO: 90393 - DNA, 63 bp, Homo sapiens
acgccggggggcgggagctggggggccccgggaggaggtggtggcccacccagggcccgagga

SEQ ID NO: 90394 - DNA, 69 bp, Homo sapiens
gggagctggggggccccgggaggaggtggtggcccacccagggcccgaggagcaggactccctcctgca

SEQ ID NO: 90395 - DNA, 73 bp, Homo sapiens
ggccccgggaggaggtggtggcccacccagggcccgaggagcaggactccctcctgcagcgcaagtcagctcg

SEQ ID NO: 90396 - DNA, 77 bp, Homo sapiens
aggaggtggtggcccacccagggcccgaggagcaggactccctcctgcagcgcaagtcagctcggcgctgcgtcaaa

SEQ ID NO: 90397 - DNA, 78 bp, Homo sapiens
gcccacccagggcccgaggagcaggactccctcctgcagcgcaagtcagctcggcgctgcgtcaaacagcgaccctcc

SEQ ID NO: 90398 - DNA, 80 bp, Homo sapiens
agggcccgaggagcaggactccctcctgcagcgcaagtcagctcggcgctgcgtcaaacagcgaccctcctatgatatct

SEQ ID NO: 90399 - DNA, 84 bp, Homo sapiens
gcaggactccctcctgcagcgcaagtcagctcggcgctgcgtcaaacagcgaccctcctatgatatcttcgaggattcggatga

SEQ ID NO: 90400 - DNA, 83 bp, Homo sapiens
tccctcctgcagcgcaagtcagctcggcgctgcgtcaaacagcgaccctcctatgatatcttcgaggattcggatgactcgga

SEQ ID NO: 90401 - DNA, 79 bp, Homo sapiens
agcgcaagtcagctcggcgctgcgtcaaacagcgaccctcctatgatatcttcgaggattcggatgactcggagcccgg

SEQ ID NO: 90402 - DNA, 75 bp, Homo sapiens
agctcggcgctgcgtcaaacagcgaccctcctatgatatcttcgaggattcggatgactcggagcccgggggccc

SEQ ID NO: 90403 - DNA, 74 bp, Homo sapiens
ctgcgtcaaacagcgaccctcctatgatatcttcgaggattcggatgactcggagcccgggggcccccctgctc

SEQ ID NO: 90404 - DNA, 72 bp, Homo sapiens
acagcgaccctcctatgatatcttcgaggattcggatgactcggagcccgggggcccccctgctcctcggcg

SEQ ID NO: 90405 - DNA, 71 bp, Homo sapiens
tcctatgatatcttcgaggattcggatgactcggagcccgggggcccccctgctcctcggcgtcggacccc

SEQ ID NO: 90406 - DNA, 67 bp, Homo sapiens
ttcgaggattcggatgactcggagcccgggggcccccctgctcctcggcgtcggaccccccgagaaa

SEQ ID NO: 90407 - DNA, 68 bp, Homo sapiens
ttcggatgactcggagcccgggggcccccctgctcctcggcgtcggaccccccgagaaaatggtgcga

SEQ ID NO: 90408 - DNA, 67 bp, Homo sapiens
agcccgggggcccccctgctcctcggcgtcggaccccccgagaaaatggtgcgaactgcttaatgct

SEQ ID NO: 90409 - DNA, 72 bp, Homo sapiens
ccccctgctcctcggcgtcggaccccccgagaaaatggtgcgaactgcttaatgctttctctgttgatcatt

SEQ ID NO: 90410 - DNA, 79 bp, Homo sapiens
aagaagaggggcgtggaaggggagtgacctcactgctcattgtgtcctgcctagagctgccactgccagaacctgagga

SEQ ID NO: 90411 - DNA, 81 bp, Homo sapiens
cgtggaaggggagtgacctcactgctcattgtgtcctgcctagagctgccactgccagaacctgaggagcagagccggccc

SEQ ID NO: 90412 - DNA, 81 bp, Homo sapiens
agtgacctcactgctcattgtgtcctgcctagagctgccactgccagaacctgaggagcagagccggccccgcaaacctac

SEQ ID NO: 90413 - DNA, 81 bp, Homo sapiens
actgctcattgtgtcctgcctagagctgccactgccagaacctgaggagcagagccggccccgcaaacctaccctgcagcc

SEQ ID NO: 90414 - DNA, 83 bp, Homo sapiens
tcctgcctagagctgccactgccagaacctgaggagcagagccggccccgcaaacctaccctgcagcctgtgttgcagctcaa

SEQ ID NO: 90415 - DNA, 80 bp, Homo sapiens
gctgccactgccagaacctgaggagcagagccggccccgcaaacctaccctgcagcctgtgttgcagctcaaggcccgaa

SEQ ID NO: 90416 - DNA, 77 bp, Homo sapiens
actgccagaacctgaggagcagagccggccccgcaaacctaccctgcagcctgtgttgcagctcaaggcccgaaggc

SEQ ID NO: 90417 - DNA, 75 bp, Homo sapiens
aggagcagagccggccccgcaaacctaccctgcagcctgtgttgcagctcaaggcccgaaggcgcctggacaagg

SEQ ID NO: 90418 - DNA, 76 bp, Homo sapiens
agagccggccccgcaaacctaccctgcagcctgtgttgcagctcaaggcccgaaggcgcctggacaaggtcagcac

SEQ ID NO: 90419 - DNA, 76 bp, Homo sapiens
aaacctaccctgcagcctgtgttgcagctcaaggcccgaaggcgcctggacaaggtcagcacggcccgctccgaga

SEQ ID NO: 90420 - DNA, 77 bp, Homo sapiens
ctgcagcctgtgttgcagctcaaggcccgaaggcgcctggacaaggtcagcacggcccgctccgagagccccttccc

SEQ ID NO: 90421 - DNA, 75 bp, Homo sapiens
cctgtgttgcagctcaaggcccgaaggcgcctggacaaggtcagcacggcccgctccgagagccccttccctcca

SEQ ID NO: 90422 - DNA, 71 bp, Homo sapiens
atcacggccaggctggcagctctgaattcccccacctttcctccccaggatgctttggcccctggcccctt

SEQ ID NO: 90423 - DNA, 70 bp, Homo sapiens
ctggcagctctgaattcccccacctttcctccccaggatgctttggcccctggcccctttgcttcttttc

SEQ ID NO: 90424 - DNA, 68 bp, Homo sapiens
tctgaattcccccacctttcctccccaggatgctttggcccctggcccctttgcttcttttcccaatg

SEQ ID NO: 90425 - DNA, 69 bp, Homo sapiens
cacctttcctccccaggatgctttggcccctggcccctttgcttcttttcccaatggctggactggaaa

SEQ ID NO: 90426 - DNA, 71 bp, Homo sapiens
ttcctccccaggatgctttggcccctggcccctttgcttcttttcccaatggctggactggaaagcagaag

SEQ ID NO: 90427 - DNA, 72 bp, Homo sapiens
atgctttggcccctggcccctttgcttcttttcccaatggctggactggaaagcagaagtctcccgatggtg

SEQ ID NO: 90428 - DNA, 74 bp, Homo sapiens
tggcccctttgcttcttttcccaatggctggactggaaagcagaagtctcccgatggtgtgcaccgcgtccgtg

SEQ ID NO: 90429 - DNA, 74 bp, Homo sapiens
gcttcttttcccaatggctggactggaaagcagaagtctcccgatggtgtgcaccgcgtccgtgtggattttaa

SEQ ID NO: 90430 - DNA, 73 bp, Homo sapiens
ttttcccaatggctggactggaaagcagaagtctcccgatggtgtgcaccgcgtccgtgtggattttaaggta

SEQ ID NO: 90431 - DNA, 75 bp, Homo sapiens
ctggactggaaagcagaagtctcccgatggtgtgcaccgcgtccgtgtggattttaaggtatggcattgagtggg

SEQ ID NO: 90432 - DNA, 76 bp, Homo sapiens
aaagcagaagtctcccgatggtgtgcaccgcgtccgtgtggattttaaggtatggcattgagtggggcgagtcaca

SEQ ID NO: 90433 - DNA, 77 bp, Homo sapiens
tctcccgatggtgtgcaccgcgtccgtgtggattttaaggtatggcattgagtggggcgagtcacagagcctctggt

SEQ ID NO: 90434 - DNA, 80 bp, Homo sapiens
cttgtatgcctggcggccctctgatcctgcatcctctcttcccccaggaggattgtgatttagagaacgtgtggctgatg

SEQ ID NO: 90435 - DNA, 76 bp, Homo sapiens
cctggcggccctctgatcctgcatcctctcttcccccaggaggattgtgatttagagaacgtgtggctgatggggg

SEQ ID NO: 90436 - DNA, 81 bp, Homo sapiens
tctgatcctgcatcctctcttcccccaggaggattgtgatttagagaacgtgtggctgatggggggcctgagtgtgctcac

SEQ ID NO: 90437 - DNA, 78 bp, Homo sapiens
atcctctcttcccccaggaggattgtgatttagagaacgtgtggctgatggggggcctgagtgtgctcacctctgtgc

SEQ ID NO: 90438 - DNA, 77 bp, Homo sapiens
tcttcccccaggaggattgtgatttagagaacgtgtggctgatggggggcctgagtgtgctcacctctgtgccaggg

SEQ ID NO: 90439 - DNA, 75 bp, Homo sapiens
attgtgatttagagaacgtgtggctgatggggggcctgagtgtgctcacctctgtgccagggggccccccgatgg

SEQ ID NO: 90440 - DNA, 75 bp, Homo sapiens
atttagagaacgtgtggctgatggggggcctgagtgtgctcacctctgtgccagggggccccccgatggtgtgct

SEQ ID NO: 90441 - DNA, 81 bp, Homo sapiens
gtgtggctgatggggggcctgagtgtgctcacctctgtgccagggggccccccgatggtgtgcttgctgtgtgccagcaaa

SEQ ID NO: 90442 - DNA, 79 bp, Homo sapiens
ggggcctgagtgtgctcacctctgtgccagggggccccccgatggtgtgcttgctgtgtgccagcaaaggactccacga

SEQ ID NO: 90443 - DNA, 80 bp, Homo sapiens
tgtgctcacctctgtgccagggggccccccgatggtgtgcttgctgtgtgccagcaaaggactccacgaggttagatctc

SEQ ID NO: 90444 - DNA, 78 bp, Homo sapiens
tctgtgccagggggccccccgatggtgtgcttgctgtgtgccagcaaaggactccacgaggttagatctctgcctttc

SEQ ID NO: 90445 - DNA, 77 bp, Homo sapiens
ggggccccccgatggtgtgcttgctgtgtgccagcaaaggactccacgaggttagatctctgcctttcttcacagac

SEQ ID NO: 90446 - DNA, 83 bp, Homo sapiens
tctggcctcatgctatgcccatcattcactcctttaccctgtccccagctggtgttctgtcaagtctgctgtgacccattcca

SEQ ID NO: 90447 - DNA, 79 bp, Homo sapiens
atgctatgcccatcattcactcctttaccctgtccccagctggtgttctgtcaagtctgctgtgacccattccacccat

SEQ ID NO: 90448 - DNA, 78 bp, Homo sapiens
atcattcactcctttaccctgtccccagctggtgttctgtcaagtctgctgtgacccattccacccattctgcctgga

SEQ ID NO: 90449 - DNA, 75 bp, Homo sapiens
actcctttaccctgtccccagctggtgttctgtcaagtctgctgtgacccattccacccattctgcctggaggag

SEQ ID NO: 90450 - DNA, 77 bp, Homo sapiens
cctgtccccagctggtgttctgtcaagtctgctgtgacccattccacccattctgcctggaggaggccgagcggccc

SEQ ID NO: 90451 - DNA, 81 bp, Homo sapiens
tgttctgtcaagtctgctgtgacccattccacccattctgcctggaggaggccgagcggcccctgccccagcatcacgaca

SEQ ID NO: 90452 - DNA, 80 bp, Homo sapiens
tgtcaagtctgctgtgacccattccacccattctgcctggaggaggccgagcggcccctgccccagcatcacgacacctg

SEQ ID NO: 90453 - DNA, 79 bp, Homo sapiens
tgtgacccattccacccattctgcctggaggaggccgagcggcccctgccccagcatcacgacacctggtgctgccgtc

SEQ ID NO: 90454 - DNA, 79 bp, Homo sapiens
ttccacccattctgcctggaggaggccgagcggcccctgccccagcatcacgacacctggtgctgccgtcgctgcaaat

SEQ ID NO: 90455 - DNA, 80 bp, Homo sapiens
cctggaggaggccgagcggcccctgccccagcatcacgacacctggtgctgccgtcgctgcaaattctgccacgtctgtg

SEQ ID NO: 90456 - DNA, 80 bp, Homo sapiens
aggccgagcggcccctgccccagcatcacgacacctggtgctgccgtcgctgcaaattctgccacgtctgtggacgcaaa

SEQ ID NO: 90457 - DNA, 81 bp, Homo sapiens
ccctgccccagcatcacgacacctggtgctgccgtcgctgcaaattctgccacgtctgtggacgcaaaggtcgtggatcca

SEQ ID NO: 90458 - DNA, 79 bp, Homo sapiens
agcatcacgacacctggtgctgccgtcgctgcaaattctgccacgtctgtggacgcaaaggtcgtggatccaaggtttg

SEQ ID NO: 90459 - DNA, 75 bp, Homo sapiens
acctggtgctgccgtcgctgcaaattctgccacgtctgtggacgcaaaggtcgtggatccaaggtttgggcccaa

SEQ ID NO: 90460 - DNA, 76 bp, Homo sapiens
gtgctgccgtcgctgcaaattctgccacgtctgtggacgcaaaggtcgtggatccaaggtttgggcccaagggctg

SEQ ID NO: 90461 - DNA, 71 bp, Homo sapiens
caaattctgccacgtctgtggacgcaaaggtcgtggatccaaggtttgggcccaagggctggccagggtgg

SEQ ID NO: 90462 - DNA, 72 bp, Homo sapiens
tctgccacgtctgtggacgcaaaggtcgtggatccaaggtttgggcccaagggctggccagggtgggtggag

SEQ ID NO: 90463 - DNA, 87 bp, Homo sapiens
catccctgtgccagcaggtttcgccatctctgtctccacatccaacagcacctcctggagtgcgagcgctgccgccatgcataccac

SEQ ID NO: 90464 - DNA, 85 bp, Homo sapiens
ctgtgccagcaggtttcgccatctctgtctccacatccaacagcacctcctggagtgcgagcgctgccgccatgcataccacccg

SEQ ID NO: 90465 - DNA, 82 bp, Homo sapiens
aggtttcgccatctctgtctccacatccaacagcacctcctggagtgcgagcgctgccgccatgcataccacccggcctgtc

SEQ ID NO: 90466 - DNA, 84 bp, Homo sapiens
tgtctccacatccaacagcacctcctggagtgcgagcgctgccgccatgcataccacccggcctgtctggggcccagctatcca

SEQ ID NO: 90467 - DNA, 80 bp, Homo sapiens
acatccaacagcacctcctggagtgcgagcgctgccgccatgcataccacccggcctgtctggggcccagctatccaacc

SEQ ID NO: 90468 - DNA, 76 bp, Homo sapiens
acctcctggagtgcgagcgctgccgccatgcataccacccggcctgtctggggcccagctatccaacccgggccac

SEQ ID NO: 90469 - DNA, 78 bp, Homo sapiens
tggagtgcgagcgctgccgccatgcataccacccggcctgtctggggcccagctatccaacccgggccacgcgcaaac

SEQ ID NO: 90470 - DNA, 75 bp, Homo sapiens
ctgccgccatgcataccacccggcctgtctggggcccagctatccaacccgggccacgcgcaaacggcgccactg

SEQ ID NO: 90471 - DNA, 74 bp, Homo sapiens
atgcataccacccggcctgtctggggcccagctatccaacccgggccacgcgcaaacggcgccactgggtgaga

SEQ ID NO: 90472 - DNA, 72 bp, Homo sapiens
acccggcctgtctggggcccagctatccaacccgggccacgcgcaaacggcgccactgggtgagagatgagg

SEQ ID NO: 90473 - DNA, 74 bp, Homo sapiens
ggcccagctatccaacccgggccacgcgcaaacggcgccactgggtgagagatgaggttcacccacttgctttg

SEQ ID NO: 90474 - DNA, 76 bp, Homo sapiens
tatccaacccgggccacgcgcaaacggcgccactgggtgagagatgaggttcacccacttgctttgtctctaatga

SEQ ID NO: 90475 - DNA, 79 bp, Homo sapiens
ttgctccagtccagtgcctggttttcccctaacatcgccctgctcccccagatctgttcagcctgtgtgcgctgtaaga

SEQ ID NO: 90476 - DNA, 77 bp, Homo sapiens
ccagtgcctggttttcccctaacatcgccctgctcccccagatctgttcagcctgtgtgcgctgtaagagctgtggg

SEQ ID NO: 90477 - DNA, 77 bp, Homo sapiens
gttttcccctaacatcgccctgctcccccagatctgttcagcctgtgtgcgctgtaagagctgtggggcaactccag

SEQ ID NO: 90478 - DNA, 80 bp, Homo sapiens
aacatcgccctgctcccccagatctgttcagcctgtgtgcgctgtaagagctgtggggcaactccaggcaagaactggga

SEQ ID NO: 90479 - DNA, 79 bp, Homo sapiens
ccccagatctgttcagcctgtgtgcgctgtaagagctgtggggcaactccaggcaagaactgggacgtcgagtggtctg

SEQ ID NO: 90480 - DNA, 80 bp, Homo sapiens
atctgttcagcctgtgtgcgctgtaagagctgtggggcaactccaggcaagaactgggacgtcgagtggtctggagatta

SEQ ID NO: 90481 - DNA, 80 bp, Homo sapiens
cctgtgtgcgctgtaagagctgtggggcaactccaggcaagaactgggacgtcgagtggtctggagattacagcctctgc

SEQ ID NO: 90482 - DNA, 76 bp, Homo sapiens
ctgtaagagctgtggggcaactccaggcaagaactgggacgtcgagtggtctggagattacagcctctgccccagg

SEQ ID NO: 90483 - DNA, 79 bp, Homo sapiens
gggcaactccaggcaagaactgggacgtcgagtggtctggagattacagcctctgccccaggtgcacccagctatatga

SEQ ID NO: 90484 - DNA, 78 bp, Homo sapiens
actccaggcaagaactgggacgtcgagtggtctggagattacagcctctgccccaggtgcacccagctatatgagaaa

SEQ ID NO: 90485 - DNA, 76 bp, Homo sapiens
agaactgggacgtcgagtggtctggagattacagcctctgccccaggtgcacccagctatatgagaaaggtgggga

SEQ ID NO: 90486 - DNA, 75 bp, Homo sapiens
cgtcgagtggtctggagattacagcctctgccccaggtgcacccagctatatgagaaaggtggggaccgggcagg

SEQ ID NO: 90487 - DNA, 75 bp, Homo sapiens
agattacagcctctgccccaggtgcacccagctatatgagaaaggtggggaccgggcaggggaactggatgctgg

SEQ ID NO: 90488 - DNA, 75 bp, Homo sapiens
agtgggaactccagcacctctgactccttctcttccctttctctaggaaactactgcccgatctgtacacgctgc

SEQ ID NO: 90489 - DNA, 77 bp, Homo sapiens
aactccagcacctctgactccttctcttccctttctctaggaaactactgcccgatctgtacacgctgctatgaaga

SEQ ID NO: 90490 - DNA, 79 bp, Homo sapiens
tctgactccttctcttccctttctctaggaaactactgcccgatctgtacacgctgctatgaagacaacgactatgaga

SEQ ID NO: 90491 - DNA, 84 bp, Homo sapiens
tcttccctttctctaggaaactactgcccgatctgtacacgctgctatgaagacaacgactatgagagcaagatgatgcagtgc

SEQ ID NO: 90492 - DNA, 88 bp, Homo sapiens
tttctctaggaaactactgcccgatctgtacacgctgctatgaagacaacgactatgagagcaagatgatgcagtgcgcacagtgcga

SEQ ID NO: 90493 - DNA, 90 bp, Homo sapiens
aaactactgcccgatctgtacacgctgctatgaagacaacgactatgagagcaagatgatgcagtgcgcacagtgcgatcactgggtgca

SEQ ID NO: 90494 - DNA, 92 bp, Homo sapiens
atctgtacacgctgctatgaagacaacgactatgagagcaagatgatgcagtgcgcacagtgcgatcactgggtgcatgccaagtgcgaggg

SEQ ID NO: 90495 - DNA, 94 bp, Homo sapiens
gctgctatgaagacaacgactatgagagcaagatgatgcagtgcgcacagtgcgatcactgggtgcatgccaagtgcgaggggctctcaggtga

SEQ ID NO: 90496 - DNA, 93 bp, Homo sapiens
tatgaagacaacgactatgagagcaagatgatgcagtgcgcacagtgcgatcactgggtgcatgccaagtgcgaggggctctcaggtgagtca

SEQ ID NO: 90497 - DNA, 92 bp, Homo sapiens
acgactatgagagcaagatgatgcagtgcgcacagtgcgatcactgggtgcatgccaagtgcgaggggctctcaggtgagtcagtggagcac

SEQ ID NO: 90498 - DNA, 93 bp, Homo sapiens
agcaagatgatgcagtgcgcacagtgcgatcactgggtgcatgccaagtgcgaggggctctcaggtgagtcagtggagcacctgggctgcagc

SEQ ID NO: 90499 - DNA, 90 bp, Homo sapiens
atgcagtgcgcacagtgcgatcactgggtgcatgccaagtgcgaggggctctcaggtgagtcagtggagcacctgggctgcagcctcaac

SEQ ID NO: 90500 - DNA, 85 bp, Homo sapiens
acagtgcgatcactgggtgcatgccaagtgcgaggggctctcaggtgagtcagtggagcacctgggctgcagcctcaaccctgtg

SEQ ID NO: 90501 - DNA, 74 bp, Homo sapiens
tcacatcctctgaaaccacttttccctttcccacttggctatcctagatgaagactacgagatcctttcaggac

SEQ ID NO: 90502 - DNA, 74 bp, Homo sapiens
tgaaaccacttttccctttcccacttggctatcctagatgaagactacgagatcctttcaggactgccagactc

SEQ ID NO: 90503 - DNA, 76 bp, Homo sapiens
ttttccctttcccacttggctatcctagatgaagactacgagatcctttcaggactgccagactcggtgctgtaca

SEQ ID NO: 90504 - DNA, 78 bp, Homo sapiens
tttcccacttggctatcctagatgaagactacgagatcctttcaggactgccagactcggtgctgtacacctgcggac

SEQ ID NO: 90505 - DNA, 79 bp, Homo sapiens
ggctatcctagatgaagactacgagatcctttcaggactgccagactcggtgctgtacacctgcggaccgtgtgctggg

SEQ ID NO: 90506 - DNA, 80 bp, Homo sapiens
atgaagactacgagatcctttcaggactgccagactcggtgctgtacacctgcggaccgtgtgctggggcagcgcagccc

SEQ ID NO: 90507 - DNA, 80 bp, Homo sapiens
agatcctttcaggactgccagactcggtgctgtacacctgcggaccgtgtgctggggcagcgcagccccgctggcgagag

SEQ ID NO: 90508 - DNA, 77 bp, Homo sapiens
agactcggtgctgtacacctgcggaccgtgtgctggggcagcgcagccccgctggcgagaggccctgagcggggccc

SEQ ID NO: 90509 - DNA, 77 bp, Homo sapiens
tgctgtacacctgcggaccgtgtgctggggcagcgcagccccgctggcgagaggccctgagcggggccctccagggg

SEQ ID NO: 90510 - DNA, 77 bp, Homo sapiens
tgcggaccgtgtgctggggcagcgcagccccgctggcgagaggccctgagcggggccctccaggggggcctgcgcca

SEQ ID NO: 90511 - DNA, 78 bp, Homo sapiens
tgtgctggggcagcgcagccccgctggcgagaggccctgagcggggccctccaggggggcctgcgccaggtgctccag

SEQ ID NO: 90512 - DNA, 76 bp, Homo sapiens
ctggcgagaggccctgagcggggccctccaggggggcctgcgccaggtgctccagggcctgctgagctccaaggtg

SEQ ID NO: 90513 - DNA, 74 bp, Homo sapiens
cctgagcggggccctccaggggggcctgcgccaggtgctccagggcctgctgagctccaaggtggtgggcccac

SEQ ID NO: 90514 - DNA, 80 bp, Homo sapiens
gccctccaggggggcctgcgccaggtgctccagggcctgctgagctccaaggtggtgggcccactgctgctctgcaccca

SEQ ID NO: 90515 - DNA, 80 bp, Homo sapiens
ggggcctgcgccaggtgctccagggcctgctgagctccaaggtggtgggcccactgctgctctgcacccaggtctggagg

SEQ ID NO: 90516 - DNA, 79 bp, Homo sapiens
ccaggtgctccagggcctgctgagctccaaggtggtgggcccactgctgctctgcacccaggtctggagggccctggag

SEQ ID NO: 90517 - DNA, 80 bp, Homo sapiens
tccagggcctgctgagctccaaggtggtgggcccactgctgctctgcacccaggtctggagggccctggaggcaggatgg

SEQ ID NO: 90518 - DNA, 78 bp, Homo sapiens
ctgctgagctccaaggtggtgggcccactgctgctctgcacccaggtctggagggccctggaggcaggatgggccggg

SEQ ID NO: 90519 - DNA, 72 bp, Homo sapiens
tctgcacccaggtctggagggccctggaggcaggatgggccggggctaggcccacccccagccctgctaact

SEQ ID NO: 90520 - DNA, 69 bp, Homo sapiens
acccaggtctggagggccctggaggcaggatgggccggggctaggcccacccccagccctgctaacttc

SEQ ID NO: 90521 - DNA, 72 bp, Homo sapiens
atgggccggggctaggcccacccccagccctgctaacttccccgctttgcagtgtgggccagatgggaagca

SEQ ID NO: 90522 - DNA, 74 bp, Homo sapiens
ctaggcccacccccagccctgctaacttccccgctttgcagtgtgggccagatgggaagcaactgcacccagga

SEQ ID NO: 90523 - DNA, 74 bp, Homo sapiens
ccccagccctgctaacttccccgctttgcagtgtgggccagatgggaagcaactgcacccaggaccctgcggcc

SEQ ID NO: 90524 - DNA, 81 bp, Homo sapiens
tgctaacttccccgctttgcagtgtgggccagatgggaagcaactgcacccaggaccctgcggcctgcaagctgtgagtca

SEQ ID NO: 90525 - DNA, 82 bp, Homo sapiens
ccgctttgcagtgtgggccagatgggaagcaactgcacccaggaccctgcggcctgcaagctgtgagtcagcgcttcgagga

SEQ ID NO: 90526 - DNA, 82 bp, Homo sapiens
agtgtgggccagatgggaagcaactgcacccaggaccctgcggcctgcaagctgtgagtcagcgcttcgaggatggccacta

SEQ ID NO: 90527 - DNA, 82 bp, Homo sapiens
agatgggaagcaactgcacccaggaccctgcggcctgcaagctgtgagtcagcgcttcgaggatggccactacaagtctgtg

SEQ ID NO: 90528 - DNA, 81 bp, Homo sapiens
aactgcacccaggaccctgcggcctgcaagctgtgagtcagcgcttcgaggatggccactacaagtctgtggtgagtggta

SEQ ID NO: 90529 - DNA, 80 bp, Homo sapiens
aggaccctgcggcctgcaagctgtgagtcagcgcttcgaggatggccactacaagtctgtggtgagtggtacaccaggag

SEQ ID NO: 90530 - DNA, 82 bp, Homo sapiens
cctgcggcctgcaagctgtgagtcagcgcttcgaggatggccactacaagtctgtggtgagtggtacaccaggaggagcagg

SEQ ID NO: 90531 - DNA, 80 bp, Homo sapiens
aagctgtgagtcagcgcttcgaggatggccactacaagtctgtggtgagtggtacaccaggaggagcaggtgggtggcag

SEQ ID NO: 90532 - DNA, 79 bp, Homo sapiens
agtcagcgcttcgaggatggccactacaagtctgtggtgagtggtacaccaggaggagcaggtgggtggcaggaggaga

SEQ ID NO: 90533 - DNA, 81 bp, Homo sapiens
ctggaattgtgcagaggggactcagtctctgacaaacccccttacagcacagcttcatggaggacatggtgggcatcctca

SEQ ID NO: 90534 - DNA, 83 bp, Homo sapiens
ttgtgcagaggggactcagtctctgacaaacccccttacagcacagcttcatggaggacatggtgggcatcctcatgcggcac

SEQ ID NO: 90535 - DNA, 80 bp, Homo sapiens
actcagtctctgacaaacccccttacagcacagcttcatggaggacatggtgggcatcctcatgcggcactcggaggagg

SEQ ID NO: 90536 - DNA, 80 bp, Homo sapiens
ctctgacaaacccccttacagcacagcttcatggaggacatggtgggcatcctcatgcggcactcggaggagggagagac

SEQ ID NO: 90537 - DNA, 78 bp, Homo sapiens
ttacagcacagcttcatggaggacatggtgggcatcctcatgcggcactcggaggagggagagaccccggaccgccgg

SEQ ID NO: 90538 - DNA, 76 bp, Homo sapiens
agcttcatggaggacatggtgggcatcctcatgcggcactcggaggagggagagaccccggaccgccgggctggag

SEQ ID NO: 90539 - DNA, 75 bp, Homo sapiens
tgggcatcctcatgcggcactcggaggagggagagaccccggaccgccgggctggaggccagatgaaggggctcc

SEQ ID NO: 90540 - DNA, 75 bp, Homo sapiens
cctcatgcggcactcggaggagggagagaccccggaccgccgggctggaggccagatgaaggggctcctgctgaa

SEQ ID NO: 90541 - DNA, 74 bp, Homo sapiens
tcggaggagggagagaccccggaccgccgggctggaggccagatgaaggggctcctgctgaaggtgagctcttc

SEQ ID NO: 90542 - DNA, 71 bp, Homo sapiens
agggagagaccccggaccgccgggctggaggccagatgaaggggctcctgctgaaggtgagctcttccggg

SEQ ID NO: 90543 - DNA, 73 bp, Homo sapiens
cccggaccgccgggctggaggccagatgaaggggctcctgctgaaggtgagctcttccggggatgcttgtggg

SEQ ID NO: 90544 - DNA, 79 bp, Homo sapiens
tgcccctgccagctctcctggggaagctggctcttctcatcctgttaacccactccccagctgctagaatctgcgttcg

SEQ ID NO: 90545 - DNA, 77 bp, Homo sapiens
agctctcctggggaagctggctcttctcatcctgttaacccactccccagctgctagaatctgcgttcggctggttc

SEQ ID NO: 90546 - DNA, 77 bp, Homo sapiens
ggaagctggctcttctcatcctgttaacccactccccagctgctagaatctgcgttcggctggttcgacgcccacga

SEQ ID NO: 90547 - DNA, 75 bp, Homo sapiens
ctggctcttctcatcctgttaacccactccccagctgctagaatctgcgttcggctggttcgacgcccacgaccc

SEQ ID NO: 90548 - DNA, 72 bp, Homo sapiens
atcctgttaacccactccccagctgctagaatctgcgttcggctggttcgacgcccacgaccccaagtactg

SEQ ID NO: 90549 - DNA, 72 bp, Homo sapiens
actccccagctgctagaatctgcgttcggctggttcgacgcccacgaccccaagtactggcgacggagtacc

SEQ ID NO: 90550 - DNA, 73 bp, Homo sapiens
tgctagaatctgcgttcggctggttcgacgcccacgaccccaagtactggcgacggagtacccggctgccaaa

SEQ ID NO: 90551 - DNA, 71 bp, Homo sapiens
aatctgcgttcggctggttcgacgcccacgaccccaagtactggcgacggagtacccggctgccaaagtga

SEQ ID NO: 90552 - DNA, 71 bp, Homo sapiens
ctggttcgacgcccacgaccccaagtactggcgacggagtacccggctgccaaagtgagcaaggctgggta

SEQ ID NO: 90553 - DNA, 71 bp, Homo sapiens
cccacgaccccaagtactggcgacggagtacccggctgccaaagtgagcaaggctgggtagcagaagggaa

SEQ ID NO: 90554 - DNA, 70 bp, Homo sapiens
accccaagtactggcgacggagtacccggctgccaaagtgagcaaggctgggtagcagaagggaagccgg

SEQ ID NO: 90555 - DNA, 73 bp, Homo sapiens
actggcgacggagtacccggctgccaaagtgagcaaggctgggtagcagaagggaagccggggagtgagggca

SEQ ID NO: 90556 - DNA, 79 bp, Homo sapiens
gttcagctgcccttgttgggcacatcagctgctaaccctgcctgtccacagcggagtccttcccaatgcggtgttgccc

SEQ ID NO: 90557 - DNA, 77 bp, Homo sapiens
cttgttgggcacatcagctgctaaccctgcctgtccacagcggagtccttcccaatgcggtgttgcccccatccctg

SEQ ID NO: 90558 - DNA, 81 bp, Homo sapiens
acatcagctgctaaccctgcctgtccacagcggagtccttcccaatgcggtgttgcccccatccctggatcatgtctatgc

SEQ ID NO: 90559 - DNA, 80 bp, Homo sapiens
taaccctgcctgtccacagcggagtccttcccaatgcggtgttgcccccatccctggatcatgtctatgcgcagtggaga

SEQ ID NO: 90560 - DNA, 81 bp, Homo sapiens
cctgtccacagcggagtccttcccaatgcggtgttgcccccatccctggatcatgtctatgcgcagtggagacagcaggaa

SEQ ID NO: 90561 - DNA, 79 bp, Homo sapiens
cggagtccttcccaatgcggtgttgcccccatccctggatcatgtctatgcgcagtggagacagcaggaaccagagacc

SEQ ID NO: 90562 - DNA, 81 bp, Homo sapiens
tcccaatgcggtgttgcccccatccctggatcatgtctatgcgcagtggagacagcaggaaccagagaccccagaatcagg

SEQ ID NO: 90563 - DNA, 82 bp, Homo sapiens
gtgttgcccccatccctggatcatgtctatgcgcagtggagacagcaggaaccagagaccccagaatcagggcagcctccag

SEQ ID NO: 90564 - DNA, 82 bp, Homo sapiens
atccctggatcatgtctatgcgcagtggagacagcaggaaccagagaccccagaatcagggcagcctccaggggatccctca

SEQ ID NO: 90565 - DNA, 81 bp, Homo sapiens
atgtctatgcgcagtggagacagcaggaaccagagaccccagaatcagggcagcctccaggggatccctcagcaggtactg

SEQ ID NO: 90566 - DNA, 76 bp, Homo sapiens
agtggagacagcaggaaccagagaccccagaatcagggcagcctccaggggatccctcagcaggtactgggaagtg

SEQ ID NO: 90567 - DNA, 73 bp, Homo sapiens
acagcaggaaccagagaccccagaatcagggcagcctccaggggatccctcagcaggtactgggaagtggggg

SEQ ID NO: 90568 - DNA, 73 bp, Homo sapiens
agagaccccagaatcagggcagcctccaggggatccctcagcaggtactgggaagtgggggtccagaagccag

SEQ ID NO: 90569 - DNA, 74 bp, Homo sapiens
gtggcctggctccgggtcctgattcttagacctcccttcacatttcctcttcagcattccagggcaaggatccg

SEQ ID NO: 90570 - DNA, 76 bp, Homo sapiens
tccgggtcctgattcttagacctcccttcacatttcctcttcagcattccagggcaaggatccggctgccttctca

SEQ ID NO: 90571 - DNA, 76 bp, Homo sapiens
attcttagacctcccttcacatttcctcttcagcattccagggcaaggatccggctgccttctcacacctggagga

SEQ ID NO: 90572 - DNA, 75 bp, Homo sapiens
ccttcacatttcctcttcagcattccagggcaaggatccggctgccttctcacacctggaggacccccgtcagtg

SEQ ID NO: 90573 - DNA, 77 bp, Homo sapiens
acatttcctcttcagcattccagggcaaggatccggctgccttctcacacctggaggacccccgtcagtgtgcactc

SEQ ID NO: 90574 - DNA, 79 bp, Homo sapiens
ttcagcattccagggcaaggatccggctgccttctcacacctggaggacccccgtcagtgtgcactctgcctcaaatac

SEQ ID NO: 90575 - DNA, 78 bp, Homo sapiens
caaggatccggctgccttctcacacctggaggacccccgtcagtgtgcactctgcctcaaatacggggatgcagactc

SEQ ID NO: 90576 - DNA, 77 bp, Homo sapiens
atccggctgccttctcacacctggaggacccccgtcagtgtgcactctgcctcaaatacggggatgcagactccaag

SEQ ID NO: 90577 - DNA, 79 bp, Homo sapiens
ttctcacacctggaggacccccgtcagtgtgcactctgcctcaaatacggggatgcagactccaaggtgagggctgctc

SEQ ID NO: 90578 - DNA, 79 bp, Homo sapiens
aggacccccgtcagtgtgcactctgcctcaaatacggggatgcagactccaaggtgagggctgctctgtgacgcaccag

SEQ ID NO: 90579 - DNA, 80 bp, Homo sapiens
cccgtcagtgtgcactctgcctcaaatacggggatgcagactccaaggtgagggctgctctgtgacgcaccaggttgtgg

SEQ ID NO: 90580 - DNA, 77 bp, Homo sapiens
aaggtgagggctgctctgtgacgcaccaggttgtggggcctgttccctggcctccccacatcatgccactcctcttc

SEQ ID NO: 90581 - DNA, 77 bp, Homo sapiens
ctgttccctggcctccccacatcatgccactcctcttctgccccaggaggcggggcggctcttgtacatcgggcaga

SEQ ID NO: 90582 - DNA, 78 bp, Homo sapiens
gcctccccacatcatgccactcctcttctgccccaggaggcggggcggctcttgtacatcgggcagaacgagtggaca

SEQ ID NO: 90583 - DNA, 78 bp, Homo sapiens
acatcatgccactcctcttctgccccaggaggcggggcggctcttgtacatcgggcagaacgagtggacacacgtcaa

SEQ ID NO: 90584 - DNA, 78 bp, Homo sapiens
tcctcttctgccccaggaggcggggcggctcttgtacatcgggcagaacgagtggacacacgtcaactgtgccatctg

SEQ ID NO: 90585 - DNA, 77 bp, Homo sapiens
ttctgccccaggaggcggggcggctcttgtacatcgggcagaacgagtggacacacgtcaactgtgccatctggtcg

SEQ ID NO: 90586 - DNA, 76 bp, Homo sapiens
cggggcggctcttgtacatcgggcagaacgagtggacacacgtcaactgtgccatctggtcggcggaagtcttcga

SEQ ID NO: 90587 - DNA, 77 bp, Homo sapiens
tcttgtacatcgggcagaacgagtggacacacgtcaactgtgccatctggtcggcggaagtcttcgaggagaacgac

SEQ ID NO: 90588 - DNA, 76 bp, Homo sapiens
acatcgggcagaacgagtggacacacgtcaactgtgccatctggtcggcggaagtcttcgaggagaacgacggctc

SEQ ID NO: 90589 - DNA, 74 bp, Homo sapiens
aacgagtggacacacgtcaactgtgccatctggtcggcggaagtcttcgaggagaacgacggctccctcaagaa

SEQ ID NO: 90590 - DNA, 81 bp, Homo sapiens
acacacgtcaactgtgccatctggtcggcggaagtcttcgaggagaacgacggctccctcaagaatgtgcatgctgctgtg

SEQ ID NO: 90591 - DNA, 79 bp, Homo sapiens
actgtgccatctggtcggcggaagtcttcgaggagaacgacggctccctcaagaatgtgcatgctgctgtggcccgagg

SEQ ID NO: 90592 - DNA, 79 bp, Homo sapiens
ctggtcggcggaagtcttcgaggagaacgacggctccctcaagaatgtgcatgctgctgtggcccgagggaggcagatg

SEQ ID NO: 90593 - DNA, 79 bp, Homo sapiens
aagtcttcgaggagaacgacggctccctcaagaatgtgcatgctgctgtggcccgagggaggcagatggtgagggcgcg

SEQ ID NO: 90594 - DNA, 81 bp, Homo sapiens
aggagaacgacggctccctcaagaatgtgcatgctgctgtggcccgagggaggcagatggtgagggcgcgggcgcagagag

SEQ ID NO: 90595 - DNA, 86 bp, Homo sapiens
tccctcaagaatgtgcatgctgctgtggcccgagggaggcagatggtgagggcgcgggcgcagagaggtggacagctctctggctc

SEQ ID NO: 90596 - DNA, 80 bp, Homo sapiens
cagccccagccctggcttctcccctgagctgccctcccctacgcagcgctgcgagctctgcctgaagcctggcgccacgg

SEQ ID NO: 90597 - DNA, 82 bp, Homo sapiens
cctggcttctcccctgagctgccctcccctacgcagcgctgcgagctctgcctgaagcctggcgccacggtgggctgctgcc

SEQ ID NO: 90598 - DNA, 82 bp, Homo sapiens
cttctcccctgagctgccctcccctacgcagcgctgcgagctctgcctgaagcctggcgccacggtgggctgctgcctgtcc

SEQ ID NO: 90599 - DNA, 82 bp, Homo sapiens
cctcctgcctcagcaacttccacttcatgtgtgcccgggccagctactgcatcttccaggatgacaagaaagtcttctgcca

SEQ ID NO: 90600 - DNA, 82 bp, Homo sapiens
tcagcaacttccacttcatgtgtgcccgggccagctactgcatcttccaggatgacaagaaagtcttctgccagaaacacac

SEQ ID NO: 90601 - DNA, 81 bp, Homo sapiens
acttccacttcatgtgtgcccgggccagctactgcatcttccaggatgacaagaaagtcttctgccagaaacacactgatc

SEQ ID NO: 90602 - DNA, 83 bp, Homo sapiens
atgtgtgcccgggccagctactgcatcttccaggatgacaagaaagtcttctgccagaaacacactgatctcctggatggcaa

SEQ ID NO: 90603 - DNA, 82 bp, Homo sapiens
ccagctactgcatcttccaggatgacaagaaagtcttctgccagaaacacactgatctcctggatggcaaggtgggccagaa

SEQ ID NO: 90604 - DNA, 78 bp, Homo sapiens
atcttccaggatgacaagaaagtcttctgccagaaacacactgatctcctggatggcaaggtgggccagaactgtggg

SEQ ID NO: 90605 - DNA, 77 bp, Homo sapiens
aggatgacaagaaagtcttctgccagaaacacactgatctcctggatggcaaggtgggccagaactgtggggtacac

SEQ ID NO: 90606 - DNA, 74 bp, Homo sapiens
aagaaagtcttctgccagaaacacactgatctcctggatggcaaggtgggccagaactgtggggtacacggttc

SEQ ID NO: 90607 - DNA, 69 bp, Homo sapiens
ctcccccaccaatgcagccacctcactttgccaccccctcttccaggaaattgtgaaccccgatggttt

SEQ ID NO: 90608 - DNA, 72 bp, Homo sapiens
accaatgcagccacctcactttgccaccccctcttccaggaaattgtgaaccccgatggttttgatgttctc

SEQ ID NO: 90609 - DNA, 70 bp, Homo sapiens
cctcactttgccaccccctcttccaggaaattgtgaaccccgatggttttgatgttctccgccgagtcta

SEQ ID NO: 90610 - DNA, 70 bp, Homo sapiens
ccaccccctcttccaggaaattgtgaaccccgatggttttgatgttctccgccgagtctatgtggacttc

SEQ ID NO: 90611 - DNA, 73 bp, Homo sapiens
ttccaggaaattgtgaaccccgatggttttgatgttctccgccgagtctatgtggacttcgagggcatcaact

SEQ ID NO: 90612 - DNA, 73 bp, Homo sapiens
aaattgtgaaccccgatggttttgatgttctccgccgagtctatgtggacttcgagggcatcaacttcaagcg

SEQ ID NO: 90613 - DNA, 74 bp, Homo sapiens
ccgatggttttgatgttctccgccgagtctatgtggacttcgagggcatcaacttcaagcggaagttcttgacg

SEQ ID NO: 90614 - DNA, 75 bp, Homo sapiens
tttgatgttctccgccgagtctatgtggacttcgagggcatcaacttcaagcggaagttcttgacggggcttgaa

SEQ ID NO: 90615 - DNA, 76 bp, Homo sapiens
gccgagtctatgtggacttcgagggcatcaacttcaagcggaagttcttgacggggcttgaacccgatgccatcaa

SEQ ID NO: 90616 - DNA, 77 bp, Homo sapiens
tatgtggacttcgagggcatcaacttcaagcggaagttcttgacggggcttgaacccgatgccatcaacgtgctcat

SEQ ID NO: 90617 - DNA, 75 bp, Homo sapiens
acttcgagggcatcaacttcaagcggaagttcttgacggggcttgaacccgatgccatcaacgtgctcattggta

SEQ ID NO: 90618 - DNA, 78 bp, Homo sapiens
atcaacttcaagcggaagttcttgacggggcttgaacccgatgccatcaacgtgctcattggtaagctgcctgctctc

SEQ ID NO: 90619 - DNA, 76 bp, Homo sapiens
aagcggaagttcttgacggggcttgaacccgatgccatcaacgtgctcattggtaagctgcctgctctccgccctg

SEQ ID NO: 90620 - DNA, 77 bp, Homo sapiens
tcttgacggggcttgaacccgatgccatcaacgtgctcattggtaagctgcctgctctccgccctgtcctcctaccc

SEQ ID NO: 90621 - DNA, 81 bp, Homo sapiens
atgccatcaacgtgctcattggtaagctgcctgctctccgccctgtcctcctaccctgtcctgcctgcctctcctgacctc

SEQ ID NO: 90622 - DNA, 79 bp, Homo sapiens
ctcattggtaagctgcctgctctccgccctgtcctcctaccctgtcctgcctgcctctcctgacctccgctttgcacca

SEQ ID NO: 90623 - DNA, 78 bp, Homo sapiens
tggtaagctgcctgctctccgccctgtcctcctaccctgtcctgcctgcctctcctgacctccgctttgcaccacagg

SEQ ID NO: 90624 - DNA, 78 bp, Homo sapiens
tctccgccctgtcctcctaccctgtcctgcctgcctctcctgacctccgctttgcaccacaggttccatccgcattga

SEQ ID NO: 90625 - DNA, 76 bp, Homo sapiens
tcctaccctgtcctgcctgcctctcctgacctccgctttgcaccacaggttccatccgcattgactccctgggtac

SEQ ID NO: 90626 - DNA, 80 bp, Homo sapiens
cctgcctgcctctcctgacctccgctttgcaccacaggttccatccgcattgactccctgggtactctgtctgatctctc

SEQ ID NO: 90627 - DNA, 80 bp, Homo sapiens
tctcctgacctccgctttgcaccacaggttccatccgcattgactccctgggtactctgtctgatctctcggactgcgag

SEQ ID NO: 90628 - DNA, 77 bp, Homo sapiens
acctccgctttgcaccacaggttccatccgcattgactccctgggtactctgtctgatctctcggactgcgagggac

SEQ ID NO: 90629 - DNA, 78 bp, Homo sapiens
tttgcaccacaggttccatccgcattgactccctgggtactctgtctgatctctcggactgcgagggacggctcttcc

SEQ ID NO: 90630 - DNA, 78 bp, Homo sapiens
ttccatccgcattgactccctgggtactctgtctgatctctcggactgcgagggacggctcttccccattggctacca

SEQ ID NO: 90631 - DNA, 76 bp, Homo sapiens
attgactccctgggtactctgtctgatctctcggactgcgagggacggctcttccccattggctaccagtgagcgg

SEQ ID NO: 90632 - DNA, 74 bp, Homo sapiens
ccctgggtactctgtctgatctctcggactgcgagggacggctcttccccattggctaccagtgagcggtcggg

SEQ ID NO: 90633 - DNA, 78 bp, Homo sapiens
tgtctgatctctcggactgcgagggacggctcttccccattggctaccagtgagcggtcggggtgatccatggggcca

SEQ ID NO: 90634 - DNA, 73 bp, Homo sapiens
ctctcggactgcgagggacggctcttccccattggctaccagtgagcggtcggggtgatccatggggccaggg

SEQ ID NO: 90635 - DNA, 74 bp, Homo sapiens
ggggtgatccatggggccaggggactccatagctggatcccatttcccaagcatcctaaccgtcttatcccaca

SEQ ID NO: 90636 - DNA, 79 bp, Homo sapiens
tagctggatcccatttcccaagcatcctaaccgtcttatcccacatgccaggtgctcccgtctgtactggagcacagtg

SEQ ID NO: 90637 - DNA, 78 bp, Homo sapiens
atttcccaagcatcctaaccgtcttatcccacatgccaggtgctcccgtctgtactggagcacagtggatgctcggag

SEQ ID NO: 90638 - DNA, 81 bp, Homo sapiens
atcctaaccgtcttatcccacatgccaggtgctcccgtctgtactggagcacagtggatgctcggaggcgctgctggtatc

SEQ ID NO: 90639 - DNA, 83 bp, Homo sapiens
ttatcccacatgccaggtgctcccgtctgtactggagcacagtggatgctcggaggcgctgctggtatcggtgccgaattctg

SEQ ID NO: 90640 - DNA, 83 bp, Homo sapiens
acatgccaggtgctcccgtctgtactggagcacagtggatgctcggaggcgctgctggtatcggtgccgaattctggagtatc

SEQ ID NO: 90641 - DNA, 80 bp, Homo sapiens
ctcccgtctgtactggagcacagtggatgctcggaggcgctgctggtatcggtgccgaattctggagtatcggccatggg

SEQ ID NO: 90642 - DNA, 81 bp, Homo sapiens
tctgtactggagcacagtggatgctcggaggcgctgctggtatcggtgccgaattctggagtatcggccatgggggccgag

SEQ ID NO: 90643 - DNA, 78 bp, Homo sapiens
acagtggatgctcggaggcgctgctggtatcggtgccgaattctggagtatcggccatgggggccgagggaagagcca

SEQ ID NO: 90644 - DNA, 78 bp, Homo sapiens
atgctcggaggcgctgctggtatcggtgccgaattctggagtatcggccatgggggccgagggaagagccagctcacc

SEQ ID NO: 90645 - DNA, 80 bp, Homo sapiens
cgctgctggtatcggtgccgaattctggagtatcggccatgggggccgagggaagagccagctcacctggaggctgcaga

SEQ ID NO: 90646 - DNA, 78 bp, Homo sapiens
tatcggtgccgaattctggagtatcggccatgggggccgagggaagagccagctcacctggaggctgcagaggagaac

SEQ ID NO: 90647 - DNA, 77 bp, Homo sapiens
aattctggagtatcggccatgggggccgagggaagagccagctcacctggaggctgcagaggagaaccagaccattg

SEQ ID NO: 90648 - DNA, 79 bp, Homo sapiens
gtatcggccatgggggccgagggaagagccagctcacctggaggctgcagaggagaaccagaccattgtgcacagcccc

SEQ ID NO: 90649 - DNA, 78 bp, Homo sapiens
gccgagggaagagccagctcacctggaggctgcagaggagaaccagaccattgtgcacagccccgccccttcctcagg

SEQ ID NO: 90650 - DNA, 78 bp, Homo sapiens
aagagccagctcacctggaggctgcagaggagaaccagaccattgtgcacagccccgccccttcctcaggtgtggctt

SEQ ID NO: 90651 - DNA, 77 bp, Homo sapiens
acctggaggctgcagaggagaaccagaccattgtgcacagccccgccccttcctcaggtgtggctttggctctgtct

SEQ ID NO: 90652 - DNA, 79 bp, Homo sapiens
tgcagaggagaaccagaccattgtgcacagccccgccccttcctcaggtgtggctttggctctgtcttcttcctgaata

SEQ ID NO: 90653 - DNA, 75 bp, Homo sapiens
aggagaaccagaccattgtgcacagccccgccccttcctcaggtgtggctttggctctgtcttcttcctgaatac

SEQ ID NO: 90654 - DNA, 73 bp, Homo sapiens
ggctttgacacagagcccctaccaccccaatgccatttctcgcctcttcagagcccccaggtggtgaggaccc

SEQ ID NO: 90655 - DNA, 71 bp, Homo sapiens
cccctaccaccccaatgccatttctcgcctcttcagagcccccaggtggtgaggaccccccactggacaca

SEQ ID NO: 90656 - DNA, 74 bp, Homo sapiens
cccaatgccatttctcgcctcttcagagcccccaggtggtgaggaccccccactggacacagatgttcttgtcc

SEQ ID NO: 90657 - DNA, 74 bp, Homo sapiens
atttctcgcctcttcagagcccccaggtggtgaggaccccccactggacacagatgttcttgtccctggagctc

SEQ ID NO: 90658 - DNA, 77 bp, Homo sapiens
cccaggtggtgaggaccccccactggacacagatgttcttgtccctggagctcctgagcgccactcgcccattcaga

SEQ ID NO: 90659 - DNA, 78 bp, Homo sapiens
tggtgaggaccccccactggacacagatgttcttgtccctggagctcctgagcgccactcgcccattcagaacctgga

SEQ ID NO: 90660 - DNA, 80 bp, Homo sapiens
cactggacacagatgttcttgtccctggagctcctgagcgccactcgcccattcagaacctggaccctccactgcggcca

SEQ ID NO: 90661 - DNA, 80 bp, Homo sapiens
acacagatgttcttgtccctggagctcctgagcgccactcgcccattcagaacctggaccctccactgcggccagattca

SEQ ID NO: 90662 - DNA, 80 bp, Homo sapiens
ttcttgtccctggagctcctgagcgccactcgcccattcagaacctggaccctccactgcggccagattcaggcagcgcc

SEQ ID NO: 90663 - DNA, 81 bp, Homo sapiens
tggagctcctgagcgccactcgcccattcagaacctggaccctccactgcggccagattcaggcagcgcccctcctccagc

SEQ ID NO: 90664 - DNA, 73 bp, Homo sapiens
ccactcgcccattcagaacctggaccctccactgcggccagattcaggcagcgcccctcctccagccccccgt

SEQ ID NO: 90665 - DNA, 71 bp, Homo sapiens
attcagaacctggaccctccactgcggccagattcaggcagcgcccctcctccagccccccgttctttttc

SEQ ID NO: 90666 - DNA, 68 bp, Homo sapiens
aacctggaccctccactgcggccagattcaggcagcgcccctcctccagccccccgttctttttcggg

SEQ ID NO: 90667 - DNA, 71 bp, Homo sapiens
actgcggccagattcaggcagcgcccctcctccagccccccgttctttttcgggggctcgaatcaaagtgc

SEQ ID NO: 90668 - DNA, 69 bp, Homo sapiens
agattcaggcagcgcccctcctccagccccccgttctttttcgggggctcgaatcaaagtgcccaacta

SEQ ID NO: 90669 - DNA, 68 bp, Homo sapiens
agcgcccctcctccagccccccgttctttttcgggggctcgaatcaaagtgcccaactactcgccatc

SEQ ID NO: 90670 - DNA, 67 bp, Homo sapiens
ctccagccccccgttctttttcgggggctcgaatcaaagtgcccaactactcgccatcccggaggcc

SEQ ID NO: 90671 - DNA, 65 bp, Homo sapiens
ccccgttctttttcgggggctcgaatcaaagtgcccaactactcgccatcccggaggcccttggg

SEQ ID NO: 90672 - DNA, 67 bp, Homo sapiens
tttttcgggggctcgaatcaaagtgcccaactactcgccatcccggaggcccttggggggtgtctcc

SEQ ID NO: 90673 - DNA, 69 bp, Homo sapiens
ctcgaatcaaagtgcccaactactcgccatcccggaggcccttggggggtgtctcctttggccccctgc

SEQ ID NO: 90674 - DNA, 66 bp, Homo sapiens
aagtgcccaactactcgccatcccggaggcccttggggggtgtctcctttggccccctgccctccc

SEQ ID NO: 90675 - DNA, 68 bp, Homo sapiens
ctactcgccatcccggaggcccttggggggtgtctcctttggccccctgccctcccctggtgagcacc

SEQ ID NO: 90676 - DNA, 68 bp, Homo sapiens
tcccggaggcccttggggggtgtctcctttggccccctgccctcccctggtgagcaccgggcatgtgg

SEQ ID NO: 90677 - DNA, 66 bp, Homo sapiens
ccttggggggtgtctcctttggccccctgccctcccctggtgagcaccgggcatgtgggggttggg

SEQ ID NO: 90678 - DNA, 71 bp, Homo sapiens
ccctggtgagcaccgggcatgtgggggttgggggtggagccgcggaggtgggagctgctggtaacaccaac

SEQ ID NO: 90679 - DNA, 73 bp, Homo sapiens
gtggagccgcggaggtgggagctgctggtaacaccaaccctccccccacaggaagtccatcttcactgaccca

SEQ ID NO: 90680 - DNA, 72 bp, Homo sapiens
ggaggtgggagctgctggtaacaccaaccctccccccacaggaagtccatcttcactgacccaccacatccc

SEQ ID NO: 90681 - DNA, 73 bp, Homo sapiens
ctgctggtaacaccaaccctccccccacaggaagtccatcttcactgacccaccacatccccacagtgggaga

SEQ ID NO: 90682 - DNA, 69 bp, Homo sapiens
aaccctccccccacaggaagtccatcttcactgacccaccacatccccacagtgggagacccggacttc

SEQ ID NO: 90683 - DNA, 71 bp, Homo sapiens
cccccacaggaagtccatcttcactgacccaccacatccccacagtgggagacccggacttcccagctccc

SEQ ID NO: 90684 - DNA, 70 bp, Homo sapiens
aagtccatcttcactgacccaccacatccccacagtgggagacccggacttcccagctccccccagacgt

SEQ ID NO: 90685 - DNA, 69 bp, Homo sapiens
ttcactgacccaccacatccccacagtgggagacccggacttcccagctccccccagacgttcccgtcg

SEQ ID NO: 90686 - DNA, 66 bp, Homo sapiens
acatccccacagtgggagacccggacttcccagctccccccagacgttcccgtcgtcccagccctt

SEQ ID NO: 90687 - DNA, 67 bp, Homo sapiens
acagtgggagacccggacttcccagctccccccagacgttcccgtcgtcccagccctttggctccca

SEQ ID NO: 90688 - DNA, 69 bp, Homo sapiens
ccggacttcccagctccccccagacgttcccgtcgtcccagccctttggctcccaggccgcctccatca

SEQ ID NO: 90689 - DNA, 69 bp, Homo sapiens
ttcccagctccccccagacgttcccgtcgtcccagccctttggctcccaggccgcctccatcacggtgg

SEQ ID NO: 90690 - DNA, 70 bp, Homo sapiens
cagacgttcccgtcgtcccagccctttggctcccaggccgcctccatcacggtgggcctcccctcctcta

SEQ ID NO: 90691 - DNA, 68 bp, Homo sapiens
ttcccgtcgtcccagccctttggctcccaggccgcctccatcacggtgggcctcccctcctctaaaaa

SEQ ID NO: 90692 - DNA, 71 bp, Homo sapiens
ttggctcccaggccgcctccatcacggtgggcctcccctcctctaaaaacctcccctcagctcagggtgcc

SEQ ID NO: 90693 - DNA, 69 bp, Homo sapiens
cctccatcacggtgggcctcccctcctctaaaaacctcccctcagctcagggtgccccctcctacctca

SEQ ID NO: 90694 - DNA, 70 bp, Homo sapiens
tcacggtgggcctcccctcctctaaaaacctcccctcagctcagggtgccccctcctacctcagtcgtca

SEQ ID NO: 90695 - DNA, 71 bp, Homo sapiens
ccctcctctaaaaacctcccctcagctcagggtgccccctcctacctcagtcgtcacagccctcacaccta

SEQ ID NO: 90696 - DNA, 72 bp, Homo sapiens
ctctaaaaacctcccctcagctcagggtgccccctcctacctcagtcgtcacagccctcacacctacctcag

SEQ ID NO: 90697 - DNA, 75 bp, Homo sapiens
tcccctcagctcagggtgccccctcctacctcagtcgtcacagccctcacacctacctcaggggagctggctccc

SEQ ID NO: 90698 - DNA, 71 bp, Homo sapiens
agggtgccccctcctacctcagtcgtcacagccctcacacctacctcaggggagctggctccccctggccc

SEQ ID NO: 90699 - DNA, 74 bp, Homo sapiens
ctcctacctcagtcgtcacagccctcacacctacctcaggggagctggctccccctggcccggccccatctcca

SEQ ID NO: 90700 - DNA, 73 bp, Homo sapiens
ctcagtcgtcacagccctcacacctacctcaggggagctggctccccctggcccggccccatctccaccaccc

SEQ ID NO: 90701 - DNA, 71 bp, Homo sapiens
acagccctcacacctacctcaggggagctggctccccctggcccggccccatctccaccaccccctgaaga

SEQ ID NO: 90702 - DNA, 70 bp, Homo sapiens
ctacctcaggggagctggctccccctggcccggccccatctccaccaccccctgaagacctgggcccaga

SEQ ID NO: 90703 - DNA, 71 bp, Homo sapiens
agctggctccccctggcccggccccatctccaccaccccctgaagacctgggcccagacttcgaggacatg

SEQ ID NO: 90704 - DNA, 70 bp, Homo sapiens
ccctggcccggccccatctccaccaccccctgaagacctgggcccagacttcgaggacatggaggtggtg

SEQ ID NO: 90705 - DNA, 79 bp, Homo sapiens
cctgaagacctgggcccagacttcgaggacatggaggtggtgtcaggactgagtgctgctgacctggacttcgcggcca

SEQ ID NO: 90706 - DNA, 80 bp, Homo sapiens
acctgggcccagacttcgaggacatggaggtggtgtcaggactgagtgctgctgacctggacttcgcggccagcctgctg

SEQ ID NO: 90707 - DNA, 81 bp, Homo sapiens
agacttcgaggacatggaggtggtgtcaggactgagtgctgctgacctggacttcgcggccagcctgctggggactgagcc

SEQ ID NO: 90708 - DNA, 80 bp, Homo sapiens
acatggaggtggtgtcaggactgagtgctgctgacctggacttcgcggccagcctgctggggactgagcccttccaggaa

SEQ ID NO: 90709 - DNA, 76 bp, Homo sapiens
ctgacctggacttcgcggccagcctgctggggactgagcccttccaggaagagattgtagccgctggggccatggg

SEQ ID NO: 90710 - DNA, 77 bp, Homo sapiens
acttcgcggccagcctgctggggactgagcccttccaggaagagattgtagccgctggggccatggggagcagccac

SEQ ID NO: 90711 - DNA, 74 bp, Homo sapiens
agcctgctggggactgagcccttccaggaagagattgtagccgctggggccatggggagcagccacgggggccc

SEQ ID NO: 90712 - DNA, 72 bp, Homo sapiens
actgagcccttccaggaagagattgtagccgctggggccatggggagcagccacgggggcccgggggacagc

SEQ ID NO: 90713 - DNA, 72 bp, Homo sapiens
ttccaggaagagattgtagccgctggggccatggggagcagccacgggggcccgggggacagctccgaggag

SEQ ID NO: 90714 - DNA, 73 bp, Homo sapiens
agagattgtagccgctggggccatggggagcagccacgggggcccgggggacagctccgaggaggagtccagc

SEQ ID NO: 90715 - DNA, 70 bp, Homo sapiens
ccgctggggccatggggagcagccacgggggcccgggggacagctccgaggaggagtccagccccacctc

SEQ ID NO: 90716 - DNA, 70 bp, Homo sapiens
gggagcagccacgggggcccgggggacagctccgaggaggagtccagccccacctcccgctacatccact

SEQ ID NO: 90717 - DNA, 69 bp, Homo sapiens
acgggggcccgggggacagctccgaggaggagtccagccccacctcccgctacatccacttccctgtga

SEQ ID NO: 90718 - DNA, 72 bp, Homo sapiens
ggaggagtccagccccacctcccgctacatccacttccctgtgactgtggtgtccgcccctggtctggcccc

SEQ ID NO: 90719 - DNA, 72 bp, Homo sapiens
cccgctacatccacttccctgtgactgtggtgtccgcccctggtctggcccccagcgctacccctggagccc

SEQ ID NO: 90720 - DNA, 71 bp, Homo sapiens
acttccctgtgactgtggtgtccgcccctggtctggcccccagcgctacccctggagccccccgcattgaa

SEQ ID NO: 90721 - DNA, 73 bp, Homo sapiens
gtgactgtggtgtccgcccctggtctggcccccagcgctacccctggagccccccgcattgaacagctggacg

SEQ ID NO: 90722 - DNA, 73 bp, Homo sapiens
tgtccgcccctggtctggcccccagcgctacccctggagccccccgcattgaacagctggacggcgtggacga

SEQ ID NO: 90723 - DNA, 76 bp, Homo sapiens
gtctggcccccagcgctacccctggagccccccgcattgaacagctggacggcgtggacgacggcactgacagtga

SEQ ID NO: 90724 - DNA, 77 bp, Homo sapiens
cccagcgctacccctggagccccccgcattgaacagctggacggcgtggacgacggcactgacagtgaggctgaggc

SEQ ID NO: 90725 - DNA, 79 bp, Homo sapiens
aacagctggacggcgtggacgacggcactgacagtgaggctgaggcggtgcagcagcctcggggccagggcacgcctcc

SEQ ID NO: 90726 - DNA, 76 bp, Homo sapiens
acggcgtggacgacggcactgacagtgaggctgaggcggtgcagcagcctcggggccagggcacgcctccttcggg

SEQ ID NO: 90727 - DNA, 77 bp, Homo sapiens
acggcactgacagtgaggctgaggcggtgcagcagcctcggggccagggcacgcctccttcggggccaggagtagtc

SEQ ID NO: 90728 - DNA, 74 bp, Homo sapiens
agtgaggctgaggcggtgcagcagcctcggggccagggcacgcctccttcggggccaggagtagtccgggcagg

SEQ ID NO: 90729 - DNA, 72 bp, Homo sapiens
tgaggcggtgcagcagcctcggggccagggcacgcctccttcggggccaggagtagtccgggcaggggtcct

SEQ ID NO: 90730 - DNA, 71 bp, Homo sapiens
agcagcctcggggccagggcacgcctccttcggggccaggagtagtccgggcaggggtccttggggctgca

SEQ ID NO: 90731 - DNA, 69 bp, Homo sapiens
gggccagggcacgcctccttcggggccaggagtagtccgggcaggggtccttggggctgcaggggacag

SEQ ID NO: 90732 - DNA, 67 bp, Homo sapiens
acgcctccttcggggccaggagtagtccgggcaggggtccttggggctgcaggggacagggcccggc

SEQ ID NO: 90733 - DNA, 71 bp, Homo sapiens
ggccaggagtagtccgggcaggggtccttggggctgcaggggacagggcccggcctcctgaggacctgcca

SEQ ID NO: 90734 - DNA, 70 bp, Homo sapiens
tagtccgggcaggggtccttggggctgcaggggacagggcccggcctcctgaggacctgccatcggaaat

SEQ ID NO: 90735 - DNA, 72 bp, Homo sapiens
gggctgcaggggacagggcccggcctcctgaggacctgccatcggaaattgtggattttgtgttgaagaacc

SEQ ID NO: 90736 - DNA, 68 bp, Homo sapiens
cccggcctcctgaggacctgccatcggaaattgtggattttgtgttgaagaacctagggggtcctggg

SEQ ID NO: 90737 - DNA, 70 bp, Homo sapiens
atcggaaattgtggattttgtgttgaagaacctagggggtcctggggatggaggtgctggccctagagag

SEQ ID NO: 90738 - DNA, 71 bp, Homo sapiens
aaattgtggattttgtgttgaagaacctagggggtcctggggatggaggtgctggccctagagaggagtca

SEQ ID NO: 90739 - DNA, 69 bp, Homo sapiens
ttttgtgttgaagaacctagggggtcctggggatggaggtgctggccctagagaggagtcactcccccc

SEQ ID NO: 90740 - DNA, 68 bp, Homo sapiens
aagaacctagggggtcctggggatggaggtgctggccctagagaggagtcactccccccggcgcctcc

SEQ ID NO: 90741 - DNA, 74 bp, Homo sapiens
ggtcctggggatggaggtgctggccctagagaggagtcactccccccggcgcctcccctggctaatggcagcca

SEQ ID NO: 90742 - DNA, 74 bp, Homo sapiens
atggaggtgctggccctagagaggagtcactccccccggcgcctcccctggctaatggcagccagccctcccaa

SEQ ID NO: 90743 - DNA, 73 bp, Homo sapiens
ctggccctagagaggagtcactccccccggcgcctcccctggctaatggcagccagccctcccaaggcctgac

SEQ ID NO: 90744 - DNA, 73 bp, Homo sapiens
agaggagtcactccccccggcgcctcccctggctaatggcagccagccctcccaaggcctgaccgccagccca

SEQ ID NO: 90745 - DNA, 72 bp, Homo sapiens
actccccccggcgcctcccctggctaatggcagccagccctcccaaggcctgaccgccagcccagctgaccc

SEQ ID NO: 90746 - DNA, 76 bp, Homo sapiens
ctcccctggctaatggcagccagccctcccaaggcctgaccgccagcccagctgaccccacccgcacatttgcctg

SEQ ID NO: 90747 - DNA, 78 bp, Homo sapiens
tggctaatggcagccagccctcccaaggcctgaccgccagcccagctgaccccacccgcacatttgcctggctcccag

SEQ ID NO: 90748 - DNA, 73 bp, Homo sapiens
agccagccctcccaaggcctgaccgccagcccagctgaccccacccgcacatttgcctggctcccaggggccc

SEQ ID NO: 90749 - DNA, 72 bp, Homo sapiens
tcccaaggcctgaccgccagcccagctgaccccacccgcacatttgcctggctcccaggggccccaggggtc

SEQ ID NO: 90750 - DNA, 68 bp, Homo sapiens
agctgaccccacccgcacatttgcctggctcccaggggccccaggggtccgggtgttaagccttggcc

SEQ ID NO: 90751 - DNA, 67 bp, Homo sapiens
cccacccgcacatttgcctggctcccaggggccccaggggtccgggtgttaagccttggccctgccc

SEQ ID NO: 90752 - DNA, 66 bp, Homo sapiens
atttgcctggctcccaggggccccaggggtccgggtgttaagccttggccctgcccctgagccccc

SEQ ID NO: 90753 - DNA, 65 bp, Homo sapiens
caggggccccaggggtccgggtgttaagccttggccctgcccctgagccccccaaacccgccaca

SEQ ID NO: 90754 - DNA, 72 bp, Homo sapiens
gtgttaagccttggccctgcccctgagccccccaaacccgccacatccaaaatcatacttgtcaacaagctg

SEQ ID NO: 90755 - DNA, 72 bp, Homo sapiens
ttggccctgcccctgagccccccaaacccgccacatccaaaatcatacttgtcaacaagctggggcaagtat

SEQ ID NO: 90756 - DNA, 73 bp, Homo sapiens
cccaaacccgccacatccaaaatcatacttgtcaacaagctggggcaagtatttgtgaagatggctggggagg

SEQ ID NO: 90757 - DNA, 75 bp, Homo sapiens
ccacatccaaaatcatacttgtcaacaagctggggcaagtatttgtgaagatggctggggagggtgaacctgtcc

SEQ ID NO: 90758 - DNA, 72 bp, Homo sapiens
aaaatcatacttgtcaacaagctggggcaagtatttgtgaagatggctggggagggtgaacctgtcccaccc

SEQ ID NO: 90759 - DNA, 73 bp, Homo sapiens
tacttgtcaacaagctggggcaagtatttgtgaagatggctggggagggtgaacctgtcccacccccagtgaa

SEQ ID NO: 90760 - DNA, 72 bp, Homo sapiens
aagctggggcaagtatttgtgaagatggctggggagggtgaacctgtcccacccccagtgaagcagccacct

SEQ ID NO: 90761 - DNA, 70 bp, Homo sapiens
aagtatttgtgaagatggctggggagggtgaacctgtcccacccccagtgaagcagccacctttgccccc

SEQ ID NO: 90762 - DNA, 69 bp, Homo sapiens
aagatggctggggagggtgaacctgtcccacccccagtgaagcagccacctttgccccccaccatttcc

SEQ ID NO: 90763 - DNA, 67 bp, Homo sapiens
agggtgaacctgtcccacccccagtgaagcagccacctttgccccccaccatttcccccacggctcc

SEQ ID NO: 90764 - DNA, 67 bp, Homo sapiens
aacctgtcccacccccagtgaagcagccacctttgccccccaccatttcccccacggctcccacctc

SEQ ID NO: 90765 - DNA, 69 bp, Homo sapiens
acccccagtgaagcagccacctttgccccccaccatttcccccacggctcccacctcctggactctgcc

SEQ ID NO: 90766 - DNA, 68 bp, Homo sapiens
aagcagccacctttgccccccaccatttcccccacggctcccacctcctggactctgcccccaggccc

SEQ ID NO: 90767 - DNA, 66 bp, Homo sapiens
ctttgccccccaccatttcccccacggctcccacctcctggactctgcccccaggccccctcctcg

SEQ ID NO: 90768 - DNA, 69 bp, Homo sapiens
atttcccccacggctcccacctcctggactctgcccccaggccccctcctcggcgtgctgcccgtggtc

SEQ ID NO: 90769 - DNA, 70 bp, Homo sapiens
acggctcccacctcctggactctgcccccaggccccctcctcggcgtgctgcccgtggtcggagtggtcc

SEQ ID NO: 90770 - DNA, 67 bp, Homo sapiens
cccaggccccctcctcggcgtgctgcccgtggtcggagtggtccgccctgccccgcccccgccaccc

SEQ ID NO: 90771 - DNA, 72 bp, Homo sapiens
tgcccgtggtcggagtggtccgccctgccccgcccccgccaccccctcccctgacgctggtgctgagcagtg

SEQ ID NO: 90772 - DNA, 73 bp, Homo sapiens
gtcggagtggtccgccctgccccgcccccgccaccccctcccctgacgctggtgctgagcagtgggccagcca

SEQ ID NO: 90773 - DNA, 72 bp, Homo sapiens
gtccgccctgccccgcccccgccaccccctcccctgacgctggtgctgagcagtgggccagccagcccgccc

SEQ ID NO: 90774 - DNA, 73 bp, Homo sapiens
cccccgccaccccctcccctgacgctggtgctgagcagtgggccagccagcccgccccgccaggccatccgcg

SEQ ID NO: 90775 - DNA, 76 bp, Homo sapiens
cccctcccctgacgctggtgctgagcagtgggccagccagcccgccccgccaggccatccgcgtcaagagggtgtc

SEQ ID NO: 90776 - DNA, 76 bp, Homo sapiens
tgctgagcagtgggccagccagcccgccccgccaggccatccgcgtcaagagggtgtccactttctccggccggtc

SEQ ID NO: 90777 - DNA, 70 bp, Homo sapiens
agcccgccccgccaggccatccgcgtcaagagggtgtccactttctccggccggtccccgccagcacctc

SEQ ID NO: 90778 - DNA, 68 bp, Homo sapiens
atccgcgtcaagagggtgtccactttctccggccggtccccgccagcacctcccccatacaaagcccc

SEQ ID NO: 90779 - DNA, 69 bp, Homo sapiens
ggtgtccactttctccggccggtccccgccagcacctcccccatacaaagccccccggctggatgaaga

SEQ ID NO: 90780 - DNA, 69 bp, Homo sapiens
actttctccggccggtccccgccagcacctcccccatacaaagccccccggctggatgaagatggagag

SEQ ID NO: 90781 - DNA, 72 bp, Homo sapiens
cggtccccgccagcacctcccccatacaaagccccccggctggatgaagatggagaggcctcagaggatacc

SEQ ID NO: 90782 - DNA, 73 bp, Homo sapiens
aaagccccccggctggatgaagatggagaggcctcagaggatacccctcaggttccagggcttggcagtggcg

SEQ ID NO: 90783 - DNA, 79 bp, Homo sapiens
cctcagaggatacccctcaggttccagggcttggcagtggcgggtgagtgcgggtgctgaggctggcagagcaggcaag

SEQ ID NO: 90784 - DNA, 81 bp, Homo sapiens
cgggtgagtgcgggtgctgaggctggcagagcaggcaagggggcagatgggcgggagatgcggctcatccttctcgggctc

SEQ ID NO: 90785 - DNA, 75 bp, Homo sapiens
gggcagatgggcgggagatgcggctcatccttctcgggctcgccctcccaggtttagccgtgtgaggatgaaaac

SEQ ID NO: 90786 - DNA, 72 bp, Homo sapiens
atgggcgggagatgcggctcatccttctcgggctcgccctcccaggtttagccgtgtgaggatgaaaacccc

SEQ ID NO: 90787 - DNA, 74 bp, Homo sapiens
agatgcggctcatccttctcgggctcgccctcccaggtttagccgtgtgaggatgaaaacccccacagtgcgtg

SEQ ID NO: 90788 - DNA, 70 bp, Homo sapiens
cttctcgggctcgccctcccaggtttagccgtgtgaggatgaaaacccccacagtgcgtggggtccttga

SEQ ID NO: 90789 - DNA, 70 bp, Homo sapiens
ctcgccctcccaggtttagccgtgtgaggatgaaaacccccacagtgcgtggggtccttgacctggatcg

SEQ ID NO: 90790 - DNA, 70 bp, Homo sapiens
tcccaggtttagccgtgtgaggatgaaaacccccacagtgcgtggggtccttgacctggatcggcctggg

SEQ ID NO: 90791 - DNA, 71 bp, Homo sapiens
agccgtgtgaggatgaaaacccccacagtgcgtggggtccttgacctggatcggcctggggagcccgctgg

SEQ ID NO: 90792 - DNA, 68 bp, Homo sapiens
atgaaaacccccacagtgcgtggggtccttgacctggatcggcctggggagcccgctggggaagaaag

SEQ ID NO: 90793 - DNA, 71 bp, Homo sapiens
ccacagtgcgtggggtccttgacctggatcggcctggggagcccgctggggaagaaagtcctgggtgagtg

SEQ ID NO: 90794 - DNA, 70 bp, Homo sapiens
cgtggggtccttgacctggatcggcctggggagcccgctggggaagaaagtcctgggtgagtggccaggc

SEQ ID NO: 90795 - DNA, 71 bp, Homo sapiens
ttgacctggatcggcctggggagcccgctggggaagaaagtcctgggtgagtggccaggcccctctccctg

SEQ ID NO: 90796 - DNA, 69 bp, Homo sapiens
cctggggagcccgctggggaagaaagtcctgggtgagtggccaggcccctctccctggagggtctggga

SEQ ID NO: 90797 - DNA, 71 bp, Homo sapiens
ggtgagtggccaggcccctctccctggagggtctgggacctctgtccttccccttcctgacaggtctcttc

SEQ ID NO: 90798 - DNA, 69 bp, Homo sapiens
agggtctgggacctctgtccttccccttcctgacaggtctcttctcgcaggcccctccaggaacggtcc

SEQ ID NO: 90799 - DNA, 72 bp, Homo sapiens
tctgtccttccccttcctgacaggtctcttctcgcaggcccctccaggaacggtcccctttgctgccacttc

SEQ ID NO: 90800 - DNA, 71 bp, Homo sapiens
ccttcctgacaggtctcttctcgcaggcccctccaggaacggtcccctttgctgccacttccggaagatgg

SEQ ID NO: 90801 - DNA, 70 bp, Homo sapiens
acaggtctcttctcgcaggcccctccaggaacggtcccctttgctgccacttccggaagatggtcctccc

SEQ ID NO: 90802 - DNA, 70 bp, Homo sapiens
tcttctcgcaggcccctccaggaacggtcccctttgctgccacttccggaagatggtcctccccaggtcc

SEQ ID NO: 90803 - DNA, 67 bp, Homo sapiens
cctccaggaacggtcccctttgctgccacttccggaagatggtcctccccaggtccccgatggtccc

SEQ ID NO: 90804 - DNA, 66 bp, Homo sapiens
aacggtcccctttgctgccacttccggaagatggtcctccccaggtccccgatggtcccccagacc

SEQ ID NO: 90805 - DNA, 73 bp, Homo sapiens
ctttgctgccacttccggaagatggtcctccccaggtccccgatggtcccccagacctgctgcttgagtccca

SEQ ID NO: 90806 - DNA, 73 bp, Homo sapiens
ttccggaagatggtcctccccaggtccccgatggtcccccagacctgctgcttgagtcccagtggcaccacta

SEQ ID NO: 90807 - DNA, 74 bp, Homo sapiens
agatggtcctccccaggtccccgatggtcccccagacctgctgcttgagtcccagtggcaccactattcaggta

SEQ ID NO: 90808 - DNA, 71 bp, Homo sapiens
aggtccccgatggtcccccagacctgctgcttgagtcccagtggcaccactattcaggtagggaccggcct

SEQ ID NO: 90809 - DNA, 73 bp, Homo sapiens
atggtcccccagacctgctgcttgagtcccagtggcaccactattcaggtagggaccggccttgccctctccc

SEQ ID NO: 90810 - DNA, 76 bp, Homo sapiens
agacctgctgcttgagtcccagtggcaccactattcaggtagggaccggccttgccctctccctccttgcctgtgc

SEQ ID NO: 90811 - DNA, 74 bp, Homo sapiens
ttttgagtccgggaagggtgatcttcactccaacctgcttcttgggaccaggtgaggcttcgagctctgaggaa

SEQ ID NO: 90812 - DNA, 76 bp, Homo sapiens
gggaagggtgatcttcactccaacctgcttcttgggaccaggtgaggcttcgagctctgaggaagagcctccatcc

SEQ ID NO: 90813 - DNA, 79 bp, Homo sapiens
ttcactccaacctgcttcttgggaccaggtgaggcttcgagctctgaggaagagcctccatccccagatgataaagaga

SEQ ID NO: 90814 - DNA, 76 bp, Homo sapiens
aacctgcttcttgggaccaggtgaggcttcgagctctgaggaagagcctccatccccagatgataaagagaaccag

SEQ ID NO: 90815 - DNA, 75 bp, Homo sapiens
ttgggaccaggtgaggcttcgagctctgaggaagagcctccatccccagatgataaagagaaccaggccccaaaa

SEQ ID NO: 90816 - DNA, 74 bp, Homo sapiens
aggcttcgagctctgaggaagagcctccatccccagatgataaagagaaccaggccccaaaacggactggccca

SEQ ID NO: 90817 - DNA, 77 bp, Homo sapiens
tctgaggaagagcctccatccccagatgataaagagaaccaggccccaaaacggactggcccacatctgcgcttcga

SEQ ID NO: 90818 - DNA, 79 bp, Homo sapiens
agcctccatccccagatgataaagagaaccaggccccaaaacggactggcccacatctgcgcttcgagatcagcagtga

SEQ ID NO: 90819 - DNA, 77 bp, Homo sapiens
cccagatgataaagagaaccaggccccaaaacggactggcccacatctgcgcttcgagatcagcagtgaggatgggt

SEQ ID NO: 90820 - DNA, 78 bp, Homo sapiens
taaagagaaccaggccccaaaacggactggcccacatctgcgcttcgagatcagcagtgaggatgggttcagcgttga

SEQ ID NO: 90821 - DNA, 79 bp, Homo sapiens
aaccaggccccaaaacggactggcccacatctgcgcttcgagatcagcagtgaggatgggttcagcgttgaggcagaga

SEQ ID NO: 90822 - DNA, 81 bp, Homo sapiens
aaaacggactggcccacatctgcgcttcgagatcagcagtgaggatgggttcagcgttgaggcagagagcttggagggtga

SEQ ID NO: 90823 - DNA, 83 bp, Homo sapiens
cccacatctgcgcttcgagatcagcagtgaggatgggttcagcgttgaggcagagagcttggagggtgagtggggggagtgca

SEQ ID NO: 90824 - DNA, 84 bp, Homo sapiens
tctgcgcttcgagatcagcagtgaggatgggttcagcgttgaggcagagagcttggagggtgagtggggggagtgcagtggcag

SEQ ID NO: 90825 - DNA, 81 bp, Homo sapiens
gagggagagtgtccataaaacaccatcctgactcagctctggctctgctgtctccccaggggcgtggagaactctgatcga

SEQ ID NO: 90826 - DNA, 82 bp, Homo sapiens
tgtccataaaacaccatcctgactcagctctggctctgctgtctccccaggggcgtggagaactctgatcgagaaagtgcaa

SEQ ID NO: 90827 - DNA, 81 bp, Homo sapiens
taaaacaccatcctgactcagctctggctctgctgtctccccaggggcgtggagaactctgatcgagaaagtgcaagaggc

SEQ ID NO: 90828 - DNA, 80 bp, Homo sapiens
actcagctctggctctgctgtctccccaggggcgtggagaactctgatcgagaaagtgcaagaggcccgagggcatgccc

SEQ ID NO: 90829 - DNA, 81 bp, Homo sapiens
tggctctgctgtctccccaggggcgtggagaactctgatcgagaaagtgcaagaggcccgagggcatgcccgactcagaca

SEQ ID NO: 90830 - DNA, 78 bp, Homo sapiens
tctccccaggggcgtggagaactctgatcgagaaagtgcaagaggcccgagggcatgcccgactcagacatctctcct

SEQ ID NO: 90831 - DNA, 78 bp, Homo sapiens
ggcgtggagaactctgatcgagaaagtgcaagaggcccgagggcatgcccgactcagacatctctcctttagtggtaa

SEQ ID NO: 90832 - DNA, 77 bp, Homo sapiens
agaactctgatcgagaaagtgcaagaggcccgagggcatgcccgactcagacatctctcctttagtggtaaggagtg

SEQ ID NO: 90833 - DNA, 75 bp, Homo sapiens
atcgagaaagtgcaagaggcccgagggcatgcccgactcagacatctctcctttagtggtaaggagtgggcccca

SEQ ID NO: 90834 - DNA, 72 bp, Homo sapiens
aagaggcccgagggcatgcccgactcagacatctctcctttagtggtaaggagtgggccccacagggggcag

SEQ ID NO: 90835 - DNA, 75 bp, Homo sapiens
agggcatgcccgactcagacatctctcctttagtggtaaggagtgggccccacagggggcagggagctggatgtc

SEQ ID NO: 90836 - DNA, 73 bp, Homo sapiens
ccgactcagacatctctcctttagtggtaaggagtgggccccacagggggcagggagctggatgtctccccga

SEQ ID NO: 90837 - DNA, 76 bp, Homo sapiens
ccccacagggggcagggagctggatgtctccccgagggcaccatgggccctccacatgacaggtgtgtcctcaaca

SEQ ID NO: 90838 - DNA, 79 bp, Homo sapiens
accatgggccctccacatgacaggtgtgtcctcaacatctcccctcaggaatgagtggggcgagactcctgggcatcca

SEQ ID NO: 90839 - DNA, 85 bp, Homo sapiens
tccacatgacaggtgtgtcctcaacatctcccctcaggaatgagtggggcgagactcctgggcatccaccatgatgctgtcatct

SEQ ID NO: 90840 - DNA, 82 bp, Homo sapiens
acaggtgtgtcctcaacatctcccctcaggaatgagtggggcgagactcctgggcatccaccatgatgctgtcatcttcctg

SEQ ID NO: 90841 - DNA, 85 bp, Homo sapiens
tcctcaacatctcccctcaggaatgagtggggcgagactcctgggcatccaccatgatgctgtcatcttcctggccgagcagctc

SEQ ID NO: 90842 - DNA, 82 bp, Homo sapiens
cctcaggaatgagtggggcgagactcctgggcatccaccatgatgctgtcatcttcctggccgagcagctccccggagccca

SEQ ID NO: 90843 - DNA, 82 bp, Homo sapiens
aatgagtggggcgagactcctgggcatccaccatgatgctgtcatcttcctggccgagcagctccccggagcccagcgttgc

SEQ ID NO: 90844 - DNA, 82 bp, Homo sapiens
agactcctgggcatccaccatgatgctgtcatcttcctggccgagcagctccccggagcccagcgttgccagcactataagt

SEQ ID NO: 90845 - DNA, 82 bp, Homo sapiens
gcatccaccatgatgctgtcatcttcctggccgagcagctccccggagcccagcgttgccagcactataagttccgttacca

SEQ ID NO: 90846 - DNA, 80 bp, Homo sapiens
atgatgctgtcatcttcctggccgagcagctccccggagcccagcgttgccagcactataagttccgttaccaccagcag

SEQ ID NO: 90847 - DNA, 78 bp, Homo sapiens
tgtcatcttcctggccgagcagctccccggagcccagcgttgccagcactataagttccgttaccaccagcagggaga

SEQ ID NO: 90848 - DNA, 75 bp, Homo sapiens
cctggccgagcagctccccggagcccagcgttgccagcactataagttccgttaccaccagcagggagagggcca

SEQ ID NO: 90849 - DNA, 73 bp, Homo sapiens
agctccccggagcccagcgttgccagcactataagttccgttaccaccagcagggagagggccaggaggagcc

SEQ ID NO: 90850 - DNA, 74 bp, Homo sapiens
agcccagcgttgccagcactataagttccgttaccaccagcagggagagggccaggaggagccgcccctgaatc

SEQ ID NO: 90851 - DNA, 73 bp, Homo sapiens
ttgccagcactataagttccgttaccaccagcagggagagggccaggaggagccgcccctgaatccccatggg

SEQ ID NO: 90852 - DNA, 72 bp, Homo sapiens
tataagttccgttaccaccagcagggagagggccaggaggagccgcccctgaatccccatggggctgctcgg

SEQ ID NO: 90853 - DNA, 76 bp, Homo sapiens
ttaccaccagcagggagagggccaggaggagccgcccctgaatccccatggggctgctcgggcagaggtctatctc

SEQ ID NO: 90854 - DNA, 75 bp, Homo sapiens
aggaggagccgcccctgaatccccatggggctgctcgggcagaggtctatctccggtgagaggtctggggtgtga

SEQ ID NO: 90855 - DNA, 76 bp, Homo sapiens
cccctgaatccccatggggctgctcgggcagaggtctatctccggtgagaggtctggggtgtgatgcctgggtcag

SEQ ID NO: 90856 - DNA, 76 bp, Homo sapiens
aatccccatggggctgctcgggcagaggtctatctccggtgagaggtctggggtgtgatgcctgggtcagggcgcc

SEQ ID NO: 90857 - DNA, 79 bp, Homo sapiens
ttagctctgtcttcaacagtatattcctccttcccctgctgccacctgcaggaagtgcacctttgacatgttcaacttc

SEQ ID NO: 90858 - DNA, 77 bp, Homo sapiens
cttcaacagtatattcctccttcccctgctgccacctgcaggaagtgcacctttgacatgttcaacttcctggcctc

SEQ ID NO: 90859 - DNA, 76 bp, Homo sapiens
atattcctccttcccctgctgccacctgcaggaagtgcacctttgacatgttcaacttcctggcctcccagcaccg

SEQ ID NO: 90860 - DNA, 77 bp, Homo sapiens
cctgctgccacctgcaggaagtgcacctttgacatgttcaacttcctggcctcccagcaccgggtgctccctgaggg

SEQ ID NO: 90861 - DNA, 74 bp, Homo sapiens
acctgcaggaagtgcacctttgacatgttcaacttcctggcctcccagcaccgggtgctccctgagggggccac

SEQ ID NO: 90862 - DNA, 75 bp, Homo sapiens
aagtgcacctttgacatgttcaacttcctggcctcccagcaccgggtgctccctgagggggccacctgtgatgag

SEQ ID NO: 90863 - DNA, 75 bp, Homo sapiens
ctttgacatgttcaacttcctggcctcccagcaccgggtgctccctgagggggccacctgtgatgaggaagagga

SEQ ID NO: 90864 - DNA, 79 bp, Homo sapiens
ttcaacttcctggcctcccagcaccgggtgctccctgagggggccacctgtgatgaggaagaggatgaggtgcagctca

SEQ ID NO: 90865 - DNA, 79 bp, Homo sapiens
tcccagcaccgggtgctccctgagggggccacctgtgatgaggaagaggatgaggtgcagctcaggtcaaccaggtatg

SEQ ID NO: 90866 - DNA, 77 bp, Homo sapiens
accgggtgctccctgagggggccacctgtgatgaggaagaggatgaggtgcagctcaggtcaaccaggtatggagtg

SEQ ID NO: 90867 - DNA, 79 bp, Homo sapiens
ctccctgagggggccacctgtgatgaggaagaggatgaggtgcagctcaggtcaaccaggtatggagtgtgagctgggg

SEQ ID NO: 90868 - DNA, 78 bp, Homo sapiens
acctgtgatgaggaagaggatgaggtgcagctcaggtcaaccaggtatggagtgtgagctggggggcgggtggtggtc

SEQ ID NO: 90869 - DNA, 80 bp, Homo sapiens
gcctgggtgacactgctgtccctcaccagacgtgccaccagcctggagctgcccatggccatgcgttttcgtcaccttaa

SEQ ID NO: 90870 - DNA, 78 bp, Homo sapiens
acactgctgtccctcaccagacgtgccaccagcctggagctgcccatggccatgcgttttcgtcaccttaagaagacg

SEQ ID NO: 90871 - DNA, 76 bp, Homo sapiens
cctcaccagacgtgccaccagcctggagctgcccatggccatgcgttttcgtcaccttaagaagacgtccaaagaa

SEQ ID NO: 90872 - DNA, 76 bp, Homo sapiens
agacgtgccaccagcctggagctgcccatggccatgcgttttcgtcaccttaagaagacgtccaaagaagctgtgg

SEQ ID NO: 90873 - DNA, 77 bp, Homo sapiens
gcctggagctgcccatggccatgcgttttcgtcaccttaagaagacgtccaaagaagctgtgggtgtctacaggtga

SEQ ID NO: 90874 - DNA, 74 bp, Homo sapiens
ctgcccatggccatgcgttttcgtcaccttaagaagacgtccaaagaagctgtgggtgtctacaggtgagtggg

SEQ ID NO: 90875 - DNA, 72 bp, Homo sapiens
tggccatgcgttttcgtcaccttaagaagacgtccaaagaagctgtgggtgtctacaggtgagtggggttgg

SEQ ID NO: 90876 - DNA, 68 bp, Homo sapiens
ttttcgtcaccttaagaagacgtccaaagaagctgtgggtgtctacaggtgagtggggttggggggga

SEQ ID NO: 90877 - DNA, 69 bp, Homo sapiens
ttaagaagacgtccaaagaagctgtgggtgtctacaggtgagtggggttgggggggaggatgccccttg

SEQ ID NO: 90878 - DNA, 75 bp, Homo sapiens
tttctgtccccctcccccctgagttccctgttcatcctgccctgcagatcagccatccacgggcgaggcctgttc

SEQ ID NO: 90879 - DNA, 79 bp, Homo sapiens
ctcccccctgagttccctgttcatcctgccctgcagatcagccatccacgggcgaggcctgttctgtaagcgcaacatc

SEQ ID NO: 90880 - DNA, 80 bp, Homo sapiens
ctgagttccctgttcatcctgccctgcagatcagccatccacgggcgaggcctgttctgtaagcgcaacatcgacgcggg

SEQ ID NO: 90881 - DNA, 83 bp, Homo sapiens
ttcatcctgccctgcagatcagccatccacgggcgaggcctgttctgtaagcgcaacatcgacgcgggggagatggtcatcga

SEQ ID NO: 90882 - DNA, 80 bp, Homo sapiens
atcagccatccacgggcgaggcctgttctgtaagcgcaacatcgacgcgggggagatggtcatcgagtactctggcattg

SEQ ID NO: 90883 - DNA, 79 bp, Homo sapiens
acgggcgaggcctgttctgtaagcgcaacatcgacgcgggggagatggtcatcgagtactctggcattgtcatccgctc

SEQ ID NO: 90884 - DNA, 82 bp, Homo sapiens
tgttctgtaagcgcaacatcgacgcgggggagatggtcatcgagtactctggcattgtcatccgctcggtgttgactgacaa

SEQ ID NO: 90885 - DNA, 81 bp, Homo sapiens
taagcgcaacatcgacgcgggggagatggtcatcgagtactctggcattgtcatccgctcggtgttgactgacaagcggga

SEQ ID NO: 90886 - DNA, 77 bp, Homo sapiens
acgcgggggagatggtcatcgagtactctggcattgtcatccgctcggtgttgactgacaagcgggagaagttctac

SEQ ID NO: 90887 - DNA, 78 bp, Homo sapiens
agatggtcatcgagtactctggcattgtcatccgctcggtgttgactgacaagcgggagaagttctacgatgggaagg

SEQ ID NO: 90888 - DNA, 77 bp, Homo sapiens
atcgagtactctggcattgtcatccgctcggtgttgactgacaagcgggagaagttctacgatgggaaggtgggctc

SEQ ID NO: 90889 - DNA, 77 bp, Homo sapiens
ctctggcattgtcatccgctcggtgttgactgacaagcgggagaagttctacgatgggaaggtgggctcccagtggc

SEQ ID NO: 90890 - DNA, 75 bp, Homo sapiens
gtcatccgctcggtgttgactgacaagcgggagaagttctacgatgggaaggtgggctcccagtggctgtgggaa

SEQ ID NO: 90891 - DNA, 75 bp, Homo sapiens
tgttgactgacaagcgggagaagttctacgatgggaaggtgggctcccagtggctgtgggaagacagtgggtgaa

SEQ ID NO: 90892 - DNA, 81 bp, Homo sapiens
tgtccgcggggacagagcacctgatctccccacctcatccctgcagggcatcgggtgctatatgttccgcatggatgactt

SEQ ID NO: 90893 - DNA, 84 bp, Homo sapiens
gacagagcacctgatctccccacctcatccctgcagggcatcgggtgctatatgttccgcatggatgactttgatgtagtggac

SEQ ID NO: 90894 - DNA, 85 bp, Homo sapiens
ctgatctccccacctcatccctgcagggcatcgggtgctatatgttccgcatggatgactttgatgtagtggacgccacgatgca

SEQ ID NO: 90895 - DNA, 86 bp, Homo sapiens
ccacctcatccctgcagggcatcgggtgctatatgttccgcatggatgactttgatgtagtggacgccacgatgcatggcaatgcc

SEQ ID NO: 90896 - DNA, 88 bp, Homo sapiens
ctgcagggcatcgggtgctatatgttccgcatggatgactttgatgtagtggacgccacgatgcatggcaatgccgcccgcttcatca

SEQ ID NO: 90897 - DNA, 84 bp, Homo sapiens
atcgggtgctatatgttccgcatggatgactttgatgtagtggacgccacgatgcatggcaatgccgcccgcttcatcaaccac

SEQ ID NO: 90898 - DNA, 86 bp, Homo sapiens
ctatatgttccgcatggatgactttgatgtagtggacgccacgatgcatggcaatgccgcccgcttcatcaaccactcctgtgagc

SEQ ID NO: 90899 - DNA, 84 bp, Homo sapiens
atggatgactttgatgtagtggacgccacgatgcatggcaatgccgcccgcttcatcaaccactcctgtgagcccaactgcttc

SEQ ID NO: 90900 - DNA, 82 bp, Homo sapiens
actttgatgtagtggacgccacgatgcatggcaatgccgcccgcttcatcaaccactcctgtgagcccaactgcttctctcg

SEQ ID NO: 90901 - DNA, 83 bp, Homo sapiens
gtagtggacgccacgatgcatggcaatgccgcccgcttcatcaaccactcctgtgagcccaactgcttctctcgggtcatcca

SEQ ID NO: 90902 - DNA, 82 bp, Homo sapiens
atgcatggcaatgccgcccgcttcatcaaccactcctgtgagcccaactgcttctctcgggtcatccacgtggagggccaga

SEQ ID NO: 90903 - DNA, 77 bp, Homo sapiens
aatgccgcccgcttcatcaaccactcctgtgagcccaactgcttctctcgggtcatccacgtggagggccagaaaca

SEQ ID NO: 90904 - DNA, 77 bp, Homo sapiens
cttcatcaaccactcctgtgagcccaactgcttctctcgggtcatccacgtggagggccagaaacacattgttatct

SEQ ID NO: 90905 - DNA, 75 bp, Homo sapiens
aaccactcctgtgagcccaactgcttctctcgggtcatccacgtggagggccagaaacacattgttatcttcgcc

SEQ ID NO: 90906 - DNA, 79 bp, Homo sapiens
actgcttctctcgggtcatccacgtggagggccagaaacacattgttatcttcgccctgcgccgcatcctgcgtggtga

SEQ ID NO: 90907 - DNA, 80 bp, Homo sapiens
gtcatccacgtggagggccagaaacacattgttatcttcgccctgcgccgcatcctgcgtggtgaggagctcacctacga

SEQ ID NO: 90908 - DNA, 78 bp, Homo sapiens
tggagggccagaaacacattgttatcttcgccctgcgccgcatcctgcgtggtgaggagctcacctacgactacaagt

SEQ ID NO: 90909 - DNA, 77 bp, Homo sapiens
ggccagaaacacattgttatcttcgccctgcgccgcatcctgcgtggtgaggagctcacctacgactacaagttccc

SEQ ID NO: 90910 - DNA, 79 bp, Homo sapiens
acattgttatcttcgccctgcgccgcatcctgcgtggtgaggagctcacctacgactacaagttccccatcgaggatgc

SEQ ID NO: 90911 - DNA, 80 bp, Homo sapiens
cttcgccctgcgccgcatcctgcgtggtgaggagctcacctacgactacaagttccccatcgaggatgccagcaacaagc

SEQ ID NO: 90912 - DNA, 82 bp, Homo sapiens
cgcatcctgcgtggtgaggagctcacctacgactacaagttccccatcgaggatgccagcaacaagctgccctgcaactgtg

SEQ ID NO: 90913 - DNA, 80 bp, Homo sapiens
cgtggtgaggagctcacctacgactacaagttccccatcgaggatgccagcaacaagctgccctgcaactgtggcgccaa

SEQ ID NO: 90914 - DNA, 81 bp, Homo sapiens
agctcacctacgactacaagttccccatcgaggatgccagcaacaagctgccctgcaactgtggcgccaagcgctgccgtc

SEQ ID NO: 90915 - DNA, 78 bp, Homo sapiens
ctacaagttccccatcgaggatgccagcaacaagctgccctgcaactgtggcgccaagcgctgccgtcggttccttaa

SEQ ID NO: 90916 - DNA, 79 bp, Homo sapiens
cccatcgaggatgccagcaacaagctgccctgcaactgtggcgccaagcgctgccgtcggttccttaactgaggccgtg

SEQ ID NO: 90917 - DNA, 80 bp, Homo sapiens
atgccagcaacaagctgccctgcaactgtggcgccaagcgctgccgtcggttccttaactgaggccgtggctgcccacca

SEQ ID NO: 90918 - DNA, 76 bp, Homo sapiens
tgcaactgtggcgccaagcgctgccgtcggttccttaactgaggccgtggctgcccaccacgacccctcacacctc

SEQ ID NO: 90919 - DNA, 75 bp, Homo sapiens
ctgtggcgccaagcgctgccgtcggttccttaactgaggccgtggctgcccaccacgacccctcacacctcctgc

SEQ ID NO: 90920 - DNA, 74 bp, Homo sapiens
aagcgctgccgtcggttccttaactgaggccgtggctgcccaccacgacccctcacacctcctgctgccgtcgc

SEQ ID NO: 90921 - DNA, 76 bp, Homo sapiens
gtcggttccttaactgaggccgtggctgcccaccacgacccctcacacctcctgctgccgtcgctgccatcttgcc

SEQ ID NO: 90922 - DNA, 77 bp, Homo sapiens
taactgaggccgtggctgcccaccacgacccctcacacctcctgctgccgtcgctgccatcttgcccctagcctggg

SEQ ID NO: 90923 - DNA, 76 bp, Homo sapiens
cgtggctgcccaccacgacccctcacacctcctgctgccgtcgctgccatcttgcccctagcctgggggctcccta

SEQ ID NO: 90924 - DNA, 73 bp, Homo sapiens
accacgacccctcacacctcctgctgccgtcgctgccatcttgcccctagcctgggggctccctagcccctcc

SEQ ID NO: 90925 - DNA, 78 bp, Homo sapiens
ctcacacctcctgctgccgtcgctgccatcttgcccctagcctgggggctccctagcccctcccagagcatctcaccc

SEQ ID NO: 90926 - DNA, 75 bp, Homo sapiens
tgccatcttgcccctagcctgggggctccctagcccctcccagagcatctcacccccaccctcatgttcagggtg

SEQ ID NO: 90927 - DNA, 74 bp, Homo sapiens
ccctagcctgggggctccctagcccctcccagagcatctcacccccaccctcatgttcagggtggatgtgggca

SEQ ID NO: 90928 - DNA, 77 bp, Homo sapiens
ggggctccctagcccctcccagagcatctcacccccaccctcatgttcagggtggatgtgggcatgcaggtgacaag

SEQ ID NO: 90929 - DNA, 79 bp, Homo sapiens
tagcccctcccagagcatctcacccccaccctcatgttcagggtggatgtgggcatgcaggtgacaagggccctgcctc

SEQ ID NO: 90930 - DNA, 78 bp, Homo sapiens
ctcccagagcatctcacccccaccctcatgttcagggtggatgtgggcatgcaggtgacaagggccctgcctccaccc

SEQ ID NO: 90931 - DNA, 75 bp, Homo sapiens
acccccaccctcatgttcagggtggatgtgggcatgcaggtgacaagggccctgcctccacccctccagcccatc

SEQ ID NO: 90932 - DNA, 79 bp, Homo sapiens
accctcatgttcagggtggatgtgggcatgcaggtgacaagggccctgcctccacccctccagcccatccagcaatcgc

SEQ ID NO: 90933 - DNA, 76 bp, Homo sapiens
ttcagggtggatgtgggcatgcaggtgacaagggccctgcctccacccctccagcccatccagcaatcgccccctt

SEQ ID NO: 90934 - DNA, 76 bp, Homo sapiens
atgtgggcatgcaggtgacaagggccctgcctccacccctccagcccatccagcaatcgccccctttctgccctgg

SEQ ID NO: 90935 - DNA, 71 bp, Homo sapiens
aggtgacaagggccctgcctccacccctccagcccatccagcaatcgccccctttctgccctgggggccca

SEQ ID NO: 90936 - DNA, 74 bp, Homo sapiens
cctgcctccacccctccagcccatccagcaatcgccccctttctgccctgggggcccaggatgtagatattgta

SEQ ID NO: 90937 - DNA, 67 bp, Homo sapiens
aatcgccccctttctgccctgggggcccaggatgtagatattgtacaaaggtttctaaatcccttct

SEQ ID NO: 90938 - DNA, 65 bp, Homo sapiens
ttgtacaaaggtttctaaatcccttcttttctatgcacttttttatttaagaggtggggtcccag

SEQ ID NO: 90939 - DNA, 63 bp, Homo sapiens
aaaggtttctaaatcccttcttttctatgcacttttttatttaagaggtggggtcccaggtgg

SEQ ID NO: 90940 - DNA, 62 bp, Homo sapiens
aaatcccttcttttctatgcacttttttatttaagaggtggggtcccaggtgggaacccccc

SEQ ID NO: 90941 - DNA, 64 bp, Homo sapiens
ttttctatgcacttttttatttaagaggtggggtcccaggtgggaacccccccacaataaagtc

SEQ ID NO: 90942 - DNA, 65 bp, Homo sapiens
tttttatttaagaggtggggtcccaggtgggaacccccccacaataaagtctgtcaatgtttgga

SEQ ID NO: 90943 - DNA, 67 bp, Homo sapiens
taagaggtggggtcccaggtgggaacccccccacaataaagtctgtcaatgtttggagaggtggtct

SEQ ID NO: 90944 - DNA, 68 bp, Homo sapiens
ggtcccaggtgggaacccccccacaataaagtctgtcaatgtttggagaggtggtcttcccatttgta

SEQ ID NO: 90945 - DNA, 74 bp, Homo sapiens
caattaggattgtacttcaagaagtacttcagtgctaattgtatactgggcttagtagtcagcaaagttcttta

SEQ ID NO: 90946 - DNA, 73 bp, Homo sapiens
tacttcaagaagtacttcagtgctaattgtatactgggcttagtagtcagcaaagttctttattgggtgttaa

SEQ ID NO: 90947 - DNA, 73 bp, Homo sapiens
agtacttcagtgctaattgtatactgggcttagtagtcagcaaagttctttattgggtgttaagcccagcaaa

SEQ ID NO: 90948 - DNA, 72 bp, Homo sapiens
agtgctaattgtatactgggcttagtagtcagcaaagttctttattgggtgttaagcccagcaaaccccaga

SEQ ID NO: 90949 - DNA, 74 bp, Homo sapiens
tatactgggcttagtagtcagcaaagttctttattgggtgttaagcccagcaaaccccagatgagccaagcttg

SEQ ID NO: 90950 - DNA, 74 bp, Homo sapiens
ttagtagtcagcaaagttctttattgggtgttaagcccagcaaaccccagatgagccaagcttggacagcaccc

SEQ ID NO: 90951 - DNA, 76 bp, Homo sapiens
aaagttctttattgggtgttaagcccagcaaaccccagatgagccaagcttggacagcacccgcaatgcatctgcc

SEQ ID NO: 90952 - DNA, 78 bp, Homo sapiens
tttattgggtgttaagcccagcaaaccccagatgagccaagcttggacagcacccgcaatgcatctgcccgccctagc

SEQ ID NO: 90953 - DNA, 80 bp, Homo sapiens
ttaagcccagcaaaccccagatgagccaagcttggacagcacccgcaatgcatctgcccgccctagctgggcgaggtgtg

SEQ ID NO: 90954 - DNA, 81 bp, Homo sapiens
aaaccccagatgagccaagcttggacagcacccgcaatgcatctgcccgccctagctgggcgaggtgtgtgccaagctggc

SEQ ID NO: 90955 - DNA, 81 bp, Homo sapiens
cttggacagcacccgcaatgcatctgcccgccctagctgggcgaggtgtgtgccaagctggcccagggaggcagagggctc

SEQ ID NO: 90956 - DNA, 81 bp, Homo sapiens
gcaatgcatctgcccgccctagctgggcgaggtgtgtgccaagctggcccagggaggcagagggctcccttgccaccacca

SEQ ID NO: 90957 - DNA, 80 bp, Homo sapiens
tgcccgccctagctgggcgaggtgtgtgccaagctggcccagggaggcagagggctcccttgccaccaccatctcaatca

SEQ ID NO: 90958 - DNA, 81 bp, Homo sapiens
ctagctgggcgaggtgtgtgccaagctggcccagggaggcagagggctcccttgccaccaccatctcaatcagagcccgca

SEQ ID NO: 90959 - DNA, 81 bp, Homo sapiens
aggtgtgtgccaagctggcccagggaggcagagggctcccttgccaccaccatctcaatcagagcccgcagcggcgagcga

SEQ ID NO: 90960 - DNA, 80 bp, Homo sapiens
aagctggcccagggaggcagagggctcccttgccaccaccatctcaatcagagcccgcagcggcgagcgactcggcctca

SEQ ID NO: 90961 - DNA, 79 bp, Homo sapiens
agggctcccttgccaccaccatctcaatcagagcccgcagcggcgagcgactcggcctcagcgaataggcaaaggtgga

SEQ ID NO: 90962 - DNA, 82 bp, Homo sapiens
cttgccaccaccatctcaatcagagcccgcagcggcgagcgactcggcctcagcgaataggcaaaggtggaccaggcagcag

SEQ ID NO: 90963 - DNA, 82 bp, Homo sapiens
aatcagagcccgcagcggcgagcgactcggcctcagcgaataggcaaaggtggaccaggcagcaggcagcccatatcttgcg

SEQ ID NO: 90964 - DNA, 81 bp, Homo sapiens
agcggcgagcgactcggcctcagcgaataggcaaaggtggaccaggcagcaggcagcccatatcttgcggccaggtgtcga

SEQ ID NO: 90965 - DNA, 81 bp, Homo sapiens
actcggcctcagcgaataggcaaaggtggaccaggcagcaggcagcccatatcttgcggccaggtgtcgagtagtgccatg

SEQ ID NO: 90966 - DNA, 82 bp, Homo sapiens
cctcagcgaataggcaaaggtggaccaggcagcaggcagcccatatcttgcggccaggtgtcgagtagtgccatgggccata

SEQ ID NO: 90967 - DNA, 79 bp, Homo sapiens
taggcaaaggtggaccaggcagcaggcagcccatatcttgcggccaggtgtcgagtagtgccatgggccatacccccac

SEQ ID NO: 90968 - DNA, 80 bp, Homo sapiens
accaggcagcaggcagcccatatcttgcggccaggtgtcgagtagtgccatgggccatacccccacctggcccaggctca

SEQ ID NO: 90969 - DNA, 78 bp, Homo sapiens
agcaggcagcccatatcttgcggccaggtgtcgagtagtgccatgggccatacccccacctggcccaggctcagggtc

SEQ ID NO: 90970 - DNA, 77 bp, Homo sapiens
atatcttgcggccaggtgtcgagtagtgccatgggccatacccccacctggcccaggctcagggtccagcagtacaa

SEQ ID NO: 90971 - DNA, 79 bp, Homo sapiens
aggtgtcgagtagtgccatgggccatacccccacctggcccaggctcagggtccagcagtacaatcagctcttccagca

SEQ ID NO: 90972 - DNA, 80 bp, Homo sapiens
tcgagtagtgccatgggccatacccccacctggcccaggctcagggtccagcagtacaatcagctcttccagcacctcca

SEQ ID NO: 90973 - DNA, 80 bp, Homo sapiens
atgggccatacccccacctggcccaggctcagggtccagcagtacaatcagctcttccagcacctccagctcatccagga

SEQ ID NO: 90974 - DNA, 80 bp, Homo sapiens
cccacctggcccaggctcagggtccagcagtacaatcagctcttccagcacctccagctcatccaggaggcgagacaggg

SEQ ID NO: 90975 - DNA, 83 bp, Homo sapiens
caggctcagggtccagcagtacaatcagctcttccagcacctccagctcatccaggaggcgagacaggggttgtgacgccaga

SEQ ID NO: 90976 - DNA, 82 bp, Homo sapiens
gtccagcagtacaatcagctcttccagcacctccagctcatccaggaggcgagacaggggttgtgacgccagactggacagt

SEQ ID NO: 90977 - DNA, 82 bp, Homo sapiens
tacaatcagctcttccagcacctccagctcatccaggaggcgagacaggggttgtgacgccagactggacagttctggaaga

SEQ ID NO: 90978 - DNA, 78 bp, Homo sapiens
agctcttccagcacctccagctcatccaggaggcgagacaggggttgtgacgccagactggacagttctggaagaaag

SEQ ID NO: 90979 - DNA, 71 bp, Homo sapiens
ctcatccaggaggcgagacaggggttgtgacgccagactggacagttctggaagaaaggggaagggtaaag

SEQ ID NO: 90980 - DNA, 69 bp, Homo sapiens
aggcgagacaggggttgtgacgccagactggacagttctggaagaaaggggaagggtaaaggtgcggaa

SEQ ID NO: 90981 - DNA, 71 bp, Homo sapiens
ggcgtccagtccaccttccctgccccggggctcctccaggactaacccctgctcaggagtggaagtagtga

SEQ ID NO: 90982 - DNA, 72 bp, Homo sapiens
ttccctgccccggggctcctccaggactaacccctgctcaggagtggaagtagtgaggcctccttccatgtg

SEQ ID NO: 90983 - DNA, 74 bp, Homo sapiens
ggctcctccaggactaacccctgctcaggagtggaagtagtgaggcctccttccatgtgtcccctgtctccagg

SEQ ID NO: 90984 - DNA, 73 bp, Homo sapiens
aggactaacccctgctcaggagtggaagtagtgaggcctccttccatgtgtcccctgtctccagggcgcctgg

SEQ ID NO: 90985 - DNA, 79 bp, Homo sapiens
tgctcaggagtggaagtagtgaggcctccttccatgtgtcccctgtctccagggcgcctggggaggacagatgcgagga

SEQ ID NO: 90986 - DNA, 75 bp, Homo sapiens
agtggaagtagtgaggcctccttccatgtgtcccctgtctccagggcgcctggggaggacagatgcgaggaggaa

SEQ ID NO: 90987 - DNA, 73 bp, Homo sapiens
tccttccatgtgtcccctgtctccagggcgcctggggaggacagatgcgaggaggaaggggtgtgggtgttgg

SEQ ID NO: 90988 - DNA, 73 bp, Homo sapiens
cctgtctccagggcgcctggggaggacagatgcgaggaggaaggggtgtgggtgttggggactccgcagacca

SEQ ID NO: 90989 - DNA, 73 bp, Homo sapiens
gggcgcctggggaggacagatgcgaggaggaaggggtgtgggtgttggggactccgcagaccaagccaggata

SEQ ID NO: 90990 - DNA, 72 bp, Homo sapiens
gggaggacagatgcgaggaggaaggggtgtgggtgttggggactccgcagaccaagccaggatagggatagg

SEQ ID NO: 90991 - DNA, 71 bp, Homo sapiens
acagatgcgaggaggaaggggtgtgggtgttggggactccgcagaccaagccaggatagggataggggtcg

SEQ ID NO: 90992 - DNA, 68 bp, Homo sapiens
aaggggtgtgggtgttggggactccgcagaccaagccaggatagggataggggtcggctttctccttg

SEQ ID NO: 90993 - DNA, 74 bp, Homo sapiens
tgtgggtgttggggactccgcagaccaagccaggatagggataggggtcggctttctccttgggccagcagaga

SEQ ID NO: 90994 - DNA, 77 bp, Homo sapiens
actccgcagaccaagccaggatagggataggggtcggctttctccttgggccagcagagatgccagagcagaataaa

SEQ ID NO: 90995 - DNA, 76 bp, Homo sapiens
agaccaagccaggatagggataggggtcggctttctccttgggccagcagagatgccagagcagaataaacaggag

SEQ ID NO: 90996 - DNA, 78 bp, Homo sapiens
aggatagggataggggtcggctttctccttgggccagcagagatgccagagcagaataaacaggaggatcgctatcac

SEQ ID NO: 90997 - DNA, 79 bp, Homo sapiens
gggtcggctttctccttgggccagcagagatgccagagcagaataaacaggaggatcgctatcaccgccaaggtcagga

SEQ ID NO: 90998 - DNA, 83 bp, Homo sapiens
ccagcagagatgccagagcagaataaacaggaggatcgctatcaccgccaaggtcaggagcaggaccagcaccacgagcggaa

SEQ ID NO: 90999 - DNA, 79 bp, Homo sapiens
tgccagagcagaataaacaggaggatcgctatcaccgccaaggtcaggagcaggaccagcaccacgagcggaaggaaat

SEQ ID NO: 91000 - DNA, 75 bp, Homo sapiens
agaataaacaggaggatcgctatcaccgccaaggtcaggagcaggaccagcaccacgagcggaaggaaattcggc

SEQ ID NO: 91001 - DNA, 75 bp, Homo sapiens
aacaggaggatcgctatcaccgccaaggtcaggagcaggaccagcaccacgagcggaaggaaattcggccaggcc

SEQ ID NO: 91002 - DNA, 78 bp, Homo sapiens
tcgctatcaccgccaaggtcaggagcaggaccagcaccacgagcggaaggaaattcggccaggcctgctgagggacag

SEQ ID NO: 91003 - DNA, 76 bp, Homo sapiens
cgccaaggtcaggagcaggaccagcaccacgagcggaaggaaattcggccaggcctgctgagggacaggctcaggg

SEQ ID NO: 91004 - DNA, 76 bp, Homo sapiens
caggaccagcaccacgagcggaaggaaattcggccaggcctgctgagggacaggctcaggggtcctccaggcaatg

SEQ ID NO: 91005 - DNA, 74 bp, Homo sapiens
agcaccacgagcggaaggaaattcggccaggcctgctgagggacaggctcaggggtcctccaggcaatggaact

SEQ ID NO: 91006 - DNA, 76 bp, Homo sapiens
agcggaaggaaattcggccaggcctgctgagggacaggctcaggggtcctccaggcaatggaacttgctggtgagc

SEQ ID NO: 91007 - DNA, 78 bp, Homo sapiens
aaattcggccaggcctgctgagggacaggctcaggggtcctccaggcaatggaacttgctggtgagctgcgctcctgg

SEQ ID NO: 91008 - DNA, 80 bp, Homo sapiens
tgctgagggacaggctcaggggtcctccaggcaatggaacttgctggtgagctgcgctcctgggagctaggggcgcctgg

SEQ ID NO: 91009 - DNA, 76 bp, Homo sapiens
acaggctcaggggtcctccaggcaatggaacttgctggtgagctgcgctcctgggagctaggggcgcctgggtttc

SEQ ID NO: 91010 - DNA, 76 bp, Homo sapiens
gggtcctccaggcaatggaacttgctggtgagctgcgctcctgggagctaggggcgcctgggtttccaggtgtgag

SEQ ID NO: 91011 - DNA, 74 bp, Homo sapiens
aacttgctggtgagctgcgctcctgggagctaggggcgcctgggtttccaggtgtgagggggcagtgccccttg

SEQ ID NO: 91012 - DNA, 74 bp, Homo sapiens
ggtgagctgcgctcctgggagctaggggcgcctgggtttccaggtgtgagggggcagtgccccttggcagggac

SEQ ID NO: 91013 - DNA, 71 bp, Homo sapiens
tcctgggagctaggggcgcctgggtttccaggtgtgagggggcagtgccccttggcagggaccggcctctg

SEQ ID NO: 91014 - DNA, 68 bp, Homo sapiens
gggcgcctgggtttccaggtgtgagggggcagtgccccttggcagggaccggcctctggggataaggg

SEQ ID NO: 91015 - DNA, 75 bp, Homo sapiens
cccccacctccagcacgcccttgccctgccgggagtcccatctgcacctctctgcagcgccacggggttctgccc

SEQ ID NO: 91016 - DNA, 75 bp, Homo sapiens
cctccagcacgcccttgccctgccgggagtcccatctgcacctctctgcagcgccacggggttctgcccccgccc

SEQ ID NO: 91017 - DNA, 74 bp, Homo sapiens
ttgccctgccgggagtcccatctgcacctctctgcagcgccacggggttctgcccccgcccgcggcgggagtag

SEQ ID NO: 91018 - DNA, 74 bp, Homo sapiens
tgccgggagtcccatctgcacctctctgcagcgccacggggttctgcccccgcccgcggcgggagtaggggtca

SEQ ID NO: 91019 - DNA, 73 bp, Homo sapiens
atctgcacctctctgcagcgccacggggttctgcccccgcccgcggcgggagtaggggtcacggctccgccgc

SEQ ID NO: 91020 - DNA, 71 bp, Homo sapiens
tctctgcagcgccacggggttctgcccccgcccgcggcgggagtaggggtcacggctccgccgccgcaggg

SEQ ID NO: 91021 - DNA, 68 bp, Homo sapiens
ccacggggttctgcccccgcccgcggcgggagtaggggtcacggctccgccgccgcaggggctacata

SEQ ID NO: 91022 - DNA, 71 bp, Homo sapiens
ttctgcccccgcccgcggcgggagtaggggtcacggctccgccgccgcaggggctacatagctccgcgccg

SEQ ID NO: 91023 - DNA, 73 bp, Homo sapiens
cgcggcgggagtaggggtcacggctccgccgccgcaggggctacatagctccgcgccgtcggggttgcactgc

SEQ ID NO: 91024 - DNA, 73 bp, Homo sapiens
agtaggggtcacggctccgccgccgcaggggctacatagctccgcgccgtcggggttgcactgcccagaagaa

SEQ ID NO: 91025 - DNA, 73 bp, Homo sapiens
ggctccgccgccgcaggggctacatagctccgcgccgtcggggttgcactgcccagaagaacactttcggaac

SEQ ID NO: 91026 - DNA, 71 bp, Homo sapiens
cgccgccgcaggggctacatagctccgcgccgtcggggttgcactgcccagaagaacactttcggaacggg

SEQ ID NO: 91027 - DNA, 70 bp, Homo sapiens
tacatagctccgcgccgtcggggttgcactgcccagaagaacactttcggaacgggggcgttacgaaatc

SEQ ID NO: 91028 - DNA, 68 bp, Homo sapiens
agctccgcgccgtcggggttgcactgcccagaagaacactttcggaacgggggcgttacgaaatcgcc

SEQ ID NO: 91029 - DNA, 71 bp, Homo sapiens
gggttgcactgcccagaagaacactttcggaacgggggcgttacgaaatcgccgtggtcattgagtccgca

SEQ ID NO: 91030 - DNA, 68 bp, Homo sapiens
actgcccagaagaacactttcggaacgggggcgttacgaaatcgccgtggtcattgagtccgcagttt

SEQ ID NO: 91031 - DNA, 66 bp, Homo sapiens
agaacactttcggaacgggggcgttacgaaatcgccgtggtcattgagtccgcagttttcccggaa

SEQ ID NO: 91032 - DNA, 69 bp, Homo sapiens
ttcggaacgggggcgttacgaaatcgccgtggtcattgagtccgcagttttcccggaactcatagtcta

SEQ ID NO: 91033 - DNA, 74 bp, Homo sapiens
gttacgaaatcgccgtggtcattgagtccgcagttttcccggaactcatagtctagcgggaaagctgcgctcca

SEQ ID NO: 91034 - DNA, 75 bp, Homo sapiens
aaatcgccgtggtcattgagtccgcagttttcccggaactcatagtctagcgggaaagctgcgctccagtgcggc

SEQ ID NO: 91035 - DNA, 72 bp, Homo sapiens
cctatcacctgcaagctccgcccaagcaaggctcggtctcggattctcacccgggcaggggggcggcccgaa

SEQ ID NO: 91036 - DNA, 72 bp, Homo sapiens
aagctccgcccaagcaaggctcggtctcggattctcacccgggcaggggggcggcccgaagcgttgcaggca

SEQ ID NO: 91037 - DNA, 77 bp, Homo sapiens
aagcaaggctcggtctcggattctcacccgggcaggggggcggcccgaagcgttgcaggcagctgctgcagcacttg

SEQ ID NO: 91038 - DNA, 76 bp, Homo sapiens
ggtctcggattctcacccgggcaggggggcggcccgaagcgttgcaggcagctgctgcagcacttgttgtctgggt

SEQ ID NO: 91039 - DNA, 76 bp, Homo sapiens
attctcacccgggcaggggggcggcccgaagcgttgcaggcagctgctgcagcacttgttgtctgggttccagtat

SEQ ID NO: 91040 - DNA, 79 bp, Homo sapiens
gcaggggggcggcccgaagcgttgcaggcagctgctgcagcacttgttgtctgggttccagtattcaaggcggccgcag

SEQ ID NO: 91041 - DNA, 79 bp, Homo sapiens
cggcccgaagcgttgcaggcagctgctgcagcacttgttgtctgggttccagtattcaaggcggccgcagtactgggag

SEQ ID NO: 91042 - DNA, 79 bp, Homo sapiens
aagcgttgcaggcagctgctgcagcacttgttgtctgggttccagtattcaaggcggccgcagtactgggaggcttccg

SEQ ID NO: 91043 - DNA, 73 bp, Homo sapiens
cacttgttgtctgggttccagtattcaaggcggccgcagtactgggaggcttccggcggtggcgccagggcca

SEQ ID NO: 91044 - DNA, 74 bp, Homo sapiens
tctgggttccagtattcaaggcggccgcagtactgggaggcttccggcggtggcgccagggccagaagcaacaa

SEQ ID NO: 91045 - DNA, 73 bp, Homo sapiens
agtattcaaggcggccgcagtactgggaggcttccggcggtggcgccagggccagaagcaacaaggccgtcag

SEQ ID NO: 91046 - DNA, 74 bp, Homo sapiens
aaggcggccgcagtactgggaggcttccggcggtggcgccagggccagaagcaacaaggccgtcaggaggcatc

SEQ ID NO: 91047 - DNA, 73 bp, Homo sapiens
agtactgggaggcttccggcggtggcgccagggccagaagcaacaaggccgtcaggaggcatcgtccaggccc

SEQ ID NO: 91048 - DNA, 73 bp, Homo sapiens
aggcttccggcggtggcgccagggccagaagcaacaaggccgtcaggaggcatcgtccaggccccatctgggg

SEQ ID NO: 91049 - DNA, 76 bp, Homo sapiens
tggcgccagggccagaagcaacaaggccgtcaggaggcatcgtccaggccccatctggggggccgtgatagcggga

SEQ ID NO: 91050 - DNA, 73 bp, Homo sapiens
ccagaagcaacaaggccgtcaggaggcatcgtccaggccccatctggggggccgtgatagcgggacttccaaa

SEQ ID NO: 91051 - DNA, 74 bp, Homo sapiens
agcaacaaggccgtcaggaggcatcgtccaggccccatctggggggccgtgatagcgggacttccaaacacagc

SEQ ID NO: 91052 - DNA, 74 bp, Homo sapiens
aggaggcatcgtccaggccccatctggggggccgtgatagcgggacttccaaacacagcgcctctgctacactt

SEQ ID NO: 91053 - DNA, 72 bp, Homo sapiens
atcgtccaggccccatctggggggccgtgatagcgggacttccaaacacagcgcctctgctacactttccgg

SEQ ID NO: 91054 - DNA, 73 bp, Homo sapiens
catctggggggccgtgatagcgggacttccaaacacagcgcctctgctacactttccggggaaatcgggcaga

SEQ ID NO: 91055 - DNA, 71 bp, Homo sapiens
gggccgtgatagcgggacttccaaacacagcgcctctgctacactttccggggaaatcgggcagaagaaag

SEQ ID NO: 91056 - DNA, 70 bp, Homo sapiens
atagcgggacttccaaacacagcgcctctgctacactttccggggaaatcgggcagaagaaaggacgcgg

SEQ ID NO: 91057 - DNA, 71 bp, Homo sapiens
cttccaaacacagcgcctctgctacactttccggggaaatcgggcagaagaaaggacgcggtgatgtgggg

SEQ ID NO: 91058 - DNA, 71 bp, Homo sapiens
cctctgctacactttccggggaaatcgggcagaagaaaggacgcggtgatgtgggggaacagaattctcac

SEQ ID NO: 91059 - DNA, 70 bp, Homo sapiens
tacactttccggggaaatcgggcagaagaaaggacgcggtgatgtgggggaacagaattctcacgcctct

SEQ ID NO: 91060 - DNA, 71 bp, Homo sapiens
gaaatcgggcagaagaaaggacgcggtgatgtgggggaacagaattctcacgcctcttcggaagccgggaa

SEQ ID NO: 91061 - DNA, 69 bp, Homo sapiens
aaaggacgcggtgatgtgggggaacagaattctcacgcctcttcggaagccgggaatctacccccgagc

SEQ ID NO: 91062 - DNA, 69 bp, Homo sapiens
agaattctcacgcctcttcggaagccgggaatctacccccgagccctcatcccccaactgagccggtta

SEQ ID NO: 91063 - DNA, 72 bp, Homo sapiens
tctcacgcctcttcggaagccgggaatctacccccgagccctcatcccccaactgagccggttatcagagaa

SEQ ID NO: 91064 - DNA, 70 bp, Homo sapiens
cttcggaagccgggaatctacccccgagccctcatcccccaactgagccggttatcagagaagcccacaa

SEQ ID NO: 91065 - DNA, 67 bp, Homo sapiens
agatggaggtgctaaggttttcagcacaaaggtgtccccaccctaccagtaccgttagggtcctggg

SEQ ID NO: 91066 - DNA, 66 bp, Homo sapiens
acaaaggtgtccccaccctaccagtaccgttagggtcctgggtcccaagctggccgtgccaagttc

SEQ ID NO: 91067 - DNA, 70 bp, Homo sapiens
ccaccctaccagtaccgttagggtcctgggtcccaagctggccgtgccaagttcctcagctgaagttgtg

SEQ ID NO: 91068 - DNA, 71 bp, Homo sapiens
agtaccgttagggtcctgggtcccaagctggccgtgccaagttcctcagctgaagttgtggccaggaccca

SEQ ID NO: 91069 - DNA, 73 bp, Homo sapiens
tagggtcctgggtcccaagctggccgtgccaagttcctcagctgaagttgtggccaggacccagtcttgtttc

SEQ ID NO: 91070 - DNA, 74 bp, Homo sapiens
caagctggccgtgccaagttcctcagctgaagttgtggccaggacccagtcttgtttccccttttcgtcacatg

SEQ ID NO: 91071 - DNA, 74 bp, Homo sapiens
gtgccaagttcctcagctgaagttgtggccaggacccagtcttgtttccccttttcgtcacatgtgtgggtgga

SEQ ID NO: 91072 - DNA, 71 bp, Homo sapiens
aagttcctcagctgaagttgtggccaggacccagtcttgtttccccttttcgtcacatgtgtgggtggagg

SEQ ID NO: 91073 - DNA, 69 bp, Homo sapiens
aagttgtggccaggacccagtcttgtttccccttttcgtcacatgtgtgggtggagggaaatgccaaac

SEQ ID NO: 91074 - DNA, 71 bp, Homo sapiens
aggacccagtcttgtttccccttttcgtcacatgtgtgggtggagggaaatgccaaaccacagcaaaagca

SEQ ID NO: 91075 - DNA, 73 bp, Homo sapiens
agtcttgtttccccttttcgtcacatgtgtgggtggagggaaatgccaaaccacagcaaaagcaagttgatgc

SEQ ID NO: 91076 - DNA, 74 bp, Homo sapiens
ccttttcgtcacatgtgtgggtggagggaaatgccaaaccacagcaaaagcaagttgatgccgaagtgaaacac

SEQ ID NO: 91077 - DNA, 76 bp, Homo sapiens
catgtgtgggtggagggaaatgccaaaccacagcaaaagcaagttgatgccgaagtgaaacacgcagctttattaa

SEQ ID NO: 91078 - DNA, 74 bp, Homo sapiens
aatgccaaaccacagcaaaagcaagttgatgccgaagtgaaacacgcagctttattaagacaggggcggtagaa

SEQ ID NO: 91079 - DNA, 74 bp, Homo sapiens
acagcaaaagcaagttgatgccgaagtgaaacacgcagctttattaagacaggggcggtagaagaaggtctcca

SEQ ID NO: 91080 - DNA, 75 bp, Homo sapiens
aaagcaagttgatgccgaagtgaaacacgcagctttattaagacaggggcggtagaagaaggtctccatgctgaa

SEQ ID NO: 91081 - DNA, 76 bp, Homo sapiens
atgccgaagtgaaacacgcagctttattaagacaggggcggtagaagaaggtctccatgctgaacagattacatta

SEQ ID NO: 91082 - DNA, 74 bp, Homo sapiens
aaacacgcagctttattaagacaggggcggtagaagaaggtctccatgctgaacagattacattatggagcccg

SEQ ID NO: 91083 - DNA, 74 bp, Homo sapiens
ttattaagacaggggcggtagaagaaggtctccatgctgaacagattacattatggagcccgggagcctgggaa

SEQ ID NO: 91084 - DNA, 74 bp, Homo sapiens
agacaggggcggtagaagaaggtctccatgctgaacagattacattatggagcccgggagcctgggaaggatgg

SEQ ID NO: 91085 - DNA, 77 bp, Homo sapiens
gtagaagaaggtctccatgctgaacagattacattatggagcccgggagcctgggaaggatggggcaggagagtgaa

SEQ ID NO: 91086 - DNA, 77 bp, Homo sapiens
tctccatgctgaacagattacattatggagcccgggagcctgggaaggatggggcaggagagtgaagggggctttga

SEQ ID NO: 91087 - DNA, 72 bp, Homo sapiens
aacagattacattatggagcccgggagcctgggaaggatggggcaggagagtgaagggggctttgaggagag

SEQ ID NO: 91088 - DNA, 73 bp, Homo sapiens
gggagcctgggaaggatggggcaggagagtgaagggggctttgaggagaggtcctgccaggaacatctgtccc

SEQ ID NO: 91089 - DNA, 73 bp, Homo sapiens
tgggaaggatggggcaggagagtgaagggggctttgaggagaggtcctgccaggaacatctgtccctgttggg

SEQ ID NO: 91090 - DNA, 69 bp, Homo sapiens
agagtgaagggggctttgaggagaggtcctgccaggaacatctgtccctgttgggggtgaagggtaagg

SEQ ID NO: 91091 - DNA, 70 bp, Homo sapiens
ctttgaggagaggtcctgccaggaacatctgtccctgttgggggtgaagggtaagggggccagggcctca

SEQ ID NO: 91092 - DNA, 70 bp, Homo sapiens
aggtcctgccaggaacatctgtccctgttgggggtgaagggtaagggggccagggcctcagaagcggcca

SEQ ID NO: 91093 - DNA, 73 bp, Homo sapiens
aggaacatctgtccctgttgggggtgaagggtaagggggccagggcctcagaagcggccatgccagtgatcag

SEQ ID NO: 91094 - DNA, 73 bp, Homo sapiens
tctgtccctgttgggggtgaagggtaagggggccagggcctcagaagcggccatgccagtgatcaggggaaca

SEQ ID NO: 91095 - DNA, 72 bp, Homo sapiens
agggtaagggggccagggcctcagaagcggccatgccagtgatcaggggaacaccgatggttcctctctcgg

SEQ ID NO: 91096 - DNA, 77 bp, Homo sapiens
gggcctcagaagcggccatgccagtgatcaggggaacaccgatggttcctctctcggggatggtggccagtatggaa

SEQ ID NO: 91097 - DNA, 75 bp, Homo sapiens
agaagcggccatgccagtgatcaggggaacaccgatggttcctctctcggggatggtggccagtatggaacctcg

SEQ ID NO: 91098 - DNA, 73 bp, Homo sapiens
atgccagtgatcaggggaacaccgatggttcctctctcggggatggtggccagtatggaacctcgggggtgac

SEQ ID NO: 91099 - DNA, 70 bp, Homo sapiens
atcaggggaacaccgatggttcctctctcggggatggtggccagtatggaacctcgggggtgacctggga

SEQ ID NO: 91100 - DNA, 72 bp, Homo sapiens
gatggttcctctctcggggatggtggccagtatggaacctcgggggtgacctgggaataggagcgttgagag

SEQ ID NO: 91101 - DNA, 73 bp, Homo sapiens
tctctcggggatggtggccagtatggaacctcgggggtgacctgggaataggagcgttgagagttctgttaga

SEQ ID NO: 91102 - DNA, 71 bp, Homo sapiens
atggtggccagtatggaacctcgggggtgacctgggaataggagcgttgagagttctgttagaaccctgag

SEQ ID NO: 91103 - DNA, 72 bp, Homo sapiens
agtatggaacctcgggggtgacctgggaataggagcgttgagagttctgttagaaccctgaggagtggtgca

SEQ ID NO: 91104 - DNA, 72 bp, Homo sapiens
aacctcgggggtgacctgggaataggagcgttgagagttctgttagaaccctgaggagtggtgcagagatcc

SEQ ID NO: 91105 - DNA, 81 bp, Homo sapiens
gtgacctgggaataggagcgttgagagttctgttagaaccctgaggagtggtgcagagatcctgcaggcctgcctctctgc

SEQ ID NO: 91106 - DNA, 82 bp, Homo sapiens
aataggagcgttgagagttctgttagaaccctgaggagtggtgcagagatcctgcaggcctgcctctctgctctgggatgag

SEQ ID NO: 91107 - DNA, 83 bp, Homo sapiens
agttctgttagaaccctgaggagtggtgcagagatcctgcaggcctgcctctctgctctgggatgaggcaggagggtgctgaa

SEQ ID NO: 91108 - DNA, 83 bp, Homo sapiens
ttagaaccctgaggagtggtgcagagatcctgcaggcctgcctctctgctctgggatgaggcaggagggtgctgaaataacta

SEQ ID NO: 91109 - DNA, 83 bp, Homo sapiens
aggagtggtgcagagatcctgcaggcctgcctctctgctctgggatgaggcaggagggtgctgaaataactagagttctaaga

SEQ ID NO: 91110 - DNA, 79 bp, Homo sapiens
aggcctgcctctctgctctgggatgaggcaggagggtgctgaaataactagagttctaagacacgacctcagtggccag

SEQ ID NO: 91111 - DNA, 79 bp, Homo sapiens
ctctctgctctgggatgaggcaggagggtgctgaaataactagagttctaagacacgacctcagtggccagtatcaggg

SEQ ID NO: 91112 - DNA, 75 bp, Homo sapiens
ctgaaataactagagttctaagacacgacctcagtggccagtatcaggggaactcagtggccagtatcaggggtg

SEQ ID NO: 91113 - DNA, 76 bp, Homo sapiens
aactagagttctaagacacgacctcagtggccagtatcaggggaactcagtggccagtatcaggggtggcaatcca

SEQ ID NO: 91114 - DNA, 77 bp, Homo sapiens
acacgacctcagtggccagtatcaggggaactcagtggccagtatcaggggtggcaatccaggctggtcgtggatta

SEQ ID NO: 91115 - DNA, 75 bp, Homo sapiens
acctcagtggccagtatcaggggaactcagtggccagtatcaggggtggcaatccaggctggtcgtggattaggg

SEQ ID NO: 91116 - DNA, 74 bp, Homo sapiens
tatcaggggaactcagtggccagtatcaggggtggcaatccaggctggtcgtggattaggggttcaggctggtt

SEQ ID NO: 91117 - DNA, 72 bp, Homo sapiens
gggaactcagtggccagtatcaggggtggcaatccaggctggtcgtggattaggggttcaggctggtttggg

SEQ ID NO: 91118 - DNA, 70 bp, Homo sapiens
agtatcaggggtggcaatccaggctggtcgtggattaggggttcaggctggtttggggattgggacttag

SEQ ID NO: 91119 - DNA, 71 bp, Homo sapiens
gtggcaatccaggctggtcgtggattaggggttcaggctggtttggggattgggacttaggtactggtctc

SEQ ID NO: 91120 - DNA, 70 bp, Homo sapiens
aatccaggctggtcgtggattaggggttcaggctggtttggggattgggacttaggtactggtctccaga

SEQ ID NO: 91121 - DNA, 73 bp, Homo sapiens
tcgtggattaggggttcaggctggtttggggattgggacttaggtactggtctccagatggagctcagaacta

SEQ ID NO: 91122 - DNA, 73 bp, Homo sapiens
gttcaggctggtttggggattgggacttaggtactggtctccagatggagctcagaactactcttagggtata

SEQ ID NO: 91123 - DNA, 73 bp, Homo sapiens
attgggacttaggtactggtctccagatggagctcagaactactcttagggtataagagtcttgggaatgacc

SEQ ID NO: 91124 - DNA, 74 bp, Homo sapiens
cttaggtactggtctccagatggagctcagaactactcttagggtataagagtcttgggaatgaccgggcgcag

SEQ ID NO: 91125 - DNA, 66 bp, Homo sapiens
aaaaaaaaaagattcttgggaacgtggttactggggcttagggttaggctcatctgaggatatagg

SEQ ID NO: 91126 - DNA, 68 bp, Homo sapiens
aaaaagattcttgggaacgtggttactggggcttagggttaggctcatctgaggatataggggcctta

SEQ ID NO: 91127 - DNA, 74 bp, Homo sapiens
tgggaacgtggttactggggcttagggttaggctcatctgaggatataggggccttaggacatgaggagacata

SEQ ID NO: 91128 - DNA, 76 bp, Homo sapiens
ggttactggggcttagggttaggctcatctgaggatataggggccttaggacatgaggagacatagcaggctggtc

SEQ ID NO: 91129 - DNA, 78 bp, Homo sapiens
cttagggttaggctcatctgaggatataggggccttaggacatgaggagacatagcaggctggtcctgaggtacctgc

SEQ ID NO: 91130 - DNA, 79 bp, Homo sapiens
aggctcatctgaggatataggggccttaggacatgaggagacatagcaggctggtcctgaggtacctgcgcctgggtcc

SEQ ID NO: 91131 - DNA, 76 bp, Homo sapiens
atataggggccttaggacatgaggagacatagcaggctggtcctgaggtacctgcgcctgggtccccgcccataga

SEQ ID NO: 91132 - DNA, 79 bp, Homo sapiens
ccttaggacatgaggagacatagcaggctggtcctgaggtacctgcgcctgggtccccgcccatagagctgcctctgga

SEQ ID NO: 91133 - DNA, 79 bp, Homo sapiens
acatgaggagacatagcaggctggtcctgaggtacctgcgcctgggtccccgcccatagagctgcctctggaggttctg

SEQ ID NO: 91134 - DNA, 76 bp, Homo sapiens
acatagcaggctggtcctgaggtacctgcgcctgggtccccgcccatagagctgcctctggaggttctgggaaatg

SEQ ID NO: 91135 - DNA, 79 bp, Homo sapiens
tcctgaggtacctgcgcctgggtccccgcccatagagctgcctctggaggttctgggaaatgggccgcagatgcatgaa

SEQ ID NO: 91136 - DNA, 80 bp, Homo sapiens
tacctgcgcctgggtccccgcccatagagctgcctctggaggttctgggaaatgggccgcagatgcatgaagttgcagaa

SEQ ID NO: 91137 - DNA, 79 bp, Homo sapiens
tgggtccccgcccatagagctgcctctggaggttctgggaaatgggccgcagatgcatgaagttgcagaagccacctcg

SEQ ID NO: 91138 - DNA, 81 bp, Homo sapiens
atagagctgcctctggaggttctgggaaatgggccgcagatgcatgaagttgcagaagccacctcgggtacattccctgca

SEQ ID NO: 91139 - DNA, 78 bp, Homo sapiens
ctctggaggttctgggaaatgggccgcagatgcatgaagttgcagaagccacctcgggtacattccctgcatagaggg

SEQ ID NO: 91140 - DNA, 78 bp, Homo sapiens
aggttctgggaaatgggccgcagatgcatgaagttgcagaagccacctcgggtacattccctgcatagagggtagaga

SEQ ID NO: 91141 - DNA, 80 bp, Homo sapiens
aaatgggccgcagatgcatgaagttgcagaagccacctcgggtacattccctgcatagagggtagagagatggaggaagc

SEQ ID NO: 91142 - DNA, 77 bp, Homo sapiens
attcaaagtctgggattccaagtgcccatcccacccttgaactaccataccccatctcatactggcgacagcatgac

SEQ ID NO: 91143 - DNA, 77 bp, Homo sapiens
aagtgcccatcccacccttgaactaccataccccatctcatactggcgacagcatgactcccggaagtcagtgacag

SEQ ID NO: 91144 - DNA, 78 bp, Homo sapiens
acccttgaactaccataccccatctcatactggcgacagcatgactcccggaagtcagtgacaggagacagctcaccg

SEQ ID NO: 91145 - DNA, 83 bp, Homo sapiens
aactaccataccccatctcatactggcgacagcatgactcccggaagtcagtgacaggagacagctcaccgtgcacagcctgc

SEQ ID NO: 91146 - DNA, 83 bp, Homo sapiens
atctcatactggcgacagcatgactcccggaagtcagtgacaggagacagctcaccgtgcacagcctgcccgttgaaccagcg

SEQ ID NO: 91147 - DNA, 81 bp, Homo sapiens
tactggcgacagcatgactcccggaagtcagtgacaggagacagctcaccgtgcacagcctgcccgttgaaccagcggtta

SEQ ID NO: 91148 - DNA, 80 bp, Homo sapiens
agcatgactcccggaagtcagtgacaggagacagctcaccgtgcacagcctgcccgttgaaccagcggttactgagttca

SEQ ID NO: 91149 - DNA, 78 bp, Homo sapiens
aagtcagtgacaggagacagctcaccgtgcacagcctgcccgttgaaccagcggttactgagttcagccacggcccgc

SEQ ID NO: 91150 - DNA, 78 bp, Homo sapiens
aggagacagctcaccgtgcacagcctgcccgttgaaccagcggttactgagttcagccacggcccgctctccatcctc

SEQ ID NO: 91151 - DNA, 77 bp, Homo sapiens
acagctcaccgtgcacagcctgcccgttgaaccagcggttactgagttcagccacggcccgctctccatcctcctcc

SEQ ID NO: 91152 - DNA, 72 bp, Homo sapiens
acagcctgcccgttgaaccagcggttactgagttcagccacggcccgctctccatcctcctccctccggaac

SEQ ID NO: 91153 - DNA, 75 bp, Homo sapiens
accagcggttactgagttcagccacggcccgctctccatcctcctccctccggaactgcaggaaatgtcagtcag

SEQ ID NO: 91154 - DNA, 78 bp, Homo sapiens
actgagttcagccacggcccgctctccatcctcctccctccggaactgcaggaaatgtcagtcagggtcagcaggaga

SEQ ID NO: 91155 - DNA, 77 bp, Homo sapiens
acggcccgctctccatcctcctccctccggaactgcaggaaatgtcagtcagggtcagcaggagaactcagagatct

SEQ ID NO: 91156 - DNA, 79 bp, Homo sapiens
tccatcctcctccctccggaactgcaggaaatgtcagtcagggtcagcaggagaactcagagatcttcaggggactcac

SEQ ID NO: 91157 - DNA, 77 bp, Homo sapiens
tcctccctccggaactgcaggaaatgtcagtcagggtcagcaggagaactcagagatcttcaggggactcactaccc

SEQ ID NO: 91158 - DNA, 79 bp, Homo sapiens
aactgcaggaaatgtcagtcagggtcagcaggagaactcagagatcttcaggggactcactacccgctctggggctgga

SEQ ID NO: 91159 - DNA, 78 bp, Homo sapiens
aatgtcagtcagggtcagcaggagaactcagagatcttcaggggactcactacccgctctggggctggactggattta

SEQ ID NO: 91160 - DNA, 79 bp, Homo sapiens
ggtcagcaggagaactcagagatcttcaggggactcactacccgctctggggctggactggatttagtgatgaaattca

SEQ ID NO: 91161 - DNA, 78 bp, Homo sapiens
aggagaactcagagatcttcaggggactcactacccgctctggggctggactggatttagtgatgaaattcaagctga

SEQ ID NO: 91162 - DNA, 78 bp, Homo sapiens
agatcttcaggggactcactacccgctctggggctggactggatttagtgatgaaattcaagctgagagcctacagtg

SEQ ID NO: 91163 - DNA, 79 bp, Homo sapiens
gggactcactacccgctctggggctggactggatttagtgatgaaattcaagctgagagcctacagtggccaccatcag

SEQ ID NO: 91164 - DNA, 80 bp, Homo sapiens
actacccgctctggggctggactggatttagtgatgaaattcaagctgagagcctacagtggccaccatcaggcattgaa

SEQ ID NO: 91165 - DNA, 79 bp, Homo sapiens
gatttagtgatgaaattcaagctgagagcctacagtggccaccatcaggcattgaaacgcctccacttctgggccctaa

SEQ ID NO: 91166 - DNA, 78 bp, Homo sapiens
agtgatgaaattcaagctgagagcctacagtggccaccatcaggcattgaaacgcctccacttctgggccctaagtgg

SEQ ID NO: 91167 - DNA, 78 bp, Homo sapiens
aagctgagagcctacagtggccaccatcaggcattgaaacgcctccacttctgggccctaagtggggggcagcaagca

SEQ ID NO: 91168 - DNA, 78 bp, Homo sapiens
tacagtggccaccatcaggcattgaaacgcctccacttctgggccctaagtggggggcagcaagcaccttgacataga

SEQ ID NO: 91169 - DNA, 75 bp, Homo sapiens
accatcaggcattgaaacgcctccacttctgggccctaagtggggggcagcaagcaccttgacatagacgttgcc

SEQ ID NO: 91170 - DNA, 72 bp, Homo sapiens
aacgcctccacttctgggccctaagtggggggcagcaagcaccttgacatagacgttgcccacgaggtggtc

SEQ ID NO: 91171 - DNA, 71 bp, Homo sapiens
ttctgggccctaagtggggggcagcaagcaccttgacatagacgttgcccacgaggtggtccccaaggttg

SEQ ID NO: 91172 - DNA, 76 bp, Homo sapiens
taagtggggggcagcaagcaccttgacatagacgttgcccacgaggtggtccccaaggttgtcgcacacattcatc

SEQ ID NO: 91173 - DNA, 77 bp, Homo sapiens
agcaagcaccttgacatagacgttgcccacgaggtggtccccaaggttgtcgcacacattcatctcttcaatctccc

SEQ ID NO: 91174 - DNA, 77 bp, Homo sapiens
ttgacatagacgttgcccacgaggtggtccccaaggttgtcgcacacattcatctcttcaatctccccatacttctc

SEQ ID NO: 91175 - DNA, 75 bp, Homo sapiens
acgttgcccacgaggtggtccccaaggttgtcgcacacattcatctcttcaatctccccatacttctcctgcagt

SEQ ID NO: 91176 - DNA, 77 bp, Homo sapiens
acgaggtggtccccaaggttgtcgcacacattcatctcttcaatctccccatacttctcctgcagttctgtgaacac

SEQ ID NO: 91177 - DNA, 77 bp, Homo sapiens
cacacattcatctcttcaatctccccatacttctcctgcagttctgtgaacacctcctgtggaagacggggaggaac

SEQ ID NO: 91178 - DNA, 77 bp, Homo sapiens
attcatctcttcaatctccccatacttctcctgcagttctgtgaacacctcctgtggaagacggggaggaactcagc

SEQ ID NO: 91179 - DNA, 74 bp, Homo sapiens
tagcctactgggggctgttcaccttgcccccaggcctggtcccttactcacagtgtgatccgtctgcagtttgg

SEQ ID NO: 91180 - DNA, 77 bp, Homo sapiens
tgttcaccttgcccccaggcctggtcccttactcacagtgtgatccgtctgcagtttgggctgtgttctgtggattc

SEQ ID NO: 91181 - DNA, 76 bp, Homo sapiens
ttgcccccaggcctggtcccttactcacagtgtgatccgtctgcagtttgggctgtgttctgtggattccggtaca

SEQ ID NO: 91182 - DNA, 79 bp, Homo sapiens
ctggtcccttactcacagtgtgatccgtctgcagtttgggctgtgttctgtggattccggtacaggttgagcagcacta

SEQ ID NO: 91183 - DNA, 84 bp, Homo sapiens
tactcacagtgtgatccgtctgcagtttgggctgtgttctgtggattccggtacaggttgagcagcactatggtctgcacagaa

SEQ ID NO: 91184 - DNA, 81 bp, Homo sapiens
tgtgatccgtctgcagtttgggctgtgttctgtggattccggtacaggttgagcagcactatggtctgcacagaatttaaa

SEQ ID NO: 91185 - DNA, 77 bp, Homo sapiens
cgtctgcagtttgggctgtgttctgtggattccggtacaggttgagcagcactatggtctgcacagaatttaaaagg

SEQ ID NO: 91186 - DNA, 75 bp, Homo sapiens
ttgggctgtgttctgtggattccggtacaggttgagcagcactatggtctgcacagaatttaaaaggggcggggc

SEQ ID NO: 91187 - DNA, 77 bp, Homo sapiens
ttctgtggattccggtacaggttgagcagcactatggtctgcacagaatttaaaaggggcggggcctgagctcagag

SEQ ID NO: 91188 - DNA, 82 bp, Homo sapiens
tacaggttgagcagcactatggtctgcacagaatttaaaaggggcggggcctgagctcagagggcagggctgcatgaacaga

SEQ ID NO: 91189 - DNA, 83 bp, Homo sapiens
gttgagcagcactatggtctgcacagaatttaaaaggggcggggcctgagctcagagggcagggctgcatgaacagagagtga

SEQ ID NO: 91190 - DNA, 81 bp, Homo sapiens
actatggtctgcacagaatttaaaaggggcggggcctgagctcagagggcagggctgcatgaacagagagtgaggcatgaa

SEQ ID NO: 91191 - DNA, 76 bp, Homo sapiens
acagaatttaaaaggggcggggcctgagctcagagggcagggctgcatgaacagagagtgaggcatgaaggttggg

SEQ ID NO: 91192 - DNA, 67 bp, Homo sapiens
aaggggaagggccagggagccgttaacccccgaggctccgtgccgggtctcacctggctgaatgtcg

SEQ ID NO: 91193 - DNA, 71 bp, Homo sapiens
gggccagggagccgttaacccccgaggctccgtgccgggtctcacctggctgaatgtcggcttgttgtgaa

SEQ ID NO: 91194 - DNA, 72 bp, Homo sapiens
agccgttaacccccgaggctccgtgccgggtctcacctggctgaatgtcggcttgttgtgaagccgggagca

SEQ ID NO: 91195 - DNA, 73 bp, Homo sapiens
cgaggctccgtgccgggtctcacctggctgaatgtcggcttgttgtgaagccgggagcaccggtccccgtgcc

SEQ ID NO: 91196 - DNA, 74 bp, Homo sapiens
tccgtgccgggtctcacctggctgaatgtcggcttgttgtgaagccgggagcaccggtccccgtgccggcagac

SEQ ID NO: 91197 - DNA, 71 bp, Homo sapiens
acctggctgaatgtcggcttgttgtgaagccgggagcaccggtccccgtgccggcagaccccgatcttaaa

SEQ ID NO: 91198 - DNA, 70 bp, Homo sapiens
ctgaatgtcggcttgttgtgaagccgggagcaccggtccccgtgccggcagaccccgatcttaaagtaaa

SEQ ID NO: 91199 - DNA, 69 bp, Homo sapiens
ttgttgtgaagccgggagcaccggtccccgtgccggcagaccccgatcttaaagtaaaaagagcagtta

SEQ ID NO: 91200 - DNA, 66 bp, Homo sapiens
cgggagcaccggtccccgtgccggcagaccccgatcttaaagtaaaaagagcagttaaccctggaa

SEQ ID NO: 91201 - DNA, 66 bp, Homo sapiens
ggtccccgtgccggcagaccccgatcttaaagtaaaaagagcagttaaccctggaaaaggtgcaaa

SEQ ID NO: 91202 - DNA, 67 bp, Homo sapiens
ccggcagaccccgatcttaaagtaaaaagagcagttaaccctggaaaaggtgcaaagacaaaggtga

SEQ ID NO: 91203 - DNA, 65 bp, Homo sapiens
cccgatcttaaagtaaaaagagcagttaaccctggaaaaggtgcaaagacaaaggtgaaccgagg

SEQ ID NO: 91204 - DNA, 68 bp, Homo sapiens
ccagtaccccggccccgaccccccgagagtccactcccagcgcccgttctcacttgtccttctcagtc

SEQ ID NO: 91205 - DNA, 70 bp, Homo sapiens
ggccccgaccccccgagagtccactcccagcgcccgttctcacttgtccttctcagtcccgaatatcgaa

SEQ ID NO: 91206 - DNA, 75 bp, Homo sapiens
cccgagagtccactcccagcgcccgttctcacttgtccttctcagtcccgaatatcgaagctaaatattcagcca

SEQ ID NO: 91207 - DNA, 73 bp, Homo sapiens
agtccactcccagcgcccgttctcacttgtccttctcagtcccgaatatcgaagctaaatattcagccatttt

SEQ ID NO: 91208 - DNA, 72 bp, Homo sapiens
agcgcccgttctcacttgtccttctcagtcccgaatatcgaagctaaatattcagccatttttacccaagcc

SEQ ID NO: 91209 - DNA, 73 bp, Homo sapiens
ttctcacttgtccttctcagtcccgaatatcgaagctaaatattcagccatttttacccaagccctccaggtc

SEQ ID NO: 91210 - DNA, 75 bp, Homo sapiens
tccttctcagtcccgaatatcgaagctaaatattcagccatttttacccaagccctccaggtctggctgctctta

SEQ ID NO: 91211 - DNA, 72 bp, Homo sapiens
aatatcgaagctaaatattcagccatttttacccaagccctccaggtctggctgctcttacgtcacttccgt

SEQ ID NO: 91212 - DNA, 72 bp, Homo sapiens
aagctaaatattcagccatttttacccaagccctccaggtctggctgctcttacgtcacttccgttgcttag

SEQ ID NO: 91213 - DNA, 74 bp, Homo sapiens
ttcagccatttttacccaagccctccaggtctggctgctcttacgtcacttccgttgcttaggagcactgggaa

SEQ ID NO: 91214 - DNA, 72 bp, Homo sapiens
tttttacccaagccctccaggtctggctgctcttacgtcacttccgttgcttaggagcactgggaagtgtag

SEQ ID NO: 91215 - DNA, 69 bp, Homo sapiens
acctggaagtgcgtcgcccgtgccagccccggaaatctcgtgttaggcgaggtcaacgggtaggttctc

SEQ ID NO: 91216 - DNA, 69 bp, Homo sapiens
tcgcccgtgccagccccggaaatctcgtgttaggcgaggtcaacgggtaggttctcgcgagaggacccg

SEQ ID NO: 91217 - DNA, 70 bp, Homo sapiens
gtgccagccccggaaatctcgtgttaggcgaggtcaacgggtaggttctcgcgagaggacccgtcagccc

SEQ ID NO: 91218 - DNA, 70 bp, Homo sapiens
aaatctcgtgttaggcgaggtcaacgggtaggttctcgcgagaggacccgtcagccccagtcaggcgtcg

SEQ ID NO: 91219 - DNA, 74 bp, Homo sapiens
gtgttaggcgaggtcaacgggtaggttctcgcgagaggacccgtcagccccagtcaggcgtcgtgcgaacagca

SEQ ID NO: 91220 - DNA, 73 bp, Homo sapiens
aggtcaacgggtaggttctcgcgagaggacccgtcagccccagtcaggcgtcgtgcgaacagcagctggtacc

SEQ ID NO: 91221 - DNA, 75 bp, Homo sapiens
taggttctcgcgagaggacccgtcagccccagtcaggcgtcgtgcgaacagcagctggtaccgaaggcggaggtg

SEQ ID NO: 91222 - DNA, 74 bp, Homo sapiens
agaggacccgtcagccccagtcaggcgtcgtgcgaacagcagctggtaccgaaggcggaggtggagcccgagag

SEQ ID NO: 91223 - DNA, 77 bp, Homo sapiens
agccccagtcaggcgtcgtgcgaacagcagctggtaccgaaggcggaggtggagcccgagaggtaagtgcgtgtgca

SEQ ID NO: 91224 - DNA, 77 bp, Homo sapiens
agtcaggcgtcgtgcgaacagcagctggtaccgaaggcggaggtggagcccgagaggtaagtgcgtgtgcagaggtg

SEQ ID NO: 91225 - DNA, 77 bp, Homo sapiens
tcgtgcgaacagcagctggtaccgaaggcggaggtggagcccgagaggtaagtgcgtgtgcagaggtggcagttccg

SEQ ID NO: 91226 - DNA, 74 bp, Homo sapiens
agcagctggtaccgaaggcggaggtggagcccgagaggtaagtgcgtgtgcagaggtggcagttccgggcgccg

SEQ ID NO: 91227 - DNA, 72 bp, Homo sapiens
tggtaccgaaggcggaggtggagcccgagaggtaagtgcgtgtgcagaggtggcagttccgggcgccgggga

SEQ ID NO: 91228 - DNA, 72 bp, Homo sapiens
aaggcggaggtggagcccgagaggtaagtgcgtgtgcagaggtggcagttccgggcgccggggaggtgtaga

SEQ ID NO: 91229 - DNA, 73 bp, Homo sapiens
aggtggagcccgagaggtaagtgcgtgtgcagaggtggcagttccgggcgccggggaggtgtagagaacagat

SEQ ID NO: 91230 - DNA, 73 bp, Homo sapiens
cgagaggtaagtgcgtgtgcagaggtggcagttccgggcgccggggaggtgtagagaacagattcggaaactg

SEQ ID NO: 91231 - DNA, 72 bp, Homo sapiens
agaggtaagtgcgtgtgcagaggtggcagttccgggcgccggggaggtgtagagaacagattcggaaactgg

SEQ ID NO: 91232 - DNA, 72 bp, Homo sapiens
ggtaagtgcgtgtgcagaggtggcagttccgggcgccggggaggtgtagagaacagattcggaaactgggga

SEQ ID NO: 91233 - DNA, 72 bp, Homo sapiens
agaggtggcagttccgggcgccggggaggtgtagagaacagattcggaaactggggaggtctagcatgtggc

SEQ ID NO: 91234 - DNA, 70 bp, Homo sapiens
agttccgggcgccggggaggtgtagagaacagattcggaaactggggaggtctagcatgtggcgtaggag

SEQ ID NO: 91235 - DNA, 70 bp, Homo sapiens
ccggggaggtgtagagaacagattcggaaactggggaggtctagcatgtggcgtaggagggggtcctcac

SEQ ID NO: 91236 - DNA, 73 bp, Homo sapiens
gtagagaacagattcggaaactggggaggtctagcatgtggcgtaggagggggtcctcactccgcttcgcgat

SEQ ID NO: 91237 - DNA, 72 bp, Homo sapiens
agattcggaaactggggaggtctagcatgtggcgtaggagggggtcctcactccgcttcgcgattgccaaaa

SEQ ID NO: 91238 - DNA, 73 bp, Homo sapiens
aaactggggaggtctagcatgtggcgtaggagggggtcctcactccgcttcgcgattgccaaaacgagcctgc

SEQ ID NO: 91239 - DNA, 75 bp, Homo sapiens
tctagcatgtggcgtaggagggggtcctcactccgcttcgcgattgccaaaacgagcctgccggaagcgccctaa

SEQ ID NO: 91240 - DNA, 71 bp, Homo sapiens
atgtggcgtaggagggggtcctcactccgcttcgcgattgccaaaacgagcctgccggaagcgccctaagg

SEQ ID NO: 91241 - DNA, 70 bp, Homo sapiens
tcactccgcttcgcgattgccaaaacgagcctgccggaagcgccctaaggggttttcttctcccagggaa

SEQ ID NO: 91242 - DNA, 68 bp, Homo sapiens
ttcgcgattgccaaaacgagcctgccggaagcgccctaaggggttttcttctcccagggaaccagcgg

SEQ ID NO: 91243 - DNA, 65 bp, Homo sapiens
aaaacgagcctgccggaagcgccctaaggggttttcttctcccagggaaccagcggggaaactga

SEQ ID NO: 91244 - DNA, 68 bp, Homo sapiens
ctaaggggttttcttctcccagggaaccagcggggaaactgaggctcggggtggagcgcaggattgtg

SEQ ID NO: 91245 - DNA, 71 bp, Homo sapiens
ttttcttctcccagggaaccagcggggaaactgaggctcggggtggagcgcaggattgtgggacgcgccaa

SEQ ID NO: 91246 - DNA, 73 bp, Homo sapiens
agggaaccagcggggaaactgaggctcggggtggagcgcaggattgtgggacgcgccaaggctgctgtctttc

SEQ ID NO: 91247 - DNA, 77 bp, Homo sapiens
accagcggggaaactgaggctcggggtggagcgcaggattgtgggacgcgccaaggctgctgtctttcccagcagca

SEQ ID NO: 91248 - DNA, 80 bp, Homo sapiens
actgaggctcggggtggagcgcaggattgtgggacgcgccaaggctgctgtctttcccagcagcagcggaagatgtcgga

SEQ ID NO: 91249 - DNA, 83 bp, Homo sapiens
ggtggagcgcaggattgtgggacgcgccaaggctgctgtctttcccagcagcagcggaagatgtcggacagcgaggacagcaa

SEQ ID NO: 91250 - DNA, 79 bp, Homo sapiens
aggattgtgggacgcgccaaggctgctgtctttcccagcagcagcggaagatgtcggacagcgaggacagcaacttttc

SEQ ID NO: 91251 - DNA, 78 bp, Homo sapiens
acgcgccaaggctgctgtctttcccagcagcagcggaagatgtcggacagcgaggacagcaacttttccgaggaggag

SEQ ID NO: 91252 - DNA, 79 bp, Homo sapiens
aaggctgctgtctttcccagcagcagcggaagatgtcggacagcgaggacagcaacttttccgaggaggaggacagcga

SEQ ID NO: 91253 - DNA, 80 bp, Homo sapiens
agcagcggaagatgtcggacagcgaggacagcaacttttccgaggaggaggacagcgagcgcagcagtgacggcgaggag

SEQ ID NO: 91254 - DNA, 78 bp, Homo sapiens
aagatgtcggacagcgaggacagcaacttttccgaggaggaggacagcgagcgcagcagtgacggcgaggaggccgag

SEQ ID NO: 91255 - DNA, 79 bp, Homo sapiens
acagcgaggacagcaacttttccgaggaggaggacagcgagcgcagcagtgacggcgaggaggccgaggtctgtggctg

SEQ ID NO: 91256 - DNA, 71 bp, Homo sapiens
atttttggggtagcagaattctggtgctacaaccctgcctgacccctgtaggtagacgaagagcggcggag

SEQ ID NO: 91257 - DNA, 76 bp, Homo sapiens
agaattctggtgctacaaccctgcctgacccctgtaggtagacgaagagcggcggagtgcagcgggcagtgagaaa

SEQ ID NO: 91258 - DNA, 76 bp, Homo sapiens
ctggtgctacaaccctgcctgacccctgtaggtagacgaagagcggcggagtgcagcgggcagtgagaaagaagaa

SEQ ID NO: 91259 - DNA, 78 bp, Homo sapiens
tgcctgacccctgtaggtagacgaagagcggcggagtgcagcgggcagtgagaaagaagaagagcctgaggacgaaga

SEQ ID NO: 91260 - DNA, 76 bp, Homo sapiens
ccctgtaggtagacgaagagcggcggagtgcagcgggcagtgagaaagaagaagagcctgaggacgaagaggagga

SEQ ID NO: 91261 - DNA, 70 bp, Homo sapiens
aagaggaggaggaatacgatgaggaagaggaggaagaagatgatgaccgaccccccaagaaaccccgcca

SEQ ID NO: 91262 - DNA, 72 bp, Homo sapiens
aatacgatgaggaagaggaggaagaagatgatgaccgaccccccaagaaaccccgccatggaggcttcattc

SEQ ID NO: 91263 - DNA, 72 bp, Homo sapiens
aagaggaggaagaagatgatgaccgaccccccaagaaaccccgccatggaggcttcattctggacgaggctg

SEQ ID NO: 91264 - DNA, 74 bp, Homo sapiens
aagaagatgatgaccgaccccccaagaaaccccgccatggaggcttcattctggacgaggctggtatgtcatag

SEQ ID NO: 91265 - DNA, 76 bp, Homo sapiens
atgatgaccgaccccccaagaaaccccgccatggaggcttcattctggacgaggctggtatgtcatagtgcttggc

SEQ ID NO: 91266 - DNA, 81 bp, Homo sapiens
ccaagaaaccccgccatggaggcttcattctggacgaggctggtatgtcatagtgcttggccagtgccgagcagaggctga

SEQ ID NO: 91267 - DNA, 74 bp, Homo sapiens
ttatgaggtcacctttgccacttaccacttggcctttccgttttagatgttgacgatgagtatgaggacgagga

SEQ ID NO: 91268 - DNA, 73 bp, Homo sapiens
ccacttaccacttggcctttccgttttagatgttgacgatgagtatgaggacgaggaccagtgggaggatgga

SEQ ID NO: 91269 - DNA, 77 bp, Homo sapiens
ttggcctttccgttttagatgttgacgatgagtatgaggacgaggaccagtgggaggatggagcagaggacattcta

SEQ ID NO: 91270 - DNA, 77 bp, Homo sapiens
ttccgttttagatgttgacgatgagtatgaggacgaggaccagtgggaggatggagcagaggacattctagagaaag

SEQ ID NO: 91271 - DNA, 80 bp, Homo sapiens
atgttgacgatgagtatgaggacgaggaccagtgggaggatggagcagaggacattctagagaaaggtgtgtgtgagccc

SEQ ID NO: 91272 - DNA, 79 bp, Homo sapiens
agtatgaggacgaggaccagtgggaggatggagcagaggacattctagagaaaggtgtgtgtgagccctgcctccacaa

SEQ ID NO: 91273 - DNA, 78 bp, Homo sapiens
aggaccagtgggaggatggagcagaggacattctagagaaaggtgtgtgtgagccctgcctccacaagactactggga

SEQ ID NO: 91274 - DNA, 77 bp, Homo sapiens
agtgggaggatggagcagaggacattctagagaaaggtgtgtgtgagccctgcctccacaagactactgggaagagg

SEQ ID NO: 91275 - DNA, 79 bp, Homo sapiens
atggagcagaggacattctagagaaaggtgtgtgtgagccctgcctccacaagactactgggaagagggtggctgagag

SEQ ID NO: 91276 - DNA, 77 bp, Homo sapiens
acattctagagaaaggtgtgtgtgagccctgcctccacaagactactgggaagagggtggctgagagggtcttcaga

SEQ ID NO: 91277 - DNA, 75 bp, Homo sapiens
aaaggtgtgtgtgagccctgcctccacaagactactgggaagagggtggctgagagggtcttcagagcccattcc

SEQ ID NO: 91278 - DNA, 75 bp, Homo sapiens
tgtgtgagccctgcctccacaagactactgggaagagggtggctgagagggtcttcagagcccattcccccgacc

SEQ ID NO: 91279 - DNA, 71 bp, Homo sapiens
cctccacaagactactgggaagagggtggctgagagggtcttcagagcccattcccccgacccccgcatcc

SEQ ID NO: 91280 - DNA, 70 bp, Homo sapiens
aagactactgggaagagggtggctgagagggtcttcagagcccattcccccgacccccgcatcccctgta

SEQ ID NO: 91281 - DNA, 69 bp, Homo sapiens
aagagggtggctgagagggtcttcagagcccattcccccgacccccgcatcccctgtacaccccaactc

SEQ ID NO: 91282 - DNA, 68 bp, Homo sapiens
agagggtcttcagagcccattcccccgacccccgcatcccctgtacaccccaactcccaccgtcctca

SEQ ID NO: 91283 - DNA, 69 bp, Homo sapiens
tcttcagagcccattcccccgacccccgcatcccctgtacaccccaactcccaccgtcctcaccttgct

SEQ ID NO: 91284 - DNA, 67 bp, Homo sapiens
attcccccgacccccgcatcccctgtacaccccaactcccaccgtcctcaccttgcttctttctgtc

SEQ ID NO: 91285 - DNA, 71 bp, Homo sapiens
cccgcatcccctgtacaccccaactcccaccgtcctcaccttgcttctttctgtccttcccagagagacca

SEQ ID NO: 91286 - DNA, 72 bp, Homo sapiens
ctgtacaccccaactcccaccgtcctcaccttgcttctttctgtccttcccagagagaccagctccctgctt

SEQ ID NO: 91287 - DNA, 70 bp, Homo sapiens
caactcccaccgtcctcaccttgcttctttctgtccttcccagagagaccagctccctgctttttccttt

SEQ ID NO: 91288 - DNA, 70 bp, Homo sapiens
accgtcctcaccttgcttctttctgtccttcccagagagaccagctccctgctttttccttttaggccca

SEQ ID NO: 91289 - DNA, 70 bp, Homo sapiens
accttgcttctttctgtccttcccagagagaccagctccctgctttttccttttaggcccatgagtgggg

SEQ ID NO: 91290 - DNA, 70 bp, Homo sapiens
tctttctgtccttcccagagagaccagctccctgctttttccttttaggcccatgagtggggggtggggc

SEQ ID NO: 91291 - DNA, 68 bp, Homo sapiens
ttcccagagagaccagctccctgctttttccttttaggcccatgagtggggggtggggccctggggtg

SEQ ID NO: 91292 - DNA, 66 bp, Homo sapiens
agaccagctccctgctttttccttttaggcccatgagtggggggtggggccctggggtggggatgt

SEQ ID NO: 91293 - DNA, 65 bp, Homo sapiens
tttttccttttaggcccatgagtggggggtggggccctggggtggggatgttgtggggagaggac

SEQ ID NO: 91294 - DNA, 68 bp, Homo sapiens
cttttaggcccatgagtggggggtggggccctggggtggggatgttgtggggagaggactctgggatc

SEQ ID NO: 91295 - DNA, 72 bp, Homo sapiens
accaccaccacctcctcttcctccaagtagaagagattgaaggtaagaatatgaaaagtgtgattccctgac

SEQ ID NO: 91296 - DNA, 71 bp, Homo sapiens
acctcctcttcctccaagtagaagagattgaaggtaagaatatgaaaagtgtgattccctgaccttcctcc

SEQ ID NO: 91297 - DNA, 74 bp, Homo sapiens
ctccaagtagaagagattgaaggtaagaatatgaaaagtgtgattccctgaccttcctcccatatcctgacatt

SEQ ID NO: 91298 - DNA, 74 bp, Homo sapiens
agtagaagagattgaaggtaagaatatgaaaagtgtgattccctgaccttcctcccatatcctgacatttcctc

SEQ ID NO: 91299 - DNA, 73 bp, Homo sapiens
attgaaggtaagaatatgaaaagtgtgattccctgaccttcctcccatatcctgacatttcctccttcctgag

SEQ ID NO: 91300 - DNA, 76 bp, Homo sapiens
agaatatgaaaagtgtgattccctgaccttcctcccatatcctgacatttcctccttcctgaggcacctgccctca

SEQ ID NO: 91301 - DNA, 75 bp, Homo sapiens
tattttctccaggcccctgccctccacctgcccttgctcacgccctctgcccattatttttcagcctccaatatc

SEQ ID NO: 91302 - DNA, 75 bp, Homo sapiens
cccctgccctccacctgcccttgctcacgccctctgcccattatttttcagcctccaatatcgataatgttgtcc

SEQ ID NO: 91303 - DNA, 79 bp, Homo sapiens
tccacctgcccttgctcacgccctctgcccattatttttcagcctccaatatcgataatgttgtcctggatgaagatcg

SEQ ID NO: 91304 - DNA, 77 bp, Homo sapiens
cccttgctcacgccctctgcccattatttttcagcctccaatatcgataatgttgtcctggatgaagatcgttctgg

SEQ ID NO: 91305 - DNA, 76 bp, Homo sapiens
acgccctctgcccattatttttcagcctccaatatcgataatgttgtcctggatgaagatcgttctggggctcgcc

SEQ ID NO: 91306 - DNA, 76 bp, Homo sapiens
ttatttttcagcctccaatatcgataatgttgtcctggatgaagatcgttctggggctcgccgcctgcaaaacctc

SEQ ID NO: 91307 - DNA, 77 bp, Homo sapiens
tttcagcctccaatatcgataatgttgtcctggatgaagatcgttctggggctcgccgcctgcaaaacctctggagg

SEQ ID NO: 91308 - DNA, 76 bp, Homo sapiens
aatatcgataatgttgtcctggatgaagatcgttctggggctcgccgcctgcaaaacctctggaggtgggcaagga

SEQ ID NO: 91309 - DNA, 73 bp, Homo sapiens
aatgttgtcctggatgaagatcgttctggggctcgccgcctgcaaaacctctggaggtgggcaaggaagggaa

SEQ ID NO: 91310 - DNA, 71 bp, Homo sapiens
tgaagatcgttctggggctcgccgcctgcaaaacctctggaggtgggcaaggaagggaaacgtggtgggat

SEQ ID NO: 91311 - DNA, 71 bp, Homo sapiens
tcgttctggggctcgccgcctgcaaaacctctggaggtgggcaaggaagggaaacgtggtgggattggctc

SEQ ID NO: 91312 - DNA, 69 bp, Homo sapiens
ccgcctgcaaaacctctggaggtgggcaaggaagggaaacgtggtgggattggctcctgtggggagatt

SEQ ID NO: 91313 - DNA, 76 bp, Homo sapiens
taggtcagcccacctgctgtcctcaaccttcaattcgtgtttgcttccccactcgtgctccagggaccagcgagaa

SEQ ID NO: 91314 - DNA, 74 bp, Homo sapiens
acctgctgtcctcaaccttcaattcgtgtttgcttccccactcgtgctccagggaccagcgagaagaagaactg

SEQ ID NO: 91315 - DNA, 73 bp, Homo sapiens
ctcaaccttcaattcgtgtttgcttccccactcgtgctccagggaccagcgagaagaagaactgggcgagtat

SEQ ID NO: 91316 - DNA, 74 bp, Homo sapiens
aattcgtgtttgcttccccactcgtgctccagggaccagcgagaagaagaactgggcgagtattacatgaagaa

SEQ ID NO: 91317 - DNA, 75 bp, Homo sapiens
tttgcttccccactcgtgctccagggaccagcgagaagaagaactgggcgagtattacatgaagaaatacgccaa

SEQ ID NO: 91318 - DNA, 77 bp, Homo sapiens
actcgtgctccagggaccagcgagaagaagaactgggcgagtattacatgaagaaatacgccaagtcatctgtggga

SEQ ID NO: 91319 - DNA, 75 bp, Homo sapiens
agggaccagcgagaagaagaactgggcgagtattacatgaagaaatacgccaagtcatctgtgggagagacgtaa

SEQ ID NO: 91320 - DNA, 76 bp, Homo sapiens
agcgagaagaagaactgggcgagtattacatgaagaaatacgccaagtcatctgtgggagagacgtaagggcatgg

SEQ ID NO: 91321 - DNA, 75 bp, Homo sapiens
aagaactgggcgagtattacatgaagaaatacgccaagtcatctgtgggagagacgtaagggcatggtgggggca

SEQ ID NO: 91322 - DNA, 74 bp, Homo sapiens
agtattacatgaagaaatacgccaagtcatctgtgggagagacgtaagggcatggtgggggcaggtgggggcag

SEQ ID NO: 91323 - DNA, 74 bp, Homo sapiens
atgaagaaatacgccaagtcatctgtgggagagacgtaagggcatggtgggggcaggtgggggcagggagcagg

SEQ ID NO: 91324 - DNA, 74 bp, Homo sapiens
tacgccaagtcatctgtgggagagacgtaagggcatggtgggggcaggtgggggcagggagcaggtggtcccta

SEQ ID NO: 91325 - DNA, 72 bp, Homo sapiens
tggtgggggcaggtgggggcagggagcaggtggtccctaagcgggaaggggcggggatctgacagagcttca

SEQ ID NO: 91326 - DNA, 70 bp, Homo sapiens
gggcaggtgggggcagggagcaggtggtccctaagcgggaaggggcggggatctgacagagcttcacccc

SEQ ID NO: 91327 - DNA, 72 bp, Homo sapiens
taagcgggaaggggcggggatctgacagagcttcaccccttcctgactgccctcctcccttcagggtgtatg

SEQ ID NO: 91328 - DNA, 78 bp, Homo sapiens
gggcggggatctgacagagcttcaccccttcctgactgccctcctcccttcagggtgtatggaggatctgatgagctc

SEQ ID NO: 91329 - DNA, 83 bp, Homo sapiens
atctgacagagcttcaccccttcctgactgccctcctcccttcagggtgtatggaggatctgatgagctctcagacgacatca

SEQ ID NO: 91330 - DNA, 80 bp, Homo sapiens
agagcttcaccccttcctgactgccctcctcccttcagggtgtatggaggatctgatgagctctcagacgacatcaccca

SEQ ID NO: 91331 - DNA, 86 bp, Homo sapiens
ttcctgactgccctcctcccttcagggtgtatggaggatctgatgagctctcagacgacatcacccagcagcagctgctcccagga

SEQ ID NO: 91332 - DNA, 84 bp, Homo sapiens
ctcctcccttcagggtgtatggaggatctgatgagctctcagacgacatcacccagcagcagctgctcccaggagtcaagtaag

SEQ ID NO: 91333 - DNA, 82 bp, Homo sapiens
cccttcagggtgtatggaggatctgatgagctctcagacgacatcacccagcagcagctgctcccaggagtcaagtaagggg

SEQ ID NO: 91334 - DNA, 84 bp, Homo sapiens
tgtatggaggatctgatgagctctcagacgacatcacccagcagcagctgctcccaggagtcaagtaagggggttgggatggtg

SEQ ID NO: 91335 - DNA, 80 bp, Homo sapiens
atctgatgagctctcagacgacatcacccagcagcagctgctcccaggagtcaagtaagggggttgggatggtgggggcc

SEQ ID NO: 91336 - DNA, 77 bp, Homo sapiens
ctctcagacgacatcacccagcagcagctgctcccaggagtcaagtaagggggttgggatggtgggggccgtgctgg

SEQ ID NO: 91337 - DNA, 73 bp, Homo sapiens
acccagcagcagctgctcccaggagtcaagtaagggggttgggatggtgggggccgtgctggggtgcgaatct

SEQ ID NO: 91338 - DNA, 71 bp, Homo sapiens
agctgctcccaggagtcaagtaagggggttgggatggtgggggccgtgctggggtgcgaatcttgtatggg

SEQ ID NO: 91339 - DNA, 67 bp, Homo sapiens
aagggggtggccctgggggttcgtctgtttgttactgaagatccagcttcactgaaggccttccttt

SEQ ID NO: 91340 - DNA, 72 bp, Homo sapiens
ccctgggggttcgtctgtttgttactgaagatccagcttcactgaaggccttccttttcctctgctgcttag

SEQ ID NO: 91341 - DNA, 76 bp, Homo sapiens
ttcgtctgtttgttactgaagatccagcttcactgaaggccttccttttcctctgctgcttagggatcccaatctg

SEQ ID NO: 91342 - DNA, 78 bp, Homo sapiens
ttactgaagatccagcttcactgaaggccttccttttcctctgctgcttagggatcccaatctgtggactgtcaaatg

SEQ ID NO: 91343 - DNA, 76 bp, Homo sapiens
aagatccagcttcactgaaggccttccttttcctctgctgcttagggatcccaatctgtggactgtcaaatgtaag

SEQ ID NO: 91344 - DNA, 79 bp, Homo sapiens
ttcactgaaggccttccttttcctctgctgcttagggatcccaatctgtggactgtcaaatgtaaggtatgtgctctga

SEQ ID NO: 91345 - DNA, 77 bp, Homo sapiens
ggccttccttttcctctgctgcttagggatcccaatctgtggactgtcaaatgtaaggtatgtgctctgatctcggg

SEQ ID NO: 91346 - DNA, 79 bp, Homo sapiens
ttcctctgctgcttagggatcccaatctgtggactgtcaaatgtaaggtatgtgctctgatctcggggcttggaggagg

SEQ ID NO: 91347 - DNA, 76 bp, Homo sapiens
cttagggatcccaatctgtggactgtcaaatgtaaggtatgtgctctgatctcggggcttggaggaggtgggagaa

SEQ ID NO: 91348 - DNA, 78 bp, Homo sapiens
aatctgtggactgtcaaatgtaaggtatgtgctctgatctcggggcttggaggaggtgggagaatgagggaggctgct

SEQ ID NO: 91349 - DNA, 76 bp, Homo sapiens
actgtcaaatgtaaggtatgtgctctgatctcggggcttggaggaggtgggagaatgagggaggctgctttgtggg

SEQ ID NO: 91350 - DNA, 75 bp, Homo sapiens
atgtaaggtatgtgctctgatctcggggcttggaggaggtgggagaatgagggaggctgctttgtgggggagaag

SEQ ID NO: 91351 - DNA, 76 bp, Homo sapiens
ccctttcctgtgtcctttcctccatcctgtcatctctctcaaatctgcctctcatcttccagattggggaggaacg

SEQ ID NO: 91352 - DNA, 78 bp, Homo sapiens
tgtcctttcctccatcctgtcatctctctcaaatctgcctctcatcttccagattggggaggaacgggccacggccat

SEQ ID NO: 91353 - DNA, 79 bp, Homo sapiens
tcctccatcctgtcatctctctcaaatctgcctctcatcttccagattggggaggaacgggccacggccatttccttga

SEQ ID NO: 91354 - DNA, 79 bp, Homo sapiens
catctctctcaaatctgcctctcatcttccagattggggaggaacgggccacggccatttccttgatgcgcaagttcat

SEQ ID NO: 91355 - DNA, 76 bp, Homo sapiens
aaatctgcctctcatcttccagattggggaggaacgggccacggccatttccttgatgcgcaagttcattgcctac

SEQ ID NO: 91356 - DNA, 77 bp, Homo sapiens
ctcatcttccagattggggaggaacgggccacggccatttccttgatgcgcaagttcattgcctaccagttcacaga

SEQ ID NO: 91357 - DNA, 74 bp, Homo sapiens
agattggggaggaacgggccacggccatttccttgatgcgcaagttcattgcctaccagttcacagacacggta

SEQ ID NO: 91358 - DNA, 73 bp, Homo sapiens
ggaacgggccacggccatttccttgatgcgcaagttcattgcctaccagttcacagacacggtaagtcgggta

SEQ ID NO: 91359 - DNA, 74 bp, Homo sapiens
acggccatttccttgatgcgcaagttcattgcctaccagttcacagacacggtaagtcgggtagacaggcggct

SEQ ID NO: 91360 - DNA, 74 bp, Homo sapiens
atttccttgatgcgcaagttcattgcctaccagttcacagacacggtaagtcgggtagacaggcggcttggtgg

SEQ ID NO: 91361 - DNA, 75 bp, Homo sapiens
caagttcattgcctaccagttcacagacacggtaagtcgggtagacaggcggcttggtggggagacatggcaaca

SEQ ID NO: 91362 - DNA, 74 bp, Homo sapiens
attgcctaccagttcacagacacggtaagtcgggtagacaggcggcttggtggggagacatggcaacacccaga

SEQ ID NO: 91363 - DNA, 79 bp, Homo sapiens
tattagccgttgtgtctcactgtttcctccttccaccggctcaccctgcagcccctgcagatcaagtcagtagtggcac

SEQ ID NO: 91364 - DNA, 83 bp, Homo sapiens
tgtgtctcactgtttcctccttccaccggctcaccctgcagcccctgcagatcaagtcagtagtggcaccagagcatgtgaag

SEQ ID NO: 91365 - DNA, 82 bp, Homo sapiens
tttcctccttccaccggctcaccctgcagcccctgcagatcaagtcagtagtggcaccagagcatgtgaagggctacatcta

SEQ ID NO: 91366 - DNA, 82 bp, Homo sapiens
accggctcaccctgcagcccctgcagatcaagtcagtagtggcaccagagcatgtgaagggctacatctacgtggaggccta

SEQ ID NO: 91367 - DNA, 84 bp, Homo sapiens
ctgcagcccctgcagatcaagtcagtagtggcaccagagcatgtgaagggctacatctacgtggaggcctacaagcagacccac

SEQ ID NO: 91368 - DNA, 84 bp, Homo sapiens
ctgcagatcaagtcagtagtggcaccagagcatgtgaagggctacatctacgtggaggcctacaagcagacccacgtgaagcag

SEQ ID NO: 91369 - DNA, 80 bp, Homo sapiens
aagtcagtagtggcaccagagcatgtgaagggctacatctacgtggaggcctacaagcagacccacgtgaagcaggccat

SEQ ID NO: 91370 - DNA, 80 bp, Homo sapiens
tagtggcaccagagcatgtgaagggctacatctacgtggaggcctacaagcagacccacgtgaagcaggccattgagggg

SEQ ID NO: 91371 - DNA, 78 bp, Homo sapiens
agagcatgtgaagggctacatctacgtggaggcctacaagcagacccacgtgaagcaggccattgagggggtgggcaa

SEQ ID NO: 91372 - DNA, 74 bp, Homo sapiens
aagggctacatctacgtggaggcctacaagcagacccacgtgaagcaggccattgagggggtgggcaacctgcg

SEQ ID NO: 91373 - DNA, 76 bp, Homo sapiens
tctacgtggaggcctacaagcagacccacgtgaagcaggccattgagggggtgggcaacctgcggcttggctactg

SEQ ID NO: 91374 - DNA, 77 bp, Homo sapiens
cctacaagcagacccacgtgaagcaggccattgagggggtgggcaacctgcggcttggctactggaaccagcagatg

SEQ ID NO: 91375 - DNA, 77 bp, Homo sapiens
acccacgtgaagcaggccattgagggggtgggcaacctgcggcttggctactggaaccagcagatggtgcccatcaa

SEQ ID NO: 91376 - DNA, 80 bp, Homo sapiens
aagcaggccattgagggggtgggcaacctgcggcttggctactggaaccagcagatggtgcccatcaaggagatgacaga

SEQ ID NO: 91377 - DNA, 80 bp, Homo sapiens
ttgagggggtgggcaacctgcggcttggctactggaaccagcagatggtgcccatcaaggagatgacagacgtgctcaaa

SEQ ID NO: 91378 - DNA, 82 bp, Homo sapiens
tgggcaacctgcggcttggctactggaaccagcagatggtgcccatcaaggagatgacagacgtgctcaaagtggtgaagga

SEQ ID NO: 91379 - DNA, 79 bp, Homo sapiens
cttggctactggaaccagcagatggtgcccatcaaggagatgacagacgtgctcaaagtggtgaaggaggtggccaacc

SEQ ID NO: 91380 - DNA, 79 bp, Homo sapiens
tactggaaccagcagatggtgcccatcaaggagatgacagacgtgctcaaagtggtgaaggaggtggccaacctgaaac

SEQ ID NO: 91381 - DNA, 76 bp, Homo sapiens
agatggtgcccatcaaggagatgacagacgtgctcaaagtggtgaaggaggtggccaacctgaaaccaaagtcctg

SEQ ID NO: 91382 - DNA, 73 bp, Homo sapiens
atcaaggagatgacagacgtgctcaaagtggtgaaggaggtggccaacctgaaaccaaagtcctgggtccgcc

SEQ ID NO: 91383 - DNA, 73 bp, Homo sapiens
agatgacagacgtgctcaaagtggtgaaggaggtggccaacctgaaaccaaagtcctgggtccgcctcaagcg

SEQ ID NO: 91384 - DNA, 73 bp, Homo sapiens
tgctcaaagtggtgaaggaggtggccaacctgaaaccaaagtcctgggtccgcctcaagcggggcatctacaa

SEQ ID NO: 91385 - DNA, 74 bp, Homo sapiens
gtgaaggaggtggccaacctgaaaccaaagtcctgggtccgcctcaagcggggcatctacaaggatgacattgc

SEQ ID NO: 91386 - DNA, 75 bp, Homo sapiens
aggtggccaacctgaaaccaaagtcctgggtccgcctcaagcggggcatctacaaggatgacattgctcaggtgc

SEQ ID NO: 91387 - DNA, 72 bp, Homo sapiens
aacctgaaaccaaagtcctgggtccgcctcaagcggggcatctacaaggatgacattgctcaggtgcccggg

SEQ ID NO: 91388 - DNA, 74 bp, Homo sapiens
aaagtcctgggtccgcctcaagcggggcatctacaaggatgacattgctcaggtgcccggggcggggtggcatg

SEQ ID NO: 91389 - DNA, 77 bp, Homo sapiens
gggtcagggaggagagtggggccctgctgaccttctgctcgccctgctcaggtggactacgtggagcccagccagaa

SEQ ID NO: 91390 - DNA, 78 bp, Homo sapiens
aggagagtggggccctgctgaccttctgctcgccctgctcaggtggactacgtggagcccagccagaacaccatctcc

SEQ ID NO: 91391 - DNA, 82 bp, Homo sapiens
gccctgctgaccttctgctcgccctgctcaggtggactacgtggagcccagccagaacaccatctccctgaagatgatccca

SEQ ID NO: 91392 - DNA, 81 bp, Homo sapiens
accttctgctcgccctgctcaggtggactacgtggagcccagccagaacaccatctccctgaagatgatcccacgcatcga

SEQ ID NO: 91393 - DNA, 84 bp, Homo sapiens
gccctgctcaggtggactacgtggagcccagccagaacaccatctccctgaagatgatcccacgcatcgactacgatcgcatca

SEQ ID NO: 91394 - DNA, 80 bp, Homo sapiens
aggtggactacgtggagcccagccagaacaccatctccctgaagatgatcccacgcatcgactacgatcgcatcaaggcc

SEQ ID NO: 91395 - DNA, 84 bp, Homo sapiens
gtggagcccagccagaacaccatctccctgaagatgatcccacgcatcgactacgatcgcatcaaggcccgcatgagcttggta

SEQ ID NO: 91396 - DNA, 82 bp, Homo sapiens
agccagaacaccatctccctgaagatgatcccacgcatcgactacgatcgcatcaaggcccgcatgagcttggtactcaggg

SEQ ID NO: 91397 - DNA, 82 bp, Homo sapiens
accatctccctgaagatgatcccacgcatcgactacgatcgcatcaaggcccgcatgagcttggtactcaggggaatctgtg

SEQ ID NO: 91398 - DNA, 81 bp, Homo sapiens
ccctgaagatgatcccacgcatcgactacgatcgcatcaaggcccgcatgagcttggtactcaggggaatctgtggcctgg

SEQ ID NO: 91399 - DNA, 77 bp, Homo sapiens
atcccacgcatcgactacgatcgcatcaaggcccgcatgagcttggtactcaggggaatctgtggcctgggggggag

SEQ ID NO: 91400 - DNA, 77 bp, Homo sapiens
atcgactacgatcgcatcaaggcccgcatgagcttggtactcaggggaatctgtggcctgggggggagggagtgtgc

SEQ ID NO: 91401 - DNA, 69 bp, Homo sapiens
atcccactggtggccaagccccctccctcacccttcccacccatgcccctttcctccatagaaagactg

SEQ ID NO: 91402 - DNA, 69 bp, Homo sapiens
tggccaagccccctccctcacccttcccacccatgcccctttcctccatagaaagactggtttgccaaa

SEQ ID NO: 91403 - DNA, 67 bp, Homo sapiens
ccctccctcacccttcccacccatgcccctttcctccatagaaagactggtttgccaaaaggaagaa

SEQ ID NO: 91404 - DNA, 67 bp, Homo sapiens
ctcacccttcccacccatgcccctttcctccatagaaagactggtttgccaaaaggaagaagtttaa

SEQ ID NO: 91405 - DNA, 69 bp, Homo sapiens
acccatgcccctttcctccatagaaagactggtttgccaaaaggaagaagtttaagcggcctccacaga

SEQ ID NO: 91406 - DNA, 74 bp, Homo sapiens
tttcctccatagaaagactggtttgccaaaaggaagaagtttaagcggcctccacagaggctgtttgatgctga

SEQ ID NO: 91407 - DNA, 75 bp, Homo sapiens
atagaaagactggtttgccaaaaggaagaagtttaagcggcctccacagaggctgtttgatgctgagaagatcag

SEQ ID NO: 91408 - DNA, 76 bp, Homo sapiens
tttgccaaaaggaagaagtttaagcggcctccacagaggctgtttgatgctgagaagatcaggtgcgtgtccttgg

SEQ ID NO: 91409 - DNA, 74 bp, Homo sapiens
aaaaggaagaagtttaagcggcctccacagaggctgtttgatgctgagaagatcaggtgcgtgtccttggggac

SEQ ID NO: 91410 - DNA, 77 bp, Homo sapiens
aagtttaagcggcctccacagaggctgtttgatgctgagaagatcaggtgcgtgtccttggggactggctgggctgg

SEQ ID NO: 91411 - DNA, 77 bp, Homo sapiens
tccacagaggctgtttgatgctgagaagatcaggtgcgtgtccttggggactggctgggctgggtccccagggccgg

SEQ ID NO: 91412 - DNA, 81 bp, Homo sapiens
tgcttcctcagattatagattatagtgagaattaaataaattagtatgcatatgtactcagaatgcccttggcacgtagta

SEQ ID NO: 91413 - DNA, 81 bp, Homo sapiens
gtgagaattaaataaattagtatgcatatgtactcagaatgcccttggcacgtagtaagtgtgatccatggtgtgatatat

SEQ ID NO: 91414 - DNA, 80 bp, Homo sapiens
attaaataaattagtatgcatatgtactcagaatgcccttggcacgtagtaagtgtgatccatggtgtgatatattgaaa

SEQ ID NO: 91415 - DNA, 84 bp, Homo sapiens
attagtatgcatatgtactcagaatgcccttggcacgtagtaagtgtgatccatggtgtgatatattgaaatgggattcatgga

SEQ ID NO: 91416 - DNA, 80 bp, Homo sapiens
aatgcccttggcacgtagtaagtgtgatccatggtgtgatatattgaaatgggattcatggactatgtcaggctttagaa

SEQ ID NO: 91417 - DNA, 77 bp, Homo sapiens
acgtagtaagtgtgatccatggtgtgatatattgaaatgggattcatggactatgtcaggctttagaaagtctcctt

SEQ ID NO: 91418 - DNA, 82 bp, Homo sapiens
taagtgtgatccatggtgtgatatattgaaatgggattcatggactatgtcaggctttagaaagtctcctttcctgatctgc

SEQ ID NO: 91419 - DNA, 81 bp, Homo sapiens
gtgtgatatattgaaatgggattcatggactatgtcaggctttagaaagtctcctttcctgatctgcttatgcccacttga

SEQ ID NO: 91420 - DNA, 80 bp, Homo sapiens
atatattgaaatgggattcatggactatgtcaggctttagaaagtctcctttcctgatctgcttatgcccacttgagatg

SEQ ID NO: 91421 - DNA, 76 bp, Homo sapiens
tatgtcaggctttagaaagtctcctttcctgatctgcttatgcccacttgagatgggggggtatggagtgcctttc

SEQ ID NO: 91422 - DNA, 74 bp, Homo sapiens
tttagaaagtctcctttcctgatctgcttatgcccacttgagatgggggggtatggagtgcctttccctcagga

SEQ ID NO: 91423 - DNA, 74 bp, Homo sapiens
aaagtctcctttcctgatctgcttatgcccacttgagatgggggggtatggagtgcctttccctcaggatgccc

SEQ ID NO: 91424 - DNA, 76 bp, Homo sapiens
tcctgatctgcttatgcccacttgagatgggggggtatggagtgcctttccctcaggatgccccccagactcccta

SEQ ID NO: 91425 - DNA, 73 bp, Homo sapiens
ttatgcccacttgagatgggggggtatggagtgcctttccctcaggatgccccccagactccctagctgggta

SEQ ID NO: 91426 - DNA, 71 bp, Homo sapiens
acttgagatgggggggtatggagtgcctttccctcaggatgccccccagactccctagctgggtagagaat

SEQ ID NO: 91427 - DNA, 74 bp, Homo sapiens
gtatggagtgcctttccctcaggatgccccccagactccctagctgggtagagaattggagcagcccaggaatt

SEQ ID NO: 91428 - DNA, 74 bp, Homo sapiens
agtgcctttccctcaggatgccccccagactccctagctgggtagagaattggagcagcccaggaatttcaaca

SEQ ID NO: 91429 - DNA, 73 bp, Homo sapiens
aggatgccccccagactccctagctgggtagagaattggagcagcccaggaatttcaacatcccagggccaac

SEQ ID NO: 91430 - DNA, 73 bp, Homo sapiens
ccagactccctagctgggtagagaattggagcagcccaggaatttcaacatcccagggccaactgggggctcc

SEQ ID NO: 91431 - DNA, 73 bp, Homo sapiens
ctccctagctgggtagagaattggagcagcccaggaatttcaacatcccagggccaactgggggctccggcag

SEQ ID NO: 91432 - DNA, 72 bp, Homo sapiens
gggtagagaattggagcagcccaggaatttcaacatcccagggccaactgggggctccggcagggagggcag

SEQ ID NO: 91433 - DNA, 74 bp, Homo sapiens
ttggagcagcccaggaatttcaacatcccagggccaactgggggctccggcagggagggcaggagaggaggaca

SEQ ID NO: 91434 - DNA, 72 bp, Homo sapiens
aatttcaacatcccagggccaactgggggctccggcagggagggcaggagaggaggacatggagaaacgaga

SEQ ID NO: 91435 - DNA, 73 bp, Homo sapiens
aacatcccagggccaactgggggctccggcagggagggcaggagaggaggacatggagaaacgagaggtgcca

SEQ ID NO: 91436 - DNA, 76 bp, Homo sapiens
tccggcagggagggcaggagaggaggacatggagaaacgagaggtgccagtgacactcttccctctggtcctgttc

SEQ ID NO: 91437 - DNA, 75 bp, Homo sapiens
agggcaggagaggaggacatggagaaacgagaggtgccagtgacactcttccctctggtcctgttctagaactaa

SEQ ID NO: 91438 - DNA, 79 bp, Homo sapiens
atggagaaacgagaggtgccagtgacactcttccctctggtcctgttctagaactaattgtgtgtgattcagccagtca

SEQ ID NO: 91439 - DNA, 76 bp, Homo sapiens
aacgagaggtgccagtgacactcttccctctggtcctgttctagaactaattgtgtgtgattcagccagtcaggtt

SEQ ID NO: 91440 - DNA, 76 bp, Homo sapiens
agtgacactcttccctctggtcctgttctagaactaattgtgtgtgattcagccagtcaggttttccttcagataa

SEQ ID NO: 91441 - DNA, 75 bp, Homo sapiens
tcttccctctggtcctgttctagaactaattgtgtgtgattcagccagtcaggttttccttcagataaaggaaga

SEQ ID NO: 91442 - DNA, 77 bp, Homo sapiens
ctgttctagaactaattgtgtgtgattcagccagtcaggttttccttcagataaaggaagagctgtggaatgcacct

SEQ ID NO: 91443 - DNA, 79 bp, Homo sapiens
ttgtgtgtgattcagccagtcaggttttccttcagataaaggaagagctgtggaatgcacctttgagtctgcacccaag

SEQ ID NO: 91444 - DNA, 75 bp, Homo sapiens
ccagtcaggttttccttcagataaaggaagagctgtggaatgcacctttgagtctgcacccaagggccttgctaa

SEQ ID NO: 91445 - DNA, 75 bp, Homo sapiens
ttttccttcagataaaggaagagctgtggaatgcacctttgagtctgcacccaagggccttgctaatacttcacc

SEQ ID NO: 91446 - DNA, 76 bp, Homo sapiens
ataaaggaagagctgtggaatgcacctttgagtctgcacccaagggccttgctaatacttcacctgcctgagttcg

SEQ ID NO: 91447 - DNA, 76 bp, Homo sapiens
agctgtggaatgcacctttgagtctgcacccaagggccttgctaatacttcacctgcctgagttcggacccattta

SEQ ID NO: 91448 - DNA, 74 bp, Homo sapiens
aatgcacctttgagtctgcacccaagggccttgctaatacttcacctgcctgagttcggacccatttataccac

SEQ ID NO: 91449 - DNA, 73 bp, Homo sapiens
tttgagtctgcacccaagggccttgctaatacttcacctgcctgagttcggacccatttataccactggtttc

SEQ ID NO: 91450 - DNA, 72 bp, Homo sapiens
caagggccttgctaatacttcacctgcctgagttcggacccatttataccactggtttcgactcacctgaac

SEQ ID NO: 91451 - DNA, 73 bp, Homo sapiens
tacttcacctgcctgagttcggacccatttataccactggtttcgactcacctgaacctctctttgcaaagaa

SEQ ID NO: 91452 - DNA, 68 bp, Homo sapiens
ataccactggtttcgactcacctgaacctctctttgcaaagaacaaaccctagtgctcccttaccccc

SEQ ID NO: 91453 - DNA, 73 bp, Homo sapiens
tttcgactcacctgaacctctctttgcaaagaacaaaccctagtgctcccttaccccccagcaagccagctga

SEQ ID NO: 91454 - DNA, 69 bp, Homo sapiens
aacctctctttgcaaagaacaaaccctagtgctcccttaccccccagcaagccagctgaccaagtaccc

SEQ ID NO: 91455 - DNA, 74 bp, Homo sapiens
tctttgcaaagaacaaaccctagtgctcccttaccccccagcaagccagctgaccaagtaccccagcatgccca

SEQ ID NO: 91456 - DNA, 78 bp, Homo sapiens
aacaaaccctagtgctcccttaccccccagcaagccagctgaccaagtaccccagcatgcccagcagagcatgctggc

SEQ ID NO: 91457 - DNA, 81 bp, Homo sapiens
tagtgctcccttaccccccagcaagccagctgaccaagtaccccagcatgcccagcagagcatgctggcccctctcccaga

SEQ ID NO: 91458 - DNA, 82 bp, Homo sapiens
ccccagcaagccagctgaccaagtaccccagcatgcccagcagagcatgctggcccctctcccagattcaccatgggagaag

SEQ ID NO: 91459 - DNA, 86 bp, Homo sapiens
agccagctgaccaagtaccccagcatgcccagcagagcatgctggcccctctcccagattcaccatgggagaaggcgattgcatga

SEQ ID NO: 91460 - DNA, 85 bp, Homo sapiens
accaagtaccccagcatgcccagcagagcatgctggcccctctcccagattcaccatgggagaaggcgattgcatgagcgcagga

SEQ ID NO: 91461 - DNA, 87 bp, Homo sapiens
agcatgcccagcagagcatgctggcccctctcccagattcaccatgggagaaggcgattgcatgagcgcaggaggaacttgacctgc

SEQ ID NO: 91462 - DNA, 86 bp, Homo sapiens
cagagcatgctggcccctctcccagattcaccatgggagaaggcgattgcatgagcgcaggaggaacttgacctgctcctccatga

SEQ ID NO: 91463 - DNA, 81 bp, Homo sapiens
tggcccctctcccagattcaccatgggagaaggcgattgcatgagcgcaggaggaacttgacctgctcctccatgaaggag

SEQ ID NO: 91464 - DNA, 82 bp, Homo sapiens
tctcccagattcaccatgggagaaggcgattgcatgagcgcaggaggaacttgacctgctcctccatgaaggaggctccttc

SEQ ID NO: 91465 - DNA, 79 bp, Homo sapiens
attcaccatgggagaaggcgattgcatgagcgcaggaggaacttgacctgctcctccatgaaggaggctccttccccac

SEQ ID NO: 91466 - DNA, 76 bp, Homo sapiens
agaaggcgattgcatgagcgcaggaggaacttgacctgctcctccatgaaggaggctccttccccaccccggagac

SEQ ID NO: 91467 - DNA, 76 bp, Homo sapiens
attgcatgagcgcaggaggaacttgacctgctcctccatgaaggaggctccttccccaccccggagactcggaaca

SEQ ID NO: 91468 - DNA, 69 bp, Homo sapiens
aaggaggctccttccccaccccggagactcggaacaggcactaagcggccgccactccacatttggggc

SEQ ID NO: 91469 - DNA, 72 bp, Homo sapiens
cccaccccggagactcggaacaggcactaagcggccgccactccacatttggggccgggagctgcaggcttg

SEQ ID NO: 91470 - DNA, 74 bp, Homo sapiens
aacaggcactaagcggccgccactccacatttggggccgggagctgcaggcttgggagtcccacctgcctgctt

SEQ ID NO: 91471 - DNA, 75 bp, Homo sapiens
taagcggccgccactccacatttggggccgggagctgcaggcttgggagtcccacctgcctgcttttgaatcctg

SEQ ID NO: 91472 - DNA, 76 bp, Homo sapiens
gggccgggagctgcaggcttgggagtcccacctgcctgcttttgaatcctgtcaagactgtggcttggcacccttg

SEQ ID NO: 91473 - DNA, 82 bp, Homo sapiens
agctgcaggcttgggagtcccacctgcctgcttttgaatcctgtcaagactgtggcttggcacccttgggcatgtgatgtga

SEQ ID NO: 91474 - DNA, 78 bp, Homo sapiens
cttgggagtcccacctgcctgcttttgaatcctgtcaagactgtggcttggcacccttgggcatgtgatgtgaccttc

SEQ ID NO: 91475 - DNA, 81 bp, Homo sapiens
ttttgaatcctgtcaagactgtggcttggcacccttgggcatgtgatgtgaccttcctgagcctgcattccctcacctgga

SEQ ID NO: 91476 - DNA, 83 bp, Homo sapiens
atcctgtcaagactgtggcttggcacccttgggcatgtgatgtgaccttcctgagcctgcattccctcacctggaaatgatga

SEQ ID NO: 91477 - DNA, 83 bp, Homo sapiens
actgtggcttggcacccttgggcatgtgatgtgaccttcctgagcctgcattccctcacctggaaatgatgagcagttactga

SEQ ID NO: 91478 - DNA, 83 bp, Homo sapiens
acccttgggcatgtgatgtgaccttcctgagcctgcattccctcacctggaaatgatgagcagttactgatgccacagatttg

SEQ ID NO: 91479 - DNA, 83 bp, Homo sapiens
atgtgatgtgaccttcctgagcctgcattccctcacctggaaatgatgagcagttactgatgccacagatttggggaagagcc

SEQ ID NO: 91480 - DNA, 80 bp, Homo sapiens
accttcctgagcctgcattccctcacctggaaatgatgagcagttactgatgccacagatttggggaagagcctgtgagg

SEQ ID NO: 91481 - DNA, 85 bp, Homo sapiens
agcctgcattccctcacctggaaatgatgagcagttactgatgccacagatttggggaagagcctgtgaggtcatgagtgtgcag

SEQ ID NO: 91482 - DNA, 88 bp, Homo sapiens
aatgatgagcagttactgatgccacagatttggggaagagcctgtgaggtcatgagtgtgcaggccaggctgagcgctctgcgaatat

SEQ ID NO: 91483 - DNA, 85 bp, Homo sapiens
agttactgatgccacagatttggggaagagcctgtgaggtcatgagtgtgcaggccaggctgagcgctctgcgaatattcactgg

SEQ ID NO: 91484 - DNA, 87 bp, Homo sapiens
atgccacagatttggggaagagcctgtgaggtcatgagtgtgcaggccaggctgagcgctctgcgaatattcactggtatcattgtc

SEQ ID NO: 91485 - DNA, 84 bp, Homo sapiens
atttggggaagagcctgtgaggtcatgagtgtgcaggccaggctgagcgctctgcgaatattcactggtatcattgtctgaaac

SEQ ID NO: 91486 - DNA, 84 bp, Homo sapiens
aagagcctgtgaggtcatgagtgtgcaggccaggctgagcgctctgcgaatattcactggtatcattgtctgaaactgttattt

SEQ ID NO: 91487 - DNA, 85 bp, Homo sapiens
tcatgagtgtgcaggccaggctgagcgctctgcgaatattcactggtatcattgtctgaaactgttattttgttcagctaatgtt

SEQ ID NO: 91488 - DNA, 82 bp, Homo sapiens
tgagcgctctgcgaatattcactggtatcattgtctgaaactgttattttgttcagctaatgtttactgcatactttctgtg

SEQ ID NO: 91489 - DNA, 80 bp, Homo sapiens
tctgcgaatattcactggtatcattgtctgaaactgttattttgttcagctaatgtttactgcatactttctgtgtactg

SEQ ID NO: 91490 - DNA, 79 bp, Homo sapiens
tattcactggtatcattgtctgaaactgttattttgttcagctaatgtttactgcatactttctgtgtactgggcacta

SEQ ID NO: 91491 - DNA, 76 bp, Homo sapiens
attgtctgaaactgttattttgttcagctaatgtttactgcatactttctgtgtactgggcactattcttggtgaa

SEQ ID NO: 91492 - DNA, 75 bp, Homo sapiens
taatgtttactgcatactttctgtgtactgggcactattcttggtgaaatttagtgaatgttacatccctgacct

SEQ ID NO: 91493 - DNA, 78 bp, Homo sapiens
atactttctgtgtactgggcactattcttggtgaaatttagtgaatgttacatccctgaccttctggagctgacatgc

SEQ ID NO: 91494 - DNA, 79 bp, Homo sapiens
ttctgtgtactgggcactattcttggtgaaatttagtgaatgttacatccctgaccttctggagctgacatgctagtta

SEQ ID NO: 91495 - DNA, 74 bp, Homo sapiens
actattcttggtgaaatttagtgaatgttacatccctgaccttctggagctgacatgctagttagggggacagg

SEQ ID NO: 91496 - DNA, 77 bp, Homo sapiens
atttagtgaatgttacatccctgaccttctggagctgacatgctagttagggggacaggtcaaacactagattgtca

SEQ ID NO: 91497 - DNA, 79 bp, Homo sapiens
tgttacatccctgaccttctggagctgacatgctagttagggggacaggtcaaacactagattgtcagatggtgatcgg

SEQ ID NO: 91498 - DNA, 79 bp, Homo sapiens
accttctggagctgacatgctagttagggggacaggtcaaacactagattgtcagatggtgatcggtgctcaaagataa

SEQ ID NO: 91499 - DNA, 79 bp, Homo sapiens
agctgacatgctagttagggggacaggtcaaacactagattgtcagatggtgatcggtgctcaaagataaatcagggaa

SEQ ID NO: 91500 - DNA, 75 bp, Homo sapiens
ctagttagggggacaggtcaaacactagattgtcagatggtgatcggtgctcaaagataaatcagggaatgggtg

SEQ ID NO: 91501 - DNA, 78 bp, Homo sapiens
acaggtcaaacactagattgtcagatggtgatcggtgctcaaagataaatcagggaatgggtggaggagtgcagggag

SEQ ID NO: 91502 - DNA, 77 bp, Homo sapiens
aaacactagattgtcagatggtgatcggtgctcaaagataaatcagggaatgggtggaggagtgcagggaggtggga

SEQ ID NO: 91503 - DNA, 76 bp, Homo sapiens
tgtcagatggtgatcggtgctcaaagataaatcagggaatgggtggaggagtgcagggaggtgggaggcgggcctt

SEQ ID NO: 91504 - DNA, 72 bp, Homo sapiens
ggtgatcggtgctcaaagataaatcagggaatgggtggaggagtgcagggaggtgggaggcgggcctttggg

SEQ ID NO: 91505 - DNA, 69 bp, Homo sapiens
aaagataaatcagggaatgggtggaggagtgcagggaggtgggaggcgggcctttggggtttgtgagaa

SEQ ID NO: 91506 - DNA, 72 bp, Homo sapiens
atgggtggaggagtgcagggaggtgggaggcgggcctttggggtttgtgagaagtcactgctgccaagaggg

SEQ ID NO: 91507 - DNA, 75 bp, Homo sapiens
agtgcagggaggtgggaggcgggcctttggggtttgtgagaagtcactgctgccaagagggtgtgtgctgggatg

SEQ ID NO: 91508 - DNA, 76 bp, Homo sapiens
tgggaggcgggcctttggggtttgtgagaagtcactgctgccaagagggtgtgtgctgggatgggatgggtcagtc

SEQ ID NO: 91509 - DNA, 78 bp, Homo sapiens
ctttggggtttgtgagaagtcactgctgccaagagggtgtgtgctgggatgggatgggtcagtctgcctgtggtcctc

SEQ ID NO: 91510 - DNA, 80 bp, Homo sapiens
gtttgtgagaagtcactgctgccaagagggtgtgtgctgggatgggatgggtcagtctgcctgtggtcctctccttctgt

SEQ ID NO: 91511 - DNA, 84 bp, Homo sapiens
gtcactgctgccaagagggtgtgtgctgggatgggatgggtcagtctgcctgtggtcctctccttctgttgccagctgagaaga

SEQ ID NO: 91512 - DNA, 80 bp, Homo sapiens
aagagggtgtgtgctgggatgggatgggtcagtctgcctgtggtcctctccttctgttgccagctgagaagactgaggta

SEQ ID NO: 91513 - DNA, 82 bp, Homo sapiens
tgtgctgggatgggatgggtcagtctgcctgtggtcctctccttctgttgccagctgagaagactgaggtacagcaagattt

SEQ ID NO: 91514 - DNA, 79 bp, Homo sapiens
atgggatgggtcagtctgcctgtggtcctctccttctgttgccagctgagaagactgaggtacagcaagattttcttct

SEQ ID NO: 91515 - DNA, 78 bp, Homo sapiens
agtctgcctgtggtcctctccttctgttgccagctgagaagactgaggtacagcaagattttcttcttgactctccct

SEQ ID NO: 91516 - DNA, 78 bp, Homo sapiens
tggtcctctccttctgttgccagctgagaagactgaggtacagcaagattttcttcttgactctcccttctaatcttc

SEQ ID NO: 91517 - DNA, 77 bp, Homo sapiens
ctccttctgttgccagctgagaagactgaggtacagcaagattttcttcttgactctcccttctaatcttctctccc

SEQ ID NO: 91518 - DNA, 77 bp, Homo sapiens
ttgccagctgagaagactgaggtacagcaagattttcttcttgactctcccttctaatcttctctcccccatcaaat

SEQ ID NO: 91519 - DNA, 73 bp, Homo sapiens
aagactgaggtacagcaagattttcttcttgactctcccttctaatcttctctcccccatcaaattccaggtc

SEQ ID NO: 91520 - DNA, 71 bp, Homo sapiens
aggtacagcaagattttcttcttgactctcccttctaatcttctctcccccatcaaattccaggtccctgg

SEQ ID NO: 91521 - DNA, 69 bp, Homo sapiens
attttcttcttgactctcccttctaatcttctctcccccatcaaattccaggtccctggggggtgatgt

SEQ ID NO: 91522 - DNA, 75 bp, Homo sapiens
ttgactctcccttctaatcttctctcccccatcaaattccaggtccctggggggtgatgttgcctctgatggtga

SEQ ID NO: 91523 - DNA, 75 bp, Homo sapiens
ttctaatcttctctcccccatcaaattccaggtccctggggggtgatgttgcctctgatggtgacttcctcatct

SEQ ID NO: 91524 - DNA, 74 bp, Homo sapiens
ttctctcccccatcaaattccaggtccctggggggtgatgttgcctctgatggtgacttcctcatctttgaggg

SEQ ID NO: 91525 - DNA, 72 bp, Homo sapiens
atcaaattccaggtccctggggggtgatgttgcctctgatggtgacttcctcatctttgaggggaaccgtta

SEQ ID NO: 91526 - DNA, 75 bp, Homo sapiens
gtgatgttgcctctgatggtgacttcctcatctttgaggggaaccgttacagccggaagggctttctgttcaaga

SEQ ID NO: 91527 - DNA, 74 bp, Homo sapiens
ttgcctctgatggtgacttcctcatctttgaggggaaccgttacagccggaagggctttctgttcaagagcttc

SEQ ID NO: 91528 - DNA, 74 bp, Homo sapiens
acttcctcatctttgaggggaaccgttacagccggaagggctttctgttcaagagcttcgccatgtctgctgtg

SEQ ID NO: 91529 - DNA, 73 bp, Homo sapiens
atctttgaggggaaccgttacagccggaagggctttctgttcaagagcttcgccatgtctgctgtggtgaggg

SEQ ID NO: 91530 - DNA, 73 bp, Homo sapiens
gggaaccgttacagccggaagggctttctgttcaagagcttcgccatgtctgctgtggtgagggtcccagagg

SEQ ID NO: 91531 - DNA, 75 bp, Homo sapiens
ttacagccggaagggctttctgttcaagagcttcgccatgtctgctgtggtgagggtcccagaggggtgttggta

SEQ ID NO: 91532 - DNA, 71 bp, Homo sapiens
actgacctcggtccatttccttctcttcccctcaccgctgggggcttagatcacggagggtgtgaagccaa

SEQ ID NO: 91533 - DNA, 74 bp, Homo sapiens
tcggtccatttccttctcttcccctcaccgctgggggcttagatcacggagggtgtgaagccaacactctctga

SEQ ID NO: 91534 - DNA, 73 bp, Homo sapiens
ttctcttcccctcaccgctgggggcttagatcacggagggtgtgaagccaacactctctgagctggaaaagtt

SEQ ID NO: 91535 - DNA, 74 bp, Homo sapiens
ccctcaccgctgggggcttagatcacggagggtgtgaagccaacactctctgagctggaaaagtttgaggacca

SEQ ID NO: 91536 - DNA, 77 bp, Homo sapiens
ggggcttagatcacggagggtgtgaagccaacactctctgagctggaaaagtttgaggaccagccagagggcattga

SEQ ID NO: 91537 - DNA, 78 bp, Homo sapiens
ttagatcacggagggtgtgaagccaacactctctgagctggaaaagtttgaggaccagccagagggcattgacctgga

SEQ ID NO: 91538 - DNA, 76 bp, Homo sapiens
agggtgtgaagccaacactctctgagctggaaaagtttgaggaccagccagagggcattgacctggaggtggtgac

SEQ ID NO: 91539 - DNA, 78 bp, Homo sapiens
acactctctgagctggaaaagtttgaggaccagccagagggcattgacctggaggtggtgactgagagcacaggtatt

SEQ ID NO: 91540 - DNA, 79 bp, Homo sapiens
tctgagctggaaaagtttgaggaccagccagagggcattgacctggaggtggtgactgagagcacaggtatttgatccc

SEQ ID NO: 91541 - DNA, 76 bp, Homo sapiens
aagtttgaggaccagccagagggcattgacctggaggtggtgactgagagcacaggtatttgatccccctctataa

SEQ ID NO: 91542 - DNA, 76 bp, Homo sapiens
accagccagagggcattgacctggaggtggtgactgagagcacaggtatttgatccccctctataacctgggccaa

SEQ ID NO: 91543 - DNA, 76 bp, Homo sapiens
agagggcattgacctggaggtggtgactgagagcacaggtatttgatccccctctataacctgggccaaggagcag

SEQ ID NO: 91544 - DNA, 73 bp, Homo sapiens
gcccatggtggcaacccccgagtcagccctacgactgcccctgcagggaaggagcgggagcacaacttccaac

SEQ ID NO: 91545 - DNA, 72 bp, Homo sapiens
tggtggcaacccccgagtcagccctacgactgcccctgcagggaaggagcgggagcacaacttccaacctgg

SEQ ID NO: 91546 - DNA, 71 bp, Homo sapiens
agtcagccctacgactgcccctgcagggaaggagcgggagcacaacttccaacctggggacaacgtggagg

SEQ ID NO: 91547 - DNA, 72 bp, Homo sapiens
ccctacgactgcccctgcagggaaggagcgggagcacaacttccaacctggggacaacgtggaggtctgtga

SEQ ID NO: 91548 - DNA, 75 bp, Homo sapiens
ctgcagggaaggagcgggagcacaacttccaacctggggacaacgtggaggtctgtgagggtgagctcatcaacc

SEQ ID NO: 91549 - DNA, 76 bp, Homo sapiens
aggagcgggagcacaacttccaacctggggacaacgtggaggtctgtgagggtgagctcatcaacctgcagggcaa

SEQ ID NO: 91550 - DNA, 78 bp, Homo sapiens
cacaacttccaacctggggacaacgtggaggtctgtgagggtgagctcatcaacctgcagggcaagatcctcagcgtg

SEQ ID NO: 91551 - DNA, 79 bp, Homo sapiens
aacctggggacaacgtggaggtctgtgagggtgagctcatcaacctgcagggcaagatcctcagcgtggatggcaacaa

SEQ ID NO: 91552 - DNA, 85 bp, Homo sapiens
acaacgtggaggtctgtgagggtgagctcatcaacctgcagggcaagatcctcagcgtggatggcaacaagatcaccatcatgcc

SEQ ID NO: 91553 - DNA, 88 bp, Homo sapiens
aggtctgtgagggtgagctcatcaacctgcagggcaagatcctcagcgtggatggcaacaagatcaccatcatgcccaagcatgagga

SEQ ID NO: 91554 - DNA, 86 bp, Homo sapiens
agggtgagctcatcaacctgcagggcaagatcctcagcgtggatggcaacaagatcaccatcatgcccaagcatgaggacctcaag

SEQ ID NO: 91555 - DNA, 84 bp, Homo sapiens
atcaacctgcagggcaagatcctcagcgtggatggcaacaagatcaccatcatgcccaagcatgaggacctcaaggtgggtgcc

SEQ ID NO: 91556 - DNA, 82 bp, Homo sapiens
ggcaagatcctcagcgtggatggcaacaagatcaccatcatgcccaagcatgaggacctcaaggtgggtgcccggtgttctc

SEQ ID NO: 91557 - DNA, 81 bp, Homo sapiens
atcctcagcgtggatggcaacaagatcaccatcatgcccaagcatgaggacctcaaggtgggtgcccggtgttctcgggca

SEQ ID NO: 91558 - DNA, 77 bp, Homo sapiens
atggcaacaagatcaccatcatgcccaagcatgaggacctcaaggtgggtgcccggtgttctcgggcaggggttgga

SEQ ID NO: 91559 - DNA, 71 bp, Homo sapiens
ttgtggtggtctcccttcacctgtttgttgtccccacacccaatcccccaggacatgttggagttcccagc

SEQ ID NO: 91560 - DNA, 70 bp, Homo sapiens
ttcacctgtttgttgtccccacacccaatcccccaggacatgttggagttcccagcccaggaacttagaa

SEQ ID NO: 91561 - DNA, 68 bp, Homo sapiens
tttgttgtccccacacccaatcccccaggacatgttggagttcccagcccaggaacttagaaaatact

SEQ ID NO: 91562 - DNA, 69 bp, Homo sapiens
cccacacccaatcccccaggacatgttggagttcccagcccaggaacttagaaaatacttcaagatggg

SEQ ID NO: 91563 - DNA, 69 bp, Homo sapiens
ccccaggacatgttggagttcccagcccaggaacttagaaaatacttcaagatgggggaccacgtgaag

SEQ ID NO: 91564 - DNA, 72 bp, Homo sapiens
acatgttggagttcccagcccaggaacttagaaaatacttcaagatgggggaccacgtgaaggtgattgctg

SEQ ID NO: 91565 - DNA, 71 bp, Homo sapiens
agttcccagcccaggaacttagaaaatacttcaagatgggggaccacgtgaaggtgattgctggccgattc

SEQ ID NO: 91566 - DNA, 72 bp, Homo sapiens
aggaacttagaaaatacttcaagatgggggaccacgtgaaggtgattgctggccgattcgagggcgacacag

SEQ ID NO: 91567 - DNA, 75 bp, Homo sapiens
aaaatacttcaagatgggggaccacgtgaaggtgattgctggccgattcgagggcgacacaggcctcattgtgcg

SEQ ID NO: 91568 - DNA, 77 bp, Homo sapiens
ttcaagatgggggaccacgtgaaggtgattgctggccgattcgagggcgacacaggcctcattgtgcgggtggagga

SEQ ID NO: 91569 - DNA, 75 bp, Homo sapiens
accacgtgaaggtgattgctggccgattcgagggcgacacaggcctcattgtgcgggtggaggagaatttcgtta

SEQ ID NO: 91570 - DNA, 75 bp, Homo sapiens
aaggtgattgctggccgattcgagggcgacacaggcctcattgtgcgggtggaggagaatttcgttatcctgttc

SEQ ID NO: 91571 - DNA, 76 bp, Homo sapiens
ctggccgattcgagggcgacacaggcctcattgtgcgggtggaggagaatttcgttatcctgttctctgacctcac

SEQ ID NO: 91572 - DNA, 80 bp, Homo sapiens
tcgagggcgacacaggcctcattgtgcgggtggaggagaatttcgttatcctgttctctgacctcaccatgcatgaggta

SEQ ID NO: 91573 - DNA, 78 bp, Homo sapiens
aggcctcattgtgcgggtggaggagaatttcgttatcctgttctctgacctcaccatgcatgaggtaggtggatagaa

SEQ ID NO: 91574 - DNA, 76 bp, Homo sapiens
attgtgcgggtggaggagaatttcgttatcctgttctctgacctcaccatgcatgaggtaggtggatagaagggtc

SEQ ID NO: 91575 - DNA, 72 bp, Homo sapiens
aggagaatttcgttatcctgttctctgacctcaccatgcatgaggtaggtggatagaagggtcggggaaggg

SEQ ID NO: 91576 - DNA, 75 bp, Homo sapiens
taggcgagccacctggactgggcctcacccctttcaccatccctggcagctgaaggtgctcccccgggacctgca

SEQ ID NO: 91577 - DNA, 77 bp, Homo sapiens
acctggactgggcctcacccctttcaccatccctggcagctgaaggtgctcccccgggacctgcagctctgctcaga

SEQ ID NO: 91578 - DNA, 82 bp, Homo sapiens
ctcacccctttcaccatccctggcagctgaaggtgctcccccgggacctgcagctctgctcagagacagcatcaggtgtgga

SEQ ID NO: 91579 - DNA, 82 bp, Homo sapiens
ctttcaccatccctggcagctgaaggtgctcccccgggacctgcagctctgctcagagacagcatcaggtgtggatgttggg

SEQ ID NO: 91580 - DNA, 85 bp, Homo sapiens
tggcagctgaaggtgctcccccgggacctgcagctctgctcagagacagcatcaggtgtggatgttgggggccagcatgaatggg

SEQ ID NO: 91581 - DNA, 83 bp, Homo sapiens
ctgaaggtgctcccccgggacctgcagctctgctcagagacagcatcaggtgtggatgttgggggccagcatgaatggggcga

SEQ ID NO: 91582 - DNA, 87 bp, Homo sapiens
ccgggacctgcagctctgctcagagacagcatcaggtgtggatgttgggggccagcatgaatggggcgagctggtgcagctggatcc

SEQ ID NO: 91583 - DNA, 88 bp, Homo sapiens
cagctctgctcagagacagcatcaggtgtggatgttgggggccagcatgaatggggcgagctggtgcagctggatccccagactgtgg

SEQ ID NO: 91584 - DNA, 87 bp, Homo sapiens
tcagagacagcatcaggtgtggatgttgggggccagcatgaatggggcgagctggtgcagctggatccccagactgtgggtgtcatc

SEQ ID NO: 91585 - DNA, 83 bp, Homo sapiens
atcaggtgtggatgttgggggccagcatgaatggggcgagctggtgcagctggatccccagactgtgggtgtcatcgtgcgac

SEQ ID NO: 91586 - DNA, 83 bp, Homo sapiens
tgtggatgttgggggccagcatgaatggggcgagctggtgcagctggatccccagactgtgggtgtcatcgtgcgactagaac

SEQ ID NO: 91587 - DNA, 82 bp, Homo sapiens
gccagcatgaatggggcgagctggtgcagctggatccccagactgtgggtgtcatcgtgcgactagaacgggagaccttcca

SEQ ID NO: 91588 - DNA, 78 bp, Homo sapiens
atgaatggggcgagctggtgcagctggatccccagactgtgggtgtcatcgtgcgactagaacgggagaccttccagg

SEQ ID NO: 91589 - DNA, 79 bp, Homo sapiens
cgagctggtgcagctggatccccagactgtgggtgtcatcgtgcgactagaacgggagaccttccaggtgtgtgtgttg

SEQ ID NO: 91590 - DNA, 79 bp, Homo sapiens
agctggatccccagactgtgggtgtcatcgtgcgactagaacgggagaccttccaggtgtgtgtgttgtgctctgtggc

SEQ ID NO: 91591 - DNA, 77 bp, Homo sapiens
gactgtgggtgtcatcgtgcgactagaacgggagaccttccaggtgtgtgtgttgtgctctgtggcggggacttgct

SEQ ID NO: 91592 - DNA, 76 bp, Homo sapiens
tgggtgtcatcgtgcgactagaacgggagaccttccaggtgtgtgtgttgtgctctgtggcggggacttgctttta

SEQ ID NO: 91593 - DNA, 74 bp, Homo sapiens
cccttcccattctcacccccacagcctccctgctctccctctgtaggtgctgaacatgtacgggaaggtggtga

SEQ ID NO: 91594 - DNA, 79 bp, Homo sapiens
attctcacccccacagcctccctgctctccctctgtaggtgctgaacatgtacgggaaggtggtgactgtcagacatca

SEQ ID NO: 91595 - DNA, 79 bp, Homo sapiens
acagcctccctgctctccctctgtaggtgctgaacatgtacgggaaggtggtgactgtcagacatcaggctgtgacccg

SEQ ID NO: 91596 - DNA, 80 bp, Homo sapiens
tgctctccctctgtaggtgctgaacatgtacgggaaggtggtgactgtcagacatcaggctgtgacccggaagaaggaca

SEQ ID NO: 91597 - DNA, 77 bp, Homo sapiens
tctgtaggtgctgaacatgtacgggaaggtggtgactgtcagacatcaggctgtgacccggaagaaggacaaccgct

SEQ ID NO: 91598 - DNA, 77 bp, Homo sapiens
ctgaacatgtacgggaaggtggtgactgtcagacatcaggctgtgacccggaagaaggacaaccgctttgctgtggc

SEQ ID NO: 91599 - DNA, 75 bp, Homo sapiens
atgtacgggaaggtggtgactgtcagacatcaggctgtgacccggaagaaggacaaccgctttgctgtggccttg

SEQ ID NO: 91600 - DNA, 80 bp, Homo sapiens
gtggtgactgtcagacatcaggctgtgacccggaagaaggacaaccgctttgctgtggccttggactcagagcagaacaa

SEQ ID NO: 91601 - DNA, 80 bp, Homo sapiens
agacatcaggctgtgacccggaagaaggacaaccgctttgctgtggccttggactcagagcagaacaacatccatgtgaa

SEQ ID NO: 91602 - DNA, 78 bp, Homo sapiens
tgtgacccggaagaaggacaaccgctttgctgtggccttggactcagagcagaacaacatccatgtgaaagacatcgt

SEQ ID NO: 91603 - DNA, 77 bp, Homo sapiens
aagaaggacaaccgctttgctgtggccttggactcagagcagaacaacatccatgtgaaagacatcgttaaggtcat

SEQ ID NO: 91604 - DNA, 79 bp, Homo sapiens
acaaccgctttgctgtggccttggactcagagcagaacaacatccatgtgaaagacatcgttaaggtcattgatggccc

SEQ ID NO: 91605 - DNA, 82 bp, Homo sapiens
tgtggccttggactcagagcagaacaacatccatgtgaaagacatcgttaaggtcattgatggcccccactcagtgagtaca

SEQ ID NO: 91606 - DNA, 80 bp, Homo sapiens
ttggactcagagcagaacaacatccatgtgaaagacatcgttaaggtcattgatggcccccactcagtgagtacaagttc

SEQ ID NO: 91607 - DNA, 77 bp, Homo sapiens
agaacaacatccatgtgaaagacatcgttaaggtcattgatggcccccactcagtgagtacaagttcctgcttttga

SEQ ID NO: 91608 - DNA, 81 bp, Homo sapiens
atccatgtgaaagacatcgttaaggtcattgatggcccccactcagtgagtacaagttcctgcttttgagctgcatctgaa

SEQ ID NO: 91609 - DNA, 73 bp, Homo sapiens
gtgagggggacatggtcaagagagtgacccttctctccccggctagggccgagaaggggagattcgccatctc

SEQ ID NO: 91610 - DNA, 73 bp, Homo sapiens
catggtcaagagagtgacccttctctccccggctagggccgagaaggggagattcgccatctcttccgaagct

SEQ ID NO: 91611 - DNA, 71 bp, Homo sapiens
agagtgacccttctctccccggctagggccgagaaggggagattcgccatctcttccgaagcttcgccttc

SEQ ID NO: 91612 - DNA, 74 bp, Homo sapiens
ttctctccccggctagggccgagaaggggagattcgccatctcttccgaagcttcgccttcctacattgcaaga

SEQ ID NO: 91613 - DNA, 72 bp, Homo sapiens
cccggctagggccgagaaggggagattcgccatctcttccgaagcttcgccttcctacattgcaagaaactg

SEQ ID NO: 91614 - DNA, 72 bp, Homo sapiens
cgagaaggggagattcgccatctcttccgaagcttcgccttcctacattgcaagaaactggtggagaacggg

SEQ ID NO: 91615 - DNA, 74 bp, Homo sapiens
agattcgccatctcttccgaagcttcgccttcctacattgcaagaaactggtggagaacgggggcatgtttgtc

SEQ ID NO: 91616 - DNA, 74 bp, Homo sapiens
atctcttccgaagcttcgccttcctacattgcaagaaactggtggagaacgggggcatgtttgtctgcaagacc

SEQ ID NO: 91617 - DNA, 73 bp, Homo sapiens
aagcttcgccttcctacattgcaagaaactggtggagaacgggggcatgtttgtctgcaagacccgccacctg

SEQ ID NO: 91618 - DNA, 75 bp, Homo sapiens
ccttcctacattgcaagaaactggtggagaacgggggcatgtttgtctgcaagacccgccacctggtgctggctg

SEQ ID NO: 91619 - DNA, 72 bp, Homo sapiens
aagaaactggtggagaacgggggcatgtttgtctgcaagacccgccacctggtgctggctgggggctcaaag

SEQ ID NO: 91620 - DNA, 73 bp, Homo sapiens
actggtggagaacgggggcatgtttgtctgcaagacccgccacctggtgctggctgggggctcaaaggtgagg

SEQ ID NO: 91621 - DNA, 77 bp, Homo sapiens
gggcatgtttgtctgcaagacccgccacctggtgctggctgggggctcaaaggtgaggtgggcatggcaggaccctg

SEQ ID NO: 91622 - DNA, 77 bp, Homo sapiens
tttgtctgcaagacccgccacctggtgctggctgggggctcaaaggtgaggtgggcatggcaggaccctgtgcgttg

SEQ ID NO: 91623 - DNA, 73 bp, Homo sapiens
gtttgtggttcccccatcccctgcctgccagttcactccttgcttctatcctagccccgtgatgtgaccaact

SEQ ID NO: 91624 - DNA, 74 bp, Homo sapiens
ttcccccatcccctgcctgccagttcactccttgcttctatcctagccccgtgatgtgaccaacttcaccgtgg

SEQ ID NO: 91625 - DNA, 77 bp, Homo sapiens
ctgcctgccagttcactccttgcttctatcctagccccgtgatgtgaccaacttcaccgtgggtggctttgcgccta

SEQ ID NO: 91626 - DNA, 75 bp, Homo sapiens
agttcactccttgcttctatcctagccccgtgatgtgaccaacttcaccgtgggtggctttgcgcctatgagtcc

SEQ ID NO: 91627 - DNA, 77 bp, Homo sapiens
cttgcttctatcctagccccgtgatgtgaccaacttcaccgtgggtggctttgcgcctatgagtccccggatcagca

SEQ ID NO: 91628 - DNA, 76 bp, Homo sapiens
ctatcctagccccgtgatgtgaccaacttcaccgtgggtggctttgcgcctatgagtccccggatcagcagcccca

SEQ ID NO: 91629 - DNA, 76 bp, Homo sapiens
cccgtgatgtgaccaacttcaccgtgggtggctttgcgcctatgagtccccggatcagcagccccatgcaccccag

SEQ ID NO: 91630 - DNA, 77 bp, Homo sapiens
accaacttcaccgtgggtggctttgcgcctatgagtccccggatcagcagccccatgcaccccagtgctggaggtga

SEQ ID NO: 91631 - DNA, 77 bp, Homo sapiens
ccgtgggtggctttgcgcctatgagtccccggatcagcagccccatgcaccccagtgctggaggtgagaggggttca

SEQ ID NO: 91632 - DNA, 76 bp, Homo sapiens
ctttgcgcctatgagtccccggatcagcagccccatgcaccccagtgctggaggtgagaggggttcagggtcaggg

SEQ ID NO: 91633 - DNA, 77 bp, Homo sapiens
tatgagtccccggatcagcagccccatgcaccccagtgctggaggtgagaggggttcagggtcaggggatgtggtgg

SEQ ID NO: 91634 - DNA, 75 bp, Homo sapiens
cggatcagcagccccatgcaccccagtgctggaggtgagaggggttcagggtcaggggatgtggtgggtagaagg

SEQ ID NO: 91635 - DNA, 74 bp, Homo sapiens
tgtgggcacagccgtgggggaccagtgacattctccccaatccccaggtcagcgtggcggctttggtagcccag

SEQ ID NO: 91636 - DNA, 72 bp, Homo sapiens
acagccgtgggggaccagtgacattctccccaatccccaggtcagcgtggcggctttggtagcccaggtggc

SEQ ID NO: 91637 - DNA, 77 bp, Homo sapiens
ggaccagtgacattctccccaatccccaggtcagcgtggcggctttggtagcccaggtggcggcagtggtggcatga

SEQ ID NO: 91638 - DNA, 76 bp, Homo sapiens
acattctccccaatccccaggtcagcgtggcggctttggtagcccaggtggcggcagtggtggcatgagcaggggc

SEQ ID NO: 91639 - DNA, 73 bp, Homo sapiens
aatccccaggtcagcgtggcggctttggtagcccaggtggcggcagtggtggcatgagcaggggccggggccg

SEQ ID NO: 91640 - DNA, 75 bp, Homo sapiens
tcagcgtggcggctttggtagcccaggtggcggcagtggtggcatgagcaggggccggggccggagggacaacga

SEQ ID NO: 91641 - DNA, 74 bp, Homo sapiens
tttggtagcccaggtggcggcagtggtggcatgagcaggggccggggccggagggacaacgaactcatcggcca

SEQ ID NO: 91642 - DNA, 74 bp, Homo sapiens
tagcccaggtggcggcagtggtggcatgagcaggggccggggccggagggacaacgaactcatcggccagaccg

SEQ ID NO: 91643 - DNA, 75 bp, Homo sapiens
cagtggtggcatgagcaggggccggggccggagggacaacgaactcatcggccagaccgtgcgcatctcccaggg

SEQ ID NO: 91644 - DNA, 73 bp, Homo sapiens
atgagcaggggccggggccggagggacaacgaactcatcggccagaccgtgcgcatctcccaggggccctaca

SEQ ID NO: 91645 - DNA, 71 bp, Homo sapiens
gccggggccggagggacaacgaactcatcggccagaccgtgcgcatctcccaggggccctacaaaggtgac

SEQ ID NO: 91646 - DNA, 75 bp, Homo sapiens
gagggacaacgaactcatcggccagaccgtgcgcatctcccaggggccctacaaaggtgacctgcgaggcctgtg

SEQ ID NO: 91647 - DNA, 75 bp, Homo sapiens
acaacgaactcatcggccagaccgtgcgcatctcccaggggccctacaaaggtgacctgcgaggcctgtggaggc

SEQ ID NO: 91648 - DNA, 73 bp, Homo sapiens
atcggccagaccgtgcgcatctcccaggggccctacaaaggtgacctgcgaggcctgtggaggcctggggagg

SEQ ID NO: 91649 - DNA, 80 bp, Homo sapiens
atggtgaaggagagcctgcccagcctgacctcctgtccccctgcaggctacatcggtgtggtgaaagatgccacagagtc

SEQ ID NO: 91650 - DNA, 78 bp, Homo sapiens
aaggagagcctgcccagcctgacctcctgtccccctgcaggctacatcggtgtggtgaaagatgccacagagtccacg

SEQ ID NO: 91651 - DNA, 81 bp, Homo sapiens
cagcctgacctcctgtccccctgcaggctacatcggtgtggtgaaagatgccacagagtccacggcccgtgtggagctgca

SEQ ID NO: 91652 - DNA, 79 bp, Homo sapiens
acctcctgtccccctgcaggctacatcggtgtggtgaaagatgccacagagtccacggcccgtgtggagctgcactcca

SEQ ID NO: 91653 - DNA, 84 bp, Homo sapiens
ctgcaggctacatcggtgtggtgaaagatgccacagagtccacggcccgtgtggagctgcactccacctgccagaccatctctg

SEQ ID NO: 91654 - DNA, 84 bp, Homo sapiens
tggtgaaagatgccacagagtccacggcccgtgtggagctgcactccacctgccagaccatctctgtggaccgtcagcggctca

SEQ ID NO: 91655 - DNA, 82 bp, Homo sapiens
agatgccacagagtccacggcccgtgtggagctgcactccacctgccagaccatctctgtggaccgtcagcggctcaccacg

SEQ ID NO: 91656 - DNA, 78 bp, Homo sapiens
agtccacggcccgtgtggagctgcactccacctgccagaccatctctgtggaccgtcagcggctcaccacggtgtacg

SEQ ID NO: 91657 - DNA, 78 bp, Homo sapiens
cgtgtggagctgcactccacctgccagaccatctctgtggaccgtcagcggctcaccacggtgtacgggcggggcctg

SEQ ID NO: 91658 - DNA, 75 bp, Homo sapiens
ctgcactccacctgccagaccatctctgtggaccgtcagcggctcaccacggtgtacgggcggggcctggggagg

SEQ ID NO: 91659 - DNA, 72 bp, Homo sapiens
acctgccagaccatctctgtggaccgtcagcggctcaccacggtgtacgggcggggcctggggagggccagg

SEQ ID NO: 91660 - DNA, 76 bp, Homo sapiens
taggcagtgagaggggtctgctcaccccatttgttctctgcgtccccaggggctcacggcgcccgggcggcatgac

SEQ ID NO: 91661 - DNA, 74 bp, Homo sapiens
gggtctgctcaccccatttgttctctgcgtccccaggggctcacggcgcccgggcggcatgacctcgacctatg

SEQ ID NO: 91662 - DNA, 71 bp, Homo sapiens
accccatttgttctctgcgtccccaggggctcacggcgcccgggcggcatgacctcgacctatgggaggac

SEQ ID NO: 91663 - DNA, 74 bp, Homo sapiens
tttgttctctgcgtccccaggggctcacggcgcccgggcggcatgacctcgacctatgggaggacgcccatgta

SEQ ID NO: 91664 - DNA, 74 bp, Homo sapiens
gtccccaggggctcacggcgcccgggcggcatgacctcgacctatgggaggacgcccatgtatggctcccagac

SEQ ID NO: 91665 - DNA, 79 bp, Homo sapiens
tcacggcgcccgggcggcatgacctcgacctatgggaggacgcccatgtatggctcccagacgcccatgtatggctctg

SEQ ID NO: 91666 - DNA, 78 bp, Homo sapiens
cgggcggcatgacctcgacctatgggaggacgcccatgtatggctcccagacgcccatgtatggctctggctcccgaa

SEQ ID NO: 91667 - DNA, 79 bp, Homo sapiens
tgacctcgacctatgggaggacgcccatgtatggctcccagacgcccatgtatggctctggctcccgaacacccatgta

SEQ ID NO: 91668 - DNA, 81 bp, Homo sapiens
tatgggaggacgcccatgtatggctcccagacgcccatgtatggctctggctcccgaacacccatgtacggctcacagaca

SEQ ID NO: 91669 - DNA, 78 bp, Homo sapiens
aggacgcccatgtatggctcccagacgcccatgtatggctctggctcccgaacacccatgtacggctcacagacaccc

SEQ ID NO: 91670 - DNA, 79 bp, Homo sapiens
atgtatggctcccagacgcccatgtatggctctggctcccgaacacccatgtacggctcacagacacccctccaggatg

SEQ ID NO: 91671 - DNA, 79 bp, Homo sapiens
agacgcccatgtatggctctggctcccgaacacccatgtacggctcacagacacccctccaggatggtgagtgcccgca

SEQ ID NO: 91672 - DNA, 78 bp, Homo sapiens
atgtatggctctggctcccgaacacccatgtacggctcacagacacccctccaggatggtgagtgcccgcaggggaca

SEQ ID NO: 91673 - DNA, 76 bp, Homo sapiens
tctggctcccgaacacccatgtacggctcacagacacccctccaggatggtgagtgcccgcaggggacagggaaga

SEQ ID NO: 91674 - DNA, 73 bp, Homo sapiens
aacacccatgtacggctcacagacacccctccaggatggtgagtgcccgcaggggacagggaagaggggctag

SEQ ID NO: 91675 - DNA, 74 bp, Homo sapiens
acctagagaagggacaggacagacacactcatttcccccattccaggtagccgcaccccacactacggctcaca

SEQ ID NO: 91676 - DNA, 73 bp, Homo sapiens
aagggacaggacagacacactcatttcccccattccaggtagccgcaccccacactacggctcacagacgccc

SEQ ID NO: 91677 - DNA, 79 bp, Homo sapiens
aggacagacacactcatttcccccattccaggtagccgcaccccacactacggctcacagacgcccctgcatgatggca

SEQ ID NO: 91678 - DNA, 78 bp, Homo sapiens
atttcccccattccaggtagccgcaccccacactacggctcacagacgcccctgcatgatggcagccgcactcctgcc

SEQ ID NO: 91679 - DNA, 80 bp, Homo sapiens
cccattccaggtagccgcaccccacactacggctcacagacgcccctgcatgatggcagccgcactcctgcccagagtgg

SEQ ID NO: 91680 - DNA, 80 bp, Homo sapiens
ggtagccgcaccccacactacggctcacagacgcccctgcatgatggcagccgcactcctgcccagagtggggcctggga

SEQ ID NO: 91681 - DNA, 77 bp, Homo sapiens
acactacggctcacagacgcccctgcatgatggcagccgcactcctgcccagagtggggcctgggaccccaacaacc

SEQ ID NO: 91682 - DNA, 77 bp, Homo sapiens
tcacagacgcccctgcatgatggcagccgcactcctgcccagagtggggcctgggaccccaacaaccccaacacgcc

SEQ ID NO: 91683 - DNA, 76 bp, Homo sapiens
cctgcatgatggcagccgcactcctgcccagagtggggcctgggaccccaacaaccccaacacgccgtcacggtga

SEQ ID NO: 91684 - DNA, 74 bp, Homo sapiens
atgatggcagccgcactcctgcccagagtggggcctgggaccccaacaaccccaacacgccgtcacggtgagtc

SEQ ID NO: 91685 - DNA, 68 bp, Homo sapiens
actcctgcccagagtggggcctgggaccccaacaaccccaacacgccgtcacggtgagtccagggttc

SEQ ID NO: 91686 - DNA, 66 bp, Homo sapiens
gagtggggcctgggaccccaacaaccccaacacgccgtcacggtgagtccagggttccccaggttc

SEQ ID NO: 91687 - DNA, 83 bp, Homo sapiens
atcgcattatcaccacagtcgctgtcaacagacttttctcccaacagggctgaggaagaatatgagtatgctttcgatgatga

SEQ ID NO: 91688 - DNA, 82 bp, Homo sapiens
ttatcaccacagtcgctgtcaacagacttttctcccaacagggctgaggaagaatatgagtatgctttcgatgatgagccca

SEQ ID NO: 91689 - DNA, 77 bp, Homo sapiens
agtcgctgtcaacagacttttctcccaacagggctgaggaagaatatgagtatgctttcgatgatgagcccaccccg

SEQ ID NO: 91690 - DNA, 75 bp, Homo sapiens
aacagacttttctcccaacagggctgaggaagaatatgagtatgctttcgatgatgagcccaccccgtccccgca

SEQ ID NO: 91691 - DNA, 76 bp, Homo sapiens
tctcccaacagggctgaggaagaatatgagtatgctttcgatgatgagcccaccccgtccccgcaggcctatgggg

SEQ ID NO: 91692 - DNA, 73 bp, Homo sapiens
gggctgaggaagaatatgagtatgctttcgatgatgagcccaccccgtccccgcaggcctatgggggaacccc

SEQ ID NO: 91693 - DNA, 71 bp, Homo sapiens
aatatgagtatgctttcgatgatgagcccaccccgtccccgcaggcctatgggggaacccccaatccccaa

SEQ ID NO: 91694 - DNA, 70 bp, Homo sapiens
tatgctttcgatgatgagcccaccccgtccccgcaggcctatgggggaacccccaatccccaaacacctg

SEQ ID NO: 91695 - DNA, 68 bp, Homo sapiens
atgatgagcccaccccgtccccgcaggcctatgggggaacccccaatccccaaacacctggctaccca

SEQ ID NO: 91696 - DNA, 65 bp, Homo sapiens
cgtccccgcaggcctatgggggaacccccaatccccaaacacctggctacccagacccctcgtcc

SEQ ID NO: 91697 - DNA, 66 bp, Homo sapiens
ggcctatgggggaacccccaatccccaaacacctggctacccagacccctcgtccccacaggtcaa

SEQ ID NO: 91698 - DNA, 67 bp, Homo sapiens
ggaacccccaatccccaaacacctggctacccagacccctcgtccccacaggtcaacccacaataca

SEQ ID NO: 91699 - DNA, 68 bp, Homo sapiens
aatccccaaacacctggctacccagacccctcgtccccacaggtcaacccacaatacaacccgcagac

SEQ ID NO: 91700 - DNA, 69 bp, Homo sapiens
aaacacctggctacccagacccctcgtccccacaggtcaacccacaatacaacccgcagacgccaggga

SEQ ID NO: 91701 - DNA, 72 bp, Homo sapiens
tacccagacccctcgtccccacaggtcaacccacaatacaacccgcagacgccagggacgccggccatgtga

SEQ ID NO: 91702 - DNA, 72 bp, Homo sapiens
ccctcgtccccacaggtcaacccacaatacaacccgcagacgccagggacgccggccatgtgagtccactgg

SEQ ID NO: 91703 - DNA, 74 bp, Homo sapiens
ggtcaacccacaatacaacccgcagacgccagggacgccggccatgtgagtccactggggcctgccctcgtcta

SEQ ID NO: 91704 - DNA, 72 bp, Homo sapiens
acccacaatacaacccgcagacgccagggacgccggccatgtgagtccactggggcctgccctcgtctaccc

SEQ ID NO: 91705 - DNA, 73 bp, Homo sapiens
cccctccctcctccaacaaatgcccccttctctcctgtctctgcaggtacaacacagaccagttctctcccta

SEQ ID NO: 91706 - DNA, 76 bp, Homo sapiens
ccctcctccaacaaatgcccccttctctcctgtctctgcaggtacaacacagaccagttctctccctatgctgccc

SEQ ID NO: 91707 - DNA, 75 bp, Homo sapiens
aaatgcccccttctctcctgtctctgcaggtacaacacagaccagttctctccctatgctgccccctccccacaa

SEQ ID NO: 91708 - DNA, 76 bp, Homo sapiens
ttctctcctgtctctgcaggtacaacacagaccagttctctccctatgctgccccctccccacaaggttcctacca

SEQ ID NO: 91709 - DNA, 76 bp, Homo sapiens
tgtctctgcaggtacaacacagaccagttctctccctatgctgccccctccccacaaggttcctaccagcccagcc

SEQ ID NO: 91710 - DNA, 72 bp, Homo sapiens
ggtacaacacagaccagttctctccctatgctgccccctccccacaaggttcctaccagcccagccccagcc

SEQ ID NO: 91711 - DNA, 72 bp, Homo sapiens
agaccagttctctccctatgctgccccctccccacaaggttcctaccagcccagccccagcccccagagcta

SEQ ID NO: 91712 - DNA, 72 bp, Homo sapiens
tctccctatgctgccccctccccacaaggttcctaccagcccagccccagcccccagagctaccaccaggtg

SEQ ID NO: 91713 - DNA, 72 bp, Homo sapiens
ccctccccacaaggttcctaccagcccagccccagcccccagagctaccaccaggtggcgccaagcccagca

SEQ ID NO: 91714 - DNA, 73 bp, Homo sapiens
aaggttcctaccagcccagccccagcccccagagctaccaccaggtggcgccaagcccagcaggctaccagaa

SEQ ID NO: 91715 - DNA, 75 bp, Homo sapiens
taccagcccagccccagcccccagagctaccaccaggtggcgccaagcccagcaggctaccagaatacccactcc

SEQ ID NO: 91716 - DNA, 75 bp, Homo sapiens
cccagcccccagagctaccaccaggtggcgccaagcccagcaggctaccagaatacccactccccagccagctac

SEQ ID NO: 91717 - DNA, 75 bp, Homo sapiens
agagctaccaccaggtggcgccaagcccagcaggctaccagaatacccactccccagccagctaccaccctacac

SEQ ID NO: 91718 - DNA, 74 bp, Homo sapiens
taccaccaggtggcgccaagcccagcaggctaccagaatacccactccccagccagctaccaccctacaccgtc

SEQ ID NO: 91719 - DNA, 75 bp, Homo sapiens
ccaagcccagcaggctaccagaatacccactccccagccagctaccaccctacaccgtcgcccatggcctatcag

SEQ ID NO: 91720 - DNA, 74 bp, Homo sapiens
agcaggctaccagaatacccactccccagccagctaccaccctacaccgtcgcccatggcctatcaggtaatgg

SEQ ID NO: 91721 - DNA, 76 bp, Homo sapiens
taccagaatacccactccccagccagctaccaccctacaccgtcgcccatggcctatcaggtaatggtctgcctgc

SEQ ID NO: 91722 - DNA, 75 bp, Homo sapiens
actccccagccagctaccaccctacaccgtcgcccatggcctatcaggtaatggtctgcctgcctgccctgaagg

SEQ ID NO: 91723 - DNA, 75 bp, Homo sapiens
caggccagatgactattcccaatgacacttcctctttcccctgcaggctagccccagcccgagccccgttggcta

SEQ ID NO: 91724 - DNA, 74 bp, Homo sapiens
tgactattcccaatgacacttcctctttcccctgcaggctagccccagcccgagccccgttggctacagtccta

SEQ ID NO: 91725 - DNA, 74 bp, Homo sapiens
aatgacacttcctctttcccctgcaggctagccccagcccgagccccgttggctacagtcctatgacacctgga

SEQ ID NO: 91726 - DNA, 74 bp, Homo sapiens
ttcctctttcccctgcaggctagccccagcccgagccccgttggctacagtcctatgacacctggagctccctc

SEQ ID NO: 91727 - DNA, 76 bp, Homo sapiens
ctgcaggctagccccagcccgagccccgttggctacagtcctatgacacctggagctccctcccctggtggctaca

SEQ ID NO: 91728 - DNA, 73 bp, Homo sapiens
tagccccagcccgagccccgttggctacagtcctatgacacctggagctccctcccctggtggctacaaccca

SEQ ID NO: 91729 - DNA, 76 bp, Homo sapiens
gagccccgttggctacagtcctatgacacctggagctccctcccctggtggctacaacccacacacgccaggctca

SEQ ID NO: 91730 - DNA, 81 bp, Homo sapiens
ttggctacagtcctatgacacctggagctccctcccctggtggctacaacccacacacgccaggctcaggcatcgagcaga

SEQ ID NO: 91731 - DNA, 79 bp, Homo sapiens
agtcctatgacacctggagctccctcccctggtggctacaacccacacacgccaggctcaggcatcgagcagaactcca

SEQ ID NO: 91732 - DNA, 78 bp, Homo sapiens
tggagctccctcccctggtggctacaacccacacacgccaggctcaggcatcgagcagaactccagcgactgggtaac

SEQ ID NO: 91733 - DNA, 80 bp, Homo sapiens
tcccctggtggctacaacccacacacgccaggctcaggcatcgagcagaactccagcgactgggtaaccactgacattca

SEQ ID NO: 91734 - DNA, 81 bp, Homo sapiens
tggtggctacaacccacacacgccaggctcaggcatcgagcagaactccagcgactgggtaaccactgacattcaggtgaa

SEQ ID NO: 91735 - DNA, 78 bp, Homo sapiens
aacccacacacgccaggctcaggcatcgagcagaactccagcgactgggtaaccactgacattcaggtgaaggtgcgg

SEQ ID NO: 91736 - DNA, 79 bp, Homo sapiens
ggctcaggcatcgagcagaactccagcgactgggtaaccactgacattcaggtgaaggtgcgggacacctacctggata

SEQ ID NO: 91737 - DNA, 78 bp, Homo sapiens
aggcatcgagcagaactccagcgactgggtaaccactgacattcaggtgaaggtgcgggacacctacctggatacaca

SEQ ID NO: 91738 - DNA, 74 bp, Homo sapiens
agaactccagcgactgggtaaccactgacattcaggtgaaggtgcgggacacctacctggatacacaggtggtg

SEQ ID NO: 91739 - DNA, 73 bp, Homo sapiens
actgggtaaccactgacattcaggtgaaggtgcgggacacctacctggatacacaggtggtgggacagacagg

SEQ ID NO: 91740 - DNA, 79 bp, Homo sapiens
actgacattcaggtgaaggtgcgggacacctacctggatacacaggtggtgggacagacaggtgtcatccgcagtgtca

SEQ ID NO: 91741 - DNA, 77 bp, Homo sapiens
ttcaggtgaaggtgcgggacacctacctggatacacaggtggtgggacagacaggtgtcatccgcagtgtcacggta

SEQ ID NO: 91742 - DNA, 74 bp, Homo sapiens
aggtgcgggacacctacctggatacacaggtggtgggacagacaggtgtcatccgcagtgtcacggtacgtggg

SEQ ID NO: 91743 - DNA, 73 bp, Homo sapiens
acctacctggatacacaggtggtgggacagacaggtgtcatccgcagtgtcacggtacgtggggcccagggtg

SEQ ID NO: 91744 - DNA, 75 bp, Homo sapiens
atacacaggtggtgggacagacaggtgtcatccgcagtgtcacggtacgtggggcccagggtggtgggtgagcag

SEQ ID NO: 91745 - DNA, 77 bp, Homo sapiens
tgggacagacaggtgtcatccgcagtgtcacggtacgtggggcccagggtggtgggtgagcaggcatcctctccttg

SEQ ID NO: 91746 - DNA, 74 bp, Homo sapiens
acaggtgtcatccgcagtgtcacggtacgtggggcccagggtggtgggtgagcaggcatcctctccttggtacc

SEQ ID NO: 91747 - DNA, 70 bp, Homo sapiens
cagtgtcacggtacgtggggcccagggtggtgggtgagcaggcatcctctccttggtaccccctaaactg

SEQ ID NO: 91748 - DNA, 71 bp, Homo sapiens
tcacggtacgtggggcccagggtggtgggtgagcaggcatcctctccttggtaccccctaaactggagaca

SEQ ID NO: 91749 - DNA, 76 bp, Homo sapiens
gtgggtgagcaggcatcctctccttggtaccccctaaactggagacagacctgtccccagatggtgacagcccaga

SEQ ID NO: 91750 - DNA, 75 bp, Homo sapiens
aggcatcctctccttggtaccccctaaactggagacagacctgtccccagatggtgacagcccagagtgggcaga

SEQ ID NO: 91751 - DNA, 74 bp, Homo sapiens
cctctccttggtaccccctaaactggagacagacctgtccccagatggtgacagcccagagtgggcagagctgg

SEQ ID NO: 91752 - DNA, 77 bp, Homo sapiens
ccctaaactggagacagacctgtccccagatggtgacagcccagagtgggcagagctgggattgaggaagcctagag

SEQ ID NO: 91753 - DNA, 78 bp, Homo sapiens
aactggagacagacctgtccccagatggtgacagcccagagtgggcagagctgggattgaggaagcctagagggcaag

SEQ ID NO: 91754 - DNA, 79 bp, Homo sapiens
tgtccccagatggtgacagcccagagtgggcagagctgggattgaggaagcctagagggcaaggggagctatgtgaacc

SEQ ID NO: 91755 - DNA, 77 bp, Homo sapiens
agatggtgacagcccagagtgggcagagctgggattgaggaagcctagagggcaaggggagctatgtgaacccaaag

SEQ ID NO: 91756 - DNA, 76 bp, Homo sapiens
ccagagtgggcagagctgggattgaggaagcctagagggcaaggggagctatgtgaacccaaaggaggcatcttac

SEQ ID NO: 91757 - DNA, 76 bp, Homo sapiens
cagagctgggattgaggaagcctagagggcaaggggagctatgtgaacccaaaggaggcatcttacctgatttagc

SEQ ID NO: 91758 - DNA, 73 bp, Homo sapiens
tgggattgaggaagcctagagggcaaggggagctatgtgaacccaaaggaggcatcttacctgatttagcggg

SEQ ID NO: 91759 - DNA, 72 bp, Homo sapiens
agggcaaggggagctatgtgaacccaaaggaggcatcttacctgatttagcggggaatcagggagggctgcc

SEQ ID NO: 91760 - DNA, 72 bp, Homo sapiens
tatgtgaacccaaaggaggcatcttacctgatttagcggggaatcagggagggctgcctggggaaggagaaa

SEQ ID NO: 91761 - DNA, 71 bp, Homo sapiens
aacccaaaggaggcatcttacctgatttagcggggaatcagggagggctgcctggggaaggagaaatctga

SEQ ID NO: 91762 - DNA, 73 bp, Homo sapiens
atcttacctgatttagcggggaatcagggagggctgcctggggaaggagaaatctgagccaagacctgacaaa

SEQ ID NO: 91763 - DNA, 74 bp, Homo sapiens
tttagcggggaatcagggagggctgcctggggaaggagaaatctgagccaagacctgacaaatgaataggagta

SEQ ID NO: 91764 - DNA, 74 bp, Homo sapiens
aatcagggagggctgcctggggaaggagaaatctgagccaagacctgacaaatgaataggagtaagctaaggaa

SEQ ID NO: 91765 - DNA, 74 bp, Homo sapiens
agggctgcctggggaaggagaaatctgagccaagacctgacaaatgaataggagtaagctaaggaaagtgactg

SEQ ID NO: 91766 - DNA, 74 bp, Homo sapiens
ggaaggagaaatctgagccaagacctgacaaatgaataggagtaagctaaggaaagtgactggggtgagtgagt

SEQ ID NO: 91767 - DNA, 74 bp, Homo sapiens
aaatctgagccaagacctgacaaatgaataggagtaagctaaggaaagtgactggggtgagtgagttccaaatg

SEQ ID NO: 91768 - DNA, 71 bp, Homo sapiens
aagacctgacaaatgaataggagtaagctaaggaaagtgactggggtgagtgagttccaaatggagggaac

SEQ ID NO: 91769 - DNA, 76 bp, Homo sapiens
acaaatgaataggagtaagctaaggaaagtgactggggtgagtgagttccaaatggagggaactgcatgtgcagag

SEQ ID NO: 91770 - DNA, 76 bp, Homo sapiens
ataggagtaagctaaggaaagtgactggggtgagtgagttccaaatggagggaactgcatgtgcagaggcctggag

SEQ ID NO: 91771 - DNA, 75 bp, Homo sapiens
ctaaggaaagtgactggggtgagtgagttccaaatggagggaactgcatgtgcagaggcctggaggtgaggggaa

SEQ ID NO: 91772 - DNA, 76 bp, Homo sapiens
actggggtgagtgagttccaaatggagggaactgcatgtgcagaggcctggaggtgaggggaacctgggcacattc

SEQ ID NO: 91773 - DNA, 78 bp, Homo sapiens
agtgagttccaaatggagggaactgcatgtgcagaggcctggaggtgaggggaacctgggcacattccaggagctgaa

SEQ ID NO: 91774 - DNA, 75 bp, Homo sapiens
aatggagggaactgcatgtgcagaggcctggaggtgaggggaacctgggcacattccaggagctgaagggtttgt

SEQ ID NO: 91775 - DNA, 79 bp, Homo sapiens
tgcatgtgcagaggcctggaggtgaggggaacctgggcacattccaggagctgaagggtttgttgtggctggaacataa

SEQ ID NO: 91776 - DNA, 73 bp, Homo sapiens
agaggcctggaggtgaggggaacctgggcacattccaggagctgaagggtttgttgtggctggaacataaaga

SEQ ID NO: 91777 - DNA, 71 bp, Homo sapiens
aggtgaggggaacctgggcacattccaggagctgaagggtttgttgtggctggaacataaagagccaaagg

SEQ ID NO: 91778 - DNA, 72 bp, Homo sapiens
aacctgggcacattccaggagctgaagggtttgttgtggctggaacataaagagccaaagggggccaagcag

SEQ ID NO: 91779 - DNA, 74 bp, Homo sapiens
acattccaggagctgaagggtttgttgtggctggaacataaagagccaaagggggccaagcagtgcttcacacc

SEQ ID NO: 91780 - DNA, 78 bp, Homo sapiens
agtcccatgttgggagcaggacaggctgaccaggctgtccccatcctccaggggggcatgtgctctgtgtacctgaag

SEQ ID NO: 91781 - DNA, 80 bp, Homo sapiens
ttgggagcaggacaggctgaccaggctgtccccatcctccaggggggcatgtgctctgtgtacctgaaggacagtgagaa

SEQ ID NO: 91782 - DNA, 79 bp, Homo sapiens
ggctgaccaggctgtccccatcctccaggggggcatgtgctctgtgtacctgaaggacagtgagaaggttgtcagcatt

SEQ ID NO: 91783 - DNA, 79 bp, Homo sapiens
aggctgtccccatcctccaggggggcatgtgctctgtgtacctgaaggacagtgagaaggttgtcagcatttccagtga

SEQ ID NO: 91784 - DNA, 81 bp, Homo sapiens
tcctccaggggggcatgtgctctgtgtacctgaaggacagtgagaaggttgtcagcatttccagtgagcacctggagccta

SEQ ID NO: 91785 - DNA, 81 bp, Homo sapiens
gggcatgtgctctgtgtacctgaaggacagtgagaaggttgtcagcatttccagtgagcacctggagcctatcacccccac

SEQ ID NO: 91786 - DNA, 79 bp, Homo sapiens
tctgtgtacctgaaggacagtgagaaggttgtcagcatttccagtgagcacctggagcctatcacccccaccaagaaca

SEQ ID NO: 91787 - DNA, 77 bp, Homo sapiens
tgaaggacagtgagaaggttgtcagcatttccagtgagcacctggagcctatcacccccaccaagaacaacaaggta

SEQ ID NO: 91788 - DNA, 74 bp, Homo sapiens
acagtgagaaggttgtcagcatttccagtgagcacctggagcctatcacccccaccaagaacaacaaggtaagg

SEQ ID NO: 91789 - DNA, 72 bp, Homo sapiens
aggttgtcagcatttccagtgagcacctggagcctatcacccccaccaagaacaacaaggtaagggcagggg

SEQ ID NO: 91790 - DNA, 72 bp, Homo sapiens
tttccagtgagcacctggagcctatcacccccaccaagaacaacaaggtaagggcagggggcaaggagataa

SEQ ID NO: 91791 - DNA, 71 bp, Homo sapiens
agcacctggagcctatcacccccaccaagaacaacaaggtaagggcagggggcaaggagataagatggggc

SEQ ID NO: 91792 - DNA, 72 bp, Homo sapiens
aacaaggtaagggcagggggcaaggagataagatggggccgttgggtgctgacatggaccctgaccatattc

SEQ ID NO: 91793 - DNA, 72 bp, Homo sapiens
ccgttgggtgctgacatggaccctgaccatattccccccacccccaggtgaaagtgatcctgggcgaggatc

SEQ ID NO: 91794 - DNA, 70 bp, Homo sapiens
tggaccctgaccatattccccccacccccaggtgaaagtgatcctgggcgaggatcgggaagccacgggc

SEQ ID NO: 91795 - DNA, 72 bp, Homo sapiens
ttccccccacccccaggtgaaagtgatcctgggcgaggatcgggaagccacgggcgtcctactgagcattga

SEQ ID NO: 91796 - DNA, 77 bp, Homo sapiens
ccccaggtgaaagtgatcctgggcgaggatcgggaagccacgggcgtcctactgagcattgatggtgaggatggcat

SEQ ID NO: 91797 - DNA, 80 bp, Homo sapiens
ctgggcgaggatcgggaagccacgggcgtcctactgagcattgatggtgaggatggcattgtccgtatggaccttgatga

SEQ ID NO: 91798 - DNA, 83 bp, Homo sapiens
atcgggaagccacgggcgtcctactgagcattgatggtgaggatggcattgtccgtatggaccttgatgagcagctcaagatc

SEQ ID NO: 91799 - DNA, 82 bp, Homo sapiens
acgggcgtcctactgagcattgatggtgaggatggcattgtccgtatggaccttgatgagcagctcaagatcctcaacctcc

SEQ ID NO: 91800 - DNA, 84 bp, Homo sapiens
gtcctactgagcattgatggtgaggatggcattgtccgtatggaccttgatgagcagctcaagatcctcaacctccgcttcctg

SEQ ID NO: 91801 - DNA, 81 bp, Homo sapiens
attgatggtgaggatggcattgtccgtatggaccttgatgagcagctcaagatcctcaacctccgcttcctggggaagctc

SEQ ID NO: 91802 - DNA, 81 bp, Homo sapiens
tgaggatggcattgtccgtatggaccttgatgagcagctcaagatcctcaacctccgcttcctggggaagctcctggaagc

SEQ ID NO: 91803 - DNA, 74 bp, Homo sapiens
acctccgcttcctggggaagctcctggaagcctgaagcaggcagggccggtggacttcgtcggatgaagagtga

SEQ ID NO: 91804 - DNA, 75 bp, Homo sapiens
ttcctggggaagctcctggaagcctgaagcaggcagggccggtggacttcgtcggatgaagagtgatcctccttc

SEQ ID NO: 91805 - DNA, 74 bp, Homo sapiens
ggaagctcctggaagcctgaagcaggcagggccggtggacttcgtcggatgaagagtgatcctccttccttccc

SEQ ID NO: 91806 - DNA, 75 bp, Homo sapiens
cctgaagcaggcagggccggtggacttcgtcggatgaagagtgatcctccttccttccctggcccttggctgtga

SEQ ID NO: 91807 - DNA, 74 bp, Homo sapiens
aggcagggccggtggacttcgtcggatgaagagtgatcctccttccttccctggcccttggctgtgacacaaga

SEQ ID NO: 91808 - DNA, 73 bp, Homo sapiens
agggccggtggacttcgtcggatgaagagtgatcctccttccttccctggcccttggctgtgacacaagatcc

SEQ ID NO: 91809 - DNA, 78 bp, Homo sapiens
tggacttcgtcggatgaagagtgatcctccttccttccctggcccttggctgtgacacaagatcctcctgcagggcta

SEQ ID NO: 91810 - DNA, 78 bp, Homo sapiens
tcggatgaagagtgatcctccttccttccctggcccttggctgtgacacaagatcctcctgcagggctaggcggattg

SEQ ID NO: 91811 - DNA, 77 bp, Homo sapiens
atgaagagtgatcctccttccttccctggcccttggctgtgacacaagatcctcctgcagggctaggcggattgttc

SEQ ID NO: 91812 - DNA, 76 bp, Homo sapiens
gtgatcctccttccttccctggcccttggctgtgacacaagatcctcctgcagggctaggcggattgttctggatt

SEQ ID NO: 91813 - DNA, 75 bp, Homo sapiens
atcctccttccttccctggcccttggctgtgacacaagatcctcctgcagggctaggcggattgttctggatttc

SEQ ID NO: 91814 - DNA, 74 bp, Homo sapiens
ttccttccctggcccttggctgtgacacaagatcctcctgcagggctaggcggattgttctggatttccttttg

SEQ ID NO: 91815 - DNA, 73 bp, Homo sapiens
ttccctggcccttggctgtgacacaagatcctcctgcagggctaggcggattgttctggatttccttttgttt

SEQ ID NO: 91816 - DNA, 73 bp, Homo sapiens
tccctggcccttggctgtgacacaagatcctcctgcagggctaggcggattgttctggatttccttttgtttt

SEQ ID NO: 91817 - DNA, 71 bp, Homo sapiens
cccttggctgtgacacaagatcctcctgcagggctaggcggattgttctggatttccttttgtttttcctt

SEQ ID NO: 91818 - DNA, 70 bp, Homo sapiens
tgtgacacaagatcctcctgcagggctaggcggattgttctggatttccttttgtttttccttttagttt

SEQ ID NO: 91819 - DNA, 67 bp, Homo sapiens
atcctcctgcagggctaggcggattgttctggatttccttttgtttttccttttagttttccatctt

SEQ ID NO: 91820 - DNA, 64 bp, Homo sapiens
agggctaggcggattgttctggatttccttttgtttttccttttagttttccatcttttccctc

SEQ ID NO: 91821 - DNA, 66 bp, Homo sapiens
attgttctggatttccttttgtttttccttttagttttccatcttttccctccctggtgctcattg

SEQ ID NO: 91822 - DNA, 67 bp, Homo sapiens
atttccttttgtttttccttttagttttccatcttttccctccctggtgctcattggaatctgagta

SEQ ID NO: 91823 - DNA, 69 bp, Homo sapiens
tttgtttttccttttagttttccatcttttccctccctggtgctcattggaatctgagtagagtctggg

SEQ ID NO: 91824 - DNA, 69 bp, Homo sapiens
cttttagttttccatcttttccctccctggtgctcattggaatctgagtagagtctgggggagggtccc

SEQ ID NO: 91825 - DNA, 70 bp, Homo sapiens
atcttttccctccctggtgctcattggaatctgagtagagtctgggggagggtccccaccttcctgtacc

SEQ ID NO: 91826 - DNA, 70 bp, Homo sapiens
ccctccctggtgctcattggaatctgagtagagtctgggggagggtccccaccttcctgtacctcctccc

SEQ ID NO: 91827 - DNA, 70 bp, Homo sapiens
attggaatctgagtagagtctgggggagggtccccaccttcctgtacctcctccccacagcttgcttttg

SEQ ID NO: 91828 - DNA, 70 bp, Homo sapiens
aatctgagtagagtctgggggagggtccccaccttcctgtacctcctccccacagcttgcttttgttgta

SEQ ID NO: 91829 - DNA, 66 bp, Homo sapiens
agggtccccaccttcctgtacctcctccccacagcttgcttttgttgtaccgtctttcaataaaaa

SEQ ID NO: 91830 - DNA, 70 bp, Homo sapiens
tcctgtacctcctccccacagcttgcttttgttgtaccgtctttcaataaaaagaagctgtttggtctaa

SEQ ID NO: 91831 - DNA, 70 bp, Homo sapiens
ctccccacagcttgcttttgttgtaccgtctttcaataaaaagaagctgtttggtctaaaagtgcgtgtg

SEQ ID NO: 91832 - DNA, 82 bp, Homo sapiens
gttctgcattctgcaggacaggtcctgctcaaggtcaatggggctggtggcctggaggactcatttaagaatcatgtgttga

SEQ ID NO: 91833 - DNA, 79 bp, Homo sapiens
attctgcaggacaggtcctgctcaaggtcaatggggctggtggcctggaggactcatttaagaatcatgtgttgagtac

SEQ ID NO: 91834 - DNA, 75 bp, Homo sapiens
acaggtcctgctcaaggtcaatggggctggtggcctggaggactcatttaagaatcatgtgttgagtacctactt

SEQ ID NO: 91835 - DNA, 75 bp, Homo sapiens
aaggtcaatggggctggtggcctggaggactcatttaagaatcatgtgttgagtacctactttgtactgggcaca

SEQ ID NO: 91836 - DNA, 77 bp, Homo sapiens
gggctggtggcctggaggactcatttaagaatcatgtgttgagtacctactttgtactgggcacactggagagcaaa

SEQ ID NO: 91837 - DNA, 75 bp, Homo sapiens
cctggaggactcatttaagaatcatgtgttgagtacctactttgtactgggcacactggagagcaaaggtggtac

SEQ ID NO: 91838 - DNA, 76 bp, Homo sapiens
aggactcatttaagaatcatgtgttgagtacctactttgtactgggcacactggagagcaaaggtggtaccatcta

SEQ ID NO: 91839 - DNA, 78 bp, Homo sapiens
taagaatcatgtgttgagtacctactttgtactgggcacactggagagcaaaggtggtaccatctatgccctggtggc

SEQ ID NO: 91840 - DNA, 78 bp, Homo sapiens
tgagtacctactttgtactgggcacactggagagcaaaggtggtaccatctatgccctggtggctgcgggtggacaca

SEQ ID NO: 91841 - DNA, 79 bp, Homo sapiens
tactttgtactgggcacactggagagcaaaggtggtaccatctatgccctggtggctgcgggtggacacaaacatgtga

SEQ ID NO: 91842 - DNA, 80 bp, Homo sapiens
gcacactggagagcaaaggtggtaccatctatgccctggtggctgcgggtggacacaaacatgtgaccaggtaatggtga

SEQ ID NO: 91843 - DNA, 78 bp, Homo sapiens
agagcaaaggtggtaccatctatgccctggtggctgcgggtggacacaaacatgtgaccaggtaatggtgacatggtg

SEQ ID NO: 91844 - DNA, 76 bp, Homo sapiens
aaggtggtaccatctatgccctggtggctgcgggtggacacaaacatgtgaccaggtaatggtgacatggtgtggt

SEQ ID NO: 91845 - DNA, 78 bp, Homo sapiens
atctatgccctggtggctgcgggtggacacaaacatgtgaccaggtaatggtgacatggtgtggttggggtgcaatgg

SEQ ID NO: 91846 - DNA, 77 bp, Homo sapiens
aaaggacacacagcaggtaggagatagagcaggtctgtgtcttgctctaggggccaggactggtcaggaaggaggaa

SEQ ID NO: 91847 - DNA, 73 bp, Homo sapiens
aggtaggagatagagcaggtctgtgtcttgctctaggggccaggactggtcaggaaggaggaagcggtccttt

SEQ ID NO: 91848 - DNA, 74 bp, Homo sapiens
agatagagcaggtctgtgtcttgctctaggggccaggactggtcaggaaggaggaagcggtccttttgaggagg

SEQ ID NO: 91849 - DNA, 73 bp, Homo sapiens
tctgtgtcttgctctaggggccaggactggtcaggaaggaggaagcggtccttttgaggagggcgaggcaacg

SEQ ID NO: 91850 - DNA, 71 bp, Homo sapiens
tcttgctctaggggccaggactggtcaggaaggaggaagcggtccttttgaggagggcgaggcaacggacc

SEQ ID NO: 91851 - DNA, 70 bp, Homo sapiens
ccaggactggtcaggaaggaggaagcggtccttttgaggagggcgaggcaacggaccctgccgcccacca

SEQ ID NO: 91852 - DNA, 70 bp, Homo sapiens
caggaaggaggaagcggtccttttgaggagggcgaggcaacggaccctgccgcccaccaggactggtgtc

SEQ ID NO: 91853 - DNA, 70 bp, Homo sapiens
gaagcggtccttttgaggagggcgaggcaacggaccctgccgcccaccaggactggtgtccctcacctta

SEQ ID NO: 91854 - DNA, 68 bp, Homo sapiens
ggtccttttgaggagggcgaggcaacggaccctgccgcccaccaggactggtgtccctcaccttaccc

SEQ ID NO: 91855 - DNA, 68 bp, Homo sapiens
aggagggcgaggcaacggaccctgccgcccaccaggactggtgtccctcaccttacccccacccttgc

SEQ ID NO: 91856 - DNA, 67 bp, Homo sapiens
aacggaccctgccgcccaccaggactggtgtccctcaccttacccccacccttgccctcctcaggtg

SEQ ID NO: 91857 - DNA, 72 bp, Homo sapiens
tgccgcccaccaggactggtgtccctcaccttacccccacccttgccctcctcaggtggcctgtggagagga

SEQ ID NO: 91858 - DNA, 70 bp, Homo sapiens
accaggactggtgtccctcaccttacccccacccttgccctcctcaggtggcctgtggagaggagaaaca

SEQ ID NO: 91859 - DNA, 72 bp, Homo sapiens
cctcaccttacccccacccttgccctcctcaggtggcctgtggagaggagaaacacagggcaccaactatga

SEQ ID NO: 91860 - DNA, 74 bp, Homo sapiens
ttacccccacccttgccctcctcaggtggcctgtggagaggagaaacacagggcaccaactatgaagactctca

SEQ ID NO: 91861 - DNA, 77 bp, Homo sapiens
tgccctcctcaggtggcctgtggagaggagaaacacagggcaccaactatgaagactctcagggcgcgatttaagaa

SEQ ID NO: 91862 - DNA, 78 bp, Homo sapiens
tcctcaggtggcctgtggagaggagaaacacagggcaccaactatgaagactctcagggcgcgatttaagaagacaga

SEQ ID NO: 91863 - DNA, 78 bp, Homo sapiens
ctgtggagaggagaaacacagggcaccaactatgaagactctcagggcgcgatttaagaagacagaggtgagtgtgag

SEQ ID NO: 91864 - DNA, 78 bp, Homo sapiens
agaaacacagggcaccaactatgaagactctcagggcgcgatttaagaagacagaggtgagtgtgaggccctagatgc

SEQ ID NO: 91865 - DNA, 77 bp, Homo sapiens
caccaactatgaagactctcagggcgcgatttaagaagacagaggtgagtgtgaggccctagatgcccgatacaccc

SEQ ID NO: 91866 - DNA, 69 bp, Homo sapiens
gcccagccccgccctccggccgctccccgcggtccctccagaccctctggccgccgcctcctcttggaa

SEQ ID NO: 91867 - DNA, 68 bp, Homo sapiens
cgccctccggccgctccccgcggtccctccagaccctctggccgccgcctcctcttggaaccccgtgc

SEQ ID NO: 91868 - DNA, 67 bp, Homo sapiens
ccggccgctccccgcggtccctccagaccctctggccgccgcctcctcttggaaccccgtgcgcccc

SEQ ID NO: 91869 - DNA, 66 bp, Homo sapiens
cccgcggtccctccagaccctctggccgccgcctcctcttggaaccccgtgcgccccccgcgcccc

SEQ ID NO: 91870 - DNA, 69 bp, Homo sapiens
gaccctctggccgccgcctcctcttggaaccccgtgcgccccccgcgccccgcgccccggacgccatga

SEQ ID NO: 91871 - DNA, 71 bp, Homo sapiens
ccgccgcctcctcttggaaccccgtgcgccccccgcgccccgcgccccggacgccatgaagcagctgtgtc

SEQ ID NO: 91872 - DNA, 75 bp, Homo sapiens
ctcctcttggaaccccgtgcgccccccgcgccccgcgccccggacgccatgaagcagctgtgtctgtgcgcagcc

SEQ ID NO: 91873 - DNA, 75 bp, Homo sapiens
cccgtgcgccccccgcgccccgcgccccggacgccatgaagcagctgtgtctgtgcgcagccgcctccttcgcgg

SEQ ID NO: 91874 - DNA, 74 bp, Homo sapiens
ccccgcgccccgcgccccggacgccatgaagcagctgtgtctgtgcgcagccgcctccttcgcggtagggcccg

SEQ ID NO: 91875 - DNA, 73 bp, Homo sapiens
cccgcgccccggacgccatgaagcagctgtgtctgtgcgcagccgcctccttcgcggtagggcccggggaggg

SEQ ID NO: 91876 - DNA, 75 bp, Homo sapiens
cccggacgccatgaagcagctgtgtctgtgcgcagccgcctccttcgcggtagggcccggggagggggcgcagga

SEQ ID NO: 91877 - DNA, 74 bp, Homo sapiens
atgaagcagctgtgtctgtgcgcagccgcctccttcgcggtagggcccggggagggggcgcaggagcgggcggg

SEQ ID NO: 91878 - DNA, 74 bp, Homo sapiens
cttgggggacactgtctgaggaccccctcgcccaggaccacctccccctgcagctgcggctcagccccactgac

SEQ ID NO: 91879 - DNA, 75 bp, Homo sapiens
acactgtctgaggaccccctcgcccaggaccacctccccctgcagctgcggctcagccccactgaccttggctcc

SEQ ID NO: 91880 - DNA, 75 bp, Homo sapiens
ctgaggaccccctcgcccaggaccacctccccctgcagctgcggctcagccccactgaccttggctcctgcccgc

SEQ ID NO: 91881 - DNA, 75 bp, Homo sapiens
cctcgcccaggaccacctccccctgcagctgcggctcagccccactgaccttggctcctgcccgccctgcggccc

SEQ ID NO: 91882 - DNA, 75 bp, Homo sapiens
accacctccccctgcagctgcggctcagccccactgaccttggctcctgcccgccctgcggcccctgccccatcc

SEQ ID NO: 91883 - DNA, 80 bp, Homo sapiens
tgcagctgcggctcagccccactgaccttggctcctgcccgccctgcggcccctgccccatcccgaagccggcagccaga

SEQ ID NO: 91884 - DNA, 76 bp, Homo sapiens
cggctcagccccactgaccttggctcctgcccgccctgcggcccctgccccatcccgaagccggcagccagaggca

SEQ ID NO: 91885 - DNA, 76 bp, Homo sapiens
actgaccttggctcctgcccgccctgcggcccctgccccatcccgaagccggcagccagaggcaggcgccaggcaa

SEQ ID NO: 91886 - DNA, 77 bp, Homo sapiens
ttggctcctgcccgccctgcggcccctgccccatcccgaagccggcagccagaggcaggcgccaggcaagtgcccag

SEQ ID NO: 91887 - DNA, 77 bp, Homo sapiens
cctgcggcccctgccccatcccgaagccggcagccagaggcaggcgccaggcaagtgcccaggggcaggtggtgaga

SEQ ID NO: 91888 - DNA, 76 bp, Homo sapiens
ccctgccccatcccgaagccggcagccagaggcaggcgccaggcaagtgcccaggggcaggtggtgagagcccgga

SEQ ID NO: 91889 - DNA, 76 bp, Homo sapiens
atcccgaagccggcagccagaggcaggcgccaggcaagtgcccaggggcaggtggtgagagcccggagcccctgtc

SEQ ID NO: 91890 - DNA, 84 bp, Homo sapiens
gacagcagccaacactgccccacgcacttctgggcgtgccctgcagagtcaagactggggcaagagtgacgagaggctgctaca

SEQ ID NO: 91891 - DNA, 79 bp, Homo sapiens
aacactgccccacgcacttctgggcgtgccctgcagagtcaagactggggcaagagtgacgagaggctgctacaagccg

SEQ ID NO: 91892 - DNA, 79 bp, Homo sapiens
cacgcacttctgggcgtgccctgcagagtcaagactggggcaagagtgacgagaggctgctacaagccgtggaaaacaa

SEQ ID NO: 91893 - DNA, 77 bp, Homo sapiens
acttctgggcgtgccctgcagagtcaagactggggcaagagtgacgagaggctgctacaagccgtggaaaacaacga

SEQ ID NO: 91894 - DNA, 77 bp, Homo sapiens
ccctgcagagtcaagactggggcaagagtgacgagaggctgctacaagccgtggaaaacaacgatgcacctcgggtg

SEQ ID NO: 91895 - DNA, 75 bp, Homo sapiens
aagactggggcaagagtgacgagaggctgctacaagccgtggaaaacaacgatgcacctcgggtggccgccctca

SEQ ID NO: 91896 - DNA, 76 bp, Homo sapiens
caagagtgacgagaggctgctacaagccgtggaaaacaacgatgcacctcgggtggccgccctcatcgcccgcaag

SEQ ID NO: 91897 - DNA, 74 bp, Homo sapiens
acgagaggctgctacaagccgtggaaaacaacgatgcacctcgggtggccgccctcatcgcccgcaaggggctg

SEQ ID NO: 91898 - DNA, 73 bp, Homo sapiens
tacaagccgtggaaaacaacgatgcacctcgggtggccgccctcatcgcccgcaaggggctggtgcccacgaa

SEQ ID NO: 91899 - DNA, 73 bp, Homo sapiens
gtggaaaacaacgatgcacctcgggtggccgccctcatcgcccgcaaggggctggtgcccacgaagctagacc

SEQ ID NO: 91900 - DNA, 72 bp, Homo sapiens
acaacgatgcacctcgggtggccgccctcatcgcccgcaaggggctggtgcccacgaagctagaccccgagg

SEQ ID NO: 91901 - DNA, 70 bp, Homo sapiens
acctcgggtggccgccctcatcgcccgcaaggggctggtgcccacgaagctagaccccgagggcaagtcc

SEQ ID NO: 91902 - DNA, 73 bp, Homo sapiens
cctcatcgcccgcaaggggctggtgcccacgaagctagaccccgagggcaagtccgcgtgagtgcccgcgacc

SEQ ID NO: 91903 - DNA, 72 bp, Homo sapiens
cgcaaggggctggtgcccacgaagctagaccccgagggcaagtccgcgtgagtgcccgcgacccgggagtga

SEQ ID NO: 91904 - DNA, 75 bp, Homo sapiens
gggctggtgcccacgaagctagaccccgagggcaagtccgcgtgagtgcccgcgacccgggagtgagatggctga

SEQ ID NO: 91905 - DNA, 73 bp, Homo sapiens
aagtccgcgtgagtgcccgcgacccgggagtgagatggctgaggggtggcaaccttgcggctgaacccttgtc

SEQ ID NO: 91906 - DNA, 75 bp, Homo sapiens
cgtgagtgcccgcgacccgggagtgagatggctgaggggtggcaaccttgcggctgaacccttgtctctcacctc

SEQ ID NO: 91907 - DNA, 77 bp, Homo sapiens
agtgagatggctgaggggtggcaaccttgcggctgaacccttgtctctcacctccaggttccacctggcggccatgc

SEQ ID NO: 91908 - DNA, 74 bp, Homo sapiens
gggtggcaaccttgcggctgaacccttgtctctcacctccaggttccacctggcggccatgcggggtgcggcca

SEQ ID NO: 91909 - DNA, 75 bp, Homo sapiens
aaccttgcggctgaacccttgtctctcacctccaggttccacctggcggccatgcggggtgcggccagctgtctg

SEQ ID NO: 91910 - DNA, 79 bp, Homo sapiens
aacccttgtctctcacctccaggttccacctggcggccatgcggggtgcggccagctgtctggaggtgatgatagctca

SEQ ID NO: 91911 - DNA, 88 bp, Homo sapiens
tctctcacctccaggttccacctggcggccatgcggggtgcggccagctgtctggaggtgatgatagctcatggcagcaatgtcatga

SEQ ID NO: 91912 - DNA, 85 bp, Homo sapiens
aggttccacctggcggccatgcggggtgcggccagctgtctggaggtgatgatagctcatggcagcaatgtcatgagcgcggacg

SEQ ID NO: 91913 - DNA, 88 bp, Homo sapiens
tggcggccatgcggggtgcggccagctgtctggaggtgatgatagctcatggcagcaatgtcatgagcgcggacggggcaggtactgc

SEQ ID NO: 91914 - DNA, 87 bp, Homo sapiens
atgcggggtgcggccagctgtctggaggtgatgatagctcatggcagcaatgtcatgagcgcggacggggcaggtactgccagctgg

SEQ ID NO: 91915 - DNA, 86 bp, Homo sapiens
gtgcggccagctgtctggaggtgatgatagctcatggcagcaatgtcatgagcgcggacggggcaggtactgccagctgggccccg

SEQ ID NO: 91916 - DNA, 83 bp, Homo sapiens
tgtctggaggtgatgatagctcatggcagcaatgtcatgagcgcggacggggcaggtactgccagctgggccccggggaggga

SEQ ID NO: 91917 - DNA, 80 bp, Homo sapiens
tgatagctcatggcagcaatgtcatgagcgcggacggggcaggtactgccagctgggccccggggagggaggaggaacta

SEQ ID NO: 91918 - DNA, 75 bp, Homo sapiens
atggcagcaatgtcatgagcgcggacggggcaggtactgccagctgggccccggggagggaggaggaactaagcc

SEQ ID NO: 91919 - DNA, 75 bp, Homo sapiens
ttggggagcagctgggagctacttgaatagctggagctccagtaaatcttctttccttccccaggttacaatgcc

SEQ ID NO: 91920 - DNA, 73 bp, Homo sapiens
agctgggagctacttgaatagctggagctccagtaaatcttctttccttccccaggttacaatgccctccacc

SEQ ID NO: 91921 - DNA, 73 bp, Homo sapiens
tacttgaatagctggagctccagtaaatcttctttccttccccaggttacaatgccctccacctggccgccaa

SEQ ID NO: 91922 - DNA, 71 bp, Homo sapiens
aatagctggagctccagtaaatcttctttccttccccaggttacaatgccctccacctggccgccaaatac

SEQ ID NO: 91923 - DNA, 68 bp, Homo sapiens
agtaaatcttctttccttccccaggttacaatgccctccacctggccgccaaatacgggcacccacag

SEQ ID NO: 91924 - DNA, 71 bp, Homo sapiens
ctttccttccccaggttacaatgccctccacctggccgccaaatacgggcacccacagtgcttgaagcaac

SEQ ID NO: 91925 - DNA, 75 bp, Homo sapiens
ccaggttacaatgccctccacctggccgccaaatacgggcacccacagtgcttgaagcaactactgcaggtcatt

SEQ ID NO: 91926 - DNA, 76 bp, Homo sapiens
aatgccctccacctggccgccaaatacgggcacccacagtgcttgaagcaactactgcaggtcatttactgtctta

SEQ ID NO: 91927 - DNA, 79 bp, Homo sapiens
tccacctggccgccaaatacgggcacccacagtgcttgaagcaactactgcaggtcatttactgtcttatctcagctac

SEQ ID NO: 91928 - DNA, 76 bp, Homo sapiens
aaatacgggcacccacagtgcttgaagcaactactgcaggtcatttactgtcttatctcagctactcccttggccc

SEQ ID NO: 91929 - DNA, 76 bp, Homo sapiens
acccacagtgcttgaagcaactactgcaggtcatttactgtcttatctcagctactcccttggcccctactactcc

SEQ ID NO: 91930 - DNA, 77 bp, Homo sapiens
agtgcttgaagcaactactgcaggtcatttactgtcttatctcagctactcccttggcccctactactcctgagttc

SEQ ID NO: 91931 - DNA, 75 bp, Homo sapiens
aaggcagtcctagagaaatcaggcagcaagaaggatggctccgcctcaaaggactcgccccatccccaggcttcc

SEQ ID NO: 91932 - DNA, 77 bp, Homo sapiens
tagagaaatcaggcagcaagaaggatggctccgcctcaaaggactcgccccatccccaggcttcctgcgtggtggac

SEQ ID NO: 91933 - DNA, 78 bp, Homo sapiens
gcagcaagaaggatggctccgcctcaaaggactcgccccatccccaggcttcctgcgtggtggacgtcgtggacagca

SEQ ID NO: 91934 - DNA, 75 bp, Homo sapiens
aagaaggatggctccgcctcaaaggactcgccccatccccaggcttcctgcgtggtggacgtcgtggacagcagc

SEQ ID NO: 91935 - DNA, 75 bp, Homo sapiens
gcctcaaaggactcgccccatccccaggcttcctgcgtggtggacgtcgtggacagcagcgggtggactgcccta

SEQ ID NO: 91936 - DNA, 73 bp, Homo sapiens
aaaggactcgccccatccccaggcttcctgcgtggtggacgtcgtggacagcagcgggtggactgccctacac

SEQ ID NO: 91937 - DNA, 78 bp, Homo sapiens
atccccaggcttcctgcgtggtggacgtcgtggacagcagcgggtggactgccctacaccatgcaggtgggtgcagcc

SEQ ID NO: 91938 - DNA, 78 bp, Homo sapiens
aggcttcctgcgtggtggacgtcgtggacagcagcgggtggactgccctacaccatgcaggtgggtgcagcccagccc

SEQ ID NO: 91939 - DNA, 78 bp, Homo sapiens
cgtggtggacgtcgtggacagcagcgggtggactgccctacaccatgcaggtgggtgcagcccagccctgccctgacc

SEQ ID NO: 91940 - DNA, 79 bp, Homo sapiens
tcgtggacagcagcgggtggactgccctacaccatgcaggtgggtgcagcccagccctgccctgaccccgaagcccaga

SEQ ID NO: 91941 - DNA, 76 bp, Homo sapiens
cgggtggactgccctacaccatgcaggtgggtgcagcccagccctgccctgaccccgaagcccagagggtgctaga

SEQ ID NO: 91942 - DNA, 75 bp, Homo sapiens
actgccctacaccatgcaggtgggtgcagcccagccctgccctgaccccgaagcccagagggtgctagacttggg

SEQ ID NO: 91943 - DNA, 77 bp, Homo sapiens
tgggattacagggttgagctaccgcaccggacaaccttttctcttttgcagcggctggtggctgtctctcctgctca

SEQ ID NO: 91944 - DNA, 76 bp, Homo sapiens
ttacagggttgagctaccgcaccggacaaccttttctcttttgcagcggctggtggctgtctctcctgctcagagg

SEQ ID NO: 91945 - DNA, 78 bp, Homo sapiens
taccgcaccggacaaccttttctcttttgcagcggctggtggctgtctctcctgctcagaggtgctctgctcctttaa

SEQ ID NO: 91946 - DNA, 79 bp, Homo sapiens
acaaccttttctcttttgcagcggctggtggctgtctctcctgctcagaggtgctctgctcctttaaggcacatctaaa

SEQ ID NO: 91947 - DNA, 78 bp, Homo sapiens
cttttctcttttgcagcggctggtggctgtctctcctgctcagaggtgctctgctcctttaaggcacatctaaacccc

SEQ ID NO: 91948 - DNA, 77 bp, Homo sapiens
agcggctggtggctgtctctcctgctcagaggtgctctgctcctttaaggcacatctaaacccccaagatcgggtaa

SEQ ID NO: 91949 - DNA, 78 bp, Homo sapiens
gctgtctctcctgctcagaggtgctctgctcctttaaggcacatctaaacccccaagatcgggtaagcttctgggatc

SEQ ID NO: 91950 - DNA, 78 bp, Homo sapiens
tctcctgctcagaggtgctctgctcctttaaggcacatctaaacccccaagatcgggtaagcttctgggatctcttca

SEQ ID NO: 91951 - DNA, 73 bp, Homo sapiens
agaggtgctctgctcctttaaggcacatctaaacccccaagatcgggtaagcttctgggatctcttcagggaa

SEQ ID NO: 91952 - DNA, 74 bp, Homo sapiens
tcctttaaggcacatctaaacccccaagatcgggtaagcttctgggatctcttcagggaagatgttatgcttga

SEQ ID NO: 91953 - DNA, 75 bp, Homo sapiens
aaggcacatctaaacccccaagatcgggtaagcttctgggatctcttcagggaagatgttatgcttgaggtatgc

SEQ ID NO: 91954 - DNA, 80 bp, Homo sapiens
gggggtcagtttctcatgccatcgcatccctcctcctccctaccagtcaggcgcaacacccctcattatagcagctcaga

SEQ ID NO: 91955 - DNA, 84 bp, Homo sapiens
agtttctcatgccatcgcatccctcctcctccctaccagtcaggcgcaacacccctcattatagcagctcagatgtgtcacaca

SEQ ID NO: 91956 - DNA, 85 bp, Homo sapiens
atgccatcgcatccctcctcctccctaccagtcaggcgcaacacccctcattatagcagctcagatgtgtcacacagacctgtgc

SEQ ID NO: 91957 - DNA, 84 bp, Homo sapiens
tcctcctccctaccagtcaggcgcaacacccctcattatagcagctcagatgtgtcacacagacctgtgccgtctcctactgca

SEQ ID NO: 91958 - DNA, 84 bp, Homo sapiens
ctccctaccagtcaggcgcaacacccctcattatagcagctcagatgtgtcacacagacctgtgccgtctcctactgcagcaag

SEQ ID NO: 91959 - DNA, 84 bp, Homo sapiens
aggcgcaacacccctcattatagcagctcagatgtgtcacacagacctgtgccgtctcctactgcagcaaggggctgccgcgaa

SEQ ID NO: 91960 - DNA, 87 bp, Homo sapiens
cctcattatagcagctcagatgtgtcacacagacctgtgccgtctcctactgcagcaaggggctgccgcgaacgatcaggacctgca

SEQ ID NO: 91961 - DNA, 87 bp, Homo sapiens
ttatagcagctcagatgtgtcacacagacctgtgccgtctcctactgcagcaaggggctgccgcgaacgatcaggacctgcaaggca

SEQ ID NO: 91962 - DNA, 85 bp, Homo sapiens
atgtgtcacacagacctgtgccgtctcctactgcagcaaggggctgccgcgaacgatcaggacctgcaaggcaggtgagcatctc

SEQ ID NO: 91963 - DNA, 81 bp, Homo sapiens
acagacctgtgccgtctcctactgcagcaaggggctgccgcgaacgatcaggacctgcaaggcaggtgagcatctcccctc

SEQ ID NO: 91964 - DNA, 82 bp, Homo sapiens
tgtgccgtctcctactgcagcaaggggctgccgcgaacgatcaggacctgcaaggcaggtgagcatctcccctcccagccag

SEQ ID NO: 91965 - DNA, 80 bp, Homo sapiens
ctactgcagcaaggggctgccgcgaacgatcaggacctgcaaggcaggtgagcatctcccctcccagccagtccacccta

SEQ ID NO: 91966 - DNA, 74 bp, Homo sapiens
gggcttgggggatgttctcatctcctcagtagccccctcccctggtaggacggccctgatgctggcctgtgagg

SEQ ID NO: 91967 - DNA, 75 bp, Homo sapiens
gggatgttctcatctcctcagtagccccctcccctggtaggacggccctgatgctggcctgtgagggggccagcc

SEQ ID NO: 91968 - DNA, 74 bp, Homo sapiens
tcatctcctcagtagccccctcccctggtaggacggccctgatgctggcctgtgagggggccagccccgaaaca

SEQ ID NO: 91969 - DNA, 69 bp, Homo sapiens
ccccctcccctggtaggacggccctgatgctggcctgtgagggggccagccccgaaacagtggaggtcc

SEQ ID NO: 91970 - DNA, 75 bp, Homo sapiens
cctggtaggacggccctgatgctggcctgtgagggggccagccccgaaacagtggaggtcctgctgcagggcgga

SEQ ID NO: 91971 - DNA, 79 bp, Homo sapiens
gccctgatgctggcctgtgagggggccagccccgaaacagtggaggtcctgctgcagggcggagcccagccgggcatca

SEQ ID NO: 91972 - DNA, 77 bp, Homo sapiens
atgctggcctgtgagggggccagccccgaaacagtggaggtcctgctgcagggcggagcccagccgggcatcaccga

SEQ ID NO: 91973 - DNA, 77 bp, Homo sapiens
tgtgagggggccagccccgaaacagtggaggtcctgctgcagggcggagcccagccgggcatcaccgatgcgctggg

SEQ ID NO: 91974 - DNA, 78 bp, Homo sapiens
cccgaaacagtggaggtcctgctgcagggcggagcccagccgggcatcaccgatgcgctggggcaggacgcggctcac

SEQ ID NO: 91975 - DNA, 81 bp, Homo sapiens
aacagtggaggtcctgctgcagggcggagcccagccgggcatcaccgatgcgctggggcaggacgcggctcactatggcgc

SEQ ID NO: 91976 - DNA, 80 bp, Homo sapiens
gtcctgctgcagggcggagcccagccgggcatcaccgatgcgctggggcaggacgcggctcactatggcgccctggcggg

SEQ ID NO: 91977 - DNA, 78 bp, Homo sapiens
ggagcccagccgggcatcaccgatgcgctggggcaggacgcggctcactatggcgccctggcgggggacaaactcatc

SEQ ID NO: 91978 - DNA, 77 bp, Homo sapiens
ccgggcatcaccgatgcgctggggcaggacgcggctcactatggcgccctggcgggggacaaactcatcctgcacct

SEQ ID NO: 91979 - DNA, 80 bp, Homo sapiens
atcaccgatgcgctggggcaggacgcggctcactatggcgccctggcgggggacaaactcatcctgcaccttctgcaaga

SEQ ID NO: 91980 - DNA, 78 bp, Homo sapiens
gggcaggacgcggctcactatggcgccctggcgggggacaaactcatcctgcaccttctgcaagaggcggcccagcgc

SEQ ID NO: 91981 - DNA, 76 bp, Homo sapiens
acgcggctcactatggcgccctggcgggggacaaactcatcctgcaccttctgcaagaggcggcccagcgcccctc

SEQ ID NO: 91982 - DNA, 73 bp, Homo sapiens
actatggcgccctggcgggggacaaactcatcctgcaccttctgcaagaggcggcccagcgcccctccccacc

SEQ ID NO: 91983 - DNA, 75 bp, Homo sapiens
ctggcgggggacaaactcatcctgcaccttctgcaagaggcggcccagcgcccctccccacccagcggtatgcaa

SEQ ID NO: 91984 - DNA, 75 bp, Homo sapiens
ggacaaactcatcctgcaccttctgcaagaggcggcccagcgcccctccccacccagcggtatgcaagccccacc

SEQ ID NO: 91985 - DNA, 75 bp, Homo sapiens
ctgcaccttctgcaagaggcggcccagcgcccctccccacccagcggtatgcaagccccacctccccaatgcatt

SEQ ID NO: 91986 - DNA, 75 bp, Homo sapiens
ttctgcaagaggcggcccagcgcccctccccacccagcggtatgcaagccccacctccccaatgcatttgcttct

SEQ ID NO: 91987 - DNA, 71 bp, Homo sapiens
cctacaagtccctggggcccaccaatgcccttcctgggcctgggaacagaatgcctgaccctgcttccctc

SEQ ID NO: 91988 - DNA, 73 bp, Homo sapiens
tccctggggcccaccaatgcccttcctgggcctgggaacagaatgcctgaccctgcttccctctctccccagc

SEQ ID NO: 91989 - DNA, 77 bp, Homo sapiens
aatgcccttcctgggcctgggaacagaatgcctgaccctgcttccctctctccccagccctcacagaggatgattca

SEQ ID NO: 91990 - DNA, 77 bp, Homo sapiens
cttcctgggcctgggaacagaatgcctgaccctgcttccctctctccccagccctcacagaggatgattcaggcgag

SEQ ID NO: 91991 - DNA, 82 bp, Homo sapiens
gaacagaatgcctgaccctgcttccctctctccccagccctcacagaggatgattcaggcgaggcgtcatctcaggtatgga

SEQ ID NO: 91992 - DNA, 79 bp, Homo sapiens
aatgcctgaccctgcttccctctctccccagccctcacagaggatgattcaggcgaggcgtcatctcaggtatggaccc

SEQ ID NO: 91993 - DNA, 78 bp, Homo sapiens
cttccctctctccccagccctcacagaggatgattcaggcgaggcgtcatctcaggtatggacccctaagcagtgaag

SEQ ID NO: 91994 - DNA, 79 bp, Homo sapiens
ctctctccccagccctcacagaggatgattcaggcgaggcgtcatctcaggtatggacccctaagcagtgaaggagccc

SEQ ID NO: 91995 - DNA, 77 bp, Homo sapiens
agccctcacagaggatgattcaggcgaggcgtcatctcaggtatggacccctaagcagtgaaggagcccctcctccc

SEQ ID NO: 91996 - DNA, 78 bp, Homo sapiens
atgattcaggcgaggcgtcatctcaggtatggacccctaagcagtgaaggagcccctcctccctgcatccacactaac

SEQ ID NO: 91997 - DNA, 76 bp, Homo sapiens
aggcgaggcgtcatctcaggtatggacccctaagcagtgaaggagcccctcctccctgcatccacactaacttctc

SEQ ID NO: 91998 - DNA, 75 bp, Homo sapiens
gtcatctcaggtatggacccctaagcagtgaaggagcccctcctccctgcatccacactaacttctcccctgccc

SEQ ID NO: 91999 - DNA, 73 bp, Homo sapiens
aggctggcatggccccccgatcggcccccttcactctctctcccctcccttcccagaactctatgtccagcca

SEQ ID NO: 92000 - DNA, 71 bp, Homo sapiens
atggccccccgatcggcccccttcactctctctcccctcccttcccagaactctatgtccagccatggaaa

SEQ ID NO: 92001 - DNA, 71 bp, Homo sapiens
cccgatcggcccccttcactctctctcccctcccttcccagaactctatgtccagccatggaaagcagggg

SEQ ID NO: 92002 - DNA, 73 bp, Homo sapiens
tcactctctctcccctcccttcccagaactctatgtccagccatggaaagcagggggcccccaagaagcggaa

SEQ ID NO: 92003 - DNA, 71 bp, Homo sapiens
tcccctcccttcccagaactctatgtccagccatggaaagcagggggcccccaagaagcggaaggcgcctc

SEQ ID NO: 92004 - DNA, 71 bp, Homo sapiens
cttcccagaactctatgtccagccatggaaagcagggggcccccaagaagcggaaggcgcctccacctccc

SEQ ID NO: 92005 - DNA, 73 bp, Homo sapiens
aactctatgtccagccatggaaagcagggggcccccaagaagcggaaggcgcctccacctcccgccagcattc

SEQ ID NO: 92006 - DNA, 73 bp, Homo sapiens
ccatggaaagcagggggcccccaagaagcggaaggcgcctccacctcccgccagcattcccatgccggtgaga

SEQ ID NO: 92007 - DNA, 74 bp, Homo sapiens
aaagcagggggcccccaagaagcggaaggcgcctccacctcccgccagcattcccatgccggtgagagatgctc

SEQ ID NO: 92008 - DNA, 76 bp, Homo sapiens
cccaagaagcggaaggcgcctccacctcccgccagcattcccatgccggtgagagatgctctgggcacgggaggag

SEQ ID NO: 92009 - DNA, 77 bp, Homo sapiens
aagcggaaggcgcctccacctcccgccagcattcccatgccggtgagagatgctctgggcacgggaggaggcatggg

SEQ ID NO: 92010 - DNA, 74 bp, Homo sapiens
ggcaaccttaggccccatctaaaggccgtggtggggaggggaacaggatgatcgagatgcctatgaggagatcg

SEQ ID NO: 92011 - DNA, 77 bp, Homo sapiens
ttaggccccatctaaaggccgtggtggggaggggaacaggatgatcgagatgcctatgaggagatcgtgaggctgcg

SEQ ID NO: 92012 - DNA, 78 bp, Homo sapiens
atctaaaggccgtggtggggaggggaacaggatgatcgagatgcctatgaggagatcgtgaggctgcggcaggagagg

SEQ ID NO: 92013 - DNA, 81 bp, Homo sapiens
gtggggaggggaacaggatgatcgagatgcctatgaggagatcgtgaggctgcggcaggagaggggccgcctcctgcagaa

SEQ ID NO: 92014 - DNA, 81 bp, Homo sapiens
gggaacaggatgatcgagatgcctatgaggagatcgtgaggctgcggcaggagaggggccgcctcctgcagaagatccggg

SEQ ID NO: 92015 - DNA, 82 bp, Homo sapiens
atgatcgagatgcctatgaggagatcgtgaggctgcggcaggagaggggccgcctcctgcagaagatccggggcctggaaca

SEQ ID NO: 92016 - DNA, 79 bp, Homo sapiens
ctatgaggagatcgtgaggctgcggcaggagaggggccgcctcctgcagaagatccggggcctggaacagcacaaggaa

SEQ ID NO: 92017 - DNA, 76 bp, Homo sapiens
agatcgtgaggctgcggcaggagaggggccgcctcctgcagaagatccggggcctggaacagcacaaggaacggag

SEQ ID NO: 92018 - DNA, 76 bp, Homo sapiens
tgcggcaggagaggggccgcctcctgcagaagatccggggcctggaacagcacaaggaacggaggcagcaggaggt

SEQ ID NO: 92019 - DNA, 73 bp, Homo sapiens
aggagaggggccgcctcctgcagaagatccggggcctggaacagcacaaggaacggaggcagcaggaggttag

SEQ ID NO: 92020 - DNA, 74 bp, Homo sapiens
ctcctgcagaagatccggggcctggaacagcacaaggaacggaggcagcaggaggttaggaggcctcggagatt

SEQ ID NO: 92021 - DNA, 72 bp, Homo sapiens
agaagatccggggcctggaacagcacaaggaacggaggcagcaggaggttaggaggcctcggagatttgggc

SEQ ID NO: 92022 - DNA, 73 bp, Homo sapiens
aatggaggctatgaagcaggaggtggggcagggaggcctcttgcccagatccaaacccctgtccctgtttctc

SEQ ID NO: 92023 - DNA, 73 bp, Homo sapiens
tatgaagcaggaggtggggcagggaggcctcttgcccagatccaaacccctgtccctgtttctcccgtcagtc

SEQ ID NO: 92024 - DNA, 70 bp, Homo sapiens
tggggcagggaggcctcttgcccagatccaaacccctgtccctgtttctcccgtcagtccccggaggcca

SEQ ID NO: 92025 - DNA, 69 bp, Homo sapiens
agggaggcctcttgcccagatccaaacccctgtccctgtttctcccgtcagtccccggaggccagctcc

SEQ ID NO: 92026 - DNA, 74 bp, Homo sapiens
ttgcccagatccaaacccctgtccctgtttctcccgtcagtccccggaggccagctccctgcacatcctggaga

SEQ ID NO: 92027 - DNA, 71 bp, Homo sapiens
aaacccctgtccctgtttctcccgtcagtccccggaggccagctccctgcacatcctggagagacaggtag

SEQ ID NO: 92028 - DNA, 73 bp, Homo sapiens
tccctgtttctcccgtcagtccccggaggccagctccctgcacatcctggagagacaggtaggtgggaaggtg

SEQ ID NO: 92029 - DNA, 73 bp, Homo sapiens
ttctcccgtcagtccccggaggccagctccctgcacatcctggagagacaggtaggtgggaaggtggggagga

SEQ ID NO: 92030 - DNA, 75 bp, Homo sapiens
ccggaggccagctccctgcacatcctggagagacaggtaggtgggaaggtggggaggagccggtcctcctgctgc

SEQ ID NO: 92031 - DNA, 74 bp, Homo sapiens
agctccctgcacatcctggagagacaggtaggtgggaaggtggggaggagccggtcctcctgctgcccagcctt

SEQ ID NO: 92032 - DNA, 72 bp, Homo sapiens
acatcctggagagacaggtaggtgggaaggtggggaggagccggtcctcctgctgcccagcctttcctccca

SEQ ID NO: 92033 - DNA, 74 bp, Homo sapiens
agagacaggtaggtgggaaggtggggaggagccggtcctcctgctgcccagcctttcctcccagaggcagctga

SEQ ID NO: 92034 - DNA, 76 bp, Homo sapiens
taggtgggaaggtggggaggagccggtcctcctgctgcccagcctttcctcccagaggcagctgagcctccactgc

SEQ ID NO: 92035 - DNA, 81 bp, Homo sapiens
tggggaggagccggtcctcctgctgcccagcctttcctcccagaggcagctgagcctccactgctgctcccaggtgcaaga

SEQ ID NO: 92036 - DNA, 84 bp, Homo sapiens
cggtcctcctgctgcccagcctttcctcccagaggcagctgagcctccactgctgctcccaggtgcaagagctacagcagttgc

SEQ ID NO: 92037 - DNA, 87 bp, Homo sapiens
tcctgctgcccagcctttcctcccagaggcagctgagcctccactgctgctcccaggtgcaagagctacagcagttgctggtggaga

SEQ ID NO: 92038 - DNA, 85 bp, Homo sapiens
cagcctttcctcccagaggcagctgagcctccactgctgctcccaggtgcaagagctacagcagttgctggtggagagacaagag

SEQ ID NO: 92039 - DNA, 85 bp, Homo sapiens
tttcctcccagaggcagctgagcctccactgctgctcccaggtgcaagagctacagcagttgctggtggagagacaagaggagaa

SEQ ID NO: 92040 - DNA, 84 bp, Homo sapiens
agctgagcctccactgctgctcccaggtgcaagagctacagcagttgctggtggagagacaagaggagaaggagagcctgggac

SEQ ID NO: 92041 - DNA, 81 bp, Homo sapiens
tccactgctgctcccaggtgcaagagctacagcagttgctggtggagagacaagaggagaaggagagcctgggacgggagg

SEQ ID NO: 92042 - DNA, 78 bp, Homo sapiens
tcccaggtgcaagagctacagcagttgctggtggagagacaagaggagaaggagagcctgggacgggaggtggagagt

SEQ ID NO: 92043 - DNA, 78 bp, Homo sapiens
aagagctacagcagttgctggtggagagacaagaggagaaggagagcctgggacgggaggtggagagtttgcagagcc

SEQ ID NO: 92044 - DNA, 79 bp, Homo sapiens
tacagcagttgctggtggagagacaagaggagaaggagagcctgggacgggaggtggagagtttgcagagccggctgtc

SEQ ID NO: 92045 - DNA, 79 bp, Homo sapiens
tgctggtggagagacaagaggagaaggagagcctgggacgggaggtggagagtttgcagagccggctgtccctgctgga

SEQ ID NO: 92046 - DNA, 75 bp, Homo sapiens
agacaagaggagaaggagagcctgggacgggaggtggagagtttgcagagccggctgtccctgctggaggtagga

SEQ ID NO: 92047 - DNA, 79 bp, Homo sapiens
agaaggagagcctgggacgggaggtggagagtttgcagagccggctgtccctgctggaggtaggagcagtgatgagtca

SEQ ID NO: 92048 - DNA, 78 bp, Homo sapiens
cctgggacgggaggtggagagtttgcagagccggctgtccctgctggaggtaggagcagtgatgagtcagggctgggc

SEQ ID NO: 92049 - DNA, 73 bp, Homo sapiens
tcttggtggggacacacgggggctgagagcagaaccccgagctggactctgctccctccccccagaacgagcg

SEQ ID NO: 92050 - DNA, 73 bp, Homo sapiens
acacacgggggctgagagcagaaccccgagctggactctgctccctccccccagaacgagcgggagaatacta

SEQ ID NO: 92051 - DNA, 74 bp, Homo sapiens
agagcagaaccccgagctggactctgctccctccccccagaacgagcgggagaatactagctatgacgtaacca

SEQ ID NO: 92052 - DNA, 74 bp, Homo sapiens
cccgagctggactctgctccctccccccagaacgagcgggagaatactagctatgacgtaaccaccctgcagga

SEQ ID NO: 92053 - DNA, 75 bp, Homo sapiens
ctggactctgctccctccccccagaacgagcgggagaatactagctatgacgtaaccaccctgcaggatgaggag

SEQ ID NO: 92054 - DNA, 76 bp, Homo sapiens
cctccccccagaacgagcgggagaatactagctatgacgtaaccaccctgcaggatgaggagggtgagctgcctga

SEQ ID NO: 92055 - DNA, 77 bp, Homo sapiens
aacgagcgggagaatactagctatgacgtaaccaccctgcaggatgaggagggtgagctgcctgaccttccaggtga

SEQ ID NO: 92056 - DNA, 76 bp, Homo sapiens
cgggagaatactagctatgacgtaaccaccctgcaggatgaggagggtgagctgcctgaccttccaggtgagcccc

SEQ ID NO: 92057 - DNA, 75 bp, Homo sapiens
actagctatgacgtaaccaccctgcaggatgaggagggtgagctgcctgaccttccaggtgagcccccacctccc

SEQ ID NO: 92058 - DNA, 74 bp, Homo sapiens
acgtaaccaccctgcaggatgaggagggtgagctgcctgaccttccaggtgagcccccacctccccacgcactc

SEQ ID NO: 92059 - DNA, 74 bp, Homo sapiens
aggatgaggagggtgagctgcctgaccttccaggtgagcccccacctccccacgcactcccagccgccttgtcc

SEQ ID NO: 92060 - DNA, 72 bp, Homo sapiens
aggagggtgagctgcctgaccttccaggtgagcccccacctccccacgcactcccagccgccttgtcccctg

SEQ ID NO: 92061 - DNA, 73 bp, Homo sapiens
ccctgtggcccaggtccccagggcctgactctgcgtccccctccaggggccgaggtgctgctgtccagacaac

SEQ ID NO: 92062 - DNA, 74 bp, Homo sapiens
caggtccccagggcctgactctgcgtccccctccaggggccgaggtgctgctgtccagacaactcagtccgtcg

SEQ ID NO: 92063 - DNA, 74 bp, Homo sapiens
agggcctgactctgcgtccccctccaggggccgaggtgctgctgtccagacaactcagtccgtcggcccaggaa

SEQ ID NO: 92064 - DNA, 76 bp, Homo sapiens
tgactctgcgtccccctccaggggccgaggtgctgctgtccagacaactcagtccgtcggcccaggaacacctggc

SEQ ID NO: 92065 - DNA, 77 bp, Homo sapiens
ctccaggggccgaggtgctgctgtccagacaactcagtccgtcggcccaggaacacctggcctcgctgcaggaacag

SEQ ID NO: 92066 - DNA, 81 bp, Homo sapiens
ccgaggtgctgctgtccagacaactcagtccgtcggcccaggaacacctggcctcgctgcaggaacaggtggctgtgctca

SEQ ID NO: 92067 - DNA, 80 bp, Homo sapiens
ctgtccagacaactcagtccgtcggcccaggaacacctggcctcgctgcaggaacaggtggctgtgctcaccagacagaa

SEQ ID NO: 92068 - DNA, 78 bp, Homo sapiens
agacaactcagtccgtcggcccaggaacacctggcctcgctgcaggaacaggtggctgtgctcaccagacagaaccag

SEQ ID NO: 92069 - DNA, 78 bp, Homo sapiens
agtccgtcggcccaggaacacctggcctcgctgcaggaacaggtggctgtgctcaccagacagaaccaggaactgatg

SEQ ID NO: 92070 - DNA, 79 bp, Homo sapiens
gaacacctggcctcgctgcaggaacaggtggctgtgctcaccagacagaaccaggaactgatggagaaggtccaggtag

SEQ ID NO: 92071 - DNA, 78 bp, Homo sapiens
cctcgctgcaggaacaggtggctgtgctcaccagacagaaccaggaactgatggagaaggtccaggtagggaaagtga

SEQ ID NO: 92072 - DNA, 75 bp, Homo sapiens
aggaacaggtggctgtgctcaccagacagaaccaggaactgatggagaaggtccaggtagggaaagtgaggctgg

SEQ ID NO: 92073 - DNA, 79 bp, Homo sapiens
gctgtgctcaccagacagaaccaggaactgatggagaaggtccaggtagggaaagtgaggctggggacagatctgagga

SEQ ID NO: 92074 - DNA, 78 bp, Homo sapiens
tcacatcaactcctgccagactcctgccccccactccactccccagatcctggagaactttgagaaggacgagacaca

SEQ ID NO: 92075 - DNA, 75 bp, Homo sapiens
aactcctgccagactcctgccccccactccactccccagatcctggagaactttgagaaggacgagacacagatg

SEQ ID NO: 92076 - DNA, 74 bp, Homo sapiens
agactcctgccccccactccactccccagatcctggagaactttgagaaggacgagacacagatggaagtggaa

SEQ ID NO: 92077 - DNA, 77 bp, Homo sapiens
ccactccactccccagatcctggagaactttgagaaggacgagacacagatggaagtggaagctttggcagaggtca

SEQ ID NO: 92078 - DNA, 76 bp, Homo sapiens
ctccccagatcctggagaactttgagaaggacgagacacagatggaagtggaagctttggcagaggtcatccctct

SEQ ID NO: 92079 - DNA, 79 bp, Homo sapiens
tggagaactttgagaaggacgagacacagatggaagtggaagctttggcagaggtcatccctcttgccctctatgactc

SEQ ID NO: 92080 - DNA, 78 bp, Homo sapiens
aactttgagaaggacgagacacagatggaagtggaagctttggcagaggtcatccctcttgccctctatgactctctc

SEQ ID NO: 92081 - DNA, 78 bp, Homo sapiens
gagacacagatggaagtggaagctttggcagaggtcatccctcttgccctctatgactctctccgggccgagtttgac

SEQ ID NO: 92082 - DNA, 76 bp, Homo sapiens
atggaagtggaagctttggcagaggtcatccctcttgccctctatgactctctccgggccgagtttgaccagctac

SEQ ID NO: 92083 - DNA, 79 bp, Homo sapiens
aagctttggcagaggtcatccctcttgccctctatgactctctccgggccgagtttgaccagctacgcaggcagcacgc

SEQ ID NO: 92084 - DNA, 81 bp, Homo sapiens
agaggtcatccctcttgccctctatgactctctccgggccgagtttgaccagctacgcaggcagcacgctgaggccctgca

SEQ ID NO: 92085 - DNA, 80 bp, Homo sapiens
accagctacgcaggcagcacgctgaggccctgcaggccctgaggcagcaggagacacgagaggtccccagagaagagggg

SEQ ID NO: 92086 - DNA, 80 bp, Homo sapiens
aggcagcacgctgaggccctgcaggccctgaggcagcaggagacacgagaggtccccagagaagagggggcagcctgtgg

SEQ ID NO: 92087 - DNA, 77 bp, Homo sapiens
aggccctgcaggccctgaggcagcaggagacacgagaggtccccagagaagagggggcagcctgtggggagagtgag

SEQ ID NO: 92088 - DNA, 77 bp, Homo sapiens
aggccctgaggcagcaggagacacgagaggtccccagagaagagggggcagcctgtggggagagtgaggttgctgga

SEQ ID NO: 92089 - DNA, 73 bp, Homo sapiens
cacgagaggtccccagagaagagggggcagcctgtggggagagtgaggttgctggagccacggccaccaaaaa

SEQ ID NO: 92090 - DNA, 72 bp, Homo sapiens
tccccagagaagagggggcagcctgtggggagagtgaggttgctggagccacggccaccaaaaacgggccaa

SEQ ID NO: 92091 - DNA, 71 bp, Homo sapiens
aagagggggcagcctgtggggagagtgaggttgctggagccacggccaccaaaaacgggccaacccacatg

SEQ ID NO: 92092 - DNA, 74 bp, Homo sapiens
cctgtggggagagtgaggttgctggagccacggccaccaaaaacgggccaacccacatggagctaaatggctca

SEQ ID NO: 92093 - DNA, 76 bp, Homo sapiens
agagtgaggttgctggagccacggccaccaaaaacgggccaacccacatggagctaaatggctcagtggctccaga

SEQ ID NO: 92094 - DNA, 69 bp, Homo sapiens
acggccaccaaaaacgggccaacccacatggagctaaatggctcagtggctccagaaaccaaagttaac

SEQ ID NO: 92095 - DNA, 70 bp, Homo sapiens
aaaaacgggccaacccacatggagctaaatggctcagtggctccagaaaccaaagttaacggagccgaga

SEQ ID NO: 92096 - DNA, 75 bp, Homo sapiens
ccaacccacatggagctaaatggctcagtggctccagaaaccaaagttaacggagccgagaccatagatgaggag

SEQ ID NO: 92097 - DNA, 78 bp, Homo sapiens
agctaaatggctcagtggctccagaaaccaaagttaacggagccgagaccatagatgaggaggctgcaggagatgaaa

SEQ ID NO: 92098 - DNA, 78 bp, Homo sapiens
aatggctcagtggctccagaaaccaaagttaacggagccgagaccatagatgaggaggctgcaggagatgaaaccatg

SEQ ID NO: 92099 - DNA, 77 bp, Homo sapiens
tccagaaaccaaagttaacggagccgagaccatagatgaggaggctgcaggagatgaaaccatggaagccaggacta

SEQ ID NO: 92100 - DNA, 81 bp, Homo sapiens
agaccatagatgaggaggctgcaggagatgaaaccatggaagccaggactatggaagctgaggccacgggagccgaggcca

SEQ ID NO: 92101 - DNA, 77 bp, Homo sapiens
aggagatgaaaccatggaagccaggactatggaagctgaggccacgggagccgaggccacgggagctgaggccacag

SEQ ID NO: 92102 - DNA, 76 bp, Homo sapiens
aggactatggaagctgaggccacgggagccgaggccacgggagctgaggccacaggagccaaggtcacagaaacaa

SEQ ID NO: 92103 - DNA, 74 bp, Homo sapiens
atggaagctgaggccacgggagccgaggccacgggagctgaggccacaggagccaaggtcacagaaacaaaacc

SEQ ID NO: 92104 - DNA, 71 bp, Homo sapiens
aggccacgggagccgaggccacgggagctgaggccacaggagccaaggtcacagaaacaaaacccacaggg

SEQ ID NO: 92105 - DNA, 74 bp, Homo sapiens
aggccacgggagctgaggccacaggagccaaggtcacagaaacaaaacccacaggggctgaggtcagagaaatg

SEQ ID NO: 92106 - DNA, 76 bp, Homo sapiens
agctgaggccacaggagccaaggtcacagaaacaaaacccacaggggctgaggtcagagaaatggagaccacagaa

SEQ ID NO: 92107 - DNA, 75 bp, Homo sapiens
acaggagccaaggtcacagaaacaaaacccacaggggctgaggtcagagaaatggagaccacagaagaagaagca

SEQ ID NO: 92108 - DNA, 74 bp, Homo sapiens
aggtcacagaaacaaaacccacaggggctgaggtcagagaaatggagaccacagaagaagaagcaaacatggaa

SEQ ID NO: 92109 - DNA, 72 bp, Homo sapiens
agaaacaaaacccacaggggctgaggtcagagaaatggagaccacagaagaagaagcaaacatggaaactaa

SEQ ID NO: 92110 - DNA, 74 bp, Homo sapiens
aacccacaggggctgaggtcagagaaatggagaccacagaagaagaagcaaacatggaaactaagcccacagga

SEQ ID NO: 92111 - DNA, 79 bp, Homo sapiens
agagaaatggagaccacagaagaagaagcaaacatggaaactaagcccacaggagctcaggccacagacacagagacca

SEQ ID NO: 92112 - DNA, 76 bp, Homo sapiens
taagcccacaggagctcaggccacagacacagagaccacgggagtggaggccatgggggtggaggccacaaaaaca

SEQ ID NO: 92113 - DNA, 75 bp, Homo sapiens
agacacagagaccacgggagtggaggccatgggggtggaggccacaaaaacaaaagcagaggaagcagaaatgca

SEQ ID NO: 92114 - DNA, 72 bp, Homo sapiens
agtggaggccatgggggtggaggccacaaaaacaaaagcagaggaagcagaaatgcaggcctacggagtggg

SEQ ID NO: 92115 - DNA, 75 bp, Homo sapiens
atgggggtggaggccacaaaaacaaaagcagaggaagcagaaatgcaggcctacggagtgggtgctgggcaagca

SEQ ID NO: 92116 - DNA, 76 bp, Homo sapiens
aaaacaaaagcagaggaagcagaaatgcaggcctacggagtgggtgctgggcaagcagagcccccagtcacaggga

SEQ ID NO: 92117 - DNA, 77 bp, Homo sapiens
aggaagcagaaatgcaggcctacggagtgggtgctgggcaagcagagcccccagtcacagggaccacaaacatggag

SEQ ID NO: 92118 - DNA, 76 bp, Homo sapiens
agaaatgcaggcctacggagtgggtgctgggcaagcagagcccccagtcacagggaccacaaacatggaggccacg

SEQ ID NO: 92119 - DNA, 76 bp, Homo sapiens
tacggagtgggtgctgggcaagcagagcccccagtcacagggaccacaaacatggaggccacgggctctagggcca

SEQ ID NO: 92120 - DNA, 78 bp, Homo sapiens
tgctgggcaagcagagcccccagtcacagggaccacaaacatggaggccacgggctctagggccacagggatggaatc

SEQ ID NO: 92121 - DNA, 75 bp, Homo sapiens
aagcagagcccccagtcacagggaccacaaacatggaggccacgggctctagggccacagggatggaatccacag

SEQ ID NO: 92122 - DNA, 75 bp, Homo sapiens
tctagggccacagggatggaatccacaggagtcagtgccacaggtgtggagaacccaggggtagaggccacggtc

SEQ ID NO: 92123 - DNA, 74 bp, Homo sapiens
atggaatccacaggagtcagtgccacaggtgtggagaacccaggggtagaggccacggtcccggggatctctgc

SEQ ID NO: 92124 - DNA, 74 bp, Homo sapiens
atccacaggagtcagtgccacaggtgtggagaacccaggggtagaggccacggtcccggggatctctgctggcc

SEQ ID NO: 92125 - DNA, 73 bp, Homo sapiens
agtgccacaggtgtggagaacccaggggtagaggccacggtcccggggatctctgctggccccatcctacatc

SEQ ID NO: 92126 - DNA, 72 bp, Homo sapiens
aggtgtggagaacccaggggtagaggccacggtcccggggatctctgctggccccatcctacatcctggtgc

SEQ ID NO: 92127 - DNA, 74 bp, Homo sapiens
caggggtagaggccacggtcccggggatctctgctggccccatcctacatcctggtgccgcagaggcctcggaa

SEQ ID NO: 92128 - DNA, 74 bp, Homo sapiens
aggccacggtcccggggatctctgctggccccatcctacatcctggtgccgcagaggcctcggaaaagcttcaa

SEQ ID NO: 92129 - DNA, 78 bp, Homo sapiens
tcccggggatctctgctggccccatcctacatcctggtgccgcagaggcctcggaaaagcttcaagtagagctggaga

SEQ ID NO: 92130 - DNA, 79 bp, Homo sapiens
atctctgctggccccatcctacatcctggtgccgcagaggcctcggaaaagcttcaagtagagctggagaccaggatcc

SEQ ID NO: 92131 - DNA, 78 bp, Homo sapiens
catcctacatcctggtgccgcagaggcctcggaaaagcttcaagtagagctggagaccaggatccgtggcttggagga

SEQ ID NO: 92132 - DNA, 78 bp, Homo sapiens
tacatcctggtgccgcagaggcctcggaaaagcttcaagtagagctggagaccaggatccgtggcttggaggaggctc

SEQ ID NO: 92133 - DNA, 76 bp, Homo sapiens
cagaggcctcggaaaagcttcaagtagagctggagaccaggatccgtggcttggaggaggctctccggcagcggga

SEQ ID NO: 92134 - DNA, 75 bp, Homo sapiens
ctcggaaaagcttcaagtagagctggagaccaggatccgtggcttggaggaggctctccggcagcgggagcggga

SEQ ID NO: 92135 - DNA, 79 bp, Homo sapiens
agcttcaagtagagctggagaccaggatccgtggcttggaggaggctctccggcagcgggagcgggaggcagctgcgga

SEQ ID NO: 92136 - DNA, 79 bp, Homo sapiens
agctggagaccaggatccgtggcttggaggaggctctccggcagcgggagcgggaggcagctgcggagctggaggcggc

SEQ ID NO: 92137 - DNA, 76 bp, Homo sapiens
accaggatccgtggcttggaggaggctctccggcagcgggagcgggaggcagctgcggagctggaggcggccctgg

SEQ ID NO: 92138 - DNA, 76 bp, Homo sapiens
ggaggctctccggcagcgggagcgggaggcagctgcggagctggaggcggccctggggaagtgcgaggccgcggag

SEQ ID NO: 92139 - DNA, 76 bp, Homo sapiens
cggcagcgggagcgggaggcagctgcggagctggaggcggccctggggaagtgcgaggccgcggaggccgaggcag

SEQ ID NO: 92140 - DNA, 75 bp, Homo sapiens
ggccgaggcaggccggctgcgagagcgtgtccgcgaggccgagggcagcggggccagcgggggcggtggcggtga

SEQ ID NO: 92141 - DNA, 75 bp, Homo sapiens
aggccggctgcgagagcgtgtccgcgaggccgagggcagcggggccagcgggggcggtggcggtgacaccacaca

SEQ ID NO: 92142 - DNA, 77 bp, Homo sapiens
ctgcgagagcgtgtccgcgaggccgagggcagcggggccagcgggggcggtggcggtgacaccacacagctgcgggc

SEQ ID NO: 92143 - DNA, 75 bp, Homo sapiens
tgtccgcgaggccgagggcagcggggccagcgggggcggtggcggtgacaccacacagctgcgggcggccctgga

SEQ ID NO: 92144 - DNA, 74 bp, Homo sapiens
aggccgagggcagcggggccagcgggggcggtggcggtgacaccacacagctgcgggcggccctggagcaggcc

SEQ ID NO: 92145 - DNA, 72 bp, Homo sapiens
gggccagcgggggcggtggcggtgacaccacacagctgcgggcggccctggagcaggcccgggaggacctcc

SEQ ID NO: 92146 - DNA, 72 bp, Homo sapiens
gggcggtggcggtgacaccacacagctgcgggcggccctggagcaggcccgggaggacctccgagaccggga

SEQ ID NO: 92147 - DNA, 72 bp, Homo sapiens
gtggcggtgacaccacacagctgcgggcggccctggagcaggcccgggaggacctccgagaccgggactccc

SEQ ID NO: 92148 - DNA, 71 bp, Homo sapiens
accacacagctgcgggcggccctggagcaggcccgggaggacctccgagaccgggactcccgcctgcggga

SEQ ID NO: 92149 - DNA, 71 bp, Homo sapiens
ctgcgggcggccctggagcaggcccgggaggacctccgagaccgggactcccgcctgcgggagctggaggc

SEQ ID NO: 92150 - DNA, 72 bp, Homo sapiens
gagcaggcccgggaggacctccgagaccgggactcccgcctgcgggagctggaggcggcctcggcctgcctg

SEQ ID NO: 92151 - DNA, 71 bp, Homo sapiens
cccgggaggacctccgagaccgggactcccgcctgcgggagctggaggcggcctcggcctgcctggatgag

SEQ ID NO: 92152 - DNA, 74 bp, Homo sapiens
acctccgagaccgggactcccgcctgcgggagctggaggcggcctcggcctgcctggatgaggctcgggccagc

SEQ ID NO: 92153 - DNA, 78 bp, Homo sapiens
ccgcctgcgggagctggaggcggcctcggcctgcctggatgaggctcgggccagccggctgctggcggaggaggaggc

SEQ ID NO: 92154 - DNA, 78 bp, Homo sapiens
agctggaggcggcctcggcctgcctggatgaggctcgggccagccggctgctggcggaggaggaggcgcggggcctgc

SEQ ID NO: 92155 - DNA, 77 bp, Homo sapiens
cctcggcctgcctggatgaggctcgggccagccggctgctggcggaggaggaggcgcggggcctgcgggccgagctg

SEQ ID NO: 92156 - DNA, 75 bp, Homo sapiens
cggaggaggaggcgcggggcctgcgggccgagctggcccagcgggaggaggcgcggctggagcagagccgggagc

SEQ ID NO: 92157 - DNA, 75 bp, Homo sapiens
aggaggcgcggggcctgcgggccgagctggcccagcgggaggaggcgcggctggagcagagccgggagctggagg

SEQ ID NO: 92158 - DNA, 79 bp, Homo sapiens
agctggcccagcgggaggaggcgcggctggagcagagccgggagctggaggttctgcgggagcagctggccacggccag

SEQ ID NO: 92159 - DNA, 77 bp, Homo sapiens
agcgggaggaggcgcggctggagcagagccgggagctggaggttctgcgggagcagctggccacggccagggccacg

SEQ ID NO: 92160 - DNA, 76 bp, Homo sapiens
aggaggcgcggctggagcagagccgggagctggaggttctgcgggagcagctggccacggccagggccacggggga

SEQ ID NO: 92161 - DNA, 80 bp, Homo sapiens
tggagcagagccgggagctggaggttctgcgggagcagctggccacggccagggccacgggggagcagcagcgcacggcg

SEQ ID NO: 92162 - DNA, 77 bp, Homo sapiens
ggagctggaggttctgcgggagcagctggccacggccagggccacgggggagcagcagcgcacggcggccgcggaac

SEQ ID NO: 92163 - DNA, 77 bp, Homo sapiens
tggaggttctgcgggagcagctggccacggccagggccacgggggagcagcagcgcacggcggccgcggaactgggc

SEQ ID NO: 92164 - DNA, 74 bp, Homo sapiens
cgggagcagctggccacggccagggccacgggggagcagcagcgcacggcggccgcggaactgggccgggcacg

SEQ ID NO: 92165 - DNA, 72 bp, Homo sapiens
agggccacgggggagcagcagcgcacggcggccgcggaactgggccgggcacgggacgccgctgaggcccga

SEQ ID NO: 92166 - DNA, 79 bp, Homo sapiens
gggagcagcagcgcacggcggccgcggaactgggccgggcacgggacgccgctgaggcccgagtggctgagctgcctgc

SEQ ID NO: 92167 - DNA, 76 bp, Homo sapiens
cacggcggccgcggaactgggccgggcacgggacgccgctgaggcccgagtggctgagctgcctgcggcctgcgag

SEQ ID NO: 92168 - DNA, 79 bp, Homo sapiens
tgggccgggcacgggacgccgctgaggcccgagtggctgagctgcctgcggcctgcgaggaggcgcggcagggcctggc

SEQ ID NO: 92169 - DNA, 79 bp, Homo sapiens
acgggacgccgctgaggcccgagtggctgagctgcctgcggcctgcgaggaggcgcggcagggcctggccgagctgcgg

SEQ ID NO: 92170 - DNA, 80 bp, Homo sapiens
ctgaggcccgagtggctgagctgcctgcggcctgcgaggaggcgcggcagggcctggccgagctgcgggaggcctccgag

SEQ ID NO: 92171 - DNA, 77 bp, Homo sapiens
tgcctgcggcctgcgaggaggcgcggcagggcctggccgagctgcgggaggcctccgaggccctccgccagtccgtg

SEQ ID NO: 92172 - DNA, 74 bp, Homo sapiens
cctgcgaggaggcgcggcagggcctggccgagctgcgggaggcctccgaggccctccgccagtccgtggtgccg

SEQ ID NO: 92173 - DNA, 76 bp, Homo sapiens
aggcgcggcagggcctggccgagctgcgggaggcctccgaggccctccgccagtccgtggtgccggcctctgagca

SEQ ID NO: 92174 - DNA, 76 bp, Homo sapiens
cctggccgagctgcgggaggcctccgaggccctccgccagtccgtggtgccggcctctgagcaccgccggctgcag

SEQ ID NO: 92175 - DNA, 76 bp, Homo sapiens
ccgagctgcgggaggcctccgaggccctccgccagtccgtggtgccggcctctgagcaccgccggctgcaggagga

SEQ ID NO: 92176 - DNA, 75 bp, Homo sapiens
ggaggcctccgaggccctccgccagtccgtggtgccggcctctgagcaccgccggctgcaggaggaggccctgga

SEQ ID NO: 92177 - DNA, 75 bp, Homo sapiens
aggccctccgccagtccgtggtgccggcctctgagcaccgccggctgcaggaggaggccctggagctgcggggcc

SEQ ID NO: 92178 - DNA, 77 bp, Homo sapiens
agtccgtggtgccggcctctgagcaccgccggctgcaggaggaggccctggagctgcggggccgggcagccagtctg

SEQ ID NO: 92179 - DNA, 80 bp, Homo sapiens
tgccggcctctgagcaccgccggctgcaggaggaggccctggagctgcggggccgggcagccagtctggagcaggaggtg

SEQ ID NO: 92180 - DNA, 80 bp, Homo sapiens
tctgagcaccgccggctgcaggaggaggccctggagctgcggggccgggcagccagtctggagcaggaggtggtggccac

SEQ ID NO: 92181 - DNA, 77 bp, Homo sapiens
ctgcaggaggaggccctggagctgcggggccgggcagccagtctggagcaggaggtggtggccacgggcaaggaggc

SEQ ID NO: 92182 - DNA, 73 bp, Homo sapiens
aggccctggagctgcggggccgggcagccagtctggagcaggaggtggtggccacgggcaaggaggccgcccg

SEQ ID NO: 92183 - DNA, 76 bp, Homo sapiens
agctgcggggccgggcagccagtctggagcaggaggtggtggccacgggcaaggaggccgcccggctgcgcgcgga

SEQ ID NO: 92184 - DNA, 77 bp, Homo sapiens
cgggcagccagtctggagcaggaggtggtggccacgggcaaggaggccgcccggctgcgcgcggagctggagcggga

SEQ ID NO: 92185 - DNA, 79 bp, Homo sapiens
agtctggagcaggaggtggtggccacgggcaaggaggccgcccggctgcgcgcggagctggagcgggagcgtgtgtgca

SEQ ID NO: 92186 - DNA, 78 bp, Homo sapiens
aggaggtggtggccacgggcaaggaggccgcccggctgcgcgcggagctggagcgggagcgtgtgtgcagcgtggcgc

SEQ ID NO: 92187 - DNA, 81 bp, Homo sapiens
gccacgggcaaggaggccgcccggctgcgcgcggagctggagcgggagcgtgtgtgcagcgtggcgctctcggagcacgaa

SEQ ID NO: 92188 - DNA, 81 bp, Homo sapiens
aaggaggccgcccggctgcgcgcggagctggagcgggagcgtgtgtgcagcgtggcgctctcggagcacgaacgcatcgtg

SEQ ID NO: 92189 - DNA, 83 bp, Homo sapiens
cccggctgcgcgcggagctggagcgggagcgtgtgtgcagcgtggcgctctcggagcacgaacgcatcgtgggcaccctgcag

SEQ ID NO: 92190 - DNA, 82 bp, Homo sapiens
cgcggagctggagcgggagcgtgtgtgcagcgtggcgctctcggagcacgaacgcatcgtgggcaccctgcaggccaacgtg

SEQ ID NO: 92191 - DNA, 82 bp, Homo sapiens
agcgggagcgtgtgtgcagcgtggcgctctcggagcacgaacgcatcgtgggcaccctgcaggccaacgtggcccagctgga

SEQ ID NO: 92192 - DNA, 82 bp, Homo sapiens
agcgtgtgtgcagcgtggcgctctcggagcacgaacgcatcgtgggcaccctgcaggccaacgtggcccagctggaggggca

SEQ ID NO: 92193 - DNA, 80 bp, Homo sapiens
agcgtggcgctctcggagcacgaacgcatcgtgggcaccctgcaggccaacgtggcccagctggaggggcagctggagga

SEQ ID NO: 92194 - DNA, 79 bp, Homo sapiens
ctctcggagcacgaacgcatcgtgggcaccctgcaggccaacgtggcccagctggaggggcagctggaggagctgggac

SEQ ID NO: 92195 - DNA, 82 bp, Homo sapiens
tgggcaccctgcaggccaacgtggcccagctggaggggcagctggaggagctgggacggcggcatgagaagaccagcgcaga

SEQ ID NO: 92196 - DNA, 79 bp, Homo sapiens
aggccaacgtggcccagctggaggggcagctggaggagctgggacggcggcatgagaagaccagcgcagaggtcttcca

SEQ ID NO: 92197 - DNA, 79 bp, Homo sapiens
aacgtggcccagctggaggggcagctggaggagctgggacggcggcatgagaagaccagcgcagaggtcttccaggtga

SEQ ID NO: 92198 - DNA, 82 bp, Homo sapiens
tggaggggcagctggaggagctgggacggcggcatgagaagaccagcgcagaggtcttccaggtgagcagggctggtcacca

SEQ ID NO: 92199 - DNA, 78 bp, Homo sapiens
tggaggagctgggacggcggcatgagaagaccagcgcagaggtcttccaggtgagcagggctggtcaccacccgggcc

SEQ ID NO: 92200 - DNA, 84 bp, Homo sapiens
atcattggagtcttagtgtcctgagagtcatgcgtgggcttgggccacaggtgcagcgtgaggccctgttcatgaagagtgagc

SEQ ID NO: 92201 - DNA, 85 bp, Homo sapiens
ttagtgtcctgagagtcatgcgtgggcttgggccacaggtgcagcgtgaggccctgttcatgaagagtgagcgacacgcagccga

SEQ ID NO: 92202 - DNA, 87 bp, Homo sapiens
ctgagagtcatgcgtgggcttgggccacaggtgcagcgtgaggccctgttcatgaagagtgagcgacacgcagccgaggcacagctg

SEQ ID NO: 92203 - DNA, 87 bp, Homo sapiens
atgcgtgggcttgggccacaggtgcagcgtgaggccctgttcatgaagagtgagcgacacgcagccgaggcacagctggccacagca

SEQ ID NO: 92204 - DNA, 90 bp, Homo sapiens
ttgggccacaggtgcagcgtgaggccctgttcatgaagagtgagcgacacgcagccgaggcacagctggccacagcagagcagcagctac

SEQ ID NO: 92205 - DNA, 85 bp, Homo sapiens
agcgtgaggccctgttcatgaagagtgagcgacacgcagccgaggcacagctggccacagcagagcagcagctacgggggctacg

SEQ ID NO: 92206 - DNA, 83 bp, Homo sapiens
ccctgttcatgaagagtgagcgacacgcagccgaggcacagctggccacagcagagcagcagctacgggggctacggaccgag

SEQ ID NO: 92207 - DNA, 84 bp, Homo sapiens
tcatgaagagtgagcgacacgcagccgaggcacagctggccacagcagagcagcagctacgggggctacggaccgaggcggaaa

SEQ ID NO: 92208 - DNA, 82 bp, Homo sapiens
tgagcgacacgcagccgaggcacagctggccacagcagagcagcagctacgggggctacggaccgaggcggaaagggctcgc

SEQ ID NO: 92209 - DNA, 78 bp, Homo sapiens
ccgaggcacagctggccacagcagagcagcagctacgggggctacggaccgaggcggaaagggctcgccaggcccaga

SEQ ID NO: 92210 - DNA, 76 bp, Homo sapiens
acagctggccacagcagagcagcagctacgggggctacggaccgaggcggaaagggctcgccaggcccagagccgg

SEQ ID NO: 92211 - DNA, 73 bp, Homo sapiens
agcagagcagcagctacgggggctacggaccgaggcggaaagggctcgccaggcccagagccgggcccaggag

SEQ ID NO: 92212 - DNA, 71 bp, Homo sapiens
agcagctacgggggctacggaccgaggcggaaagggctcgccaggcccagagccgggcccaggaggctctg

SEQ ID NO: 92213 - DNA, 71 bp, Homo sapiens
ctacggaccgaggcggaaagggctcgccaggcccagagccgggcccaggaggctctggacaaggccaagga

SEQ ID NO: 92214 - DNA, 72 bp, Homo sapiens
aggcggaaagggctcgccaggcccagagccgggcccaggaggctctggacaaggccaaggagaaggacaaga

SEQ ID NO: 92215 - DNA, 71 bp, Homo sapiens
aaagggctcgccaggcccagagccgggcccaggaggctctggacaaggccaaggagaaggacaagaaggtg

SEQ ID NO: 92216 - DNA, 70 bp, Homo sapiens
aggcccagagccgggcccaggaggctctggacaaggccaaggagaaggacaagaaggtgggtgccccctc

SEQ ID NO: 92217 - DNA, 73 bp, Homo sapiens
gggcccaggaggctctggacaaggccaaggagaaggacaagaaggtgggtgccccctctcccacactcagtca

SEQ ID NO: 92218 - DNA, 72 bp, Homo sapiens
aggaggctctggacaaggccaaggagaaggacaagaaggtgggtgccccctctcccacactcagtcagggag

SEQ ID NO: 92219 - DNA, 81 bp, Homo sapiens
ccagctctgggcttagggtgatcgctgacagcacctgcaccctcagatcacagaactctccaaagaagtcttcaatcttaa

SEQ ID NO: 92220 - DNA, 80 bp, Homo sapiens
tctgggcttagggtgatcgctgacagcacctgcaccctcagatcacagaactctccaaagaagtcttcaatcttaaggaa

SEQ ID NO: 92221 - DNA, 80 bp, Homo sapiens
ggtgatcgctgacagcacctgcaccctcagatcacagaactctccaaagaagtcttcaatcttaaggaagccttgaagga

SEQ ID NO: 92222 - DNA, 78 bp, Homo sapiens
acagcacctgcaccctcagatcacagaactctccaaagaagtcttcaatcttaaggaagccttgaaggagcagccggc

SEQ ID NO: 92223 - DNA, 74 bp, Homo sapiens
accctcagatcacagaactctccaaagaagtcttcaatcttaaggaagccttgaaggagcagccggccgccctc

SEQ ID NO: 92224 - DNA, 73 bp, Homo sapiens
atcacagaactctccaaagaagtcttcaatcttaaggaagccttgaaggagcagccggccgccctcgccaccc

SEQ ID NO: 92225 - DNA, 73 bp, Homo sapiens
tctccaaagaagtcttcaatcttaaggaagccttgaaggagcagccggccgccctcgccacccctgaggtgga

SEQ ID NO: 92226 - DNA, 72 bp, Homo sapiens
aagtcttcaatcttaaggaagccttgaaggagcagccggccgccctcgccacccctgaggtggaggctctcc

SEQ ID NO: 92227 - DNA, 73 bp, Homo sapiens
ttaaggaagccttgaaggagcagccggccgccctcgccacccctgaggtggaggctctccgtgaccaggtgaa

SEQ ID NO: 92228 - DNA, 75 bp, Homo sapiens
cttgaaggagcagccggccgccctcgccacccctgaggtggaggctctccgtgaccaggtgaaggatttacagca

SEQ ID NO: 92229 - DNA, 76 bp, Homo sapiens
ccggccgccctcgccacccctgaggtggaggctctccgtgaccaggtgaaggatttacagcagcagctgcaggtaa

SEQ ID NO: 92230 - DNA, 78 bp, Homo sapiens
ctcgccacccctgaggtggaggctctccgtgaccaggtgaaggatttacagcagcagctgcaggtaaggactgggcca

SEQ ID NO: 92231 - DNA, 77 bp, Homo sapiens
ccctgaggtggaggctctccgtgaccaggtgaaggatttacagcagcagctgcaggtaaggactgggccacgcaggg

SEQ ID NO: 92232 - DNA, 79 bp, Homo sapiens
gctctccgtgaccaggtgaaggatttacagcagcagctgcaggtaaggactgggccacgcaggggccaggggaccatca

SEQ ID NO: 92233 - DNA, 79 bp, Homo sapiens
ttttggtgtgttttgctcagtggggaggtgctcctgctcttctgagcgccccttcctcatgcccacaggaagctgccag

SEQ ID NO: 92234 - DNA, 80 bp, Homo sapiens
ttttgctcagtggggaggtgctcctgctcttctgagcgccccttcctcatgcccacaggaagctgccagggaccactcca

SEQ ID NO: 92235 - DNA, 79 bp, Homo sapiens
aggtgctcctgctcttctgagcgccccttcctcatgcccacaggaagctgccagggaccactccagcgtggtggctttg

SEQ ID NO: 92236 - DNA, 80 bp, Homo sapiens
tcctgctcttctgagcgccccttcctcatgcccacaggaagctgccagggaccactccagcgtggtggctttgtacagaa

SEQ ID NO: 92237 - DNA, 79 bp, Homo sapiens
tctgagcgccccttcctcatgcccacaggaagctgccagggaccactccagcgtggtggctttgtacagaagccacctc

SEQ ID NO: 92238 - DNA, 81 bp, Homo sapiens
ttcctcatgcccacaggaagctgccagggaccactccagcgtggtggctttgtacagaagccacctcctatatgccattca

SEQ ID NO: 92239 - DNA, 79 bp, Homo sapiens
acaggaagctgccagggaccactccagcgtggtggctttgtacagaagccacctcctatatgccattcaggtgagtggc

SEQ ID NO: 92240 - DNA, 78 bp, Homo sapiens
ccagggaccactccagcgtggtggctttgtacagaagccacctcctatatgccattcaggtgagtggcccagctcctg

SEQ ID NO: 92241 - DNA, 77 bp, Homo sapiens
accactccagcgtggtggctttgtacagaagccacctcctatatgccattcaggtgagtggcccagctcctgggtac

SEQ ID NO: 92242 - DNA, 75 bp, Homo sapiens
gtggctttgtacagaagccacctcctatatgccattcaggtgagtggcccagctcctgggtacccggtggctttg

SEQ ID NO: 92243 - DNA, 76 bp, Homo sapiens
tttgtacagaagccacctcctatatgccattcaggtgagtggcccagctcctgggtacccggtggctttgggcata

SEQ ID NO: 92244 - DNA, 75 bp, Homo sapiens
ccatggagggtatactcagggtcttcctctactcccccaaccctagggccagatggatgaagatgtgcagcggat

SEQ ID NO: 92245 - DNA, 79 bp, Homo sapiens
tatactcagggtcttcctctactcccccaaccctagggccagatggatgaagatgtgcagcggattctcagccagattc

SEQ ID NO: 92246 - DNA, 82 bp, Homo sapiens
agggtcttcctctactcccccaaccctagggccagatggatgaagatgtgcagcggattctcagccagattctgcagatgca

SEQ ID NO: 92247 - DNA, 84 bp, Homo sapiens
cctctactcccccaaccctagggccagatggatgaagatgtgcagcggattctcagccagattctgcagatgcagagactccag

SEQ ID NO: 92248 - DNA, 88 bp, Homo sapiens
ccctagggccagatggatgaagatgtgcagcggattctcagccagattctgcagatgcagagactccaggctcagggccgctgagaaa

SEQ ID NO: 92249 - DNA, 89 bp, Homo sapiens
agatggatgaagatgtgcagcggattctcagccagattctgcagatgcagagactccaggctcagggccgctgagaaaggccaggccca

SEQ ID NO: 92250 - DNA, 88 bp, Homo sapiens
atgaagatgtgcagcggattctcagccagattctgcagatgcagagactccaggctcagggccgctgagaaaggccaggcccagtggc

SEQ ID NO: 92251 - DNA, 85 bp, Homo sapiens
agcggattctcagccagattctgcagatgcagagactccaggctcagggccgctgagaaaggccaggcccagtggctacactgac

SEQ ID NO: 92252 - DNA, 86 bp, Homo sapiens
tctcagccagattctgcagatgcagagactccaggctcagggccgctgagaaaggccaggcccagtggctacactgaccacaccca

SEQ ID NO: 92253 - DNA, 82 bp, Homo sapiens
attctgcagatgcagagactccaggctcagggccgctgagaaaggccaggcccagtggctacactgaccacacccacgcagg

SEQ ID NO: 92254 - DNA, 77 bp, Homo sapiens
agagactccaggctcagggccgctgagaaaggccaggcccagtggctacactgaccacacccacgcagggacctcac

SEQ ID NO: 92255 - DNA, 74 bp, Homo sapiens
ccaggctcagggccgctgagaaaggccaggcccagtggctacactgaccacacccacgcagggacctcaccccc

SEQ ID NO: 92256 - DNA, 73 bp, Homo sapiens
ccaggcccagtggctacactgaccacacccacgcagggacctcacccccctgcaggccccttgcagaccggct

SEQ ID NO: 92257 - DNA, 76 bp, Homo sapiens
tggctacactgaccacacccacgcagggacctcacccccctgcaggccccttgcagaccggcttcacttggcttca

SEQ ID NO: 92258 - DNA, 73 bp, Homo sapiens
actgaccacacccacgcagggacctcacccccctgcaggccccttgcagaccggcttcacttggcttcacttg

SEQ ID NO: 92259 - DNA, 72 bp, Homo sapiens
acccacgcagggacctcacccccctgcaggccccttgcagaccggcttcacttggcttcacttggccctatc

SEQ ID NO: 92260 - DNA, 76 bp, Homo sapiens
ctcacccccctgcaggccccttgcagaccggcttcacttggcttcacttggccctatccaggcccatgcacttgga

SEQ ID NO: 92261 - DNA, 77 bp, Homo sapiens
ccctgcaggccccttgcagaccggcttcacttggcttcacttggccctatccaggcccatgcacttggagaccagcc

SEQ ID NO: 92262 - DNA, 76 bp, Homo sapiens
agaccagcctggttccctgcccgaccacccccagctggctccatcaccccacctggtctctgcacgcacacactgg

SEQ ID NO: 92263 - DNA, 78 bp, Homo sapiens
ctggttccctgcccgaccacccccagctggctccatcaccccacctggtctctgcacgcacacactggtcagtctgga

SEQ ID NO: 92264 - DNA, 76 bp, Homo sapiens
cctgcccgaccacccccagctggctccatcaccccacctggtctctgcacgcacacactggtcagtctggacccgg

SEQ ID NO: 92265 - DNA, 78 bp, Homo sapiens
ccagctggctccatcaccccacctggtctctgcacgcacacactggtcagtctggacccgggccgtgactgcccctcc

SEQ ID NO: 92266 - DNA, 77 bp, Homo sapiens
tggctccatcaccccacctggtctctgcacgcacacactggtcagtctggacccgggccgtgactgcccctccccca

SEQ ID NO: 92267 - DNA, 73 bp, Homo sapiens
acctggtctctgcacgcacacactggtcagtctggacccgggccgtgactgcccctcccccaccaccggagac

SEQ ID NO: 92268 - DNA, 76 bp, Homo sapiens
gtctctgcacgcacacactggtcagtctggacccgggccgtgactgcccctcccccaccaccggagactgtgattc

SEQ ID NO: 92269 - DNA, 72 bp, Homo sapiens
acacactggtcagtctggacccgggccgtgactgcccctcccccaccaccggagactgtgattccctgtgtc

SEQ ID NO: 92270 - DNA, 74 bp, Homo sapiens
tcagtctggacccgggccgtgactgcccctcccccaccaccggagactgtgattccctgtgtcctccacatcca

SEQ ID NO: 92271 - DNA, 72 bp, Homo sapiens
acccgggccgtgactgcccctcccccaccaccggagactgtgattccctgtgtcctccacatccagacgcca

SEQ ID NO: 92272 - DNA, 73 bp, Homo sapiens
actgcccctcccccaccaccggagactgtgattccctgtgtcctccacatccagacgccagcccaggaataaa

SEQ ID NO: 92273 - DNA, 78 bp, Homo sapiens
cccaccaccggagactgtgattccctgtgtcctccacatccagacgccagcccaggaataaaggcattctgtgcacag

SEQ ID NO: 92274 - DNA, 78 bp, Homo sapiens
attccctgtgtcctccacatccagacgccagcccaggaataaaggcattctgtgcacagggccaacgcgtgccgtctc

SEQ ID NO: 92275 - DNA, 80 bp, Homo sapiens
tccacatccagacgccagcccaggaataaaggcattctgtgcacagggccaacgcgtgccgtctcgttgctgggcttcca

SEQ ID NO: 92276 - DNA, 79 bp, Homo sapiens
atccagacgccagcccaggaataaaggcattctgtgcacagggccaacgcgtgccgtctcgttgctgggcttccactgc

SEQ ID NO: 92277 - DNA, 72 bp, Homo sapiens
cgtcctggcaacgcctcccccaacccggggctcccacatttcagcaggtgccggagctggagctcccaccgc

SEQ ID NO: 92278 - DNA, 72 bp, Homo sapiens
tcccccaacccggggctcccacatttcagcaggtgccggagctggagctcccaccgccgccgcccgtgcctc

SEQ ID NO: 92279 - DNA, 73 bp, Homo sapiens
aacccggggctcccacatttcagcaggtgccggagctggagctcccaccgccgccgcccgtgcctccggctgc

SEQ ID NO: 92280 - DNA, 74 bp, Homo sapiens
acatttcagcaggtgccggagctggagctcccaccgccgccgcccgtgcctccggctgccggcgcccctgcctt

SEQ ID NO: 92281 - DNA, 76 bp, Homo sapiens
tcagcaggtgccggagctggagctcccaccgccgccgcccgtgcctccggctgccggcgcccctgcctttggctct

SEQ ID NO: 92282 - DNA, 72 bp, Homo sapiens
ccggagctggagctcccaccgccgccgcccgtgcctccggctgccggcgcccctgcctttggctcttcctcc

SEQ ID NO: 92283 - DNA, 71 bp, Homo sapiens
agctcccaccgccgccgcccgtgcctccggctgccggcgcccctgcctttggctcttcctccccactcgcc

SEQ ID NO: 92284 - DNA, 70 bp, Homo sapiens
cgccgcccgtgcctccggctgccggcgcccctgcctttggctcttcctccccactcgcccgctccccctg

SEQ ID NO: 92285 - DNA, 71 bp, Homo sapiens
gtgcctccggctgccggcgcccctgcctttggctcttcctccccactcgcccgctccccctggcggagccg

SEQ ID NO: 92286 - DNA, 70 bp, Homo sapiens
ctgccggcgcccctgcctttggctcttcctccccactcgcccgctccccctggcggagccggcgcgcccg

SEQ ID NO: 92287 - DNA, 70 bp, Homo sapiens
tgcctttggctcttcctccccactcgcccgctccccctggcggagccggcgcgcccggggtgccgctccc

SEQ ID NO: 92288 - DNA, 72 bp, Homo sapiens
ttcctccccactcgcccgctccccctggcggagccggcgcgcccggggtgccgctccctgcctggcgcgctc

SEQ ID NO: 92289 - DNA, 73 bp, Homo sapiens
actcgcccgctccccctggcggagccggcgcgcccggggtgccgctccctgcctggcgcgctccgcacctgga

SEQ ID NO: 92290 - DNA, 74 bp, Homo sapiens
tccccctggcggagccggcgcgcccggggtgccgctccctgcctggcgcgctccgcacctggaggtgccttgcc

SEQ ID NO: 92291 - DNA, 75 bp, Homo sapiens
tggcggagccggcgcgcccggggtgccgctccctgcctggcgcgctccgcacctggaggtgccttgcccctctcc

SEQ ID NO: 92292 - DNA, 74 bp, Homo sapiens
gcccggggtgccgctccctgcctggcgcgctccgcacctggaggtgccttgcccctctcctgcccacctcggaa

SEQ ID NO: 92293 - DNA, 76 bp, Homo sapiens
tgccgctccctgcctggcgcgctccgcacctggaggtgccttgcccctctcctgcccacctcggaatttccctgtg

SEQ ID NO: 92294 - DNA, 74 bp, Homo sapiens
cctggcgcgctccgcacctggaggtgccttgcccctctcctgcccacctcggaatttccctgtggctcctttga

SEQ ID NO: 92295 - DNA, 73 bp, Homo sapiens
tccgcacctggaggtgccttgcccctctcctgcccacctcggaatttccctgtggctcctttgatccttcgag

SEQ ID NO: 92296 - DNA, 72 bp, Homo sapiens
acctggaggtgccttgcccctctcctgcccacctcggaatttccctgtggctcctttgatccttcgagtctc

SEQ ID NO: 92297 - DNA, 73 bp, Homo sapiens
ttgcccctctcctgcccacctcggaatttccctgtggctcctttgatccttcgagtctccagctcctctccct

SEQ ID NO: 92298 - DNA, 73 bp, Homo sapiens
tgcccacctcggaatttccctgtggctcctttgatccttcgagtctccagctcctctcccttccacctgtttc

SEQ ID NO: 92299 - DNA, 70 bp, Homo sapiens
acctcggaatttccctgtggctcctttgatccttcgagtctccagctcctctcccttccacctgtttccc

SEQ ID NO: 92300 - DNA, 72 bp, Homo sapiens
ttccctgtggctcctttgatccttcgagtctccagctcctctcccttccacctgtttcccccaagaaaggca

SEQ ID NO: 92301 - DNA, 72 bp, Homo sapiens
tcctttgatccttcgagtctccagctcctctcccttccacctgtttcccccaagaaaggcaggatcctggtc

SEQ ID NO: 92302 - DNA, 71 bp, Homo sapiens
tcgagtctccagctcctctcccttccacctgtttcccccaagaaaggcaggatcctggtccctgctacgtt

SEQ ID NO: 92303 - DNA, 70 bp, Homo sapiens
tccagctcctctcccttccacctgtttcccccaagaaaggcaggatcctggtccctgctacgtttctggg

SEQ ID NO: 92304 - DNA, 70 bp, Homo sapiens
ctcccttccacctgtttcccccaagaaaggcaggatcctggtccctgctacgtttctggggccatggctg

SEQ ID NO: 92305 - DNA, 70 bp, Homo sapiens
cctgtttcccccaagaaaggcaggatcctggtccctgctacgtttctggggccatggctggtctgggccc

SEQ ID NO: 92306 - DNA, 73 bp, Homo sapiens
aaaggcaggatcctggtccctgctacgtttctggggccatggctggtctgggccccggcgtaggcgattcaga

SEQ ID NO: 92307 - DNA, 71 bp, Homo sapiens
aggatcctggtccctgctacgtttctggggccatggctggtctgggccccggcgtaggcgattcagagggg

SEQ ID NO: 92308 - DNA, 69 bp, Homo sapiens
tccctgctacgtttctggggccatggctggtctgggccccggcgtaggcgattcagaggggggaccccg

SEQ ID NO: 92309 - DNA, 67 bp, Homo sapiens
ttctggggccatggctggtctgggccccggcgtaggcgattcagaggggggaccccggcccctgttt

SEQ ID NO: 92310 - DNA, 67 bp, Homo sapiens
atggctggtctgggccccggcgtaggcgattcagaggggggaccccggcccctgttttgcagaaagg

SEQ ID NO: 92311 - DNA, 65 bp, Homo sapiens
gtctgggccccggcgtaggcgattcagaggggggaccccggcccctgttttgcagaaagggggcc

SEQ ID NO: 92312 - DNA, 68 bp, Homo sapiens
taggcgattcagaggggggaccccggcccctgttttgcagaaagggggccctgaggcagaaggtggtc

SEQ ID NO: 92313 - DNA, 67 bp, Homo sapiens
ttcagaggggggaccccggcccctgttttgcagaaagggggccctgaggcagaaggtggtccacgaa

SEQ ID NO: 92314 - DNA, 69 bp, Homo sapiens
accccggcccctgttttgcagaaagggggccctgaggcagaaggtggtccacgaagtcaagagccacaa

SEQ ID NO: 92315 - DNA, 74 bp, Homo sapiens
tgttttgcagaaagggggccctgaggcagaaggtggtccacgaagtcaagagccacaagttcaccgctcgcttc

SEQ ID NO: 92316 - DNA, 74 bp, Homo sapiens
agaaagggggccctgaggcagaaggtggtccacgaagtcaagagccacaagttcaccgctcgcttcttcaagca

SEQ ID NO: 92317 - DNA, 78 bp, Homo sapiens
ccctgaggcagaaggtggtccacgaagtcaagagccacaagttcaccgctcgcttcttcaagcagcccaccttctgca

SEQ ID NO: 92318 - DNA, 79 bp, Homo sapiens
agaaggtggtccacgaagtcaagagccacaagttcaccgctcgcttcttcaagcagcccaccttctgcagccactgcac

SEQ ID NO: 92319 - DNA, 80 bp, Homo sapiens
acgaagtcaagagccacaagttcaccgctcgcttcttcaagcagcccaccttctgcagccactgcaccgacttcatctgg

SEQ ID NO: 92320 - DNA, 80 bp, Homo sapiens
aagagccacaagttcaccgctcgcttcttcaagcagcccaccttctgcagccactgcaccgacttcatctggtgagggaa

SEQ ID NO: 92321 - DNA, 77 bp, Homo sapiens
aagttcaccgctcgcttcttcaagcagcccaccttctgcagccactgcaccgacttcatctggtgagggaagggggc

SEQ ID NO: 92322 - DNA, 77 bp, Homo sapiens
ctcgcttcttcaagcagcccaccttctgcagccactgcaccgacttcatctggtgagggaagggggctgggggactg

SEQ ID NO: 92323 - DNA, 76 bp, Homo sapiens
tcaagcagcccaccttctgcagccactgcaccgacttcatctggtgagggaagggggctgggggactgggggacga

SEQ ID NO: 92324 - DNA, 73 bp, Homo sapiens
agcgcaggccccctgtggctcgcagaggttgggggtccaggtacccctttctgcactgacctaggatccctga

SEQ ID NO: 92325 - DNA, 72 bp, Homo sapiens
ccctgtggctcgcagaggttgggggtccaggtacccctttctgcactgacctaggatccctgactcttccag

SEQ ID NO: 92326 - DNA, 70 bp, Homo sapiens
cagaggttgggggtccaggtacccctttctgcactgacctaggatccctgactcttccaggggtatcgga

SEQ ID NO: 92327 - DNA, 70 bp, Homo sapiens
gggtccaggtacccctttctgcactgacctaggatccctgactcttccaggggtatcggaaagcagggcc

SEQ ID NO: 92328 - DNA, 74 bp, Homo sapiens
aggtacccctttctgcactgacctaggatccctgactcttccaggggtatcggaaagcagggcctgcaatgtca

SEQ ID NO: 92329 - DNA, 77 bp, Homo sapiens
tttctgcactgacctaggatccctgactcttccaggggtatcggaaagcagggcctgcaatgtcaaggtaagagctg

SEQ ID NO: 92330 - DNA, 72 bp, Homo sapiens
acctaggatccctgactcttccaggggtatcggaaagcagggcctgcaatgtcaaggtaagagctggggacc

SEQ ID NO: 92331 - DNA, 71 bp, Homo sapiens
actcttccaggggtatcggaaagcagggcctgcaatgtcaaggtaagagctggggaccggggctcctggga

SEQ ID NO: 92332 - DNA, 71 bp, Homo sapiens
gggtatcggaaagcagggcctgcaatgtcaaggtaagagctggggaccggggctcctgggaccctcaggag

SEQ ID NO: 92333 - DNA, 72 bp, Homo sapiens
tcggaaagcagggcctgcaatgtcaaggtaagagctggggaccggggctcctgggaccctcaggagggtgga

SEQ ID NO: 92334 - DNA, 70 bp, Homo sapiens
cctgcaatgtcaaggtaagagctggggaccggggctcctgggaccctcaggagggtggaggctggggccc

SEQ ID NO: 92335 - DNA, 72 bp, Homo sapiens
tgtcaaggtaagagctggggaccggggctcctgggaccctcaggagggtggaggctggggccccacagctga

SEQ ID NO: 92336 - DNA, 64 bp, Homo sapiens
aggccgggtggggtcaccaatgggcgagtgggggccgggcggggccggcagttctggggggcgg

SEQ ID NO: 92337 - DNA, 65 bp, Homo sapiens
gggtggggtcaccaatgggcgagtgggggccgggcggggccggcagttctggggggcgggagagg

SEQ ID NO: 92338 - DNA, 66 bp, Homo sapiens
atgggcgagtgggggccgggcggggccggcagttctggggggcgggagaggggggcgagtccttga

SEQ ID NO: 92339 - DNA, 69 bp, Homo sapiens
ggggccgggcggggccggcagttctggggggcgggagaggggggcgagtccttgagcaccagctgctac

SEQ ID NO: 92340 - DNA, 76 bp, Homo sapiens
ggggccggcagttctggggggcgggagaggggggcgagtccttgagcaccagctgctactgctgagaacagagtga

SEQ ID NO: 92341 - DNA, 76 bp, Homo sapiens
agttctggggggcgggagaggggggcgagtccttgagcaccagctgctactgctgagaacagagtgagtcagggtg

SEQ ID NO: 92342 - DNA, 75 bp, Homo sapiens
gggcgggagaggggggcgagtccttgagcaccagctgctactgctgagaacagagtgagtcagggtggggggcgg

SEQ ID NO: 92343 - DNA, 79 bp, Homo sapiens
ggggcgagtccttgagcaccagctgctactgctgagaacagagtgagtcagggtggggggcgggccggcagcagcgccc

SEQ ID NO: 92344 - DNA, 80 bp, Homo sapiens
cttgagcaccagctgctactgctgagaacagagtgagtcagggtggggggcgggccggcagcagcgcccccagactcact

SEQ ID NO: 92345 - DNA, 79 bp, Homo sapiens
agctgctactgctgagaacagagtgagtcagggtggggggcgggccggcagcagcgcccccagactcacttctgcccaa

SEQ ID NO: 92346 - DNA, 78 bp, Homo sapiens
tactgctgagaacagagtgagtcagggtggggggcgggccggcagcagcgcccccagactcacttctgcccaagttgc

SEQ ID NO: 92347 - DNA, 75 bp, Homo sapiens
aacagagtgagtcagggtggggggcgggccggcagcagcgcccccagactcacttctgcccaagttgctgcttcc

SEQ ID NO: 92348 - DNA, 83 bp, Homo sapiens
gtctcccgctggactaatccatgcctccgtctgtgtctctatgattttcatctatagtctgcagctttgtggttcatcgacga

SEQ ID NO: 92349 - DNA, 82 bp, Homo sapiens
actaatccatgcctccgtctgtgtctctatgattttcatctatagtctgcagctttgtggttcatcgacgatgccacgaatt

SEQ ID NO: 92350 - DNA, 82 bp, Homo sapiens
atgcctccgtctgtgtctctatgattttcatctatagtctgcagctttgtggttcatcgacgatgccacgaatttgtgacct

SEQ ID NO: 92351 - DNA, 84 bp, Homo sapiens
tctgtgtctctatgattttcatctatagtctgcagctttgtggttcatcgacgatgccacgaatttgtgaccttcgagtgtcca

SEQ ID NO: 92352 - DNA, 81 bp, Homo sapiens
gattttcatctatagtctgcagctttgtggttcatcgacgatgccacgaatttgtgaccttcgagtgtccaggcgctggga

SEQ ID NO: 92353 - DNA, 79 bp, Homo sapiens
atctatagtctgcagctttgtggttcatcgacgatgccacgaatttgtgaccttcgagtgtccaggcgctgggaagggc

SEQ ID NO: 92354 - DNA, 74 bp, Homo sapiens
agctttgtggttcatcgacgatgccacgaatttgtgaccttcgagtgtccaggcgctgggaagggcccccagac

SEQ ID NO: 92355 - DNA, 75 bp, Homo sapiens
tggttcatcgacgatgccacgaatttgtgaccttcgagtgtccaggcgctgggaagggcccccagacggacgtga

SEQ ID NO: 92356 - DNA, 74 bp, Homo sapiens
acgatgccacgaatttgtgaccttcgagtgtccaggcgctgggaagggcccccagacggacgtgagtgctcgga

SEQ ID NO: 92357 - DNA, 71 bp, Homo sapiens
aatttgtgaccttcgagtgtccaggcgctgggaagggcccccagacggacgtgagtgctcggacacctggt

SEQ ID NO: 92358 - DNA, 71 bp, Homo sapiens
accttcgagtgtccaggcgctgggaagggcccccagacggacgtgagtgctcggacacctggttctcctcc

SEQ ID NO: 92359 - DNA, 73 bp, Homo sapiens
tgtccaggcgctgggaagggcccccagacggacgtgagtgctcggacacctggttctcctcctcgggccgtgc

SEQ ID NO: 92360 - DNA, 65 bp, Homo sapiens
ttttaggaccctcccaacgccccctaagccagtcttctctgcccccaggacccccggaacaaaca

SEQ ID NO: 92361 - DNA, 65 bp, Homo sapiens
accctcccaacgccccctaagccagtcttctctgcccccaggacccccggaacaaacacaagttc

SEQ ID NO: 92362 - DNA, 73 bp, Homo sapiens
cctaagccagtcttctctgcccccaggacccccggaacaaacacaagttccgcctgcatagctacagcagccc

SEQ ID NO: 92363 - DNA, 72 bp, Homo sapiens
agtcttctctgcccccaggacccccggaacaaacacaagttccgcctgcatagctacagcagccccaccttc

SEQ ID NO: 92364 - DNA, 73 bp, Homo sapiens
ccccaggacccccggaacaaacacaagttccgcctgcatagctacagcagccccaccttctgcgaccactgtg

SEQ ID NO: 92365 - DNA, 76 bp, Homo sapiens
cccggaacaaacacaagttccgcctgcatagctacagcagccccaccttctgcgaccactgtggctccctcctcta

SEQ ID NO: 92366 - DNA, 76 bp, Homo sapiens
aaacacaagttccgcctgcatagctacagcagccccaccttctgcgaccactgtggctccctcctctacgggcttg

SEQ ID NO: 92367 - DNA, 81 bp, Homo sapiens
cgcctgcatagctacagcagccccaccttctgcgaccactgtggctccctcctctacgggcttgtgcaccagggcatgaaa

SEQ ID NO: 92368 - DNA, 80 bp, Homo sapiens
atagctacagcagccccaccttctgcgaccactgtggctccctcctctacgggcttgtgcaccagggcatgaaatgctcc

SEQ ID NO: 92369 - DNA, 79 bp, Homo sapiens
agccccaccttctgcgaccactgtggctccctcctctacgggcttgtgcaccagggcatgaaatgctcctgtgagtgac

SEQ ID NO: 92370 - DNA, 79 bp, Homo sapiens
cttctgcgaccactgtggctccctcctctacgggcttgtgcaccagggcatgaaatgctcctgtgagtgacctgggcct

SEQ ID NO: 92371 - DNA, 78 bp, Homo sapiens
tgtggctccctcctctacgggcttgtgcaccagggcatgaaatgctcctgtgagtgacctgggccttgccagggccct

SEQ ID NO: 92372 - DNA, 76 bp, Homo sapiens
cctcctctacgggcttgtgcaccagggcatgaaatgctcctgtgagtgacctgggccttgccagggcccttccaaa

SEQ ID NO: 92373 - DNA, 75 bp, Homo sapiens
tcttggcttgggggcggggcctgaggtgctacccgcagctttcccctccaggctgcgagatgaacgtgcaccggc

SEQ ID NO: 92374 - DNA, 79 bp, Homo sapiens
ggggcctgaggtgctacccgcagctttcccctccaggctgcgagatgaacgtgcaccggcgctgtgtgcgtagcgtgcc

SEQ ID NO: 92375 - DNA, 78 bp, Homo sapiens
aggtgctacccgcagctttcccctccaggctgcgagatgaacgtgcaccggcgctgtgtgcgtagcgtgccctccctg

SEQ ID NO: 92376 - DNA, 80 bp, Homo sapiens
cagctttcccctccaggctgcgagatgaacgtgcaccggcgctgtgtgcgtagcgtgccctccctgtgcggtgtggacca

SEQ ID NO: 92377 - DNA, 81 bp, Homo sapiens
ctccaggctgcgagatgaacgtgcaccggcgctgtgtgcgtagcgtgccctccctgtgcggtgtggaccacaccgagcgcc

SEQ ID NO: 92378 - DNA, 80 bp, Homo sapiens
ggctgcgagatgaacgtgcaccggcgctgtgtgcgtagcgtgccctccctgtgcggtgtggaccacaccgagcgccgcgg

SEQ ID NO: 92379 - DNA, 81 bp, Homo sapiens
tgaacgtgcaccggcgctgtgtgcgtagcgtgccctccctgtgcggtgtggaccacaccgagcgccgcgggcgcctgcagc

SEQ ID NO: 92380 - DNA, 80 bp, Homo sapiens
ccggcgctgtgtgcgtagcgtgccctccctgtgcggtgtggaccacaccgagcgccgcgggcgcctgcagctggagatcc

SEQ ID NO: 92381 - DNA, 80 bp, Homo sapiens
tgcgtagcgtgccctccctgtgcggtgtggaccacaccgagcgccgcgggcgcctgcagctggagatccgggctcccaca

SEQ ID NO: 92382 - DNA, 82 bp, Homo sapiens
cctccctgtgcggtgtggaccacaccgagcgccgcgggcgcctgcagctggagatccgggctcccacagcagatgagatcca

SEQ ID NO: 92383 - DNA, 82 bp, Homo sapiens
gtgtggaccacaccgagcgccgcgggcgcctgcagctggagatccgggctcccacagcagatgagatccacgtaactggtga

SEQ ID NO: 92384 - DNA, 80 bp, Homo sapiens
accacaccgagcgccgcgggcgcctgcagctggagatccgggctcccacagcagatgagatccacgtaactggtgaggcc

SEQ ID NO: 92385 - DNA, 78 bp, Homo sapiens
agcgccgcgggcgcctgcagctggagatccgggctcccacagcagatgagatccacgtaactggtgaggccccgcccc

SEQ ID NO: 92386 - DNA, 77 bp, Homo sapiens
cctgcagctggagatccgggctcccacagcagatgagatccacgtaactggtgaggccccgccccctcgcctggccc

SEQ ID NO: 92387 - DNA, 74 bp, Homo sapiens
ctggagatccgggctcccacagcagatgagatccacgtaactggtgaggccccgccccctcgcctggccccgcc

SEQ ID NO: 92388 - DNA, 68 bp, Homo sapiens
ttcctggatctctaacccgtcacactcttcctcactccccgtttagttggcgaggcccgtaacctaat

SEQ ID NO: 92389 - DNA, 68 bp, Homo sapiens
atctctaacccgtcacactcttcctcactccccgtttagttggcgaggcccgtaacctaattcctatg

SEQ ID NO: 92390 - DNA, 68 bp, Homo sapiens
cacactcttcctcactccccgtttagttggcgaggcccgtaacctaattcctatggaccccaatggtc

SEQ ID NO: 92391 - DNA, 69 bp, Homo sapiens
cttcctcactccccgtttagttggcgaggcccgtaacctaattcctatggaccccaatggtctctctga

SEQ ID NO: 92392 - DNA, 72 bp, Homo sapiens
gtttagttggcgaggcccgtaacctaattcctatggaccccaatggtctctctgatccctatgtgaaactga

SEQ ID NO: 92393 - DNA, 75 bp, Homo sapiens
gttggcgaggcccgtaacctaattcctatggaccccaatggtctctctgatccctatgtgaaactgaagctcatc

SEQ ID NO: 92394 - DNA, 75 bp, Homo sapiens
taacctaattcctatggaccccaatggtctctctgatccctatgtgaaactgaagctcatcccagaccctcggaa

SEQ ID NO: 92395 - DNA, 75 bp, Homo sapiens
aattcctatggaccccaatggtctctctgatccctatgtgaaactgaagctcatcccagaccctcggaacctgac

SEQ ID NO: 92396 - DNA, 76 bp, Homo sapiens
caatggtctctctgatccctatgtgaaactgaagctcatcccagaccctcggaacctgacgaaacagaagacccga

SEQ ID NO: 92397 - DNA, 74 bp, Homo sapiens
tctgatccctatgtgaaactgaagctcatcccagaccctcggaacctgacgaaacagaagacccgaacggtgaa

SEQ ID NO: 92398 - DNA, 72 bp, Homo sapiens
ctatgtgaaactgaagctcatcccagaccctcggaacctgacgaaacagaagacccgaacggtgaaagccac

SEQ ID NO: 92399 - DNA, 70 bp, Homo sapiens
aactgaagctcatcccagaccctcggaacctgacgaaacagaagacccgaacggtgaaagccacgctaaa

SEQ ID NO: 92400 - DNA, 68 bp, Homo sapiens
atcccagaccctcggaacctgacgaaacagaagacccgaacggtgaaagccacgctaaaccctgtgtg

SEQ ID NO: 92401 - DNA, 69 bp, Homo sapiens
tcggaacctgacgaaacagaagacccgaacggtgaaagccacgctaaaccctgtgtggaatgagacctt

SEQ ID NO: 92402 - DNA, 70 bp, Homo sapiens
acgaaacagaagacccgaacggtgaaagccacgctaaaccctgtgtggaatgagacctttgtgttgtgag

SEQ ID NO: 92403 - DNA, 70 bp, Homo sapiens
agaagacccgaacggtgaaagccacgctaaaccctgtgtggaatgagacctttgtgttgtgagtctgggg

SEQ ID NO: 92404 - DNA, 73 bp, Homo sapiens
aacggtgaaagccacgctaaaccctgtgtggaatgagacctttgtgttgtgagtctggggtgcagggaaggca

SEQ ID NO: 92405 - DNA, 81 bp, Homo sapiens
agccatgagctcggctctgcaccccatccaccccaccttcctgcagcaacctgaagccaggggatgtggagcgccggctca

SEQ ID NO: 92406 - DNA, 81 bp, Homo sapiens
tgagctcggctctgcaccccatccaccccaccttcctgcagcaacctgaagccaggggatgtggagcgccggctcagcgtg

SEQ ID NO: 92407 - DNA, 75 bp, Homo sapiens
accccatccaccccaccttcctgcagcaacctgaagccaggggatgtggagcgccggctcagcgtggaggtgtgg

SEQ ID NO: 92408 - DNA, 75 bp, Homo sapiens
accccaccttcctgcagcaacctgaagccaggggatgtggagcgccggctcagcgtggaggtgtgggactgggac

SEQ ID NO: 92409 - DNA, 76 bp, Homo sapiens
ttcctgcagcaacctgaagccaggggatgtggagcgccggctcagcgtggaggtgtgggactgggaccggacctcc

SEQ ID NO: 92410 - DNA, 73 bp, Homo sapiens
ctgaagccaggggatgtggagcgccggctcagcgtggaggtgtgggactgggaccggacctcccgcaacgact

SEQ ID NO: 92411 - DNA, 72 bp, Homo sapiens
aggggatgtggagcgccggctcagcgtggaggtgtgggactgggaccggacctcccgcaacgacttcatggg

SEQ ID NO: 92412 - DNA, 72 bp, Homo sapiens
agcgccggctcagcgtggaggtgtgggactgggaccggacctcccgcaacgacttcatgggggccatgtcct

SEQ ID NO: 92413 - DNA, 71 bp, Homo sapiens
agcgtggaggtgtgggactgggaccggacctcccgcaacgacttcatgggggccatgtcctttggcgtctc

SEQ ID NO: 92414 - DNA, 74 bp, Homo sapiens
tgtgggactgggaccggacctcccgcaacgacttcatgggggccatgtcctttggcgtctcggagctgctcaag

SEQ ID NO: 92415 - DNA, 73 bp, Homo sapiens
actgggaccggacctcccgcaacgacttcatgggggccatgtcctttggcgtctcggagctgctcaaggcgcc

SEQ ID NO: 92416 - DNA, 75 bp, Homo sapiens
acctcccgcaacgacttcatgggggccatgtcctttggcgtctcggagctgctcaaggcgcccgtggatggctgg

SEQ ID NO: 92417 - DNA, 77 bp, Homo sapiens
aacgacttcatgggggccatgtcctttggcgtctcggagctgctcaaggcgcccgtggatggctggtgaggagcagg

SEQ ID NO: 92418 - DNA, 77 bp, Homo sapiens
gggccatgtcctttggcgtctcggagctgctcaaggcgcccgtggatggctggtgaggagcagggctggggcctggg

SEQ ID NO: 92419 - DNA, 80 bp, Homo sapiens
tttggcgtctcggagctgctcaaggcgcccgtggatggctggtgaggagcagggctggggcctggggatggagcgcaata

SEQ ID NO: 92420 - DNA, 75 bp, Homo sapiens
tcccatgggtgccccatccccgctgcccgcctctggtctccgtctgtatgtcaggtacaagttactgaaccagga

SEQ ID NO: 92421 - DNA, 73 bp, Homo sapiens
cccatccccgctgcccgcctctggtctccgtctgtatgtcaggtacaagttactgaaccaggaggagggcgag

SEQ ID NO: 92422 - DNA, 76 bp, Homo sapiens
ctgcccgcctctggtctccgtctgtatgtcaggtacaagttactgaaccaggaggagggcgagtattacaatgtgc

SEQ ID NO: 92423 - DNA, 74 bp, Homo sapiens
cctctggtctccgtctgtatgtcaggtacaagttactgaaccaggaggagggcgagtattacaatgtgccggtg

SEQ ID NO: 92424 - DNA, 80 bp, Homo sapiens
tctgtatgtcaggtacaagttactgaaccaggaggagggcgagtattacaatgtgccggtggccgatgctgacaactgca

SEQ ID NO: 92425 - DNA, 78 bp, Homo sapiens
atgtcaggtacaagttactgaaccaggaggagggcgagtattacaatgtgccggtggccgatgctgacaactgcagcc

SEQ ID NO: 92426 - DNA, 77 bp, Homo sapiens
aagttactgaaccaggaggagggcgagtattacaatgtgccggtggccgatgctgacaactgcagcctcctccagaa

SEQ ID NO: 92427 - DNA, 76 bp, Homo sapiens
aaccaggaggagggcgagtattacaatgtgccggtggccgatgctgacaactgcagcctcctccagaagtttgagg

SEQ ID NO: 92428 - DNA, 77 bp, Homo sapiens
gagtattacaatgtgccggtggccgatgctgacaactgcagcctcctccagaagtttgaggtacccagaccctggct

SEQ ID NO: 92429 - DNA, 78 bp, Homo sapiens
ttacaatgtgccggtggccgatgctgacaactgcagcctcctccagaagtttgaggtacccagaccctggcttcctca

SEQ ID NO: 92430 - DNA, 76 bp, Homo sapiens
ggtggccgatgctgacaactgcagcctcctccagaagtttgaggtacccagaccctggcttcctcaagggagccca

SEQ ID NO: 92431 - DNA, 76 bp, Homo sapiens
atgctgacaactgcagcctcctccagaagtttgaggtacccagaccctggcttcctcaagggagcccagcccagcc

SEQ ID NO: 92432 - DNA, 70 bp, Homo sapiens
tctctctttcttttctcccaggcttgtaactaccccctggaattgtatgaggtgagtagaaccagggcgt

SEQ ID NO: 92433 - DNA, 72 bp, Homo sapiens
ttttctcccaggcttgtaactaccccctggaattgtatgaggtgagtagaaccagggcgttgaatggaggca

SEQ ID NO: 92434 - DNA, 70 bp, Homo sapiens
ccaggcttgtaactaccccctggaattgtatgaggtgagtagaaccagggcgttgaatggaggcagtttt

SEQ ID NO: 92435 - DNA, 70 bp, Homo sapiens
gtaactaccccctggaattgtatgaggtgagtagaaccagggcgttgaatggaggcagtttttgcctact

SEQ ID NO: 92436 - DNA, 73 bp, Homo sapiens
aattgtatgaggtgagtagaaccagggcgttgaatggaggcagtttttgcctacttctctgatttcttattcc

SEQ ID NO: 92437 - DNA, 76 bp, Homo sapiens
tatgaggtgagtagaaccagggcgttgaatggaggcagtttttgcctacttctctgatttcttattcctcctctga

SEQ ID NO: 92438 - DNA, 74 bp, Homo sapiens
tagaaccagggcgttgaatggaggcagtttttgcctacttctctgatttcttattcctcctctgacttctgtct

SEQ ID NO: 92439 - DNA, 74 bp, Homo sapiens
ggcgttgaatggaggcagtttttgcctacttctctgatttcttattcctcctctgacttctgtcttcaattccc

SEQ ID NO: 92440 - DNA, 76 bp, Homo sapiens
aggcagtttttgcctacttctctgatttcttattcctcctctgacttctgtcttcaattccccacacatgagttga

SEQ ID NO: 92441 - DNA, 79 bp, Homo sapiens
tttgcctacttctctgatttcttattcctcctctgacttctgtcttcaattccccacacatgagttgagcacacatttg

SEQ ID NO: 92442 - DNA, 81 bp, Homo sapiens
tgatttcttattcctcctctgacttctgtcttcaattccccacacatgagttgagcacacatttgtgctaggcctgtcttg

SEQ ID NO: 92443 - DNA, 84 bp, Homo sapiens
tcctcctctgacttctgtcttcaattccccacacatgagttgagcacacatttgtgctaggcctgtcttgtgcttgctgaataa

SEQ ID NO: 92444 - DNA, 83 bp, Homo sapiens
acttctgtcttcaattccccacacatgagttgagcacacatttgtgctaggcctgtcttgtgcttgctgaataatccaggatc

SEQ ID NO: 92445 - DNA, 86 bp, Homo sapiens
ttcaattccccacacatgagttgagcacacatttgtgctaggcctgtcttgtgcttgctgaataatccaggatccagagatgaatc

SEQ ID NO: 92446 - DNA, 88 bp, Homo sapiens
acacatgagttgagcacacatttgtgctaggcctgtcttgtgcttgctgaataatccaggatccagagatgaatctgaccctcaagca

SEQ ID NO: 92447 - DNA, 85 bp, Homo sapiens
agttgagcacacatttgtgctaggcctgtcttgtgcttgctgaataatccaggatccagagatgaatctgaccctcaagcaactc

SEQ ID NO: 92448 - DNA, 82 bp, Homo sapiens
atttgtgctaggcctgtcttgtgcttgctgaataatccaggatccagagatgaatctgaccctcaagcaactctccaaggta

SEQ ID NO: 92449 - DNA, 82 bp, Homo sapiens
taggcctgtcttgtgcttgctgaataatccaggatccagagatgaatctgaccctcaagcaactctccaaggtagggacaca

SEQ ID NO: 92450 - DNA, 84 bp, Homo sapiens
tcttgtgcttgctgaataatccaggatccagagatgaatctgaccctcaagcaactctccaaggtagggacacagtcacagata

SEQ ID NO: 92451 - DNA, 83 bp, Homo sapiens
tgcttgctgaataatccaggatccagagatgaatctgaccctcaagcaactctccaaggtagggacacagtcacagatactta

SEQ ID NO: 92452 - DNA, 81 bp, Homo sapiens
tgctgaataatccaggatccagagatgaatctgaccctcaagcaactctccaaggtagggacacagtcacagatacttaaa

SEQ ID NO: 92453 - DNA, 77 bp, Homo sapiens
aataatccaggatccagagatgaatctgaccctcaagcaactctccaaggtagggacacagtcacagatacttaaaa

SEQ ID NO: 92454 - DNA, 78 bp, Homo sapiens
ataatccaggatccagagatgaatctgaccctcaagcaactctccaaggtagggacacagtcacagatacttaaaata

SEQ ID NO: 92455 - DNA, 77 bp, Homo sapiens
aggatccagagatgaatctgaccctcaagcaactctccaaggtagggacacagtcacagatacttaaaatacaggaa

SEQ ID NO: 92456 - DNA, 78 bp, Homo sapiens
atccagagatgaatctgaccctcaagcaactctccaaggtagggacacagtcacagatacttaaaatacaggaagatg

SEQ ID NO: 92457 - DNA, 77 bp, Homo sapiens
atgaatctgaccctcaagcaactctccaaggtagggacacagtcacagatacttaaaatacaggaagatgtgctaaa

SEQ ID NO: 92458 - DNA, 76 bp, Homo sapiens
atctgaccctcaagcaactctccaaggtagggacacagtcacagatacttaaaatacaggaagatgtgctaaatta

SEQ ID NO: 92459 - DNA, 74 bp, Homo sapiens
aagcaactctccaaggtagggacacagtcacagatacttaaaatacaggaagatgtgctaaattagaggtagcc

SEQ ID NO: 92460 - DNA, 74 bp, Homo sapiens
aaggtagggacacagtcacagatacttaaaatacaggaagatgtgctaaattagaggtagcccagggcactgaa

SEQ ID NO: 92461 - DNA, 75 bp, Homo sapiens
acacagtcacagatacttaaaatacaggaagatgtgctaaattagaggtagcccagggcactgaagaggcctaac

SEQ ID NO: 92462 - DNA, 74 bp, Homo sapiens
gatacttaaaatacaggaagatgtgctaaattagaggtagcccagggcactgaagaggcctaacggaggcacta

SEQ ID NO: 92463 - DNA, 74 bp, Homo sapiens
ttaaaatacaggaagatgtgctaaattagaggtagcccagggcactgaagaggcctaacggaggcactaatcca

SEQ ID NO: 92464 - DNA, 74 bp, Homo sapiens
ggaagatgtgctaaattagaggtagcccagggcactgaagaggcctaacggaggcactaatccagcctggggga

SEQ ID NO: 92465 - DNA, 72 bp, Homo sapiens
taaattagaggtagcccagggcactgaagaggcctaacggaggcactaatccagcctgggggagggtggtca

SEQ ID NO: 92466 - DNA, 72 bp, Homo sapiens
tagcccagggcactgaagaggcctaacggaggcactaatccagcctgggggagggtggtcagggaggacttc

SEQ ID NO: 92467 - DNA, 70 bp, Homo sapiens
actgaagaggcctaacggaggcactaatccagcctgggggagggtggtcagggaggacttccctgaggag

SEQ ID NO: 92468 - DNA, 71 bp, Homo sapiens
taacggaggcactaatccagcctgggggagggtggtcagggaggacttccctgaggaggtgacgcctgaat

SEQ ID NO: 92469 - DNA, 72 bp, Homo sapiens
actaatccagcctgggggagggtggtcagggaggacttccctgaggaggtgacgcctgaattgattcttgag

SEQ ID NO: 92470 - DNA, 68 bp, Homo sapiens
cctgggggagggtggtcagggaggacttccctgaggaggtgacgcctgaattgattcttgaggttttt

SEQ ID NO: 92471 - DNA, 67 bp, Homo sapiens
agggtggtcagggaggacttccctgaggaggtgacgcctgaattgattcttgaggttttttaaaatt

SEQ ID NO: 92472 - DNA, 73 bp, Homo sapiens
tgtgtaaggtctaactgcctctggctctttctttctcctttccacagcgggtgcggatgggcccctcttcctc

SEQ ID NO: 92473 - DNA, 72 bp, Homo sapiens
aggtctaactgcctctggctctttctttctcctttccacagcgggtgcggatgggcccctcttcctctccca

SEQ ID NO: 92474 - DNA, 70 bp, Homo sapiens
cctctggctctttctttctcctttccacagcgggtgcggatgggcccctcttcctctcccatcccctccc

SEQ ID NO: 92475 - DNA, 67 bp, Homo sapiens
ctttctttctcctttccacagcgggtgcggatgggcccctcttcctctcccatcccctccccttccc

SEQ ID NO: 92476 - DNA, 68 bp, Homo sapiens
tttccacagcgggtgcggatgggcccctcttcctctcccatcccctccccttcccctagtcccaccga

SEQ ID NO: 92477 - DNA, 69 bp, Homo sapiens
tgcggatgggcccctcttcctctcccatcccctccccttcccctagtcccaccgaccccaagcgctgct

SEQ ID NO: 92478 - DNA, 67 bp, Homo sapiens
atgggcccctcttcctctcccatcccctccccttcccctagtcccaccgaccccaagcgctgcttct

SEQ ID NO: 92479 - DNA, 69 bp, Homo sapiens
tctcccatcccctccccttcccctagtcccaccgaccccaagcgctgcttcttcggggcgagtccagga

SEQ ID NO: 92480 - DNA, 71 bp, Homo sapiens
cctccccttcccctagtcccaccgaccccaagcgctgcttcttcggggcgagtccaggacgcctgcacatc

SEQ ID NO: 92481 - DNA, 74 bp, Homo sapiens
ccctagtcccaccgaccccaagcgctgcttcttcggggcgagtccaggacgcctgcacatctccgacttcagct

SEQ ID NO: 92482 - DNA, 76 bp, Homo sapiens
accgaccccaagcgctgcttcttcggggcgagtccaggacgcctgcacatctccgacttcagcttcctcatggttc

SEQ ID NO: 92483 - DNA, 76 bp, Homo sapiens
aagcgctgcttcttcggggcgagtccaggacgcctgcacatctccgacttcagcttcctcatggttctaggaaaag

SEQ ID NO: 92484 - DNA, 74 bp, Homo sapiens
ttcttcggggcgagtccaggacgcctgcacatctccgacttcagcttcctcatggttctaggaaaaggcagttt

SEQ ID NO: 92485 - DNA, 73 bp, Homo sapiens
agtccaggacgcctgcacatctccgacttcagcttcctcatggttctaggaaaaggcagttttgggaaggttg

SEQ ID NO: 92486 - DNA, 73 bp, Homo sapiens
aggacgcctgcacatctccgacttcagcttcctcatggttctaggaaaaggcagttttgggaaggttggattc

SEQ ID NO: 92487 - DNA, 69 bp, Homo sapiens
acatctccgacttcagcttcctcatggttctaggaaaaggcagttttgggaaggttggattcctggggt

SEQ ID NO: 92488 - DNA, 67 bp, Homo sapiens
acttcagcttcctcatggttctaggaaaaggcagttttgggaaggttggattcctggggttctgggg

SEQ ID NO: 92489 - DNA, 65 bp, Homo sapiens
cctcatggttctaggaaaaggcagttttgggaaggttggattcctggggttctgggggaaaggga

SEQ ID NO: 92490 - DNA, 79 bp, Homo sapiens
taccactgggttcccaacatggactggcccttttggaactgtgcgcataggtgatgctggccgagcgcaggggctctga

SEQ ID NO: 92491 - DNA, 85 bp, Homo sapiens
caacatggactggcccttttggaactgtgcgcataggtgatgctggccgagcgcaggggctctgatgagctctacgccatcaaga

SEQ ID NO: 92492 - DNA, 84 bp, Homo sapiens
tggcccttttggaactgtgcgcataggtgatgctggccgagcgcaggggctctgatgagctctacgccatcaagatcttgaaaa

SEQ ID NO: 92493 - DNA, 83 bp, Homo sapiens
cttttggaactgtgcgcataggtgatgctggccgagcgcaggggctctgatgagctctacgccatcaagatcttgaaaaagga

SEQ ID NO: 92494 - DNA, 84 bp, Homo sapiens
gcataggtgatgctggccgagcgcaggggctctgatgagctctacgccatcaagatcttgaaaaaggacgtgatcgtccaggac

SEQ ID NO: 92495 - DNA, 82 bp, Homo sapiens
atgctggccgagcgcaggggctctgatgagctctacgccatcaagatcttgaaaaaggacgtgatcgtccaggacgacgatg

SEQ ID NO: 92496 - DNA, 82 bp, Homo sapiens
agcgcaggggctctgatgagctctacgccatcaagatcttgaaaaaggacgtgatcgtccaggacgacgatgtggactgcac

SEQ ID NO: 92497 - DNA, 83 bp, Homo sapiens
tctgatgagctctacgccatcaagatcttgaaaaaggacgtgatcgtccaggacgacgatgtggactgcacgctggtggagaa

SEQ ID NO: 92498 - DNA, 78 bp, Homo sapiens
agctctacgccatcaagatcttgaaaaaggacgtgatcgtccaggacgacgatgtggactgcacgctggtggagaaac

SEQ ID NO: 92499 - DNA, 79 bp, Homo sapiens
atcaagatcttgaaaaaggacgtgatcgtccaggacgacgatgtggactgcacgctggtggagaaacgtgtgctggcgc

SEQ ID NO: 92500 - DNA, 77 bp, Homo sapiens
tcttgaaaaaggacgtgatcgtccaggacgacgatgtggactgcacgctggtggagaaacgtgtgctggcgctgggg

SEQ ID NO: 92501 - DNA, 75 bp, Homo sapiens
acgtgatcgtccaggacgacgatgtggactgcacgctggtggagaaacgtgtgctggcgctggggggccggggtc

SEQ ID NO: 92502 - DNA, 75 bp, Homo sapiens
gtccaggacgacgatgtggactgcacgctggtggagaaacgtgtgctggcgctggggggccggggtcctggcggc

SEQ ID NO: 92503 - DNA, 72 bp, Homo sapiens
atgtggactgcacgctggtggagaaacgtgtgctggcgctggggggccggggtcctggcggccggccccact

SEQ ID NO: 92504 - DNA, 72 bp, Homo sapiens
ctgcacgctggtggagaaacgtgtgctggcgctggggggccggggtcctggcggccggccccacttcctcac

SEQ ID NO: 92505 - DNA, 71 bp, Homo sapiens
gtggagaaacgtgtgctggcgctggggggccggggtcctggcggccggccccacttcctcacccagctcca

SEQ ID NO: 92506 - DNA, 72 bp, Homo sapiens
tgtgctggcgctggggggccggggtcctggcggccggccccacttcctcacccagctccactccaccttcca

SEQ ID NO: 92507 - DNA, 69 bp, Homo sapiens
gtcctggcggccggccccacttcctcacccagctccactccaccttccagaccccggtaaggatggagg

SEQ ID NO: 92508 - DNA, 67 bp, Homo sapiens
ccggccccacttcctcacccagctccactccaccttccagaccccggtaaggatggagggggcggag

SEQ ID NO: 92509 - DNA, 69 bp, Homo sapiens
acttcctcacccagctccactccaccttccagaccccggtaaggatggagggggcggaggctgtcctcc

SEQ ID NO: 92510 - DNA, 78 bp, Homo sapiens
tcctactctgggtagatggatcccgcctctaagcccatgcacttctccgcaggaccgcctgtatttcgtgatggagta

SEQ ID NO: 92511 - DNA, 77 bp, Homo sapiens
tgggtagatggatcccgcctctaagcccatgcacttctccgcaggaccgcctgtatttcgtgatggagtacgtcacc

SEQ ID NO: 92512 - DNA, 74 bp, Homo sapiens
atcccgcctctaagcccatgcacttctccgcaggaccgcctgtatttcgtgatggagtacgtcaccgggggaga

SEQ ID NO: 92513 - DNA, 76 bp, Homo sapiens
taagcccatgcacttctccgcaggaccgcctgtatttcgtgatggagtacgtcaccgggggagacttgatgtacca

SEQ ID NO: 92514 - DNA, 74 bp, Homo sapiens
acttctccgcaggaccgcctgtatttcgtgatggagtacgtcaccgggggagacttgatgtaccacattcaaca

SEQ ID NO: 92515 - DNA, 74 bp, Homo sapiens
gaccgcctgtatttcgtgatggagtacgtcaccgggggagacttgatgtaccacattcaacagctgggcaagtt

SEQ ID NO: 92516 - DNA, 74 bp, Homo sapiens
ctgtatttcgtgatggagtacgtcaccgggggagacttgatgtaccacattcaacagctgggcaagtttaagga

SEQ ID NO: 92517 - DNA, 75 bp, Homo sapiens
atggagtacgtcaccgggggagacttgatgtaccacattcaacagctgggcaagtttaaggagccccatgcagcg

SEQ ID NO: 92518 - DNA, 76 bp, Homo sapiens
acgtcaccgggggagacttgatgtaccacattcaacagctgggcaagtttaaggagccccatgcagcgtgagtctc

SEQ ID NO: 92519 - DNA, 79 bp, Homo sapiens
agacttgatgtaccacattcaacagctgggcaagtttaaggagccccatgcagcgtgagtctcggccaacagagaatgg

SEQ ID NO: 92520 - DNA, 77 bp, Homo sapiens
atgtaccacattcaacagctgggcaagtttaaggagccccatgcagcgtgagtctcggccaacagagaatggtcggg

SEQ ID NO: 92521 - DNA, 76 bp, Homo sapiens
ttcaacagctgggcaagtttaaggagccccatgcagcgtgagtctcggccaacagagaatggtcggggtggtggaa

SEQ ID NO: 92522 - DNA, 77 bp, Homo sapiens
atgcagcgtgagtctcggccaacagagaatggtcggggtggtggaagggggcaggatccagccactgaccttctgac

SEQ ID NO: 92523 - DNA, 69 bp, Homo sapiens
ggtggtggaagggggcaggatccagccactgaccttctgacgtccccacccaccccgtcctccaggttc

SEQ ID NO: 92524 - DNA, 70 bp, Homo sapiens
aagggggcaggatccagccactgaccttctgacgtccccacccaccccgtcctccaggttctacgcggca

SEQ ID NO: 92525 - DNA, 72 bp, Homo sapiens
atccagccactgaccttctgacgtccccacccaccccgtcctccaggttctacgcggcagaaatcgctatcg

SEQ ID NO: 92526 - DNA, 71 bp, Homo sapiens
tgaccttctgacgtccccacccaccccgtcctccaggttctacgcggcagaaatcgctatcggcctcttct

SEQ ID NO: 92527 - DNA, 72 bp, Homo sapiens
tctgacgtccccacccaccccgtcctccaggttctacgcggcagaaatcgctatcggcctcttcttccttca

SEQ ID NO: 92528 - DNA, 77 bp, Homo sapiens
caccccgtcctccaggttctacgcggcagaaatcgctatcggcctcttcttccttcacaatcagggcatcatctaca

SEQ ID NO: 92529 - DNA, 80 bp, Homo sapiens
cgtcctccaggttctacgcggcagaaatcgctatcggcctcttcttccttcacaatcagggcatcatctacaggtgagca

SEQ ID NO: 92530 - DNA, 80 bp, Homo sapiens
ttctacgcggcagaaatcgctatcggcctcttcttccttcacaatcagggcatcatctacaggtgagcagccccaggaat

SEQ ID NO: 92531 - DNA, 78 bp, Homo sapiens
agaaatcgctatcggcctcttcttccttcacaatcagggcatcatctacaggtgagcagccccaggaatttccgtgga

SEQ ID NO: 92532 - DNA, 78 bp, Homo sapiens
ctatcggcctcttcttccttcacaatcagggcatcatctacaggtgagcagccccaggaatttccgtggaggaaatca

SEQ ID NO: 92533 - DNA, 76 bp, Homo sapiens
ttccttcacaatcagggcatcatctacaggtgagcagccccaggaatttccgtggaggaaatcacgcccctggaag

SEQ ID NO: 92534 - DNA, 74 bp, Homo sapiens
acaatcagggcatcatctacaggtgagcagccccaggaatttccgtggaggaaatcacgcccctggaagggaag

SEQ ID NO: 92535 - DNA, 81 bp, Homo sapiens
aactcaacacttcttgcaattcctgccccacacccctgcatcgtccagggacctgaagctggacaatgtgatgctggatgc

SEQ ID NO: 92536 - DNA, 85 bp, Homo sapiens
tcttgcaattcctgccccacacccctgcatcgtccagggacctgaagctggacaatgtgatgctggatgctgagggacacatcaa

SEQ ID NO: 92537 - DNA, 85 bp, Homo sapiens
ctgccccacacccctgcatcgtccagggacctgaagctggacaatgtgatgctggatgctgagggacacatcaagatcactgact

SEQ ID NO: 92538 - DNA, 87 bp, Homo sapiens
cccctgcatcgtccagggacctgaagctggacaatgtgatgctggatgctgagggacacatcaagatcactgactttggcatgtgta

SEQ ID NO: 92539 - DNA, 86 bp, Homo sapiens
atcgtccagggacctgaagctggacaatgtgatgctggatgctgagggacacatcaagatcactgactttggcatgtgtaaggaga

SEQ ID NO: 92540 - DNA, 84 bp, Homo sapiens
acctgaagctggacaatgtgatgctggatgctgagggacacatcaagatcactgactttggcatgtgtaaggagaacgtcttcc

SEQ ID NO: 92541 - DNA, 81 bp, Homo sapiens
acaatgtgatgctggatgctgagggacacatcaagatcactgactttggcatgtgtaaggagaacgtcttccccgggacga

SEQ ID NO: 92542 - DNA, 78 bp, Homo sapiens
atgctggatgctgagggacacatcaagatcactgactttggcatgtgtaaggagaacgtcttccccgggacgacaacc

SEQ ID NO: 92543 - DNA, 74 bp, Homo sapiens
tgagggacacatcaagatcactgactttggcatgtgtaaggagaacgtcttccccgggacgacaacccgcacct

SEQ ID NO: 92544 - DNA, 73 bp, Homo sapiens
atcaagatcactgactttggcatgtgtaaggagaacgtcttccccgggacgacaacccgcaccttctgcggga

SEQ ID NO: 92545 - DNA, 70 bp, Homo sapiens
atcactgactttggcatgtgtaaggagaacgtcttccccgggacgacaacccgcaccttctgcgggaccc

SEQ ID NO: 92546 - DNA, 68 bp, Homo sapiens
atgtgtaaggagaacgtcttccccgggacgacaacccgcaccttctgcgggaccccggactacatagc

SEQ ID NO: 92547 - DNA, 66 bp, Homo sapiens
taaggagaacgtcttccccgggacgacaacccgcaccttctgcgggaccccggactacatagcccc

SEQ ID NO: 92548 - DNA, 65 bp, Homo sapiens
gtcttccccgggacgacaacccgcaccttctgcgggaccccggactacatagccccggaggtaac

SEQ ID NO: 92549 - DNA, 66 bp, Homo sapiens
ggacgacaacccgcaccttctgcgggaccccggactacatagccccggaggtaaccccaaccctgc

SEQ ID NO: 92550 - DNA, 74 bp, Homo sapiens
gggtcctaggcttcctaaagaacgcatcatgattccctgccttccacctcccctagatcattgcctaccagccc

SEQ ID NO: 92551 - DNA, 76 bp, Homo sapiens
taggcttcctaaagaacgcatcatgattccctgccttccacctcccctagatcattgcctaccagccctatgggaa

SEQ ID NO: 92552 - DNA, 77 bp, Homo sapiens
taaagaacgcatcatgattccctgccttccacctcccctagatcattgcctaccagccctatgggaagtctgtcgat

SEQ ID NO: 92553 - DNA, 74 bp, Homo sapiens
tgattccctgccttccacctcccctagatcattgcctaccagccctatgggaagtctgtcgattggtggtcctt

SEQ ID NO: 92554 - DNA, 74 bp, Homo sapiens
cttccacctcccctagatcattgcctaccagccctatgggaagtctgtcgattggtggtcctttggagttctgc

SEQ ID NO: 92555 - DNA, 78 bp, Homo sapiens
ccctagatcattgcctaccagccctatgggaagtctgtcgattggtggtcctttggagttctgctgtatgagatgttg

SEQ ID NO: 92556 - DNA, 80 bp, Homo sapiens
atcattgcctaccagccctatgggaagtctgtcgattggtggtcctttggagttctgctgtatgagatgttggcaggaca

SEQ ID NO: 92557 - DNA, 76 bp, Homo sapiens
agccctatgggaagtctgtcgattggtggtcctttggagttctgctgtatgagatgttggcaggacaggtaaggga

SEQ ID NO: 92558 - DNA, 75 bp, Homo sapiens
atgggaagtctgtcgattggtggtcctttggagttctgctgtatgagatgttggcaggacaggtaagggaaggtg

SEQ ID NO: 92559 - DNA, 76 bp, Homo sapiens
tgtcgattggtggtcctttggagttctgctgtatgagatgttggcaggacaggtaagggaaggtggggagaagctg

SEQ ID NO: 92560 - DNA, 75 bp, Homo sapiens
ctttggagttctgctgtatgagatgttggcaggacaggtaagggaaggtggggagaagctggcttggctaaaaga

SEQ ID NO: 92561 - DNA, 77 bp, Homo sapiens
agttctgctgtatgagatgttggcaggacaggtaagggaaggtggggagaagctggcttggctaaaagagacagaga

SEQ ID NO: 92562 - DNA, 73 bp, Homo sapiens
aaaggcagttgggcatgtccctgactctctatcccctccactttgatagcctcccttcgatggggaggacgag

SEQ ID NO: 92563 - DNA, 75 bp, Homo sapiens
catgtccctgactctctatcccctccactttgatagcctcccttcgatggggaggacgaggaggagctgtttcag

SEQ ID NO: 92564 - DNA, 76 bp, Homo sapiens
actctctatcccctccactttgatagcctcccttcgatggggaggacgaggaggagctgtttcaggccatcatgga

SEQ ID NO: 92565 - DNA, 74 bp, Homo sapiens
ccctccactttgatagcctcccttcgatggggaggacgaggaggagctgtttcaggccatcatggaacaaactg

SEQ ID NO: 92566 - DNA, 75 bp, Homo sapiens
actttgatagcctcccttcgatggggaggacgaggaggagctgtttcaggccatcatggaacaaactgtcaccta

SEQ ID NO: 92567 - DNA, 73 bp, Homo sapiens
ccttcgatggggaggacgaggaggagctgtttcaggccatcatggaacaaactgtcacctaccccaagtcgct

SEQ ID NO: 92568 - DNA, 72 bp, Homo sapiens
ggaggacgaggaggagctgtttcaggccatcatggaacaaactgtcacctaccccaagtcgctttcccggga

SEQ ID NO: 92569 - DNA, 71 bp, Homo sapiens
aggaggagctgtttcaggccatcatggaacaaactgtcacctaccccaagtcgctttcccgggaagccgtg

SEQ ID NO: 92570 - DNA, 74 bp, Homo sapiens
ctgtttcaggccatcatggaacaaactgtcacctaccccaagtcgctttcccgggaagccgtggccatctgcaa

SEQ ID NO: 92571 - DNA, 72 bp, Homo sapiens
atcatggaacaaactgtcacctaccccaagtcgctttcccgggaagccgtggccatctgcaagggggtgaga

SEQ ID NO: 92572 - DNA, 69 bp, Homo sapiens
aacaaactgtcacctaccccaagtcgctttcccgggaagccgtggccatctgcaagggggtgagagccc

SEQ ID NO: 92573 - DNA, 69 bp, Homo sapiens
acctaccccaagtcgctttcccgggaagccgtggccatctgcaagggggtgagagccccctgactccca

SEQ ID NO: 92574 - DNA, 72 bp, Homo sapiens
aagtcgctttcccgggaagccgtggccatctgcaagggggtgagagccccctgactcccagcttctccaggc

SEQ ID NO: 92575 - DNA, 77 bp, Homo sapiens
ctgtctgtctctctctgtgtttcccacagttcctgaccaagcacccagggaagcgcctgggctcagggcctgatggg

SEQ ID NO: 92576 - DNA, 74 bp, Homo sapiens
tctgtgtttcccacagttcctgaccaagcacccagggaagcgcctgggctcagggcctgatggggaacctacca

SEQ ID NO: 92577 - DNA, 72 bp, Homo sapiens
tttcccacagttcctgaccaagcacccagggaagcgcctgggctcagggcctgatggggaacctaccatccg

SEQ ID NO: 92578 - DNA, 75 bp, Homo sapiens
ttcctgaccaagcacccagggaagcgcctgggctcagggcctgatggggaacctaccatccgtgcacatggcttt

SEQ ID NO: 92579 - DNA, 75 bp, Homo sapiens
cccagggaagcgcctgggctcagggcctgatggggaacctaccatccgtgcacatggctttttccgctggattga

SEQ ID NO: 92580 - DNA, 76 bp, Homo sapiens
ggaagcgcctgggctcagggcctgatggggaacctaccatccgtgcacatggctttttccgctggattgactggga

SEQ ID NO: 92581 - DNA, 76 bp, Homo sapiens
tcagggcctgatggggaacctaccatccgtgcacatggctttttccgctggattgactgggagcggctggaacgat

SEQ ID NO: 92582 - DNA, 75 bp, Homo sapiens
atggggaacctaccatccgtgcacatggctttttccgctggattgactgggagcggctggaacgattggagatcc

SEQ ID NO: 92583 - DNA, 77 bp, Homo sapiens
taccatccgtgcacatggctttttccgctggattgactgggagcggctggaacgattggagatcccgcctcctttca

SEQ ID NO: 92584 - DNA, 75 bp, Homo sapiens
ccgtgcacatggctttttccgctggattgactgggagcggctggaacgattggagatcccgcctcctttcagacc

SEQ ID NO: 92585 - DNA, 70 bp, Homo sapiens
ctttttccgctggattgactgggagcggctggaacgattggagatcccgcctcctttcagaccccgcccg

SEQ ID NO: 92586 - DNA, 72 bp, Homo sapiens
attgactgggagcggctggaacgattggagatcccgcctcctttcagaccccgcccggtcagtcaccctcca

SEQ ID NO: 92587 - DNA, 71 bp, Homo sapiens
agcggctggaacgattggagatcccgcctcctttcagaccccgcccggtcagtcaccctccaggcaacaaa

SEQ ID NO: 92588 - DNA, 69 bp, Homo sapiens
ctggaacgattggagatcccgcctcctttcagaccccgcccggtcagtcaccctccaggcaacaaaaac

SEQ ID NO: 92589 - DNA, 74 bp, Homo sapiens
gagccctcggagctgcttaactttccctcccccacgtctcccacagtgtggccgcagcggcgagaactttgaca

SEQ ID NO: 92590 - DNA, 73 bp, Homo sapiens
agctgcttaactttccctcccccacgtctcccacagtgtggccgcagcggcgagaactttgacaagttcttca

SEQ ID NO: 92591 - DNA, 71 bp, Homo sapiens
ttaactttccctcccccacgtctcccacagtgtggccgcagcggcgagaactttgacaagttcttcacgcg

SEQ ID NO: 92592 - DNA, 76 bp, Homo sapiens
cccacgtctcccacagtgtggccgcagcggcgagaactttgacaagttcttcacgcgggcggcgccagcgctgacc

SEQ ID NO: 92593 - DNA, 78 bp, Homo sapiens
tctcccacagtgtggccgcagcggcgagaactttgacaagttcttcacgcgggcggcgccagcgctgacccctccaga

SEQ ID NO: 92594 - DNA, 76 bp, Homo sapiens
tggccgcagcggcgagaactttgacaagttcttcacgcgggcggcgccagcgctgacccctccagaccgcctagtc

SEQ ID NO: 92595 - DNA, 76 bp, Homo sapiens
cgagaactttgacaagttcttcacgcgggcggcgccagcgctgacccctccagaccgcctagtcctggccagcatc

SEQ ID NO: 92596 - DNA, 76 bp, Homo sapiens
actttgacaagttcttcacgcgggcggcgccagcgctgacccctccagaccgcctagtcctggccagcatcgacca

SEQ ID NO: 92597 - DNA, 77 bp, Homo sapiens
ttcttcacgcgggcggcgccagcgctgacccctccagaccgcctagtcctggccagcatcgaccaggccgatttcca

SEQ ID NO: 92598 - DNA, 76 bp, Homo sapiens
cggcgccagcgctgacccctccagaccgcctagtcctggccagcatcgaccaggccgatttccagggcttcaccta

SEQ ID NO: 92599 - DNA, 73 bp, Homo sapiens
ctgacccctccagaccgcctagtcctggccagcatcgaccaggccgatttccagggcttcacctacgtgaacc

SEQ ID NO: 92600 - DNA, 73 bp, Homo sapiens
tccagaccgcctagtcctggccagcatcgaccaggccgatttccagggcttcacctacgtgaaccccgacttc

SEQ ID NO: 92601 - DNA, 75 bp, Homo sapiens
tggccagcatcgaccaggccgatttccagggcttcacctacgtgaaccccgacttcgtgcacccggatgcccgca

SEQ ID NO: 92602 - DNA, 70 bp, Homo sapiens
accaggccgatttccagggcttcacctacgtgaaccccgacttcgtgcacccggatgcccgcagccccac

SEQ ID NO: 92603 - DNA, 72 bp, Homo sapiens
atttccagggcttcacctacgtgaaccccgacttcgtgcacccggatgcccgcagccccaccagcccagtgc

SEQ ID NO: 92604 - DNA, 74 bp, Homo sapiens
acctacgtgaaccccgacttcgtgcacccggatgcccgcagccccaccagcccagtgcctgtgcccgtcatgta

SEQ ID NO: 92605 - DNA, 76 bp, Homo sapiens
cgtgaaccccgacttcgtgcacccggatgcccgcagccccaccagcccagtgcctgtgcccgtcatgtaatctcac

SEQ ID NO: 92606 - DNA, 77 bp, Homo sapiens
acttcgtgcacccggatgcccgcagccccaccagcccagtgcctgtgcccgtcatgtaatctcacccgccgccacta

SEQ ID NO: 92607 - DNA, 75 bp, Homo sapiens
acccggatgcccgcagccccaccagcccagtgcctgtgcccgtcatgtaatctcacccgccgccactaggtgtcc

SEQ ID NO: 92608 - DNA, 74 bp, Homo sapiens
cgcagccccaccagcccagtgcctgtgcccgtcatgtaatctcacccgccgccactaggtgtccccaacgtccc

SEQ ID NO: 92609 - DNA, 72 bp, Homo sapiens
cctgtgcccgtcatgtaatctcacccgccgccactaggtgtccccaacgtcccctccgccgtgccggcggca

SEQ ID NO: 92610 - DNA, 71 bp, Homo sapiens
atgtaatctcacccgccgccactaggtgtccccaacgtcccctccgccgtgccggcggcagccccacttca

SEQ ID NO: 92611 - DNA, 69 bp, Homo sapiens
tctcacccgccgccactaggtgtccccaacgtcccctccgccgtgccggcggcagccccacttcacccc

SEQ ID NO: 92612 - DNA, 67 bp, Homo sapiens
ccaacgtcccctccgccgtgccggcggcagccccacttcacccccaacttcaccaccccctgtccca

SEQ ID NO: 92613 - DNA, 72 bp, Homo sapiens
cctccgccgtgccggcggcagccccacttcacccccaacttcaccaccccctgtcccattctagatcctgca

SEQ ID NO: 92614 - DNA, 74 bp, Homo sapiens
tgccggcggcagccccacttcacccccaacttcaccaccccctgtcccattctagatcctgcaccccagcattc

SEQ ID NO: 92615 - DNA, 73 bp, Homo sapiens
ttcacccccaacttcaccaccccctgtcccattctagatcctgcaccccagcattccagctctgcccccgcgg

SEQ ID NO: 92616 - DNA, 73 bp, Homo sapiens
aacttcaccaccccctgtcccattctagatcctgcaccccagcattccagctctgcccccgcgggttctagac

SEQ ID NO: 92617 - DNA, 71 bp, Homo sapiens
accccagcattccagctctgcccccgcgggttctagacgcccctcccaagcgttcctggccttctgaactc

SEQ ID NO: 92618 - DNA, 74 bp, Homo sapiens
tccagctctgcccccgcgggttctagacgcccctcccaagcgttcctggccttctgaactccatacagcctcta

SEQ ID NO: 92619 - DNA, 73 bp, Homo sapiens
ctctgcccccgcgggttctagacgcccctcccaagcgttcctggccttctgaactccatacagcctctacagc

SEQ ID NO: 92620 - DNA, 74 bp, Homo sapiens
ttctagacgcccctcccaagcgttcctggccttctgaactccatacagcctctacagccgtcccgcgttcaaga

SEQ ID NO: 92621 - DNA, 74 bp, Homo sapiens
ccctcccaagcgttcctggccttctgaactccatacagcctctacagccgtcccgcgttcaagacttgagcgga

SEQ ID NO: 92622 - DNA, 75 bp, Homo sapiens
cgttcctggccttctgaactccatacagcctctacagccgtcccgcgttcaagacttgagcggagcccgatattc

SEQ ID NO: 92623 - DNA, 75 bp, Homo sapiens
cttctgaactccatacagcctctacagccgtcccgcgttcaagacttgagcggagcccgatattctccctgacct

SEQ ID NO: 92624 - DNA, 76 bp, Homo sapiens
tccatacagcctctacagccgtcccgcgttcaagacttgagcggagcccgatattctccctgaccttagcgttctg

SEQ ID NO: 92625 - DNA, 73 bp, Homo sapiens
agccgtcccgcgttcaagacttgagcggagcccgatattctccctgaccttagcgttctggactctgccccaa

SEQ ID NO: 92626 - DNA, 75 bp, Homo sapiens
ttcaagacttgagcggagcccgatattctccctgaccttagcgttctggactctgccccaatcgggtccagagac

SEQ ID NO: 92627 - DNA, 73 bp, Homo sapiens
cggagcccgatattctccctgaccttagcgttctggactctgccccaatcgggtccagagaccacaccactaa

SEQ ID NO: 92628 - DNA, 73 bp, Homo sapiens
cccgatattctccctgaccttagcgttctggactctgccccaatcgggtccagagaccacaccactaaccatc

SEQ ID NO: 92629 - DNA, 73 bp, Homo sapiens
tccctgaccttagcgttctggactctgccccaatcgggtccagagaccacaccactaaccatccccaactcca

SEQ ID NO: 92630 - DNA, 73 bp, Homo sapiens
ttctggactctgccccaatcgggtccagagaccacaccactaaccatccccaactccatggggttcgagactc

SEQ ID NO: 92631 - DNA, 71 bp, Homo sapiens
aatcgggtccagagaccacaccactaaccatccccaactccatggggttcgagactccatcttggtagttc

SEQ ID NO: 92632 - DNA, 70 bp, Homo sapiens
accactaaccatccccaactccatggggttcgagactccatcttggtagttctgtgcctccccccagacc

SEQ ID NO: 92633 - DNA, 69 bp, Homo sapiens
gggttcgagactccatcttggtagttctgtgcctccccccagaccccgcccctggggaaatagcctcac

SEQ ID NO: 92634 - DNA, 67 bp, Homo sapiens
actccatcttggtagttctgtgcctccccccagaccccgcccctggggaaatagcctcacggggttg

SEQ ID NO: 92635 - DNA, 68 bp, Homo sapiens
ttggtagttctgtgcctccccccagaccccgcccctggggaaatagcctcacggggttggctgttcca

SEQ ID NO: 92636 - DNA, 69 bp, Homo sapiens
tctgtgcctccccccagaccccgcccctggggaaatagcctcacggggttggctgttccagactcaggt

SEQ ID NO: 92637 - DNA, 69 bp, Homo sapiens
agaccccgcccctggggaaatagcctcacggggttggctgttccagactcaggttccagaacagccctc

SEQ ID NO: 92638 - DNA, 70 bp, Homo sapiens
ccctggggaaatagcctcacggggttggctgttccagactcaggttccagaacagccctcggcctccgag

SEQ ID NO: 92639 - DNA, 71 bp, Homo sapiens
aaatagcctcacggggttggctgttccagactcaggttccagaacagccctcggcctccgaggctccccgc

SEQ ID NO: 92640 - DNA, 72 bp, Homo sapiens
gggttggctgttccagactcaggttccagaacagccctcggcctccgaggctccccgcctccactctagttc

SEQ ID NO: 92641 - DNA, 75 bp, Homo sapiens
ttccagactcaggttccagaacagccctcggcctccgaggctccccgcctccactctagttctagatgagtggga

SEQ ID NO: 92642 - DNA, 73 bp, Homo sapiens
actcaggttccagaacagccctcggcctccgaggctccccgcctccactctagttctagatgagtgggaggcg

SEQ ID NO: 92643 - DNA, 72 bp, Homo sapiens
agaacagccctcggcctccgaggctccccgcctccactctagttctagatgagtgggaggcgtgcccccctc

SEQ ID NO: 92644 - DNA, 72 bp, Homo sapiens
gcctccgaggctccccgcctccactctagttctagatgagtgggaggcgtgcccccctcctccagtacgtcc

SEQ ID NO: 92645 - DNA, 75 bp, Homo sapiens
ctccccgcctccactctagttctagatgagtgggaggcgtgcccccctcctccagtacgtcccgctgctgtgctc

SEQ ID NO: 92646 - DNA, 76 bp, Homo sapiens
tccactctagttctagatgagtgggaggcgtgcccccctcctccagtacgtcccgctgctgtgctctggggatttc

SEQ ID NO: 92647 - DNA, 76 bp, Homo sapiens
tagttctagatgagtgggaggcgtgcccccctcctccagtacgtcccgctgctgtgctctggggatttctgggata

SEQ ID NO: 92648 - DNA, 75 bp, Homo sapiens
tgggaggcgtgcccccctcctccagtacgtcccgctgctgtgctctggggatttctgggatatatggaggattct

SEQ ID NO: 92649 - DNA, 73 bp, Homo sapiens
cgtgcccccctcctccagtacgtcccgctgctgtgctctggggatttctgggatatatggaggattctttccc

SEQ ID NO: 92650 - DNA, 77 bp, Homo sapiens
ctccagtacgtcccgctgctgtgctctggggatttctgggatatatggaggattctttccccagaggctcccaatca

SEQ ID NO: 92651 - DNA, 77 bp, Homo sapiens
tcccgctgctgtgctctggggatttctgggatatatggaggattctttccccagaggctcccaatcagcttttgttc

SEQ ID NO: 92652 - DNA, 76 bp, Homo sapiens
tgtgctctggggatttctgggatatatggaggattctttccccagaggctcccaatcagcttttgttctagacttc

SEQ ID NO: 92653 - DNA, 72 bp, Homo sapiens
atttctgggatatatggaggattctttccccagaggctcccaatcagcttttgttctagacttccccatccc

SEQ ID NO: 92654 - DNA, 74 bp, Homo sapiens
atatatggaggattctttccccagaggctcccaatcagcttttgttctagacttccccatcccgaagccatcac

SEQ ID NO: 92655 - DNA, 72 bp, Homo sapiens
aggattctttccccagaggctcccaatcagcttttgttctagacttccccatcccgaagccatcacttctcc

SEQ ID NO: 92656 - DNA, 75 bp, Homo sapiens
cagaggctcccaatcagcttttgttctagacttccccatcccgaagccatcacttctccccgcagcccgcctgcc

SEQ ID NO: 92657 - DNA, 76 bp, Homo sapiens
ctcccaatcagcttttgttctagacttccccatcccgaagccatcacttctccccgcagcccgcctgccgtgcatg

SEQ ID NO: 92658 - DNA, 76 bp, Homo sapiens
cttttgttctagacttccccatcccgaagccatcacttctccccgcagcccgcctgccgtgcatggctcctgtctg

SEQ ID NO: 92659 - DNA, 76 bp, Homo sapiens
atcccgaagccatcacttctccccgcagcccgcctgccgtgcatggctcctgtctggctcggacccaccccaactc

SEQ ID NO: 92660 - DNA, 79 bp, Homo sapiens
cgcagcccgcctgccgtgcatggctcctgtctggctcggacccaccccaactctccccagtgcctgccactctctggga

SEQ ID NO: 92661 - DNA, 78 bp, Homo sapiens
cctgccgtgcatggctcctgtctggctcggacccaccccaactctccccagtgcctgccactctctgggactctcctc

SEQ ID NO: 92662 - DNA, 77 bp, Homo sapiens
gtgcatggctcctgtctggctcggacccaccccaactctccccagtgcctgccactctctgggactctcctcctccc

SEQ ID NO: 92663 - DNA, 73 bp, Homo sapiens
ctgtctggctcggacccaccccaactctccccagtgcctgccactctctgggactctcctcctcccctcctct

SEQ ID NO: 92664 - DNA, 71 bp, Homo sapiens
aactctccccagtgcctgccactctctgggactctcctcctcccctcctcttcccttagcctctcccaccc

SEQ ID NO: 92665 - DNA, 77 bp, Homo sapiens
tgcctgccactctctgggactctcctcctcccctcctcttcccttagcctctcccacccggccacagctgctggaga

SEQ ID NO: 92666 - DNA, 73 bp, Homo sapiens
tctctgggactctcctcctcccctcctcttcccttagcctctcccacccggccacagctgctggagaataaat

SEQ ID NO: 92667 - DNA, 75 bp, Homo sapiens
tctcctcctcccctcctcttcccttagcctctcccacccggccacagctgctggagaataaatttgggatgctga

SEQ ID NO: 92668 - DNA, 76 bp, Homo sapiens
ccctcctcttcccttagcctctcccacccggccacagctgctggagaataaatttgggatgctgatgctgaagtgt

SEQ ID NO: 92669 - DNA, 78 bp, Homo sapiens
tctcccacccggccacagctgctggagaataaatttgggatgctgatgctgaagtgtttggatattttcttgtaagct

SEQ ID NO: 92670 - DNA, 70 bp, Homo sapiens
tggggactgaaacctggtccccgcaacccccttcacgggagcagtgggagagcgcgccacagaacgactt

SEQ ID NO: 92671 - DNA, 69 bp, Homo sapiens
actgaaacctggtccccgcaacccccttcacgggagcagtgggagagcgcgccacagaacgacttttac

SEQ ID NO: 92672 - DNA, 73 bp, Homo sapiens
ccgcaacccccttcacgggagcagtgggagagcgcgccacagaacgacttttacgcaggcgcagaagcctgtt

SEQ ID NO: 92673 - DNA, 74 bp, Homo sapiens
cccttcacgggagcagtgggagagcgcgccacagaacgacttttacgcaggcgcagaagcctgtttcccctcac

SEQ ID NO: 92674 - DNA, 75 bp, Homo sapiens
agcagtgggagagcgcgccacagaacgacttttacgcaggcgcagaagcctgtttcccctcacccgcggcttcca

SEQ ID NO: 92675 - DNA, 75 bp, Homo sapiens
agagcgcgccacagaacgacttttacgcaggcgcagaagcctgtttcccctcacccgcggcttccaccctgcgca

SEQ ID NO: 92676 - DNA, 72 bp, Homo sapiens
agaacgacttttacgcaggcgcagaagcctgtttcccctcacccgcggcttccaccctgcgcaggcgcaaaa

SEQ ID NO: 92677 - DNA, 72 bp, Homo sapiens
acttttacgcaggcgcagaagcctgtttcccctcacccgcggcttccaccctgcgcaggcgcaaaaagccgc

SEQ ID NO: 92678 - DNA, 74 bp, Homo sapiens
aggcgcagaagcctgtttcccctcacccgcggcttccaccctgcgcaggcgcaaaaagccgcgctggcaacctc

SEQ ID NO: 92679 - DNA, 74 bp, Homo sapiens
gtttcccctcacccgcggcttccaccctgcgcaggcgcaaaaagccgcgctggcaacctccgcagcggtcgcgc

SEQ ID NO: 92680 - DNA, 78 bp, Homo sapiens
tcacccgcggcttccaccctgcgcaggcgcaaaaagccgcgctggcaacctccgcagcggtcgcgcgcacccttcatc

SEQ ID NO: 92681 - DNA, 76 bp, Homo sapiens
cggcttccaccctgcgcaggcgcaaaaagccgcgctggcaacctccgcagcggtcgcgcgcacccttcatccctct

SEQ ID NO: 92682 - DNA, 76 bp, Homo sapiens
aaaaagccgcgctggcaacctccgcagcggtcgcgcgcacccttcatccctcttgctgcttttgtctggcacaacc

SEQ ID NO: 92683 - DNA, 77 bp, Homo sapiens
acctccgcagcggtcgcgcgcacccttcatccctcttgctgcttttgtctggcacaaccttctcaggccctccgcga

SEQ ID NO: 92684 - DNA, 74 bp, Homo sapiens
gcgcgcacccttcatccctcttgctgcttttgtctggcacaaccttctcaggccctccgcgaggccggcccttt

SEQ ID NO: 92685 - DNA, 70 bp, Homo sapiens
acccttcatccctcttgctgcttttgtctggcacaaccttctcaggccctccgcgaggccggcccttttt

SEQ ID NO: 92686 - DNA, 70 bp, Homo sapiens
ctcttgctgcttttgtctggcacaaccttctcaggccctccgcgaggccggccctttttttctttcactt

SEQ ID NO: 92687 - DNA, 67 bp, Homo sapiens
cttttgtctggcacaaccttctcaggccctccgcgaggccggccctttttttctttcactttcccca

SEQ ID NO: 92688 - DNA, 65 bp, Homo sapiens
aaccttctcaggccctccgcgaggccggccctttttttctttcactttccccacccggagagcca

SEQ ID NO: 92689 - DNA, 68 bp, Homo sapiens
tctcaggccctccgcgaggccggccctttttttctttcactttccccacccggagagccaggtgccga

SEQ ID NO: 92690 - DNA, 66 bp, Homo sapiens
gaggccggccctttttttctttcactttccccacccggagagccaggtgccgagaactaggacctc

SEQ ID NO: 92691 - DNA, 65 bp, Homo sapiens
ggccctttttttctttcactttccccacccggagagccaggtgccgagaactaggacctcgtccc

SEQ ID NO: 92692 - DNA, 68 bp, Homo sapiens
ttctttcactttccccacccggagagccaggtgccgagaactaggacctcgtccccttctctatccct

SEQ ID NO: 92693 - DNA, 71 bp, Homo sapiens
ccacccggagagccaggtgccgagaactaggacctcgtccccttctctatcccttcccctgatccatctcg

SEQ ID NO: 92694 - DNA, 74 bp, Homo sapiens
agagccaggtgccgagaactaggacctcgtccccttctctatcccttcccctgatccatctcgtctctgttctc

SEQ ID NO: 92695 - DNA, 69 bp, Homo sapiens
actaggacctcgtccccttctctatcccttcccctgatccatctcgtctctgttctccttcccttttcc

SEQ ID NO: 92696 - DNA, 69 bp, Homo sapiens
ctgatccatctcgtctctgttctccttcccttttccgttcccgaagccggaaggagccgaggtacccac

SEQ ID NO: 92697 - DNA, 64 bp, Homo sapiens
gtctctgttctccttcccttttccgttcccgaagccggaaggagccgaggtacccacggaaaaa

SEQ ID NO: 92698 - DNA, 63 bp, Homo sapiens
cccttttccgttcccgaagccggaaggagccgaggtacccacggaaaaagtcgaagctgtccc

SEQ ID NO: 92699 - DNA, 68 bp, Homo sapiens
aggtacccacggaaaaagtcgaagctgtccccggagagtgaggccttcacgaagcggtggcggaagga

SEQ ID NO: 92700 - DNA, 71 bp, Homo sapiens
aaaaagtcgaagctgtccccggagagtgaggccttcacgaagcggtggcggaaggagccgaagttctctga

SEQ ID NO: 92701 - DNA, 74 bp, Homo sapiens
aagctgtccccggagagtgaggccttcacgaagcggtggcggaaggagccgaagttctctgatcggaggcgtga

SEQ ID NO: 92702 - DNA, 76 bp, Homo sapiens
cccggagagtgaggccttcacgaagcggtggcggaaggagccgaagttctctgatcggaggcgtgagcaagtggca

SEQ ID NO: 92703 - DNA, 75 bp, Homo sapiens
aggccttcacgaagcggtggcggaaggagccgaagttctctgatcggaggcgtgagcaagtggcatctccggaaa

SEQ ID NO: 92704 - DNA, 75 bp, Homo sapiens
aagcggtggcggaaggagccgaagttctctgatcggaggcgtgagcaagtggcatctccggaaagagccgaaaca

SEQ ID NO: 92705 - DNA, 75 bp, Homo sapiens
aaggagccgaagttctctgatcggaggcgtgagcaagtggcatctccggaaagagccgaaacacggactcgagct

SEQ ID NO: 92706 - DNA, 75 bp, Homo sapiens
aagttctctgatcggaggcgtgagcaagtggcatctccggaaagagccgaaacacggactcgagcttaatcccag

SEQ ID NO: 92707 - DNA, 76 bp, Homo sapiens
tctgatcggaggcgtgagcaagtggcatctccggaaagagccgaaacacggactcgagcttaatcccaggaggggc

SEQ ID NO: 92708 - DNA, 74 bp, Homo sapiens
tgagcaagtggcatctccggaaagagccgaaacacggactcgagcttaatcccaggaggggcccgagggcgaga

SEQ ID NO: 92709 - DNA, 68 bp, Homo sapiens
aaagagccgaaacacggactcgagcttaatcccaggaggggcccgagggcgagatccggaaatctccg

SEQ ID NO: 92710 - DNA, 68 bp, Homo sapiens
ccgaaacacggactcgagcttaatcccaggaggggcccgagggcgagatccggaaatctccggaaaga

SEQ ID NO: 92711 - DNA, 68 bp, Homo sapiens
actcgagcttaatcccaggaggggcccgagggcgagatccggaaatctccggaaagagccgaaggccg

SEQ ID NO: 92712 - DNA, 66 bp, Homo sapiens
ccaggaggggcccgagggcgagatccggaaatctccggaaagagccgaaggccgggacggttagga

SEQ ID NO: 92713 - DNA, 66 bp, Homo sapiens
cccgagggcgagatccggaaatctccggaaagagccgaaggccgggacggttaggattgtcggaag

SEQ ID NO: 92714 - DNA, 68 bp, Homo sapiens
agatccggaaatctccggaaagagccgaaggccgggacggttaggattgtcggaagtggccgattgct

SEQ ID NO: 92715 - DNA, 69 bp, Homo sapiens
aaagagccgaaggccgggacggttaggattgtcggaagtggccgattgcttggacagggccggcggaga

SEQ ID NO: 92716 - DNA, 73 bp, Homo sapiens
gttaggattgtcggaagtggccgattgcttggacagggccggcggagaagatcggagcaagtccgtggaagaa

SEQ ID NO: 92717 - DNA, 73 bp, Homo sapiens
attgtcggaagtggccgattgcttggacagggccggcggagaagatcggagcaagtccgtggaagaagccaaa

SEQ ID NO: 92718 - DNA, 72 bp, Homo sapiens
ttggacagggccggcggagaagatcggagcaagtccgtggaagaagccaaagactgggacggattgaattgt

SEQ ID NO: 92719 - DNA, 72 bp, Homo sapiens
gcggagaagatcggagcaagtccgtggaagaagccaaagactgggacggattgaattgttggaagaacccga

SEQ ID NO: 92720 - DNA, 70 bp, Homo sapiens
aagatcggagcaagtccgtggaagaagccaaagactgggacggattgaattgttggaagaacccgaactc

SEQ ID NO: 92721 - DNA, 69 bp, Homo sapiens
aagtccgtggaagaagccaaagactgggacggattgaattgttggaagaacccgaactcgcagagggga

SEQ ID NO: 92722 - DNA, 71 bp, Homo sapiens
ggaagaagccaaagactgggacggattgaattgttggaagaacccgaactcgcagaggggactgggcgcag

SEQ ID NO: 92723 - DNA, 72 bp, Homo sapiens
aaagactgggacggattgaattgttggaagaacccgaactcgcagaggggactgggcgcagtggcacacgag

SEQ ID NO: 92724 - DNA, 72 bp, Homo sapiens
attgaattgttggaagaacccgaactcgcagaggggactgggcgcagtggcacacgaggacacacggaaacc

SEQ ID NO: 92725 - DNA, 72 bp, Homo sapiens
ttgttggaagaacccgaactcgcagaggggactgggcgcagtggcacacgaggacacacggaaacctccgaa

SEQ ID NO: 92726 - DNA, 75 bp, Homo sapiens
gaactcgcagaggggactgggcgcagtggcacacgaggacacacggaaacctccgaacgttgaggagataatctc

SEQ ID NO: 92727 - DNA, 71 bp, Homo sapiens
aggggactgggcgcagtggcacacgaggacacacggaaacctccgaacgttgaggagataatctcggaaaa

SEQ ID NO: 92728 - DNA, 71 bp, Homo sapiens
gcgcagtggcacacgaggacacacggaaacctccgaacgttgaggagataatctcggaaaagttacggaaa

SEQ ID NO: 92729 - DNA, 66 bp, Homo sapiens
acacgaggacacacggaaacctccgaacgttgaggagataatctcggaaaagttacggaaacctgg

SEQ ID NO: 92730 - DNA, 65 bp, Homo sapiens
aggacacacggaaacctccgaacgttgaggagataatctcggaaaagttacggaaacctgggaag

SEQ ID NO: 92731 - DNA, 62 bp, Homo sapiens
agataatctcggaaaagttacggaaacctgggaagtcggcgaaaccctacgttcgggtgttt

SEQ ID NO: 92732 - DNA, 62 bp, Homo sapiens
aaaagttacggaaacctgggaagtcggcgaaaccctacgttcgggtgttttcggaagcagcc

SEQ ID NO: 92733 - DNA, 66 bp, Homo sapiens
aaacctgggaagtcggcgaaaccctacgttcgggtgttttcggaagcagccgaagcggccgcctgc

SEQ ID NO: 92734 - DNA, 67 bp, Homo sapiens
aagtcggcgaaaccctacgttcgggtgttttcggaagcagccgaagcggccgcctgcttcgccttcg

SEQ ID NO: 92735 - DNA, 68 bp, Homo sapiens
aaaccctacgttcgggtgttttcggaagcagccgaagcggccgcctgcttcgccttcgtccagtatcc

SEQ ID NO: 92736 - DNA, 72 bp, Homo sapiens
gttcgggtgttttcggaagcagccgaagcggccgcctgcttcgccttcgtccagtatccggagatagccgag

SEQ ID NO: 92737 - DNA, 76 bp, Homo sapiens
tttcggaagcagccgaagcggccgcctgcttcgccttcgtccagtatccggagatagccgaggcgcttcggagcca

SEQ ID NO: 92738 - DNA, 74 bp, Homo sapiens
agccgaagcggccgcctgcttcgccttcgtccagtatccggagatagccgaggcgcttcggagccaggctcggg

SEQ ID NO: 92739 - DNA, 73 bp, Homo sapiens
cgcctgcttcgccttcgtccagtatccggagatagccgaggcgcttcggagccaggctcggggggaggggcaa

SEQ ID NO: 92740 - DNA, 73 bp, Homo sapiens
tcgccttcgtccagtatccggagatagccgaggcgcttcggagccaggctcggggggaggggcaagctcgcgg

SEQ ID NO: 92741 - DNA, 70 bp, Homo sapiens
agatagccgaggcgcttcggagccaggctcggggggaggggcaagctcgcgggcgggcgggcgggtgagg

SEQ ID NO: 92742 - DNA, 68 bp, Homo sapiens
aggcgcttcggagccaggctcggggggaggggcaagctcgcgggcgggcgggcgggtgagggggcgga

SEQ ID NO: 92743 - DNA, 66 bp, Homo sapiens
agccaggctcggggggaggggcaagctcgcgggcgggcgggcgggtgagggggcggagcccgggcg

SEQ ID NO: 92744 - DNA, 64 bp, Homo sapiens
gggaggggcaagctcgcgggcgggcgggcgggtgagggggcggagcccgggcggggcggggagg

SEQ ID NO: 92745 - DNA, 65 bp, Homo sapiens
aagctcgcgggcgggcgggcgggtgagggggcggagcccgggcggggcggggagggctgccggag

SEQ ID NO: 92746 - DNA, 65 bp, Homo sapiens
cgggcgggcgggtgagggggcggagcccgggcggggcggggagggctgccggaggcttgattagg

SEQ ID NO: 92747 - DNA, 68 bp, Homo sapiens
gtgagggggcggagcccgggcggggcggggagggctgccggaggcttgattaggtaggaggtggcgaa

SEQ ID NO: 92748 - DNA, 68 bp, Homo sapiens
cggggcggggagggctgccggaggcttgattaggtaggaggtggcgaagcgccggcggcggccggaag

SEQ ID NO: 92749 - DNA, 72 bp, Homo sapiens
gaggcttgattaggtaggaggtggcgaagcgccggcggcggccggaagtagccgaagccagcggcggaagta

SEQ ID NO: 92750 - DNA, 70 bp, Homo sapiens
attaggtaggaggtggcgaagcgccggcggcggccggaagtagccgaagccagcggcggaagtagccgaa

SEQ ID NO: 92751 - DNA, 72 bp, Homo sapiens
aggaggtggcgaagcgccggcggcggccggaagtagccgaagccagcggcggaagtagccgaagcggctgga

SEQ ID NO: 92752 - DNA, 72 bp, Homo sapiens
aagcgccggcggcggccggaagtagccgaagccagcggcggaagtagccgaagcggctggagcgggcggcaa

SEQ ID NO: 92753 - DNA, 72 bp, Homo sapiens
cggccggaagtagccgaagccagcggcggaagtagccgaagcggctggagcgggcggcaaggcgaggcgaaa

SEQ ID NO: 92754 - DNA, 77 bp, Homo sapiens
aagtagccgaagcggctggagcgggcggcaaggcgaggcgaaagctgcacagggccctacgcggccgcctcagcatg

SEQ ID NO: 92755 - DNA, 78 bp, Homo sapiens
ggctggagcgggcggcaaggcgaggcgaaagctgcacagggccctacgcggccgcctcagcatgtcggacttcgacga

SEQ ID NO: 92756 - DNA, 76 bp, Homo sapiens
cgggcggcaaggcgaggcgaaagctgcacagggccctacgcggccgcctcagcatgtcggacttcgacgagttcga

SEQ ID NO: 92757 - DNA, 79 bp, Homo sapiens
aaggcgaggcgaaagctgcacagggccctacgcggccgcctcagcatgtcggacttcgacgagttcgagcggcagctca

SEQ ID NO: 92758 - DNA, 79 bp, Homo sapiens
gctgcacagggccctacgcggccgcctcagcatgtcggacttcgacgagttcgagcggcagctcaacgagaataaacaa

SEQ ID NO: 92759 - DNA, 75 bp, Homo sapiens
acagggccctacgcggccgcctcagcatgtcggacttcgacgagttcgagcggcagctcaacgagaataaacaag

SEQ ID NO: 92760 - DNA, 76 bp, Homo sapiens
acgcggccgcctcagcatgtcggacttcgacgagttcgagcggcagctcaacgagaataaacaaggtgagggcacc

SEQ ID NO: 92761 - DNA, 71 bp, Homo sapiens
atccttactccgcttatcccgtgcccctcctctcacccttgcccagagcgggacaaggagaaccggcatcg

SEQ ID NO: 92762 - DNA, 74 bp, Homo sapiens
tactccgcttatcccgtgcccctcctctcacccttgcccagagcgggacaaggagaaccggcatcggaagcgca

SEQ ID NO: 92763 - DNA, 77 bp, Homo sapiens
gtgcccctcctctcacccttgcccagagcgggacaaggagaaccggcatcggaagcgcagccacagccgctctcgga

SEQ ID NO: 92764 - DNA, 76 bp, Homo sapiens
tctcacccttgcccagagcgggacaaggagaaccggcatcggaagcgcagccacagccgctctcggagccgggacc

SEQ ID NO: 92765 - DNA, 75 bp, Homo sapiens
cttgcccagagcgggacaaggagaaccggcatcggaagcgcagccacagccgctctcggagccgggaccgcaaac

SEQ ID NO: 92766 - DNA, 74 bp, Homo sapiens
ggacaaggagaaccggcatcggaagcgcagccacagccgctctcggagccgggaccgcaaacgccggagccgga

SEQ ID NO: 92767 - DNA, 74 bp, Homo sapiens
aggagaaccggcatcggaagcgcagccacagccgctctcggagccgggaccgcaaacgccggagccggagccgc

SEQ ID NO: 92768 - DNA, 74 bp, Homo sapiens
atcggaagcgcagccacagccgctctcggagccgggaccgcaaacgccggagccggagccgcgaccggcgcaac

SEQ ID NO: 92769 - DNA, 71 bp, Homo sapiens
agccacagccgctctcggagccgggaccgcaaacgccggagccggagccgcgaccggcgcaaccgggacca

SEQ ID NO: 92770 - DNA, 71 bp, Homo sapiens
tctcggagccgggaccgcaaacgccggagccggagccgcgaccggcgcaaccgggaccagcggagcgcctc

SEQ ID NO: 92771 - DNA, 69 bp, Homo sapiens
gggaccgcaaacgccggagccggagccgcgaccggcgcaaccgggaccagcggagcgcctcccgggaca

SEQ ID NO: 92772 - DNA, 69 bp, Homo sapiens
aaacgccggagccggagccgcgaccggcgcaaccgggaccagcggagcgcctcccgggacaggcgacga

SEQ ID NO: 92773 - DNA, 71 bp, Homo sapiens
agccggagccgcgaccggcgcaaccgggaccagcggagcgcctcccgggacaggcgacgacgcaggtacta

SEQ ID NO: 92774 - DNA, 71 bp, Homo sapiens
cgaccggcgcaaccgggaccagcggagcgcctcccgggacaggcgacgacgcaggtactagggctcaggga

SEQ ID NO: 92775 - DNA, 69 bp, Homo sapiens
aaccgggaccagcggagcgcctcccgggacaggcgacgacgcaggtactagggctcagggatcccctgg

SEQ ID NO: 92776 - DNA, 72 bp, Homo sapiens
accagcggagcgcctcccgggacaggcgacgacgcaggtactagggctcagggatcccctgggccagcctgg

SEQ ID NO: 92777 - DNA, 66 bp, Homo sapiens
cttgggggggtgtggcatgtggggaagacgagggtccccagtcacccctccccatacctttccctc

SEQ ID NO: 92778 - DNA, 66 bp, Homo sapiens
ggtgtggcatgtggggaagacgagggtccccagtcacccctccccatacctttccctcccaccccc

SEQ ID NO: 92779 - DNA, 65 bp, Homo sapiens
gaagacgagggtccccagtcacccctccccatacctttccctcccaccccccagcaaacctttga

SEQ ID NO: 92780 - DNA, 64 bp, Homo sapiens
agggtccccagtcacccctccccatacctttccctcccaccccccagcaaacctttgaccagag

SEQ ID NO: 92781 - DNA, 66 bp, Homo sapiens
agtcacccctccccatacctttccctcccaccccccagcaaacctttgaccagaggcgctaaagag

SEQ ID NO: 92782 - DNA, 70 bp, Homo sapiens
atacctttccctcccaccccccagcaaacctttgaccagaggcgctaaagaggagcacggtggactgatg

SEQ ID NO: 92783 - DNA, 74 bp, Homo sapiens
ctcccaccccccagcaaacctttgaccagaggcgctaaagaggagcacggtggactgatgtgagcttctcttcc

SEQ ID NO: 92784 - DNA, 75 bp, Homo sapiens
cccagcaaacctttgaccagaggcgctaaagaggagcacggtggactgatgtgagcttctcttcctgccccttcc

SEQ ID NO: 92785 - DNA, 73 bp, Homo sapiens
aaacctttgaccagaggcgctaaagaggagcacggtggactgatgtgagcttctcttcctgccccttcctccc

SEQ ID NO: 92786 - DNA, 77 bp, Homo sapiens
aggcgctaaagaggagcacggtggactgatgtgagcttctcttcctgccccttcctccctgatgtccactcccttca

SEQ ID NO: 92787 - DNA, 76 bp, Homo sapiens
taaagaggagcacggtggactgatgtgagcttctcttcctgccccttcctccctgatgtccactcccttcaccttc

SEQ ID NO: 92788 - DNA, 74 bp, Homo sapiens
acggtggactgatgtgagcttctcttcctgccccttcctccctgatgtccactcccttcaccttcctcacgccc

SEQ ID NO: 92789 - DNA, 70 bp, Homo sapiens
tcagactgaggttgccctgccccgctctcccctcccacctcccccagtcgttccccccgccacgagaaga

SEQ ID NO: 92790 - DNA, 67 bp, Homo sapiens
gttgccctgccccgctctcccctcccacctcccccagtcgttccccccgccacgagaagaagaagaa

SEQ ID NO: 92791 - DNA, 65 bp, Homo sapiens
ccgctctcccctcccacctcccccagtcgttccccccgccacgagaagaagaagaaggtccgtaa

SEQ ID NO: 92792 - DNA, 65 bp, Homo sapiens
ctcccacctcccccagtcgttccccccgccacgagaagaagaagaaggtccgtaaatactgggac

SEQ ID NO: 92793 - DNA, 66 bp, Homo sapiens
acctcccccagtcgttccccccgccacgagaagaagaagaaggtccgtaaatactgggacgtgcca

SEQ ID NO: 92794 - DNA, 67 bp, Homo sapiens
gttccccccgccacgagaagaagaagaaggtccgtaaatactgggacgtgccacccccaggctttga

SEQ ID NO: 92795 - DNA, 71 bp, Homo sapiens
ccgccacgagaagaagaagaaggtccgtaaatactgggacgtgccacccccaggctttgagcacatcaccc

SEQ ID NO: 92796 - DNA, 73 bp, Homo sapiens
agaagaagaaggtccgtaaatactgggacgtgccacccccaggctttgagcacatcaccccaatgcagtacaa

SEQ ID NO: 92797 - DNA, 75 bp, Homo sapiens
aggtccgtaaatactgggacgtgccacccccaggctttgagcacatcaccccaatgcagtacaaggccatgcaag

SEQ ID NO: 92798 - DNA, 76 bp, Homo sapiens
atactgggacgtgccacccccaggctttgagcacatcaccccaatgcagtacaaggccatgcaaggtaggcccctg

SEQ ID NO: 92799 - DNA, 78 bp, Homo sapiens
acccccaggctttgagcacatcaccccaatgcagtacaaggccatgcaaggtaggcccctggccaggctgctcccaga

SEQ ID NO: 92800 - DNA, 79 bp, Homo sapiens
tttgagcacatcaccccaatgcagtacaaggccatgcaaggtaggcccctggccaggctgctcccagagcgggagggta

SEQ ID NO: 92801 - DNA, 72 bp, Homo sapiens
actgagcattcccctgatggggttttatccggcttttattccctttgaagctgcgggtcagattccagccac

SEQ ID NO: 92802 - DNA, 72 bp, Homo sapiens
ccctgatggggttttatccggcttttattccctttgaagctgcgggtcagattccagccactgctcttctcc

SEQ ID NO: 92803 - DNA, 73 bp, Homo sapiens
gggttttatccggcttttattccctttgaagctgcgggtcagattccagccactgctcttctccccaccatga

SEQ ID NO: 92804 - DNA, 74 bp, Homo sapiens
cttttattccctttgaagctgcgggtcagattccagccactgctcttctccccaccatgacccctgacggtctg

SEQ ID NO: 92805 - DNA, 77 bp, Homo sapiens
tccctttgaagctgcgggtcagattccagccactgctcttctccccaccatgacccctgacggtctggctgtgaccc

SEQ ID NO: 92806 - DNA, 77 bp, Homo sapiens
tgcgggtcagattccagccactgctcttctccccaccatgacccctgacggtctggctgtgaccccaacgccggtgc

SEQ ID NO: 92807 - DNA, 74 bp, Homo sapiens
agattccagccactgctcttctccccaccatgacccctgacggtctggctgtgaccccaacgccggtgcccgtg

SEQ ID NO: 92808 - DNA, 72 bp, Homo sapiens
ctcttctccccaccatgacccctgacggtctggctgtgaccccaacgccggtgcccgtggtcgggagccaga

SEQ ID NO: 92809 - DNA, 75 bp, Homo sapiens
caccatgacccctgacggtctggctgtgaccccaacgccggtgcccgtggtcgggagccagatgaccagacaagc

SEQ ID NO: 92810 - DNA, 73 bp, Homo sapiens
ccctgacggtctggctgtgaccccaacgccggtgcccgtggtcgggagccagatgaccagacaagcccggcgc

SEQ ID NO: 92811 - DNA, 75 bp, Homo sapiens
tggctgtgaccccaacgccggtgcccgtggtcgggagccagatgaccagacaagcccggcgcctctacgtgggca

SEQ ID NO: 92812 - DNA, 72 bp, Homo sapiens
cccaacgccggtgcccgtggtcgggagccagatgaccagacaagcccggcgcctctacgtgggcaacatccc

SEQ ID NO: 92813 - DNA, 77 bp, Homo sapiens
gtgcccgtggtcgggagccagatgaccagacaagcccggcgcctctacgtgggcaacatcccctttggcatcactga

SEQ ID NO: 92814 - DNA, 76 bp, Homo sapiens
cgtggtcgggagccagatgaccagacaagcccggcgcctctacgtgggcaacatcccctttggcatcactgaggta

SEQ ID NO: 92815 - DNA, 76 bp, Homo sapiens
agccagatgaccagacaagcccggcgcctctacgtgggcaacatcccctttggcatcactgaggtactgccctccc

SEQ ID NO: 92816 - DNA, 73 bp, Homo sapiens
ccagacaagcccggcgcctctacgtgggcaacatcccctttggcatcactgaggtactgccctcccctgcccc

SEQ ID NO: 92817 - DNA, 71 bp, Homo sapiens
gcctctacgtgggcaacatcccctttggcatcactgaggtactgccctcccctgccccctaccctctccct

SEQ ID NO: 92818 - DNA, 69 bp, Homo sapiens
acctcccttcccccgcccccccccttgtctcctattccctctgcaggaggccatgatggatttcttcaa

SEQ ID NO: 92819 - DNA, 73 bp, Homo sapiens
ccccgcccccccccttgtctcctattccctctgcaggaggccatgatggatttcttcaacgcccagatgcgcc

SEQ ID NO: 92820 - DNA, 76 bp, Homo sapiens
ccccttgtctcctattccctctgcaggaggccatgatggatttcttcaacgcccagatgcgcctgggggggctgac

SEQ ID NO: 92821 - DNA, 78 bp, Homo sapiens
tgtctcctattccctctgcaggaggccatgatggatttcttcaacgcccagatgcgcctgggggggctgacccaggcc

SEQ ID NO: 92822 - DNA, 77 bp, Homo sapiens
tctgcaggaggccatgatggatttcttcaacgcccagatgcgcctgggggggctgacccaggcccctggcaacccag

SEQ ID NO: 92823 - DNA, 74 bp, Homo sapiens
aggccatgatggatttcttcaacgcccagatgcgcctgggggggctgacccaggcccctggcaacccagtgttg

SEQ ID NO: 92824 - DNA, 75 bp, Homo sapiens
atttcttcaacgcccagatgcgcctgggggggctgacccaggcccctggcaacccagtgttggctgtgcagatta

SEQ ID NO: 92825 - DNA, 76 bp, Homo sapiens
tcaacgcccagatgcgcctgggggggctgacccaggcccctggcaacccagtgttggctgtgcagattaaccagga

SEQ ID NO: 92826 - DNA, 73 bp, Homo sapiens
atgcgcctgggggggctgacccaggcccctggcaacccagtgttggctgtgcagattaaccaggacaagaatt

SEQ ID NO: 92827 - DNA, 73 bp, Homo sapiens
gctgacccaggcccctggcaacccagtgttggctgtgcagattaaccaggacaagaattttgcctttttggag

SEQ ID NO: 92828 - DNA, 73 bp, Homo sapiens
aggcccctggcaacccagtgttggctgtgcagattaaccaggacaagaattttgcctttttggaggtgagctg

SEQ ID NO: 92829 - DNA, 72 bp, Homo sapiens
aacccagtgttggctgtgcagattaaccaggacaagaattttgcctttttggaggtgagctgggggagtgag

SEQ ID NO: 92830 - DNA, 75 bp, Homo sapiens
tgttggctgtgcagattaaccaggacaagaattttgcctttttggaggtgagctgggggagtgagtgaggtccag

SEQ ID NO: 92831 - DNA, 74 bp, Homo sapiens
tgtactagtccctgacccccatccctcaccactcctttctctttcattcagttccgctcagtggacgagactac

SEQ ID NO: 92832 - DNA, 73 bp, Homo sapiens
cccccatccctcaccactcctttctctttcattcagttccgctcagtggacgagactacccaggctatggcct

SEQ ID NO: 92833 - DNA, 80 bp, Homo sapiens
tcaccactcctttctctttcattcagttccgctcagtggacgagactacccaggctatggcctttgatggcatcatcttc

SEQ ID NO: 92834 - DNA, 79 bp, Homo sapiens
tttctctttcattcagttccgctcagtggacgagactacccaggctatggcctttgatggcatcatcttccagggccag

SEQ ID NO: 92835 - DNA, 80 bp, Homo sapiens
tttcattcagttccgctcagtggacgagactacccaggctatggcctttgatggcatcatcttccagggccagtcactaa

SEQ ID NO: 92836 - DNA, 80 bp, Homo sapiens
ttccgctcagtggacgagactacccaggctatggcctttgatggcatcatcttccagggccagtcactaaagatccgcag

SEQ ID NO: 92837 - DNA, 79 bp, Homo sapiens
acgagactacccaggctatggcctttgatggcatcatcttccagggccagtcactaaagatccgcaggcctcacgacta

SEQ ID NO: 92838 - DNA, 80 bp, Homo sapiens
caggctatggcctttgatggcatcatcttccagggccagtcactaaagatccgcaggcctcacgactaccagccgcttcc

SEQ ID NO: 92839 - DNA, 82 bp, Homo sapiens
tatggcctttgatggcatcatcttccagggccagtcactaaagatccgcaggcctcacgactaccagccgcttcctggcatg

SEQ ID NO: 92840 - DNA, 81 bp, Homo sapiens
atggcatcatcttccagggccagtcactaaagatccgcaggcctcacgactaccagccgcttcctggcatgtcagagaacc

SEQ ID NO: 92841 - DNA, 77 bp, Homo sapiens
cagggccagtcactaaagatccgcaggcctcacgactaccagccgcttcctggcatgtcagagaacccctccgtcta

SEQ ID NO: 92842 - DNA, 78 bp, Homo sapiens
agtcactaaagatccgcaggcctcacgactaccagccgcttcctggcatgtcagagaacccctccgtctatgtgcctg

SEQ ID NO: 92843 - DNA, 78 bp, Homo sapiens
aagatccgcaggcctcacgactaccagccgcttcctggcatgtcagagaacccctccgtctatgtgcctggtgagtgg

SEQ ID NO: 92844 - DNA, 77 bp, Homo sapiens
ctcacgactaccagccgcttcctggcatgtcagagaacccctccgtctatgtgcctggtgagtgggggatccattaa

SEQ ID NO: 92845 - DNA, 75 bp, Homo sapiens
ctaccagccgcttcctggcatgtcagagaacccctccgtctatgtgcctggtgagtgggggatccattaagggcc

SEQ ID NO: 92846 - DNA, 73 bp, Homo sapiens
cttcctggcatgtcagagaacccctccgtctatgtgcctggtgagtgggggatccattaagggcccctttctc

SEQ ID NO: 92847 - DNA, 69 bp, Homo sapiens
aggttttgggagataacctggtactggaattgaagtcctcctcttctctacccataggggttgtgtcca

SEQ ID NO: 92848 - DNA, 72 bp, Homo sapiens
tgggagataacctggtactggaattgaagtcctcctcttctctacccataggggttgtgtccactgtggtcc

SEQ ID NO: 92849 - DNA, 73 bp, Homo sapiens
tactggaattgaagtcctcctcttctctacccataggggttgtgtccactgtggtccccgactctgcccacaa

SEQ ID NO: 92850 - DNA, 72 bp, Homo sapiens
aattgaagtcctcctcttctctacccataggggttgtgtccactgtggtccccgactctgcccacaagctgt

SEQ ID NO: 92851 - DNA, 72 bp, Homo sapiens
cctcctcttctctacccataggggttgtgtccactgtggtccccgactctgcccacaagctgttcatcgggg

SEQ ID NO: 92852 - DNA, 72 bp, Homo sapiens
tctacccataggggttgtgtccactgtggtccccgactctgcccacaagctgttcatcgggggcttacccaa

SEQ ID NO: 92853 - DNA, 74 bp, Homo sapiens
ttgtgtccactgtggtccccgactctgcccacaagctgttcatcgggggcttacccaactacctgaacgatgac

SEQ ID NO: 92854 - DNA, 72 bp, Homo sapiens
actgtggtccccgactctgcccacaagctgttcatcgggggcttacccaactacctgaacgatgaccaggta

SEQ ID NO: 92855 - DNA, 70 bp, Homo sapiens
cccgactctgcccacaagctgttcatcgggggcttacccaactacctgaacgatgaccaggtaacttccc

SEQ ID NO: 92856 - DNA, 70 bp, Homo sapiens
cccacaagctgttcatcgggggcttacccaactacctgaacgatgaccaggtaacttccctgcctccctc

SEQ ID NO: 92857 - DNA, 69 bp, Homo sapiens
ttcatcgggggcttacccaactacctgaacgatgaccaggtaacttccctgcctccctccagacccgtc

SEQ ID NO: 92858 - DNA, 66 bp, Homo sapiens
cttacccaactacctgaacgatgaccaggtaacttccctgcctccctccagacccgtccccccacc

SEQ ID NO: 92859 - DNA, 69 bp, Homo sapiens
taacttccctgcctccctccagacccgtccccccaccccgccccacctcatcccagccctgatggactc

SEQ ID NO: 92860 - DNA, 77 bp, Homo sapiens
accccgccccacctcatcccagccctgatggactctcggctactgcaggtcaaagagctgctgacatcctttgggcc

SEQ ID NO: 92861 - DNA, 80 bp, Homo sapiens
ctcatcccagccctgatggactctcggctactgcaggtcaaagagctgctgacatcctttgggcccctcaaggccttcaa

SEQ ID NO: 92862 - DNA, 78 bp, Homo sapiens
ccctgatggactctcggctactgcaggtcaaagagctgctgacatcctttgggcccctcaaggccttcaacctggtca

SEQ ID NO: 92863 - DNA, 77 bp, Homo sapiens
atggactctcggctactgcaggtcaaagagctgctgacatcctttgggcccctcaaggccttcaacctggtcaagga

SEQ ID NO: 92864 - DNA, 76 bp, Homo sapiens
ctactgcaggtcaaagagctgctgacatcctttgggcccctcaaggccttcaacctggtcaaggacagtgccacgg

SEQ ID NO: 92865 - DNA, 74 bp, Homo sapiens
aaagagctgctgacatcctttgggcccctcaaggccttcaacctggtcaaggacagtgccacggggctctccaa

SEQ ID NO: 92866 - DNA, 72 bp, Homo sapiens
ctgacatcctttgggcccctcaaggccttcaacctggtcaaggacagtgccacggggctctccaagggctac

SEQ ID NO: 92867 - DNA, 73 bp, Homo sapiens
ttgggcccctcaaggccttcaacctggtcaaggacagtgccacggggctctccaagggctacgccttctgtga

SEQ ID NO: 92868 - DNA, 73 bp, Homo sapiens
aaggccttcaacctggtcaaggacagtgccacggggctctccaagggctacgccttctgtgagtacgtggaca

SEQ ID NO: 92869 - DNA, 76 bp, Homo sapiens
ttcaacctggtcaaggacagtgccacggggctctccaagggctacgccttctgtgagtacgtggacatcaacgtca

SEQ ID NO: 92870 - DNA, 76 bp, Homo sapiens
aaggacagtgccacggggctctccaagggctacgccttctgtgagtacgtggacatcaacgtcacggatcaggtga

SEQ ID NO: 92871 - DNA, 72 bp, Homo sapiens
acggggctctccaagggctacgccttctgtgagtacgtggacatcaacgtcacggatcaggtgagtccccgg

SEQ ID NO: 92872 - DNA, 75 bp, Homo sapiens
ctctccaagggctacgccttctgtgagtacgtggacatcaacgtcacggatcaggtgagtccccggtcgctggcc

SEQ ID NO: 92873 - DNA, 78 bp, Homo sapiens
tacgccttctgtgagtacgtggacatcaacgtcacggatcaggtgagtccccggtcgctggccgctgccgcgtctgtc

SEQ ID NO: 92874 - DNA, 72 bp, Homo sapiens
ccccacctctccccgcaccccccgacccctcatcctccaaacacaggccattgcggggctgaacggcatgca

SEQ ID NO: 92875 - DNA, 73 bp, Homo sapiens
cctctccccgcaccccccgacccctcatcctccaaacacaggccattgcggggctgaacggcatgcagctggg

SEQ ID NO: 92876 - DNA, 77 bp, Homo sapiens
cccgacccctcatcctccaaacacaggccattgcggggctgaacggcatgcagctgggggataagaagctgctggtc

SEQ ID NO: 92877 - DNA, 81 bp, Homo sapiens
tcatcctccaaacacaggccattgcggggctgaacggcatgcagctgggggataagaagctgctggtccagagggcgagtg

SEQ ID NO: 92878 - DNA, 79 bp, Homo sapiens
aaacacaggccattgcggggctgaacggcatgcagctgggggataagaagctgctggtccagagggcgagtgtgggagc

SEQ ID NO: 92879 - DNA, 80 bp, Homo sapiens
attgcggggctgaacggcatgcagctgggggataagaagctgctggtccagagggcgagtgtgggagccaagaatgccac

SEQ ID NO: 92880 - DNA, 82 bp, Homo sapiens
gggctgaacggcatgcagctgggggataagaagctgctggtccagagggcgagtgtgggagccaagaatgccacgctggtga

SEQ ID NO: 92881 - DNA, 78 bp, Homo sapiens
atgcagctgggggataagaagctgctggtccagagggcgagtgtgggagccaagaatgccacgctggtgagccccccg

SEQ ID NO: 92882 - DNA, 78 bp, Homo sapiens
ataagaagctgctggtccagagggcgagtgtgggagccaagaatgccacgctggtgagccccccggcacgtcatcttc

SEQ ID NO: 92883 - DNA, 80 bp, Homo sapiens
tgctggtccagagggcgagtgtgggagccaagaatgccacgctggtgagccccccggcacgtcatcttccattggcttga

SEQ ID NO: 92884 - DNA, 76 bp, Homo sapiens
agagggcgagtgtgggagccaagaatgccacgctggtgagccccccggcacgtcatcttccattggcttgagggac

SEQ ID NO: 92885 - DNA, 74 bp, Homo sapiens
agtgtgggagccaagaatgccacgctggtgagccccccggcacgtcatcttccattggcttgagggaccctggg

SEQ ID NO: 92886 - DNA, 79 bp, Homo sapiens
tgggtctgggccccctgtgacgccgctgcctcccctggccccacagagcaccatcaatcagacgcctgtgaccctgcaa

SEQ ID NO: 92887 - DNA, 79 bp, Homo sapiens
tgggccccctgtgacgccgctgcctcccctggccccacagagcaccatcaatcagacgcctgtgaccctgcaagtgccg

SEQ ID NO: 92888 - DNA, 84 bp, Homo sapiens
tgtgacgccgctgcctcccctggccccacagagcaccatcaatcagacgcctgtgaccctgcaagtgccgggcttgatgagctc

SEQ ID NO: 92889 - DNA, 83 bp, Homo sapiens
tcccctggccccacagagcaccatcaatcagacgcctgtgaccctgcaagtgccgggcttgatgagctcccaggtgcagatgg

SEQ ID NO: 92890 - DNA, 83 bp, Homo sapiens
ccacagagcaccatcaatcagacgcctgtgaccctgcaagtgccgggcttgatgagctcccaggtgcagatgggcggccaccc

SEQ ID NO: 92891 - DNA, 81 bp, Homo sapiens
accatcaatcagacgcctgtgaccctgcaagtgccgggcttgatgagctcccaggtgcagatgggcggccacccgactgag

SEQ ID NO: 92892 - DNA, 79 bp, Homo sapiens
aatcagacgcctgtgaccctgcaagtgccgggcttgatgagctcccaggtgcagatgggcggccacccgactgaggtcc

SEQ ID NO: 92893 - DNA, 81 bp, Homo sapiens
accctgcaagtgccgggcttgatgagctcccaggtgcagatgggcggccacccgactgaggtcctgtgcctcatgaacatg

SEQ ID NO: 92894 - DNA, 82 bp, Homo sapiens
aagtgccgggcttgatgagctcccaggtgcagatgggcggccacccgactgaggtcctgtgcctcatgaacatggtgctgcc

SEQ ID NO: 92895 - DNA, 87 bp, Homo sapiens
cttgatgagctcccaggtgcagatgggcggccacccgactgaggtcctgtgcctcatgaacatggtgctgcctgaggagctgctgga

SEQ ID NO: 92896 - DNA, 84 bp, Homo sapiens
caggtgcagatgggcggccacccgactgaggtcctgtgcctcatgaacatggtgctgcctgaggagctgctggacgacgaggag

SEQ ID NO: 92897 - DNA, 83 bp, Homo sapiens
agatgggcggccacccgactgaggtcctgtgcctcatgaacatggtgctgcctgaggagctgctggacgacgaggagtatgag

SEQ ID NO: 92898 - DNA, 83 bp, Homo sapiens
acccgactgaggtcctgtgcctcatgaacatggtgctgcctgaggagctgctggacgacgaggagtatgaggagatcgtggag

SEQ ID NO: 92899 - DNA, 85 bp, Homo sapiens
tgaggtcctgtgcctcatgaacatggtgctgcctgaggagctgctggacgacgaggagtatgaggagatcgtggaggacgtgcgg

SEQ ID NO: 92900 - DNA, 86 bp, Homo sapiens
tcatgaacatggtgctgcctgaggagctgctggacgacgaggagtatgaggagatcgtggaggacgtgcgggacgagtgcagcaag

SEQ ID NO: 92901 - DNA, 83 bp, Homo sapiens
aacatggtgctgcctgaggagctgctggacgacgaggagtatgaggagatcgtggaggacgtgcgggacgagtgcagcaagta

SEQ ID NO: 92902 - DNA, 80 bp, Homo sapiens
gaggagctgctggacgacgaggagtatgaggagatcgtggaggacgtgcgggacgagtgcagcaagtacgggcttgtcaa

SEQ ID NO: 92903 - DNA, 79 bp, Homo sapiens
tggacgacgaggagtatgaggagatcgtggaggacgtgcgggacgagtgcagcaagtacgggcttgtcaagtccatcga

SEQ ID NO: 92904 - DNA, 78 bp, Homo sapiens
acgaggagtatgaggagatcgtggaggacgtgcgggacgagtgcagcaagtacgggcttgtcaagtccatcgagatcc

SEQ ID NO: 92905 - DNA, 75 bp, Homo sapiens
aggagatcgtggaggacgtgcgggacgagtgcagcaagtacgggcttgtcaagtccatcgagatcccccggcctg

SEQ ID NO: 92906 - DNA, 74 bp, Homo sapiens
cgtggaggacgtgcgggacgagtgcagcaagtacgggcttgtcaagtccatcgagatcccccggcctgtggacg

SEQ ID NO: 92907 - DNA, 74 bp, Homo sapiens
ggacgagtgcagcaagtacgggcttgtcaagtccatcgagatcccccggcctgtggacggcgtcgaggtgcccg

SEQ ID NO: 92908 - DNA, 73 bp, Homo sapiens
agcaagtacgggcttgtcaagtccatcgagatcccccggcctgtggacggcgtcgaggtgcccggctgcggaa

SEQ ID NO: 92909 - DNA, 73 bp, Homo sapiens
tacgggcttgtcaagtccatcgagatcccccggcctgtggacggcgtcgaggtgcccggctgcggaaaggtca

SEQ ID NO: 92910 - DNA, 73 bp, Homo sapiens
gtcaagtccatcgagatcccccggcctgtggacggcgtcgaggtgcccggctgcggaaaggtcaggaggcctc

SEQ ID NO: 92911 - DNA, 74 bp, Homo sapiens
ccggcctgtggacggcgtcgaggtgcccggctgcggaaaggtcaggaggcctcgggctcagtgctctctcaccc

SEQ ID NO: 92912 - DNA, 75 bp, Homo sapiens
gccttgttcacaaacctgcctctcctttccccacagatctttgtggagttcacctctgtgtttgactgccagaaa

SEQ ID NO: 92913 - DNA, 78 bp, Homo sapiens
gttcacaaacctgcctctcctttccccacagatctttgtggagttcacctctgtgtttgactgccagaaagccatgca

SEQ ID NO: 92914 - DNA, 77 bp, Homo sapiens
tctcctttccccacagatctttgtggagttcacctctgtgtttgactgccagaaagccatgcagggcctgacgggcc

SEQ ID NO: 92915 - DNA, 79 bp, Homo sapiens
ccacagatctttgtggagttcacctctgtgtttgactgccagaaagccatgcagggcctgacgggccgcaagttcgcca

SEQ ID NO: 92916 - DNA, 78 bp, Homo sapiens
tttgtggagttcacctctgtgtttgactgccagaaagccatgcagggcctgacgggccgcaagttcgccaacagagtg

SEQ ID NO: 92917 - DNA, 79 bp, Homo sapiens
tcacctctgtgtttgactgccagaaagccatgcagggcctgacgggccgcaagttcgccaacagagtggttgtcacaaa

SEQ ID NO: 92918 - DNA, 77 bp, Homo sapiens
ctgtgtttgactgccagaaagccatgcagggcctgacgggccgcaagttcgccaacagagtggttgtcacaaaatac

SEQ ID NO: 92919 - DNA, 74 bp, Homo sapiens
agaaagccatgcagggcctgacgggccgcaagttcgccaacagagtggttgtcacaaaatactgtgaccccgac

SEQ ID NO: 92920 - DNA, 75 bp, Homo sapiens
atgcagggcctgacgggccgcaagttcgccaacagagtggttgtcacaaaatactgtgaccccgactcttatcac

SEQ ID NO: 92921 - DNA, 71 bp, Homo sapiens
acgggccgcaagttcgccaacagagtggttgtcacaaaatactgtgaccccgactcttatcaccgccggga

SEQ ID NO: 92922 - DNA, 71 bp, Homo sapiens
aagttcgccaacagagtggttgtcacaaaatactgtgaccccgactcttatcaccgccgggacttctggta

SEQ ID NO: 92923 - DNA, 72 bp, Homo sapiens
aacagagtggttgtcacaaaatactgtgaccccgactcttatcaccgccgggacttctggtagaggcggctg

SEQ ID NO: 92924 - DNA, 71 bp, Homo sapiens
tggttgtcacaaaatactgtgaccccgactcttatcaccgccgggacttctggtagaggcggctgggggag

SEQ ID NO: 92925 - DNA, 67 bp, Homo sapiens
aaaatactgtgaccccgactcttatcaccgccgggacttctggtagaggcggctgggggagggtggg

SEQ ID NO: 92926 - DNA, 69 bp, Homo sapiens
cccgactcttatcaccgccgggacttctggtagaggcggctgggggagggtgggggcagggctggctgg

SEQ ID NO: 92927 - DNA, 70 bp, Homo sapiens
ttatcaccgccgggacttctggtagaggcggctgggggagggtgggggcagggctggctgggggcttctc

SEQ ID NO: 92928 - DNA, 68 bp, Homo sapiens
ccgggacttctggtagaggcggctgggggagggtgggggcagggctggctgggggcttctccccactc

SEQ ID NO: 92929 - DNA, 67 bp, Homo sapiens
tggtagaggcggctgggggagggtgggggcagggctggctgggggcttctccccactcccgcccccc

SEQ ID NO: 92930 - DNA, 64 bp, Homo sapiens
ctgggggagggtgggggcagggctggctgggggcttctccccactcccgccccccccttatccc

SEQ ID NO: 92931 - DNA, 67 bp, Homo sapiens
ggggcagggctggctgggggcttctccccactcccgccccccccttatccccctctgaagacgatgg

SEQ ID NO: 92932 - DNA, 71 bp, Homo sapiens
tggctgggggcttctccccactcccgccccccccttatccccctctgaagacgatgggcagaggagtgaca

SEQ ID NO: 92933 - DNA, 73 bp, Homo sapiens
cttctccccactcccgccccccccttatccccctctgaagacgatgggcagaggagtgacagccgcagacaca

SEQ ID NO: 92934 - DNA, 80 bp, Homo sapiens
ccccttatccccctctgaagacgatgggcagaggagtgacagccgcagacacacgacagccggcagcaactggaatggca

SEQ ID NO: 92935 - DNA, 81 bp, Homo sapiens
ccctctgaagacgatgggcagaggagtgacagccgcagacacacgacagccggcagcaactggaatggcagcaattaaggg

SEQ ID NO: 92936 - DNA, 77 bp, Homo sapiens
gggcagaggagtgacagccgcagacacacgacagccggcagcaactggaatggcagcaattaagggtggggggcggg

SEQ ID NO: 92937 - DNA, 74 bp, Homo sapiens
gtgacagccgcagacacacgacagccggcagcaactggaatggcagcaattaagggtggggggcgggggttggg

SEQ ID NO: 92938 - DNA, 69 bp, Homo sapiens
agacacacgacagccggcagcaactggaatggcagcaattaagggtggggggcgggggttggggggttg

SEQ ID NO: 92939 - DNA, 64 bp, Homo sapiens
ccggcagcaactggaatggcagcaattaagggtggggggcgggggttggggggttggggggtta

SEQ ID NO: 92940 - DNA, 62 bp, Homo sapiens
aactggaatggcagcaattaagggtggggggcgggggttggggggttggggggttagggcag

SEQ ID NO: 92941 - DNA, 59 bp, Homo sapiens
agcaattaagggtggggggcgggggttggggggttggggggttagggcagggaggggac

SEQ ID NO: 92942 - DNA, 62 bp, Homo sapiens
gtggggggcgggggttggggggttggggggttagggcagggaggggactggggaagtgcgca

SEQ ID NO: 92943 - DNA, 67 bp, Homo sapiens
ggggttggggggttggggggttagggcagggaggggactggggaagtgcgcacacagcccacacaga

SEQ ID NO: 92944 - DNA, 72 bp, Homo sapiens
ggttggggggttagggcagggaggggactggggaagtgcgcacacagcccacacagacaacacgcacccaca

SEQ ID NO: 92945 - DNA, 77 bp, Homo sapiens
ttagggcagggaggggactggggaagtgcgcacacagcccacacagacaacacgcacccacacagacacagagggaa

SEQ ID NO: 92946 - DNA, 75 bp, Homo sapiens
gaggggactggggaagtgcgcacacagcccacacagacaacacgcacccacacagacacagagggaaggggttgg

SEQ ID NO: 92947 - DNA, 75 bp, Homo sapiens
actggggaagtgcgcacacagcccacacagacaacacgcacccacacagacacagagggaaggggttgggatggg

SEQ ID NO: 92948 - DNA, 74 bp, Homo sapiens
acacagacaacacgcacccacacagacacagagggaaggggttgggatggggacagggtgcacagcagggcggg

SEQ ID NO: 92949 - DNA, 72 bp, Homo sapiens
acaacacgcacccacacagacacagagggaaggggttgggatggggacagggtgcacagcagggcggggtag

SEQ ID NO: 92950 - DNA, 70 bp, Homo sapiens
acacagacacagagggaaggggttgggatggggacagggtgcacagcagggcggggtaggaccccagccc

SEQ ID NO: 92951 - DNA, 68 bp, Homo sapiens
acacagagggaaggggttgggatggggacagggtgcacagcagggcggggtaggaccccagcccctcc

SEQ ID NO: 92952 - DNA, 69 bp, Homo sapiens
gttgggatggggacagggtgcacagcagggcggggtaggaccccagcccctcccaaaacagcctctcct

SEQ ID NO: 92953 - DNA, 71 bp, Homo sapiens
ggacagggtgcacagcagggcggggtaggaccccagcccctcccaaaacagcctctccttctcccatagac

SEQ ID NO: 92954 - DNA, 68 bp, Homo sapiens
cacagcagggcggggtaggaccccagcccctcccaaaacagcctctccttctcccatagacccctttc

SEQ ID NO: 92955 - DNA, 67 bp, Homo sapiens
ctcccaaaacagcctctccttctcccatagacccctttcttctccccttccccacggtaggaacata

SEQ ID NO: 92956 - DNA, 68 bp, Homo sapiens
gcctctccttctcccatagacccctttcttctccccttccccacggtaggaacatagcgtgtttatat

SEQ ID NO: 92957 - DNA, 67 bp, Homo sapiens
tccttctcccatagacccctttcttctccccttccccacggtaggaacatagcgtgtttatatttta

SEQ ID NO: 92958 - DNA, 65 bp, Homo sapiens
cccctttcttctccccttccccacggtaggaacatagcgtgtttatattttatggccaaactatt

SEQ ID NO: 92959 - DNA, 66 bp, Homo sapiens
ctccccttccccacggtaggaacatagcgtgtttatattttatggccaaactattttgaattttgt

SEQ ID NO: 92960 - DNA, 69 bp, Homo sapiens
ccacggtaggaacatagcgtgtttatattttatggccaaactattttgaattttgttgtccggccctca

SEQ ID NO: 92961 - DNA, 70 bp, Homo sapiens
gtaggaacatagcgtgtttatattttatggccaaactattttgaattttgttgtccggccctcagtgccc

SEQ ID NO: 92962 - DNA, 69 bp, Homo sapiens
gtttatattttatggccaaactattttgaattttgttgtccggccctcagtgccctgccctctccctta

SEQ ID NO: 92963 - DNA, 70 bp, Homo sapiens
tattttatggccaaactattttgaattttgttgtccggccctcagtgccctgccctctcccttaccagga

SEQ ID NO: 92964 - DNA, 70 bp, Homo sapiens
aaactattttgaattttgttgtccggccctcagtgccctgccctctcccttaccaggaccacagctctgt

SEQ ID NO: 92965 - DNA, 72 bp, Homo sapiens
ttgaattttgttgtccggccctcagtgccctgccctctcccttaccaggaccacagctctgttccttcggcc

SEQ ID NO: 92966 - DNA, 74 bp, Homo sapiens
ttgtccggccctcagtgccctgccctctcccttaccaggaccacagctctgttccttcggcctctggtcctctc

SEQ ID NO: 92967 - DNA, 72 bp, Homo sapiens
agtgccctgccctctcccttaccaggaccacagctctgttccttcggcctctggtcctctctggtcccctcc

SEQ ID NO: 92968 - DNA, 71 bp, Homo sapiens
tctcccttaccaggaccacagctctgttccttcggcctctggtcctctctggtcccctcctgggtttctta

SEQ ID NO: 92969 - DNA, 71 bp, Homo sapiens
caggaccacagctctgttccttcggcctctggtcctctctggtcccctcctgggtttcttacgtagttgat

SEQ ID NO: 92970 - DNA, 69 bp, Homo sapiens
acagctctgttccttcggcctctggtcctctctggtcccctcctgggtttcttacgtagttgatttttc

SEQ ID NO: 92971 - DNA, 67 bp, Homo sapiens
ttccttcggcctctggtcctctctggtcccctcctgggtttcttacgtagttgatttttcctcttta

SEQ ID NO: 92972 - DNA, 66 bp, Homo sapiens
cctctggtcctctctggtcccctcctgggtttcttacgtagttgatttttcctctttagtctcccc

SEQ ID NO: 92973 - DNA, 66 bp, Homo sapiens
ctcctgggtttcttacgtagttgatttttcctctttagtctcccccgacctgcgcccagccccgtg

SEQ ID NO: 92974 - DNA, 72 bp, Homo sapiens
tttagtctcccccgacctgcgcccagccccgtggcccctgcccctctcctactctctgtggcagtttcatat

SEQ ID NO: 92975 - DNA, 75 bp, Homo sapiens
tggcccctgcccctctcctactctctgtggcagtttcatatttgctaagacgaatttgctcattaaacattttgt

SEQ ID NO: 92976 - DNA, 74 bp, Homo sapiens
ccctctcctactctctgtggcagtttcatatttgctaagacgaatttgctcattaaacattttgttgtatttta

SEQ ID NO: 92977 - DNA, 75 bp, Homo sapiens
tggcagtttcatatttgctaagacgaatttgctcattaaacattttgttgtattttactttatggagcggctgtg

SEQ ID NO: 92978 - DNA, 76 bp, Homo sapiens
tcatatttgctaagacgaatttgctcattaaacattttgttgtattttactttatggagcggctgtgtgtccagta

SEQ ID NO: 92979 - DNA, 75 bp, Homo sapiens
tccactgcccacacccctgcctccgcctctgcccacccggcccaatcccttacaactgcccaggactgctcctga

SEQ ID NO: 92980 - DNA, 75 bp, Homo sapiens
acacccctgcctccgcctctgcccacccggcccaatcccttacaactgcccaggactgctcctgagcagccgctg

SEQ ID NO: 92981 - DNA, 76 bp, Homo sapiens
ctccgcctctgcccacccggcccaatcccttacaactgcccaggactgctcctgagcagccgctgggagacagacg

SEQ ID NO: 92982 - DNA, 77 bp, Homo sapiens
tctgcccacccggcccaatcccttacaactgcccaggactgctcctgagcagccgctgggagacagacggcaaccag

SEQ ID NO: 92983 - DNA, 75 bp, Homo sapiens
ccggcccaatcccttacaactgcccaggactgctcctgagcagccgctgggagacagacggcaaccaggttgccc

SEQ ID NO: 92984 - DNA, 78 bp, Homo sapiens
ttacaactgcccaggactgctcctgagcagccgctgggagacagacggcaaccaggttgcccctctttgctccaggta

SEQ ID NO: 92985 - DNA, 76 bp, Homo sapiens
aggactgctcctgagcagccgctgggagacagacggcaaccaggttgcccctctttgctccaggtacctctctccc

SEQ ID NO: 92986 - DNA, 76 bp, Homo sapiens
tcctgagcagccgctgggagacagacggcaaccaggttgcccctctttgctccaggtacctctctcccctcagtta

SEQ ID NO: 92987 - DNA, 74 bp, Homo sapiens
gctgggagacagacggcaaccaggttgcccctctttgctccaggtacctctctcccctcagttagcaggcctcg

SEQ ID NO: 92988 - DNA, 73 bp, Homo sapiens
agacagacggcaaccaggttgcccctctttgctccaggtacctctctcccctcagttagcaggcctcggcttc

SEQ ID NO: 92989 - DNA, 75 bp, Homo sapiens
aaccaggttgcccctctttgctccaggtacctctctcccctcagttagcaggcctcggcttcctgtctcactgca

SEQ ID NO: 92990 - DNA, 79 bp, Homo sapiens
agttagcaggcctcggcttcctgtctcactgcagccagacgagaggggaaattggacagcctgacacactccactcttg

SEQ ID NO: 92991 - DNA, 79 bp, Homo sapiens
acgagaggggaaattggacagcctgacacactccactcttgtttctgcagctagaaagacttgagttagacaagcagca

SEQ ID NO: 92992 - DNA, 81 bp, Homo sapiens
aaattggacagcctgacacactccactcttgtttctgcagctagaaagacttgagttagacaagcagcagcacacgcctcc

SEQ ID NO: 92993 - DNA, 82 bp, Homo sapiens
agcctgacacactccactcttgtttctgcagctagaaagacttgagttagacaagcagcagcacacgcctccctacctcatg

SEQ ID NO: 92994 - DNA, 80 bp, Homo sapiens
actcttgtttctgcagctagaaagacttgagttagacaagcagcagcacacgcctccctacctcatggcgacagaaaatg

SEQ ID NO: 92995 - DNA, 83 bp, Homo sapiens
tttctgcagctagaaagacttgagttagacaagcagcagcacacgcctccctacctcatggcgacagaaaatggagcagttga

SEQ ID NO: 92996 - DNA, 79 bp, Homo sapiens
aaagacttgagttagacaagcagcagcacacgcctccctacctcatggcgacagaaaatggagcagttgagctgggaat

SEQ ID NO: 92997 - DNA, 81 bp, Homo sapiens
cttgagttagacaagcagcagcacacgcctccctacctcatggcgacagaaaatggagcagttgagctgggaattcagaac

SEQ ID NO: 92998 - DNA, 81 bp, Homo sapiens
acaagcagcagcacacgcctccctacctcatggcgacagaaaatggagcagttgagctgggaattcagaacccatcaacag

SEQ ID NO: 92999 - DNA, 78 bp, Homo sapiens
acacgcctccctacctcatggcgacagaaaatggagcagttgagctgggaattcagaacccatcaacaggtgccaagc

SEQ ID NO: 93000 - DNA, 79 bp, Homo sapiens
cctacctcatggcgacagaaaatggagcagttgagctgggaattcagaacccatcaacaggtgccaagctggggcagga

SEQ ID NO: 93001 - DNA, 78 bp, Homo sapiens
acagaaaatggagcagttgagctgggaattcagaacccatcaacaggtgccaagctggggcaggagatggagggagga

SEQ ID NO: 93002 - DNA, 78 bp, Homo sapiens
aaatggagcagttgagctgggaattcagaacccatcaacaggtgccaagctggggcaggagatggagggaggagcttg

SEQ ID NO: 93003 - DNA, 74 bp, Homo sapiens
aaggaaaggagggtggatcctgatgggtgtctcacctcctctgcagacaaggcacctaaaggtcccacaggtga

SEQ ID NO: 93004 - DNA, 74 bp, Homo sapiens
aaggagggtggatcctgatgggtgtctcacctcctctgcagacaaggcacctaaaggtcccacaggtgaaagac

SEQ ID NO: 93005 - DNA, 76 bp, Homo sapiens
tgatgggtgtctcacctcctctgcagacaaggcacctaaaggtcccacaggtgaaagacccctggctgcagggaaa

SEQ ID NO: 93006 - DNA, 74 bp, Homo sapiens
tgtctcacctcctctgcagacaaggcacctaaaggtcccacaggtgaaagacccctggctgcagggaaagaccc

SEQ ID NO: 93007 - DNA, 72 bp, Homo sapiens
ctcctctgcagacaaggcacctaaaggtcccacaggtgaaagacccctggctgcagggaaagaccctggccc

SEQ ID NO: 93008 - DNA, 68 bp, Homo sapiens
acaaggcacctaaaggtcccacaggtgaaagacccctggctgcagggaaagaccctggccccccagac

SEQ ID NO: 93009 - DNA, 67 bp, Homo sapiens
taaaggtcccacaggtgaaagacccctggctgcagggaaagaccctggccccccagacccaaagaaa

SEQ ID NO: 93010 - DNA, 69 bp, Homo sapiens
acaggtgaaagacccctggctgcagggaaagaccctggccccccagacccaaagaaagctccggatcca

SEQ ID NO: 93011 - DNA, 69 bp, Homo sapiens
cctggctgcagggaaagaccctggccccccagacccaaagaaagctccggatccacccaccctgaagaa

SEQ ID NO: 93012 - DNA, 68 bp, Homo sapiens
agggaaagaccctggccccccagacccaaagaaagctccggatccacccaccctgaagaaagatgcca

SEQ ID NO: 93013 - DNA, 68 bp, Homo sapiens
agaccctggccccccagacccaaagaaagctccggatccacccaccctgaagaaagatgccaaagccc

SEQ ID NO: 93014 - DNA, 70 bp, Homo sapiens
agacccaaagaaagctccggatccacccaccctgaagaaagatgccaaagcccctgcctcagagaaaggg

SEQ ID NO: 93015 - DNA, 71 bp, Homo sapiens
aaagaaagctccggatccacccaccctgaagaaagatgccaaagcccctgcctcagagaaaggggatggta

SEQ ID NO: 93016 - DNA, 70 bp, Homo sapiens
atccacccaccctgaagaaagatgccaaagcccctgcctcagagaaaggggatggtaccctggcccaacc

SEQ ID NO: 93017 - DNA, 70 bp, Homo sapiens
accctgaagaaagatgccaaagcccctgcctcagagaaaggggatggtaccctggcccaaccctcaacta

SEQ ID NO: 93018 - DNA, 72 bp, Homo sapiens
agaaagatgccaaagcccctgcctcagagaaaggggatggtaccctggcccaaccctcaactagcagccaag

SEQ ID NO: 93019 - DNA, 69 bp, Homo sapiens
aaagcccctgcctcagagaaaggggatggtaccctggcccaaccctcaactagcagccaaggccccaaa

SEQ ID NO: 93020 - DNA, 69 bp, Homo sapiens
agagaaaggggatggtaccctggcccaaccctcaactagcagccaaggccccaaaggagagggtgacag

SEQ ID NO: 93021 - DNA, 68 bp, Homo sapiens
gggatggtaccctggcccaaccctcaactagcagccaaggccccaaaggagagggtgacaggggcggg

SEQ ID NO: 93022 - DNA, 67 bp, Homo sapiens
taccctggcccaaccctcaactagcagccaaggccccaaaggagagggtgacaggggcggggggccc

SEQ ID NO: 93023 - DNA, 67 bp, Homo sapiens
aaccctcaactagcagccaaggccccaaaggagagggtgacaggggcggggggcccgcggagggcag

SEQ ID NO: 93024 - DNA, 69 bp, Homo sapiens
ctagcagccaaggccccaaaggagagggtgacaggggcggggggcccgcggagggcagtgctgggcccc

SEQ ID NO: 93025 - DNA, 68 bp, Homo sapiens
cccaaaggagagggtgacaggggcggggggcccgcggagggcagtgctgggcccccggcagccctgcc

SEQ ID NO: 93026 - DNA, 72 bp, Homo sapiens
agggtgacaggggcggggggcccgcggagggcagtgctgggcccccggcagccctgccccagcagactgcga

SEQ ID NO: 93027 - DNA, 74 bp, Homo sapiens
gggcggggggcccgcggagggcagtgctgggcccccggcagccctgccccagcagactgcgacacctgagacca

SEQ ID NO: 93028 - DNA, 78 bp, Homo sapiens
ccgcggagggcagtgctgggcccccggcagccctgccccagcagactgcgacacctgagaccagcgtcaagaagccca

SEQ ID NO: 93029 - DNA, 79 bp, Homo sapiens
agggcagtgctgggcccccggcagccctgccccagcagactgcgacacctgagaccagcgtcaagaagcccaaggctga

SEQ ID NO: 93030 - DNA, 79 bp, Homo sapiens
cccccggcagccctgccccagcagactgcgacacctgagaccagcgtcaagaagcccaaggctgagcagggagcctcag

SEQ ID NO: 93031 - DNA, 83 bp, Homo sapiens
agccctgccccagcagactgcgacacctgagaccagcgtcaagaagcccaaggctgagcagggagcctcaggcagccaggatc

SEQ ID NO: 93032 - DNA, 82 bp, Homo sapiens
cccagcagactgcgacacctgagaccagcgtcaagaagcccaaggctgagcagggagcctcaggcagccaggatcctggaaa

SEQ ID NO: 93033 - DNA, 78 bp, Homo sapiens
acacctgagaccagcgtcaagaagcccaaggctgagcagggagcctcaggcagccaggatcctggaaagcccagggtg

SEQ ID NO: 93034 - DNA, 77 bp, Homo sapiens
accagcgtcaagaagcccaaggctgagcagggagcctcaggcagccaggatcctggaaagcccagggtgggcaagaa

SEQ ID NO: 93035 - DNA, 80 bp, Homo sapiens
gtcaagaagcccaaggctgagcagggagcctcaggcagccaggatcctggaaagcccagggtgggcaagaaggcagcaga

SEQ ID NO: 93036 - DNA, 81 bp, Homo sapiens
aaggctgagcagggagcctcaggcagccaggatcctggaaagcccagggtgggcaagaaggcagcagagggccaagcagca

SEQ ID NO: 93037 - DNA, 79 bp, Homo sapiens
agggagcctcaggcagccaggatcctggaaagcccagggtgggcaagaaggcagcagagggccaagcagcagccaggag

SEQ ID NO: 93038 - DNA, 78 bp, Homo sapiens
aggcagccaggatcctggaaagcccagggtgggcaagaaggcagcagagggccaagcagcagccaggaggggctcacc

SEQ ID NO: 93039 - DNA, 80 bp, Homo sapiens
tcctggaaagcccagggtgggcaagaaggcagcagagggccaagcagcagccaggaggggctcacctgcctttctgcata

SEQ ID NO: 93040 - DNA, 78 bp, Homo sapiens
aaagcccagggtgggcaagaaggcagcagagggccaagcagcagccaggaggggctcacctgcctttctgcatagccc

SEQ ID NO: 93041 - DNA, 86 bp, Homo sapiens
caagaaggcagcagagggccaagcagcagccaggaggggctcacctgcctttctgcatagccccagctgtcctgccatcatctcca

SEQ ID NO: 93042 - DNA, 83 bp, Homo sapiens
gggccaagcagcagccaggaggggctcacctgcctttctgcatagccccagctgtcctgccatcatctccaggtgaatatccc

SEQ ID NO: 93043 - DNA, 80 bp, Homo sapiens
caggaggggctcacctgcctttctgcatagccccagctgtcctgccatcatctccaggtgaatatcccctcctgggagtg

SEQ ID NO: 93044 - DNA, 79 bp, Homo sapiens
ccacaggctgtggccgctgagggcttcacctctgtgttctcaccttctagttctgagaagctgctggccaagaagcccc

SEQ ID NO: 93045 - DNA, 81 bp, Homo sapiens
cgctgagggcttcacctctgtgttctcaccttctagttctgagaagctgctggccaagaagcccccaagcgaggcatcaga

SEQ ID NO: 93046 - DNA, 80 bp, Homo sapiens
ttcacctctgtgttctcaccttctagttctgagaagctgctggccaagaagcccccaagcgaggcatcagagctcacctt

SEQ ID NO: 93047 - DNA, 80 bp, Homo sapiens
tctgtgttctcaccttctagttctgagaagctgctggccaagaagcccccaagcgaggcatcagagctcacctttgaagg

SEQ ID NO: 93048 - DNA, 80 bp, Homo sapiens
gttctgagaagctgctggccaagaagcccccaagcgaggcatcagagctcacctttgaaggggtgcccatgacccacagc

SEQ ID NO: 93049 - DNA, 76 bp, Homo sapiens
tggccaagaagcccccaagcgaggcatcagagctcacctttgaaggggtgcccatgacccacagccccacggatcc

SEQ ID NO: 93050 - DNA, 74 bp, Homo sapiens
aagaagcccccaagcgaggcatcagagctcacctttgaaggggtgcccatgacccacagccccacggatcccag

SEQ ID NO: 93051 - DNA, 78 bp, Homo sapiens
aagcgaggcatcagagctcacctttgaaggggtgcccatgacccacagccccacggatcccaggccagccaaggcaga

SEQ ID NO: 93052 - DNA, 76 bp, Homo sapiens
atcagagctcacctttgaaggggtgcccatgacccacagccccacggatcccaggccagccaaggcagaagaagga

SEQ ID NO: 93053 - DNA, 71 bp, Homo sapiens
acctttgaaggggtgcccatgacccacagccccacggatcccaggccagccaaggcagaagaaggaaagaa

SEQ ID NO: 93054 - DNA, 77 bp, Homo sapiens
cccatgacccacagccccacggatcccaggccagccaaggcagaagaaggaaagaacatcctggcagagagccagaa

SEQ ID NO: 93055 - DNA, 75 bp, Homo sapiens
acccacagccccacggatcccaggccagccaaggcagaagaaggaaagaacatcctggcagagagccagaaggaa

SEQ ID NO: 93056 - DNA, 75 bp, Homo sapiens
acggatcccaggccagccaaggcagaagaaggaaagaacatcctggcagagagccagaaggaagtgggagagaaa

SEQ ID NO: 93057 - DNA, 73 bp, Homo sapiens
aggccagccaaggcagaagaaggaaagaacatcctggcagagagccagaaggaagtgggagagaaaaccccag

SEQ ID NO: 93058 - DNA, 73 bp, Homo sapiens
aaggcagaagaaggaaagaacatcctggcagagagccagaaggaagtgggagagaaaaccccaggccaggctg

SEQ ID NO: 93059 - DNA, 76 bp, Homo sapiens
aaagaacatcctggcagagagccagaaggaagtgggagagaaaaccccaggccaggctggccaggctaagatgcaa

SEQ ID NO: 93060 - DNA, 76 bp, Homo sapiens
atcctggcagagagccagaaggaagtgggagagaaaaccccaggccaggctggccaggctaagatgcaaggggaca

SEQ ID NO: 93061 - DNA, 74 bp, Homo sapiens
agagagccagaaggaagtgggagagaaaaccccaggccaggctggccaggctaagatgcaaggggacacctcga

SEQ ID NO: 93062 - DNA, 71 bp, Homo sapiens
agtgggagagaaaaccccaggccaggctggccaggctaagatgcaaggggacacctcgagggggattgagt

SEQ ID NO: 93063 - DNA, 71 bp, Homo sapiens
aaaaccccaggccaggctggccaggctaagatgcaaggggacacctcgagggggattgagttccaggctgt

SEQ ID NO: 93064 - DNA, 76 bp, Homo sapiens
gccaggctggccaggctaagatgcaaggggacacctcgagggggattgagttccaggctgttccctcagagaaatc

SEQ ID NO: 93065 - DNA, 73 bp, Homo sapiens
ccaggctaagatgcaaggggacacctcgagggggattgagttccaggctgttccctcagagaaatccgaggtg

SEQ ID NO: 93066 - DNA, 73 bp, Homo sapiens
ctaagatgcaaggggacacctcgagggggattgagttccaggctgttccctcagagaaatccgaggtggggca

SEQ ID NO: 93067 - DNA, 74 bp, Homo sapiens
acacctcgagggggattgagttccaggctgttccctcagagaaatccgaggtggggcaggccctctgtctcaca

SEQ ID NO: 93068 - DNA, 75 bp, Homo sapiens
ggggattgagttccaggctgttccctcagagaaatccgaggtggggcaggccctctgtctcacagccagggagga

SEQ ID NO: 93069 - DNA, 77 bp, Homo sapiens
ttgagttccaggctgttccctcagagaaatccgaggtggggcaggccctctgtctcacagccagggaggaggactgc

SEQ ID NO: 93070 - DNA, 75 bp, Homo sapiens
ctgttccctcagagaaatccgaggtggggcaggccctctgtctcacagccagggaggaggactgcttccagattt

SEQ ID NO: 93071 - DNA, 74 bp, Homo sapiens
agagaaatccgaggtggggcaggccctctgtctcacagccagggaggaggactgcttccagattttgggtaggc

SEQ ID NO: 93072 - DNA, 73 bp, Homo sapiens
aggtggggcaggccctctgtctcacagccagggaggaggactgcttccagattttgggtaggccaggggcagg

SEQ ID NO: 93073 - DNA, 73 bp, Homo sapiens
aggccctctgtctcacagccagggaggaggactgcttccagattttgggtaggccaggggcaggtgggggctg

SEQ ID NO: 93074 - DNA, 74 bp, Homo sapiens
tgtctcacagccagggaggaggactgcttccagattttgggtaggccaggggcaggtgggggctggggctgccc

SEQ ID NO: 93075 - DNA, 78 bp, Homo sapiens
atcctcagcagcccctggcactgaccatgagggctgtgctctgtcccccagatgattgcccgccacctccggccccct

SEQ ID NO: 93076 - DNA, 78 bp, Homo sapiens
tggcactgaccatgagggctgtgctctgtcccccagatgattgcccgccacctccggcccccttccctcaccgcatgg

SEQ ID NO: 93077 - DNA, 77 bp, Homo sapiens
ctgaccatgagggctgtgctctgtcccccagatgattgcccgccacctccggcccccttccctcaccgcatggtgga

SEQ ID NO: 93078 - DNA, 75 bp, Homo sapiens
tgtgctctgtcccccagatgattgcccgccacctccggcccccttccctcaccgcatggtggagctgaggaccgg

SEQ ID NO: 93079 - DNA, 75 bp, Homo sapiens
ccccagatgattgcccgccacctccggcccccttccctcaccgcatggtggagctgaggaccgggaatgtcagca

SEQ ID NO: 93080 - DNA, 75 bp, Homo sapiens
atgattgcccgccacctccggcccccttccctcaccgcatggtggagctgaggaccgggaatgtcagcagtgaat

SEQ ID NO: 93081 - DNA, 75 bp, Homo sapiens
acctccggcccccttccctcaccgcatggtggagctgaggaccgggaatgtcagcagtgaattcagtatgaactc

SEQ ID NO: 93082 - DNA, 78 bp, Homo sapiens
ccttccctcaccgcatggtggagctgaggaccgggaatgtcagcagtgaattcagtatgaactccaaggaggcgctcg

SEQ ID NO: 93083 - DNA, 79 bp, Homo sapiens
accgcatggtggagctgaggaccgggaatgtcagcagtgaattcagtatgaactccaaggaggcgctcggagggtgaga

SEQ ID NO: 93084 - DNA, 80 bp, Homo sapiens
tggtggagctgaggaccgggaatgtcagcagtgaattcagtatgaactccaaggaggcgctcggagggtgagatctggga

SEQ ID NO: 93085 - DNA, 76 bp, Homo sapiens
aggaccgggaatgtcagcagtgaattcagtatgaactccaaggaggcgctcggagggtgagatctgggaccccagc

SEQ ID NO: 93086 - DNA, 81 bp, Homo sapiens
aatgtcagcagtgaattcagtatgaactccaaggaggcgctcggagggtgagatctgggaccccagctgggcactcatgga

SEQ ID NO: 93087 - DNA, 70 bp, Homo sapiens
actgaccccggtgggctctggggtcccctcacttacagcctcttctctttccagtggcaagtttggggca

SEQ ID NO: 93088 - DNA, 75 bp, Homo sapiens
ctctggggtcccctcacttacagcctcttctctttccagtggcaagtttggggcagtctgtacctgcatggagaa

SEQ ID NO: 93089 - DNA, 76 bp, Homo sapiens
ccctcacttacagcctcttctctttccagtggcaagtttggggcagtctgtacctgcatggagaaagccacaggcc

SEQ ID NO: 93090 - DNA, 77 bp, Homo sapiens
acttacagcctcttctctttccagtggcaagtttggggcagtctgtacctgcatggagaaagccacaggcctcaagc

SEQ ID NO: 93091 - DNA, 81 bp, Homo sapiens
tctttccagtggcaagtttggggcagtctgtacctgcatggagaaagccacaggcctcaagctggcagccaaggtcatcaa

SEQ ID NO: 93092 - DNA, 80 bp, Homo sapiens
agtggcaagtttggggcagtctgtacctgcatggagaaagccacaggcctcaagctggcagccaaggtcatcaagaaaca

SEQ ID NO: 93093 - DNA, 81 bp, Homo sapiens
gggcagtctgtacctgcatggagaaagccacaggcctcaagctggcagccaaggtcatcaagaaacagactcccaaagaca

SEQ ID NO: 93094 - DNA, 80 bp, Homo sapiens
tctgtacctgcatggagaaagccacaggcctcaagctggcagccaaggtcatcaagaaacagactcccaaagacaaggta

SEQ ID NO: 93095 - DNA, 76 bp, Homo sapiens
atggagaaagccacaggcctcaagctggcagccaaggtcatcaagaaacagactcccaaagacaaggtagtgaggt

SEQ ID NO: 93096 - DNA, 75 bp, Homo sapiens
agccacaggcctcaagctggcagccaaggtcatcaagaaacagactcccaaagacaaggtagtgaggttgcgggg

SEQ ID NO: 93097 - DNA, 76 bp, Homo sapiens
ctcaagctggcagccaaggtcatcaagaaacagactcccaaagacaaggtagtgaggttgcgggggtggtggctgc

SEQ ID NO: 93098 - DNA, 71 bp, Homo sapiens
aaggtcatcaagaaacagactcccaaagacaaggtagtgaggttgcgggggtggtggctgcccaggatggg

SEQ ID NO: 93099 - DNA, 77 bp, Homo sapiens
ggagtgatggtgcccagctggtacccttgacttccctggtccccaggaaatggtgttgctggagattgaggtcatga

SEQ ID NO: 93100 - DNA, 77 bp, Homo sapiens
tgcccagctggtacccttgacttccctggtccccaggaaatggtgttgctggagattgaggtcatgaaccagctgaa

SEQ ID NO: 93101 - DNA, 75 bp, Homo sapiens
agctggtacccttgacttccctggtccccaggaaatggtgttgctggagattgaggtcatgaaccagctgaacca

SEQ ID NO: 93102 - DNA, 79 bp, Homo sapiens
ttgacttccctggtccccaggaaatggtgttgctggagattgaggtcatgaaccagctgaaccaccgcaatctgatcca

SEQ ID NO: 93103 - DNA, 86 bp, Homo sapiens
tccccaggaaatggtgttgctggagattgaggtcatgaaccagctgaaccaccgcaatctgatccagctgtatgcagccatcgaga

SEQ ID NO: 93104 - DNA, 88 bp, Homo sapiens
aaatggtgttgctggagattgaggtcatgaaccagctgaaccaccgcaatctgatccagctgtatgcagccatcgagactccgcatga

SEQ ID NO: 93105 - DNA, 90 bp, Homo sapiens
tggagattgaggtcatgaaccagctgaaccaccgcaatctgatccagctgtatgcagccatcgagactccgcatgagatcgtcctgttca

SEQ ID NO: 93106 - DNA, 88 bp, Homo sapiens
aggtcatgaaccagctgaaccaccgcaatctgatccagctgtatgcagccatcgagactccgcatgagatcgtcctgttcatggagta

SEQ ID NO: 93107 - DNA, 88 bp, Homo sapiens
aaccagctgaaccaccgcaatctgatccagctgtatgcagccatcgagactccgcatgagatcgtcctgttcatggagtagtgagtgc

SEQ ID NO: 93108 - DNA, 86 bp, Homo sapiens
accaccgcaatctgatccagctgtatgcagccatcgagactccgcatgagatcgtcctgttcatggagtagtgagtgcccgaagta

SEQ ID NO: 93109 - DNA, 85 bp, Homo sapiens
atctgatccagctgtatgcagccatcgagactccgcatgagatcgtcctgttcatggagtagtgagtgcccgaagtagtggtagg

SEQ ID NO: 93110 - DNA, 81 bp, Homo sapiens
ctgtatgcagccatcgagactccgcatgagatcgtcctgttcatggagtagtgagtgcccgaagtagtggtaggggctggg

SEQ ID NO: 93111 - DNA, 76 bp, Homo sapiens
ccatcgagactccgcatgagatcgtcctgttcatggagtagtgagtgcccgaagtagtggtaggggctgggtgggg

SEQ ID NO: 93112 - DNA, 71 bp, Homo sapiens
atcgtcctgttcatggagtagtgagtgcccgaagtagtggtaggggctgggtgggggtaccaccaggcacg

SEQ ID NO: 93113 - DNA, 72 bp, Homo sapiens
ttcatggagtagtgagtgcccgaagtagtggtaggggctgggtgggggtaccaccaggcacggagcaagccg

SEQ ID NO: 93114 - DNA, 73 bp, Homo sapiens
aagtagtggtaggggctgggtgggggtaccaccaggcacggagcaagccgtggaggggtctgtgcacacagca

SEQ ID NO: 93115 - DNA, 76 bp, Homo sapiens
ctgggtgggggtaccaccaggcacggagcaagccgtggaggggtctgtgcacacagcatcgagggcggagagctct

SEQ ID NO: 93116 - DNA, 80 bp, Homo sapiens
gtaccaccaggcacggagcaagccgtggaggggtctgtgcacacagcatcgagggcggagagctcttcgagaggattgtg

SEQ ID NO: 93117 - DNA, 81 bp, Homo sapiens
accaggcacggagcaagccgtggaggggtctgtgcacacagcatcgagggcggagagctcttcgagaggattgtggatgag

SEQ ID NO: 93118 - DNA, 81 bp, Homo sapiens
aagccgtggaggggtctgtgcacacagcatcgagggcggagagctcttcgagaggattgtggatgaggactaccatctgac

SEQ ID NO: 93119 - DNA, 82 bp, Homo sapiens
gggtctgtgcacacagcatcgagggcggagagctcttcgagaggattgtggatgaggactaccatctgaccgaggtggacac

SEQ ID NO: 93120 - DNA, 80 bp, Homo sapiens
acacagcatcgagggcggagagctcttcgagaggattgtggatgaggactaccatctgaccgaggtggacaccatggtgt

SEQ ID NO: 93121 - DNA, 79 bp, Homo sapiens
atcgagggcggagagctcttcgagaggattgtggatgaggactaccatctgaccgaggtggacaccatggtgtttgtca

SEQ ID NO: 93122 - DNA, 82 bp, Homo sapiens
agagctcttcgagaggattgtggatgaggactaccatctgaccgaggtggacaccatggtgtttgtcaggcagatctgtgac

SEQ ID NO: 93123 - DNA, 81 bp, Homo sapiens
ttcgagaggattgtggatgaggactaccatctgaccgaggtggacaccatggtgtttgtcaggcagatctgtgacgggatc

SEQ ID NO: 93124 - DNA, 84 bp, Homo sapiens
tgtggatgaggactaccatctgaccgaggtggacaccatggtgtttgtcaggcagatctgtgacgggatcctcttcatgcacaa

SEQ ID NO: 93125 - DNA, 81 bp, Homo sapiens
taccatctgaccgaggtggacaccatggtgtttgtcaggcagatctgtgacgggatcctcttcatgcacaagatgagggtt

SEQ ID NO: 93126 - DNA, 79 bp, Homo sapiens
accgaggtggacaccatggtgtttgtcaggcagatctgtgacgggatcctcttcatgcacaagatgagggttttgcacc

SEQ ID NO: 93127 - DNA, 80 bp, Homo sapiens
acaccatggtgtttgtcaggcagatctgtgacgggatcctcttcatgcacaagatgagggttttgcacctggacctcaag

SEQ ID NO: 93128 - DNA, 80 bp, Homo sapiens
tttgtcaggcagatctgtgacgggatcctcttcatgcacaagatgagggttttgcacctggacctcaaggtaccagactg

SEQ ID NO: 93129 - DNA, 77 bp, Homo sapiens
agatctgtgacgggatcctcttcatgcacaagatgagggttttgcacctggacctcaaggtaccagactggggcctc

SEQ ID NO: 93130 - DNA, 75 bp, Homo sapiens
gtgacgggatcctcttcatgcacaagatgagggttttgcacctggacctcaaggtaccagactggggcctcctgg

SEQ ID NO: 93131 - DNA, 74 bp, Homo sapiens
cctcttcatgcacaagatgagggttttgcacctggacctcaaggtaccagactggggcctcctgggaagggtca

SEQ ID NO: 93132 - DNA, 74 bp, Homo sapiens
tggtgggagagggagggtgagctggtcagaggcccacccaggccaccccctttctcctcagccagagaacatcc

SEQ ID NO: 93133 - DNA, 75 bp, Homo sapiens
agggagggtgagctggtcagaggcccacccaggccaccccctttctcctcagccagagaacatcctgtgtgtcaa

SEQ ID NO: 93134 - DNA, 74 bp, Homo sapiens
agctggtcagaggcccacccaggccaccccctttctcctcagccagagaacatcctgtgtgtcaacaccaccgg

SEQ ID NO: 93135 - DNA, 73 bp, Homo sapiens
agaggcccacccaggccaccccctttctcctcagccagagaacatcctgtgtgtcaacaccaccgggcatttg

SEQ ID NO: 93136 - DNA, 76 bp, Homo sapiens
ggccaccccctttctcctcagccagagaacatcctgtgtgtcaacaccaccgggcatttggtgaagatcattgact

SEQ ID NO: 93137 - DNA, 79 bp, Homo sapiens
tttctcctcagccagagaacatcctgtgtgtcaacaccaccgggcatttggtgaagatcattgactttggcctggcacg

SEQ ID NO: 93138 - DNA, 77 bp, Homo sapiens
agccagagaacatcctgtgtgtcaacaccaccgggcatttggtgaagatcattgactttggcctggcacggaggtac

SEQ ID NO: 93139 - DNA, 75 bp, Homo sapiens
aacatcctgtgtgtcaacaccaccgggcatttggtgaagatcattgactttggcctggcacggaggtaccacctg

SEQ ID NO: 93140 - DNA, 74 bp, Homo sapiens
tgtgtcaacaccaccgggcatttggtgaagatcattgactttggcctggcacggaggtaccacctgggtgggtg

SEQ ID NO: 93141 - DNA, 70 bp, Homo sapiens
accaccgggcatttggtgaagatcattgactttggcctggcacggaggtaccacctgggtgggtggggag

SEQ ID NO: 93142 - DNA, 72 bp, Homo sapiens
atttggtgaagatcattgactttggcctggcacggaggtaccacctgggtgggtggggagggcaagacaagc

SEQ ID NO: 93143 - DNA, 74 bp, Homo sapiens
atcattgactttggcctggcacggaggtaccacctgggtgggtggggagggcaagacaagcctctgagttggca

SEQ ID NO: 93144 - DNA, 74 bp, Homo sapiens
atgggtataggccaggagctgtgctctcagcccttggtctcacccccaggtataaccccaacgagaagctgaag

SEQ ID NO: 93145 - DNA, 72 bp, Homo sapiens
aggagctgtgctctcagcccttggtctcacccccaggtataaccccaacgagaagctgaaggtgaactttgg

SEQ ID NO: 93146 - DNA, 71 bp, Homo sapiens
tgtgctctcagcccttggtctcacccccaggtataaccccaacgagaagctgaaggtgaactttgggaccc

SEQ ID NO: 93147 - DNA, 67 bp, Homo sapiens
ccttggtctcacccccaggtataaccccaacgagaagctgaaggtgaactttgggaccccagagttc

SEQ ID NO: 93148 - DNA, 68 bp, Homo sapiens
ccccaggtataaccccaacgagaagctgaaggtgaactttgggaccccagagttcctgtcacctgagg

SEQ ID NO: 93149 - DNA, 71 bp, Homo sapiens
tataaccccaacgagaagctgaaggtgaactttgggaccccagagttcctgtcacctgaggtggtgaatta

SEQ ID NO: 93150 - DNA, 72 bp, Homo sapiens
aacgagaagctgaaggtgaactttgggaccccagagttcctgtcacctgaggtggtgaattatgaccaaatc

SEQ ID NO: 93151 - DNA, 72 bp, Homo sapiens
aaggtgaactttgggaccccagagttcctgtcacctgaggtggtgaattatgaccaaatctccgataagaca

SEQ ID NO: 93152 - DNA, 76 bp, Homo sapiens
tttgggaccccagagttcctgtcacctgaggtggtgaattatgaccaaatctccgataagacagacatgtggagta

SEQ ID NO: 93153 - DNA, 78 bp, Homo sapiens
agagttcctgtcacctgaggtggtgaattatgaccaaatctccgataagacagacatgtggagtatgggggtgatcac

SEQ ID NO: 93154 - DNA, 83 bp, Homo sapiens
tgtcacctgaggtggtgaattatgaccaaatctccgataagacagacatgtggagtatgggggtgatcacctacatgctgtga

SEQ ID NO: 93155 - DNA, 81 bp, Homo sapiens
aggtggtgaattatgaccaaatctccgataagacagacatgtggagtatgggggtgatcacctacatgctgtgagctccca

SEQ ID NO: 93156 - DNA, 80 bp, Homo sapiens
ttatgaccaaatctccgataagacagacatgtggagtatgggggtgatcacctacatgctgtgagctcccaggcgggtcg

SEQ ID NO: 93157 - DNA, 79 bp, Homo sapiens
atctccgataagacagacatgtggagtatgggggtgatcacctacatgctgtgagctcccaggcgggtcgtgtttatgg

SEQ ID NO: 93158 - DNA, 76 bp, Homo sapiens
acagacatgtggagtatgggggtgatcacctacatgctgtgagctcccaggcgggtcgtgtttatggggttggtgg

SEQ ID NO: 93159 - DNA, 74 bp, Homo sapiens
aggctcagagaggggagatgacttacccaaagtcacccagccagattcaaacccaggtctgtcccacgagaggc

SEQ ID NO: 93160 - DNA, 72 bp, Homo sapiens
agagaggggagatgacttacccaaagtcacccagccagattcaaacccaggtctgtcccacgagaggctggg

SEQ ID NO: 93161 - DNA, 71 bp, Homo sapiens
atgacttacccaaagtcacccagccagattcaaacccaggtctgtcccacgagaggctgggggtcttttca

SEQ ID NO: 93162 - DNA, 74 bp, Homo sapiens
ctcagcacctccaatctcacctccctgccccctgctatcccctccctctaggctgagcggcctctcccccttcc

SEQ ID NO: 93163 - DNA, 75 bp, Homo sapiens
aatctcacctccctgccccctgctatcccctccctctaggctgagcggcctctcccccttcctgggagatgatga

SEQ ID NO: 93164 - DNA, 76 bp, Homo sapiens
tgccccctgctatcccctccctctaggctgagcggcctctcccccttcctgggagatgatgacacagagaccctaa

SEQ ID NO: 93165 - DNA, 73 bp, Homo sapiens
tatcccctccctctaggctgagcggcctctcccccttcctgggagatgatgacacagagaccctaaacaacgt

SEQ ID NO: 93166 - DNA, 76 bp, Homo sapiens
cctctaggctgagcggcctctcccccttcctgggagatgatgacacagagaccctaaacaacgttctatctggcaa

SEQ ID NO: 93167 - DNA, 73 bp, Homo sapiens
agcggcctctcccccttcctgggagatgatgacacagagaccctaaacaacgttctatctggcaactggtact

SEQ ID NO: 93168 - DNA, 76 bp, Homo sapiens
tcccccttcctgggagatgatgacacagagaccctaaacaacgttctatctggcaactggtactttgatgaagaga

SEQ ID NO: 93169 - DNA, 77 bp, Homo sapiens
ttcctgggagatgatgacacagagaccctaaacaacgttctatctggcaactggtactttgatgaagagacctttga

SEQ ID NO: 93170 - DNA, 76 bp, Homo sapiens
atgacacagagaccctaaacaacgttctatctggcaactggtactttgatgaagagacctttgaggccgtatcaga

SEQ ID NO: 93171 - DNA, 73 bp, Homo sapiens
agagaccctaaacaacgttctatctggcaactggtactttgatgaagagacctttgaggccgtatcagacgag

SEQ ID NO: 93172 - DNA, 73 bp, Homo sapiens
aacaacgttctatctggcaactggtactttgatgaagagacctttgaggccgtatcagacgaggccaaagact

SEQ ID NO: 93173 - DNA, 75 bp, Homo sapiens
tatctggcaactggtactttgatgaagagacctttgaggccgtatcagacgaggccaaagactttgtctccaacc

SEQ ID NO: 93174 - DNA, 75 bp, Homo sapiens
tactttgatgaagagacctttgaggccgtatcagacgaggccaaagactttgtctccaacctcatcgtcaaggac

SEQ ID NO: 93175 - DNA, 74 bp, Homo sapiens
atgaagagacctttgaggccgtatcagacgaggccaaagactttgtctccaacctcatcgtcaaggaccagagg

SEQ ID NO: 93176 - DNA, 75 bp, Homo sapiens
cctttgaggccgtatcagacgaggccaaagactttgtctccaacctcatcgtcaaggaccagaggtgaggctcac

SEQ ID NO: 93177 - DNA, 76 bp, Homo sapiens
tatcagacgaggccaaagactttgtctccaacctcatcgtcaaggaccagaggtgaggctcaccccagaacctgaa

SEQ ID NO: 93178 - DNA, 77 bp, Homo sapiens
caaagactttgtctccaacctcatcgtcaaggaccagaggtgaggctcaccccagaacctgaactgtatgtgtgcaa

SEQ ID NO: 93179 - DNA, 81 bp, Homo sapiens
cctcacgagcatgcagcccaccgtcaccatgctgcctctcccccagggcccggatgaacgctgcccagtgtctcgcccatc

SEQ ID NO: 93180 - DNA, 80 bp, Homo sapiens
atgcagcccaccgtcaccatgctgcctctcccccagggcccggatgaacgctgcccagtgtctcgcccatccctggctca

SEQ ID NO: 93181 - DNA, 76 bp, Homo sapiens
accgtcaccatgctgcctctcccccagggcccggatgaacgctgcccagtgtctcgcccatccctggctcaacaac

SEQ ID NO: 93182 - DNA, 77 bp, Homo sapiens
tgctgcctctcccccagggcccggatgaacgctgcccagtgtctcgcccatccctggctcaacaacctggcggagaa

SEQ ID NO: 93183 - DNA, 73 bp, Homo sapiens
ccccagggcccggatgaacgctgcccagtgtctcgcccatccctggctcaacaacctggcggagaaagccaaa

SEQ ID NO: 93184 - DNA, 75 bp, Homo sapiens
cggatgaacgctgcccagtgtctcgcccatccctggctcaacaacctggcggagaaagccaaacgctgtaaccga

SEQ ID NO: 93185 - DNA, 73 bp, Homo sapiens
ctgcccagtgtctcgcccatccctggctcaacaacctggcggagaaagccaaacgctgtaaccgacgccttaa

SEQ ID NO: 93186 - DNA, 71 bp, Homo sapiens
agtgtctcgcccatccctggctcaacaacctggcggagaaagccaaacgctgtaaccgacgccttaagtcc

SEQ ID NO: 93187 - DNA, 71 bp, Homo sapiens
ccctggctcaacaacctggcggagaaagccaaacgctgtaaccgacgccttaagtcccagatcttgcttaa

SEQ ID NO: 93188 - DNA, 71 bp, Homo sapiens
ctcaacaacctggcggagaaagccaaacgctgtaaccgacgccttaagtcccagatcttgcttaagaaata

SEQ ID NO: 93189 - DNA, 73 bp, Homo sapiens
ctggcggagaaagccaaacgctgtaaccgacgccttaagtcccagatcttgcttaagaaatacctcatgaaga

SEQ ID NO: 93190 - DNA, 72 bp, Homo sapiens
aaacgctgtaaccgacgccttaagtcccagatcttgcttaagaaatacctcatgaagaggcgctggaaggta

SEQ ID NO: 93191 - DNA, 73 bp, Homo sapiens
taaccgacgccttaagtcccagatcttgcttaagaaatacctcatgaagaggcgctggaaggtaccgctggat

SEQ ID NO: 93192 - DNA, 73 bp, Homo sapiens
ccttaagtcccagatcttgcttaagaaatacctcatgaagaggcgctggaaggtaccgctggattcagggtgg

SEQ ID NO: 93193 - DNA, 73 bp, Homo sapiens
cccagatcttgcttaagaaatacctcatgaagaggcgctggaaggtaccgctggattcagggtggggagggag

SEQ ID NO: 93194 - DNA, 76 bp, Homo sapiens
cccctgccctggtgttgactgggactccctctcttctgccctctagaaaaacttcattgctgtcagcgctgccaac

SEQ ID NO: 93195 - DNA, 78 bp, Homo sapiens
tggtgttgactgggactccctctcttctgccctctagaaaaacttcattgctgtcagcgctgccaaccgcttcaagaa

SEQ ID NO: 93196 - DNA, 80 bp, Homo sapiens
actgggactccctctcttctgccctctagaaaaacttcattgctgtcagcgctgccaaccgcttcaagaagatcagcagc

SEQ ID NO: 93197 - DNA, 83 bp, Homo sapiens
tctcttctgccctctagaaaaacttcattgctgtcagcgctgccaaccgcttcaagaagatcagcagctcgggggcactgatg

SEQ ID NO: 93198 - DNA, 83 bp, Homo sapiens
ctgccctctagaaaaacttcattgctgtcagcgctgccaaccgcttcaagaagatcagcagctcgggggcactgatggctctg

SEQ ID NO: 93199 - DNA, 81 bp, Homo sapiens
aaaaacttcattgctgtcagcgctgccaaccgcttcaagaagatcagcagctcgggggcactgatggctctgggggtctga

SEQ ID NO: 93200 - DNA, 84 bp, Homo sapiens
attgctgtcagcgctgccaaccgcttcaagaagatcagcagctcgggggcactgatggctctgggggtctgagccctgggcgca

SEQ ID NO: 93201 - DNA, 83 bp, Homo sapiens
tgccaaccgcttcaagaagatcagcagctcgggggcactgatggctctgggggtctgagccctgggcgcagctgaagcctgga

SEQ ID NO: 93202 - DNA, 85 bp, Homo sapiens
ttcaagaagatcagcagctcgggggcactgatggctctgggggtctgagccctgggcgcagctgaagcctggacgcagccacaca

SEQ ID NO: 93203 - DNA, 84 bp, Homo sapiens
aagatcagcagctcgggggcactgatggctctgggggtctgagccctgggcgcagctgaagcctggacgcagccacacagtggc

SEQ ID NO: 93204 - DNA, 81 bp, Homo sapiens
ggggcactgatggctctgggggtctgagccctgggcgcagctgaagcctggacgcagccacacagtggccggggctgaagc

SEQ ID NO: 93205 - DNA, 82 bp, Homo sapiens
actgatggctctgggggtctgagccctgggcgcagctgaagcctggacgcagccacacagtggccggggctgaagccacaca

SEQ ID NO: 93206 - DNA, 82 bp, Homo sapiens
ggtctgagccctgggcgcagctgaagcctggacgcagccacacagtggccggggctgaagccacacagcccagaaggccaga

SEQ ID NO: 93207 - DNA, 79 bp, Homo sapiens
agccctgggcgcagctgaagcctggacgcagccacacagtggccggggctgaagccacacagcccagaaggccagaaaa

SEQ ID NO: 93208 - DNA, 80 bp, Homo sapiens
agctgaagcctggacgcagccacacagtggccggggctgaagccacacagcccagaaggccagaaaaggcagccagatcc

SEQ ID NO: 93209 - DNA, 77 bp, Homo sapiens
cctggacgcagccacacagtggccggggctgaagccacacagcccagaaggccagaaaaggcagccagatccccagg

SEQ ID NO: 93210 - DNA, 76 bp, Homo sapiens
acacagtggccggggctgaagccacacagcccagaaggccagaaaaggcagccagatccccagggcagcctcgtta

SEQ ID NO: 93211 - DNA, 74 bp, Homo sapiens
ccggggctgaagccacacagcccagaaggccagaaaaggcagccagatccccagggcagcctcgttaggacaag

SEQ ID NO: 93212 - DNA, 77 bp, Homo sapiens
aagccacacagcccagaaggccagaaaaggcagccagatccccagggcagcctcgttaggacaaggctgtgccaggc

SEQ ID NO: 93213 - DNA, 76 bp, Homo sapiens
agcccagaaggccagaaaaggcagccagatccccagggcagcctcgttaggacaaggctgtgccaggctgggaggc

SEQ ID NO: 93214 - DNA, 74 bp, Homo sapiens
agaaaaggcagccagatccccagggcagcctcgttaggacaaggctgtgccaggctgggaggctcggggctccc

SEQ ID NO: 93215 - DNA, 75 bp, Homo sapiens
ggcagccagatccccagggcagcctcgttaggacaaggctgtgccaggctgggaggctcggggctccccacgccc

SEQ ID NO: 93216 - DNA, 75 bp, Homo sapiens
agggcagcctcgttaggacaaggctgtgccaggctgggaggctcggggctccccacgcccccatgcagtgaccgc

SEQ ID NO: 93217 - DNA, 74 bp, Homo sapiens
agcctcgttaggacaaggctgtgccaggctgggaggctcggggctccccacgcccccatgcagtgaccgcttcc

SEQ ID NO: 93218 - DNA, 76 bp, Homo sapiens
acaaggctgtgccaggctgggaggctcggggctccccacgcccccatgcagtgaccgcttccccgatgtgagccgc

SEQ ID NO: 93219 - DNA, 74 bp, Homo sapiens
aggctgggaggctcggggctccccacgcccccatgcagtgaccgcttccccgatgtgagccgcctcggagtgtg

SEQ ID NO: 93220 - DNA, 75 bp, Homo sapiens
aggctcggggctccccacgcccccatgcagtgaccgcttccccgatgtgagccgcctcggagtgtggcctggatc

SEQ ID NO: 93221 - DNA, 79 bp, Homo sapiens
tccccacgcccccatgcagtgaccgcttccccgatgtgagccgcctcggagtgtggcctggatccatcctgctagcacc

SEQ ID NO: 93222 - DNA, 81 bp, Homo sapiens
ccgatgtgagccgcctcggagtgtggcctggatccatcctgctagcacctccccagacagggctccagcctgtcggccaca

SEQ ID NO: 93223 - DNA, 80 bp, Homo sapiens
tgagccgcctcggagtgtggcctggatccatcctgctagcacctccccagacagggctccagcctgtcggccacacccca

SEQ ID NO: 93224 - DNA, 78 bp, Homo sapiens
cggagtgtggcctggatccatcctgctagcacctccccagacagggctccagcctgtcggccacaccccagactccag

SEQ ID NO: 93225 - DNA, 75 bp, Homo sapiens
atccatcctgctagcacctccccagacagggctccagcctgtcggccacaccccagactccaggcccccgttgaa

SEQ ID NO: 93226 - DNA, 75 bp, Homo sapiens
tgctagcacctccccagacagggctccagcctgtcggccacaccccagactccaggcccccgttgaagccgctcc

SEQ ID NO: 93227 - DNA, 70 bp, Homo sapiens
cccagacagggctccagcctgtcggccacaccccagactccaggcccccgttgaagccgctcccggttcc

SEQ ID NO: 93228 - DNA, 68 bp, Homo sapiens
agggctccagcctgtcggccacaccccagactccaggcccccgttgaagccgctcccggttccctccc

SEQ ID NO: 93229 - DNA, 69 bp, Homo sapiens
tgtcggccacaccccagactccaggcccccgttgaagccgctcccggttccctccccagctcctcgtct

SEQ ID NO: 93230 - DNA, 67 bp, Homo sapiens
acaccccagactccaggcccccgttgaagccgctcccggttccctccccagctcctcgtctttgaac

SEQ ID NO: 93231 - DNA, 68 bp, Homo sapiens
actccaggcccccgttgaagccgctcccggttccctccccagctcctcgtctttgaactgccgccgcc

SEQ ID NO: 93232 - DNA, 68 bp, Homo sapiens
cccgttgaagccgctcccggttccctccccagctcctcgtctttgaactgccgccgccgtggtgaccc

SEQ ID NO: 93233 - DNA, 69 bp, Homo sapiens
ccgctcccggttccctccccagctcctcgtctttgaactgccgccgccgtggtgacccctgctttgccc

SEQ ID NO: 93234 - DNA, 72 bp, Homo sapiens
ctccccagctcctcgtctttgaactgccgccgccgtggtgacccctgctttgccccactgggagagtcctta

SEQ ID NO: 93235 - DNA, 72 bp, Homo sapiens
agctcctcgtctttgaactgccgccgccgtggtgacccctgctttgccccactgggagagtccttagcctgg

SEQ ID NO: 93236 - DNA, 72 bp, Homo sapiens
tctttgaactgccgccgccgtggtgacccctgctttgccccactgggagagtccttagcctgggcctcctcc

SEQ ID NO: 93237 - DNA, 74 bp, Homo sapiens
ccgccgtggtgacccctgctttgccccactgggagagtccttagcctgggcctcctcctagctggagtgccatg

SEQ ID NO: 93238 - DNA, 75 bp, Homo sapiens
tggtgacccctgctttgccccactgggagagtccttagcctgggcctcctcctagctggagtgccatggctgggg

SEQ ID NO: 93239 - DNA, 77 bp, Homo sapiens
actgggagagtccttagcctgggcctcctcctagctggagtgccatggctggggggtctcagcatgtagggcttctg

SEQ ID NO: 93240 - DNA, 78 bp, Homo sapiens
ctggagtgccatggctggggggtctcagcatgtagggcttctgtggttgtggatgggaggctcctggtggggcagaaa

SEQ ID NO: 93241 - DNA, 77 bp, Homo sapiens
atggctggggggtctcagcatgtagggcttctgtggttgtggatgggaggctcctggtggggcagaaaggctgcaac

SEQ ID NO: 93242 - DNA, 79 bp, Homo sapiens
ggtctcagcatgtagggcttctgtggttgtggatgggaggctcctggtggggcagaaaggctgcaacgctgattcctaa

SEQ ID NO: 93243 - DNA, 76 bp, Homo sapiens
atgtagggcttctgtggttgtggatgggaggctcctggtggggcagaaaggctgcaacgctgattcctaaggccca

SEQ ID NO: 93244 - DNA, 77 bp, Homo sapiens
cttctgtggttgtggatgggaggctcctggtggggcagaaaggctgcaacgctgattcctaaggcccagctgccagg

SEQ ID NO: 93245 - DNA, 80 bp, Homo sapiens
ctcctggtggggcagaaaggctgcaacgctgattcctaaggcccagctgccagggaagacagagcaggctttgtgagaga

SEQ ID NO: 93246 - DNA, 80 bp, Homo sapiens
gggcagaaaggctgcaacgctgattcctaaggcccagctgccagggaagacagagcaggctttgtgagagaggacctcca

SEQ ID NO: 93247 - DNA, 79 bp, Homo sapiens
aaaggctgcaacgctgattcctaaggcccagctgccagggaagacagagcaggctttgtgagagaggacctccatgccc

SEQ ID NO: 93248 - DNA, 77 bp, Homo sapiens
acgctgattcctaaggcccagctgccagggaagacagagcaggctttgtgagagaggacctccatgcccccgccacc

SEQ ID NO: 93249 - DNA, 76 bp, Homo sapiens
ctaaggcccagctgccagggaagacagagcaggctttgtgagagaggacctccatgcccccgccacctccccactc

SEQ ID NO: 93250 - DNA, 77 bp, Homo sapiens
cagggaagacagagcaggctttgtgagagaggacctccatgcccccgccacctccccactccagcagataaggccga

SEQ ID NO: 93251 - DNA, 77 bp, Homo sapiens
aagacagagcaggctttgtgagagaggacctccatgcccccgccacctccccactccagcagataaggccgagccca

SEQ ID NO: 93252 - DNA, 76 bp, Homo sapiens
aggctttgtgagagaggacctccatgcccccgccacctccccactccagcagataaggccgagcccacaccatctg

SEQ ID NO: 93253 - DNA, 76 bp, Homo sapiens
agagaggacctccatgcccccgccacctccccactccagcagataaggccgagcccacaccatctggcccaggctg

SEQ ID NO: 93254 - DNA, 74 bp, Homo sapiens
atgcccccgccacctccccactccagcagataaggccgagcccacaccatctggcccaggctggcccccaccca

SEQ ID NO: 93255 - DNA, 73 bp, Homo sapiens
acctccccactccagcagataaggccgagcccacaccatctggcccaggctggcccccacccaccttccttgc

SEQ ID NO: 93256 - DNA, 76 bp, Homo sapiens
tccagcagataaggccgagcccacaccatctggcccaggctggcccccacccaccttccttgcgaccaccaacaca

SEQ ID NO: 93257 - DNA, 73 bp, Homo sapiens
agataaggccgagcccacaccatctggcccaggctggcccccacccaccttccttgcgaccaccaacacacag

SEQ ID NO: 93258 - DNA, 77 bp, Homo sapiens
cacaccatctggcccaggctggcccccacccaccttccttgcgaccaccaacacacaggaactctgtgtgagagaga

SEQ ID NO: 93259 - DNA, 75 bp, Homo sapiens
atctggcccaggctggcccccacccaccttccttgcgaccaccaacacacaggaactctgtgtgagagagagggc

SEQ ID NO: 93260 - DNA, 75 bp, Homo sapiens
acccaccttccttgcgaccaccaacacacaggaactctgtgtgagagagagggcgcccagcccaggcctggtgga

SEQ ID NO: 93261 - DNA, 75 bp, Homo sapiens
tccttgcgaccaccaacacacaggaactctgtgtgagagagagggcgcccagcccaggcctggtggagggggagg

SEQ ID NO: 93262 - DNA, 73 bp, Homo sapiens
aacacacaggaactctgtgtgagagagagggcgcccagcccaggcctggtggagggggaggggagaagccaag

SEQ ID NO: 93263 - DNA, 73 bp, Homo sapiens
aactctgtgtgagagagagggcgcccagcccaggcctggtggagggggaggggagaagccaagggacacagga

SEQ ID NO: 93264 - DNA, 73 bp, Homo sapiens
tgtgagagagagggcgcccagcccaggcctggtggagggggaggggagaagccaagggacacaggagaccacc

SEQ ID NO: 93265 - DNA, 70 bp, Homo sapiens
cgcccagcccaggcctggtggagggggaggggagaagccaagggacacaggagaccacccccgagcttgc

SEQ ID NO: 93266 - DNA, 70 bp, Homo sapiens
aggcctggtggagggggaggggagaagccaagggacacaggagaccacccccgagcttgcctcagggcca

SEQ ID NO: 93267 - DNA, 70 bp, Homo sapiens
gagggggaggggagaagccaagggacacaggagaccacccccgagcttgcctcagggccaagccggccca

SEQ ID NO: 93268 - DNA, 69 bp, Homo sapiens
agccaagggacacaggagaccacccccgagcttgcctcagggccaagccggcccaacccaaccactcgg

SEQ ID NO: 93269 - DNA, 67 bp, Homo sapiens
aggagaccacccccgagcttgcctcagggccaagccggcccaacccaaccactcggggcccccatct

SEQ ID NO: 93270 - DNA, 68 bp, Homo sapiens
ccgagcttgcctcagggccaagccggcccaacccaaccactcggggcccccatcttgggggtcaccca

SEQ ID NO: 93271 - DNA, 70 bp, Homo sapiens
ttgcctcagggccaagccggcccaacccaaccactcggggcccccatcttgggggtcacccatggcctca

SEQ ID NO: 93272 - DNA, 70 bp, Homo sapiens
ggccaagccggcccaacccaaccactcggggcccccatcttgggggtcacccatggcctcagatgatggg

SEQ ID NO: 93273 - DNA, 72 bp, Homo sapiens
aacccaaccactcggggcccccatcttgggggtcacccatggcctcagatgatggggtcagcaggcccagga

SEQ ID NO: 93274 - DNA, 73 bp, Homo sapiens
actcggggcccccatcttgggggtcacccatggcctcagatgatggggtcagcaggcccaggagaattaggaa

SEQ ID NO: 93275 - DNA, 78 bp, Homo sapiens
catcttgggggtcacccatggcctcagatgatggggtcagcaggcccaggagaattaggaaggccatggggcagcctc

SEQ ID NO: 93276 - DNA, 82 bp, Homo sapiens
ggtcacccatggcctcagatgatggggtcagcaggcccaggagaattaggaaggccatggggcagcctccagtctgctctca

SEQ ID NO: 93277 - DNA, 83 bp, Homo sapiens
atggcctcagatgatggggtcagcaggcccaggagaattaggaaggccatggggcagcctccagtctgctctcagcttgtgcc

SEQ ID NO: 93278 - DNA, 79 bp, Homo sapiens
atggggtcagcaggcccaggagaattaggaaggccatggggcagcctccagtctgctctcagcttgtgccttgtaaata

SEQ ID NO: 93279 - DNA, 79 bp, Homo sapiens
agcaggcccaggagaattaggaaggccatggggcagcctccagtctgctctcagcttgtgccttgtaaataaatgtaca

SEQ ID NO: 93280 - DNA, 78 bp, Homo sapiens
agaattaggaaggccatggggcagcctccagtctgctctcagcttgtgccttgtaaataaatgtacaggttggatgtg

SEQ ID NO: 93281 - DNA, 78 bp, Homo sapiens
aaggccatggggcagcctccagtctgctctcagcttgtgccttgtaaataaatgtacaggttggatgtggcctccttc

SEQ ID NO: 93282 - DNA, 80 bp, Homo sapiens
agtctgctctcagcttgtgccttgtaaataaatgtacaggttggatgtggcctccttccctctgtgtgtgcctgcactgg

SEQ ID NO: 93283 - DNA, 78 bp, Homo sapiens
agcttgtgccttgtaaataaatgtacaggttggatgtggcctccttccctctgtgtgtgcctgcactggtgtgaggtc

SEQ ID NO: 93284 - DNA, 72 bp, Homo sapiens
ctcacacacacccacggcagacacgcacgcacccgggcgccgaagggaaagccgcgtctcgccctcccgccc

SEQ ID NO: 93285 - DNA, 70 bp, Homo sapiens
acacacccacggcagacacgcacgcacccgggcgccgaagggaaagccgcgtctcgccctcccgccccgc

SEQ ID NO: 93286 - DNA, 68 bp, Homo sapiens
acacgcacgcacccgggcgccgaagggaaagccgcgtctcgccctcccgccccgccgtcggtcctgtc

SEQ ID NO: 93287 - DNA, 68 bp, Homo sapiens
acgcacccgggcgccgaagggaaagccgcgtctcgccctcccgccccgccgtcggtcctgtctcagtc

SEQ ID NO: 93288 - DNA, 71 bp, Homo sapiens
cgaagggaaagccgcgtctcgccctcccgccccgccgtcggtcctgtctcagtccctcagcagagcgggaa

SEQ ID NO: 93289 - DNA, 71 bp, Homo sapiens
aaagccgcgtctcgccctcccgccccgccgtcggtcctgtctcagtccctcagcagagcgggaaagcggag

SEQ ID NO: 93290 - DNA, 73 bp, Homo sapiens
tcgccctcccgccccgccgtcggtcctgtctcagtccctcagcagagcgggaaagcggaggccggagccgtga

SEQ ID NO: 93291 - DNA, 72 bp, Homo sapiens
ccccgccgtcggtcctgtctcagtccctcagcagagcgggaaagcggaggccggagccgtgacctctgaccc

SEQ ID NO: 93292 - DNA, 73 bp, Homo sapiens
gtcggtcctgtctcagtccctcagcagagcgggaaagcggaggccggagccgtgacctctgaccccgtggtta

SEQ ID NO: 93293 - DNA, 74 bp, Homo sapiens
agtccctcagcagagcgggaaagcggaggccggagccgtgacctctgaccccgtggttatgcggagccgccgca

SEQ ID NO: 93294 - DNA, 73 bp, Homo sapiens
agcagagcgggaaagcggaggccggagccgtgacctctgaccccgtggttatgcggagccgccgcattcctta

SEQ ID NO: 93295 - DNA, 72 bp, Homo sapiens
aaagcggaggccggagccgtgacctctgaccccgtggttatgcggagccgccgcattccttagcgatcgcgg

SEQ ID NO: 93296 - DNA, 74 bp, Homo sapiens
aggccggagccgtgacctctgaccccgtggttatgcggagccgccgcattccttagcgatcgcggggcagccgc

SEQ ID NO: 93297 - DNA, 75 bp, Homo sapiens
ccgtgacctctgaccccgtggttatgcggagccgccgcattccttagcgatcgcggggcagccgccgctgccgcc

SEQ ID NO: 93298 - DNA, 77 bp, Homo sapiens
cccgtggttatgcggagccgccgcattccttagcgatcgcggggcagccgccgctgccgccgtgggcgactgacgca

SEQ ID NO: 93299 - DNA, 79 bp, Homo sapiens
gttatgcggagccgccgcattccttagcgatcgcggggcagccgccgctgccgccgtgggcgactgacgcagcgcgggc

SEQ ID NO: 93300 - DNA, 78 bp, Homo sapiens
ccgccgcattccttagcgatcgcggggcagccgccgctgccgccgtgggcgactgacgcagcgcgggcgcgtggagcc

SEQ ID NO: 93301 - DNA, 78 bp, Homo sapiens
tccttagcgatcgcggggcagccgccgctgccgccgtgggcgactgacgcagcgcgggcgcgtggagccgccgccgcc

SEQ ID NO: 93302 - DNA, 74 bp, Homo sapiens
gggcagccgccgctgccgccgtgggcgactgacgcagcgcgggcgcgtggagccgccgccgcccctcccccacc

SEQ ID NO: 93303 - DNA, 74 bp, Homo sapiens
ccgctgccgccgtgggcgactgacgcagcgcgggcgcgtggagccgccgccgcccctcccccaccgccgctctc

SEQ ID NO: 93304 - DNA, 74 bp, Homo sapiens
ccgccgtgggcgactgacgcagcgcgggcgcgtggagccgccgccgcccctcccccaccgccgctctcgcgcca

SEQ ID NO: 93305 - DNA, 73 bp, Homo sapiens
cgactgacgcagcgcgggcgcgtggagccgccgccgcccctcccccaccgccgctctcgcgccagccggtccc

SEQ ID NO: 93306 - DNA, 71 bp, Homo sapiens
agcgcgggcgcgtggagccgccgccgcccctcccccaccgccgctctcgcgccagccggtccccgcgtgcc

SEQ ID NO: 93307 - DNA, 68 bp, Homo sapiens
agccgccgccgcccctcccccaccgccgctctcgcgccagccggtccccgcgtgcccgccccttctcc

SEQ ID NO: 93308 - DNA, 68 bp, Homo sapiens
gcccctcccccaccgccgctctcgcgccagccggtccccgcgtgcccgccccttctccccggccgcac

SEQ ID NO: 93309 - DNA, 69 bp, Homo sapiens
ccaccgccgctctcgcgccagccggtccccgcgtgcccgccccttctccccggccgcacccgagacctc

SEQ ID NO: 93310 - DNA, 70 bp, Homo sapiens
ccgctctcgcgccagccggtccccgcgtgcccgccccttctccccggccgcacccgagacctcgcgcgcc

SEQ ID NO: 93311 - DNA, 70 bp, Homo sapiens
ccagccggtccccgcgtgcccgccccttctccccggccgcacccgagacctcgcgcgccgccgctgccac

SEQ ID NO: 93312 - DNA, 69 bp, Homo sapiens
cccgcgtgcccgccccttctccccggccgcacccgagacctcgcgcgccgccgctgccacgcgcccccc

SEQ ID NO: 93313 - DNA, 69 bp, Homo sapiens
cccttctccccggccgcacccgagacctcgcgcgccgccgctgccacgcgccccccccaccgccgccgc

SEQ ID NO: 93314 - DNA, 70 bp, Homo sapiens
cccggccgcacccgagacctcgcgcgccgccgctgccacgcgccccccccaccgccgccgccgccccagc

SEQ ID NO: 93315 - DNA, 70 bp, Homo sapiens
acccgagacctcgcgcgccgccgctgccacgcgccccccccaccgccgccgccgccccagccccgcgcca

SEQ ID NO: 93316 - DNA, 71 bp, Homo sapiens
ctcgcgcgccgccgctgccacgcgccccccccaccgccgccgccgccccagccccgcgccaccgccccagc

SEQ ID NO: 93317 - DNA, 69 bp, Homo sapiens
ccgctgccacgcgccccccccaccgccgccgccgccccagccccgcgccaccgccccagcccgcccagc

SEQ ID NO: 93318 - DNA, 65 bp, Homo sapiens
cccccccaccgccgccgccgccccagccccgcgccaccgccccagcccgcccagcccggaggtcc

SEQ ID NO: 93319 - DNA, 71 bp, Homo sapiens
gccgccgccgccccagccccgcgccaccgccccagcccgcccagcccggaggtcccgcgtggagctgccgc

SEQ ID NO: 93320 - DNA, 70 bp, Homo sapiens
cgccgccccagccccgcgccaccgccccagcccgcccagcccggaggtcccgcgtggagctgccgccgcc

SEQ ID NO: 93321 - DNA, 70 bp, Homo sapiens
cccagcccgcccagcccggaggtcccgcgtggagctgccgccgccgccggggagaaggatgaaggacaaa

SEQ ID NO: 93322 - DNA, 71 bp, Homo sapiens
ccagcccggaggtcccgcgtggagctgccgccgccgccggggagaaggatgaaggacaaacagaagaagaa

SEQ ID NO: 93323 - DNA, 70 bp, Homo sapiens
ccggaggtcccgcgtggagctgccgccgccgccggggagaaggatgaaggacaaacagaagaagaagaag

SEQ ID NO: 93324 - DNA, 73 bp, Homo sapiens
tgccgccgccgccggggagaaggatgaaggacaaacagaagaagaagaaggagcgcacgtgggccgaggccgc

SEQ ID NO: 93325 - DNA, 72 bp, Homo sapiens
gaagaagaaggagcgcacgtgggccgaggccgcgcgcctggtgaggcggacagccgaggggggctccgtggg

SEQ ID NO: 93326 - DNA, 72 bp, Homo sapiens
ggatggatataaatggaaattgcacactgaaattaggacgtttatatttcttcaggtattagaaaactactc

SEQ ID NO: 93327 - DNA, 72 bp, Homo sapiens
aaatggaaattgcacactgaaattaggacgtttatatttcttcaggtattagaaaactactcggatgctcca

SEQ ID NO: 93328 - DNA, 73 bp, Homo sapiens
aaattgcacactgaaattaggacgtttatatttcttcaggtattagaaaactactcggatgctccaatgacac

SEQ ID NO: 93329 - DNA, 71 bp, Homo sapiens
actgaaattaggacgtttatatttcttcaggtattagaaaactactcggatgctccaatgacaccaaaaca

SEQ ID NO: 93330 - DNA, 75 bp, Homo sapiens
acgtttatatttcttcaggtattagaaaactactcggatgctccaatgacaccaaaacagattctgcaggtcata

SEQ ID NO: 93331 - DNA, 77 bp, Homo sapiens
atttcttcaggtattagaaaactactcggatgctccaatgacaccaaaacagattctgcaggtcatagaggcagaag

SEQ ID NO: 93332 - DNA, 77 bp, Homo sapiens
tattagaaaactactcggatgctccaatgacaccaaaacagattctgcaggtcatagaggcagaaggactaaaggaa

SEQ ID NO: 93333 - DNA, 76 bp, Homo sapiens
actactcggatgctccaatgacaccaaaacagattctgcaggtcatagaggcagaaggactaaaggaaatgaggtt

SEQ ID NO: 93334 - DNA, 75 bp, Homo sapiens
caatgacaccaaaacagattctgcaggtcatagaggcagaaggactaaaggaaatgaggtttgtattgttcttgt

SEQ ID NO: 93335 - DNA, 74 bp, Homo sapiens
aaaacagattctgcaggtcatagaggcagaaggactaaaggaaatgaggtttgtattgttcttgttgcttaaca

SEQ ID NO: 93336 - DNA, 74 bp, Homo sapiens
ttctgcaggtcatagaggcagaaggactaaaggaaatgaggtttgtattgttcttgttgcttaacatgagggtt

SEQ ID NO: 93337 - DNA, 73 bp, Homo sapiens
atagaggcagaaggactaaaggaaatgaggtttgtattgttcttgttgcttaacatgagggtttcataggata

SEQ ID NO: 93338 - DNA, 77 bp, Homo sapiens
atttttgtttttatgggctatttcccatcatgctgctgtctgcactgctgttggaccactttgcctatagaaggtaa

SEQ ID NO: 93339 - DNA, 80 bp, Homo sapiens
tgtttttatgggctatttcccatcatgctgctgtctgcactgctgttggaccactttgcctatagaaggtaaatgagtcc

SEQ ID NO: 93340 - DNA, 81 bp, Homo sapiens
tatttcccatcatgctgctgtctgcactgctgttggaccactttgcctatagaaggtaaatgagtccctttgggacatatg

SEQ ID NO: 93341 - DNA, 80 bp, Homo sapiens
atgctgctgtctgcactgctgttggaccactttgcctatagaaggtaaatgagtccctttgggacatatggaattgagaa

SEQ ID NO: 93342 - DNA, 75 bp, Homo sapiens
tgcactgctgttggaccactttgcctatagaaggtaaatgagtccctttgggacatatggaattgagaaccttaa

SEQ ID NO: 93343 - DNA, 70 bp, Homo sapiens
ttggaccactttgcctatagaaggtaaatgagtccctttgggacatatggaattgagaaccttaacttgt

SEQ ID NO: 93344 - DNA, 70 bp, Homo sapiens
actttgcctatagaaggtaaatgagtccctttgggacatatggaattgagaaccttaacttgtttctgct

SEQ ID NO: 93345 - DNA, 71 bp, Homo sapiens
tatagaaggtaaatgagtccctttgggacatatggaattgagaaccttaacttgtttctgcttcttgttct

SEQ ID NO: 93346 - DNA, 71 bp, Homo sapiens
aatgagtccctttgggacatatggaattgagaaccttaacttgtttctgcttcttgttcttagaggaatta

SEQ ID NO: 93347 - DNA, 76 bp, Homo sapiens
taggcagatggattgtataaccctcatccattcttttgtggttttacagtgggacttcccctctcgcatgcctcaa

SEQ ID NO: 93348 - DNA, 77 bp, Homo sapiens
attgtataaccctcatccattcttttgtggttttacagtgggacttcccctctcgcatgcctcaatgctatgctaca

SEQ ID NO: 93349 - DNA, 79 bp, Homo sapiens
tcatccattcttttgtggttttacagtgggacttcccctctcgcatgcctcaatgctatgctacattccaattcaagag

SEQ ID NO: 93350 - DNA, 76 bp, Homo sapiens
attcttttgtggttttacagtgggacttcccctctcgcatgcctcaatgctatgctacattccaattcaagaggag

SEQ ID NO: 93351 - DNA, 76 bp, Homo sapiens
ttttacagtgggacttcccctctcgcatgcctcaatgctatgctacattccaattcaagaggaggagaggggttgt

SEQ ID NO: 93352 - DNA, 76 bp, Homo sapiens
tgggacttcccctctcgcatgcctcaatgctatgctacattccaattcaagaggaggagaggggttgttttataaa

SEQ ID NO: 93353 - DNA, 80 bp, Homo sapiens
tctcgcatgcctcaatgctatgctacattccaattcaagaggaggagaggggttgttttataaactgcctggccgaatca

SEQ ID NO: 93354 - DNA, 75 bp, Homo sapiens
tcaatgctatgctacattccaattcaagaggaggagaggggttgttttataaactgcctggccgaatcagccttt

SEQ ID NO: 93355 - DNA, 73 bp, Homo sapiens
ctatgctacattccaattcaagaggaggagaggggttgttttataaactgcctggccgaatcagccttttcac

SEQ ID NO: 93356 - DNA, 70 bp, Homo sapiens
aattcaagaggaggagaggggttgttttataaactgcctggccgaatcagccttttcacgctcaaggtaa

SEQ ID NO: 93357 - DNA, 72 bp, Homo sapiens
aggagaggggttgttttataaactgcctggccgaatcagccttttcacgctcaaggtaagtgatatgaactc

SEQ ID NO: 93358 - DNA, 75 bp, Homo sapiens
ttgttttataaactgcctggccgaatcagccttttcacgctcaaggtaagtgatatgaactctcttttggtgcag

SEQ ID NO: 93359 - DNA, 77 bp, Homo sapiens
ttataaactgcctggccgaatcagccttttcacgctcaaggtaagtgatatgaactctcttttggtgcagtgattct

SEQ ID NO: 93360 - DNA, 74 bp, Homo sapiens
actgcaccaggccccttcatcttaattttaatatatctttgaataaacaccattgtatgaacctgctgtaagct

SEQ ID NO: 93361 - DNA, 72 bp, Homo sapiens
aggccccttcatcttaattttaatatatctttgaataaacaccattgtatgaacctgctgtaagcttgggag

SEQ ID NO: 93362 - DNA, 73 bp, Homo sapiens
cttaattttaatatatctttgaataaacaccattgtatgaacctgctgtaagcttgggagtggtctgttagtc

SEQ ID NO: 93363 - DNA, 76 bp, Homo sapiens
tttaatatatctttgaataaacaccattgtatgaacctgctgtaagcttgggagtggtctgttagtctacagcttg

SEQ ID NO: 93364 - DNA, 81 bp, Homo sapiens
tgaataaacaccattgtatgaacctgctgtaagcttgggagtggtctgttagtctacagcttgtgtctgagatgtgctaat

SEQ ID NO: 93365 - DNA, 80 bp, Homo sapiens
accattgtatgaacctgctgtaagcttgggagtggtctgttagtctacagcttgtgtctgagatgtgctaattgaatatt

SEQ ID NO: 93366 - DNA, 83 bp, Homo sapiens
tatgaacctgctgtaagcttgggagtggtctgttagtctacagcttgtgtctgagatgtgctaattgaatatttgctcagtac

SEQ ID NO: 93367 - DNA, 82 bp, Homo sapiens
tgtaagcttgggagtggtctgttagtctacagcttgtgtctgagatgtgctaattgaatatttgctcagtacctcatcttaa

SEQ ID NO: 93368 - DNA, 81 bp, Homo sapiens
tgttagtctacagcttgtgtctgagatgtgctaattgaatatttgctcagtacctcatcttaactgcctttggctttatgt

SEQ ID NO: 93369 - DNA, 82 bp, Homo sapiens
ttgtgtctgagatgtgctaattgaatatttgctcagtacctcatcttaactgcctttggctttatgttgcttatccttcata

SEQ ID NO: 93370 - DNA, 79 bp, Homo sapiens
atgtgctaattgaatatttgctcagtacctcatcttaactgcctttggctttatgttgcttatccttcatagtatcttg

SEQ ID NO: 93371 - DNA, 77 bp, Homo sapiens
aattgaatatttgctcagtacctcatcttaactgcctttggctttatgttgcttatccttcatagtatcttgttcat

SEQ ID NO: 93372 - DNA, 76 bp, Homo sapiens
atttgctcagtacctcatcttaactgcctttggctttatgttgcttatccttcatagtatcttgttcattggcctt

SEQ ID NO: 93373 - DNA, 76 bp, Homo sapiens
acctcatcttaactgcctttggctttatgttgcttatccttcatagtatcttgttcattggccttttacatccata

SEQ ID NO: 93374 - DNA, 78 bp, Homo sapiens
taactgcctttggctttatgttgcttatccttcatagtatcttgttcattggccttttacatccataggcatcacttc

SEQ ID NO: 93375 - DNA, 79 bp, Homo sapiens
ctttatgttgcttatccttcatagtatcttgttcattggccttttacatccataggcatcacttctctgatattcgttg

SEQ ID NO: 93376 - DNA, 79 bp, Homo sapiens
ttatccttcatagtatcttgttcattggccttttacatccataggcatcacttctctgatattcgttgtgctcttttaa

SEQ ID NO: 93377 - DNA, 78 bp, Homo sapiens
atagtatcttgttcattggccttttacatccataggcatcacttctctgatattcgttgtgctcttttaatggattaa

SEQ ID NO: 93378 - DNA, 76 bp, Homo sapiens
cttgttcattggccttttacatccataggcatcacttctctgatattcgttgtgctcttttaatggattaatggtt

SEQ ID NO: 93379 - DNA, 75 bp, Homo sapiens
cttttacatccataggcatcacttctctgatattcgttgtgctcttttaatggattaatggtttgcttggttggt

SEQ ID NO: 93380 - DNA, 75 bp, Homo sapiens
ataggcatcacttctctgatattcgttgtgctcttttaatggattaatggtttgcttggttggttcctctagtta

SEQ ID NO: 93381 - DNA, 73 bp, Homo sapiens
ttctctgatattcgttgtgctcttttaatggattaatggtttgcttggttggttcctctagttagactgtaaa

SEQ ID NO: 93382 - DNA, 70 bp, Homo sapiens
atattcgttgtgctcttttaatggattaatggtttgcttggttggttcctctagttagactgtaaactcc

SEQ ID NO: 93383 - DNA, 73 bp, Homo sapiens
tcttttaatggattaatggtttgcttggttggttcctctagttagactgtaaactccttgagagcagagtctg

SEQ ID NO: 93384 - DNA, 73 bp, Homo sapiens
gattaatggtttgcttggttggttcctctagttagactgtaaactccttgagagcagagtctgtattttatta

SEQ ID NO: 93385 - DNA, 72 bp, Homo sapiens
atggtttgcttggttggttcctctagttagactgtaaactccttgagagcagagtctgtattttattaatta

SEQ ID NO: 93386 - DNA, 72 bp, Homo sapiens
gttggttcctctagttagactgtaaactccttgagagcagagtctgtattttattaattacccacagtacta

SEQ ID NO: 93387 - DNA, 73 bp, Homo sapiens
tctagttagactgtaaactccttgagagcagagtctgtattttattaattacccacagtactaggtacatagt

SEQ ID NO: 93388 - DNA, 72 bp, Homo sapiens
aaactccttgagagcagagtctgtattttattaattacccacagtactaggtacatagttgccttcaataaa

SEQ ID NO: 93389 - DNA, 74 bp, Homo sapiens
ccttgagagcagagtctgtattttattaattacccacagtactaggtacatagttgccttcaataaatatatat

SEQ ID NO: 93390 - DNA, 75 bp, Homo sapiens
tttaagaatttgtagggttttgttcacctgagttgtaccttgctgtcacagaaggatgccctgcagtggtctcgc

SEQ ID NO: 93391 - DNA, 80 bp, Homo sapiens
tgtagggttttgttcacctgagttgtaccttgctgtcacagaaggatgccctgcagtggtctcgccatccagctacagtg

SEQ ID NO: 93392 - DNA, 83 bp, Homo sapiens
tgttcacctgagttgtaccttgctgtcacagaaggatgccctgcagtggtctcgccatccagctacagtggagggagaggagc

SEQ ID NO: 93393 - DNA, 82 bp, Homo sapiens
agttgtaccttgctgtcacagaaggatgccctgcagtggtctcgccatccagctacagtggagggagaggagccagaggaca

SEQ ID NO: 93394 - DNA, 85 bp, Homo sapiens
ctgtcacagaaggatgccctgcagtggtctcgccatccagctacagtggagggagaggagccagaggacacggctgatgtggaga

SEQ ID NO: 93395 - DNA, 84 bp, Homo sapiens
atgccctgcagtggtctcgccatccagctacagtggagggagaggagccagaggacacggctgatgtggagagctgtgggtcta

SEQ ID NO: 93396 - DNA, 84 bp, Homo sapiens
ctgcagtggtctcgccatccagctacagtggagggagaggagccagaggacacggctgatgtggagagctgtgggtctaatgaa

SEQ ID NO: 93397 - DNA, 85 bp, Homo sapiens
catccagctacagtggagggagaggagccagaggacacggctgatgtggagagctgtgggtctaatgaagccagcactgtgagtg

SEQ ID NO: 93398 - DNA, 83 bp, Homo sapiens
tacagtggagggagaggagccagaggacacggctgatgtggagagctgtgggtctaatgaagccagcactgtgagtggtgaaa

SEQ ID NO: 93399 - DNA, 81 bp, Homo sapiens
agaggagccagaggacacggctgatgtggagagctgtgggtctaatgaagccagcactgtgagtggtgaaaacgatggtaa

SEQ ID NO: 93400 - DNA, 78 bp, Homo sapiens
agaggacacggctgatgtggagagctgtgggtctaatgaagccagcactgtgagtggtgaaaacgatggtaaggaccc

SEQ ID NO: 93401 - DNA, 78 bp, Homo sapiens
ctgatgtggagagctgtgggtctaatgaagccagcactgtgagtggtgaaaacgatggtaaggaccctttaatggatg

SEQ ID NO: 93402 - DNA, 75 bp, Homo sapiens
agagctgtgggtctaatgaagccagcactgtgagtggtgaaaacgatggtaaggaccctttaatggatgggtgag

SEQ ID NO: 93403 - DNA, 74 bp, Homo sapiens
gtgggtctaatgaagccagcactgtgagtggtgaaaacgatggtaaggaccctttaatggatgggtgagggagc

SEQ ID NO: 93404 - DNA, 69 bp, Homo sapiens
aaaacgatggtaaggaccctttaatggatgggtgagggagccacagcaggcactagggactaaccttta

SEQ ID NO: 93405 - DNA, 70 bp, Homo sapiens
tggtaaggaccctttaatggatgggtgagggagccacagcaggcactagggactaacctttattttcctc

SEQ ID NO: 93406 - DNA, 76 bp, Homo sapiens
agccacagcaggcactagggactaacctttattttcctctcttccagtatctcttgatgaaacatcttcgaacgca

SEQ ID NO: 93407 - DNA, 73 bp, Homo sapiens
aggcactagggactaacctttattttcctctcttccagtatctcttgatgaaacatcttcgaacgcatcctgt

SEQ ID NO: 93408 - DNA, 76 bp, Homo sapiens
actaacctttattttcctctcttccagtatctcttgatgaaacatcttcgaacgcatcctgttctacagaatctca

SEQ ID NO: 93409 - DNA, 78 bp, Homo sapiens
attttcctctcttccagtatctcttgatgaaacatcttcgaacgcatcctgttctacagaatctcagagtcgacctct

SEQ ID NO: 93410 - DNA, 80 bp, Homo sapiens
tctcttccagtatctcttgatgaaacatcttcgaacgcatcctgttctacagaatctcagagtcgacctctttccaatcc

SEQ ID NO: 93411 - DNA, 78 bp, Homo sapiens
agtatctcttgatgaaacatcttcgaacgcatcctgttctacagaatctcagagtcgacctctttccaatcccaggga

SEQ ID NO: 93412 - DNA, 77 bp, Homo sapiens
aaacatcttcgaacgcatcctgttctacagaatctcagagtcgacctctttccaatcccagggacagctacagagct

SEQ ID NO: 93413 - DNA, 79 bp, Homo sapiens
cttcgaacgcatcctgttctacagaatctcagagtcgacctctttccaatcccagggacagctacagagcttcctcaca

SEQ ID NO: 93414 - DNA, 77 bp, Homo sapiens
atcctgttctacagaatctcagagtcgacctctttccaatcccagggacagctacagagcttcctcacaggtaagga

SEQ ID NO: 93415 - DNA, 76 bp, Homo sapiens
acagaatctcagagtcgacctctttccaatcccagggacagctacagagcttcctcacaggtaaggaagaggtaga

SEQ ID NO: 93416 - DNA, 74 bp, Homo sapiens
agagtcgacctctttccaatcccagggacagctacagagcttcctcacaggtaaggaagaggtagagcctagcc

SEQ ID NO: 93417 - DNA, 77 bp, Homo sapiens
tttccaatcccagggacagctacagagcttcctcacaggtaaggaagaggtagagcctagcctgggaggatgaatga

SEQ ID NO: 93418 - DNA, 73 bp, Homo sapiens
ttttgtggctctgcagttgacttgggctctcttttgttctctcttggaacgcaggcgaacaaacaaaagaaaa

SEQ ID NO: 93419 - DNA, 71 bp, Homo sapiens
ctgcagttgacttgggctctcttttgttctctcttggaacgcaggcgaacaaacaaaagaaaaagactggg

SEQ ID NO: 93420 - DNA, 73 bp, Homo sapiens
gctctcttttgttctctcttggaacgcaggcgaacaaacaaaagaaaaagactggggtgatgctgcctcgagt

SEQ ID NO: 93421 - DNA, 72 bp, Homo sapiens
ttttgttctctcttggaacgcaggcgaacaaacaaaagaaaaagactggggtgatgctgcctcgagttgtcc

SEQ ID NO: 93422 - DNA, 75 bp, Homo sapiens
tcttggaacgcaggcgaacaaacaaaagaaaaagactggggtgatgctgcctcgagttgtcctgactcctctgaa

SEQ ID NO: 93423 - DNA, 71 bp, Homo sapiens
aggcgaacaaacaaaagaaaaagactggggtgatgctgcctcgagttgtcctgactcctctgaaggtaaac

SEQ ID NO: 93424 - DNA, 70 bp, Homo sapiens
aaagaaaaagactggggtgatgctgcctcgagttgtcctgactcctctgaaggtaaacggggcccacgtg

SEQ ID NO: 93425 - DNA, 74 bp, Homo sapiens
aaaagactggggtgatgctgcctcgagttgtcctgactcctctgaaggtaaacggggcccacgtggaatctgca

SEQ ID NO: 93426 - DNA, 76 bp, Homo sapiens
atgctgcctcgagttgtcctgactcctctgaaggtaaacggggcccacgtggaatctgcatcaggtatgtgtaaac

SEQ ID NO: 93427 - DNA, 74 bp, Homo sapiens
agttgtcctgactcctctgaaggtaaacggggcccacgtggaatctgcatcaggtatgtgtaaactcatggttg

SEQ ID NO: 93428 - DNA, 74 bp, Homo sapiens
actcctctgaaggtaaacggggcccacgtggaatctgcatcaggtatgtgtaaactcatggttgtgatgctttt

SEQ ID NO: 93429 - DNA, 76 bp, Homo sapiens
tctgaaggtaaacggggcccacgtggaatctgcatcaggtatgtgtaaactcatggttgtgatgctttttcctcag

SEQ ID NO: 93430 - DNA, 78 bp, Homo sapiens
atgggcgcggcttggtgatacttttgaccagtggaatgctgtgccttcagggttctcgggctgccacgccgatggcga

SEQ ID NO: 93431 - DNA, 79 bp, Homo sapiens
ttggtgatacttttgaccagtggaatgctgtgccttcagggttctcgggctgccacgccgatggcgagagcggcagccc

SEQ ID NO: 93432 - DNA, 79 bp, Homo sapiens
acttttgaccagtggaatgctgtgccttcagggttctcgggctgccacgccgatggcgagagcggcagcccgtccagca

SEQ ID NO: 93433 - DNA, 84 bp, Homo sapiens
agtggaatgctgtgccttcagggttctcgggctgccacgccgatggcgagagcggcagcccgtccagcagcagcagcggctctc

SEQ ID NO: 93434 - DNA, 83 bp, Homo sapiens
tgtgccttcagggttctcgggctgccacgccgatggcgagagcggcagcccgtccagcagcagcagcggctctctggccctgg

SEQ ID NO: 93435 - DNA, 86 bp, Homo sapiens
ttctcgggctgccacgccgatggcgagagcggcagcccgtccagcagcagcagcggctctctggccctgggcagcgctgctattcg

SEQ ID NO: 93436 - DNA, 86 bp, Homo sapiens
cacgccgatggcgagagcggcagcccgtccagcagcagcagcggctctctggccctgggcagcgctgctattcgtggccaggccga

SEQ ID NO: 93437 - DNA, 85 bp, Homo sapiens
atggcgagagcggcagcccgtccagcagcagcagcggctctctggccctgggcagcgctgctattcgtggccaggccgaggtcac

SEQ ID NO: 93438 - DNA, 83 bp, Homo sapiens
agcggcagcccgtccagcagcagcagcggctctctggccctgggcagcgctgctattcgtggccaggccgaggtcacccagga

SEQ ID NO: 93439 - DNA, 81 bp, Homo sapiens
cgtccagcagcagcagcggctctctggccctgggcagcgctgctattcgtggccaggccgaggtcacccaggaccctgccc

SEQ ID NO: 93440 - DNA, 78 bp, Homo sapiens
agcggctctctggccctgggcagcgctgctattcgtggccaggccgaggtcacccaggaccctgccccgctcctgaga

SEQ ID NO: 93441 - DNA, 76 bp, Homo sapiens
tggccctgggcagcgctgctattcgtggccaggccgaggtcacccaggaccctgccccgctcctgagaggcttccg

SEQ ID NO: 93442 - DNA, 76 bp, Homo sapiens
agcgctgctattcgtggccaggccgaggtcacccaggaccctgccccgctcctgagaggcttccggaagccagcca

SEQ ID NO: 93443 - DNA, 75 bp, Homo sapiens
tattcgtggccaggccgaggtcacccaggaccctgccccgctcctgagaggcttccggaagccagccacaggtga

SEQ ID NO: 93444 - DNA, 75 bp, Homo sapiens
aggccgaggtcacccaggaccctgccccgctcctgagaggcttccggaagccagccacaggtgagtggcgtggca

SEQ ID NO: 93445 - DNA, 74 bp, Homo sapiens
acccaggaccctgccccgctcctgagaggcttccggaagccagccacaggtgagtggcgtggcacttatttctc

SEQ ID NO: 93446 - DNA, 76 bp, Homo sapiens
ctgccccgctcctgagaggcttccggaagccagccacaggtgagtggcgtggcacttatttctctgcctgtaaagg

SEQ ID NO: 93447 - DNA, 71 bp, Homo sapiens
tttttcttttaaaaagctgaaatctataccttgcttcaaaaatcataggtcaaatgaagcgcaacagaggg

SEQ ID NO: 93448 - DNA, 73 bp, Homo sapiens
aaaagctgaaatctataccttgcttcaaaaatcataggtcaaatgaagcgcaacagaggggaagaaatagatt

SEQ ID NO: 93449 - DNA, 74 bp, Homo sapiens
aaatctataccttgcttcaaaaatcataggtcaaatgaagcgcaacagaggggaagaaatagattttgagacac

SEQ ID NO: 93450 - DNA, 75 bp, Homo sapiens
tgcttcaaaaatcataggtcaaatgaagcgcaacagaggggaagaaatagattttgagacacctgggtccattct

SEQ ID NO: 93451 - DNA, 74 bp, Homo sapiens
aaaatcataggtcaaatgaagcgcaacagaggggaagaaatagattttgagacacctgggtccattcttgtcaa

SEQ ID NO: 93452 - DNA, 72 bp, Homo sapiens
aaatgaagcgcaacagaggggaagaaatagattttgagacacctgggtccattcttgtcaacaccaacctcc

SEQ ID NO: 93453 - DNA, 73 bp, Homo sapiens
aacagaggggaagaaatagattttgagacacctgggtccattcttgtcaacaccaacctccgtgccctgatca

SEQ ID NO: 93454 - DNA, 73 bp, Homo sapiens
aagaaatagattttgagacacctgggtccattcttgtcaacaccaacctccgtgccctgatcaactctcggac

SEQ ID NO: 93455 - DNA, 74 bp, Homo sapiens
atagattttgagacacctgggtccattcttgtcaacaccaacctccgtgccctgatcaactctcggaccttcca

SEQ ID NO: 93456 - DNA, 75 bp, Homo sapiens
acacctgggtccattcttgtcaacaccaacctccgtgccctgatcaactctcggaccttccatgccttaccatca

SEQ ID NO: 93457 - DNA, 78 bp, Homo sapiens
gtccattcttgtcaacaccaacctccgtgccctgatcaactctcggaccttccatgccttaccatcacacttccagca

SEQ ID NO: 93458 - DNA, 79 bp, Homo sapiens
gtcaacaccaacctccgtgccctgatcaactctcggaccttccatgccttaccatcacacttccagcagcagctcctct

SEQ ID NO: 93459 - DNA, 81 bp, Homo sapiens
cgtgccctgatcaactctcggaccttccatgccttaccatcacacttccagcagcagctcctcttcctcctgcctgaagta

SEQ ID NO: 93460 - DNA, 83 bp, Homo sapiens
ctgatcaactctcggaccttccatgccttaccatcacacttccagcagcagctcctcttcctcctgcctgaagtagacagaca

SEQ ID NO: 93461 - DNA, 84 bp, Homo sapiens
tctcggaccttccatgccttaccatcacacttccagcagcagctcctcttcctcctgcctgaagtagacagacaggtgcacatg

SEQ ID NO: 93462 - DNA, 85 bp, Homo sapiens
tccatgccttaccatcacacttccagcagcagctcctcttcctcctgcctgaagtagacagacaggtgcacatgggcagcctccc

SEQ ID NO: 93463 - DNA, 83 bp, Homo sapiens
atcacacttccagcagcagctcctcttcctcctgcctgaagtagacagacaggtgcacatgggcagcctcccctttgcctctc

SEQ ID NO: 93464 - DNA, 82 bp, Homo sapiens
ttccagcagcagctcctcttcctcctgcctgaagtagacagacaggtgcacatgggcagcctcccctttgcctctctctggg

SEQ ID NO: 93465 - DNA, 64 bp, Homo sapiens
ttctcttttaagtttatttattaggatttttttcccccttgatccttctaggtggggacggatg

SEQ ID NO: 93466 - DNA, 66 bp, Homo sapiens
taagtttatttattaggatttttttcccccttgatccttctaggtggggacggatggcctgttgcg

SEQ ID NO: 93467 - DNA, 74 bp, Homo sapiens
ggatttttttcccccttgatccttctaggtggggacggatggcctgttgcgtctcagcagcagtgcactaaata

SEQ ID NO: 93468 - DNA, 74 bp, Homo sapiens
ttcccccttgatccttctaggtggggacggatggcctgttgcgtctcagcagcagtgcactaaataacgagttt

SEQ ID NO: 93469 - DNA, 75 bp, Homo sapiens
ttgatccttctaggtggggacggatggcctgttgcgtctcagcagcagtgcactaaataacgagttttttaccca

SEQ ID NO: 93470 - DNA, 78 bp, Homo sapiens
taggtggggacggatggcctgttgcgtctcagcagcagtgcactaaataacgagttttttacccatgcggctcagagc

SEQ ID NO: 93471 - DNA, 80 bp, Homo sapiens
atggcctgttgcgtctcagcagcagtgcactaaataacgagttttttacccatgcggctcagagctggcgggagcgcctg

SEQ ID NO: 93472 - DNA, 82 bp, Homo sapiens
gtctcagcagcagtgcactaaataacgagttttttacccatgcggctcagagctggcgggagcgcctggctgatggtatgta

SEQ ID NO: 93473 - DNA, 78 bp, Homo sapiens
agcagtgcactaaataacgagttttttacccatgcggctcagagctggcgggagcgcctggctgatggtatgtagact

SEQ ID NO: 93474 - DNA, 76 bp, Homo sapiens
actaaataacgagttttttacccatgcggctcagagctggcgggagcgcctggctgatggtatgtagacttggtca

SEQ ID NO: 93475 - DNA, 80 bp, Homo sapiens
tttttacccatgcggctcagagctggcgggagcgcctggctgatggtatgtagacttggtcatctcggacggcttgcgac

SEQ ID NO: 93476 - DNA, 76 bp, Homo sapiens
acattaatatcccgaatgcacttactagaagaggtttatttctccctaggtgaatttactcatgagatgcaagtca

SEQ ID NO: 93477 - DNA, 77 bp, Homo sapiens
gaatgcacttactagaagaggtttatttctccctaggtgaatttactcatgagatgcaagtcaggatacgacaggaa

SEQ ID NO: 93478 - DNA, 74 bp, Homo sapiens
acttactagaagaggtttatttctccctaggtgaatttactcatgagatgcaagtcaggatacgacaggaaatg

SEQ ID NO: 93479 - DNA, 73 bp, Homo sapiens
aggtttatttctccctaggtgaatttactcatgagatgcaagtcaggatacgacaggaaatggagaaggaaaa

SEQ ID NO: 93480 - DNA, 75 bp, Homo sapiens
tttctccctaggtgaatttactcatgagatgcaagtcaggatacgacaggaaatggagaaggaaaagaaggtgga

SEQ ID NO: 93481 - DNA, 74 bp, Homo sapiens
aatttactcatgagatgcaagtcaggatacgacaggaaatggagaaggaaaagaaggtggaacaatggaaagaa

SEQ ID NO: 93482 - DNA, 72 bp, Homo sapiens
atgagatgcaagtcaggatacgacaggaaatggagaaggaaaagaaggtggaacaatggaaagaaaagttct

SEQ ID NO: 93483 - DNA, 68 bp, Homo sapiens
aagtcaggatacgacaggaaatggagaaggaaaagaaggtggaacaatggaaagaaaagttctttgaa

SEQ ID NO: 93484 - DNA, 68 bp, Homo sapiens
atacgacaggaaatggagaaggaaaagaaggtggaacaatggaaagaaaagttctttgaagactacta

SEQ ID NO: 93485 - DNA, 69 bp, Homo sapiens
atggagaaggaaaagaaggtggaacaatggaaagaaaagttctttgaagactactatggacagaagtaa

SEQ ID NO: 93486 - DNA, 69 bp, Homo sapiens
aaaagaaggtggaacaatggaaagaaaagttctttgaagactactatggacagaagtaaggcagttgga

SEQ ID NO: 93487 - DNA, 73 bp, Homo sapiens
aacaatggaaagaaaagttctttgaagactactatggacagaagtaaggcagttggagctatgagtcctggtc

SEQ ID NO: 93488 - DNA, 82 bp, Homo sapiens
atgtccactctggcctgaaactgatggctgtgattttgatttgcaggctgggtttgaccaaagaagagtcattgcagcagaa

SEQ ID NO: 93489 - DNA, 80 bp, Homo sapiens
actctggcctgaaactgatggctgtgattttgatttgcaggctgggtttgaccaaagaagagtcattgcagcagaacgtg

SEQ ID NO: 93490 - DNA, 78 bp, Homo sapiens
aaactgatggctgtgattttgatttgcaggctgggtttgaccaaagaagagtcattgcagcagaacgtgggccaggag

SEQ ID NO: 93491 - DNA, 77 bp, Homo sapiens
ttgatttgcaggctgggtttgaccaaagaagagtcattgcagcagaacgtgggccaggaggaggctgaaatcaaaag

SEQ ID NO: 93492 - DNA, 77 bp, Homo sapiens
tgggtttgaccaaagaagagtcattgcagcagaacgtgggccaggaggaggctgaaatcaaaagtggcttgtgtgtc

SEQ ID NO: 93493 - DNA, 78 bp, Homo sapiens
aaagaagagtcattgcagcagaacgtgggccaggaggaggctgaaatcaaaagtggcttgtgtgtcccaggagaatca

SEQ ID NO: 93494 - DNA, 80 bp, Homo sapiens
agtcattgcagcagaacgtgggccaggaggaggctgaaatcaaaagtggcttgtgtgtcccaggagaatcagtgcgtata

SEQ ID NO: 93495 - DNA, 76 bp, Homo sapiens
aacgtgggccaggaggaggctgaaatcaaaagtggcttgtgtgtcccaggagaatcagtgcgtatacagcgtggtc

SEQ ID NO: 93496 - DNA, 77 bp, Homo sapiens
aggaggaggctgaaatcaaaagtggcttgtgtgtcccaggagaatcagtgcgtatacagcgtggtccagccacccga

SEQ ID NO: 93497 - DNA, 79 bp, Homo sapiens
ctgaaatcaaaagtggcttgtgtgtcccaggagaatcagtgcgtatacagcgtggtccagccacccgacagcgagatgg

SEQ ID NO: 93498 - DNA, 78 bp, Homo sapiens
aagtggcttgtgtgtcccaggagaatcagtgcgtatacagcgtggtccagccacccgacagcgagatgggcattttaa

SEQ ID NO: 93499 - DNA, 77 bp, Homo sapiens
cttgtgtgtcccaggagaatcagtgcgtatacagcgtggtccagccacccgacagcgagatgggcattttaagaaac

SEQ ID NO: 93500 - DNA, 79 bp, Homo sapiens
agaatcagtgcgtatacagcgtggtccagccacccgacagcgagatgggcattttaagaaacgctctcggccagatctc

SEQ ID NO: 93501 - DNA, 77 bp, Homo sapiens
agtgcgtatacagcgtggtccagccacccgacagcgagatgggcattttaagaaacgctctcggccagatctccgaa

SEQ ID NO: 93502 - DNA, 76 bp, Homo sapiens
cgtggtccagccacccgacagcgagatgggcattttaagaaacgctctcggccagatctccgaaccagagccagaa

SEQ ID NO: 93503 - DNA, 77 bp, Homo sapiens
cacccgacagcgagatgggcattttaagaaacgctctcggccagatctccgaaccagagccagaaggaatctgtaca

SEQ ID NO: 93504 - DNA, 75 bp, Homo sapiens
acagcgagatgggcattttaagaaacgctctcggccagatctccgaaccagagccagaaggaatctgtacaaaaa

SEQ ID NO: 93505 - DNA, 73 bp, Homo sapiens
attttaagaaacgctctcggccagatctccgaaccagagccagaaggaatctgtacaaaaaacaggagtcaga

SEQ ID NO: 93506 - DNA, 75 bp, Homo sapiens
aagaaacgctctcggccagatctccgaaccagagccagaaggaatctgtacaaaaaacaggagtcagaacaagca

SEQ ID NO: 93507 - DNA, 74 bp, Homo sapiens
ccagatctccgaaccagagccagaaggaatctgtacaaaaaacaggagtcagaacaagcaggggttgctaagga

SEQ ID NO: 93508 - DNA, 75 bp, Homo sapiens
gaaccagagccagaaggaatctgtacaaaaaacaggagtcagaacaagcaggggttgctaaggatgcaaaatctg

SEQ ID NO: 93509 - DNA, 77 bp, Homo sapiens
cagaaggaatctgtacaaaaaacaggagtcagaacaagcaggggttgctaaggatgcaaaatctgtggcctcagatg

SEQ ID NO: 93510 - DNA, 75 bp, Homo sapiens
aatctgtacaaaaaacaggagtcagaacaagcaggggttgctaaggatgcaaaatctgtggcctcagatgttccc

SEQ ID NO: 93511 - DNA, 74 bp, Homo sapiens
aaaaacaggagtcagaacaagcaggggttgctaaggatgcaaaatctgtggcctcagatgttcccctctacaag

SEQ ID NO: 93512 - DNA, 75 bp, Homo sapiens
agaacaagcaggggttgctaaggatgcaaaatctgtggcctcagatgttcccctctacaaggatggggaggctaa

SEQ ID NO: 93513 - DNA, 78 bp, Homo sapiens
ctaaggatgcaaaatctgtggcctcagatgttcccctctacaaggatggggaggctaagactgacccagcagggctga

SEQ ID NO: 93514 - DNA, 76 bp, Homo sapiens
aaaatctgtggcctcagatgttcccctctacaaggatggggaggctaagactgacccagcagggctgagcagtccc

SEQ ID NO: 93515 - DNA, 81 bp, Homo sapiens
ctcagatgttcccctctacaaggatggggaggctaagactgacccagcagggctgagcagtccccatctgccaggcacatc

SEQ ID NO: 93516 - DNA, 82 bp, Homo sapiens
tacaaggatggggaggctaagactgacccagcagggctgagcagtccccatctgccaggcacatcctctgcagcacccgacc

SEQ ID NO: 93517 - DNA, 81 bp, Homo sapiens
gctaagactgacccagcagggctgagcagtccccatctgccaggcacatcctctgcagcacccgacctggagggtcccgaa

SEQ ID NO: 93518 - DNA, 79 bp, Homo sapiens
actgacccagcagggctgagcagtccccatctgccaggcacatcctctgcagcacccgacctggagggtcccgaattcc

SEQ ID NO: 93519 - DNA, 80 bp, Homo sapiens
ggctgagcagtccccatctgccaggcacatcctctgcagcacccgacctggagggtcccgaattcccagttgagtctgtg

SEQ ID NO: 93520 - DNA, 77 bp, Homo sapiens
agtccccatctgccaggcacatcctctgcagcacccgacctggagggtcccgaattcccagttgagtctgtggcttc

SEQ ID NO: 93521 - DNA, 79 bp, Homo sapiens
caggcacatcctctgcagcacccgacctggagggtcccgaattcccagttgagtctgtggcttctcggatccaggctga

SEQ ID NO: 93522 - DNA, 78 bp, Homo sapiens
ctctgcagcacccgacctggagggtcccgaattcccagttgagtctgtggcttctcggatccaggctgagccagacaa

SEQ ID NO: 93523 - DNA, 73 bp, Homo sapiens
acccgacctggagggtcccgaattcccagttgagtctgtggcttctcggatccaggctgagccagacaacttg

SEQ ID NO: 93524 - DNA, 79 bp, Homo sapiens
agggtcccgaattcccagttgagtctgtggcttctcggatccaggctgagccagacaacttggcacgtgcctctgcatc

SEQ ID NO: 93525 - DNA, 82 bp, Homo sapiens
aattcccagttgagtctgtggcttctcggatccaggctgagccagacaacttggcacgtgcctctgcatctccagacagaat

SEQ ID NO: 93526 - DNA, 83 bp, Homo sapiens
agttgagtctgtggcttctcggatccaggctgagccagacaacttggcacgtgcctctgcatctccagacagaattcctagcc

SEQ ID NO: 93527 - DNA, 84 bp, Homo sapiens
tggcttctcggatccaggctgagccagacaacttggcacgtgcctctgcatctccagacagaattcctagcctgcctcaggaaa

SEQ ID NO: 93528 - DNA, 84 bp, Homo sapiens
atccaggctgagccagacaacttggcacgtgcctctgcatctccagacagaattcctagcctgcctcaggaaactgtggatcag

SEQ ID NO: 93529 - DNA, 80 bp, Homo sapiens
ccagacaacttggcacgtgcctctgcatctccagacagaattcctagcctgcctcaggaaactgtggatcaggaacccaa

SEQ ID NO: 93530 - DNA, 80 bp, Homo sapiens
aacttggcacgtgcctctgcatctccagacagaattcctagcctgcctcaggaaactgtggatcaggaacccaaggatca

SEQ ID NO: 93531 - DNA, 79 bp, Homo sapiens
ctctgcatctccagacagaattcctagcctgcctcaggaaactgtggatcaggaacccaaggatcagaagaggaaatcc

SEQ ID NO: 93532 - DNA, 75 bp, Homo sapiens
atctccagacagaattcctagcctgcctcaggaaactgtggatcaggaacccaaggatcagaagaggaaatcctt

SEQ ID NO: 93533 - DNA, 75 bp, Homo sapiens
agaattcctagcctgcctcaggaaactgtggatcaggaacccaaggatcagaagaggaaatcctttgagcaggcg

SEQ ID NO: 93534 - DNA, 78 bp, Homo sapiens
tgcctcaggaaactgtggatcaggaacccaaggatcagaagaggaaatcctttgagcaggcggcctctgcatcctttc

SEQ ID NO: 93535 - DNA, 74 bp, Homo sapiens
actgtggatcaggaacccaaggatcagaagaggaaatcctttgagcaggcggcctctgcatcctttcccgaaaa

SEQ ID NO: 93536 - DNA, 73 bp, Homo sapiens
atcaggaacccaaggatcagaagaggaaatcctttgagcaggcggcctctgcatcctttcccgaaaagaagcc

SEQ ID NO: 93537 - DNA, 72 bp, Homo sapiens
aaggatcagaagaggaaatcctttgagcaggcggcctctgcatcctttcccgaaaagaagccccggcttgaa

SEQ ID NO: 93538 - DNA, 72 bp, Homo sapiens
aggaaatcctttgagcaggcggcctctgcatcctttcccgaaaagaagccccggcttgaagatcgtcagtcc

SEQ ID NO: 93539 - DNA, 73 bp, Homo sapiens
tttgagcaggcggcctctgcatcctttcccgaaaagaagccccggcttgaagatcgtcagtcctttcgtaaca

SEQ ID NO: 93540 - DNA, 71 bp, Homo sapiens
ggcctctgcatcctttcccgaaaagaagccccggcttgaagatcgtcagtcctttcgtaacacaattgaaa

SEQ ID NO: 93541 - DNA, 69 bp, Homo sapiens
atcctttcccgaaaagaagccccggcttgaagatcgtcagtcctttcgtaacacaattgaaagtgttca

SEQ ID NO: 93542 - DNA, 72 bp, Homo sapiens
ccggcttgaagatcgtcagtcctttcgtaacacaattgaaagtgttcacaccgaaaagccacagcccactaa

SEQ ID NO: 93543 - DNA, 73 bp, Homo sapiens
ttgaagatcgtcagtcctttcgtaacacaattgaaagtgttcacaccgaaaagccacagcccactaaagagga

SEQ ID NO: 93544 - DNA, 69 bp, Homo sapiens
agtcctttcgtaacacaattgaaagtgttcacaccgaaaagccacagcccactaaagaggagcccaaag

SEQ ID NO: 93545 - DNA, 68 bp, Homo sapiens
accgaaaagccacagcccactaaagaggagcccaaagtcccgcccatccgggtaggagactgtttgat

SEQ ID NO: 93546 - DNA, 72 bp, Homo sapiens
aagccacagcccactaaagaggagcccaaagtcccgcccatccgggtaggagactgtttgattcctggctgc

SEQ ID NO: 93547 - DNA, 72 bp, Homo sapiens
tcagatcacccagtcagttaaaactattttctaattctttttttgcagattcaactttcacgtatcaaacca

SEQ ID NO: 93548 - DNA, 67 bp, Homo sapiens
gtcagttaaaactattttctaattctttttttgcagattcaactttcacgtatcaaaccaccctggg

SEQ ID NO: 93549 - DNA, 66 bp, Homo sapiens
actattttctaattctttttttgcagattcaactttcacgtatcaaaccaccctgggtggttaaag

SEQ ID NO: 93550 - DNA, 67 bp, Homo sapiens
aattctttttttgcagattcaactttcacgtatcaaaccaccctgggtggttaaaggtcagcccact

SEQ ID NO: 93551 - DNA, 72 bp, Homo sapiens
tttttgcagattcaactttcacgtatcaaaccaccctgggtggttaaaggtcagcccacttaccagatatgc

SEQ ID NO: 93552 - DNA, 68 bp, Homo sapiens
attcaactttcacgtatcaaaccaccctgggtggttaaaggtcagcccacttaccagatatgcccccg

SEQ ID NO: 93553 - DNA, 69 bp, Homo sapiens
acgtatcaaaccaccctgggtggttaaaggtcagcccacttaccagatatgcccccggatcatccccac

SEQ ID NO: 93554 - DNA, 68 bp, Homo sapiens
aaccaccctgggtggttaaaggtcagcccacttaccagatatgcccccggatcatccccaccacggag

SEQ ID NO: 93555 - DNA, 70 bp, Homo sapiens
ggtggttaaaggtcagcccacttaccagatatgcccccggatcatccccaccacggagtcctcctgccgg

SEQ ID NO: 93556 - DNA, 72 bp, Homo sapiens
agcccacttaccagatatgcccccggatcatccccaccacggagtcctcctgccggggttggactggcgcca

SEQ ID NO: 93557 - DNA, 71 bp, Homo sapiens
ttaccagatatgcccccggatcatccccaccacggagtcctcctgccggggttggactggcgccaggaccc

SEQ ID NO: 93558 - DNA, 71 bp, Homo sapiens
cccggatcatccccaccacggagtcctcctgccggggttggactggcgccaggaccctcgcagacattaaa

SEQ ID NO: 93559 - DNA, 71 bp, Homo sapiens
atcatccccaccacggagtcctcctgccggggttggactggcgccaggaccctcgcagacattaaagcccg

SEQ ID NO: 93560 - DNA, 73 bp, Homo sapiens
acggagtcctcctgccggggttggactggcgccaggaccctcgcagacattaaagcccgtgctctgcaggtcc

SEQ ID NO: 93561 - DNA, 75 bp, Homo sapiens
tcctgccggggttggactggcgccaggaccctcgcagacattaaagcccgtgctctgcaggtccgaggggcgaga

SEQ ID NO: 93562 - DNA, 75 bp, Homo sapiens
ggttggactggcgccaggaccctcgcagacattaaagcccgtgctctgcaggtccgaggggcgagaggtcaccac

SEQ ID NO: 93563 - DNA, 77 bp, Homo sapiens
aggaccctcgcagacattaaagcccgtgctctgcaggtccgaggggcgagaggtcaccactgccatagagaggcggc

SEQ ID NO: 93564 - DNA, 78 bp, Homo sapiens
cctcgcagacattaaagcccgtgctctgcaggtccgaggggcgagaggtcaccactgccatagagaggcggccaccac

SEQ ID NO: 93565 - DNA, 78 bp, Homo sapiens
attaaagcccgtgctctgcaggtccgaggggcgagaggtcaccactgccatagagaggcggccaccactgccatcgga

SEQ ID NO: 93566 - DNA, 77 bp, Homo sapiens
tgctctgcaggtccgaggggcgagaggtcaccactgccatagagaggcggccaccactgccatcggaggggggggtg

SEQ ID NO: 93567 - DNA, 72 bp, Homo sapiens
ggtccgaggggcgagaggtcaccactgccatagagaggcggccaccactgccatcggaggggggggtggccc

SEQ ID NO: 93568 - DNA, 72 bp, Homo sapiens
cgagaggtcaccactgccatagagaggcggccaccactgccatcggaggggggggtggcccgggtggaggtg

SEQ ID NO: 93569 - DNA, 70 bp, Homo sapiens
accactgccatagagaggcggccaccactgccatcggaggggggggtggcccgggtggaggtggcggcgg

SEQ ID NO: 93570 - DNA, 69 bp, Homo sapiens
agaggcggccaccactgccatcggaggggggggtggcccgggtggaggtggcggcggggccaccgatga

SEQ ID NO: 93571 - DNA, 67 bp, Homo sapiens
accactgccatcggaggggggggtggcccgggtggaggtggcggcggggccaccgatgagggaggtg

SEQ ID NO: 93572 - DNA, 69 bp, Homo sapiens
ccatcggaggggggggtggcccgggtggaggtggcggcggggccaccgatgagggaggtggcagaggca

SEQ ID NO: 93573 - DNA, 75 bp, Homo sapiens
gggtggcccgggtggaggtggcggcggggccaccgatgagggaggtggcagaggcagcagcagtggtgatggtgg

SEQ ID NO: 93574 - DNA, 80 bp, Homo sapiens
ggtggaggtggcggcggggccaccgatgagggaggtggcagaggcagcagcagtggtgatggtggtgaggcctgtggcca

SEQ ID NO: 93575 - DNA, 80 bp, Homo sapiens
cggcggggccaccgatgagggaggtggcagaggcagcagcagtggtgatggtggtgaggcctgtggccaccctgagccca

SEQ ID NO: 93576 - DNA, 79 bp, Homo sapiens
accgatgagggaggtggcagaggcagcagcagtggtgatggtggtgaggcctgtggccaccctgagcccaggggaggcc

SEQ ID NO: 93577 - DNA, 79 bp, Homo sapiens
agggaggtggcagaggcagcagcagtggtgatggtggtgaggcctgtggccaccctgagcccaggggaggcccgagcac

SEQ ID NO: 93578 - DNA, 74 bp, Homo sapiens
gtggtgatggtggtgaggcctgtggccaccctgagcccaggggaggcccgagcacccctggaaagtgtacgtca

SEQ ID NO: 93579 - DNA, 74 bp, Homo sapiens
atggtggtgaggcctgtggccaccctgagcccaggggaggcccgagcacccctggaaagtgtacgtcagatcta

SEQ ID NO: 93580 - DNA, 75 bp, Homo sapiens
tgtggccaccctgagcccaggggaggcccgagcacccctggaaagtgtacgtcagatctacagcgaacacaacta

SEQ ID NO: 93581 - DNA, 74 bp, Homo sapiens
ctgagcccaggggaggcccgagcacccctggaaagtgtacgtcagatctacagcgaacacaactactgccgcct

SEQ ID NO: 93582 - DNA, 74 bp, Homo sapiens
gggaggcccgagcacccctggaaagtgtacgtcagatctacagcgaacacaactactgccgccttatcctctaa

SEQ ID NO: 93583 - DNA, 73 bp, Homo sapiens
cccgagcacccctggaaagtgtacgtcagatctacagcgaacacaactactgccgccttatcctctaaatggg

SEQ ID NO: 93584 - DNA, 75 bp, Homo sapiens
cctggaaagtgtacgtcagatctacagcgaacacaactactgccgccttatcctctaaatggggagcatacccag

SEQ ID NO: 93585 - DNA, 77 bp, Homo sapiens
atctacagcgaacacaactactgccgccttatcctctaaatggggagcatacccaggccggaactgccatgtccaga

SEQ ID NO: 93586 - DNA, 76 bp, Homo sapiens
aacacaactactgccgccttatcctctaaatggggagcatacccaggccggaactgccatgtccagagctaggaga

SEQ ID NO: 93587 - DNA, 77 bp, Homo sapiens
gccttatcctctaaatggggagcatacccaggccggaactgccatgtccagagctaggagagaggacctgccttctc

SEQ ID NO: 93588 - DNA, 78 bp, Homo sapiens
atcctctaaatggggagcatacccaggccggaactgccatgtccagagctaggagagaggacctgccttctctgagaa

SEQ ID NO: 93589 - DNA, 78 bp, Homo sapiens
aggccggaactgccatgtccagagctaggagagaggacctgccttctctgagaaaggaggaaagctgcctactacaga

SEQ ID NO: 93590 - DNA, 79 bp, Homo sapiens
aactgccatgtccagagctaggagagaggacctgccttctctgagaaaggaggaaagctgcctactacagagggctaca

SEQ ID NO: 93591 - DNA, 78 bp, Homo sapiens
agagctaggagagaggacctgccttctctgagaaaggaggaaagctgcctactacagagggctacagttggactcaca

SEQ ID NO: 93592 - DNA, 78 bp, Homo sapiens
agagaggacctgccttctctgagaaaggaggaaagctgcctactacagagggctacagttggactcacagatgggcta

SEQ ID NO: 93593 - DNA, 78 bp, Homo sapiens
ccttctctgagaaaggaggaaagctgcctactacagagggctacagttggactcacagatgggctaggagatgcctcc

SEQ ID NO: 93594 - DNA, 76 bp, Homo sapiens
agaaaggaggaaagctgcctactacagagggctacagttggactcacagatgggctaggagatgcctcccaactcc

SEQ ID NO: 93595 - DNA, 76 bp, Homo sapiens
aaagctgcctactacagagggctacagttggactcacagatgggctaggagatgcctcccaactccccgttgctcc

SEQ ID NO: 93596 - DNA, 75 bp, Homo sapiens
cctactacagagggctacagttggactcacagatgggctaggagatgcctcccaactccccgttgctcccactgg

SEQ ID NO: 93597 - DNA, 74 bp, Homo sapiens
atgggctaggagatgcctcccaactccccgttgctcccactggggaccagccatgccaggccttgcccctactg

SEQ ID NO: 93598 - DNA, 72 bp, Homo sapiens
atgcctcccaactccccgttgctcccactggggaccagccatgccaggccttgcccctactgtcctcccaaa

SEQ ID NO: 93599 - DNA, 71 bp, Homo sapiens
aactccccgttgctcccactggggaccagccatgccaggccttgcccctactgtcctcccaaacctcagta

SEQ ID NO: 93600 - DNA, 77 bp, Homo sapiens
ttgctcccactggggaccagccatgccaggccttgcccctactgtcctcccaaacctcagtagctgagagattagtg

SEQ ID NO: 93601 - DNA, 78 bp, Homo sapiens
gggaccagccatgccaggccttgcccctactgtcctcccaaacctcagtagctgagagattagtggagcagcctcagt

SEQ ID NO: 93602 - DNA, 80 bp, Homo sapiens
atgccaggccttgcccctactgtcctcccaaacctcagtagctgagagattagtggagcagcctcagttgcatccggatg

SEQ ID NO: 93603 - DNA, 80 bp, Homo sapiens
ttgcccctactgtcctcccaaacctcagtagctgagagattagtggagcagcctcagttgcatccggatgttagaactga

SEQ ID NO: 93604 - DNA, 82 bp, Homo sapiens
tactgtcctcccaaacctcagtagctgagagattagtggagcagcctcagttgcatccggatgttagaactgaatgtgagtc

SEQ ID NO: 93605 - DNA, 82 bp, Homo sapiens
agtagctgagagattagtggagcagcctcagttgcatccggatgttagaactgaatgtgagtctggcaccacttcctgggaa

SEQ ID NO: 93606 - DNA, 83 bp, Homo sapiens
agattagtggagcagcctcagttgcatccggatgttagaactgaatgtgagtctggcaccacttcctgggaaagtgatgatga

SEQ ID NO: 93607 - DNA, 81 bp, Homo sapiens
agcctcagttgcatccggatgttagaactgaatgtgagtctggcaccacttcctgggaaagtgatgatgaggagcaaggac

SEQ ID NO: 93608 - DNA, 79 bp, Homo sapiens
tggcaccacttcctgggaaagtgatgatgaggagcaaggacccaccgttcctgcagacaatggtcccattctgtctcta

SEQ ID NO: 93609 - DNA, 76 bp, Homo sapiens
acttcctgggaaagtgatgatgaggagcaaggacccaccgttcctgcagacaatggtcccattctgtctctagtgg

SEQ ID NO: 93610 - DNA, 82 bp, Homo sapiens
tgatgatgaggagcaaggacccaccgttcctgcagacaatggtcccattctgtctctagtgggagatgatacattagagaaa

SEQ ID NO: 93611 - DNA, 76 bp, Homo sapiens
acccaccgttcctgcagacaatggtcccattctgtctctagtgggagatgatacattagagaaaggaactggccaa

SEQ ID NO: 93612 - DNA, 82 bp, Homo sapiens
ttcctgcagacaatggtcccattctgtctctagtgggagatgatacattagagaaaggaactggccaagctcttgacagtca

SEQ ID NO: 93613 - DNA, 79 bp, Homo sapiens
aatggtcccattctgtctctagtgggagatgatacattagagaaaggaactggccaagctcttgacagtcatcccacta

SEQ ID NO: 93614 - DNA, 81 bp, Homo sapiens
tgtctctagtgggagatgatacattagagaaaggaactggccaagctcttgacagtcatcccactatgaaggatcctgtaa

SEQ ID NO: 93615 - DNA, 81 bp, Homo sapiens
tagtgggagatgatacattagagaaaggaactggccaagctcttgacagtcatcccactatgaaggatcctgtaaatgtga

SEQ ID NO: 93616 - DNA, 78 bp, Homo sapiens
atgatacattagagaaaggaactggccaagctcttgacagtcatcccactatgaaggatcctgtaaatgtgaccccca

SEQ ID NO: 93617 - DNA, 75 bp, Homo sapiens
agaaaggaactggccaagctcttgacagtcatcccactatgaaggatcctgtaaatgtgacccccagttccacac

SEQ ID NO: 93618 - DNA, 78 bp, Homo sapiens
actggccaagctcttgacagtcatcccactatgaaggatcctgtaaatgtgacccccagttccacacctgaatcctca

SEQ ID NO: 93619 - DNA, 77 bp, Homo sapiens
ctcttgacagtcatcccactatgaaggatcctgtaaatgtgacccccagttccacacctgaatcctcaccgactgat

SEQ ID NO: 93620 - DNA, 80 bp, Homo sapiens
atgaaggatcctgtaaatgtgacccccagttccacacctgaatcctcaccgactgattgcctgcagaacagagcatttga

SEQ ID NO: 93621 - DNA, 80 bp, Homo sapiens
tgtaaatgtgacccccagttccacacctgaatcctcaccgactgattgcctgcagaacagagcatttgatgacgaattag

SEQ ID NO: 93622 - DNA, 81 bp, Homo sapiens
cccagttccacacctgaatcctcaccgactgattgcctgcagaacagagcatttgatgacgaattagggcttggtggctca

SEQ ID NO: 93623 - DNA, 74 bp, Homo sapiens
tggtggctcatgccctcctatgagggaaagtgatactagacaagaaaacttgaaaaccaaggctctcgtttcta

SEQ ID NO: 93624 - DNA, 70 bp, Homo sapiens
atgccctcctatgagggaaagtgatactagacaagaaaacttgaaaaccaaggctctcgtttctaacagt

SEQ ID NO: 93625 - DNA, 72 bp, Homo sapiens
tatgagggaaagtgatactagacaagaaaacttgaaaaccaaggctctcgtttctaacagttctttgcattg

SEQ ID NO: 93626 - DNA, 72 bp, Homo sapiens
acaagaaaacttgaaaaccaaggctctcgtttctaacagttctttgcattggatacccatcccatcgaatga

SEQ ID NO: 93627 - DNA, 73 bp, Homo sapiens
aaacttgaaaaccaaggctctcgtttctaacagttctttgcattggatacccatcccatcgaatgatgaggta

SEQ ID NO: 93628 - DNA, 77 bp, Homo sapiens
tttctaacagttctttgcattggatacccatcccatcgaatgatgaggtagtgaaacagcccaaaccagaatccaga

SEQ ID NO: 93629 - DNA, 78 bp, Homo sapiens
agttctttgcattggatacccatcccatcgaatgatgaggtagtgaaacagcccaaaccagaatccagagaacacata

SEQ ID NO: 93630 - DNA, 79 bp, Homo sapiens
attggatacccatcccatcgaatgatgaggtagtgaaacagcccaaaccagaatccagagaacacataccatctgttga

SEQ ID NO: 93631 - DNA, 77 bp, Homo sapiens
atcccatcgaatgatgaggtagtgaaacagcccaaaccagaatccagagaacacataccatctgttgagccccaggt

SEQ ID NO: 93632 - DNA, 77 bp, Homo sapiens
aatgatgaggtagtgaaacagcccaaaccagaatccagagaacacataccatctgttgagccccaggttggagagga

SEQ ID NO: 93633 - DNA, 76 bp, Homo sapiens
tagtgaaacagcccaaaccagaatccagagaacacataccatctgttgagccccaggttggagaggagtgggagaa

SEQ ID NO: 93634 - DNA, 75 bp, Homo sapiens
aaaccagaatccagagaacacataccatctgttgagccccaggttggagaggagtgggagaaagctgctcccacc

SEQ ID NO: 93635 - DNA, 75 bp, Homo sapiens
agaatccagagaacacataccatctgttgagccccaggttggagaggagtgggagaaagctgctcccacccctcc

SEQ ID NO: 93636 - DNA, 76 bp, Homo sapiens
aacacataccatctgttgagccccaggttggagaggagtgggagaaagctgctcccacccctcctgcattgcctgg

SEQ ID NO: 93637 - DNA, 76 bp, Homo sapiens
atctgttgagccccaggttggagaggagtgggagaaagctgctcccacccctcctgcattgcctggggatttgaca

SEQ ID NO: 93638 - DNA, 78 bp, Homo sapiens
ggagtgggagaaagctgctcccacccctcctgcattgcctggggatttgacagctgaggagggtctagatcctcttga

SEQ ID NO: 93639 - DNA, 78 bp, Homo sapiens
agaaagctgctcccacccctcctgcattgcctggggatttgacagctgaggagggtctagatcctcttgacagcctta

SEQ ID NO: 93640 - DNA, 83 bp, Homo sapiens
tgcattgcctggggatttgacagctgaggagggtctagatcctcttgacagccttacttcactctggactgtgccatctcgag

SEQ ID NO: 93641 - DNA, 79 bp, Homo sapiens
cctggggatttgacagctgaggagggtctagatcctcttgacagccttacttcactctggactgtgccatctcgaggag

SEQ ID NO: 93642 - DNA, 82 bp, Homo sapiens
aggagggtctagatcctcttgacagccttacttcactctggactgtgccatctcgaggaggcagtgacagcaatggcagtta

SEQ ID NO: 93643 - DNA, 84 bp, Homo sapiens
tagatcctcttgacagccttacttcactctggactgtgccatctcgaggaggcagtgacagcaatggcagttactgtcaacagg

SEQ ID NO: 93644 - DNA, 82 bp, Homo sapiens
agccttacttcactctggactgtgccatctcgaggaggcagtgacagcaatggcagttactgtcaacaggtggacattgaaa

SEQ ID NO: 93645 - DNA, 83 bp, Homo sapiens
ttcactctggactgtgccatctcgaggaggcagtgacagcaatggcagttactgtcaacaggtggacattgaaaagctgaaaa

SEQ ID NO: 93646 - DNA, 81 bp, Homo sapiens
actgtgccatctcgaggaggcagtgacagcaatggcagttactgtcaacaggtggacattgaaaagctgaaaatcaacgga

SEQ ID NO: 93647 - DNA, 81 bp, Homo sapiens
atctcgaggaggcagtgacagcaatggcagttactgtcaacaggtggacattgaaaagctgaaaatcaacggagactctga

SEQ ID NO: 93648 - DNA, 80 bp, Homo sapiens
agtgacagcaatggcagttactgtcaacaggtggacattgaaaagctgaaaatcaacggagactctgaagcactgagtcc

SEQ ID NO: 93649 - DNA, 77 bp, Homo sapiens
aatggcagttactgtcaacaggtggacattgaaaagctgaaaatcaacggagactctgaagcactgagtcctcacgg

SEQ ID NO: 93650 - DNA, 78 bp, Homo sapiens
ttactgtcaacaggtggacattgaaaagctgaaaatcaacggagactctgaagcactgagtcctcacggtgagtccac

SEQ ID NO: 93651 - DNA, 77 bp, Homo sapiens
aaaagctgaaaatcaacggagactctgaagcactgagtcctcacggtgagtccacggatacagcctctgactttgaa

SEQ ID NO: 93652 - DNA, 76 bp, Homo sapiens
aaaatcaacggagactctgaagcactgagtcctcacggtgagtccacggatacagcctctgactttgaaggtcacc

SEQ ID NO: 93653 - DNA, 79 bp, Homo sapiens
aagcactgagtcctcacggtgagtccacggatacagcctctgactttgaaggtcacctcacggaggacagcagtgaggc

SEQ ID NO: 93654 - DNA, 80 bp, Homo sapiens
ctcacggtgagtccacggatacagcctctgactttgaaggtcacctcacggaggacagcagtgaggctgacactagagaa

SEQ ID NO: 93655 - DNA, 83 bp, Homo sapiens
tccacggatacagcctctgactttgaaggtcacctcacggaggacagcagtgaggctgacactagagaagctgcagtgacaaa

SEQ ID NO: 93656 - DNA, 82 bp, Homo sapiens
tacagcctctgactttgaaggtcacctcacggaggacagcagtgaggctgacactagagaagctgcagtgacaaagggatct

SEQ ID NO: 93657 - DNA, 80 bp, Homo sapiens
tttgaaggtcacctcacggaggacagcagtgaggctgacactagagaagctgcagtgacaaagggatcttcggtggacaa

SEQ ID NO: 93658 - DNA, 80 bp, Homo sapiens
acctcacggaggacagcagtgaggctgacactagagaagctgcagtgacaaagggatcttcggtggacaaggatgagaaa

SEQ ID NO: 93659 - DNA, 76 bp, Homo sapiens
aggctgacactagagaagctgcagtgacaaagggatcttcggtggacaaggatgagaaacccaattggaaccaatc

SEQ ID NO: 93660 - DNA, 75 bp, Homo sapiens
acactagagaagctgcagtgacaaagggatcttcggtggacaaggatgagaaacccaattggaaccaatctgccc

SEQ ID NO: 93661 - DNA, 74 bp, Homo sapiens
tgcagtgacaaagggatcttcggtggacaaggatgagaaacccaattggaaccaatctgccccactgtccaagg

SEQ ID NO: 93662 - DNA, 71 bp, Homo sapiens
acaaagggatcttcggtggacaaggatgagaaacccaattggaaccaatctgccccactgtccaaggtgaa

SEQ ID NO: 93663 - DNA, 76 bp, Homo sapiens
tcttcggtggacaaggatgagaaacccaattggaaccaatctgccccactgtccaaggtgaatggtgacatgcgtc

SEQ ID NO: 93664 - DNA, 74 bp, Homo sapiens
aaggatgagaaacccaattggaaccaatctgccccactgtccaaggtgaatggtgacatgcgtctggttacaag

SEQ ID NO: 93665 - DNA, 74 bp, Homo sapiens
aaacccaattggaaccaatctgccccactgtccaaggtgaatggtgacatgcgtctggttacaaggacagatgg

SEQ ID NO: 93666 - DNA, 79 bp, Homo sapiens
aaccaatctgccccactgtccaaggtgaatggtgacatgcgtctggttacaaggacagatgggatggttgctcctcaga

SEQ ID NO: 93667 - DNA, 81 bp, Homo sapiens
aaggtgaatggtgacatgcgtctggttacaaggacagatgggatggttgctcctcagagctgggtgtctcgagtatgtgcg

SEQ ID NO: 93668 - DNA, 81 bp, Homo sapiens
tgacatgcgtctggttacaaggacagatgggatggttgctcctcagagctgggtgtctcgagtatgtgcggtccgccaaaa

SEQ ID NO: 93669 - DNA, 79 bp, Homo sapiens
tctggttacaaggacagatgggatggttgctcctcagagctgggtgtctcgagtatgtgcggtccgccaaaagatccca

SEQ ID NO: 93670 - DNA, 78 bp, Homo sapiens
aggacagatgggatggttgctcctcagagctgggtgtctcgagtatgtgcggtccgccaaaagatcccagattcccta

SEQ ID NO: 93671 - DNA, 80 bp, Homo sapiens
gatggttgctcctcagagctgggtgtctcgagtatgtgcggtccgccaaaagatcccagattccctactgctggccagta

SEQ ID NO: 93672 - DNA, 79 bp, Homo sapiens
tcctcagagctgggtgtctcgagtatgtgcggtccgccaaaagatcccagattccctactgctggccagtactgagtac

SEQ ID NO: 93673 - DNA, 78 bp, Homo sapiens
tgggtgtctcgagtatgtgcggtccgccaaaagatcccagattccctactgctggccagtactgagtaccagccaaga

SEQ ID NO: 93674 - DNA, 78 bp, Homo sapiens
tctcgagtatgtgcggtccgccaaaagatcccagattccctactgctggccagtactgagtaccagccaagagccgtg

SEQ ID NO: 93675 - DNA, 78 bp, Homo sapiens
gtgcggtccgccaaaagatcccagattccctactgctggccagtactgagtaccagccaagagccgtgtgcctgtcca

SEQ ID NO: 93676 - DNA, 77 bp, Homo sapiens
aaaagatcccagattccctactgctggccagtactgagtaccagccaagagccgtgtgcctgtccatgcctgggtcc

SEQ ID NO: 93677 - DNA, 80 bp, Homo sapiens
agattccctactgctggccagtactgagtaccagccaagagccgtgtgcctgtccatgcctgggtcctcagtggaggcca

SEQ ID NO: 93678 - DNA, 80 bp, Homo sapiens
tactgctggccagtactgagtaccagccaagagccgtgtgcctgtccatgcctgggtcctcagtggaggccactaaccca

SEQ ID NO: 93679 - DNA, 80 bp, Homo sapiens
agtactgagtaccagccaagagccgtgtgcctgtccatgcctgggtcctcagtggaggccactaacccacttgtgatgca

SEQ ID NO: 93680 - DNA, 81 bp, Homo sapiens
agccaagagccgtgtgcctgtccatgcctgggtcctcagtggaggccactaacccacttgtgatgcagttgctgcagggta

SEQ ID NO: 93681 - DNA, 81 bp, Homo sapiens
agccgtgtgcctgtccatgcctgggtcctcagtggaggccactaacccacttgtgatgcagttgctgcagggtagcttgcc

SEQ ID NO: 93682 - DNA, 80 bp, Homo sapiens
tgtccatgcctgggtcctcagtggaggccactaacccacttgtgatgcagttgctgcagggtagcttgcccctagagaag

SEQ ID NO: 93683 - DNA, 76 bp, Homo sapiens
agtggaggccactaacccacttgtgatgcagttgctgcagggtagcttgcccctagagaaggttcttccaccagcc

SEQ ID NO: 93684 - DNA, 82 bp, Homo sapiens
taacccacttgtgatgcagttgctgcagggtagcttgcccctagagaaggttcttccaccagcccacgatgacagcatgtca

SEQ ID NO: 93685 - DNA, 82 bp, Homo sapiens
cttgtgatgcagttgctgcagggtagcttgcccctagagaaggttcttccaccagcccacgatgacagcatgtcagaatccc

SEQ ID NO: 93686 - DNA, 76 bp, Homo sapiens
ctagagaaggttcttccaccagcccacgatgacagcatgtcagaatccccacaagtaccacttacaaaagaccaga

SEQ ID NO: 93687 - DNA, 80 bp, Homo sapiens
ttcttccaccagcccacgatgacagcatgtcagaatccccacaagtaccacttacaaaagaccagagccatggctcgcta

SEQ ID NO: 93688 - DNA, 80 bp, Homo sapiens
cccacgatgacagcatgtcagaatccccacaagtaccacttacaaaagaccagagccatggctcgctacgcatgggatct

SEQ ID NO: 93689 - DNA, 81 bp, Homo sapiens
atgacagcatgtcagaatccccacaagtaccacttacaaaagaccagagccatggctcgctacgcatgggatctttacatg

SEQ ID NO: 93690 - DNA, 76 bp, Homo sapiens
agaatccccacaagtaccacttacaaaagaccagagccatggctcgctacgcatgggatctttacatggtcttgga

SEQ ID NO: 93691 - DNA, 74 bp, Homo sapiens
cccacaagtaccacttacaaaagaccagagccatggctcgctacgcatgggatctttacatggtcttggaaaaa

SEQ ID NO: 93692 - DNA, 75 bp, Homo sapiens
acttacaaaagaccagagccatggctcgctacgcatgggatctttacatggtcttggaaaaaacagtggcatggt

SEQ ID NO: 93693 - DNA, 80 bp, Homo sapiens
aagaccagagccatggctcgctacgcatgggatctttacatggtcttggaaaaaacagtggcatggttgatggaagcagc

SEQ ID NO: 93694 - DNA, 77 bp, Homo sapiens
gctcgctacgcatgggatctttacatggtcttggaaaaaacagtggcatggttgatggaagcagccccagttcttta

SEQ ID NO: 93695 - DNA, 74 bp, Homo sapiens
ctacgcatgggatctttacatggtcttggaaaaaacagtggcatggttgatggaagcagccccagttctttaag

SEQ ID NO: 93696 - DNA, 72 bp, Homo sapiens
atctttacatggtcttggaaaaaacagtggcatggttgatggaagcagccccagttctttaagggctttgaa

SEQ ID NO: 93697 - DNA, 75 bp, Homo sapiens
aaaaacagtggcatggttgatggaagcagccccagttctttaagggctttgaaggagcctcttctgccagatagc

SEQ ID NO: 93698 - DNA, 77 bp, Homo sapiens
atggttgatggaagcagccccagttctttaagggctttgaaggagcctcttctgccagatagctgtgaaacaggcac

SEQ ID NO: 93699 - DNA, 77 bp, Homo sapiens
aagcagccccagttctttaagggctttgaaggagcctcttctgccagatagctgtgaaacaggcactggtcttgcca

SEQ ID NO: 93700 - DNA, 77 bp, Homo sapiens
agttctttaagggctttgaaggagcctcttctgccagatagctgtgaaacaggcactggtcttgccaggattgaggc

SEQ ID NO: 93701 - DNA, 75 bp, Homo sapiens
gcactggtcttgccaggattgaggccacccaggctcctggagcaccccaaaagaattgcaaggcagtcccaagtt

SEQ ID NO: 93702 - DNA, 75 bp, Homo sapiens
tcttgccaggattgaggccacccaggctcctggagcaccccaaaagaattgcaaggcagtcccaagttttgactc

SEQ ID NO: 93703 - DNA, 73 bp, Homo sapiens
aggctcctggagcaccccaaaagaattgcaaggcagtcccaagttttgactccctccatccagtgacaaatcc

SEQ ID NO: 93704 - DNA, 73 bp, Homo sapiens
agcaccccaaaagaattgcaaggcagtcccaagttttgactccctccatccagtgacaaatcccattacatcc

SEQ ID NO: 93705 - DNA, 72 bp, Homo sapiens
aaggcagtcccaagttttgactccctccatccagtgacaaatcccattacatcctctaggaaactggaagaa

SEQ ID NO: 93706 - DNA, 72 bp, Homo sapiens
aagttttgactccctccatccagtgacaaatcccattacatcctctaggaaactggaagaaatggattccaa

SEQ ID NO: 93707 - DNA, 75 bp, Homo sapiens
ttgactccctccatccagtgacaaatcccattacatcctctaggaaactggaagaaatggattccaaagagcagt

SEQ ID NO: 93708 - DNA, 74 bp, Homo sapiens
tccagtgacaaatcccattacatcctctaggaaactggaagaaatggattccaaagagcagttctcttccttta

SEQ ID NO: 93709 - DNA, 72 bp, Homo sapiens
aaatcccattacatcctctaggaaactggaagaaatggattccaaagagcagttctcttcctttagttgtga

SEQ ID NO: 93710 - DNA, 74 bp, Homo sapiens
ttacatcctctaggaaactggaagaaatggattccaaagagcagttctcttcctttagttgtgaagatcagaag

SEQ ID NO: 93711 - DNA, 73 bp, Homo sapiens
aaactggaagaaatggattccaaagagcagttctcttcctttagttgtgaagatcagaaggaagtccgtgcta

SEQ ID NO: 93712 - DNA, 76 bp, Homo sapiens
aagaaatggattccaaagagcagttctcttcctttagttgtgaagatcagaaggaagtccgtgctatgtcacagga

SEQ ID NO: 93713 - DNA, 77 bp, Homo sapiens
tccaaagagcagttctcttcctttagttgtgaagatcagaaggaagtccgtgctatgtcacaggacagtaattcaaa

SEQ ID NO: 93714 - DNA, 79 bp, Homo sapiens
tctcttcctttagttgtgaagatcagaaggaagtccgtgctatgtcacaggacagtaattcaaatgctgctccaggaaa

SEQ ID NO: 93715 - DNA, 77 bp, Homo sapiens
tatgtcacaggacagtaattcaaatgctgctccaggaaagagcccaggagatcttactacctcgagaacacctcgtt

SEQ ID NO: 93716 - DNA, 76 bp, Homo sapiens
aggacagtaattcaaatgctgctccaggaaagagcccaggagatcttactacctcgagaacacctcgtttctcatc

SEQ ID NO: 93717 - DNA, 77 bp, Homo sapiens
taattcaaatgctgctccaggaaagagcccaggagatcttactacctcgagaacacctcgtttctcatctccaaatg

SEQ ID NO: 93718 - DNA, 75 bp, Homo sapiens
tccaggaaagagcccaggagatcttactacctcgagaacacctcgtttctcatctccaaatgtgatctcctttgg

SEQ ID NO: 93719 - DNA, 75 bp, Homo sapiens
aaagagcccaggagatcttactacctcgagaacacctcgtttctcatctccaaatgtgatctcctttggtccaga

SEQ ID NO: 93720 - DNA, 75 bp, Homo sapiens
actacctcgagaacacctcgtttctcatctccaaatgtgatctcctttggtccagagcagacaggtcgggccctg

SEQ ID NO: 93721 - DNA, 78 bp, Homo sapiens
aacacctcgtttctcatctccaaatgtgatctcctttggtccagagcagacaggtcgggccctgggtgatcagagcaa

SEQ ID NO: 93722 - DNA, 81 bp, Homo sapiens
ttctcatctccaaatgtgatctcctttggtccagagcagacaggtcgggccctgggtgatcagagcaatgttacaggccaa

SEQ ID NO: 93723 - DNA, 77 bp, Homo sapiens
aaatgtgatctcctttggtccagagcagacaggtcgggccctgggtgatcagagcaatgttacaggccaagggaaga

SEQ ID NO: 93724 - DNA, 74 bp, Homo sapiens
tcctttggtccagagcagacaggtcgggccctgggtgatcagagcaatgttacaggccaagggaagaagctttt

SEQ ID NO: 93725 - DNA, 75 bp, Homo sapiens
agagcagacaggtcgggccctgggtgatcagagcaatgttacaggccaagggaagaagctttttggctctgggaa

SEQ ID NO: 93726 - DNA, 74 bp, Homo sapiens
acaggtcgggccctgggtgatcagagcaatgttacaggccaagggaagaagctttttggctctgggaatgtggc

SEQ ID NO: 93727 - DNA, 76 bp, Homo sapiens
ccctgggtgatcagagcaatgttacaggccaagggaagaagctttttggctctgggaatgtggctgcaacccttca

SEQ ID NO: 93728 - DNA, 75 bp, Homo sapiens
agagcaatgttacaggccaagggaagaagctttttggctctgggaatgtggctgcaacccttcagcgccccaggc

SEQ ID NO: 93729 - DNA, 74 bp, Homo sapiens
ttacaggccaagggaagaagctttttggctctgggaatgtggctgcaacccttcagcgccccaggcctgcggac

SEQ ID NO: 93730 - DNA, 74 bp, Homo sapiens
aagaagctttttggctctgggaatgtggctgcaacccttcagcgccccaggcctgcggacccgatgcctcttcc

SEQ ID NO: 93731 - DNA, 77 bp, Homo sapiens
gaatgtggctgcaacccttcagcgccccaggcctgcggacccgatgcctcttcctgctgagatccctccagtttttc

SEQ ID NO: 93732 - DNA, 74 bp, Homo sapiens
ttcagcgccccaggcctgcggacccgatgcctcttcctgctgagatccctccagtttttcccagtgggaagttg

SEQ ID NO: 93733 - DNA, 74 bp, Homo sapiens
gcctgcggacccgatgcctcttcctgctgagatccctccagtttttcccagtgggaagttgggaccaagcacaa

SEQ ID NO: 93734 - DNA, 72 bp, Homo sapiens
acccgatgcctcttcctgctgagatccctccagtttttcccagtgggaagttgggaccaagcacaaactcca

SEQ ID NO: 93735 - DNA, 73 bp, Homo sapiens
tcttcctgctgagatccctccagtttttcccagtgggaagttgggaccaagcacaaactccatgtctggtggg

SEQ ID NO: 93736 - DNA, 69 bp, Homo sapiens
gtttttcccagtgggaagttgggaccaagcacaaactccatgtctggtggggtacagactccaagggaa

SEQ ID NO: 93737 - DNA, 72 bp, Homo sapiens
aagttgggaccaagcacaaactccatgtctggtggggtacagactccaagggaagactgggctccaaagcca

SEQ ID NO: 93738 - DNA, 74 bp, Homo sapiens
aagcacaaactccatgtctggtggggtacagactccaagggaagactgggctccaaagccacatgcctttgttg

SEQ ID NO: 93739 - DNA, 77 bp, Homo sapiens
atgtctggtggggtacagactccaagggaagactgggctccaaagccacatgcctttgttggcagcgtcaagaatga

SEQ ID NO: 93740 - DNA, 75 bp, Homo sapiens
ggtacagactccaagggaagactgggctccaaagccacatgcctttgttggcagcgtcaagaatgagaagacttt

SEQ ID NO: 93741 - DNA, 73 bp, Homo sapiens
actgggctccaaagccacatgcctttgttggcagcgtcaagaatgagaagacttttgtggggggtcctcttaa

SEQ ID NO: 93742 - DNA, 73 bp, Homo sapiens
aaagccacatgcctttgttggcagcgtcaagaatgagaagacttttgtggggggtcctcttaaggcaaatgcc

SEQ ID NO: 93743 - DNA, 74 bp, Homo sapiens
acatgcctttgttggcagcgtcaagaatgagaagacttttgtggggggtcctcttaaggcaaatgccgagaaca

SEQ ID NO: 93744 - DNA, 74 bp, Homo sapiens
tgttggcagcgtcaagaatgagaagacttttgtggggggtcctcttaaggcaaatgccgagaacaggaaagcta

SEQ ID NO: 93745 - DNA, 71 bp, Homo sapiens
aagaatgagaagacttttgtggggggtcctcttaaggcaaatgccgagaacaggaaagctactgggcatag

SEQ ID NO: 93746 - DNA, 69 bp, Homo sapiens
acttttgtggggggtcctcttaaggcaaatgccgagaacaggaaagctactgggcatagtcccctggaa

SEQ ID NO: 93747 - DNA, 71 bp, Homo sapiens
ggggtcctcttaaggcaaatgccgagaacaggaaagctactgggcatagtcccctggaactggtgggtcac

SEQ ID NO: 93748 - DNA, 72 bp, Homo sapiens
ttaaggcaaatgccgagaacaggaaagctactgggcatagtcccctggaactggtgggtcacttggaaggga

SEQ ID NO: 93749 - DNA, 71 bp, Homo sapiens
aaatgccgagaacaggaaagctactgggcatagtcccctggaactggtgggtcacttggaagggatgccct

SEQ ID NO: 93750 - DNA, 73 bp, Homo sapiens
tgggcatagtcccctggaactggtgggtcacttggaagggatgccctttgtcatggacttgcccttctggaaa

SEQ ID NO: 93751 - DNA, 71 bp, Homo sapiens
atagtcccctggaactggtgggtcacttggaagggatgccctttgtcatggacttgcccttctggaaatta

SEQ ID NO: 93752 - DNA, 71 bp, Homo sapiens
aactggtgggtcacttggaagggatgccctttgtcatggacttgcccttctggaaattaccccgagagcca

SEQ ID NO: 93753 - DNA, 72 bp, Homo sapiens
aagggatgccctttgtcatggacttgcccttctggaaattaccccgagagccagggaaggggctcagtgagc

SEQ ID NO: 93754 - DNA, 74 bp, Homo sapiens
tttgtcatggacttgcccttctggaaattaccccgagagccagggaaggggctcagtgagcctctggagccttc

SEQ ID NO: 93755 - DNA, 72 bp, Homo sapiens
acttgcccttctggaaattaccccgagagccagggaaggggctcagtgagcctctggagccttcttctctcc

SEQ ID NO: 93756 - DNA, 73 bp, Homo sapiens
tggaaattaccccgagagccagggaaggggctcagtgagcctctggagccttcttctctcccctcccaactca

SEQ ID NO: 93757 - DNA, 79 bp, Homo sapiens
gagagccagggaaggggctcagtgagcctctggagccttcttctctcccctcccaactcagcatcaagcaggcatttta

SEQ ID NO: 93758 - DNA, 78 bp, Homo sapiens
gaaggggctcagtgagcctctggagccttcttctctcccctcccaactcagcatcaagcaggcattttatgggaagct

SEQ ID NO: 93759 - DNA, 76 bp, Homo sapiens
agtgagcctctggagccttcttctctcccctcccaactcagcatcaagcaggcattttatgggaagctttctaaac

SEQ ID NO: 93760 - DNA, 77 bp, Homo sapiens
tctggagccttcttctctcccctcccaactcagcatcaagcaggcattttatgggaagctttctaaactccaactga

SEQ ID NO: 93761 - DNA, 76 bp, Homo sapiens
ttctctcccctcccaactcagcatcaagcaggcattttatgggaagctttctaaactccaactgagttccaccagc

SEQ ID NO: 93762 - DNA, 75 bp, Homo sapiens
tcccaactcagcatcaagcaggcattttatgggaagctttctaaactccaactgagttccaccagctttaattat

SEQ ID NO: 93763 - DNA, 75 bp, Homo sapiens
actcagcatcaagcaggcattttatgggaagctttctaaactccaactgagttccaccagctttaattattcctc

SEQ ID NO: 93764 - DNA, 72 bp, Homo sapiens
aggcattttatgggaagctttctaaactccaactgagttccaccagctttaattattcctctagctctccca

SEQ ID NO: 93765 - DNA, 69 bp, Homo sapiens
ctttctaaactccaactgagttccaccagctttaattattcctctagctctcccacctttcccaaaggc

SEQ ID NO: 93766 - DNA, 71 bp, Homo sapiens
aactgagttccaccagctttaattattcctctagctctcccacctttcccaaaggccttgctggaagtgtg

SEQ ID NO: 93767 - DNA, 75 bp, Homo sapiens
gttccaccagctttaattattcctctagctctcccacctttcccaaaggccttgctggaagtgtggtgcagctga

SEQ ID NO: 93768 - DNA, 76 bp, Homo sapiens
ttaattattcctctagctctcccacctttcccaaaggccttgctggaagtgtggtgcagctgagccacaaagcaaa

SEQ ID NO: 93769 - DNA, 77 bp, Homo sapiens
ctctagctctcccacctttcccaaaggccttgctggaagtgtggtgcagctgagccacaaagcaaactttggtgcga

SEQ ID NO: 93770 - DNA, 83 bp, Homo sapiens
cttgctggaagtgtggtgcagctgagccacaaagcaaactttggtgcgagccacagtgcatcactttccttgcaaatgttcac

SEQ ID NO: 93771 - DNA, 86 bp, Homo sapiens
gtgcagctgagccacaaagcaaactttggtgcgagccacagtgcatcactttccttgcaaatgttcactgacagcagcacggtgga

SEQ ID NO: 93772 - DNA, 82 bp, Homo sapiens
agccacaaagcaaactttggtgcgagccacagtgcatcactttccttgcaaatgttcactgacagcagcacggtggaaagca

SEQ ID NO: 93773 - DNA, 90 bp, Homo sapiens
tgcgagccacagtgcatcactttccttgcaaatgttcactgacagcagcacggtggaaagcatctcgctccagtgtgcgtgcagcctgaa

SEQ ID NO: 93774 - DNA, 88 bp, Homo sapiens
agtgcatcactttccttgcaaatgttcactgacagcagcacggtggaaagcatctcgctccagtgtgcgtgcagcctgaaagccatga

SEQ ID NO: 93775 - DNA, 89 bp, Homo sapiens
tttccttgcaaatgttcactgacagcagcacggtggaaagcatctcgctccagtgtgcgtgcagcctgaaagccatgatcatgtgccaa

SEQ ID NO: 93776 - DNA, 88 bp, Homo sapiens
aaatgttcactgacagcagcacggtggaaagcatctcgctccagtgtgcgtgcagcctgaaagccatgatcatgtgccaaggctgcgg

SEQ ID NO: 93777 - DNA, 89 bp, Homo sapiens
acagcagcacggtggaaagcatctcgctccagtgtgcgtgcagcctgaaagccatgatcatgtgccaaggctgcggtgcgttctgtcac

SEQ ID NO: 93778 - DNA, 89 bp, Homo sapiens
ggtggaaagcatctcgctccagtgtgcgtgcagcctgaaagccatgatcatgtgccaaggctgcggtgcgttctgtcacgatgactgta

SEQ ID NO: 93779 - DNA, 85 bp, Homo sapiens
cagcctgaaagccatgatcatgtgccaaggctgcggtgcgttctgtcacgatgactgtattggaccctcaaagctctgtgtattg

SEQ ID NO: 93780 - DNA, 83 bp, Homo sapiens
tgtgccaaggctgcggtgcgttctgtcacgatgactgtattggaccctcaaagctctgtgtattgtgccttgtggtgagataa

SEQ ID NO: 93781 - DNA, 80 bp, Homo sapiens
aaggctgcggtgcgttctgtcacgatgactgtattggaccctcaaagctctgtgtattgtgccttgtggtgagataataa

SEQ ID NO: 93782 - DNA, 81 bp, Homo sapiens
ttctgtcacgatgactgtattggaccctcaaagctctgtgtattgtgccttgtggtgagataataaattatggccatggga

SEQ ID NO: 93783 - DNA, 78 bp, Homo sapiens
atgactgtattggaccctcaaagctctgtgtattgtgccttgtggtgagataataaattatggccatgggaaacattg

SEQ ID NO: 93784 - DNA, 77 bp, Homo sapiens
tattggaccctcaaagctctgtgtattgtgccttgtggtgagataataaattatggccatgggaaacattgtatatt

SEQ ID NO: 93785 - DNA, 78 bp, Homo sapiens
ctgtgtattgtgccttgtggtgagataataaattatggccatgggaaacattgtatatttagtgtgtgtattttgata

SEQ ID NO: 93786 - DNA, 79 bp, Homo sapiens
tgccttgtggtgagataataaattatggccatgggaaacattgtatatttagtgtgtgtattttgataatgattgatct

SEQ ID NO: 93787 - DNA, 78 bp, Homo sapiens
gagataataaattatggccatgggaaacattgtatatttagtgtgtgtattttgataatgattgatcttaaatctgta

SEQ ID NO: 93788 - DNA, 82 bp, Homo sapiens
tatggccatgggaaacattgtatatttagtgtgtgtattttgataatgattgatcttaaatctgtatacagaatatcattga

SEQ ID NO: 93789 - DNA, 80 bp, Homo sapiens
ggaaacattgtatatttagtgtgtgtattttgataatgattgatcttaaatctgtatacagaatatcattgatataatac

SEQ ID NO: 93790 - DNA, 81 bp, Homo sapiens
tatttagtgtgtgtattttgataatgattgatcttaaatctgtatacagaatatcattgatataatactctttaggcagga

SEQ ID NO: 93791 - DNA, 82 bp, Homo sapiens
gtgtattttgataatgattgatcttaaatctgtatacagaatatcattgatataatactctttaggcaggagcactcttgcc

SEQ ID NO: 93792 - DNA, 81 bp, Homo sapiens
tttgataatgattgatcttaaatctgtatacagaatatcattgatataatactctttaggcaggagcactcttgccttccc

SEQ ID NO: 93793 - DNA, 75 bp, Homo sapiens
atcttaaatctgtatacagaatatcattgatataatactctttaggcaggagcactcttgccttcccccaaaatt

SEQ ID NO: 93794 - DNA, 75 bp, Homo sapiens
aaatctgtatacagaatatcattgatataatactctttaggcaggagcactcttgccttcccccaaaatttacac

SEQ ID NO: 93795 - DNA, 74 bp, Homo sapiens
aatatcattgatataatactctttaggcaggagcactcttgccttcccccaaaatttacactgctaaagccctc

SEQ ID NO: 93796 - DNA, 74 bp, Homo sapiens
ttgatataatactctttaggcaggagcactcttgccttcccccaaaatttacactgctaaagccctctgtcact

SEQ ID NO: 93797 - DNA, 73 bp, Homo sapiens
tactctttaggcaggagcactcttgccttcccccaaaatttacactgctaaagccctctgtcacttggcgacc

SEQ ID NO: 93798 - DNA, 71 bp, Homo sapiens
aggagcactcttgccttcccccaaaatttacactgctaaagccctctgtcacttggcgacccttctggtct

SEQ ID NO: 93799 - DNA, 72 bp, Homo sapiens
tcttgccttcccccaaaatttacactgctaaagccctctgtcacttggcgacccttctggtcttgctggagg

SEQ ID NO: 93800 - DNA, 71 bp, Homo sapiens
ctctgtcacttggcgacccttctggtcttgctggaggggtttcctgggtataacccattgggctgcccaag

SEQ ID NO: 93801 - DNA, 72 bp, Homo sapiens
tcacttggcgacccttctggtcttgctggaggggtttcctgggtataacccattgggctgcccaaggccagc

SEQ ID NO: 93802 - DNA, 81 bp, Homo sapiens
tttcctgggtataacccattgggctgcccaaggccagccagcctgagctctcctgcaagacagagcctgatgtggcacgga

SEQ ID NO: 93803 - DNA, 80 bp, Homo sapiens
gggtataacccattgggctgcccaaggccagccagcctgagctctcctgcaagacagagcctgatgtggcacggagtggg

SEQ ID NO: 93804 - DNA, 79 bp, Homo sapiens
attgggctgcccaaggccagccagcctgagctctcctgcaagacagagcctgatgtggcacggagtggggttgcggggg

SEQ ID NO: 93805 - DNA, 76 bp, Homo sapiens
cccaaggccagccagcctgagctctcctgcaagacagagcctgatgtggcacggagtggggttgcggggggtgggg

SEQ ID NO: 93806 - DNA, 77 bp, Homo sapiens
agcctgagctctcctgcaagacagagcctgatgtggcacggagtggggttgcggggggtggggggactgcctgactc

SEQ ID NO: 93807 - DNA, 75 bp, Homo sapiens
tcctgcaagacagagcctgatgtggcacggagtggggttgcggggggtggggggactgcctgactcccagaggga

SEQ ID NO: 93808 - DNA, 71 bp, Homo sapiens
agagcctgatgtggcacggagtggggttgcggggggtggggggactgcctgactcccagagggacttgaaa

SEQ ID NO: 93809 - DNA, 71 bp, Homo sapiens
ctgatgtggcacggagtggggttgcggggggtggggggactgcctgactcccagagggacttgaaactgaa

SEQ ID NO: 93810 - DNA, 67 bp, Homo sapiens
agtggggttgcggggggtggggggactgcctgactcccagagggacttgaaactgaagcaagaaggt

SEQ ID NO: 93811 - DNA, 71 bp, Homo sapiens
ggggggtggggggactgcctgactcccagagggacttgaaactgaagcaagaaggttgcattctccaccaa

SEQ ID NO: 93812 - DNA, 72 bp, Homo sapiens
gggactgcctgactcccagagggacttgaaactgaagcaagaaggttgcattctccaccaagggagttaacc

SEQ ID NO: 93813 - DNA, 72 bp, Homo sapiens
tgactcccagagggacttgaaactgaagcaagaaggttgcattctccaccaagggagttaacctacctgaac

SEQ ID NO: 93814 - DNA, 71 bp, Homo sapiens
aactgaagcaagaaggttgcattctccaccaagggagttaacctacctgaactaagtagaaatgccagtct

SEQ ID NO: 93815 - DNA, 67 bp, Homo sapiens
aagggagttaacctacctgaactaagtagaaatgccagtcttccactaccccctccctgccatcttt

SEQ ID NO: 93816 - DNA, 71 bp, Homo sapiens
gttaacctacctgaactaagtagaaatgccagtcttccactaccccctccctgccatcttttcttctgcta

SEQ ID NO: 93817 - DNA, 69 bp, Homo sapiens
aactaagtagaaatgccagtcttccactaccccctccctgccatcttttcttctgctactttggggagt

SEQ ID NO: 93818 - DNA, 72 bp, Homo sapiens
aatgccagtcttccactaccccctccctgccatcttttcttctgctactttggggagttgatggccaggaaa

SEQ ID NO: 93819 - DNA, 71 bp, Homo sapiens
agtcttccactaccccctccctgccatcttttcttctgctactttggggagttgatggccaggaaagaagc

SEQ ID NO: 93820 - DNA, 71 bp, Homo sapiens
atcttttcttctgctactttggggagttgatggccaggaaagaagccagcacagggttaaagtaactcctg

SEQ ID NO: 93821 - DNA, 74 bp, Homo sapiens
ttcttctgctactttggggagttgatggccaggaaagaagccagcacagggttaaagtaactcctggcattgcc

SEQ ID NO: 93822 - DNA, 71 bp, Homo sapiens
actttggggagttgatggccaggaaagaagccagcacagggttaaagtaactcctggcattgcccaccagg

SEQ ID NO: 93823 - DNA, 74 bp, Homo sapiens
gttgatggccaggaaagaagccagcacagggttaaagtaactcctggcattgcccaccagggggctggtgcacc

SEQ ID NO: 93824 - DNA, 75 bp, Homo sapiens
aggaaagaagccagcacagggttaaagtaactcctggcattgcccaccagggggctggtgcacctgctgacctca

SEQ ID NO: 93825 - DNA, 74 bp, Homo sapiens
acagggttaaagtaactcctggcattgcccaccagggggctggtgcacctgctgacctcagggtcacagttgag

SEQ ID NO: 93826 - DNA, 78 bp, Homo sapiens
ttaaagtaactcctggcattgcccaccagggggctggtgcacctgctgacctcagggtcacagttgagtcatttgcca

SEQ ID NO: 93827 - DNA, 80 bp, Homo sapiens
tggcattgcccaccagggggctggtgcacctgctgacctcagggtcacagttgagtcatttgccagttgacggagcaagt

SEQ ID NO: 93828 - DNA, 76 bp, Homo sapiens
accagggggctggtgcacctgctgacctcagggtcacagttgagtcatttgccagttgacggagcaagtttgacct

SEQ ID NO: 93829 - DNA, 74 bp, Homo sapiens
atttgccagttgacggagcaagtttgaccttggttctgttgctgaagcaaatttggaacttttctgtctcagtg

SEQ ID NO: 93830 - DNA, 76 bp, Homo sapiens
ttgacggagcaagtttgaccttggttctgttgctgaagcaaatttggaacttttctgtctcagtgtgatccactaa

SEQ ID NO: 93831 - DNA, 73 bp, Homo sapiens
aagtttgaccttggttctgttgctgaagcaaatttggaacttttctgtctcagtgtgatccactaacccacag

SEQ ID NO: 93832 - DNA, 77 bp, Homo sapiens
tctgttgctgaagcaaatttggaacttttctgtctcagtgtgatccactaacccacaggatcatttggaaccttgaa

SEQ ID NO: 93833 - DNA, 76 bp, Homo sapiens
aagcaaatttggaacttttctgtctcagtgtgatccactaacccacaggatcatttggaaccttgaatagctctgc

SEQ ID NO: 93834 - DNA, 76 bp, Homo sapiens
aatttggaacttttctgtctcagtgtgatccactaacccacaggatcatttggaaccttgaatagctctgcttgga

SEQ ID NO: 93835 - DNA, 71 bp, Homo sapiens
taacccacaggatcatttggaaccttgaatagctctgcttggacaatggggttggggaatagggttgtctt

SEQ ID NO: 93836 - DNA, 71 bp, Homo sapiens
atcatttggaaccttgaatagctctgcttggacaatggggttggggaatagggttgtctttcctatgaaaa

SEQ ID NO: 93837 - DNA, 73 bp, Homo sapiens
aaccttgaatagctctgcttggacaatggggttggggaatagggttgtctttcctatgaaaatgccatctgta

SEQ ID NO: 93838 - DNA, 73 bp, Homo sapiens
aatagctctgcttggacaatggggttggggaatagggttgtctttcctatgaaaatgccatctgtagaccttg

SEQ ID NO: 93839 - DNA, 73 bp, Homo sapiens
acaatggggttggggaatagggttgtctttcctatgaaaatgccatctgtagaccttgtgagtcagccgtcca

SEQ ID NO: 93840 - DNA, 76 bp, Homo sapiens
ttggggaatagggttgtctttcctatgaaaatgccatctgtagaccttgtgagtcagccgtccagatgtttgcagg

SEQ ID NO: 93841 - DNA, 77 bp, Homo sapiens
aatagggttgtctttcctatgaaaatgccatctgtagaccttgtgagtcagccgtccagatgtttgcaggtgaattc

SEQ ID NO: 93842 - DNA, 82 bp, Homo sapiens
tttcctatgaaaatgccatctgtagaccttgtgagtcagccgtccagatgtttgcaggtgaattcctctgcttgacatcctc

SEQ ID NO: 93843 - DNA, 81 bp, Homo sapiens
aaatgccatctgtagaccttgtgagtcagccgtccagatgtttgcaggtgaattcctctgcttgacatcctccctgtcact

SEQ ID NO: 93844 - DNA, 79 bp, Homo sapiens
tagaccttgtgagtcagccgtccagatgtttgcaggtgaattcctctgcttgacatcctccctgtcactttggacccta

SEQ ID NO: 93845 - DNA, 79 bp, Homo sapiens
ttgtgagtcagccgtccagatgtttgcaggtgaattcctctgcttgacatcctccctgtcactttggaccctatgggag

SEQ ID NO: 93846 - DNA, 79 bp, Homo sapiens
cgtccagatgtttgcaggtgaattcctctgcttgacatcctccctgtcactttggaccctatgggagtgggcatctcca

SEQ ID NO: 93847 - DNA, 80 bp, Homo sapiens
ttgcaggtgaattcctctgcttgacatcctccctgtcactttggaccctatgggagtgggcatctccacgcacctgtgta

SEQ ID NO: 93848 - DNA, 78 bp, Homo sapiens
aattcctctgcttgacatcctccctgtcactttggaccctatgggagtgggcatctccacgcacctgtgtatgtgaaa

SEQ ID NO: 93849 - DNA, 70 bp, Homo sapiens
tttttatatttttaactctttattcttggatgtataaagtgaactttttggcttctgtaagtatgctcta

SEQ ID NO: 93850 - DNA, 74 bp, Homo sapiens
tttaactctttattcttggatgtataaagtgaactttttggcttctgtaagtatgctctatgcacctctaatgt

SEQ ID NO: 93851 - DNA, 76 bp, Homo sapiens
ctctttattcttggatgtataaagtgaactttttggcttctgtaagtatgctctatgcacctctaatgttttatca

SEQ ID NO: 93852 - DNA, 78 bp, Homo sapiens
ttggatgtataaagtgaactttttggcttctgtaagtatgctctatgcacctctaatgttttatcatgtatttatatg

SEQ ID NO: 93853 - DNA, 82 bp, Homo sapiens
gcttctgtaagtatgctctatgcacctctaatgttttatcatgtatttatatgttgtacacagtactggctgattctgtaaa

SEQ ID NO: 93854 - DNA, 83 bp, Homo sapiens
tatgcacctctaatgttttatcatgtatttatatgttgtacacagtactggctgattctgtaaatggatgtattgtacagaga

SEQ ID NO: 93855 - DNA, 80 bp, Homo sapiens
atgttttatcatgtatttatatgttgtacacagtactggctgattctgtaaatggatgtattgtacagagaacatgaacg

SEQ ID NO: 93856 - DNA, 80 bp, Homo sapiens
atgtatttatatgttgtacacagtactggctgattctgtaaatggatgtattgtacagagaacatgaacgtctcttccta

SEQ ID NO: 93857 - DNA, 78 bp, Homo sapiens
ttatatgttgtacacagtactggctgattctgtaaatggatgtattgtacagagaacatgaacgtctcttcctaattt

SEQ ID NO: 93858 - DNA, 79 bp, Homo sapiens
gtacacagtactggctgattctgtaaatggatgtattgtacagagaacatgaacgtctcttcctaattttacatcttca

SEQ ID NO: 93859 - DNA, 81 bp, Homo sapiens
ctgattctgtaaatggatgtattgtacagagaacatgaacgtctcttcctaattttacatcttcagcatcattgcattaaa

SEQ ID NO: 93860 - DNA, 79 bp, Homo sapiens
atgtattgtacagagaacatgaacgtctcttcctaattttacatcttcagcatcattgcattaaagtggtgtaatctcc

SEQ ID NO: 93861 - DNA, 78 bp, Homo sapiens
aacatgaacgtctcttcctaattttacatcttcagcatcattgcattaaagtggtgtaatctccttctctacatctgt

SEQ ID NO: 93862 - DNA, 79 bp, Homo sapiens
aacgtctcttcctaattttacatcttcagcatcattgcattaaagtggtgtaatctccttctctacatctgttgtcaga

SEQ ID NO: 93863 - DNA, 84 bp, Homo sapiens
tcctaattttacatcttcagcatcattgcattaaagtggtgtaatctccttctctacatctgttgtcagagccactgagtgctg

SEQ ID NO: 93864 - DNA, 89 bp, Homo sapiens
acatcttcagcatcattgcattaaagtggtgtaatctccttctctacatctgttgtcagagccactgagtgctgtgctgctcgacgtga

SEQ ID NO: 93865 - DNA, 83 bp, Homo sapiens
attgcattaaagtggtgtaatctccttctctacatctgttgtcagagccactgagtgctgtgctgctcgacgtgagggtgaaa

SEQ ID NO: 93866 - DNA, 84 bp, Homo sapiens
ttaaagtggtgtaatctccttctctacatctgttgtcagagccactgagtgctgtgctgctcgacgtgagggtgaaatgattga

SEQ ID NO: 93867 - DNA, 87 bp, Homo sapiens
taatctccttctctacatctgttgtcagagccactgagtgctgtgctgctcgacgtgagggtgaaatgattgacttgtgacctgcca

SEQ ID NO: 93868 - DNA, 86 bp, Homo sapiens
tctacatctgttgtcagagccactgagtgctgtgctgctcgacgtgagggtgaaatgattgacttgtgacctgccaggttgcccga

SEQ ID NO: 93869 - DNA, 84 bp, Homo sapiens
ttgtcagagccactgagtgctgtgctgctcgacgtgagggtgaaatgattgacttgtgacctgccaggttgcccgatgccctgt

SEQ ID NO: 93870 - DNA, 81 bp, Homo sapiens
actgagtgctgtgctgctcgacgtgagggtgaaatgattgacttgtgacctgccaggttgcccgatgccctgttgggtcac

SEQ ID NO: 93871 - DNA, 80 bp, Homo sapiens
tgtgctgctcgacgtgagggtgaaatgattgacttgtgacctgccaggttgcccgatgccctgttgggtcaccggctgga

SEQ ID NO: 93872 - DNA, 77 bp, Homo sapiens
tcgacgtgagggtgaaatgattgacttgtgacctgccaggttgcccgatgccctgttgggtcaccggctggacctgc

SEQ ID NO: 93873 - DNA, 82 bp, Homo sapiens
ggtgaaatgattgacttgtgacctgccaggttgcccgatgccctgttgggtcaccggctggacctgctgcagcctgcagagc

SEQ ID NO: 93874 - DNA, 85 bp, Homo sapiens
ttgcccgatgccctgttgggtcaccggctggacctgctgcagcctgcagagccacagtcagcctgcccacatgccaccgagcaaa

SEQ ID NO: 93875 - DNA, 86 bp, Homo sapiens
ttgggtcaccggctggacctgctgcagcctgcagagccacagtcagcctgcccacatgccaccgagcaaacgcatcttgcttttca

SEQ ID NO: 93876 - DNA, 89 bp, Homo sapiens
tgctgcagcctgcagagccacagtcagcctgcccacatgccaccgagcaaacgcatcttgcttttcacatctctcctcctacagcctta

SEQ ID NO: 93877 - DNA, 87 bp, Homo sapiens
tgcagagccacagtcagcctgcccacatgccaccgagcaaacgcatcttgcttttcacatctctcctcctacagccttaatggctgc

SEQ ID NO: 93878 - DNA, 85 bp, Homo sapiens
acagtcagcctgcccacatgccaccgagcaaacgcatcttgcttttcacatctctcctcctacagccttaatggctgcttgctgc

SEQ ID NO: 93879 - DNA, 85 bp, Homo sapiens
cccacatgccaccgagcaaacgcatcttgcttttcacatctctcctcctacagccttaatggctgcttgctgccatatgtgacaa

SEQ ID NO: 93880 - DNA, 85 bp, Homo sapiens
atgccaccgagcaaacgcatcttgcttttcacatctctcctcctacagccttaatggctgcttgctgccatatgtgacaaatcac

SEQ ID NO: 93881 - DNA, 82 bp, Homo sapiens
aaacgcatcttgcttttcacatctctcctcctacagccttaatggctgcttgctgccatatgtgacaaatcaccaccaccag

SEQ ID NO: 93882 - DNA, 82 bp, Homo sapiens
ttttcacatctctcctcctacagccttaatggctgcttgctgccatatgtgacaaatcaccaccaccagtgttaagtgcttc

SEQ ID NO: 93883 - DNA, 82 bp, Homo sapiens
acatctctcctcctacagccttaatggctgcttgctgccatatgtgacaaatcaccaccaccagtgttaagtgcttctggat

SEQ ID NO: 93884 - DNA, 83 bp, Homo sapiens
tacagccttaatggctgcttgctgccatatgtgacaaatcaccaccaccagtgttaagtgcttctggattcatgggtgagttc

SEQ ID NO: 93885 - DNA, 81 bp, Homo sapiens
ttaatggctgcttgctgccatatgtgacaaatcaccaccaccagtgttaagtgcttctggattcatgggtgagttccctgg

SEQ ID NO: 93886 - DNA, 76 bp, Homo sapiens
tatgtgacaaatcaccaccaccagtgttaagtgcttctggattcatgggtgagttccctgggcagcccccaggaag

SEQ ID NO: 93887 - DNA, 74 bp, Homo sapiens
atcaccaccaccagtgttaagtgcttctggattcatgggtgagttccctgggcagcccccaggaaggccttcca

SEQ ID NO: 93888 - DNA, 75 bp, Homo sapiens
agtgttaagtgcttctggattcatgggtgagttccctgggcagcccccaggaaggccttccagatctggctccag

SEQ ID NO: 93889 - DNA, 75 bp, Homo sapiens
ttctggattcatgggtgagttccctgggcagcccccaggaaggccttccagatctggctccagggtcaccacctg

SEQ ID NO: 93890 - DNA, 76 bp, Homo sapiens
atgggtgagttccctgggcagcccccaggaaggccttccagatctggctccagggtcaccacctgtcacagcaata

SEQ ID NO: 93891 - DNA, 74 bp, Homo sapiens
agttccctgggcagcccccaggaaggccttccagatctggctccagggtcaccacctgtcacagcaatacctgg

SEQ ID NO: 93892 - DNA, 77 bp, Homo sapiens
agcccccaggaaggccttccagatctggctccagggtcaccacctgtcacagcaatacctgggaccatgctctcctg

SEQ ID NO: 93893 - DNA, 79 bp, Homo sapiens
agatctggctccagggtcaccacctgtcacagcaatacctgggaccatgctctcctgggactgtgaggctccttttgac

SEQ ID NO: 93894 - DNA, 76 bp, Homo sapiens
acagcaatacctgggaccatgctctcctgggactgtgaggctccttttgacgtacttttgacatcaggcaggtttg

SEQ ID NO: 93895 - DNA, 74 bp, Homo sapiens
gaccatgctctcctgggactgtgaggctccttttgacgtacttttgacatcaggcaggtttgggaagaaacaaa

SEQ ID NO: 93896 - DNA, 74 bp, Homo sapiens
ctctcctgggactgtgaggctccttttgacgtacttttgacatcaggcaggtttgggaagaaacaaagccatgc

SEQ ID NO: 93897 - DNA, 75 bp, Homo sapiens
actgtgaggctccttttgacgtacttttgacatcaggcaggtttgggaagaaacaaagccatgcctgctcctgcc

SEQ ID NO: 93898 - DNA, 75 bp, Homo sapiens
acgtacttttgacatcaggcaggtttgggaagaaacaaagccatgcctgctcctgcctctctcccaacatgtttc

SEQ ID NO: 93899 - DNA, 79 bp, Homo sapiens
acatcaggcaggtttgggaagaaacaaagccatgcctgctcctgcctctctcccaacatgtttccagcaagtagatgcc

SEQ ID NO: 93900 - DNA, 78 bp, Homo sapiens
tgggaagaaacaaagccatgcctgctcctgcctctctcccaacatgtttccagcaagtagatgcccctgtgtgtgttt

SEQ ID NO: 93901 - DNA, 76 bp, Homo sapiens
aaacaaagccatgcctgctcctgcctctctcccaacatgtttccagcaagtagatgcccctgtgtgtgttttccct

SEQ ID NO: 93902 - DNA, 77 bp, Homo sapiens
atgcctgctcctgcctctctcccaacatgtttccagcaagtagatgcccctgtgtgtgttttcccttgccttgtttc

SEQ ID NO: 93903 - DNA, 74 bp, Homo sapiens
cctctctcccaacatgtttccagcaagtagatgcccctgtgtgtgttttcccttgccttgtttcctgccttata

SEQ ID NO: 93904 - DNA, 74 bp, Homo sapiens
cagcaagtagatgcccctgtgtgtgttttcccttgccttgtttcctgccttatatcttgtatttcgacttatta

SEQ ID NO: 93905 - DNA, 73 bp, Homo sapiens
tagatgcccctgtgtgtgttttcccttgccttgtttcctgccttatatcttgtatttcgacttattacagagt

SEQ ID NO: 93906 - DNA, 70 bp, Homo sapiens
gtgtgttttcccttgccttgtttcctgccttatatcttgtatttcgacttattacagagttgagggttct

SEQ ID NO: 93907 - DNA, 71 bp, Homo sapiens
ccttgccttgtttcctgccttatatcttgtatttcgacttattacagagttgagggttcttgcttaattta

SEQ ID NO: 93908 - DNA, 72 bp, Homo sapiens
cttgtttcctgccttatatcttgtatttcgacttattacagagttgagggttcttgcttaatttagatcaag

SEQ ID NO: 93909 - DNA, 71 bp, Homo sapiens
gccttatatcttgtatttcgacttattacagagttgagggttcttgcttaatttagatcaagtataaaatt

SEQ ID NO: 93910 - DNA, 73 bp, Homo sapiens
gacttattacagagttgagggttcttgcttaatttagatcaagtataaaatttgtatgacttcaagtctcatt

SEQ ID NO: 93911 - DNA, 73 bp, Homo sapiens
gagttgagggttcttgcttaatttagatcaagtataaaatttgtatgacttcaagtctcattttatctgaaag

SEQ ID NO: 93912 - DNA, 70 bp, Homo sapiens
gttcttgcttaatttagatcaagtataaaatttgtatgacttcaagtctcattttatctgaaaggttttt

SEQ ID NO: 93913 - DNA, 74 bp, Homo sapiens
tagatcaagtataaaatttgtatgacttcaagtctcattttatctgaaaggtttttttctcatttaatctgatg

SEQ ID NO: 93914 - DNA, 73 bp, Homo sapiens
taaaatttgtatgacttcaagtctcattttatctgaaaggtttttttctcatttaatctgatgtggcattttc

SEQ ID NO: 93915 - DNA, 78 bp, Homo sapiens
gtatgacttcaagtctcattttatctgaaaggtttttttctcatttaatctgatgtggcattttcgtcatctgaagca

SEQ ID NO: 93916 - DNA, 78 bp, Homo sapiens
aagtctcattttatctgaaaggtttttttctcatttaatctgatgtggcattttcgtcatctgaagcatgagtgacaa

SEQ ID NO: 93917 - DNA, 76 bp, Homo sapiens
attttatctgaaaggtttttttctcatttaatctgatgtggcattttcgtcatctgaagcatgagtgacaagttgg

SEQ ID NO: 93918 - DNA, 81 bp, Homo sapiens
tttttttctcatttaatctgatgtggcattttcgtcatctgaagcatgagtgacaagttgggaatgatgtggtgatttaga

SEQ ID NO: 93919 - DNA, 85 bp, Homo sapiens
ttctcatttaatctgatgtggcattttcgtcatctgaagcatgagtgacaagttgggaatgatgtggtgatttagaatgcagtat

SEQ ID NO: 93920 - DNA, 83 bp, Homo sapiens
atgtggcattttcgtcatctgaagcatgagtgacaagttgggaatgatgtggtgatttagaatgcagtattggccaagtccaa

SEQ ID NO: 93921 - DNA, 80 bp, Homo sapiens
attttcgtcatctgaagcatgagtgacaagttgggaatgatgtggtgatttagaatgcagtattggccaagtccaagttg

SEQ ID NO: 93922 - DNA, 80 bp, Homo sapiens
atctgaagcatgagtgacaagttgggaatgatgtggtgatttagaatgcagtattggccaagtccaagttgtcaacttaa

SEQ ID NO: 93923 - DNA, 77 bp, Homo sapiens
tgacaagttgggaatgatgtggtgatttagaatgcagtattggccaagtccaagttgtcaacttaagcgtctgttta

SEQ ID NO: 93924 - DNA, 75 bp, Homo sapiens
ttgggaatgatgtggtgatttagaatgcagtattggccaagtccaagttgtcaacttaagcgtctgtttaccaaa

SEQ ID NO: 93925 - DNA, 72 bp, Homo sapiens
tggtgatttagaatgcagtattggccaagtccaagttgtcaacttaagcgtctgtttaccaaagaccgggaa

SEQ ID NO: 93926 - DNA, 70 bp, Homo sapiens
tttagaatgcagtattggccaagtccaagttgtcaacttaagcgtctgtttaccaaagaccgggaacagg

SEQ ID NO: 93927 - DNA, 67 bp, Homo sapiens
agtattggccaagtccaagttgtcaacttaagcgtctgtttaccaaagaccgggaacaggggcccaa

SEQ ID NO: 93928 - DNA, 67 bp, Homo sapiens
aagtccaagttgtcaacttaagcgtctgtttaccaaagaccgggaacaggggcccaaacatgtccag

SEQ ID NO: 93929 - DNA, 69 bp, Homo sapiens
tgtcaacttaagcgtctgtttaccaaagaccgggaacaggggcccaaacatgtccagtcctcttcttcc

SEQ ID NO: 93930 - DNA, 69 bp, Homo sapiens
tctgtttaccaaagaccgggaacaggggcccaaacatgtccagtcctcttcttccctctgctggaacct

SEQ ID NO: 93931 - DNA, 68 bp, Homo sapiens
taccaaagaccgggaacaggggcccaaacatgtccagtcctcttcttccctctgctggaacctttggg

SEQ ID NO: 93932 - DNA, 73 bp, Homo sapiens
aaacatgtccagtcctcttcttccctctgctggaacctttggggacactcaagggtacagtttgacactgatc

SEQ ID NO: 93933 - DNA, 74 bp, Homo sapiens
agtcctcttcttccctctgctggaacctttggggacactcaagggtacagtttgacactgatctggtccatgag

SEQ ID NO: 93934 - DNA, 78 bp, Homo sapiens
tggaacctttggggacactcaagggtacagtttgacactgatctggtccatgaggctgcccagagaaagcactgcttc

SEQ ID NO: 93935 - DNA, 81 bp, Homo sapiens
tttggggacactcaagggtacagtttgacactgatctggtccatgaggctgcccagagaaagcactgcttctgtatgtctc

SEQ ID NO: 93936 - DNA, 81 bp, Homo sapiens
actcaagggtacagtttgacactgatctggtccatgaggctgcccagagaaagcactgcttctgtatgtctcttgtggtat

SEQ ID NO: 93937 - DNA, 81 bp, Homo sapiens
agtttgacactgatctggtccatgaggctgcccagagaaagcactgcttctgtatgtctcttgtggtattggaacaataaa

SEQ ID NO: 93938 - DNA, 78 bp, Homo sapiens
atctggtccatgaggctgcccagagaaagcactgcttctgtatgtctcttgtggtattggaacaataaacccgtacaa

SEQ ID NO: 93939 - DNA, 77 bp, Homo sapiens
cagagaaagcactgcttctgtatgtctcttgtggtattggaacaataaacccgtacaacctgcagttgtggtctcag

SEQ ID NO: 93940 - DNA, 77 bp, Homo sapiens
aaagcactgcttctgtatgtctcttgtggtattggaacaataaacccgtacaacctgcagttgtggtctcagtcatc

SEQ ID NO: 93941 - DNA, 79 bp, Homo sapiens
ttctgtatgtctcttgtggtattggaacaataaacccgtacaacctgcagttgtggtctcagtcatctgtggctgcctc

SEQ ID NO: 93942 - DNA, 67 bp, Homo sapiens
gggcaagagccgggccggggctacaaggggagtcggcaccgccccctccccacccactcccgctgcc

SEQ ID NO: 93943 - DNA, 64 bp, Homo sapiens
cgggccggggctacaaggggagtcggcaccgccccctccccacccactcccgctgccccgtccg

SEQ ID NO: 93944 - DNA, 67 bp, Homo sapiens
tacaaggggagtcggcaccgccccctccccacccactcccgctgccccgtccggcccgcgccgcttc

SEQ ID NO: 93945 - DNA, 73 bp, Homo sapiens
ctccccacccactcccgctgccccgtccggcccgcgccgcttcctcgcagcagctgctcccggctccgcggcc

SEQ ID NO: 93946 - DNA, 74 bp, Homo sapiens
acccactcccgctgccccgtccggcccgcgccgcttcctcgcagcagctgctcccggctccgcggccgcagccc

SEQ ID NO: 93947 - DNA, 77 bp, Homo sapiens
tgccccgtccggcccgcgccgcttcctcgcagcagctgctcccggctccgcggccgcagcccgcgtggacgctccga

SEQ ID NO: 93948 - DNA, 77 bp, Homo sapiens
tccggcccgcgccgcttcctcgcagcagctgctcccggctccgcggccgcagcccgcgtggacgctccgagcgcccc

SEQ ID NO: 93949 - DNA, 75 bp, Homo sapiens
ttcctcgcagcagctgctcccggctccgcggccgcagcccgcgtggacgctccgagcgccccccgacggacggga

SEQ ID NO: 93950 - DNA, 72 bp, Homo sapiens
cagctgctcccggctccgcggccgcagcccgcgtggacgctccgagcgccccccgacggacgggaccggctc

SEQ ID NO: 93951 - DNA, 69 bp, Homo sapiens
tcccggctccgcggccgcagcccgcgtggacgctccgagcgccccccgacggacgggaccggctccctg

SEQ ID NO: 93952 - DNA, 69 bp, Homo sapiens
ggccgcagcccgcgtggacgctccgagcgccccccgacggacgggaccggctccctggcggtcgggcga

SEQ ID NO: 93953 - DNA, 67 bp, Homo sapiens
agcccgcgtggacgctccgagcgccccccgacggacgggaccggctccctggcggtcgggcgagcgg

SEQ ID NO: 93954 - DNA, 69 bp, Homo sapiens
acgctccgagcgccccccgacggacgggaccggctccctggcggtcgggcgagcgggcggcaacgctgc

SEQ ID NO: 93955 - DNA, 69 bp, Homo sapiens
ccccgacggacgggaccggctccctggcggtcgggcgagcgggcggcaacgctgcccggccggcagcgc

SEQ ID NO: 93956 - DNA, 69 bp, Homo sapiens
acgggaccggctccctggcggtcgggcgagcgggcggcaacgctgcccggccggcagcgctggggttaa

SEQ ID NO: 93957 - DNA, 71 bp, Homo sapiens
tccctggcggtcgggcgagcgggcggcaacgctgcccggccggcagcgctggggttaagtggcccaagtaa

SEQ ID NO: 93958 - DNA, 69 bp, Homo sapiens
cggtcgggcgagcgggcggcaacgctgcccggccggcagcgctggggttaagtggcccaagtaaaccta

SEQ ID NO: 93959 - DNA, 71 bp, Homo sapiens
agcgggcggcaacgctgcccggccggcagcgctggggttaagtggcccaagtaaacctagctcggcgatcg

SEQ ID NO: 93960 - DNA, 73 bp, Homo sapiens
ccggcagcgctggggttaagtggcccaagtaaacctagctcggcgatcggcgccggagattcgcgagcccagc

SEQ ID NO: 93961 - DNA, 73 bp, Homo sapiens
tggggttaagtggcccaagtaaacctagctcggcgatcggcgccggagattcgcgagcccagcgccctgcacg

SEQ ID NO: 93962 - DNA, 76 bp, Homo sapiens
taagtggcccaagtaaacctagctcggcgatcggcgccggagattcgcgagcccagcgccctgcacggccgccagc

SEQ ID NO: 93963 - DNA, 74 bp, Homo sapiens
aagtaaacctagctcggcgatcggcgccggagattcgcgagcccagcgccctgcacggccgccagccggcctcc

SEQ ID NO: 93964 - DNA, 77 bp, Homo sapiens
agctcggcgatcggcgccggagattcgcgagcccagcgccctgcacggccgccagccggcctcccgccagccagccc

SEQ ID NO: 93965 - DNA, 75 bp, Homo sapiens
tcggcgccggagattcgcgagcccagcgccctgcacggccgccagccggcctcccgccagccagccccgacccgc

SEQ ID NO: 93966 - DNA, 74 bp, Homo sapiens
agattcgcgagcccagcgccctgcacggccgccagccggcctcccgccagccagccccgacccgcggctccgcc

SEQ ID NO: 93967 - DNA, 73 bp, Homo sapiens
cccagcgccctgcacggccgccagccggcctcccgccagccagccccgacccgcggctccgccgcccagccgc

SEQ ID NO: 93968 - DNA, 74 bp, Homo sapiens
ctgcacggccgccagccggcctcccgccagccagccccgacccgcggctccgccgcccagccgcgccccagcca

SEQ ID NO: 93969 - DNA, 73 bp, Homo sapiens
agccggcctcccgccagccagccccgacccgcggctccgccgcccagccgcgccccagccagccctgcggcag

SEQ ID NO: 93970 - DNA, 75 bp, Homo sapiens
ctcccgccagccagccccgacccgcggctccgccgcccagccgcgccccagccagccctgcggcaggtgagcgcc

SEQ ID NO: 93971 - DNA, 71 bp, Homo sapiens
agccccgacccgcggctccgccgcccagccgcgccccagccagccctgcggcaggtgagcgccccggggcc

SEQ ID NO: 93972 - DNA, 71 bp, Homo sapiens
cggctccgccgcccagccgcgccccagccagccctgcggcaggtgagcgccccggggccccggggaggctc

SEQ ID NO: 93973 - DNA, 69 bp, Homo sapiens
ttctgtgggggaggagggggtgggtgggaagaggacctggagattgaggggaagggagagagcaaacaa

SEQ ID NO: 93974 - DNA, 67 bp, Homo sapiens
agggggtgggtgggaagaggacctggagattgaggggaagggagagagcaaacaaaggggtcaggag

SEQ ID NO: 93975 - DNA, 68 bp, Homo sapiens
ggtgggaagaggacctggagattgaggggaagggagagagcaaacaaaggggtcaggagggaaaataa

SEQ ID NO: 93976 - DNA, 72 bp, Homo sapiens
acctggagattgaggggaagggagagagcaaacaaaggggtcaggagggaaaataatgcactggcttcctga

SEQ ID NO: 93977 - DNA, 71 bp, Homo sapiens
agattgaggggaagggagagagcaaacaaaggggtcaggagggaaaataatgcactggcttcctgagcccc

SEQ ID NO: 93978 - DNA, 76 bp, Homo sapiens
aagggagagagcaaacaaaggggtcaggagggaaaataatgcactggcttcctgagcccctgcagaggctgagcag

SEQ ID NO: 93979 - DNA, 75 bp, Homo sapiens
agcaaacaaaggggtcaggagggaaaataatgcactggcttcctgagcccctgcagaggctgagcagggagaggg

SEQ ID NO: 93980 - DNA, 77 bp, Homo sapiens
gggtcaggagggaaaataatgcactggcttcctgagcccctgcagaggctgagcagggagagggggccagggccaga

SEQ ID NO: 93981 - DNA, 76 bp, Homo sapiens
agggaaaataatgcactggcttcctgagcccctgcagaggctgagcagggagagggggccagggccagaggggaca

SEQ ID NO: 93982 - DNA, 81 bp, Homo sapiens
atgcactggcttcctgagcccctgcagaggctgagcagggagagggggccagggccagaggggacagaggctggcggcaga

SEQ ID NO: 93983 - DNA, 77 bp, Homo sapiens
ttcctgagcccctgcagaggctgagcagggagagggggccagggccagaggggacagaggctggcggcagacgggcc

SEQ ID NO: 93984 - DNA, 74 bp, Homo sapiens
agaggctgagcagggagagggggccagggccagaggggacagaggctggcggcagacgggccgggacaggcagg

SEQ ID NO: 93985 - DNA, 71 bp, Homo sapiens
cagggagagggggccagggccagaggggacagaggctggcggcagacgggccgggacaggcaggtcctaaa

SEQ ID NO: 93986 - DNA, 74 bp, Homo sapiens
gggccagggccagaggggacagaggctggcggcagacgggccgggacaggcaggtcctaaatggcattgtttga

SEQ ID NO: 93987 - DNA, 74 bp, Homo sapiens
agaggctggcggcagacgggccgggacaggcaggtcctaaatggcattgtttgaaggggccggctaattgcaca

SEQ ID NO: 93988 - DNA, 76 bp, Homo sapiens
cggcagacgggccgggacaggcaggtcctaaatggcattgtttgaaggggccggctaattgcacagagcagtctga

SEQ ID NO: 93989 - DNA, 76 bp, Homo sapiens
acgggccgggacaggcaggtcctaaatggcattgtttgaaggggccggctaattgcacagagcagtctgagcctga

SEQ ID NO: 93990 - DNA, 77 bp, Homo sapiens
acaggcaggtcctaaatggcattgtttgaaggggccggctaattgcacagagcagtctgagcctgagaccccagccc

SEQ ID NO: 93991 - DNA, 76 bp, Homo sapiens
cctaaatggcattgtttgaaggggccggctaattgcacagagcagtctgagcctgagaccccagccctggcctccc

SEQ ID NO: 93992 - DNA, 76 bp, Homo sapiens
attgtttgaaggggccggctaattgcacagagcagtctgagcctgagaccccagccctggcctccccactctgtcc

SEQ ID NO: 93993 - DNA, 81 bp, Homo sapiens
ggccggctaattgcacagagcagtctgagcctgagaccccagccctggcctccccactctgtcctgggtgctggcgtctga

SEQ ID NO: 93994 - DNA, 80 bp, Homo sapiens
aattgcacagagcagtctgagcctgagaccccagccctggcctccccactctgtcctgggtgctggcgtctgagccttcg

SEQ ID NO: 93995 - DNA, 79 bp, Homo sapiens
tctgagcctgagaccccagccctggcctccccactctgtcctgggtgctggcgtctgagccttcgggacagcctgtcca

SEQ ID NO: 93996 - DNA, 76 bp, Homo sapiens
agaccccagccctggcctccccactctgtcctgggtgctggcgtctgagccttcgggacagcctgtccacatggaa

SEQ ID NO: 93997 - DNA, 77 bp, Homo sapiens
cctggcctccccactctgtcctgggtgctggcgtctgagccttcgggacagcctgtccacatggaaccaagtcctga

SEQ ID NO: 93998 - DNA, 78 bp, Homo sapiens
ccactctgtcctgggtgctggcgtctgagccttcgggacagcctgtccacatggaaccaagtcctgagcctccaagct

SEQ ID NO: 93999 - DNA, 78 bp, Homo sapiens
tcctgggtgctggcgtctgagccttcgggacagcctgtccacatggaaccaagtcctgagcctccaagcttggtgagg

SEQ ID NO: 94000 - DNA, 75 bp, Homo sapiens
tgagccttcgggacagcctgtccacatggaaccaagtcctgagcctccaagcttggtgagggggaggctatgggg

SEQ ID NO: 94001 - DNA, 74 bp, Homo sapiens
acagcctgtccacatggaaccaagtcctgagcctccaagcttggtgagggggaggctatggggggcagcctggg

SEQ ID NO: 94002 - DNA, 75 bp, Homo sapiens
atgtccctgcttccctttcaccccacccattctggcttctcccacaggaaagcatgaagggagacaccaggcatc

SEQ ID NO: 94003 - DNA, 76 bp, Homo sapiens
ttccctttcaccccacccattctggcttctcccacaggaaagcatgaagggagacaccaggcatctcaatggagag

SEQ ID NO: 94004 - DNA, 77 bp, Homo sapiens
cccacccattctggcttctcccacaggaaagcatgaagggagacaccaggcatctcaatggagaggaggacgccggc

SEQ ID NO: 94005 - DNA, 76 bp, Homo sapiens
attctggcttctcccacaggaaagcatgaagggagacaccaggcatctcaatggagaggaggacgccggcgggagg

SEQ ID NO: 94006 - DNA, 77 bp, Homo sapiens
tcccacaggaaagcatgaagggagacaccaggcatctcaatggagaggaggacgccggcgggagggaagactcgatc

SEQ ID NO: 94007 - DNA, 76 bp, Homo sapiens
aaagcatgaagggagacaccaggcatctcaatggagaggaggacgccggcgggagggaagactcgatcctcgtcaa

SEQ ID NO: 94008 - DNA, 72 bp, Homo sapiens
aagggagacaccaggcatctcaatggagaggaggacgccggcgggagggaagactcgatcctcgtcaacggg

SEQ ID NO: 94009 - DNA, 75 bp, Homo sapiens
catctcaatggagaggaggacgccggcgggagggaagactcgatcctcgtcaacggggcctgcagcgaccagtcc

SEQ ID NO: 94010 - DNA, 73 bp, Homo sapiens
atggagaggaggacgccggcgggagggaagactcgatcctcgtcaacggggcctgcagcgaccagtcctccga

SEQ ID NO: 94011 - DNA, 71 bp, Homo sapiens
aggacgccggcgggagggaagactcgatcctcgtcaacggggcctgcagcgaccagtcctccgactcgccc

SEQ ID NO: 94012 - DNA, 72 bp, Homo sapiens
cgggagggaagactcgatcctcgtcaacggggcctgcagcgaccagtcctccgactcgcccccaatcctgga

SEQ ID NO: 94013 - DNA, 75 bp, Homo sapiens
agactcgatcctcgtcaacggggcctgcagcgaccagtcctccgactcgcccccaatcctggaggctatccgcac

SEQ ID NO: 94014 - DNA, 75 bp, Homo sapiens
tcgtcaacggggcctgcagcgaccagtcctccgactcgcccccaatcctggaggctatccgcaccccggagatca

SEQ ID NO: 94015 - DNA, 76 bp, Homo sapiens
gggcctgcagcgaccagtcctccgactcgcccccaatcctggaggctatccgcaccccggagatcagaggtggctg

SEQ ID NO: 94016 - DNA, 73 bp, Homo sapiens
accagtcctccgactcgcccccaatcctggaggctatccgcaccccggagatcagaggtggctgggcagtggg

SEQ ID NO: 94017 - DNA, 73 bp, Homo sapiens
tccgactcgcccccaatcctggaggctatccgcaccccggagatcagaggtggctgggcagtggggactgggg

SEQ ID NO: 94018 - DNA, 73 bp, Homo sapiens
tattagcaaggccgttccccagactggtgcctgcccccacaaaacagactcctggctgtttcctctacaggcc

SEQ ID NO: 94019 - DNA, 76 bp, Homo sapiens
ttccccagactggtgcctgcccccacaaaacagactcctggctgtttcctctacaggccgaagatcaagctcgcga

SEQ ID NO: 94020 - DNA, 76 bp, Homo sapiens
actggtgcctgcccccacaaaacagactcctggctgtttcctctacaggccgaagatcaagctcgcgactctccaa

SEQ ID NO: 94021 - DNA, 75 bp, Homo sapiens
cccacaaaacagactcctggctgtttcctctacaggccgaagatcaagctcgcgactctccaagagggaggtgtc

SEQ ID NO: 94022 - DNA, 75 bp, Homo sapiens
aaaacagactcctggctgtttcctctacaggccgaagatcaagctcgcgactctccaagagggaggtgtccagtc

SEQ ID NO: 94023 - DNA, 78 bp, Homo sapiens
ctgtttcctctacaggccgaagatcaagctcgcgactctccaagagggaggtgtccagtctgctaagctacacacagg

SEQ ID NO: 94024 - DNA, 80 bp, Homo sapiens
tcctctacaggccgaagatcaagctcgcgactctccaagagggaggtgtccagtctgctaagctacacacaggtatggtc

SEQ ID NO: 94025 - DNA, 79 bp, Homo sapiens
aagatcaagctcgcgactctccaagagggaggtgtccagtctgctaagctacacacaggtatggtctctgctctccctt

SEQ ID NO: 94026 - DNA, 78 bp, Homo sapiens
aagctcgcgactctccaagagggaggtgtccagtctgctaagctacacacaggtatggtctctgctctccctttttca

SEQ ID NO: 94027 - DNA, 76 bp, Homo sapiens
caagagggaggtgtccagtctgctaagctacacacaggtatggtctctgctctccctttttcagggctcagggact

SEQ ID NO: 94028 - DNA, 75 bp, Homo sapiens
aggtgtccagtctgctaagctacacacaggtatggtctctgctctccctttttcagggctcagggactttgtctt

SEQ ID NO: 94029 - DNA, 76 bp, Homo sapiens
agtctgctaagctacacacaggtatggtctctgctctccctttttcagggctcagggactttgtctttggctttca

SEQ ID NO: 94030 - DNA, 77 bp, Homo sapiens
tgataccctggggtcttcatcatgttcatcatgtttccttataaaggacttgacaggcgatggcgacggggaagatg

SEQ ID NO: 94031 - DNA, 74 bp, Homo sapiens
ccctggggtcttcatcatgttcatcatgtttccttataaaggacttgacaggcgatggcgacggggaagatggg

SEQ ID NO: 94032 - DNA, 79 bp, Homo sapiens
ttcatcatgttcatcatgtttccttataaaggacttgacaggcgatggcgacggggaagatggggatggctctgacacc

SEQ ID NO: 94033 - DNA, 77 bp, Homo sapiens
atcatgtttccttataaaggacttgacaggcgatggcgacggggaagatggggatggctctgacaccccagtcatgc

SEQ ID NO: 94034 - DNA, 77 bp, Homo sapiens
ttataaaggacttgacaggcgatggcgacggggaagatggggatggctctgacaccccagtcatgccaaagctcttc

SEQ ID NO: 94035 - DNA, 75 bp, Homo sapiens
acttgacaggcgatggcgacggggaagatggggatggctctgacaccccagtcatgccaaagctcttccgggaaa

SEQ ID NO: 94036 - DNA, 73 bp, Homo sapiens
atggcgacggggaagatggggatggctctgacaccccagtcatgccaaagctcttccgggaaaccaggactcg

SEQ ID NO: 94037 - DNA, 75 bp, Homo sapiens
gaagatggggatggctctgacaccccagtcatgccaaagctcttccgggaaaccaggactcgttcagaaagccca

SEQ ID NO: 94038 - DNA, 75 bp, Homo sapiens
atggctctgacaccccagtcatgccaaagctcttccgggaaaccaggactcgttcagaaagcccagctgtaagta

SEQ ID NO: 94039 - DNA, 76 bp, Homo sapiens
tctgacaccccagtcatgccaaagctcttccgggaaaccaggactcgttcagaaagcccagctgtaagtagccaca

SEQ ID NO: 94040 - DNA, 73 bp, Homo sapiens
atgccaaagctcttccgggaaaccaggactcgttcagaaagcccagctgtaagtagccacacctcgagccaaa

SEQ ID NO: 94041 - DNA, 72 bp, Homo sapiens
aagctcttccgggaaaccaggactcgttcagaaagcccagctgtaagtagccacacctcgagccaaagcact

SEQ ID NO: 94042 - DNA, 73 bp, Homo sapiens
aggcctccagtcacctaaggcccagtgagtgtcctctcttgcttctaggtccgaactcgaaataacaacagtg

SEQ ID NO: 94043 - DNA, 74 bp, Homo sapiens
agtcacctaaggcccagtgagtgtcctctcttgcttctaggtccgaactcgaaataacaacagtgtctccagcc

SEQ ID NO: 94044 - DNA, 75 bp, Homo sapiens
cccagtgagtgtcctctcttgcttctaggtccgaactcgaaataacaacagtgtctccagccgggagaggcacag

SEQ ID NO: 94045 - DNA, 74 bp, Homo sapiens
agtgtcctctcttgcttctaggtccgaactcgaaataacaacagtgtctccagccgggagaggcacaggccttc

SEQ ID NO: 94046 - DNA, 72 bp, Homo sapiens
ttgcttctaggtccgaactcgaaataacaacagtgtctccagccgggagaggcacaggccttccccacgttc

SEQ ID NO: 94047 - DNA, 70 bp, Homo sapiens
ggtccgaactcgaaataacaacagtgtctccagccgggagaggcacaggccttccccacgttccacccga

SEQ ID NO: 94048 - DNA, 70 bp, Homo sapiens
aaataacaacagtgtctccagccgggagaggcacaggccttccccacgttccacccgaggccggcagggc

SEQ ID NO: 94049 - DNA, 72 bp, Homo sapiens
agtgtctccagccgggagaggcacaggccttccccacgttccacccgaggccggcagggccgcaaccatgtg

SEQ ID NO: 94050 - DNA, 71 bp, Homo sapiens
agccgggagaggcacaggccttccccacgttccacccgaggccggcagggccgcaaccatgtggacgagtc

SEQ ID NO: 94051 - DNA, 68 bp, Homo sapiens
caggccttccccacgttccacccgaggccggcagggccgcaaccatgtggacgagtcccccgtggagt

SEQ ID NO: 94052 - DNA, 68 bp, Homo sapiens
cccacgttccacccgaggccggcagggccgcaaccatgtggacgagtcccccgtggagttcccggcta

SEQ ID NO: 94053 - DNA, 67 bp, Homo sapiens
acccgaggccggcagggccgcaaccatgtggacgagtcccccgtggagttcccggctaccagggttg

SEQ ID NO: 94054 - DNA, 67 bp, Homo sapiens
ggccggcagggccgcaaccatgtggacgagtcccccgtggagttcccggctaccagggttggttccc

SEQ ID NO: 94055 - DNA, 67 bp, Homo sapiens
aaccatgtggacgagtcccccgtggagttcccggctaccagggttggttccccagatgcccagaccc

SEQ ID NO: 94056 - DNA, 68 bp, Homo sapiens
tgtggacgagtcccccgtggagttcccggctaccagggttggttccccagatgcccagacccctgccc

SEQ ID NO: 94057 - DNA, 78 bp, Homo sapiens
accgacatcctttgctctggcccaaactatgtgtccttctgtccacagtccctgagacggcgggcaacagcatcggca

SEQ ID NO: 94058 - DNA, 79 bp, Homo sapiens
tttgctctggcccaaactatgtgtccttctgtccacagtccctgagacggcgggcaacagcatcggcaggaacgccatg

SEQ ID NO: 94059 - DNA, 76 bp, Homo sapiens
ccaaactatgtgtccttctgtccacagtccctgagacggcgggcaacagcatcggcaggaacgccatggccgtccc

SEQ ID NO: 94060 - DNA, 77 bp, Homo sapiens
atgtgtccttctgtccacagtccctgagacggcgggcaacagcatcggcaggaacgccatggccgtcccctcccagc

SEQ ID NO: 94061 - DNA, 76 bp, Homo sapiens
tgtccacagtccctgagacggcgggcaacagcatcggcaggaacgccatggccgtcccctcccagctcttacctta

SEQ ID NO: 94062 - DNA, 77 bp, Homo sapiens
tgagacggcgggcaacagcatcggcaggaacgccatggccgtcccctcccagctcttaccttaccatcgacctcaca

SEQ ID NO: 94063 - DNA, 78 bp, Homo sapiens
ggcaacagcatcggcaggaacgccatggccgtcccctcccagctcttaccttaccatcgacctcacagacgacacaga

SEQ ID NO: 94064 - DNA, 76 bp, Homo sapiens
atcggcaggaacgccatggccgtcccctcccagctcttaccttaccatcgacctcacagacgacacagaggacaca

SEQ ID NO: 94065 - DNA, 75 bp, Homo sapiens
aggaacgccatggccgtcccctcccagctcttaccttaccatcgacctcacagacgacacagaggacacacatgg

SEQ ID NO: 94066 - DNA, 78 bp, Homo sapiens
cgtcccctcccagctcttaccttaccatcgacctcacagacgacacagaggacacacatgggacgccccagagcagca

SEQ ID NO: 94067 - DNA, 78 bp, Homo sapiens
ctcccagctcttaccttaccatcgacctcacagacgacacagaggacacacatgggacgccccagagcagcagtaccc

SEQ ID NO: 94068 - DNA, 76 bp, Homo sapiens
ttaccttaccatcgacctcacagacgacacagaggacacacatgggacgccccagagcagcagtaccccctacgcc

SEQ ID NO: 94069 - DNA, 77 bp, Homo sapiens
atcgacctcacagacgacacagaggacacacatgggacgccccagagcagcagtaccccctacgcccgcctagccca

SEQ ID NO: 94070 - DNA, 78 bp, Homo sapiens
agacgacacagaggacacacatgggacgccccagagcagcagtaccccctacgcccgcctagcccaggacagccagca

SEQ ID NO: 94071 - DNA, 74 bp, Homo sapiens
agaggacacacatgggacgccccagagcagcagtaccccctacgcccgcctagcccaggacagccagcaggggg

SEQ ID NO: 94072 - DNA, 74 bp, Homo sapiens
atgggacgccccagagcagcagtaccccctacgcccgcctagcccaggacagccagcaggggggcatggagtcc

SEQ ID NO: 94073 - DNA, 74 bp, Homo sapiens
agagcagcagtaccccctacgcccgcctagcccaggacagccagcaggggggcatggagtccccgcaggtggag

SEQ ID NO: 94074 - DNA, 73 bp, Homo sapiens
agtaccccctacgcccgcctagcccaggacagccagcaggggggcatggagtccccgcaggtggaggcagaca

SEQ ID NO: 94075 - DNA, 79 bp, Homo sapiens
ccgcctagcccaggacagccagcaggggggcatggagtccccgcaggtggaggcagacagtggagatggagacagttca

SEQ ID NO: 94076 - DNA, 81 bp, Homo sapiens
caggacagccagcaggggggcatggagtccccgcaggtggaggcagacagtggagatggagacagttcagagtatcaggta

SEQ ID NO: 94077 - DNA, 80 bp, Homo sapiens
agcaggggggcatggagtccccgcaggtggaggcagacagtggagatggagacagttcagagtatcaggtatggccgaga

SEQ ID NO: 94078 - DNA, 81 bp, Homo sapiens
catggagtccccgcaggtggaggcagacagtggagatggagacagttcagagtatcaggtatggccgagaggggctcctgc

SEQ ID NO: 94079 - DNA, 71 bp, Homo sapiens
aggatggcctctcctcactgggatttcttcatgtgggttttcttccaggatgggaaggagtttggaatagg

SEQ ID NO: 94080 - DNA, 70 bp, Homo sapiens
tcctcactgggatttcttcatgtgggttttcttccaggatgggaaggagtttggaataggggacctcgtg

SEQ ID NO: 94081 - DNA, 68 bp, Homo sapiens
ctgggatttcttcatgtgggttttcttccaggatgggaaggagtttggaataggggacctcgtgtggg

SEQ ID NO: 94082 - DNA, 69 bp, Homo sapiens
ttcatgtgggttttcttccaggatgggaaggagtttggaataggggacctcgtgtggggaaagatcaag

SEQ ID NO: 94083 - DNA, 68 bp, Homo sapiens
ttttcttccaggatgggaaggagtttggaataggggacctcgtgtggggaaagatcaagggcttctcc

SEQ ID NO: 94084 - DNA, 69 bp, Homo sapiens
ggaaggagtttggaataggggacctcgtgtggggaaagatcaagggcttctcctggtggcccgccatgg

SEQ ID NO: 94085 - DNA, 71 bp, Homo sapiens
tttggaataggggacctcgtgtggggaaagatcaagggcttctcctggtggcccgccatggtggtgtcttg

SEQ ID NO: 94086 - DNA, 73 bp, Homo sapiens
gacctcgtgtggggaaagatcaagggcttctcctggtggcccgccatggtggtgtcttggaaggccacctcca

SEQ ID NO: 94087 - DNA, 74 bp, Homo sapiens
tgtggggaaagatcaagggcttctcctggtggcccgccatggtggtgtcttggaaggccacctccaagcgacag

SEQ ID NO: 94088 - DNA, 76 bp, Homo sapiens
aagatcaagggcttctcctggtggcccgccatggtggtgtcttggaaggccacctccaagcgacaggctatgtctg

SEQ ID NO: 94089 - DNA, 78 bp, Homo sapiens
ttctcctggtggcccgccatggtggtgtcttggaaggccacctccaagcgacaggctatgtctggcatgcggtgggtc

SEQ ID NO: 94090 - DNA, 76 bp, Homo sapiens
cccgccatggtggtgtcttggaaggccacctccaagcgacaggctatgtctggcatgcggtgggtccagtggtttg

SEQ ID NO: 94091 - DNA, 78 bp, Homo sapiens
tggtgtcttggaaggccacctccaagcgacaggctatgtctggcatgcggtgggtccagtggtttggcgatggcaagt

SEQ ID NO: 94092 - DNA, 78 bp, Homo sapiens
ttggaaggccacctccaagcgacaggctatgtctggcatgcggtgggtccagtggtttggcgatggcaagttctccga

SEQ ID NO: 94093 - DNA, 77 bp, Homo sapiens
acctccaagcgacaggctatgtctggcatgcggtgggtccagtggtttggcgatggcaagttctccgaggtgagtcc

SEQ ID NO: 94094 - DNA, 74 bp, Homo sapiens
acaggctatgtctggcatgcggtgggtccagtggtttggcgatggcaagttctccgaggtgagtccggggaagg

SEQ ID NO: 94095 - DNA, 73 bp, Homo sapiens
tgtctggcatgcggtgggtccagtggtttggcgatggcaagttctccgaggtgagtccggggaagggcaaggg

SEQ ID NO: 94096 - DNA, 70 bp, Homo sapiens
ggtgggtccagtggtttggcgatggcaagttctccgaggtgagtccggggaagggcaaggggttctgcag

SEQ ID NO: 94097 - DNA, 77 bp, Homo sapiens
acctgggacacacctgtaggtggatgttgatgatgtctttctcttttaggtctctgcagacaaactggtggcactgg

SEQ ID NO: 94098 - DNA, 79 bp, Homo sapiens
acacctgtaggtggatgttgatgatgtctttctcttttaggtctctgcagacaaactggtggcactggggctgttcagc

SEQ ID NO: 94099 - DNA, 78 bp, Homo sapiens
atgttgatgatgtctttctcttttaggtctctgcagacaaactggtggcactggggctgttcagccagcactttaatt

SEQ ID NO: 94100 - DNA, 78 bp, Homo sapiens
atgatgtctttctcttttaggtctctgcagacaaactggtggcactggggctgttcagccagcactttaatttggcca

SEQ ID NO: 94101 - DNA, 76 bp, Homo sapiens
tcttttaggtctctgcagacaaactggtggcactggggctgttcagccagcactttaatttggccaccttcaataa

SEQ ID NO: 94102 - DNA, 79 bp, Homo sapiens
tctgcagacaaactggtggcactggggctgttcagccagcactttaatttggccaccttcaataagctcgtctcctatc

SEQ ID NO: 94103 - DNA, 74 bp, Homo sapiens
aactggtggcactggggctgttcagccagcactttaatttggccaccttcaataagctcgtctcctatcgaaaa

SEQ ID NO: 94104 - DNA, 75 bp, Homo sapiens
actggggctgttcagccagcactttaatttggccaccttcaataagctcgtctcctatcgaaaagccatgtacca

SEQ ID NO: 94105 - DNA, 78 bp, Homo sapiens
tcagccagcactttaatttggccaccttcaataagctcgtctcctatcgaaaagccatgtaccatgctctggaggtaa

SEQ ID NO: 94106 - DNA, 74 bp, Homo sapiens
actttaatttggccaccttcaataagctcgtctcctatcgaaaagccatgtaccatgctctggaggtaacatgg

SEQ ID NO: 94107 - DNA, 77 bp, Homo sapiens
tttggccaccttcaataagctcgtctcctatcgaaaagccatgtaccatgctctggaggtaacatgggatgagggaa

SEQ ID NO: 94108 - DNA, 78 bp, Homo sapiens
cttcaataagctcgtctcctatcgaaaagccatgtaccatgctctggaggtaacatgggatgagggaatgagggctaa

SEQ ID NO: 94109 - DNA, 76 bp, Homo sapiens
cacctcctccccacccccccattcatcacagactctgcctttgcagaaagctagggtgcgagctggcaagaccttc

SEQ ID NO: 94110 - DNA, 77 bp, Homo sapiens
cccacccccccattcatcacagactctgcctttgcagaaagctagggtgcgagctggcaagaccttccccagcagcc

SEQ ID NO: 94111 - DNA, 82 bp, Homo sapiens
attcatcacagactctgcctttgcagaaagctagggtgcgagctggcaagaccttccccagcagccctggagactcattgga

SEQ ID NO: 94112 - DNA, 79 bp, Homo sapiens
agactctgcctttgcagaaagctagggtgcgagctggcaagaccttccccagcagccctggagactcattggaggacca

SEQ ID NO: 94113 - DNA, 79 bp, Homo sapiens
cctttgcagaaagctagggtgcgagctggcaagaccttccccagcagccctggagactcattggaggaccagctgaagc

SEQ ID NO: 94114 - DNA, 78 bp, Homo sapiens
aaagctagggtgcgagctggcaagaccttccccagcagccctggagactcattggaggaccagctgaagcccatgttg

SEQ ID NO: 94115 - DNA, 77 bp, Homo sapiens
agctggcaagaccttccccagcagccctggagactcattggaggaccagctgaagcccatgttggagtgggcccacg

SEQ ID NO: 94116 - DNA, 73 bp, Homo sapiens
aagaccttccccagcagccctggagactcattggaggaccagctgaagcccatgttggagtgggcccacgggg

SEQ ID NO: 94117 - DNA, 76 bp, Homo sapiens
agcagccctggagactcattggaggaccagctgaagcccatgttggagtgggcccacgggggcttcaagcccactg

SEQ ID NO: 94118 - DNA, 74 bp, Homo sapiens
agactcattggaggaccagctgaagcccatgttggagtgggcccacgggggcttcaagcccactgggatcgagg

SEQ ID NO: 94119 - DNA, 74 bp, Homo sapiens
tggaggaccagctgaagcccatgttggagtgggcccacgggggcttcaagcccactgggatcgagggcctcaaa

SEQ ID NO: 94120 - DNA, 72 bp, Homo sapiens
tgaagcccatgttggagtgggcccacgggggcttcaagcccactgggatcgagggcctcaaacccaacaaca

SEQ ID NO: 94121 - DNA, 70 bp, Homo sapiens
atgttggagtgggcccacgggggcttcaagcccactgggatcgagggcctcaaacccaacaacacgcaac

SEQ ID NO: 94122 - DNA, 71 bp, Homo sapiens
gcccacgggggcttcaagcccactgggatcgagggcctcaaacccaacaacacgcaaccaggtgggaatga

SEQ ID NO: 94123 - DNA, 72 bp, Homo sapiens
gggcttcaagcccactgggatcgagggcctcaaacccaacaacacgcaaccaggtgggaatgagtccccatg

SEQ ID NO: 94124 - DNA, 73 bp, Homo sapiens
aagcccactgggatcgagggcctcaaacccaacaacacgcaaccaggtgggaatgagtccccatggcagcacc

SEQ ID NO: 94125 - DNA, 68 bp, Homo sapiens
gttttgttttcccctcaaaagtggttaataagtcgaaggtgcgtcgtgcaggcagtaggaaattagaa

SEQ ID NO: 94126 - DNA, 70 bp, Homo sapiens
ttttcccctcaaaagtggttaataagtcgaaggtgcgtcgtgcaggcagtaggaaattagaatcaaggaa

SEQ ID NO: 94127 - DNA, 69 bp, Homo sapiens
aaagtggttaataagtcgaaggtgcgtcgtgcaggcagtaggaaattagaatcaaggaaatacggtatt

SEQ ID NO: 94128 - DNA, 72 bp, Homo sapiens
taataagtcgaaggtgcgtcgtgcaggcagtaggaaattagaatcaaggaaatacggtatttccttcctgtc

SEQ ID NO: 94129 - DNA, 71 bp, Homo sapiens
aaggtgcgtcgtgcaggcagtaggaaattagaatcaaggaaatacggtatttccttcctgtcttttgactg

SEQ ID NO: 94130 - DNA, 70 bp, Homo sapiens
ggcagtaggaaattagaatcaaggaaatacggtatttccttcctgtcttttgactgtgccctgttttcta

SEQ ID NO: 94131 - DNA, 70 bp, Homo sapiens
aaattagaatcaaggaaatacggtatttccttcctgtcttttgactgtgccctgttttctatgcactttc

SEQ ID NO: 94132 - DNA, 80 bp, Homo sapiens
gggccatatacattcagtgtggaccccctgtcatgccccaattgcagctggtacccaggcatagcatggtcttgtcctgg

SEQ ID NO: 94133 - DNA, 81 bp, Homo sapiens
tatacattcagtgtggaccccctgtcatgccccaattgcagctggtacccaggcatagcatggtcttgtcctgggcccgca

SEQ ID NO: 94134 - DNA, 81 bp, Homo sapiens
tgtggaccccctgtcatgccccaattgcagctggtacccaggcatagcatggtcttgtcctgggcccgcattctctctgga

SEQ ID NO: 94135 - DNA, 80 bp, Homo sapiens
tcatgccccaattgcagctggtacccaggcatagcatggtcttgtcctgggcccgcattctctctggaccctcctaccaa

SEQ ID NO: 94136 - DNA, 77 bp, Homo sapiens
aattgcagctggtacccaggcatagcatggtcttgtcctgggcccgcattctctctggaccctcctaccaagccacg

SEQ ID NO: 94137 - DNA, 78 bp, Homo sapiens
tacccaggcatagcatggtcttgtcctgggcccgcattctctctggaccctcctaccaagccacggctgcagtctaat

SEQ ID NO: 94138 - DNA, 75 bp, Homo sapiens
atagcatggtcttgtcctgggcccgcattctctctggaccctcctaccaagccacggctgcagtctaattacctt

SEQ ID NO: 94139 - DNA, 76 bp, Homo sapiens
tcttgtcctgggcccgcattctctctggaccctcctaccaagccacggctgcagtctaattacctttcacagagaa

SEQ ID NO: 94140 - DNA, 75 bp, Homo sapiens
cccgcattctctctggaccctcctaccaagccacggctgcagtctaattacctttcacagagaacaagactcgaa

SEQ ID NO: 94141 - DNA, 76 bp, Homo sapiens
attctctctggaccctcctaccaagccacggctgcagtctaattacctttcacagagaacaagactcgaagacgca

SEQ ID NO: 94142 - DNA, 76 bp, Homo sapiens
accctcctaccaagccacggctgcagtctaattacctttcacagagaacaagactcgaagacgcacagctgacgac

SEQ ID NO: 94143 - DNA, 81 bp, Homo sapiens
agccacggctgcagtctaattacctttcacagagaacaagactcgaagacgcacagctgacgactcagccacctctgacta

SEQ ID NO: 94144 - DNA, 79 bp, Homo sapiens
agtctaattacctttcacagagaacaagactcgaagacgcacagctgacgactcagccacctctgactactgccccgca

SEQ ID NO: 94145 - DNA, 78 bp, Homo sapiens
attacctttcacagagaacaagactcgaagacgcacagctgacgactcagccacctctgactactgccccgcacccaa

SEQ ID NO: 94146 - DNA, 79 bp, Homo sapiens
agaacaagactcgaagacgcacagctgacgactcagccacctctgactactgccccgcacccaagcgcctcaagacaaa

SEQ ID NO: 94147 - DNA, 80 bp, Homo sapiens
actcgaagacgcacagctgacgactcagccacctctgactactgccccgcacccaagcgcctcaagacaaattgctataa

SEQ ID NO: 94148 - DNA, 78 bp, Homo sapiens
acagctgacgactcagccacctctgactactgccccgcacccaagcgcctcaagacaaattgctataacaacggcaaa

SEQ ID NO: 94149 - DNA, 75 bp, Homo sapiens
actcagccacctctgactactgccccgcacccaagcgcctcaagacaaattgctataacaacggcaaagaccgag

SEQ ID NO: 94150 - DNA, 75 bp, Homo sapiens
actactgccccgcacccaagcgcctcaagacaaattgctataacaacggcaaagaccgaggggatgaagatcaga

SEQ ID NO: 94151 - DNA, 76 bp, Homo sapiens
ccaagcgcctcaagacaaattgctataacaacggcaaagaccgaggggatgaagatcagagccgaggtgattgttg

SEQ ID NO: 94152 - DNA, 74 bp, Homo sapiens
aaattgctataacaacggcaaagaccgaggggatgaagatcagagccgaggtgattgttgggtacctgggatca

SEQ ID NO: 94153 - DNA, 76 bp, Homo sapiens
taacaacggcaaagaccgaggggatgaagatcagagccgaggtgattgttgggtacctgggatcatgggacagatg

SEQ ID NO: 94154 - DNA, 80 bp, Homo sapiens
aggacgctgcagatcaggaattgatctgtacccggctccctgacctcatctcatgccttcttcttttctcaatagaacaa

SEQ ID NO: 94155 - DNA, 79 bp, Homo sapiens
agatcaggaattgatctgtacccggctccctgacctcatctcatgccttcttcttttctcaatagaacaaatggcttca

SEQ ID NO: 94156 - DNA, 79 bp, Homo sapiens
aattgatctgtacccggctccctgacctcatctcatgccttcttcttttctcaatagaacaaatggcttcagatgttgc

SEQ ID NO: 94157 - DNA, 78 bp, Homo sapiens
tacccggctccctgacctcatctcatgccttcttcttttctcaatagaacaaatggcttcagatgttgccaacaacaa

SEQ ID NO: 94158 - DNA, 81 bp, Homo sapiens
cctgacctcatctcatgccttcttcttttctcaatagaacaaatggcttcagatgttgccaacaacaagagcagcctggaa

SEQ ID NO: 94159 - DNA, 77 bp, Homo sapiens
tcatgccttcttcttttctcaatagaacaaatggcttcagatgttgccaacaacaagagcagcctggaaggtaacgt

SEQ ID NO: 94160 - DNA, 76 bp, Homo sapiens
ttcttcttttctcaatagaacaaatggcttcagatgttgccaacaacaagagcagcctggaaggtaacgttctctc

SEQ ID NO: 94161 - DNA, 76 bp, Homo sapiens
aatagaacaaatggcttcagatgttgccaacaacaagagcagcctggaaggtaacgttctctccctcccagtcatc

SEQ ID NO: 94162 - DNA, 75 bp, Homo sapiens
aaatggcttcagatgttgccaacaacaagagcagcctggaaggtaacgttctctccctcccagtcatccccctca

SEQ ID NO: 94163 - DNA, 74 bp, Homo sapiens
atgttgccaacaacaagagcagcctggaaggtaacgttctctccctcccagtcatccccctcacaccctggcta

SEQ ID NO: 94164 - DNA, 72 bp, Homo sapiens
ccaacaacaagagcagcctggaaggtaacgttctctccctcccagtcatccccctcacaccctggctagggc

SEQ ID NO: 94165 - DNA, 71 bp, Homo sapiens
agcctggaaggtaacgttctctccctcccagtcatccccctcacaccctggctagggctctaggcctgcct

SEQ ID NO: 94166 - DNA, 75 bp, Homo sapiens
tttagcagctggtgtcagggcctcaactgccaaaagccacaaccctgtttttcttacagatggctgtttgtcttg

SEQ ID NO: 94167 - DNA, 74 bp, Homo sapiens
tgtcagggcctcaactgccaaaagccacaaccctgtttttcttacagatggctgtttgtcttgtggcaggaaaa

SEQ ID NO: 94168 - DNA, 70 bp, Homo sapiens
cctcaactgccaaaagccacaaccctgtttttcttacagatggctgtttgtcttgtggcaggaaaaaccc

SEQ ID NO: 94169 - DNA, 67 bp, Homo sapiens
aaaagccacaaccctgtttttcttacagatggctgtttgtcttgtggcaggaaaaaccccgtgtcct

SEQ ID NO: 94170 - DNA, 67 bp, Homo sapiens
aaccctgtttttcttacagatggctgtttgtcttgtggcaggaaaaaccccgtgtccttccaccctc

SEQ ID NO: 94171 - DNA, 69 bp, Homo sapiens
ttttcttacagatggctgtttgtcttgtggcaggaaaaaccccgtgtccttccaccctctctttgaggg

SEQ ID NO: 94172 - DNA, 70 bp, Homo sapiens
ctgtttgtcttgtggcaggaaaaaccccgtgtccttccaccctctctttgagggggggctctgtcagaca

SEQ ID NO: 94173 - DNA, 70 bp, Homo sapiens
tgtggcaggaaaaaccccgtgtccttccaccctctctttgagggggggctctgtcagacatgccgggtaa

SEQ ID NO: 94174 - DNA, 67 bp, Homo sapiens
aaaaaccccgtgtccttccaccctctctttgagggggggctctgtcagacatgccgggtaagtcctc

SEQ ID NO: 94175 - DNA, 73 bp, Homo sapiens
tgtccttccaccctctctttgagggggggctctgtcagacatgccgggtaagtcctcctactactgccctgga

SEQ ID NO: 94176 - DNA, 70 bp, Homo sapiens
accctctctttgagggggggctctgtcagacatgccgggtaagtcctcctactactgccctggaccttcc

SEQ ID NO: 94177 - DNA, 69 bp, Homo sapiens
ctttgagggggggctctgtcagacatgccgggtaagtcctcctactactgccctggaccttcctcccct

SEQ ID NO: 94178 - DNA, 69 bp, Homo sapiens
agacatgccgggtaagtcctcctactactgccctggaccttcctccccttgcctcctctaactcccctc

SEQ ID NO: 94179 - DNA, 69 bp, Homo sapiens
taagtcctcctactactgccctggaccttcctccccttgcctcctctaactcccctctccttcccaaca

SEQ ID NO: 94180 - DNA, 73 bp, Homo sapiens
ctggaccttcctccccttgcctcctctaactcccctctccttcccaacagcacctgtgtggagactcagtgaa

SEQ ID NO: 94181 - DNA, 76 bp, Homo sapiens
cccttgcctcctctaactcccctctccttcccaacagcacctgtgtggagactcagtgaagcccactcatcccagc

SEQ ID NO: 94182 - DNA, 80 bp, Homo sapiens
tcctctaactcccctctccttcccaacagcacctgtgtggagactcagtgaagcccactcatcccagctgccttgcactc

SEQ ID NO: 94183 - DNA, 80 bp, Homo sapiens
cccctctccttcccaacagcacctgtgtggagactcagtgaagcccactcatcccagctgccttgcactctgcctctggg

SEQ ID NO: 94184 - DNA, 82 bp, Homo sapiens
cttcccaacagcacctgtgtggagactcagtgaagcccactcatcccagctgccttgcactctgcctctggggcaggatggg

SEQ ID NO: 94185 - DNA, 84 bp, Homo sapiens
acctgtgtggagactcagtgaagcccactcatcccagctgccttgcactctgcctctggggcaggatgggggacagctgtcaca

SEQ ID NO: 94186 - DNA, 84 bp, Homo sapiens
agactcagtgaagcccactcatcccagctgccttgcactctgcctctggggcaggatgggggacagctgtcacagaggccaatg

SEQ ID NO: 94187 - DNA, 85 bp, Homo sapiens
cccactcatcccagctgccttgcactctgcctctggggcaggatgggggacagctgtcacagaggccaatggcacgcaggtcaca

SEQ ID NO: 94188 - DNA, 84 bp, Homo sapiens
atcccagctgccttgcactctgcctctggggcaggatgggggacagctgtcacagaggccaatggcacgcaggtcacagccagt

SEQ ID NO: 94189 - DNA, 82 bp, Homo sapiens
tgcactctgcctctggggcaggatgggggacagctgtcacagaggccaatggcacgcaggtcacagccagttgtccttttaa

SEQ ID NO: 94190 - DNA, 78 bp, Homo sapiens
ctctggggcaggatgggggacagctgtcacagaggccaatggcacgcaggtcacagccagttgtccttttaaaggaca

SEQ ID NO: 94191 - DNA, 77 bp, Homo sapiens
aggatgggggacagctgtcacagaggccaatggcacgcaggtcacagccagttgtccttttaaaggacaccaagcca

SEQ ID NO: 94192 - DNA, 79 bp, Homo sapiens
acagctgtcacagaggccaatggcacgcaggtcacagccagttgtccttttaaaggacaccaagccaccagcagtgtgt

SEQ ID NO: 94193 - DNA, 79 bp, Homo sapiens
aatggcacgcaggtcacagccagttgtccttttaaaggacaccaagccaccagcagtgtgttctgcagctgtatcctag

SEQ ID NO: 94194 - DNA, 77 bp, Homo sapiens
aggtcacagccagttgtccttttaaaggacaccaagccaccagcagtgtgttctgcagctgtatcctagggcctcca

SEQ ID NO: 94195 - DNA, 76 bp, Homo sapiens
agttgtccttttaaaggacaccaagccaccagcagtgtgttctgcagctgtatcctagggcctccaccagcaagcc

SEQ ID NO: 94196 - DNA, 77 bp, Homo sapiens
ttttaaaggacaccaagccaccagcagtgtgttctgcagctgtatcctagggcctccaccagcaagccggcagggcc

SEQ ID NO: 94197 - DNA, 80 bp, Homo sapiens
acaccaagccaccagcagtgtgttctgcagctgtatcctagggcctccaccagcaagccggcagggcctgcccttctctg

SEQ ID NO: 94198 - DNA, 80 bp, Homo sapiens
agcagtgtgttctgcagctgtatcctagggcctccaccagcaagccggcagggcctgcccttctctggtctccgatttca

SEQ ID NO: 94199 - DNA, 78 bp, Homo sapiens
ttctgcagctgtatcctagggcctccaccagcaagccggcagggcctgcccttctctggtctccgatttcactggtgt

SEQ ID NO: 94200 - DNA, 76 bp, Homo sapiens
tgtatcctagggcctccaccagcaagccggcagggcctgcccttctctggtctccgatttcactggtgtttctctc

SEQ ID NO: 94201 - DNA, 88 bp, Homo sapiens
ctctctggctgccaggatcgcttccttgagctgttttacatgtatgatgacgatggctatcagtcttactgcactgtgtgctgcgagg

SEQ ID NO: 94202 - DNA, 87 bp, Homo sapiens
ctgccaggatcgcttccttgagctgttttacatgtatgatgacgatggctatcagtcttactgcactgtgtgctgcgagggccgaga

SEQ ID NO: 94203 - DNA, 89 bp, Homo sapiens
cttccttgagctgttttacatgtatgatgacgatggctatcagtcttactgcactgtgtgctgcgagggccgagagctgctgctttgca

SEQ ID NO: 94204 - DNA, 90 bp, Homo sapiens
agctgttttacatgtatgatgacgatggctatcagtcttactgcactgtgtgctgcgagggccgagagctgctgctttgcagcaacacga

SEQ ID NO: 94205 - DNA, 93 bp, Homo sapiens
atgtatgatgacgatggctatcagtcttactgcactgtgtgctgcgagggccgagagctgctgctttgcagcaacacgagctgctgccggtga

SEQ ID NO: 94206 - DNA, 90 bp, Homo sapiens
acgatggctatcagtcttactgcactgtgtgctgcgagggccgagagctgctgctttgcagcaacacgagctgctgccggtgagcactgg

SEQ ID NO: 94207 - DNA, 89 bp, Homo sapiens
atcagtcttactgcactgtgtgctgcgagggccgagagctgctgctttgcagcaacacgagctgctgccggtgagcactgggccctgtg

SEQ ID NO: 94208 - DNA, 86 bp, Homo sapiens
actgtgtgctgcgagggccgagagctgctgctttgcagcaacacgagctgctgccggtgagcactgggccctgtggggtggatgtg

SEQ ID NO: 94209 - DNA, 85 bp, Homo sapiens
tgctgcgagggccgagagctgctgctttgcagcaacacgagctgctgccggtgagcactgggccctgtggggtggatgtgggtgg

SEQ ID NO: 94210 - DNA, 76 bp, Homo sapiens
aggagaccagctctgacaaaggcatcccttctccctgccactgggtccaggtgtttctgtgtggagtgcctggagg

SEQ ID NO: 94211 - DNA, 79 bp, Homo sapiens
tctgacaaaggcatcccttctccctgccactgggtccaggtgtttctgtgtggagtgcctggaggtgctggtgggcaca

SEQ ID NO: 94212 - DNA, 79 bp, Homo sapiens
aggcatcccttctccctgccactgggtccaggtgtttctgtgtggagtgcctggaggtgctggtgggcacaggcacagc

SEQ ID NO: 94213 - DNA, 79 bp, Homo sapiens
ctgccactgggtccaggtgtttctgtgtggagtgcctggaggtgctggtgggcacaggcacagcggccgaggccaagct

SEQ ID NO: 94214 - DNA, 78 bp, Homo sapiens
actgggtccaggtgtttctgtgtggagtgcctggaggtgctggtgggcacaggcacagcggccgaggccaagcttcag

SEQ ID NO: 94215 - DNA, 81 bp, Homo sapiens
tttctgtgtggagtgcctggaggtgctggtgggcacaggcacagcggccgaggccaagcttcaggagccctggagctgtta

SEQ ID NO: 94216 - DNA, 81 bp, Homo sapiens
agtgcctggaggtgctggtgggcacaggcacagcggccgaggccaagcttcaggagccctggagctgttacatgtgtctcc

SEQ ID NO: 94217 - DNA, 84 bp, Homo sapiens
ggtgctggtgggcacaggcacagcggccgaggccaagcttcaggagccctggagctgttacatgtgtctcccgcagcgctgtca

SEQ ID NO: 94218 - DNA, 85 bp, Homo sapiens
ggcacaggcacagcggccgaggccaagcttcaggagccctggagctgttacatgtgtctcccgcagcgctgtcatggcgtcctgc

SEQ ID NO: 94219 - DNA, 83 bp, Homo sapiens
aggcacagcggccgaggccaagcttcaggagccctggagctgttacatgtgtctcccgcagcgctgtcatggcgtcctgcggc

SEQ ID NO: 94220 - DNA, 80 bp, Homo sapiens
aggccaagcttcaggagccctggagctgttacatgtgtctcccgcagcgctgtcatggcgtcctgcggcgccggaaggac

SEQ ID NO: 94221 - DNA, 81 bp, Homo sapiens
ttcaggagccctggagctgttacatgtgtctcccgcagcgctgtcatggcgtcctgcggcgccggaaggactggaacgtgc

SEQ ID NO: 94222 - DNA, 82 bp, Homo sapiens
tggagctgttacatgtgtctcccgcagcgctgtcatggcgtcctgcggcgccggaaggactggaacgtgcgcctgcaggcct

SEQ ID NO: 94223 - DNA, 82 bp, Homo sapiens
tgttacatgtgtctcccgcagcgctgtcatggcgtcctgcggcgccggaaggactggaacgtgcgcctgcaggccttcttca

SEQ ID NO: 94224 - DNA, 81 bp, Homo sapiens
gtctcccgcagcgctgtcatggcgtcctgcggcgccggaaggactggaacgtgcgcctgcaggccttcttcaccagtgaca

SEQ ID NO: 94225 - DNA, 78 bp, Homo sapiens
tgtcatggcgtcctgcggcgccggaaggactggaacgtgcgcctgcaggccttcttcaccagtgacacggggcttgaa

SEQ ID NO: 94226 - DNA, 76 bp, Homo sapiens
gtcctgcggcgccggaaggactggaacgtgcgcctgcaggccttcttcaccagtgacacggggcttgaatatgtaa

SEQ ID NO: 94227 - DNA, 76 bp, Homo sapiens
ccggaaggactggaacgtgcgcctgcaggccttcttcaccagtgacacggggcttgaatatgtaagccacaggctc

SEQ ID NO: 94228 - DNA, 77 bp, Homo sapiens
actggaacgtgcgcctgcaggccttcttcaccagtgacacggggcttgaatatgtaagccacaggctcccgcctcta

SEQ ID NO: 94229 - DNA, 77 bp, Homo sapiens
cctgcaggccttcttcaccagtgacacggggcttgaatatgtaagccacaggctcccgcctctaccaccacagatcc

SEQ ID NO: 94230 - DNA, 75 bp, Homo sapiens
agagcttgagtctttgccctgtgccttcaccaccatgacctccttccttacctggcaggaagcccccaagctgta

SEQ ID NO: 94231 - DNA, 74 bp, Homo sapiens
tttgccctgtgccttcaccaccatgacctccttccttacctggcaggaagcccccaagctgtaccctgccattc

SEQ ID NO: 94232 - DNA, 73 bp, Homo sapiens
cttcaccaccatgacctccttccttacctggcaggaagcccccaagctgtaccctgccattcccgcagcccga

SEQ ID NO: 94233 - DNA, 71 bp, Homo sapiens
accatgacctccttccttacctggcaggaagcccccaagctgtaccctgccattcccgcagcccgaaggcg

SEQ ID NO: 94234 - DNA, 72 bp, Homo sapiens
ttccttacctggcaggaagcccccaagctgtaccctgccattcccgcagcccgaaggcggcccattcgagtc

SEQ ID NO: 94235 - DNA, 75 bp, Homo sapiens
gcaggaagcccccaagctgtaccctgccattcccgcagcccgaaggcggcccattcgagtcctgtcattgtttga

SEQ ID NO: 94236 - DNA, 78 bp, Homo sapiens
cccaagctgtaccctgccattcccgcagcccgaaggcggcccattcgagtcctgtcattgtttgatggcatcgcgaca

SEQ ID NO: 94237 - DNA, 78 bp, Homo sapiens
taccctgccattcccgcagcccgaaggcggcccattcgagtcctgtcattgtttgatggcatcgcgacaggtgagttc

SEQ ID NO: 94238 - DNA, 75 bp, Homo sapiens
attcccgcagcccgaaggcggcccattcgagtcctgtcattgtttgatggcatcgcgacaggtgagttcggggaa

SEQ ID NO: 94239 - DNA, 75 bp, Homo sapiens
agcccgaaggcggcccattcgagtcctgtcattgtttgatggcatcgcgacaggtgagttcggggaacacctgga

SEQ ID NO: 94240 - DNA, 81 bp, Homo sapiens
ccattcgagtcctgtcattgtttgatggcatcgcgacaggtgagttcggggaacacctggagacactgctatcgtgtcaca

SEQ ID NO: 94241 - DNA, 81 bp, Homo sapiens
tgtgctcagcatcatttatgcttctgtgtctctctggcccccacaggctacctagtcctcaaagagttgggcataaaggta

SEQ ID NO: 94242 - DNA, 75 bp, Homo sapiens
atcatttatgcttctgtgtctctctggcccccacaggctacctagtcctcaaagagttgggcataaaggtaggaa

SEQ ID NO: 94243 - DNA, 74 bp, Homo sapiens
ttatgcttctgtgtctctctggcccccacaggctacctagtcctcaaagagttgggcataaaggtaggaaagta

SEQ ID NO: 94244 - DNA, 72 bp, Homo sapiens
tctctggcccccacaggctacctagtcctcaaagagttgggcataaaggtaggaaagtacgtcgcttctgaa

SEQ ID NO: 94245 - DNA, 73 bp, Homo sapiens
ccacaggctacctagtcctcaaagagttgggcataaaggtaggaaagtacgtcgcttctgaagtgtgtgagga

SEQ ID NO: 94246 - DNA, 72 bp, Homo sapiens
aaagagttgggcataaaggtaggaaagtacgtcgcttctgaagtgtgtgaggagtccattgctgttggaacc

SEQ ID NO: 94247 - DNA, 75 bp, Homo sapiens
ttgggcataaaggtaggaaagtacgtcgcttctgaagtgtgtgaggagtccattgctgttggaaccgtgaagcac

SEQ ID NO: 94248 - DNA, 76 bp, Homo sapiens
taggaaagtacgtcgcttctgaagtgtgtgaggagtccattgctgttggaaccgtgaagcacgaggggaatatcaa

SEQ ID NO: 94249 - DNA, 77 bp, Homo sapiens
tacgtcgcttctgaagtgtgtgaggagtccattgctgttggaaccgtgaagcacgaggggaatatcaaatacgtgaa

SEQ ID NO: 94250 - DNA, 75 bp, Homo sapiens
aagtgtgtgaggagtccattgctgttggaaccgtgaagcacgaggggaatatcaaatacgtgaacgacgtgagga

SEQ ID NO: 94251 - DNA, 75 bp, Homo sapiens
aggagtccattgctgttggaaccgtgaagcacgaggggaatatcaaatacgtgaacgacgtgaggaacatcacaa

SEQ ID NO: 94252 - DNA, 73 bp, Homo sapiens
attgctgttggaaccgtgaagcacgaggggaatatcaaatacgtgaacgacgtgaggaacatcacaaagaaaa

SEQ ID NO: 94253 - DNA, 73 bp, Homo sapiens
tggaaccgtgaagcacgaggggaatatcaaatacgtgaacgacgtgaggaacatcacaaagaaaaatgtgagg

SEQ ID NO: 94254 - DNA, 72 bp, Homo sapiens
acgaggggaatatcaaatacgtgaacgacgtgaggaacatcacaaagaaaaatgtgagggcagtctgtacct

SEQ ID NO: 94255 - DNA, 75 bp, Homo sapiens
aatatcaaatacgtgaacgacgtgaggaacatcacaaagaaaaatgtgagggcagtctgtaccttgcgggcctca

SEQ ID NO: 94256 - DNA, 78 bp, Homo sapiens
tctctttccctctgtccacaccctcatcctgactctgtctctctctttcagattgaagaatggggcccatttgacttg

SEQ ID NO: 94257 - DNA, 78 bp, Homo sapiens
ttccctctgtccacaccctcatcctgactctgtctctctctttcagattgaagaatggggcccatttgacttggtgat

SEQ ID NO: 94258 - DNA, 77 bp, Homo sapiens
accctcatcctgactctgtctctctctttcagattgaagaatggggcccatttgacttggtgattggcggaagccca

SEQ ID NO: 94259 - DNA, 82 bp, Homo sapiens
tgactctgtctctctctttcagattgaagaatggggcccatttgacttggtgattggcggaagcccatgcaacgatctctca

SEQ ID NO: 94260 - DNA, 80 bp, Homo sapiens
tctctctttcagattgaagaatggggcccatttgacttggtgattggcggaagcccatgcaacgatctctcaaatgtgaa

SEQ ID NO: 94261 - DNA, 79 bp, Homo sapiens
agattgaagaatggggcccatttgacttggtgattggcggaagcccatgcaacgatctctcaaatgtgaatccagccag

SEQ ID NO: 94262 - DNA, 77 bp, Homo sapiens
aagaatggggcccatttgacttggtgattggcggaagcccatgcaacgatctctcaaatgtgaatccagccaggaaa

SEQ ID NO: 94263 - DNA, 81 bp, Homo sapiens
atttgacttggtgattggcggaagcccatgcaacgatctctcaaatgtgaatccagccaggaaaggcctgtatggtgagca

SEQ ID NO: 94264 - DNA, 82 bp, Homo sapiens
ttggtgattggcggaagcccatgcaacgatctctcaaatgtgaatccagccaggaaaggcctgtatggtgagcatccttctc

SEQ ID NO: 94265 - DNA, 82 bp, Homo sapiens
aagcccatgcaacgatctctcaaatgtgaatccagccaggaaaggcctgtatggtgagcatccttctctctggcagtccctg

SEQ ID NO: 94266 - DNA, 81 bp, Homo sapiens
aacgatctctcaaatgtgaatccagccaggaaaggcctgtatggtgagcatccttctctctggcagtccctggagagccta

SEQ ID NO: 94267 - DNA, 75 bp, Homo sapiens
tggaggtttcaaatgaaccctgcgctgtcatcttttctgagcacagagggtacaggccggctcttcttcgaattt

SEQ ID NO: 94268 - DNA, 75 bp, Homo sapiens
tttcaaatgaaccctgcgctgtcatcttttctgagcacagagggtacaggccggctcttcttcgaattttaccac

SEQ ID NO: 94269 - DNA, 75 bp, Homo sapiens
aaccctgcgctgtcatcttttctgagcacagagggtacaggccggctcttcttcgaattttaccacctgctgaat

SEQ ID NO: 94270 - DNA, 76 bp, Homo sapiens
tgtcatcttttctgagcacagagggtacaggccggctcttcttcgaattttaccacctgctgaattactcacgccc

SEQ ID NO: 94271 - DNA, 71 bp, Homo sapiens
agcacagagggtacaggccggctcttcttcgaattttaccacctgctgaattactcacgccccaaggaggg

SEQ ID NO: 94272 - DNA, 71 bp, Homo sapiens
agggtacaggccggctcttcttcgaattttaccacctgctgaattactcacgccccaaggagggtgatgac

SEQ ID NO: 94273 - DNA, 71 bp, Homo sapiens
ctcttcttcgaattttaccacctgctgaattactcacgccccaaggagggtgatgaccggccgttcttctg

SEQ ID NO: 94274 - DNA, 71 bp, Homo sapiens
ttcgaattttaccacctgctgaattactcacgccccaaggagggtgatgaccggccgttcttctggatgtt

SEQ ID NO: 94275 - DNA, 75 bp, Homo sapiens
taccacctgctgaattactcacgccccaaggagggtgatgaccggccgttcttctggatgtttgagaatgttgta

SEQ ID NO: 94276 - DNA, 73 bp, Homo sapiens
aattactcacgccccaaggagggtgatgaccggccgttcttctggatgtttgagaatgttgtagccatgaagg

SEQ ID NO: 94277 - DNA, 74 bp, Homo sapiens
ccaaggagggtgatgaccggccgttcttctggatgtttgagaatgttgtagccatgaaggttggcgacaagagg

SEQ ID NO: 94278 - DNA, 77 bp, Homo sapiens
agggtgatgaccggccgttcttctggatgtttgagaatgttgtagccatgaaggttggcgacaagagggacatctca

SEQ ID NO: 94279 - DNA, 75 bp, Homo sapiens
ccgttcttctggatgtttgagaatgttgtagccatgaaggttggcgacaagagggacatctcacggttcctggag

SEQ ID NO: 94280 - DNA, 76 bp, Homo sapiens
cttctggatgtttgagaatgttgtagccatgaaggttggcgacaagagggacatctcacggttcctggaggtgagg

SEQ ID NO: 94281 - DNA, 75 bp, Homo sapiens
tttgagaatgttgtagccatgaaggttggcgacaagagggacatctcacggttcctggaggtgagggaatctggg

SEQ ID NO: 94282 - DNA, 75 bp, Homo sapiens
ttgtagccatgaaggttggcgacaagagggacatctcacggttcctggaggtgagggaatctggggacctgattg

SEQ ID NO: 94283 - DNA, 75 bp, Homo sapiens
aaggttggcgacaagagggacatctcacggttcctggaggtgagggaatctggggacctgattgtcacagacagc

SEQ ID NO: 94284 - DNA, 76 bp, Homo sapiens
ttgacactgaaactctaataataggctcctaacagtaaccttctttctccccacagtgtaatccagtgatgattga

SEQ ID NO: 94285 - DNA, 76 bp, Homo sapiens
aactctaataataggctcctaacagtaaccttctttctccccacagtgtaatccagtgatgattgatgccatcaaa

SEQ ID NO: 94286 - DNA, 79 bp, Homo sapiens
taataggctcctaacagtaaccttctttctccccacagtgtaatccagtgatgattgatgccatcaaagtttctgctgc

SEQ ID NO: 94287 - DNA, 79 bp, Homo sapiens
agtaaccttctttctccccacagtgtaatccagtgatgattgatgccatcaaagtttctgctgctcacagggcccgata

SEQ ID NO: 94288 - DNA, 80 bp, Homo sapiens
ttctttctccccacagtgtaatccagtgatgattgatgccatcaaagtttctgctgctcacagggcccgatacttctggg

SEQ ID NO: 94289 - DNA, 79 bp, Homo sapiens
acagtgtaatccagtgatgattgatgccatcaaagtttctgctgctcacagggcccgatacttctggggcaacctaccc

SEQ ID NO: 94290 - DNA, 80 bp, Homo sapiens
taatccagtgatgattgatgccatcaaagtttctgctgctcacagggcccgatacttctggggcaacctacccgggatga

SEQ ID NO: 94291 - DNA, 75 bp, Homo sapiens
attgatgccatcaaagtttctgctgctcacagggcccgatacttctggggcaacctacccgggatgaacaggtaa

SEQ ID NO: 94292 - DNA, 71 bp, Homo sapiens
atcaaagtttctgctgctcacagggcccgatacttctggggcaacctacccgggatgaacaggtaacaaag

SEQ ID NO: 94293 - DNA, 70 bp, Homo sapiens
ctgctcacagggcccgatacttctggggcaacctacccgggatgaacaggtaacaaagggctcttagtgg

SEQ ID NO: 94294 - DNA, 68 bp, Homo sapiens
acagggcccgatacttctggggcaacctacccgggatgaacaggtaacaaagggctcttagtgggtca

SEQ ID NO: 94295 - DNA, 69 bp, Homo sapiens
tacttctggggcaacctacccgggatgaacaggtaacaaagggctcttagtgggtcaggtaacagccaa

SEQ ID NO: 94296 - DNA, 77 bp, Homo sapiens
ttgtgcctagcagaggaccctctatagctagtaagaagtaatgggttttggctgttcccaggcccgtgatagcatca

SEQ ID NO: 94297 - DNA, 75 bp, Homo sapiens
tagcagaggaccctctatagctagtaagaagtaatgggttttggctgttcccaggcccgtgatagcatcaaagaa

SEQ ID NO: 94298 - DNA, 73 bp, Homo sapiens
accctctatagctagtaagaagtaatgggttttggctgttcccaggcccgtgatagcatcaaagaatgataaa

SEQ ID NO: 94299 - DNA, 76 bp, Homo sapiens
tagtaagaagtaatgggttttggctgttcccaggcccgtgatagcatcaaagaatgataaactcgagctgcaggac

SEQ ID NO: 94300 - DNA, 79 bp, Homo sapiens
taatgggttttggctgttcccaggcccgtgatagcatcaaagaatgataaactcgagctgcaggactgcttggaataca

SEQ ID NO: 94301 - DNA, 80 bp, Homo sapiens
ttttggctgttcccaggcccgtgatagcatcaaagaatgataaactcgagctgcaggactgcttggaatacaataggata

SEQ ID NO: 94302 - DNA, 79 bp, Homo sapiens
aggcccgtgatagcatcaaagaatgataaactcgagctgcaggactgcttggaatacaataggatagccaaggtaagac

SEQ ID NO: 94303 - DNA, 81 bp, Homo sapiens
atagcatcaaagaatgataaactcgagctgcaggactgcttggaatacaataggatagccaaggtaagacgagctgtggcc

SEQ ID NO: 94304 - DNA, 78 bp, Homo sapiens
aatgataaactcgagctgcaggactgcttggaatacaataggatagccaaggtaagacgagctgtggccctctggaaa

SEQ ID NO: 94305 - DNA, 79 bp, Homo sapiens
taaactcgagctgcaggactgcttggaatacaataggatagccaaggtaagacgagctgtggccctctggaaaaatgca

SEQ ID NO: 94306 - DNA, 75 bp, Homo sapiens
aggactgcttggaatacaataggatagccaaggtaagacgagctgtggccctctggaaaaatgcacttggtgacc

SEQ ID NO: 94307 - DNA, 75 bp, Homo sapiens
ttggaatacaataggatagccaaggtaagacgagctgtggccctctggaaaaatgcacttggtgacctccaagtg

SEQ ID NO: 94308 - DNA, 76 bp, Homo sapiens
gtcccttcattctgtgctcactccatgatgtcattttgttctccagttaaagaaagtacagacaataaccaccaag

SEQ ID NO: 94309 - DNA, 76 bp, Homo sapiens
attctgtgctcactccatgatgtcattttgttctccagttaaagaaagtacagacaataaccaccaagtcgaactc

SEQ ID NO: 94310 - DNA, 74 bp, Homo sapiens
actccatgatgtcattttgttctccagttaaagaaagtacagacaataaccaccaagtcgaactcgatcaaaca

SEQ ID NO: 94311 - DNA, 70 bp, Homo sapiens
tcattttgttctccagttaaagaaagtacagacaataaccaccaagtcgaactcgatcaaacaggggaaa

SEQ ID NO: 94312 - DNA, 68 bp, Homo sapiens
ttctccagttaaagaaagtacagacaataaccaccaagtcgaactcgatcaaacaggggaaaaaccaa

SEQ ID NO: 94313 - DNA, 65 bp, Homo sapiens
gttaaagaaagtacagacaataaccaccaagtcgaactcgatcaaacaggggaaaaaccaacttt

SEQ ID NO: 94314 - DNA, 70 bp, Homo sapiens
tacagacaataaccaccaagtcgaactcgatcaaacaggggaaaaaccaacttttccctgttgtcatgaa

SEQ ID NO: 94315 - DNA, 70 bp, Homo sapiens
taaccaccaagtcgaactcgatcaaacaggggaaaaaccaacttttccctgttgtcatgaatggcaaaga

SEQ ID NO: 94316 - DNA, 69 bp, Homo sapiens
aactcgatcaaacaggggaaaaaccaacttttccctgttgtcatgaatggcaaagaagatgttttgtgg

SEQ ID NO: 94317 - DNA, 73 bp, Homo sapiens
atcaaacaggggaaaaaccaacttttccctgttgtcatgaatggcaaagaagatgttttgtggtgcactgagc

SEQ ID NO: 94318 - DNA, 75 bp, Homo sapiens
aaaaccaacttttccctgttgtcatgaatggcaaagaagatgttttgtggtgcactgagctcgaaaggtgagcaa

SEQ ID NO: 94319 - DNA, 79 bp, Homo sapiens
acttttccctgttgtcatgaatggcaaagaagatgttttgtggtgcactgagctcgaaaggtgagcaaggctgcacttg

SEQ ID NO: 94320 - DNA, 82 bp, Homo sapiens
tcatgaatggcaaagaagatgttttgtggtgcactgagctcgaaaggtgagcaaggctgcacttggagagggaaactgtgta

SEQ ID NO: 94321 - DNA, 75 bp, Homo sapiens
atcctggaggcacttctgacttgctgtcttttcactccggtacccccaggatctttggctttcctgtgcactaca

SEQ ID NO: 94322 - DNA, 75 bp, Homo sapiens
ttctgacttgctgtcttttcactccggtacccccaggatctttggctttcctgtgcactacacagacgtgtccaa

SEQ ID NO: 94323 - DNA, 74 bp, Homo sapiens
acttgctgtcttttcactccggtacccccaggatctttggctttcctgtgcactacacagacgtgtccaacatg

SEQ ID NO: 94324 - DNA, 72 bp, Homo sapiens
ttttcactccggtacccccaggatctttggctttcctgtgcactacacagacgtgtccaacatgggccgtgg

SEQ ID NO: 94325 - DNA, 77 bp, Homo sapiens
ccccaggatctttggctttcctgtgcactacacagacgtgtccaacatgggccgtggtgcccgccagaagctgctgg

SEQ ID NO: 94326 - DNA, 77 bp, Homo sapiens
atctttggctttcctgtgcactacacagacgtgtccaacatgggccgtggtgcccgccagaagctgctgggaaggtc

SEQ ID NO: 94327 - DNA, 79 bp, Homo sapiens
tttcctgtgcactacacagacgtgtccaacatgggccgtggtgcccgccagaagctgctgggaaggtcctggagcgtgc

SEQ ID NO: 94328 - DNA, 80 bp, Homo sapiens
tacacagacgtgtccaacatgggccgtggtgcccgccagaagctgctgggaaggtcctggagcgtgcctgtcatccgaca

SEQ ID NO: 94329 - DNA, 77 bp, Homo sapiens
gccgtggtgcccgccagaagctgctgggaaggtcctggagcgtgcctgtcatccgacacctcttcgcccctctgaag

SEQ ID NO: 94330 - DNA, 75 bp, Homo sapiens
ccgccagaagctgctgggaaggtcctggagcgtgcctgtcatccgacacctcttcgcccctctgaaggactactt

SEQ ID NO: 94331 - DNA, 79 bp, Homo sapiens
agctgctgggaaggtcctggagcgtgcctgtcatccgacacctcttcgcccctctgaaggactactttgcatgtgaata

SEQ ID NO: 94332 - DNA, 77 bp, Homo sapiens
aaggtcctggagcgtgcctgtcatccgacacctcttcgcccctctgaaggactactttgcatgtgaatagttccagc

SEQ ID NO: 94333 - DNA, 77 bp, Homo sapiens
tgtcatccgacacctcttcgcccctctgaaggactactttgcatgtgaatagttccagccaggccccaagcccactg

SEQ ID NO: 94334 - DNA, 73 bp, Homo sapiens
acacctcttcgcccctctgaaggactactttgcatgtgaatagttccagccaggccccaagcccactggggtg

SEQ ID NO: 94335 - DNA, 77 bp, Homo sapiens
ccctctgaaggactactttgcatgtgaatagttccagccaggccccaagcccactggggtgtgtggcagagccagga

SEQ ID NO: 94336 - DNA, 76 bp, Homo sapiens
aggactactttgcatgtgaatagttccagccaggccccaagcccactggggtgtgtggcagagccaggacccagga

SEQ ID NO: 94337 - DNA, 77 bp, Homo sapiens
tgtgaatagttccagccaggccccaagcccactggggtgtgtggcagagccaggacccaggaggtgtgattcctgaa

SEQ ID NO: 94338 - DNA, 77 bp, Homo sapiens
tagttccagccaggccccaagcccactggggtgtgtggcagagccaggacccaggaggtgtgattcctgaaggcatc

SEQ ID NO: 94339 - DNA, 76 bp, Homo sapiens
cccaagcccactggggtgtgtggcagagccaggacccaggaggtgtgattcctgaaggcatccccaggccctgctc

SEQ ID NO: 94340 - DNA, 78 bp, Homo sapiens
actggggtgtgtggcagagccaggacccaggaggtgtgattcctgaaggcatccccaggccctgctcttcctcagctg

SEQ ID NO: 94341 - DNA, 80 bp, Homo sapiens
tggcagagccaggacccaggaggtgtgattcctgaaggcatccccaggccctgctcttcctcagctgtgtgggtcatacc

SEQ ID NO: 94342 - DNA, 76 bp, Homo sapiens
aggacccaggaggtgtgattcctgaaggcatccccaggccctgctcttcctcagctgtgtgggtcataccgtgtac

SEQ ID NO: 94343 - DNA, 77 bp, Homo sapiens
aggaggtgtgattcctgaaggcatccccaggccctgctcttcctcagctgtgtgggtcataccgtgtacctcagttc

SEQ ID NO: 94344 - DNA, 78 bp, Homo sapiens
attcctgaaggcatccccaggccctgctcttcctcagctgtgtgggtcataccgtgtacctcagttccctcttgctca

SEQ ID NO: 94345 - DNA, 76 bp, Homo sapiens
aggcatccccaggccctgctcttcctcagctgtgtgggtcataccgtgtacctcagttccctcttgctcagtgggg

SEQ ID NO: 94346 - DNA, 79 bp, Homo sapiens
ctgctcttcctcagctgtgtgggtcataccgtgtacctcagttccctcttgctcagtgggggcagagccacctgactct

SEQ ID NO: 94347 - DNA, 79 bp, Homo sapiens
ttcctcagctgtgtgggtcataccgtgtacctcagttccctcttgctcagtgggggcagagccacctgactcttgcagg

SEQ ID NO: 94348 - DNA, 78 bp, Homo sapiens
tgtgggtcataccgtgtacctcagttccctcttgctcagtgggggcagagccacctgactcttgcaggggtagcctga

SEQ ID NO: 94349 - DNA, 76 bp, Homo sapiens
ataccgtgtacctcagttccctcttgctcagtgggggcagagccacctgactcttgcaggggtagcctgaggtgcc

SEQ ID NO: 94350 - DNA, 81 bp, Homo sapiens
tcttgctcagtgggggcagagccacctgactcttgcaggggtagcctgaggtgccgcctccttgtgcacaaatcagacctg

SEQ ID NO: 94351 - DNA, 83 bp, Homo sapiens
ggcagagccacctgactcttgcaggggtagcctgaggtgccgcctccttgtgcacaaatcagacctggctgcttggagcagcc

SEQ ID NO: 94352 - DNA, 80 bp, Homo sapiens
acctgactcttgcaggggtagcctgaggtgccgcctccttgtgcacaaatcagacctggctgcttggagcagcctaacac

SEQ ID NO: 94353 - DNA, 81 bp, Homo sapiens
ttgcaggggtagcctgaggtgccgcctccttgtgcacaaatcagacctggctgcttggagcagcctaacacggtgctcatt

SEQ ID NO: 94354 - DNA, 79 bp, Homo sapiens
gtagcctgaggtgccgcctccttgtgcacaaatcagacctggctgcttggagcagcctaacacggtgctcattttttct

SEQ ID NO: 94355 - DNA, 76 bp, Homo sapiens
ccgcctccttgtgcacaaatcagacctggctgcttggagcagcctaacacggtgctcattttttcttctcctaaaa

SEQ ID NO: 94356 - DNA, 75 bp, Homo sapiens
ttgtgcacaaatcagacctggctgcttggagcagcctaacacggtgctcattttttcttctcctaaaactttaaa

SEQ ID NO: 94357 - DNA, 71 bp, Homo sapiens
tgcttggagcagcctaacacggtgctcattttttcttctcctaaaactttaaaacttgaagtaggtagcaa

SEQ ID NO: 94358 - DNA, 68 bp, Homo sapiens
agcagcctaacacggtgctcattttttcttctcctaaaactttaaaacttgaagtaggtagcaacgtg

SEQ ID NO: 94359 - DNA, 65 bp, Homo sapiens
cacggtgctcattttttcttctcctaaaactttaaaacttgaagtaggtagcaacgtggcttttt

SEQ ID NO: 94360 - DNA, 61 bp, Homo sapiens
cattttttcttctcctaaaactttaaaacttgaagtaggtagcaacgtggctttttttttt

SEQ ID NO: 94361 - DNA, 71 bp, Homo sapiens
tttttttcccttcctgggtctaccactcagagaaacaatggctaagataccaaaaccacagtgccgacagc

SEQ ID NO: 94362 - DNA, 75 bp, Homo sapiens
ttcccttcctgggtctaccactcagagaaacaatggctaagataccaaaaccacagtgccgacagctctccaata

SEQ ID NO: 94363 - DNA, 78 bp, Homo sapiens
taccactcagagaaacaatggctaagataccaaaaccacagtgccgacagctctccaatactcaggttaatgctgaaa

SEQ ID NO: 94364 - DNA, 77 bp, Homo sapiens
agagaaacaatggctaagataccaaaaccacagtgccgacagctctccaatactcaggttaatgctgaaaaatcatc

SEQ ID NO: 94365 - DNA, 77 bp, Homo sapiens
gctaagataccaaaaccacagtgccgacagctctccaatactcaggttaatgctgaaaaatcatccaagacagttat

SEQ ID NO: 94366 - DNA, 77 bp, Homo sapiens
caaaaccacagtgccgacagctctccaatactcaggttaatgctgaaaaatcatccaagacagttattgcaagagtt

SEQ ID NO: 94367 - DNA, 75 bp, Homo sapiens
agtgccgacagctctccaatactcaggttaatgctgaaaaatcatccaagacagttattgcaagagtttaatttt

SEQ ID NO: 94368 - DNA, 75 bp, Homo sapiens
gacagctctccaatactcaggttaatgctgaaaaatcatccaagacagttattgcaagagtttaatttttgaaaa

SEQ ID NO: 94369 - DNA, 75 bp, Homo sapiens
tactcaggttaatgctgaaaaatcatccaagacagttattgcaagagtttaatttttgaaaactggctactgctc

SEQ ID NO: 94370 - DNA, 76 bp, Homo sapiens
atgctgaaaaatcatccaagacagttattgcaagagtttaatttttgaaaactggctactgctctgtgtttacaga

SEQ ID NO: 94371 - DNA, 73 bp, Homo sapiens
aaaatcatccaagacagttattgcaagagtttaatttttgaaaactggctactgctctgtgtttacagacgtg

SEQ ID NO: 94372 - DNA, 74 bp, Homo sapiens
aagacagttattgcaagagtttaatttttgaaaactggctactgctctgtgtttacagacgtgtgcagttgtag

SEQ ID NO: 94373 - DNA, 78 bp, Homo sapiens
attgcaagagtttaatttttgaaaactggctactgctctgtgtttacagacgtgtgcagttgtaggcatgtagctaca

SEQ ID NO: 94374 - DNA, 76 bp, Homo sapiens
atttttgaaaactggctactgctctgtgtttacagacgtgtgcagttgtaggcatgtagctacaggacatttttaa

SEQ ID NO: 94375 - DNA, 76 bp, Homo sapiens
aaaactggctactgctctgtgtttacagacgtgtgcagttgtaggcatgtagctacaggacatttttaagggccca

SEQ ID NO: 94376 - DNA, 73 bp, Homo sapiens
ctctgtgtttacagacgtgtgcagttgtaggcatgtagctacaggacatttttaagggcccaggatcgttttt

SEQ ID NO: 94377 - DNA, 73 bp, Homo sapiens
tgtttacagacgtgtgcagttgtaggcatgtagctacaggacatttttaagggcccaggatcgttttttccca

SEQ ID NO: 94378 - DNA, 74 bp, Homo sapiens
gtgtgcagttgtaggcatgtagctacaggacatttttaagggcccaggatcgttttttcccagggcaagcagaa

SEQ ID NO: 94379 - DNA, 71 bp, Homo sapiens
tagctacaggacatttttaagggcccaggatcgttttttcccagggcaagcagaagagaaaatgttgtata

SEQ ID NO: 94380 - DNA, 68 bp, Homo sapiens
atttttaagggcccaggatcgttttttcccagggcaagcagaagagaaaatgttgtatatgtctttta

SEQ ID NO: 94381 - DNA, 71 bp, Homo sapiens
ttttcccagggcaagcagaagagaaaatgttgtatatgtcttttacccggcacattccccttgcctaaata

SEQ ID NO: 94382 - DNA, 72 bp, Homo sapiens
aagagaaaatgttgtatatgtcttttacccggcacattccccttgcctaaatacaagggctggagtctgcac

SEQ ID NO: 94383 - DNA, 73 bp, Homo sapiens
tgtatatgtcttttacccggcacattccccttgcctaaatacaagggctggagtctgcacgggacctattaga

SEQ ID NO: 94384 - DNA, 76 bp, Homo sapiens
cacattccccttgcctaaatacaagggctggagtctgcacgggacctattagagtattttccacaatgatgatgat

SEQ ID NO: 94385 - DNA, 80 bp, Homo sapiens
taaatacaagggctggagtctgcacgggacctattagagtattttccacaatgatgatgatttcagcagggatgacgtca

SEQ ID NO: 94386 - DNA, 79 bp, Homo sapiens
acgggacctattagagtattttccacaatgatgatgatttcagcagggatgacgtcatcatcacattcagggctatttt

SEQ ID NO: 94387 - DNA, 80 bp, Homo sapiens
ctattagagtattttccacaatgatgatgatttcagcagggatgacgtcatcatcacattcagggctattttttccccca

SEQ ID NO: 94388 - DNA, 78 bp, Homo sapiens
ttttccacaatgatgatgatttcagcagggatgacgtcatcatcacattcagggctattttttcccccacaaacccaa

SEQ ID NO: 94389 - DNA, 77 bp, Homo sapiens
atgatgatgatttcagcagggatgacgtcatcatcacattcagggctattttttcccccacaaacccaagggcaggg

SEQ ID NO: 94390 - DNA, 73 bp, Homo sapiens
agcagggatgacgtcatcatcacattcagggctattttttcccccacaaacccaagggcaggggccactctta

SEQ ID NO: 94391 - DNA, 72 bp, Homo sapiens
atgacgtcatcatcacattcagggctattttttcccccacaaacccaagggcaggggccactcttagctaaa

SEQ ID NO: 94392 - DNA, 68 bp, Homo sapiens
atcacattcagggctattttttcccccacaaacccaagggcaggggccactcttagctaaatccctcc

SEQ ID NO: 94393 - DNA, 69 bp, Homo sapiens
ccccacaaacccaagggcaggggccactcttagctaaatccctccccgtgactgcaatagaaccctctg

SEQ ID NO: 94394 - DNA, 69 bp, Homo sapiens
aaacccaagggcaggggccactcttagctaaatccctccccgtgactgcaatagaaccctctggggagc

SEQ ID NO: 94395 - DNA, 74 bp, Homo sapiens
gggccactcttagctaaatccctccccgtgactgcaatagaaccctctggggagctcaggaaggggtgtgctga

SEQ ID NO: 94396 - DNA, 75 bp, Homo sapiens
tagctaaatccctccccgtgactgcaatagaaccctctggggagctcaggaaggggtgtgctgagttctataata

SEQ ID NO: 94397 - DNA, 73 bp, Homo sapiens
aaatccctccccgtgactgcaatagaaccctctggggagctcaggaaggggtgtgctgagttctataatataa

SEQ ID NO: 94398 - DNA, 76 bp, Homo sapiens
aatagaaccctctggggagctcaggaaggggtgtgctgagttctataatataagctgccatatattttgtagacaa

SEQ ID NO: 94399 - DNA, 81 bp, Homo sapiens
ggagctcaggaaggggtgtgctgagttctataatataagctgccatatattttgtagacaagtatggctcctccatatctc

SEQ ID NO: 94400 - DNA, 79 bp, Homo sapiens
tataatataagctgccatatattttgtagacaagtatggctcctccatatctccctcttccctaggagaggagtgtgaa

SEQ ID NO: 94401 - DNA, 79 bp, Homo sapiens
tgccatatattttgtagacaagtatggctcctccatatctccctcttccctaggagaggagtgtgaagcaaggagctta

SEQ ID NO: 94402 - DNA, 77 bp, Homo sapiens
tattttgtagacaagtatggctcctccatatctccctcttccctaggagaggagtgtgaagcaaggagcttagataa

SEQ ID NO: 94403 - DNA, 76 bp, Homo sapiens
agacaagtatggctcctccatatctccctcttccctaggagaggagtgtgaagcaaggagcttagataagacaccc

SEQ ID NO: 94404 - DNA, 73 bp, Homo sapiens
ctccatatctccctcttccctaggagaggagtgtgaagcaaggagcttagataagacaccccctcaaacccat

SEQ ID NO: 94405 - DNA, 72 bp, Homo sapiens
tatctccctcttccctaggagaggagtgtgaagcaaggagcttagataagacaccccctcaaacccattccc

SEQ ID NO: 94406 - DNA, 73 bp, Homo sapiens
taggagaggagtgtgaagcaaggagcttagataagacaccccctcaaacccattccctctccaggagacctac

SEQ ID NO: 94407 - DNA, 72 bp, Homo sapiens
agtgtgaagcaaggagcttagataagacaccccctcaaacccattccctctccaggagacctaccctccaca

SEQ ID NO: 94408 - DNA, 72 bp, Homo sapiens
aagcaaggagcttagataagacaccccctcaaacccattccctctccaggagacctaccctccacaggcaca

SEQ ID NO: 94409 - DNA, 71 bp, Homo sapiens
ttagataagacaccccctcaaacccattccctctccaggagacctaccctccacaggcacaggtccccaga

SEQ ID NO: 94410 - DNA, 73 bp, Homo sapiens
ccctcaaacccattccctctccaggagacctaccctccacaggcacaggtccccagatgagaagtctgctacc

SEQ ID NO: 94411 - DNA, 77 bp, Homo sapiens
cattccctctccaggagacctaccctccacaggcacaggtccccagatgagaagtctgctaccctcatttctcatct

SEQ ID NO: 94412 - DNA, 76 bp, Homo sapiens
tccaggagacctaccctccacaggcacaggtccccagatgagaagtctgctaccctcatttctcatctttttacta

SEQ ID NO: 94413 - DNA, 74 bp, Homo sapiens
acctaccctccacaggcacaggtccccagatgagaagtctgctaccctcatttctcatctttttactaaactca

SEQ ID NO: 94414 - DNA, 80 bp, Homo sapiens
aggcacaggtccccagatgagaagtctgctaccctcatttctcatctttttactaaactcagaggcagtgacagcagtca

SEQ ID NO: 94415 - DNA, 78 bp, Homo sapiens
aggtccccagatgagaagtctgctaccctcatttctcatctttttactaaactcagaggcagtgacagcagtcaggga

SEQ ID NO: 94416 - DNA, 80 bp, Homo sapiens
atgagaagtctgctaccctcatttctcatctttttactaaactcagaggcagtgacagcagtcagggacagacatacatt

SEQ ID NO: 94417 - DNA, 79 bp, Homo sapiens
taccctcatttctcatctttttactaaactcagaggcagtgacagcagtcagggacagacatacatttctcataccttc

SEQ ID NO: 94418 - DNA, 82 bp, Homo sapiens
tttactaaactcagaggcagtgacagcagtcagggacagacatacatttctcataccttccccacatctgagagatgacagg

SEQ ID NO: 94419 - DNA, 82 bp, Homo sapiens
agaggcagtgacagcagtcagggacagacatacatttctcataccttccccacatctgagagatgacagggaaaactgcaaa

SEQ ID NO: 94420 - DNA, 81 bp, Homo sapiens
agtgacagcagtcagggacagacatacatttctcataccttccccacatctgagagatgacagggaaaactgcaaagctcg

SEQ ID NO: 94421 - DNA, 79 bp, Homo sapiens
agtcagggacagacatacatttctcataccttccccacatctgagagatgacagggaaaactgcaaagctcggtgctcc

SEQ ID NO: 94422 - DNA, 76 bp, Homo sapiens
tacatttctcataccttccccacatctgagagatgacagggaaaactgcaaagctcggtgctccctttggagattt

SEQ ID NO: 94423 - DNA, 75 bp, Homo sapiens
ttctcataccttccccacatctgagagatgacagggaaaactgcaaagctcggtgctccctttggagatttttta

SEQ ID NO: 94424 - DNA, 71 bp, Homo sapiens
cccacatctgagagatgacagggaaaactgcaaagctcggtgctccctttggagattttttaatccttttt

SEQ ID NO: 94425 - DNA, 69 bp, Homo sapiens
agatgacagggaaaactgcaaagctcggtgctccctttggagattttttaatccttttttattccataa

SEQ ID NO: 94426 - DNA, 66 bp, Homo sapiens
gcaaagctcggtgctccctttggagattttttaatccttttttattccataagaagtcgtttttag

SEQ ID NO: 94427 - DNA, 64 bp, Homo sapiens
tgctccctttggagattttttaatccttttttattccataagaagtcgtttttagggagaacgg

SEQ ID NO: 94428 - DNA, 69 bp, Homo sapiens
atccttttttattccataagaagtcgtttttagggagaacgggaattcagacaagctgcatttcagaaa

SEQ ID NO: 94429 - DNA, 74 bp, Homo sapiens
ttttattccataagaagtcgtttttagggagaacgggaattcagacaagctgcatttcagaaatgctgtcataa

SEQ ID NO: 94430 - DNA, 73 bp, Homo sapiens
taagaagtcgtttttagggagaacgggaattcagacaagctgcatttcagaaatgctgtcataatggttttta

SEQ ID NO: 94431 - DNA, 71 bp, Homo sapiens
tttttagggagaacgggaattcagacaagctgcatttcagaaatgctgtcataatggtttttaacaccttt

SEQ ID NO: 94432 - DNA, 73 bp, Homo sapiens
agaacgggaattcagacaagctgcatttcagaaatgctgtcataatggtttttaacaccttttactcttctta

SEQ ID NO: 94433 - DNA, 75 bp, Homo sapiens
ttcagacaagctgcatttcagaaatgctgtcataatggtttttaacaccttttactcttcttactggtgctattt

SEQ ID NO: 94434 - DNA, 74 bp, Homo sapiens
ctgcatttcagaaatgctgtcataatggtttttaacaccttttactcttcttactggtgctattttgtagaata

SEQ ID NO: 94435 - DNA, 69 bp, Homo sapiens
gctgtcataatggtttttaacaccttttactcttcttactggtgctattttgtagaataaggaacaacg

SEQ ID NO: 94436 - DNA, 67 bp, Homo sapiens
tggtttttaacaccttttactcttcttactggtgctattttgtagaataaggaacaacgttgacaag

SEQ ID NO: 94437 - DNA, 67 bp, Homo sapiens
acaccttttactcttcttactggtgctattttgtagaataaggaacaacgttgacaagttttgtggg

SEQ ID NO: 94438 - DNA, 69 bp, Homo sapiens
tcttcttactggtgctattttgtagaataaggaacaacgttgacaagttttgtggggctttttatacac

SEQ ID NO: 94439 - DNA, 67 bp, Homo sapiens
ttactggtgctattttgtagaataaggaacaacgttgacaagttttgtggggctttttatacacttt

SEQ ID NO: 94440 - DNA, 64 bp, Homo sapiens
attttgtagaataaggaacaacgttgacaagttttgtggggctttttatacactttttaaaatc

SEQ ID NO: 94441 - DNA, 64 bp, Homo sapiens
aataaggaacaacgttgacaagttttgtggggctttttatacactttttaaaatctcaaacttc

SEQ ID NO: 94442 - DNA, 65 bp, Homo sapiens
tgtggggctttttatacactttttaaaatctcaaacttctatttttatgtttaacgttttcatta

SEQ ID NO: 94443 - DNA, 63 bp, Homo sapiens
ggctttttatacactttttaaaatctcaaacttctatttttatgtttaacgttttcattaaaa

SEQ ID NO: 94444 - DNA, 60 bp, Homo sapiens
acactttttaaaatctcaaacttctatttttatgtttaacgttttcattaaaattttttt

SEQ ID NO: 94445 - DNA, 65 bp, Homo sapiens
cattaaaattttttttgtaactggagccacgacgtaacaaatatggggaaaaaactgtgccttgt

SEQ ID NO: 94446 - DNA, 66 bp, Homo sapiens
ttttttgtaactggagccacgacgtaacaaatatggggaaaaaactgtgccttgtttcaacagttt

SEQ ID NO: 94447 - DNA, 68 bp, Homo sapiens
taactggagccacgacgtaacaaatatggggaaaaaactgtgccttgtttcaacagtttttgctaatt

SEQ ID NO: 94448 - DNA, 68 bp, Homo sapiens
cacgacgtaacaaatatggggaaaaaactgtgccttgtttcaacagtttttgctaatttttaggctga

SEQ ID NO: 94449 - DNA, 69 bp, Homo sapiens
caaatatggggaaaaaactgtgccttgtttcaacagtttttgctaatttttaggctgaaagatgacgga

SEQ ID NO: 94450 - DNA, 70 bp, Homo sapiens
aaaaactgtgccttgtttcaacagtttttgctaatttttaggctgaaagatgacggatgcctagagttta

SEQ ID NO: 94451 - DNA, 69 bp, Homo sapiens
ccttgtttcaacagtttttgctaatttttaggctgaaagatgacggatgcctagagtttaccttatgtt

SEQ ID NO: 94452 - DNA, 70 bp, Homo sapiens
ttcaacagtttttgctaatttttaggctgaaagatgacggatgcctagagtttaccttatgtttaattaa

SEQ ID NO: 94453 - DNA, 72 bp, Homo sapiens
tgctaatttttaggctgaaagatgacggatgcctagagtttaccttatgtttaattaaaatcagtatttgtc

SEQ ID NO: 94454 - DNA, 76 bp, Homo sapiens
gctgaaagatgacggatgcctagagtttaccttatgtttaattaaaatcagtatttgtctataactgtctgatgtc

SEQ ID NO: 94455 - DNA, 73 bp, Homo sapiens
gcctagagtttaccttatgtttaattaaaatcagtatttgtctataactgtctgatgtcccttttcttctgca

SEQ ID NO: 94456 - DNA, 70 bp, Homo sapiens
aacttgtccccacctcatccctacccaacctcaggaagacaccagtacgaatatcttaggaaaacatgaa

SEQ ID NO: 94457 - DNA, 75 bp, Homo sapiens
tcatccctacccaacctcaggaagacaccagtacgaatatcttaggaaaacatgaatctcagggtcacagcttta

SEQ ID NO: 94458 - DNA, 75 bp, Homo sapiens
caacctcaggaagacaccagtacgaatatcttaggaaaacatgaatctcagggtcacagctttattgtatagatt

SEQ ID NO: 94459 - DNA, 75 bp, Homo sapiens
tcaggaagacaccagtacgaatatcttaggaaaacatgaatctcagggtcacagctttattgtatagatttttta

SEQ ID NO: 94460 - DNA, 75 bp, Homo sapiens
cagtacgaatatcttaggaaaacatgaatctcagggtcacagctttattgtatagattttttaacacagccatgt

SEQ ID NO: 94461 - DNA, 74 bp, Homo sapiens
cttaggaaaacatgaatctcagggtcacagctttattgtatagattttttaacacagccatgttacaaacattg

SEQ ID NO: 94462 - DNA, 75 bp, Homo sapiens
atgaatctcagggtcacagctttattgtatagattttttaacacagccatgttacaaacattgtcagggaacatt

SEQ ID NO: 94463 - DNA, 75 bp, Homo sapiens
tcagggtcacagctttattgtatagattttttaacacagccatgttacaaacattgtcagggaacatttacaaga

SEQ ID NO: 94464 - DNA, 72 bp, Homo sapiens
acagctttattgtatagattttttaacacagccatgttacaaacattgtcagggaacatttacaagaataaa

SEQ ID NO: 94465 - DNA, 73 bp, Homo sapiens
agattttttaacacagccatgttacaaacattgtcagggaacatttacaagaataaataagatggacttgcag

SEQ ID NO: 94466 - DNA, 74 bp, Homo sapiens
acacagccatgttacaaacattgtcagggaacatttacaagaataaataagatggacttgcaggtgtaaaaaga

SEQ ID NO: 94467 - DNA, 74 bp, Homo sapiens
gccatgttacaaacattgtcagggaacatttacaagaataaataagatggacttgcaggtgtaaaaagattaca

SEQ ID NO: 94468 - DNA, 74 bp, Homo sapiens
cattgtcagggaacatttacaagaataaataagatggacttgcaggtgtaaaaagattacacttcactgtaatg

SEQ ID NO: 94469 - DNA, 74 bp, Homo sapiens
gggaacatttacaagaataaataagatggacttgcaggtgtaaaaagattacacttcactgtaatgtacagtca

SEQ ID NO: 94470 - DNA, 75 bp, Homo sapiens
agaataaataagatggacttgcaggtgtaaaaagattacacttcactgtaatgtacagtcaaaaaatatatctga

SEQ ID NO: 94471 - DNA, 79 bp, Homo sapiens
gatggacttgcaggtgtaaaaagattacacttcactgtaatgtacagtcaaaaaatatatctgatattcattgacctga

SEQ ID NO: 94472 - DNA, 77 bp, Homo sapiens
acttgcaggtgtaaaaagattacacttcactgtaatgtacagtcaaaaaatatatctgatattcattgacctgacat

SEQ ID NO: 94473 - DNA, 77 bp, Homo sapiens
aaagattacacttcactgtaatgtacagtcaaaaaatatatctgatattcattgacctgacattatttaccttctgc

SEQ ID NO: 94474 - DNA, 79 bp, Homo sapiens
cacttcactgtaatgtacagtcaaaaaatatatctgatattcattgacctgacattatttaccttctgcttttctgagc

SEQ ID NO: 94475 - DNA, 79 bp, Homo sapiens
gtaatgtacagtcaaaaaatatatctgatattcattgacctgacattatttaccttctgcttttctgagctagaattga

SEQ ID NO: 94476 - DNA, 74 bp, Homo sapiens
aaaaatatatctgatattcattgacctgacattatttaccttctgcttttctgagctagaattgaaaagaaaaa

SEQ ID NO: 94477 - DNA, 71 bp, Homo sapiens
aaaacattgacagcacagtgctggcttttttaaaaagttgatttattttgttttctcttctcatacgtgct

SEQ ID NO: 94478 - DNA, 74 bp, Homo sapiens
gacagcacagtgctggcttttttaaaaagttgatttattttgttttctcttctcatacgtgctttatctatcaa

SEQ ID NO: 94479 - DNA, 71 bp, Homo sapiens
tgctggcttttttaaaaagttgatttattttgttttctcttctcatacgtgctttatctatcaaacaccca

SEQ ID NO: 94480 - DNA, 70 bp, Homo sapiens
taaaaagttgatttattttgttttctcttctcatacgtgctttatctatcaaacacccaaactgtacaag

SEQ ID NO: 94481 - DNA, 73 bp, Homo sapiens
atttattttgttttctcttctcatacgtgctttatctatcaaacacccaaactgtacaagtgcaggccattgg

SEQ ID NO: 94482 - DNA, 77 bp, Homo sapiens
ttttctcttctcatacgtgctttatctatcaaacacccaaactgtacaagtgcaggccattgggattcatggaggag

SEQ ID NO: 94483 - DNA, 80 bp, Homo sapiens
tcttctcatacgtgctttatctatcaaacacccaaactgtacaagtgcaggccattgggattcatggaggaggctgcaaa

SEQ ID NO: 94484 - DNA, 78 bp, Homo sapiens
tttatctatcaaacacccaaactgtacaagtgcaggccattgggattcatggaggaggctgcaaagagtgtggagact

SEQ ID NO: 94485 - DNA, 77 bp, Homo sapiens
aaacacccaaactgtacaagtgcaggccattgggattcatggaggaggctgcaaagagtgtggagactttggtctca

SEQ ID NO: 94486 - DNA, 81 bp, Homo sapiens
aaactgtacaagtgcaggccattgggattcatggaggaggctgcaaagagtgtggagactttggtctcatgcaatattata

SEQ ID NO: 94487 - DNA, 83 bp, Homo sapiens
acaagtgcaggccattgggattcatggaggaggctgcaaagagtgtggagactttggtctcatgcaatattatatgcccagtg

SEQ ID NO: 94488 - DNA, 85 bp, Homo sapiens
attgggattcatggaggaggctgcaaagagtgtggagactttggtctcatgcaatattatatgcccagtggatgtgaagatgtca

SEQ ID NO: 94489 - DNA, 85 bp, Homo sapiens
ttcatggaggaggctgcaaagagtgtggagactttggtctcatgcaatattatatgcccagtggatgtgaagatgtcagcctccc

SEQ ID NO: 94490 - DNA, 84 bp, Homo sapiens
aggctgcaaagagtgtggagactttggtctcatgcaatattatatgcccagtggatgtgaagatgtcagcctccctggagttga

SEQ ID NO: 94491 - DNA, 81 bp, Homo sapiens
aaagagtgtggagactttggtctcatgcaatattatatgcccagtggatgtgaagatgtcagcctccctggagttgagcgg

SEQ ID NO: 94492 - DNA, 81 bp, Homo sapiens
tggagactttggtctcatgcaatattatatgcccagtggatgtgaagatgtcagcctccctggagttgagcgggaaccttg

SEQ ID NO: 94493 - DNA, 83 bp, Homo sapiens
tctcatgcaatattatatgcccagtggatgtgaagatgtcagcctccctggagttgagcgggaaccttgggatagcttgtgag

SEQ ID NO: 94494 - DNA, 77 bp, Homo sapiens
aatattatatgcccagtggatgtgaagatgtcagcctccctggagttgagcgggaaccttgggatagcttgtgaggg

SEQ ID NO: 94495 - DNA, 80 bp, Homo sapiens
tatatgcccagtggatgtgaagatgtcagcctccctggagttgagcgggaaccttgggatagcttgtgagggtgtccaga

SEQ ID NO: 94496 - DNA, 77 bp, Homo sapiens
agtggatgtgaagatgtcagcctccctggagttgagcgggaaccttgggatagcttgtgagggtgtccagaagccaa

SEQ ID NO: 94497 - DNA, 75 bp, Homo sapiens
ctccctggagttgagcgggaaccttgggatagcttgtgagggtgtccagaagccaaggcaatggtagaggccaca

SEQ ID NO: 94498 - DNA, 73 bp, Homo sapiens
agttgagcgggaaccttgggatagcttgtgagggtgtccagaagccaaggcaatggtagaggccacaactctt

SEQ ID NO: 94499 - DNA, 72 bp, Homo sapiens
cgggaaccttgggatagcttgtgagggtgtccagaagccaaggcaatggtagaggccacaactctttgtctt

SEQ ID NO: 94500 - DNA, 78 bp, Homo sapiens
tagcttgtgagggtgtccagaagccaaggcaatggtagaggccacaactctttgtctttgattggctagtagaatgta

SEQ ID NO: 94501 - DNA, 75 bp, Homo sapiens
ggtgtccagaagccaaggcaatggtagaggccacaactctttgtctttgattggctagtagaatgtagggtgaaa

SEQ ID NO: 94502 - DNA, 73 bp, Homo sapiens
aagccaaggcaatggtagaggccacaactctttgtctttgattggctagtagaatgtagggtgaaaagtgctt

SEQ ID NO: 94503 - DNA, 71 bp, Homo sapiens
gtagaatgtagggtgaaaagtgcttttgagtatgattaccaatatgggttaacccggatttacatgggcta

SEQ ID NO: 94504 - DNA, 73 bp, Homo sapiens
tagggtgaaaagtgcttttgagtatgattaccaatatgggttaacccggatttacatgggctagctcaggatc

SEQ ID NO: 94505 - DNA, 74 bp, Homo sapiens
cttttgagtatgattaccaatatgggttaacccggatttacatgggctagctcaggatccacctggtgatgaaa

SEQ ID NO: 94506 - DNA, 77 bp, Homo sapiens
agtatgattaccaatatgggttaacccggatttacatgggctagctcaggatccacctggtgatgaaatgtgtgcac

SEQ ID NO: 94507 - DNA, 77 bp, Homo sapiens
aatatgggttaacccggatttacatgggctagctcaggatccacctggtgatgaaatgtgtgcactggaaatgatta

SEQ ID NO: 94508 - DNA, 81 bp, Homo sapiens
ttaacccggatttacatgggctagctcaggatccacctggtgatgaaatgtgtgcactggaaatgattataatcatgtgta

SEQ ID NO: 94509 - DNA, 82 bp, Homo sapiens
tttacatgggctagctcaggatccacctggtgatgaaatgtgtgcactggaaatgattataatcatgtgtaaattgagttac

SEQ ID NO: 94510 - DNA, 81 bp, Homo sapiens
tcaggatccacctggtgatgaaatgtgtgcactggaaatgattataatcatgtgtaaattgagttactgtgcttttgcttt

SEQ ID NO: 94511 - DNA, 81 bp, Homo sapiens
atccacctggtgatgaaatgtgtgcactggaaatgattataatcatgtgtaaattgagttactgtgcttttgcttttgcag

SEQ ID NO: 94512 - DNA, 78 bp, Homo sapiens
aaatgattataatcatgtgtaaattgagttactgtgcttttgcttttgcagtgtgctccaacaggccttgaataggga

SEQ ID NO: 94513 - DNA, 73 bp, Homo sapiens
aaattgagttactgtgcttttgcttttgcagtgtgctccaacaggccttgaatagggagtggggtagaaataa

SEQ ID NO: 94514 - DNA, 75 bp, Homo sapiens
gcttttgcttttgcagtgtgctccaacaggccttgaatagggagtggggtagaaataacctctggagataatgtg

SEQ ID NO: 94515 - DNA, 75 bp, Homo sapiens
ttttgcagtgtgctccaacaggccttgaatagggagtggggtagaaataacctctggagataatgtgtatggtaa

SEQ ID NO: 94516 - DNA, 73 bp, Homo sapiens
gtgtgctccaacaggccttgaatagggagtggggtagaaataacctctggagataatgtgtatggtaagaaaa

SEQ ID NO: 94517 - DNA, 72 bp, Homo sapiens
acaggccttgaatagggagtggggtagaaataacctctggagataatgtgtatggtaagaaaagccctgctc

SEQ ID NO: 94518 - DNA, 72 bp, Homo sapiens
aatagggagtggggtagaaataacctctggagataatgtgtatggtaagaaaagccctgctctgtgtcctac

SEQ ID NO: 94519 - DNA, 76 bp, Homo sapiens
taacctctggagataatgtgtatggtaagaaaagccctgctctgtgtcctacttggaccttcactggttctggctg

SEQ ID NO: 94520 - DNA, 78 bp, Homo sapiens
tatggtaagaaaagccctgctctgtgtcctacttggaccttcactggttctggctgtcactcatggccctgttggtca

SEQ ID NO: 94521 - DNA, 79 bp, Homo sapiens
cctgctctgtgtcctacttggaccttcactggttctggctgtcactcatggccctgttggtcagtgggtctgagttatg

SEQ ID NO: 94522 - DNA, 82 bp, Homo sapiens
tgtgtcctacttggaccttcactggttctggctgtcactcatggccctgttggtcagtgggtctgagttatggctgctctca

SEQ ID NO: 94523 - DNA, 84 bp, Homo sapiens
cttggaccttcactggttctggctgtcactcatggccctgttggtcagtgggtctgagttatggctgctctcatgagagatcta

SEQ ID NO: 94524 - DNA, 84 bp, Homo sapiens
actggttctggctgtcactcatggccctgttggtcagtgggtctgagttatggctgctctcatgagagatctacatgggtattg

SEQ ID NO: 94525 - DNA, 83 bp, Homo sapiens
tcagtgggtctgagttatggctgctctcatgagagatctacatgggtattgggtctatggcaaagcagctgttccctatggtt

SEQ ID NO: 94526 - DNA, 84 bp, Homo sapiens
tctgagttatggctgctctcatgagagatctacatgggtattgggtctatggcaaagcagctgttccctatggtttgctgtttg

SEQ ID NO: 94527 - DNA, 82 bp, Homo sapiens
ctgctctcatgagagatctacatgggtattgggtctatggcaaagcagctgttccctatggtttgctgtttggtgataacca

SEQ ID NO: 94528 - DNA, 79 bp, Homo sapiens
atgagagatctacatgggtattgggtctatggcaaagcagctgttccctatggtttgctgtttggtgataaccagcctg

SEQ ID NO: 94529 - DNA, 79 bp, Homo sapiens
atctacatgggtattgggtctatggcaaagcagctgttccctatggtttgctgtttggtgataaccagcctggatcagc

SEQ ID NO: 94530 - DNA, 81 bp, Homo sapiens
caaagcagctgttccctatggtttgctgtttggtgataaccagcctggatcagcccagtatatgtggccacaacagcatgt

SEQ ID NO: 94531 - DNA, 80 bp, Homo sapiens
agctgttccctatggtttgctgtttggtgataaccagcctggatcagcccagtatatgtggccacaacagcatgttggcc

SEQ ID NO: 94532 - DNA, 81 bp, Homo sapiens
ctgtttggtgataaccagcctggatcagcccagtatatgtggccacaacagcatgttggcctgctcagtgggggcacttgg

SEQ ID NO: 94533 - DNA, 82 bp, Homo sapiens
ataaccagcctggatcagcccagtatatgtggccacaacagcatgttggcctgctcagtgggggcacttgggtgggagagca

SEQ ID NO: 94534 - DNA, 82 bp, Homo sapiens
tggatcagcccagtatatgtggccacaacagcatgttggcctgctcagtgggggcacttgggtgggagagcagggggcttca

SEQ ID NO: 94535 - DNA, 80 bp, Homo sapiens
agtatatgtggccacaacagcatgttggcctgctcagtgggggcacttgggtgggagagcagggggcttcagcctgtaca

SEQ ID NO: 94536 - DNA, 78 bp, Homo sapiens
acaacagcatgttggcctgctcagtgggggcacttgggtgggagagcagggggcttcagcctgtacagaccaaacaca

SEQ ID NO: 94537 - DNA, 76 bp, Homo sapiens
atgttggcctgctcagtgggggcacttgggtgggagagcagggggcttcagcctgtacagaccaaacacaatctac

SEQ ID NO: 94538 - DNA, 76 bp, Homo sapiens
tcagtgggggcacttgggtgggagagcagggggcttcagcctgtacagaccaaacacaatctacttggattcgtgc

SEQ ID NO: 94539 - DNA, 79 bp, Homo sapiens
gagagcagggggcttcagcctgtacagaccaaacacaatctacttggattcgtgctctacaggtatgaatgagttcaaa

SEQ ID NO: 94540 - DNA, 80 bp, Homo sapiens
gggcttcagcctgtacagaccaaacacaatctacttggattcgtgctctacaggtatgaatgagttcaaacatgatccca

SEQ ID NO: 94541 - DNA, 80 bp, Homo sapiens
cctgtacagaccaaacacaatctacttggattcgtgctctacaggtatgaatgagttcaaacatgatcccagctccacaa

SEQ ID NO: 94542 - DNA, 81 bp, Homo sapiens
aaacacaatctacttggattcgtgctctacaggtatgaatgagttcaaacatgatcccagctccacaagatctcacccatc

SEQ ID NO: 94543 - DNA, 82 bp, Homo sapiens
aatctacttggattcgtgctctacaggtatgaatgagttcaaacatgatcccagctccacaagatctcacccatctggaatg

SEQ ID NO: 94544 - DNA, 83 bp, Homo sapiens
attcgtgctctacaggtatgaatgagttcaaacatgatcccagctccacaagatctcacccatctggaatggaagtgacctga

SEQ ID NO: 94545 - DNA, 75 bp, Homo sapiens
aagatctcacccatctggaatggaagtgacctgaaatccatttcaccaatgcttctcttccctttaaagagacac

SEQ ID NO: 94546 - DNA, 73 bp, Homo sapiens
atctggaatggaagtgacctgaaatccatttcaccaatgcttctcttccctttaaagagacacctgccttctt

SEQ ID NO: 94547 - DNA, 73 bp, Homo sapiens
atggaagtgacctgaaatccatttcaccaatgcttctcttccctttaaagagacacctgccttcttttagaca

SEQ ID NO: 94548 - DNA, 76 bp, Homo sapiens
cctgaaatccatttcaccaatgcttctcttccctttaaagagacacctgccttcttttagacagctgctgagatgg

SEQ ID NO: 94549 - DNA, 77 bp, Homo sapiens
atttcaccaatgcttctcttccctttaaagagacacctgccttcttttagacagctgctgagatgggcagcttatcc

SEQ ID NO: 94550 - DNA, 81 bp, Homo sapiens
ttctcttccctttaaagagacacctgccttcttttagacagctgctgagatgggcagcttatcctctctggcagacagcag

SEQ ID NO: 94551 - DNA, 81 bp, Homo sapiens
ttaaagagacacctgccttcttttagacagctgctgagatgggcagcttatcctctctggcagacagcaggttcttcctta

SEQ ID NO: 94552 - DNA, 81 bp, Homo sapiens
acctgccttcttttagacagctgctgagatgggcagcttatcctctctggcagacagcaggttcttccttacagctattaa

SEQ ID NO: 94553 - DNA, 81 bp, Homo sapiens
tgctgagatgggcagcttatcctctctggcagacagcaggttcttccttacagctattaagtttcactcatgggtcctagt

SEQ ID NO: 94554 - DNA, 78 bp, Homo sapiens
atgggcagcttatcctctctggcagacagcaggttcttccttacagctattaagtttcactcatgggtcctagttata

SEQ ID NO: 94555 - DNA, 78 bp, Homo sapiens
ttatcctctctggcagacagcaggttcttccttacagctattaagtttcactcatgggtcctagttatactcagagga

SEQ ID NO: 94556 - DNA, 74 bp, Homo sapiens
agacagcaggttcttccttacagctattaagtttcactcatgggtcctagttatactcagaggagtgacctggg

SEQ ID NO: 94557 - DNA, 74 bp, Homo sapiens
ttcttccttacagctattaagtttcactcatgggtcctagttatactcagaggagtgacctgggtctagcaaac

SEQ ID NO: 94558 - DNA, 81 bp, Homo sapiens
atgggtcctagttatactcagaggagtgacctgggtctagcaaactgtgcttgacttcatccaagaatctgcagagctatg

SEQ ID NO: 94559 - DNA, 83 bp, Homo sapiens
ctagttatactcagaggagtgacctgggtctagcaaactgtgcttgacttcatccaagaatctgcagagctatggaagatatg

SEQ ID NO: 94560 - DNA, 83 bp, Homo sapiens
agaggagtgacctgggtctagcaaactgtgcttgacttcatccaagaatctgcagagctatggaagatatggacaccatattc

SEQ ID NO: 94561 - DNA, 83 bp, Homo sapiens
acctgggtctagcaaactgtgcttgacttcatccaagaatctgcagagctatggaagatatggacaccatattctgcctgacc

SEQ ID NO: 94562 - DNA, 82 bp, Homo sapiens
ttgacttcatccaagaatctgcagagctatggaagatatggacaccatattctgcctgacccctcagaagcctaactttaca

SEQ ID NO: 94563 - DNA, 82 bp, Homo sapiens
atctgcagagctatggaagatatggacaccatattctgcctgacccctcagaagcctaactttacatggaatgacaccactc

SEQ ID NO: 94564 - DNA, 80 bp, Homo sapiens
tatggaagatatggacaccatattctgcctgacccctcagaagcctaactttacatggaatgacaccactctgccctcta

SEQ ID NO: 94565 - DNA, 79 bp, Homo sapiens
tatggacaccatattctgcctgacccctcagaagcctaactttacatggaatgacaccactctgccctctaagcctcca

SEQ ID NO: 94566 - DNA, 77 bp, Homo sapiens
atattctgcctgacccctcagaagcctaactttacatggaatgacaccactctgccctctaagcctccagactgccc

SEQ ID NO: 94567 - DNA, 75 bp, Homo sapiens
ccctcagaagcctaactttacatggaatgacaccactctgccctctaagcctccagactgccctggggcctttga

SEQ ID NO: 94568 - DNA, 73 bp, Homo sapiens
ctaactttacatggaatgacaccactctgccctctaagcctccagactgccctggggcctttgacccaaagaa

SEQ ID NO: 94569 - DNA, 75 bp, Homo sapiens
atggaatgacaccactctgccctctaagcctccagactgccctggggcctttgacccaaagaacacctgacatta

SEQ ID NO: 94570 - DNA, 74 bp, Homo sapiens
acaccactctgccctctaagcctccagactgccctggggcctttgacccaaagaacacctgacattattcatct

SEQ ID NO: 94571 - DNA, 75 bp, Homo sapiens
cctctaagcctccagactgccctggggcctttgacccaaagaacacctgacattattcatcttccatgggagata

SEQ ID NO: 94572 - DNA, 74 bp, Homo sapiens
aagcctccagactgccctggggcctttgacccaaagaacacctgacattattcatcttccatgggagatacagg

SEQ ID NO: 94573 - DNA, 73 bp, Homo sapiens
cctggggcctttgacccaaagaacacctgacattattcatcttccatgggagatacagggacagggtggacac

SEQ ID NO: 94574 - DNA, 75 bp, Homo sapiens
tttgacccaaagaacacctgacattattcatcttccatgggagatacagggacagggtggacactgagagtttgt

SEQ ID NO: 94575 - DNA, 78 bp, Homo sapiens
aagaacacctgacattattcatcttccatgggagatacagggacagggtggacactgagagtttgttggaccatcata

SEQ ID NO: 94576 - DNA, 78 bp, Homo sapiens
acattattcatcttccatgggagatacagggacagggtggacactgagagtttgttggaccatcatagagaaggccca

SEQ ID NO: 94577 - DNA, 78 bp, Homo sapiens
tcttccatgggagatacagggacagggtggacactgagagtttgttggaccatcatagagaaggcccactgatttgta

SEQ ID NO: 94578 - DNA, 76 bp, Homo sapiens
acactgagagtttgttggaccatcatagagaaggcccactgatttgtattcataagcccaaaggcactgaagtaat

SEQ ID NO: 94579 - DNA, 76 bp, Homo sapiens
agagtttgttggaccatcatagagaaggcccactgatttgtattcataagcccaaaggcactgaagtaattgtaca

SEQ ID NO: 94580 - DNA, 77 bp, Homo sapiens
atcatagagaaggcccactgatttgtattcataagcccaaaggcactgaagtaattgtacagagactcaattttgta

SEQ ID NO: 94581 - DNA, 72 bp, Homo sapiens
actgatttgtattcataagcccaaaggcactgaagtaattgtacagagactcaattttgtaattttggtggt

SEQ ID NO: 94582 - DNA, 70 bp, Homo sapiens
attcataagcccaaaggcactgaagtaattgtacagagactcaattttgtaattttggtggtttacttcc

SEQ ID NO: 94583 - DNA, 69 bp, Homo sapiens
aaggcactgaagtaattgtacagagactcaattttgtaattttggtggtttacttcctatgaccctttc

SEQ ID NO: 94584 - DNA, 69 bp, Homo sapiens
aagtaattgtacagagactcaattttgtaattttggtggtttacttcctatgaccctttctcctccaca

SEQ ID NO: 94585 - DNA, 72 bp, Homo sapiens
tgtacagagactcaattttgtaattttggtggtttacttcctatgaccctttctcctccacatccaagagtc

SEQ ID NO: 94586 - DNA, 70 bp, Homo sapiens
aattttgtaattttggtggtttacttcctatgaccctttctcctccacatccaagagtcctgctcactaa

SEQ ID NO: 94587 - DNA, 72 bp, Homo sapiens
attttggtggtttacttcctatgaccctttctcctccacatccaagagtcctgctcactaaggaaccatgaa

SEQ ID NO: 94588 - DNA, 74 bp, Homo sapiens
tttacttcctatgaccctttctcctccacatccaagagtcctgctcactaaggaaccatgaactacattaatta

SEQ ID NO: 94589 - DNA, 73 bp, Homo sapiens
aagagtcctgctcactaaggaaccatgaactacattaattaccctgagctccaggcttttatactgatacttt

SEQ ID NO: 94590 - DNA, 74 bp, Homo sapiens
ctcactaaggaaccatgaactacattaattaccctgagctccaggcttttatactgatacttttctgtccaaca

SEQ ID NO: 94591 - DNA, 73 bp, Homo sapiens
aactacattaattaccctgagctccaggcttttatactgatacttttctgtccaacacttcaaggccaccaga

SEQ ID NO: 94592 - DNA, 75 bp, Homo sapiens
tccaggcttttatactgatacttttctgtccaacacttcaaggccaccagacactcattctccgaacattccaat

SEQ ID NO: 94593 - DNA, 76 bp, Homo sapiens
atacttttctgtccaacacttcaaggccaccagacactcattctccgaacattccaattaaggatcagagtccaca

SEQ ID NO: 94594 - DNA, 79 bp, Homo sapiens
tgtccaacacttcaaggccaccagacactcattctccgaacattccaattaaggatcagagtccacatctcaccaccca

SEQ ID NO: 94595 - DNA, 81 bp, Homo sapiens
ttcaaggccaccagacactcattctccgaacattccaattaaggatcagagtccacatctcaccacccagagcagttctca

SEQ ID NO: 94596 - DNA, 80 bp, Homo sapiens
acactcattctccgaacattccaattaaggatcagagtccacatctcaccacccagagcagttctcagatatagaaggaa

SEQ ID NO: 94597 - DNA, 78 bp, Homo sapiens
attctccgaacattccaattaaggatcagagtccacatctcaccacccagagcagttctcagatatagaaggaagccc

SEQ ID NO: 94598 - DNA, 81 bp, Homo sapiens
attccaattaaggatcagagtccacatctcaccacccagagcagttctcagatatagaaggaagccccataatgatcaagc

SEQ ID NO: 94599 - DNA, 79 bp, Homo sapiens
aaggatcagagtccacatctcaccacccagagcagttctcagatatagaaggaagccccataatgatcaagcccctaaa

SEQ ID NO: 94600 - DNA, 77 bp, Homo sapiens
catctcaccacccagagcagttctcagatatagaaggaagccccataatgatcaagcccctaaaactcttcccaata

SEQ ID NO: 94601 - DNA, 73 bp, Homo sapiens
acccagagcagttctcagatatagaaggaagccccataatgatcaagcccctaaaactcttcccaatagattt

SEQ ID NO: 94602 - DNA, 73 bp, Homo sapiens
agttctcagatatagaaggaagccccataatgatcaagcccctaaaactcttcccaatagattttctttcatc

SEQ ID NO: 94603 - DNA, 73 bp, Homo sapiens
agatatagaaggaagccccataatgatcaagcccctaaaactcttcccaatagattttctttcatcctgagcc

SEQ ID NO: 94604 - DNA, 72 bp, Homo sapiens
aagccccataatgatcaagcccctaaaactcttcccaatagattttctttcatcctgagcccttgcacttcc

SEQ ID NO: 94605 - DNA, 73 bp, Homo sapiens
taaaactcttcccaatagattttctttcatcctgagcccttgcacttcccttgtatctgccccagtggaccac

SEQ ID NO: 94606 - DNA, 74 bp, Homo sapiens
ctcttcccaatagattttctttcatcctgagcccttgcacttcccttgtatctgccccagtggaccacccctga

SEQ ID NO: 94607 - DNA, 75 bp, Homo sapiens
ttttctttcatcctgagcccttgcacttcccttgtatctgccccagtggaccacccctgagctcttagataggtg

SEQ ID NO: 94608 - DNA, 76 bp, Homo sapiens
ttgcacttcccttgtatctgccccagtggaccacccctgagctcttagataggtgggatgctaggtttggaggcta

SEQ ID NO: 94609 - DNA, 77 bp, Homo sapiens
ttgtatctgccccagtggaccacccctgagctcttagataggtgggatgctaggtttggaggctaccattgtgagtg

SEQ ID NO: 94610 - DNA, 75 bp, Homo sapiens
ctcttagataggtgggatgctaggtttggaggctaccattgtgagtgttgatgcctccttttagagacctaacat

SEQ ID NO: 94611 - DNA, 77 bp, Homo sapiens
ataggtgggatgctaggtttggaggctaccattgtgagtgttgatgcctccttttagagacctaacattcatgagtg

SEQ ID NO: 94612 - DNA, 77 bp, Homo sapiens
atgctaggtttggaggctaccattgtgagtgttgatgcctccttttagagacctaacattcatgagtggatttcagt

SEQ ID NO: 94613 - DNA, 77 bp, Homo sapiens
aggctaccattgtgagtgttgatgcctccttttagagacctaacattcatgagtggatttcagttggtgaatgccct

SEQ ID NO: 94614 - DNA, 78 bp, Homo sapiens
attgtgagtgttgatgcctccttttagagacctaacattcatgagtggatttcagttggtgaatgccctttgatgacc

SEQ ID NO: 94615 - DNA, 76 bp, Homo sapiens
ttgatgcctccttttagagacctaacattcatgagtggatttcagttggtgaatgccctttgatgaccttttccca

SEQ ID NO: 94616 - DNA, 75 bp, Homo sapiens
tccttttagagacctaacattcatgagtggatttcagttggtgaatgccctttgatgaccttttcccatctcttc

SEQ ID NO: 94617 - DNA, 76 bp, Homo sapiens
acctaacattcatgagtggatttcagttggtgaatgccctttgatgaccttttcccatctcttctggaggtgggca

SEQ ID NO: 94618 - DNA, 75 bp, Homo sapiens
agtggatttcagttggtgaatgccctttgatgaccttttcccatctcttctggaggtgggcaggtgggatgcaaa

SEQ ID NO: 94619 - DNA, 74 bp, Homo sapiens
atttcagttggtgaatgccctttgatgaccttttcccatctcttctggaggtgggcaggtgggatgcaaaagac

SEQ ID NO: 94620 - DNA, 77 bp, Homo sapiens
atgccctttgatgaccttttcccatctcttctggaggtgggcaggtgggatgcaaaagactggcttgatctctacaa

SEQ ID NO: 94621 - DNA, 79 bp, Homo sapiens
atgaccttttcccatctcttctggaggtgggcaggtgggatgcaaaagactggcttgatctctacaagacatctctata

SEQ ID NO: 94622 - DNA, 83 bp, Homo sapiens
ttctggaggtgggcaggtgggatgcaaaagactggcttgatctctacaagacatctctatagtcagtgccatgcaaaagccca

SEQ ID NO: 94623 - DNA, 81 bp, Homo sapiens
caggtgggatgcaaaagactggcttgatctctacaagacatctctatagtcagtgccatgcaaaagcccatccctggttac

SEQ ID NO: 94624 - DNA, 79 bp, Homo sapiens
atgcaaaagactggcttgatctctacaagacatctctatagtcagtgccatgcaaaagcccatccctggttactaaaaa

SEQ ID NO: 94625 - DNA, 79 bp, Homo sapiens
atctctacaagacatctctatagtcagtgccatgcaaaagcccatccctggttactaaaaaactagaagagtctgctca

SEQ ID NO: 94626 - DNA, 79 bp, Homo sapiens
atagtcagtgccatgcaaaagcccatccctggttactaaaaaactagaagagtctgctcatgtgcacaaatatggctta

SEQ ID NO: 94627 - DNA, 80 bp, Homo sapiens
atgcaaaagcccatccctggttactaaaaaactagaagagtctgctcatgtgcacaaatatggcttagatatctctgctg

SEQ ID NO: 94628 - DNA, 80 bp, Homo sapiens
atccctggttactaaaaaactagaagagtctgctcatgtgcacaaatatggcttagatatctctgctgtgcttcggagga

SEQ ID NO: 94629 - DNA, 86 bp, Homo sapiens
ttactaaaaaactagaagagtctgctcatgtgcacaaatatggcttagatatctctgctgtgcttcggaggatcagatccatgatc

SEQ ID NO: 94630 - DNA, 86 bp, Homo sapiens
aaactagaagagtctgctcatgtgcacaaatatggcttagatatctctgctgtgcttcggaggatcagatccatgatcctgaaaaa

SEQ ID NO: 94631 - DNA, 89 bp, Homo sapiens
agtctgctcatgtgcacaaatatggcttagatatctctgctgtgcttcggaggatcagatccatgatcctgaaaaatgtgtcagaagaa

SEQ ID NO: 94632 - DNA, 84 bp, Homo sapiens
acaaatatggcttagatatctctgctgtgcttcggaggatcagatccatgatcctgaaaaatgtgtcagaagaaactggagcta

SEQ ID NO: 94633 - DNA, 86 bp, Homo sapiens
tatggcttagatatctctgctgtgcttcggaggatcagatccatgatcctgaaaaatgtgtcagaagaaactggagctagaacagc

SEQ ID NO: 94634 - DNA, 82 bp, Homo sapiens
atatctctgctgtgcttcggaggatcagatccatgatcctgaaaaatgtgtcagaagaaactggagctagaacagctccccc

SEQ ID NO: 94635 - DNA, 81 bp, Homo sapiens
tgtgcttcggaggatcagatccatgatcctgaaaaatgtgtcagaagaaactggagctagaacagctccccccacactcca

SEQ ID NO: 94636 - DNA, 78 bp, Homo sapiens
aggatcagatccatgatcctgaaaaatgtgtcagaagaaactggagctagaacagctccccccacactccaccactaa

SEQ ID NO: 94637 - DNA, 75 bp, Homo sapiens
atgatcctgaaaaatgtgtcagaagaaactggagctagaacagctccccccacactccaccactaacctctctcc

SEQ ID NO: 94638 - DNA, 76 bp, Homo sapiens
agaaactggagctagaacagctccccccacactccaccactaacctctctccctgctgttcagtctatgacctcaa

SEQ ID NO: 94639 - DNA, 77 bp, Homo sapiens
agctagaacagctccccccacactccaccactaacctctctccctgctgttcagtctatgacctcaaaggcagatcc

SEQ ID NO: 94640 - DNA, 77 bp, Homo sapiens
ctccccccacactccaccactaacctctctccctgctgttcagtctatgacctcaaaggcagatccctgcaagacaa

SEQ ID NO: 94641 - DNA, 78 bp, Homo sapiens
ccacactccaccactaacctctctccctgctgttcagtctatgacctcaaaggcagatccctgcaagacaaagccaag

SEQ ID NO: 94642 - DNA, 79 bp, Homo sapiens
actaacctctctccctgctgttcagtctatgacctcaaaggcagatccctgcaagacaaagccaaggccttgcattcta

SEQ ID NO: 94643 - DNA, 83 bp, Homo sapiens
tccctgctgttcagtctatgacctcaaaggcagatccctgcaagacaaagccaaggccttgcattctatcacttctagacatg

SEQ ID NO: 94644 - DNA, 83 bp, Homo sapiens
ctgttcagtctatgacctcaaaggcagatccctgcaagacaaagccaaggccttgcattctatcacttctagacatgtataca

SEQ ID NO: 94645 - DNA, 81 bp, Homo sapiens
tatgacctcaaaggcagatccctgcaagacaaagccaaggccttgcattctatcacttctagacatgtatacatggaaaac

SEQ ID NO: 94646 - DNA, 73 bp, Homo sapiens
aagacaaagccaaggccttgcattctatcacttctagacatgtatacatggaaaacctccaacagggaaactt

SEQ ID NO: 94647 - DNA, 75 bp, Homo sapiens
aaagccaaggccttgcattctatcacttctagacatgtatacatggaaaacctccaacagggaaactttgcatgg

SEQ ID NO: 94648 - DNA, 74 bp, Homo sapiens
cattctatcacttctagacatgtatacatggaaaacctccaacagggaaactttgcatgggaggagtaaacaaa

SEQ ID NO: 94649 - DNA, 75 bp, Homo sapiens
tatcacttctagacatgtatacatggaaaacctccaacagggaaactttgcatgggaggagtaaacaaatctgaa

SEQ ID NO: 94650 - DNA, 75 bp, Homo sapiens
tgtatacatggaaaacctccaacagggaaactttgcatgggaggagtaaacaaatctgaatctcagcttgtctct

SEQ ID NO: 94651 - DNA, 74 bp, Homo sapiens
acatggaaaacctccaacagggaaactttgcatgggaggagtaaacaaatctgaatctcagcttgtctcttcta

SEQ ID NO: 94652 - DNA, 72 bp, Homo sapiens
aacagggaaactttgcatgggaggagtaaacaaatctgaatctcagcttgtctcttctagttggatttactt

SEQ ID NO: 94653 - DNA, 72 bp, Homo sapiens
aaactttgcatgggaggagtaaacaaatctgaatctcagcttgtctcttctagttggatttacttttcctat

SEQ ID NO: 94654 - DNA, 70 bp, Homo sapiens
ggaggagtaaacaaatctgaatctcagcttgtctcttctagttggatttacttttcctatttccttgttt

SEQ ID NO: 94655 - DNA, 73 bp, Homo sapiens
ctgaatctcagcttgtctcttctagttggatttacttttcctatttccttgttttacttggctgtgatttgaa

SEQ ID NO: 94656 - DNA, 72 bp, Homo sapiens
ttgtctcttctagttggatttacttttcctatttccttgttttacttggctgtgatttgaagctggtcacag

SEQ ID NO: 94657 - DNA, 72 bp, Homo sapiens
tctagttggatttacttttcctatttccttgttttacttggctgtgatttgaagctggtcacaggctaagaa

SEQ ID NO: 94658 - DNA, 74 bp, Homo sapiens
ttttcctatttccttgttttacttggctgtgatttgaagctggtcacaggctaagaaggagctcagactgttaa

SEQ ID NO: 94659 - DNA, 74 bp, Homo sapiens
atttccttgttttacttggctgtgatttgaagctggtcacaggctaagaaggagctcagactgttaagtaatgg

SEQ ID NO: 94660 - DNA, 75 bp, Homo sapiens
gttttacttggctgtgatttgaagctggtcacaggctaagaaggagctcagactgttaagtaatggggaagccaa

SEQ ID NO: 94661 - DNA, 80 bp, Homo sapiens
tggtcacaggctaagaaggagctcagactgttaagtaatggggaagccaagtcagggatttgagatgacatgactatcca

SEQ ID NO: 94662 - DNA, 76 bp, Homo sapiens
ctaagaaggagctcagactgttaagtaatggggaagccaagtcagggatttgagatgacatgactatccacgttta

SEQ ID NO: 94663 - DNA, 74 bp, Homo sapiens
agctcagactgttaagtaatggggaagccaagtcagggatttgagatgacatgactatccacgtttatgttttt

SEQ ID NO: 94664 - DNA, 71 bp, Homo sapiens
actgttaagtaatggggaagccaagtcagggatttgagatgacatgactatccacgtttatgttttttttc

SEQ ID NO: 94665 - DNA, 70 bp, Homo sapiens
aagtcagggatttgagatgacatgactatccacgtttatgttttttttcttctaacctaccctccagttg

SEQ ID NO: 94666 - DNA, 70 bp, Homo sapiens
ttgagatgacatgactatccacgtttatgttttttttcttctaacctaccctccagttgggttgaccatt

SEQ ID NO: 94667 - DNA, 67 bp, Homo sapiens
tgacatgactatccacgtttatgttttttttcttctaacctaccctccagttgggttgaccattttt

SEQ ID NO: 94668 - DNA, 62 bp, Homo sapiens
atccacgtttatgttttttttcttctaacctaccctccagttgggttgaccatttttttccc

SEQ ID NO: 94669 - DNA, 66 bp, Homo sapiens
ttttttcttctaacctaccctccagttgggttgaccatttttttccctggggatcctggcccagca

SEQ ID NO: 94670 - DNA, 72 bp, Homo sapiens
tccagttgggttgaccatttttttccctggggatcctggcccagcacaacctgttgacatgacttaggaaca

SEQ ID NO: 94671 - DNA, 74 bp, Homo sapiens
ttgaccatttttttccctggggatcctggcccagcacaacctgttgacatgacttaggaacagcgtcctgttca

SEQ ID NO: 94672 - DNA, 80 bp, Homo sapiens
ggatcctggcccagcacaacctgttgacatgacttaggaacagcgtcctgttcatgcttcctcttgggctcacccatgtc

SEQ ID NO: 94673 - DNA, 80 bp, Homo sapiens
ccagcacaacctgttgacatgacttaggaacagcgtcctgttcatgcttcctcttgggctcacccatgtcttccagagtg

SEQ ID NO: 94674 - DNA, 78 bp, Homo sapiens
acaacctgttgacatgacttaggaacagcgtcctgttcatgcttcctcttgggctcacccatgtcttccagagtgtta

SEQ ID NO: 94675 - DNA, 78 bp, Homo sapiens
acatgacttaggaacagcgtcctgttcatgcttcctcttgggctcacccatgtcttccagagtgttactcctggttga

SEQ ID NO: 94676 - DNA, 81 bp, Homo sapiens
aacagcgtcctgttcatgcttcctcttgggctcacccatgtcttccagagtgttactcctggttgagcttggtgctgatga

SEQ ID NO: 94677 - DNA, 80 bp, Homo sapiens
tgttcatgcttcctcttgggctcacccatgtcttccagagtgttactcctggttgagcttggtgctgatgacctgtttac

SEQ ID NO: 94678 - DNA, 77 bp, Homo sapiens
ttcctcttgggctcacccatgtcttccagagtgttactcctggttgagcttggtgctgatgacctgtttacccagcc

SEQ ID NO: 94679 - DNA, 80 bp, Homo sapiens
tcttccagagtgttactcctggttgagcttggtgctgatgacctgtttacccagcccaggagtggcaagctgcagcctaa

SEQ ID NO: 94680 - DNA, 77 bp, Homo sapiens
agtgttactcctggttgagcttggtgctgatgacctgtttacccagcccaggagtggcaagctgcagcctaaggaag

SEQ ID NO: 94681 - DNA, 78 bp, Homo sapiens
ttgagcttggtgctgatgacctgtttacccagcccaggagtggcaagctgcagcctaaggaagggtggctttcttcat

SEQ ID NO: 94682 - DNA, 75 bp, Homo sapiens
cttggtgctgatgacctgtttacccagcccaggagtggcaagctgcagcctaaggaagggtggctttcttcattt

SEQ ID NO: 94683 - DNA, 73 bp, Homo sapiens
atgacctgtttacccagcccaggagtggcaagctgcagcctaaggaagggtggctttcttcattttgtcccaa

SEQ ID NO: 94684 - DNA, 74 bp, Homo sapiens
agcccaggagtggcaagctgcagcctaaggaagggtggctttcttcattttgtcccaaggcagtgaggtaccaa

SEQ ID NO: 94685 - DNA, 75 bp, Homo sapiens
tggcaagctgcagcctaaggaagggtggctttcttcattttgtcccaaggcagtgaggtaccaaggaattatcat

SEQ ID NO: 94686 - DNA, 70 bp, Homo sapiens
cagcctaaggaagggtggctttcttcattttgtcccaaggcagtgaggtaccaaggaattatcatttcct

SEQ ID NO: 94687 - DNA, 71 bp, Homo sapiens
taaggaagggtggctttcttcattttgtcccaaggcagtgaggtaccaaggaattatcatttccttcaatg

SEQ ID NO: 94688 - DNA, 75 bp, Homo sapiens
attttgtcccaaggcagtgaggtaccaaggaattatcatttccttcaatgtctctggatctgggttgggcagtca

SEQ ID NO: 94689 - DNA, 77 bp, Homo sapiens
gtaccaaggaattatcatttccttcaatgtctctggatctgggttgggcagtcactcctgcagaggtaacaggataa

SEQ ID NO: 94690 - DNA, 77 bp, Homo sapiens
aattatcatttccttcaatgtctctggatctgggttgggcagtcactcctgcagaggtaacaggataagggcctggc

SEQ ID NO: 94691 - DNA, 78 bp, Homo sapiens
ttccttcaatgtctctggatctgggttgggcagtcactcctgcagaggtaacaggataagggcctggctgctactccc

SEQ ID NO: 94692 - DNA, 78 bp, Homo sapiens
tctctggatctgggttgggcagtcactcctgcagaggtaacaggataagggcctggctgctactccctgggcctcact

SEQ ID NO: 94693 - DNA, 78 bp, Homo sapiens
gttgggcagtcactcctgcagaggtaacaggataagggcctggctgctactccctgggcctcacttctgttgtgtaga

SEQ ID NO: 94694 - DNA, 77 bp, Homo sapiens
actcctgcagaggtaacaggataagggcctggctgctactccctgggcctcacttctgttgtgtagagcagtcttac

SEQ ID NO: 94695 - DNA, 77 bp, Homo sapiens
aggtaacaggataagggcctggctgctactccctgggcctcacttctgttgtgtagagcagtcttactggactgata

SEQ ID NO: 94696 - DNA, 78 bp, Homo sapiens
ataagggcctggctgctactccctgggcctcacttctgttgtgtagagcagtcttactggactgatacctctatgtac

SEQ ID NO: 94697 - DNA, 78 bp, Homo sapiens
ctggctgctactccctgggcctcacttctgttgtgtagagcagtcttactggactgatacctctatgtactctaaggg

SEQ ID NO: 94698 - DNA, 74 bp, Homo sapiens
ccctgggcctcacttctgttgtgtagagcagtcttactggactgatacctctatgtactctaaggggttcccac

SEQ ID NO: 94699 - DNA, 77 bp, Homo sapiens
tcacttctgttgtgtagagcagtcttactggactgatacctctatgtactctaaggggttcccaccagcgacgagga

SEQ ID NO: 94700 - DNA, 76 bp, Homo sapiens
ttgtgtagagcagtcttactggactgatacctctatgtactctaaggggttcccaccagcgacgaggaaatgtaga

SEQ ID NO: 94701 - DNA, 74 bp, Homo sapiens
agtcttactggactgatacctctatgtactctaaggggttcccaccagcgacgaggaaatgtagatcctggtga

SEQ ID NO: 94702 - DNA, 75 bp, Homo sapiens
tggactgatacctctatgtactctaaggggttcccaccagcgacgaggaaatgtagatcctggtgaggacttaca

SEQ ID NO: 94703 - DNA, 76 bp, Homo sapiens
tctatgtactctaaggggttcccaccagcgacgaggaaatgtagatcctggtgaggacttacagcaagagctagtg

SEQ ID NO: 94704 - DNA, 77 bp, Homo sapiens
ggttcccaccagcgacgaggaaatgtagatcctggtgaggacttacagcaagagctagtgtggcaatggggagtgga

SEQ ID NO: 94705 - DNA, 79 bp, Homo sapiens
acgaggaaatgtagatcctggtgaggacttacagcaagagctagtgtggcaatggggagtggaggatgaataaacatga

SEQ ID NO: 94706 - DNA, 80 bp, Homo sapiens
aaatgtagatcctggtgaggacttacagcaagagctagtgtggcaatggggagtggaggatgaataaacatgatgggtca

SEQ ID NO: 94707 - DNA, 83 bp, Homo sapiens
tgaggacttacagcaagagctagtgtggcaatggggagtggaggatgaataaacatgatgggtcagagggaaatgcatcatct

SEQ ID NO: 94708 - DNA, 79 bp, Homo sapiens
aatggggagtggaggatgaataaacatgatgggtcagagggaaatgcatcatcttttgccccagacactgagatttgcc

SEQ ID NO: 94709 - DNA, 80 bp, Homo sapiens
tggaggatgaataaacatgatgggtcagagggaaatgcatcatcttttgccccagacactgagatttgcccttgttccaa

SEQ ID NO: 94710 - DNA, 80 bp, Homo sapiens
tgggtcagagggaaatgcatcatcttttgccccagacactgagatttgcccttgttccaagtggctctggcaagctgtta

SEQ ID NO: 94711 - DNA, 77 bp, Homo sapiens
aaatgcatcatcttttgccccagacactgagatttgcccttgttccaagtggctctggcaagctgttacccatcctt

SEQ ID NO: 94712 - DNA, 77 bp, Homo sapiens
atcatcttttgccccagacactgagatttgcccttgttccaagtggctctggcaagctgttacccatcctttctcca

SEQ ID NO: 94713 - DNA, 77 bp, Homo sapiens
agatttgcccttgttccaagtggctctggcaagctgttacccatcctttctccagctatgtcacagaagtgaccatt

SEQ ID NO: 94714 - DNA, 78 bp, Homo sapiens
ttgttccaagtggctctggcaagctgttacccatcctttctccagctatgtcacagaagtgaccattttgctaaataa

SEQ ID NO: 94715 - DNA, 81 bp, Homo sapiens
aagtggctctggcaagctgttacccatcctttctccagctatgtcacagaagtgaccattttgctaaataagtcatctgca

SEQ ID NO: 94716 - DNA, 79 bp, Homo sapiens
ttacccatcctttctccagctatgtcacagaagtgaccattttgctaaataagtcatctgcatcctcggttctgagtat

SEQ ID NO: 94717 - DNA, 80 bp, Homo sapiens
tttctccagctatgtcacagaagtgaccattttgctaaataagtcatctgcatcctcggttctgagtattcactgggttc

SEQ ID NO: 94718 - DNA, 78 bp, Homo sapiens
tatgtcacagaagtgaccattttgctaaataagtcatctgcatcctcggttctgagtattcactgggttccagtttcc

SEQ ID NO: 94719 - DNA, 74 bp, Homo sapiens
aagtgaccattttgctaaataagtcatctgcatcctcggttctgagtattcactgggttccagtttcctggcct

SEQ ID NO: 94720 - DNA, 74 bp, Homo sapiens
taaataagtcatctgcatcctcggttctgagtattcactgggttccagtttcctggccttgcgttcctgttttc

SEQ ID NO: 94721 - DNA, 72 bp, Homo sapiens
tcggttctgagtattcactgggttccagtttcctggccttgcgttcctgttttcctgcctaaagtgctccaa

SEQ ID NO: 94722 - DNA, 70 bp, Homo sapiens
agtattcactgggttccagtttcctggccttgcgttcctgttttcctgcctaaagtgctccaaatctacc

SEQ ID NO: 94723 - DNA, 69 bp, Homo sapiens
ggttccagtttcctggccttgcgttcctgttttcctgcctaaagtgctccaaatctaccccttctaatg

SEQ ID NO: 94724 - DNA, 71 bp, Homo sapiens
agtttcctggccttgcgttcctgttttcctgcctaaagtgctccaaatctaccccttctaatgttgatgag

SEQ ID NO: 94725 - DNA, 70 bp, Homo sapiens
ttttcctgcctaaagtgctccaaatctaccccttctaatgttgatgagggtccttttttcatgtatgttt

SEQ ID NO: 94726 - DNA, 71 bp, Homo sapiens
ccaaatctaccccttctaatgttgatgagggtccttttttcatgtatgtttttcatgtatgtatgttttcg

SEQ ID NO: 94727 - DNA, 71 bp, Homo sapiens
cccttctaatgttgatgagggtccttttttcatgtatgtttttcatgtatgtatgttttcgttcaaactaa

SEQ ID NO: 94728 - DNA, 75 bp, Homo sapiens
tgttgatgagggtccttttttcatgtatgtttttcatgtatgtatgttttcgttcaaactaaagactgagctctg

SEQ ID NO: 94729 - DNA, 74 bp, Homo sapiens
tccttttttcatgtatgtttttcatgtatgtatgttttcgttcaaactaaagactgagctctgtccaccacaac

SEQ ID NO: 94730 - DNA, 75 bp, Homo sapiens
atgtatgtttttcatgtatgtatgttttcgttcaaactaaagactgagctctgtccaccacaaccccatgcctta

SEQ ID NO: 94731 - DNA, 72 bp, Homo sapiens
tatgtatgttttcgttcaaactaaagactgagctctgtccaccacaaccccatgccttacccaggaattaat

SEQ ID NO: 94732 - DNA, 75 bp, Homo sapiens
ttcaaactaaagactgagctctgtccaccacaaccccatgccttacccaggaattaattgtgccatagtaatctc

SEQ ID NO: 94733 - DNA, 76 bp, Homo sapiens
gactgagctctgtccaccacaaccccatgccttacccaggaattaattgtgccatagtaatctcgatttcctaata

SEQ ID NO: 94734 - DNA, 74 bp, Homo sapiens
tctgtccaccacaaccccatgccttacccaggaattaattgtgccatagtaatctcgatttcctaatagtgccc

SEQ ID NO: 94735 - DNA, 71 bp, Homo sapiens
acaaccccatgccttacccaggaattaattgtgccatagtaatctcgatttcctaatagtgccccctccaa

SEQ ID NO: 94736 - DNA, 72 bp, Homo sapiens
atgccttacccaggaattaattgtgccatagtaatctcgatttcctaatagtgccccctccaaggtgctagg

SEQ ID NO: 94737 - DNA, 74 bp, Homo sapiens
aggaattaattgtgccatagtaatctcgatttcctaatagtgccccctccaaggtgctaggtgctgtaggcacc

SEQ ID NO: 94738 - DNA, 75 bp, Homo sapiens
attgtgccatagtaatctcgatttcctaatagtgccccctccaaggtgctaggtgctgtaggcacccagtaatta

SEQ ID NO: 94739 - DNA, 72 bp, Homo sapiens
atttcctaatagtgccccctccaaggtgctaggtgctgtaggcacccagtaattatgtgtggctagggtaaa

SEQ ID NO: 94740 - DNA, 74 bp, Homo sapiens
ccaaggtgctaggtgctgtaggcacccagtaattatgtgtggctagggtaaagtgaggagccttccagacccca

SEQ ID NO: 94741 - DNA, 78 bp, Homo sapiens
ctgtaggcacccagtaattatgtgtggctagggtaaagtgaggagccttccagaccccagctgctcatgaagtgtgtc

SEQ ID NO: 94742 - DNA, 77 bp, Homo sapiens
acccagtaattatgtgtggctagggtaaagtgaggagccttccagaccccagctgctcatgaagtgtgtcctcagac

SEQ ID NO: 94743 - DNA, 81 bp, Homo sapiens
tagggtaaagtgaggagccttccagaccccagctgctcatgaagtgtgtcctcagacttgcccacattagcaaccatgtga

SEQ ID NO: 94744 - DNA, 83 bp, Homo sapiens
cttccagaccccagctgctcatgaagtgtgtcctcagacttgcccacattagcaaccatgtgactccacttggacaacaggca

SEQ ID NO: 94745 - DNA, 83 bp, Homo sapiens
agctgctcatgaagtgtgtcctcagacttgcccacattagcaaccatgtgactccacttggacaacaggcaccactttccagc

SEQ ID NO: 94746 - DNA, 79 bp, Homo sapiens
aagtgtgtcctcagacttgcccacattagcaaccatgtgactccacttggacaacaggcaccactttccagcctagcat

SEQ ID NO: 94747 - DNA, 81 bp, Homo sapiens
tcctcagacttgcccacattagcaaccatgtgactccacttggacaacaggcaccactttccagcctagcattcaggaatc

SEQ ID NO: 94748 - DNA, 83 bp, Homo sapiens
ttgcccacattagcaaccatgtgactccacttggacaacaggcaccactttccagcctagcattcaggaatctgctgagtaca

SEQ ID NO: 94749 - DNA, 82 bp, Homo sapiens
aaccatgtgactccacttggacaacaggcaccactttccagcctagcattcaggaatctgctgagtacagctgtgtccagct

SEQ ID NO: 94750 - DNA, 80 bp, Homo sapiens
actccacttggacaacaggcaccactttccagcctagcattcaggaatctgctgagtacagctgtgtccagcttctcttt

SEQ ID NO: 94751 - DNA, 79 bp, Homo sapiens
ttggacaacaggcaccactttccagcctagcattcaggaatctgctgagtacagctgtgtccagcttctcttttccctt

SEQ ID NO: 94752 - DNA, 74 bp, Homo sapiens
accactttccagcctagcattcaggaatctgctgagtacagctgtgtccagcttctcttttccctttagggttt

SEQ ID NO: 94753 - DNA, 77 bp, Homo sapiens
tgagtacagctgtgtccagcttctcttttccctttagggttttgtgggctcatccttctccacgccagatgagcaaa

SEQ ID NO: 94754 - DNA, 77 bp, Homo sapiens
tgtgtccagcttctcttttccctttagggttttgtgggctcatccttctccacgccagatgagcaaatcctcatcat

SEQ ID NO: 94755 - DNA, 77 bp, Homo sapiens
ttctcttttccctttagggttttgtgggctcatccttctccacgccagatgagcaaatcctcatcattctagtgtga

SEQ ID NO: 94756 - DNA, 76 bp, Homo sapiens
tttccctttagggttttgtgggctcatccttctccacgccagatgagcaaatcctcatcattctagtgtgagttaa

SEQ ID NO: 94757 - DNA, 76 bp, Homo sapiens
agggttttgtgggctcatccttctccacgccagatgagcaaatcctcatcattctagtgtgagttaatgggttcct

SEQ ID NO: 94758 - DNA, 80 bp, Homo sapiens
tccacgccagatgagcaaatcctcatcattctagtgtgagttaatgggttccttccagcacccaactggaagatgcctta

SEQ ID NO: 94759 - DNA, 78 bp, Homo sapiens
agatgagcaaatcctcatcattctagtgtgagttaatgggttccttccagcacccaactggaagatgccttagttgag

SEQ ID NO: 94760 - DNA, 74 bp, Homo sapiens
agttaatgggttccttccagcacccaactggaagatgccttagttgaggtcccctcatgaacagtgaggtcaga

SEQ ID NO: 94761 - DNA, 77 bp, Homo sapiens
cttccagcacccaactggaagatgccttagttgaggtcccctcatgaacagtgaggtcagagcacccacacaccaaa

SEQ ID NO: 94762 - DNA, 78 bp, Homo sapiens
caactggaagatgccttagttgaggtcccctcatgaacagtgaggtcagagcacccacacaccaaaggagctgcctag

SEQ ID NO: 94763 - DNA, 77 bp, Homo sapiens
aagatgccttagttgaggtcccctcatgaacagtgaggtcagagcacccacacaccaaaggagctgcctaggagaag

SEQ ID NO: 94764 - DNA, 77 bp, Homo sapiens
ttagttgaggtcccctcatgaacagtgaggtcagagcacccacacaccaaaggagctgcctaggagaaggtcagttg

SEQ ID NO: 94765 - DNA, 82 bp, Homo sapiens
tcatgaacagtgaggtcagagcacccacacaccaaaggagctgcctaggagaaggtcagttggtcttgatcttgagcctata

SEQ ID NO: 94766 - DNA, 78 bp, Homo sapiens
aacagtgaggtcagagcacccacacaccaaaggagctgcctaggagaaggtcagttggtcttgatcttgagcctataa

SEQ ID NO: 94767 - DNA, 78 bp, Homo sapiens
agagcacccacacaccaaaggagctgcctaggagaaggtcagttggtcttgatcttgagcctataactggctctggga

SEQ ID NO: 94768 - DNA, 80 bp, Homo sapiens
agaaggtcagttggtcttgatcttgagcctataactggctctgggaggcagcagggtcactgctcctagagtcaattcta

SEQ ID NO: 94769 - DNA, 82 bp, Homo sapiens
ttgatcttgagcctataactggctctgggaggcagcagggtcactgctcctagagtcaattctagggtcaagctgaagacca

SEQ ID NO: 94770 - DNA, 80 bp, Homo sapiens
ctataactggctctgggaggcagcagggtcactgctcctagagtcaattctagggtcaagctgaagaccagctgacctag

SEQ ID NO: 94771 - DNA, 80 bp, Homo sapiens
tgggaggcagcagggtcactgctcctagagtcaattctagggtcaagctgaagaccagctgacctagggtccgtcatagc

SEQ ID NO: 94772 - DNA, 78 bp, Homo sapiens
ggcagcagggtcactgctcctagagtcaattctagggtcaagctgaagaccagctgacctagggtccgtcatagcggg

SEQ ID NO: 94773 - DNA, 76 bp, Homo sapiens
tagagtcaattctagggtcaagctgaagaccagctgacctagggtccgtcatagcggggtgaacagaacagaacaa

SEQ ID NO: 94774 - DNA, 77 bp, Homo sapiens
tctagggtcaagctgaagaccagctgacctagggtccgtcatagcggggtgaacagaacagaacaacatgaggaaca

SEQ ID NO: 94775 - DNA, 74 bp, Homo sapiens
aagaccagctgacctagggtccgtcatagcggggtgaacagaacagaacaacatgaggaacagagcacattttt

SEQ ID NO: 94776 - DNA, 77 bp, Homo sapiens
tccgtcatagcggggtgaacagaacagaacaacatgaggaacagagcacatttttttttgaaatattcatagagtca

SEQ ID NO: 94777 - DNA, 76 bp, Homo sapiens
atagcggggtgaacagaacagaacaacatgaggaacagagcacatttttttttgaaatattcatagagtcatatta

SEQ ID NO: 94778 - DNA, 74 bp, Homo sapiens
gaacagaacaacatgaggaacagagcacatttttttttgaaatattcatagagtcatattaaaaccaacaaggc

SEQ ID NO: 94779 - DNA, 75 bp, Homo sapiens
caacatgaggaacagagcacatttttttttgaaatattcatagagtcatattaaaaccaacaaggctaaatcaga

SEQ ID NO: 94780 - DNA, 75 bp, Homo sapiens
cagagcacatttttttttgaaatattcatagagtcatattaaaaccaacaaggctaaatcagaaagtggaatgca

SEQ ID NO: 94781 - DNA, 70 bp, Homo sapiens
ttttttttgaaatattcatagagtcatattaaaaccaacaaggctaaatcagaaagtggaatgcaaattt

SEQ ID NO: 94782 - DNA, 76 bp, Homo sapiens
aatattcatagagtcatattaaaaccaacaaggctaaatcagaaagtggaatgcaaattttgcatgaattgtgaac

SEQ ID NO: 94783 - DNA, 74 bp, Homo sapiens
gagtcatattaaaaccaacaaggctaaatcagaaagtggaatgcaaattttgcatgaattgtgaacgtaaaaca

SEQ ID NO: 94784 - DNA, 76 bp, Homo sapiens
caacaaggctaaatcagaaagtggaatgcaaattttgcatgaattgtgaacgtaaaacatgagactatgaaggaat

SEQ ID NO: 94785 - DNA, 75 bp, Homo sapiens
cagaaagtggaatgcaaattttgcatgaattgtgaacgtaaaacatgagactatgaaggaattttaagcttactg

SEQ ID NO: 94786 - DNA, 75 bp, Homo sapiens
ggaatgcaaattttgcatgaattgtgaacgtaaaacatgagactatgaaggaattttaagcttactgttgtttgc

SEQ ID NO: 94787 - DNA, 77 bp, Homo sapiens
tgcatgaattgtgaacgtaaaacatgagactatgaaggaattttaagcttactgttgtttgctttgagctttatcca

SEQ ID NO: 94788 - DNA, 74 bp, Homo sapiens
ttgtgaacgtaaaacatgagactatgaaggaattttaagcttactgttgtttgctttgagctttatccactgac

SEQ ID NO: 94789 - DNA, 75 bp, Homo sapiens
taaaacatgagactatgaaggaattttaagcttactgttgtttgctttgagctttatccactgacgtatctgttc

SEQ ID NO: 94790 - DNA, 75 bp, Homo sapiens
tatgaaggaattttaagcttactgttgtttgctttgagctttatccactgacgtatctgttccactctagtctct

SEQ ID NO: 94791 - DNA, 74 bp, Homo sapiens
aattttaagcttactgttgtttgctttgagctttatccactgacgtatctgttccactctagtctcttctgtta

SEQ ID NO: 94792 - DNA, 75 bp, Homo sapiens
ttactgttgtttgctttgagctttatccactgacgtatctgttccactctagtctcttctgttatgggtaacctc

SEQ ID NO: 94793 - DNA, 74 bp, Homo sapiens
tgctttgagctttatccactgacgtatctgttccactctagtctcttctgttatgggtaacctcctgggaaaaa

SEQ ID NO: 94794 - DNA, 74 bp, Homo sapiens
ctttatccactgacgtatctgttccactctagtctcttctgttatgggtaacctcctgggaaaaatgtgagata

SEQ ID NO: 94795 - DNA, 72 bp, Homo sapiens
tgttccactctagtctcttctgttatgggtaacctcctgggaaaaatgtgagatacaatggtggaaaaatat

SEQ ID NO: 94796 - DNA, 74 bp, Homo sapiens
tctagtctcttctgttatgggtaacctcctgggaaaaatgtgagatacaatggtggaaaaatattgtctctgta

SEQ ID NO: 94797 - DNA, 72 bp, Homo sapiens
tgttatgggtaacctcctgggaaaaatgtgagatacaatggtggaaaaatattgtctctgtagtgagaaaaa

SEQ ID NO: 94798 - DNA, 69 bp, Homo sapiens
ctcctgggaaaaatgtgagatacaatggtggaaaaatattgtctctgtagtgagaaaaaaccggtttaa

SEQ ID NO: 94799 - DNA, 69 bp, Homo sapiens
gaaaaatgtgagatacaatggtggaaaaatattgtctctgtagtgagaaaaaaccggtttaaatcctgg

SEQ ID NO: 94800 - DNA, 70 bp, Homo sapiens
atacaatggtggaaaaatattgtctctgtagtgagaaaaaaccggtttaaatcctggttcattcactcac

SEQ ID NO: 94801 - DNA, 72 bp, Homo sapiens
tggaaaaatattgtctctgtagtgagaaaaaaccggtttaaatcctggttcattcactcactagctgtggaa

SEQ ID NO: 94802 - DNA, 74 bp, Homo sapiens
atattgtctctgtagtgagaaaaaaccggtttaaatcctggttcattcactcactagctgtggaactgtgggca

SEQ ID NO: 94803 - DNA, 70 bp, Homo sapiens
aaaaaccggtttaaatcctggttcattcactcactagctgtggaactgtgggcaagtgatttctccccta

SEQ ID NO: 94804 - DNA, 74 bp, Homo sapiens
ttaaatcctggttcattcactcactagctgtggaactgtgggcaagtgatttctcccctaggagccttagtttc

SEQ ID NO: 94805 - DNA, 77 bp, Homo sapiens
ttcattcactcactagctgtggaactgtgggcaagtgatttctcccctaggagccttagtttcctcatcagtaaatg

SEQ ID NO: 94806 - DNA, 77 bp, Homo sapiens
tagctgtggaactgtgggcaagtgatttctcccctaggagccttagtttcctcatcagtaaatggtgacaatcacaa

SEQ ID NO: 94807 - DNA, 71 bp, Homo sapiens
agtgatttctcccctaggagccttagtttcctcatcagtaaatggtgacaatcacaaaccctcctttagaa

SEQ ID NO: 94808 - DNA, 76 bp, Homo sapiens
cttagtttcctcatcagtaaatggtgacaatcacaaaccctcctttagaatgctggaagaatttaatgagctcaca

SEQ ID NO: 94809 - DNA, 78 bp, Homo sapiens
tcatcagtaaatggtgacaatcacaaaccctcctttagaatgctggaagaatttaatgagctcacatgttagagtccc

SEQ ID NO: 94810 - DNA, 75 bp, Homo sapiens
agtaaatggtgacaatcacaaaccctcctttagaatgctggaagaatttaatgagctcacatgttagagtcccca

SEQ ID NO: 94811 - DNA, 75 bp, Homo sapiens
aatcacaaaccctcctttagaatgctggaagaatttaatgagctcacatgttagagtccccagcatagggtctgt

SEQ ID NO: 94812 - DNA, 74 bp, Homo sapiens
cctcctttagaatgctggaagaatttaatgagctcacatgttagagtccccagcatagggtctgttggttcctt

SEQ ID NO: 94813 - DNA, 79 bp, Homo sapiens
tagaatgctggaagaatttaatgagctcacatgttagagtccccagcatagggtctgttggttcctttgcaggccacac

SEQ ID NO: 94814 - DNA, 77 bp, Homo sapiens
aagaatttaatgagctcacatgttagagtccccagcatagggtctgttggttcctttgcaggccacacccacagaga

SEQ ID NO: 94815 - DNA, 77 bp, Homo sapiens
ctcacatgttagagtccccagcatagggtctgttggttcctttgcaggccacacccacagagagggccagcactaaa

SEQ ID NO: 94816 - DNA, 75 bp, Homo sapiens
ttagagtccccagcatagggtctgttggttcctttgcaggccacacccacagagagggccagcactaaaagcaaa

SEQ ID NO: 94817 - DNA, 74 bp, Homo sapiens
cccagcatagggtctgttggttcctttgcaggccacacccacagagagggccagcactaaaagcaaactgtccc

SEQ ID NO: 94818 - DNA, 74 bp, Homo sapiens
ttcctttgcaggccacacccacagagagggccagcactaaaagcaaactgtccccttccattcccacaaagaga

SEQ ID NO: 94819 - DNA, 73 bp, Homo sapiens
acacccacagagagggccagcactaaaagcaaactgtccccttccattcccacaaagagaggcctactgtggc

SEQ ID NO: 94820 - DNA, 73 bp, Homo sapiens
agagagggccagcactaaaagcaaactgtccccttccattcccacaaagagaggcctactgtggccttctaga

SEQ ID NO: 94821 - DNA, 71 bp, Homo sapiens
cactaaaagcaaactgtccccttccattcccacaaagagaggcctactgtggccttctagaggcccaagga

SEQ ID NO: 94822 - DNA, 71 bp, Homo sapiens
cttccattcccacaaagagaggcctactgtggccttctagaggcccaaggacccctggttggcccagattc

SEQ ID NO: 94823 - DNA, 71 bp, Homo sapiens
attcccacaaagagaggcctactgtggccttctagaggcccaaggacccctggttggcccagattcttcac

SEQ ID NO: 94824 - DNA, 70 bp, Homo sapiens
agagaggcctactgtggccttctagaggcccaaggacccctggttggcccagattcttcaccccagaaag

SEQ ID NO: 94825 - DNA, 72 bp, Homo sapiens
actgtggccttctagaggcccaaggacccctggttggcccagattcttcaccccagaaaggatgcaatgttg

SEQ ID NO: 94826 - DNA, 77 bp, Homo sapiens
acccctggttggcccagattcttcaccccagaaaggatgcaatgttggagtgcagctaagatacatcctgaagctat

SEQ ID NO: 94827 - DNA, 80 bp, Homo sapiens
ttggcccagattcttcaccccagaaaggatgcaatgttggagtgcagctaagatacatcctgaagctatttaggccataa

SEQ ID NO: 94828 - DNA, 79 bp, Homo sapiens
agattcttcaccccagaaaggatgcaatgttggagtgcagctaagatacatcctgaagctatttaggccataaacacag

SEQ ID NO: 94829 - DNA, 78 bp, Homo sapiens
agaaaggatgcaatgttggagtgcagctaagatacatcctgaagctatttaggccataaacacaggtggagaaatttc

SEQ ID NO: 94830 - DNA, 76 bp, Homo sapiens
aatgttggagtgcagctaagatacatcctgaagctatttaggccataaacacaggtggagaaatttcctgggcttc

SEQ ID NO: 94831 - DNA, 76 bp, Homo sapiens
agtgcagctaagatacatcctgaagctatttaggccataaacacaggtggagaaatttcctgggcttctcattact

SEQ ID NO: 94832 - DNA, 73 bp, Homo sapiens
ctaagatacatcctgaagctatttaggccataaacacaggtggagaaatttcctgggcttctcattacttcct

SEQ ID NO: 94833 - DNA, 74 bp, Homo sapiens
tcctgaagctatttaggccataaacacaggtggagaaatttcctgggcttctcattacttccttgcatcttccc

SEQ ID NO: 94834 - DNA, 72 bp, Homo sapiens
atttaggccataaacacaggtggagaaatttcctgggcttctcattacttccttgcatcttccccaaacaga

SEQ ID NO: 94835 - DNA, 76 bp, Homo sapiens
taaacacaggtggagaaatttcctgggcttctcattacttccttgcatcttccccaaacagagcccacatctatga

SEQ ID NO: 94836 - DNA, 77 bp, Homo sapiens
catcttccccaaacagagcccacatctatgaggtaagagctcctgttgtaaagactcagagagcattaataatattt

SEQ ID NO: 94837 - DNA, 81 bp, Homo sapiens
aggtaagagctcctgttgtaaagactcagagagcattaataatattttcctctgctcatgacaggctgagctcaccctgta

SEQ ID NO: 94838 - DNA, 81 bp, Homo sapiens
agagctcctgttgtaaagactcagagagcattaataatattttcctctgctcatgacaggctgagctcaccctgtaaatgg

SEQ ID NO: 94839 - DNA, 78 bp, Homo sapiens
ttgtaaagactcagagagcattaataatattttcctctgctcatgacaggctgagctcaccctgtaaatggggtgggg

SEQ ID NO: 94840 - DNA, 72 bp, Homo sapiens
tttcctctgctcatgacaggctgagctcaccctgtaaatggggtggggtggggagaccccctgggggtggtg

SEQ ID NO: 94841 - DNA, 65 bp, Homo sapiens
ctcaccctgtaaatggggtggggtggggagaccccctgggggtggtggtgttggctccggagatt

SEQ ID NO: 94842 - DNA, 65 bp, Homo sapiens
taaatggggtggggtggggagaccccctgggggtggtggtgttggctccggagatttcctgggta

SEQ ID NO: 94843 - DNA, 64 bp, Homo sapiens
gggtggggagaccccctgggggtggtggtgttggctccggagatttcctgggtaaaggaaaatg

SEQ ID NO: 94844 - DNA, 69 bp, Homo sapiens
ggtggtggtgttggctccggagatttcctgggtaaaggaaaatgttcaaattcctgggcactggtgccc

SEQ ID NO: 94845 - DNA, 73 bp, Homo sapiens
tgttggctccggagatttcctgggtaaaggaaaatgttcaaattcctgggcactggtgccccatctcatccaa

SEQ ID NO: 94846 - DNA, 75 bp, Homo sapiens
ggtaaaggaaaatgttcaaattcctgggcactggtgccccatctcatccaagccttgccacatccttgtcccatg

SEQ ID NO: 94847 - DNA, 76 bp, Homo sapiens
aaaatgttcaaattcctgggcactggtgccccatctcatccaagccttgccacatccttgtcccatgggatcttag

SEQ ID NO: 94848 - DNA, 77 bp, Homo sapiens
aaattcctgggcactggtgccccatctcatccaagccttgccacatccttgtcccatgggatcttagggaagtcatc

SEQ ID NO: 94849 - DNA, 77 bp, Homo sapiens
catccttgtcccatgggatcttagggaagtcatccccatccataagcctcaatttcttcctgtgtgcactggcctaa

SEQ ID NO: 94850 - DNA, 77 bp, Homo sapiens
ccatgggatcttagggaagtcatccccatccataagcctcaatttcttcctgtgtgcactggcctaagacctattca

SEQ ID NO: 94851 - DNA, 78 bp, Homo sapiens
aagtcatccccatccataagcctcaatttcttcctgtgtgcactggcctaagacctattcactgtcctgctttagaga

SEQ ID NO: 94852 - DNA, 76 bp, Homo sapiens
cataagcctcaatttcttcctgtgtgcactggcctaagacctattcactgtcctgctttagagaatggttgggttg

SEQ ID NO: 94853 - DNA, 73 bp, Homo sapiens
aatttcttcctgtgtgcactggcctaagacctattcactgtcctgctttagagaatggttgggttgtgggaaa

SEQ ID NO: 94854 - DNA, 73 bp, Homo sapiens
cttcctgtgtgcactggcctaagacctattcactgtcctgctttagagaatggttgggttgtgggaaaataag

SEQ ID NO: 94855 - DNA, 72 bp, Homo sapiens
actggcctaagacctattcactgtcctgctttagagaatggttgggttgtgggaaaataaggggatgagctg

SEQ ID NO: 94856 - DNA, 71 bp, Homo sapiens
acctattcactgtcctgctttagagaatggttgggttgtgggaaaataaggggatgagctgggggaaatca

SEQ ID NO: 94857 - DNA, 72 bp, Homo sapiens
actgtcctgctttagagaatggttgggttgtgggaaaataaggggatgagctgggggaaatcatcactggcc

SEQ ID NO: 94858 - DNA, 72 bp, Homo sapiens
tagagaatggttgggttgtgggaaaataaggggatgagctgggggaaatcatcactggcccttgctgggtta

SEQ ID NO: 94859 - DNA, 70 bp, Homo sapiens
ttgggttgtgggaaaataaggggatgagctgggggaaatcatcactggcccttgctgggttaccccaaca

SEQ ID NO: 94860 - DNA, 71 bp, Homo sapiens
aaaataaggggatgagctgggggaaatcatcactggcccttgctgggttaccccaacatggcctgagattt

SEQ ID NO: 94861 - DNA, 66 bp, Homo sapiens
ttttttttttgcaagtttgtttctccctgaagtcacaccttaaattcctaccatttaaaatgataa

SEQ ID NO: 94862 - DNA, 70 bp, Homo sapiens
ttgcaagtttgtttctccctgaagtcacaccttaaattcctaccatttaaaatgataaaagccactgtct

SEQ ID NO: 94863 - DNA, 74 bp, Homo sapiens
tgaagtcacaccttaaattcctaccatttaaaatgataaaagccactgtcttttgtatctgccagctatttcac

SEQ ID NO: 94864 - DNA, 69 bp, Homo sapiens
accttaaattcctaccatttaaaatgataaaagccactgtcttttgtatctgccagctatttcacccct

SEQ ID NO: 94865 - DNA, 73 bp, Homo sapiens
ctaccatttaaaatgataaaagccactgtcttttgtatctgccagctatttcaccccttcctgagcagaaaaa

SEQ ID NO: 94866 - DNA, 73 bp, Homo sapiens
taaaatgataaaagccactgtcttttgtatctgccagctatttcaccccttcctgagcagaaaaaaatcttag

SEQ ID NO: 94867 - DNA, 74 bp, Homo sapiens
tcttttgtatctgccagctatttcaccccttcctgagcagaaaaaaatcttaggatttgtgttaaatagctctc

SEQ ID NO: 94868 - DNA, 70 bp, Homo sapiens
ccagctatttcaccccttcctgagcagaaaaaaatcttaggatttgtgttaaatagctctccctccaccc

SEQ ID NO: 94869 - DNA, 71 bp, Homo sapiens
tttcaccccttcctgagcagaaaaaaatcttaggatttgtgttaaatagctctccctccaccctcatcctg

SEQ ID NO: 94870 - DNA, 74 bp, Homo sapiens
agcagaaaaaaatcttaggatttgtgttaaatagctctccctccaccctcatcctgtctggatgtaccaagatc

SEQ ID NO: 94871 - DNA, 74 bp, Homo sapiens
aatcttaggatttgtgttaaatagctctccctccaccctcatcctgtctggatgtaccaagatctaagaaaata

SEQ ID NO: 94872 - DNA, 79 bp, Homo sapiens
taggatttgtgttaaatagctctccctccaccctcatcctgtctggatgtaccaagatctaagaaaatagcatacagca

SEQ ID NO: 94873 - DNA, 85 bp, Homo sapiens
ctccaccctcatcctgtctggatgtaccaagatctaagaaaatagcatacagcaggcagatttgccatgctacaggctccttgca

SEQ ID NO: 94874 - DNA, 83 bp, Homo sapiens
gtctggatgtaccaagatctaagaaaatagcatacagcaggcagatttgccatgctacaggctccttgcaggctggggaaggc

SEQ ID NO: 94875 - DNA, 81 bp, Homo sapiens
accaagatctaagaaaatagcatacagcaggcagatttgccatgctacaggctccttgcaggctggggaaggccagctggg

SEQ ID NO: 94876 - DNA, 82 bp, Homo sapiens
aagaaaatagcatacagcaggcagatttgccatgctacaggctccttgcaggctggggaaggccagctggggcattgggctg

SEQ ID NO: 94877 - DNA, 82 bp, Homo sapiens
atacagcaggcagatttgccatgctacaggctccttgcaggctggggaaggccagctggggcattgggctggagccgaggga

SEQ ID NO: 94878 - DNA, 80 bp, Homo sapiens
agatttgccatgctacaggctccttgcaggctggggaaggccagctggggcattgggctggagccgagggaggccagcag

SEQ ID NO: 94879 - DNA, 79 bp, Homo sapiens
atgctacaggctccttgcaggctggggaaggccagctggggcattgggctggagccgagggaggccagcaggcccagtg

SEQ ID NO: 94880 - DNA, 72 bp, Homo sapiens
gctggggcattgggctggagccgagggaggccagcaggcccagtgggggtgggtccccggggtctgctgaaa

SEQ ID NO: 94881 - DNA, 70 bp, Homo sapiens
attgggctggagccgagggaggccagcaggcccagtgggggtgggtccccggggtctgctgaaatacacc

SEQ ID NO: 94882 - DNA, 71 bp, Homo sapiens
ccagcaggcccagtgggggtgggtccccggggtctgctgaaatacacctggggagaggctcatcaaaggaa

SEQ ID NO: 94883 - DNA, 68 bp, Homo sapiens
aggcccagtgggggtgggtccccggggtctgctgaaatacacctggggagaggctcatcaaaggaaaa

SEQ ID NO: 94884 - DNA, 72 bp, Homo sapiens
tgggtccccggggtctgctgaaatacacctggggagaggctcatcaaaggaaaagagcaagttcatcgtggg

SEQ ID NO: 94885 - DNA, 73 bp, Homo sapiens
gggtctgctgaaatacacctggggagaggctcatcaaaggaaaagagcaagttcatcgtggggttcctttgct

SEQ ID NO: 94886 - DNA, 72 bp, Homo sapiens
ctgaaatacacctggggagaggctcatcaaaggaaaagagcaagttcatcgtggggttcctttgcttgcctt

SEQ ID NO: 94887 - DNA, 74 bp, Homo sapiens
gggagaggctcatcaaaggaaaagagcaagttcatcgtggggttcctttgcttgcctttgctttgaggcacttc

SEQ ID NO: 94888 - DNA, 73 bp, Homo sapiens
tcatcaaaggaaaagagcaagttcatcgtggggttcctttgcttgcctttgctttgaggcacttccttttgaa

SEQ ID NO: 94889 - DNA, 71 bp, Homo sapiens
aagttcatcgtggggttcctttgcttgcctttgctttgaggcacttccttttgaacctctaaagtgacagc

SEQ ID NO: 94890 - DNA, 74 bp, Homo sapiens
tttgcttgcctttgctttgaggcacttccttttgaacctctaaagtgacagcccttccttgatcaagtctggtg

SEQ ID NO: 94891 - DNA, 73 bp, Homo sapiens
ctttgctttgaggcacttccttttgaacctctaaagtgacagcccttccttgatcaagtctggtgtccctgga

SEQ ID NO: 94892 - DNA, 73 bp, Homo sapiens
acttccttttgaacctctaaagtgacagcccttccttgatcaagtctggtgtccctggacttctggacagctc

SEQ ID NO: 94893 - DNA, 76 bp, Homo sapiens
ttttgaacctctaaagtgacagcccttccttgatcaagtctggtgtccctggacttctggacagctccagagccca

SEQ ID NO: 94894 - DNA, 80 bp, Homo sapiens
taaagtgacagcccttccttgatcaagtctggtgtccctggacttctggacagctccagagcccatgccaatggaagcaa

SEQ ID NO: 94895 - DNA, 77 bp, Homo sapiens
ccttccttgatcaagtctggtgtccctggacttctggacagctccagagcccatgccaatggaagcaacttttgtcg

SEQ ID NO: 94896 - DNA, 78 bp, Homo sapiens
atcaagtctggtgtccctggacttctggacagctccagagcccatgccaatggaagcaacttttgtcggctcctttca

SEQ ID NO: 94897 - DNA, 79 bp, Homo sapiens
tggtgtccctggacttctggacagctccagagcccatgccaatggaagcaacttttgtcggctcctttcatgttccatc

SEQ ID NO: 94898 - DNA, 79 bp, Homo sapiens
tccagagcccatgccaatggaagcaacttttgtcggctcctttcatgttccatcctcatgggcctggagatctgggttg

SEQ ID NO: 94899 - DNA, 76 bp, Homo sapiens
atgccaatggaagcaacttttgtcggctcctttcatgttccatcctcatgggcctggagatctgggttggtgaccc

SEQ ID NO: 94900 - DNA, 76 bp, Homo sapiens
aatggaagcaacttttgtcggctcctttcatgttccatcctcatgggcctggagatctgggttggtgaccctgctc

SEQ ID NO: 94901 - DNA, 76 bp, Homo sapiens
ttttgtcggctcctttcatgttccatcctcatgggcctggagatctgggttggtgaccctgctccgtggtaaagca

SEQ ID NO: 94902 - DNA, 75 bp, Homo sapiens
tttcatgttccatcctcatgggcctggagatctgggttggtgaccctgctccgtggtaaagcagagaccctgggt

SEQ ID NO: 94903 - DNA, 76 bp, Homo sapiens
ttccatcctcatgggcctggagatctgggttggtgaccctgctccgtggtaaagcagagaccctgggtttctcata

SEQ ID NO: 94904 - DNA, 75 bp, Homo sapiens
atgggcctggagatctgggttggtgaccctgctccgtggtaaagcagagaccctgggtttctcatagaatctgag

SEQ ID NO: 94905 - DNA, 80 bp, Homo sapiens
gttggtgaccctgctccgtggtaaagcagagaccctgggtttctcatagaatctgagtctcatgatccattgcatattta

SEQ ID NO: 94906 - DNA, 80 bp, Homo sapiens
tccgtggtaaagcagagaccctgggtttctcatagaatctgagtctcatgatccattgcatatttagttccagcaacaaa

SEQ ID NO: 94907 - DNA, 83 bp, Homo sapiens
cctgggtttctcatagaatctgagtctcatgatccattgcatatttagttccagcaacaaaacaatgagcagacagacaaata

SEQ ID NO: 94908 - DNA, 85 bp, Homo sapiens
atagaatctgagtctcatgatccattgcatatttagttccagcaacaaaacaatgagcagacagacaaatagatgtgatattaaa

SEQ ID NO: 94909 - DNA, 76 bp, Homo sapiens
atatttagttccagcaacaaaacaatgagcagacagacaaatagatgtgatattaaaaagtgcacgcttaagggaa

SEQ ID NO: 94910 - DNA, 79 bp, Homo sapiens
aaacaatgagcagacagacaaatagatgtgatattaaaaagtgcacgcttaagggaatgttttcacagtgtctgatgaa

SEQ ID NO: 94911 - DNA, 75 bp, Homo sapiens
acagacaaatagatgtgatattaaaaagtgcacgcttaagggaatgttttcacagtgtctgatgaaaggaaaaga

SEQ ID NO: 94912 - DNA, 75 bp, Homo sapiens
aaatagatgtgatattaaaaagtgcacgcttaagggaatgttttcacagtgtctgatgaaaggaaaagaggcagc

SEQ ID NO: 94913 - DNA, 74 bp, Homo sapiens
aagtgcacgcttaagggaatgttttcacagtgtctgatgaaaggaaaagaggcagccccattggcccagaagga

SEQ ID NO: 94914 - DNA, 74 bp, Homo sapiens
taagggaatgttttcacagtgtctgatgaaaggaaaagaggcagccccattggcccagaaggagtcttggccaa

SEQ ID NO: 94915 - DNA, 76 bp, Homo sapiens
ttttcacagtgtctgatgaaaggaaaagaggcagccccattggcccagaaggagtcttggccaacacgaagctgag

SEQ ID NO: 94916 - DNA, 78 bp, Homo sapiens
aaaagaggcagccccattggcccagaaggagtcttggccaacacgaagctgagtgcatctctctaaagctccatggac

SEQ ID NO: 94917 - DNA, 79 bp, Homo sapiens
agccccattggcccagaaggagtcttggccaacacgaagctgagtgcatctctctaaagctccatggactccttgttgc

SEQ ID NO: 94918 - DNA, 79 bp, Homo sapiens
ccagaaggagtcttggccaacacgaagctgagtgcatctctctaaagctccatggactccttgttgccaataggacaaa

SEQ ID NO: 94919 - DNA, 81 bp, Homo sapiens
aacacgaagctgagtgcatctctctaaagctccatggactccttgttgccaataggacaaagtctgtactcgcgatgggca

SEQ ID NO: 94920 - DNA, 83 bp, Homo sapiens
agctgagtgcatctctctaaagctccatggactccttgttgccaataggacaaagtctgtactcgcgatgggcatctgtctcc

SEQ ID NO: 94921 - DNA, 79 bp, Homo sapiens
atctctctaaagctccatggactccttgttgccaataggacaaagtctgtactcgcgatgggcatctgtctcctggacc

SEQ ID NO: 94922 - DNA, 81 bp, Homo sapiens
actccttgttgccaataggacaaagtctgtactcgcgatgggcatctgtctcctggaccctggctcatctcttgctgctcc

SEQ ID NO: 94923 - DNA, 83 bp, Homo sapiens
actcgcgatgggcatctgtctcctggaccctggctcatctcttgctgctccccgtgttgtgctgtgcccgcactgggctggcc

SEQ ID NO: 94924 - DNA, 80 bp, Homo sapiens
atctgtctcctggaccctggctcatctcttgctgctccccgtgttgtgctgtgcccgcactgggctggcctcccccagac

SEQ ID NO: 94925 - DNA, 80 bp, Homo sapiens
gaccctggctcatctcttgctgctccccgtgttgtgctgtgcccgcactgggctggcctcccccagactgcttctcccaa

SEQ ID NO: 94926 - DNA, 81 bp, Homo sapiens
tcatctcttgctgctccccgtgttgtgctgtgcccgcactgggctggcctcccccagactgcttctcccaatgccttttca

SEQ ID NO: 94927 - DNA, 78 bp, Homo sapiens
ttgctgctccccgtgttgtgctgtgcccgcactgggctggcctcccccagactgcttctcccaatgccttttcacatt

SEQ ID NO: 94928 - DNA, 81 bp, Homo sapiens
tgttgtgctgtgcccgcactgggctggcctcccccagactgcttctcccaatgccttttcacatttctttgccattgcaca

SEQ ID NO: 94929 - DNA, 81 bp, Homo sapiens
tgtgcccgcactgggctggcctcccccagactgcttctcccaatgccttttcacatttctttgccattgcacatatggatc

SEQ ID NO: 94930 - DNA, 76 bp, Homo sapiens
actgggctggcctcccccagactgcttctcccaatgccttttcacatttctttgccattgcacatatggatccctt

SEQ ID NO: 94931 - DNA, 76 bp, Homo sapiens
ccccagactgcttctcccaatgccttttcacatttctttgccattgcacatatggatccctttgcctgagtttcct

SEQ ID NO: 94932 - DNA, 74 bp, Homo sapiens
actgcttctcccaatgccttttcacatttctttgccattgcacatatggatccctttgcctgagtttccttttt

SEQ ID NO: 94933 - DNA, 70 bp, Homo sapiens
aatgccttttcacatttctttgccattgcacatatggatccctttgcctgagtttcctttttttcctttt

SEQ ID NO: 94934 - DNA, 67 bp, Homo sapiens
tttttttcctttttatgcttgttaagacccagcaggaatggacgtccccttctccaggaagcccgag

SEQ ID NO: 94935 - DNA, 70 bp, Homo sapiens
ttttatgcttgttaagacccagcaggaatggacgtccccttctccaggaagcccgaggccgaagagactt

SEQ ID NO: 94936 - DNA, 74 bp, Homo sapiens
agcaggaatggacgtccccttctccaggaagcccgaggccgaagagactttcttgctcctaggctcatggaaca

SEQ ID NO: 94937 - DNA, 80 bp, Homo sapiens
tctccaggaagcccgaggccgaagagactttcttgctcctaggctcatggaacactcatccactccacactactgcacca

SEQ ID NO: 94938 - DNA, 78 bp, Homo sapiens
aagcccgaggccgaagagactttcttgctcctaggctcatggaacactcatccactccacactactgcaccatggttc

SEQ ID NO: 94939 - DNA, 80 bp, Homo sapiens
actttcttgctcctaggctcatggaacactcatccactccacactactgcaccatggttccatttccccagcatacagtg

SEQ ID NO: 94940 - DNA, 81 bp, Homo sapiens
ctcctaggctcatggaacactcatccactccacactactgcaccatggttccatttccccagcatacagtgggctcttgag

SEQ ID NO: 94941 - DNA, 79 bp, Homo sapiens
aacactcatccactccacactactgcaccatggttccatttccccagcatacagtgggctcttgagggccaaagctgta

SEQ ID NO: 94942 - DNA, 78 bp, Homo sapiens
cactccacactactgcaccatggttccatttccccagcatacagtgggctcttgagggccaaagctgtaccttcttga

SEQ ID NO: 94943 - DNA, 77 bp, Homo sapiens
cacactactgcaccatggttccatttccccagcatacagtgggctcttgagggccaaagctgtaccttcttgaattc

SEQ ID NO: 94944 - DNA, 74 bp, Homo sapiens
accatggttccatttccccagcatacagtgggctcttgagggccaaagctgtaccttcttgaattctctgcccc

SEQ ID NO: 94945 - DNA, 77 bp, Homo sapiens
atttccccagcatacagtgggctcttgagggccaaagctgtaccttcttgaattctctgcccctcatgccctgtctg

SEQ ID NO: 94946 - DNA, 78 bp, Homo sapiens
agcatacagtgggctcttgagggccaaagctgtaccttcttgaattctctgcccctcatgccctgtctggggctagac

SEQ ID NO: 94947 - DNA, 77 bp, Homo sapiens
atacagtgggctcttgagggccaaagctgtaccttcttgaattctctgcccctcatgccctgtctggggctagacca

SEQ ID NO: 94948 - DNA, 77 bp, Homo sapiens
aaagctgtaccttcttgaattctctgcccctcatgccctgtctggggctagaccagccttcaagatggagcttccta

SEQ ID NO: 94949 - DNA, 78 bp, Homo sapiens
ttcttgaattctctgcccctcatgccctgtctggggctagaccagccttcaagatggagcttcctaggtcccagccca

SEQ ID NO: 94950 - DNA, 80 bp, Homo sapiens
tctgcccctcatgccctgtctggggctagaccagccttcaagatggagcttcctaggtcccagcccacctgaggctgtca

SEQ ID NO: 94951 - DNA, 78 bp, Homo sapiens
atgccctgtctggggctagaccagccttcaagatggagcttcctaggtcccagcccacctgaggctgtcagatattgg

SEQ ID NO: 94952 - DNA, 78 bp, Homo sapiens
gggctagaccagccttcaagatggagcttcctaggtcccagcccacctgaggctgtcagatattgggcctaagcactg

SEQ ID NO: 94953 - DNA, 80 bp, Homo sapiens
agccttcaagatggagcttcctaggtcccagcccacctgaggctgtcagatattgggcctaagcactggctagagatcaa

SEQ ID NO: 94954 - DNA, 80 bp, Homo sapiens
aggctgtcagatattgggcctaagcactggctagagatcaaggtcgagagtttccctggctggtccattcatagcctgaa

SEQ ID NO: 94955 - DNA, 76 bp, Homo sapiens
taagcactggctagagatcaaggtcgagagtttccctggctggtccattcatagcctgaaggaacagggaattgtt

SEQ ID NO: 94956 - DNA, 71 bp, Homo sapiens
gtcgagagtttccctggctggtccattcatagcctgaaggaacagggaattgtttttactgactaagaaat

SEQ ID NO: 94957 - DNA, 72 bp, Homo sapiens
agtttccctggctggtccattcatagcctgaaggaacagggaattgtttttactgactaagaaattagatga

SEQ ID NO: 94958 - DNA, 73 bp, Homo sapiens
ctggtccattcatagcctgaaggaacagggaattgtttttactgactaagaaattagatgagactggctttcc

SEQ ID NO: 94959 - DNA, 71 bp, Homo sapiens
aacagggaattgtttttactgactaagaaattagatgagactggctttcctggggagctgggaatgtgtta

SEQ ID NO: 94960 - DNA, 71 bp, Homo sapiens
attgtttttactgactaagaaattagatgagactggctttcctggggagctgggaatgtgttactaaaata

SEQ ID NO: 94961 - DNA, 74 bp, Homo sapiens
ttactgactaagaaattagatgagactggctttcctggggagctgggaatgtgttactaaaatatatctgaaat

SEQ ID NO: 94962 - DNA, 76 bp, Homo sapiens
tggggagctgggaatgtgttactaaaatatatctgaaattctgcgcttcccagaagaactggcatcaggaagaaag

SEQ ID NO: 94963 - DNA, 74 bp, Homo sapiens
ggaatgtgttactaaaatatatctgaaattctgcgcttcccagaagaactggcatcaggaagaaagtactaaat

SEQ ID NO: 94964 - DNA, 74 bp, Homo sapiens
tactaaaatatatctgaaattctgcgcttcccagaagaactggcatcaggaagaaagtactaaatttccatttg

SEQ ID NO: 94965 - DNA, 76 bp, Homo sapiens
aaattctgcgcttcccagaagaactggcatcaggaagaaagtactaaatttccatttgtggagttatctgctcaga

SEQ ID NO: 94966 - DNA, 75 bp, Homo sapiens
cagaagaactggcatcaggaagaaagtactaaatttccatttgtggagttatctgctcagaagtttctggcctta

SEQ ID NO: 94967 - DNA, 71 bp, Homo sapiens
ctaaatttccatttgtggagttatctgctcagaagtttctggccttattttccctccataaaataattgct

SEQ ID NO: 94968 - DNA, 73 bp, Homo sapiens
atttgtggagttatctgctcagaagtttctggccttattttccctccataaaataattgcttggcttagagaa

SEQ ID NO: 94969 - DNA, 74 bp, Homo sapiens
agttatctgctcagaagtttctggccttattttccctccataaaataattgcttggcttagagaagatgaagaa

SEQ ID NO: 94970 - DNA, 71 bp, Homo sapiens
aagtttctggccttattttccctccataaaataattgcttggcttagagaagatgaagaaaacagcacgga

SEQ ID NO: 94971 - DNA, 74 bp, Homo sapiens
ccttattttccctccataaaataattgcttggcttagagaagatgaagaaaacagcacggagaagtctcattgc

SEQ ID NO: 94972 - DNA, 75 bp, Homo sapiens
ttttccctccataaaataattgcttggcttagagaagatgaagaaaacagcacggagaagtctcattgccattac

SEQ ID NO: 94973 - DNA, 74 bp, Homo sapiens
ataaaataattgcttggcttagagaagatgaagaaaacagcacggagaagtctcattgccattacctgcccctt

SEQ ID NO: 94974 - DNA, 74 bp, Homo sapiens
tggcttagagaagatgaagaaaacagcacggagaagtctcattgccattacctgcccctttggaacccaggatt

SEQ ID NO: 94975 - DNA, 73 bp, Homo sapiens
agatgaagaaaacagcacggagaagtctcattgccattacctgcccctttggaacccaggatttcattactaa

SEQ ID NO: 94976 - DNA, 71 bp, Homo sapiens
aagaaaacagcacggagaagtctcattgccattacctgcccctttggaacccaggatttcattactaagga

SEQ ID NO: 94977 - DNA, 69 bp, Homo sapiens
attgccattacctgcccctttggaacccaggatttcattactaaggaaggtgcgtgggtttcctcattg

SEQ ID NO: 94978 - DNA, 68 bp, Homo sapiens
attacctgcccctttggaacccaggatttcattactaaggaaggtgcgtgggtttcctcattggagga

SEQ ID NO: 94979 - DNA, 75 bp, Homo sapiens
tttggaacccaggatttcattactaaggaaggtgcgtgggtttcctcattggaggagatgatcaaatggagatga

SEQ ID NO: 94980 - DNA, 77 bp, Homo sapiens
atttcattactaaggaaggtgcgtgggtttcctcattggaggagatgatcaaatggagatgataacaagtcagtagc

SEQ ID NO: 94981 - DNA, 78 bp, Homo sapiens
attactaaggaaggtgcgtgggtttcctcattggaggagatgatcaaatggagatgataacaagtcagtagctctctc

SEQ ID NO: 94982 - DNA, 78 bp, Homo sapiens
gtgcgtgggtttcctcattggaggagatgatcaaatggagatgataacaagtcagtagctctctcctgggggttctaa

SEQ ID NO: 94983 - DNA, 80 bp, Homo sapiens
ttcctcattggaggagatgatcaaatggagatgataacaagtcagtagctctctcctgggggttctaaggactgtgtgaa

SEQ ID NO: 94984 - DNA, 76 bp, Homo sapiens
atcaaatggagatgataacaagtcagtagctctctcctgggggttctaaggactgtgtgaaatgtcctatggaaag

SEQ ID NO: 94985 - DNA, 79 bp, Homo sapiens
agtcagtagctctctcctgggggttctaaggactgtgtgaaatgtcctatggaaagtgccaagcatgatccctggcata

SEQ ID NO: 94986 - DNA, 78 bp, Homo sapiens
tctcctgggggttctaaggactgtgtgaaatgtcctatggaaagtgccaagcatgatccctggcatacagtagagact

SEQ ID NO: 94987 - DNA, 80 bp, Homo sapiens
gttctaaggactgtgtgaaatgtcctatggaaagtgccaagcatgatccctggcatacagtagagacttagcaaatgttg

SEQ ID NO: 94988 - DNA, 81 bp, Homo sapiens
tgtgtgaaatgtcctatggaaagtgccaagcatgatccctggcatacagtagagacttagcaaatgttggttccctctcat

SEQ ID NO: 94989 - DNA, 79 bp, Homo sapiens
aaatgtcctatggaaagtgccaagcatgatccctggcatacagtagagacttagcaaatgttggttccctctcattgac

SEQ ID NO: 94990 - DNA, 80 bp, Homo sapiens
aaagtgccaagcatgatccctggcatacagtagagacttagcaaatgttggttccctctcattgactcactcacactttg

SEQ ID NO: 94991 - DNA, 80 bp, Homo sapiens
aagcatgatccctggcatacagtagagacttagcaaatgttggttccctctcattgactcactcacactttggacaagac

SEQ ID NO: 94992 - DNA, 77 bp, Homo sapiens
acagtagagacttagcaaatgttggttccctctcattgactcactcacactttggacaagaccctagatctccaggc

SEQ ID NO: 94993 - DNA, 78 bp, Homo sapiens
ttagcaaatgttggttccctctcattgactcactcacactttggacaagaccctagatctccaggcctgattctcttg

SEQ ID NO: 94994 - DNA, 76 bp, Homo sapiens
ttccctctcattgactcactcacactttggacaagaccctagatctccaggcctgattctcttggcctattttaaa

SEQ ID NO: 94995 - DNA, 74 bp, Homo sapiens
tttggacaagaccctagatctccaggcctgattctcttggcctattttaaatcaaagtataatgggctccacaa

SEQ ID NO: 94996 - DNA, 73 bp, Homo sapiens
tccaggcctgattctcttggcctattttaaatcaaagtataatgggctccacaatggcctttttcaaggtggc

SEQ ID NO: 94997 - DNA, 69 bp, Homo sapiens
aaagtataatgggctccacaatggcctttttcaaggtggctgctgggtttctttaggaaggagttcaaa

SEQ ID NO: 94998 - DNA, 71 bp, Homo sapiens
gctccacaatggcctttttcaaggtggctgctgggtttctttaggaaggagttcaaatttggacatccaaa

SEQ ID NO: 94999 - DNA, 69 bp, Homo sapiens
acaatggcctttttcaaggtggctgctgggtttctttaggaaggagttcaaatttggacatccaaatta

SEQ ID NO: 95000 - DNA, 72 bp, Homo sapiens
ttttcaaggtggctgctgggtttctttaggaaggagttcaaatttggacatccaaattatgcacaaagctgg

SEQ ID NO: 95001 - DNA, 74 bp, Homo sapiens
ctgctgggtttctttaggaaggagttcaaatttggacatccaaattatgcacaaagctggtgctctatttgccc

SEQ ID NO: 95002 - DNA, 73 bp, Homo sapiens
tttaggaaggagttcaaatttggacatccaaattatgcacaaagctggtgctctatttgccccagaaaccaaa

SEQ ID NO: 95003 - DNA, 73 bp, Homo sapiens
agttcaaatttggacatccaaattatgcacaaagctggtgctctatttgccccagaaaccaaagggaccatct

SEQ ID NO: 95004 - DNA, 76 bp, Homo sapiens
aatttggacatccaaattatgcacaaagctggtgctctatttgccccagaaaccaaagggaccatcttcaggctca

SEQ ID NO: 95005 - DNA, 75 bp, Homo sapiens
aaattatgcacaaagctggtgctctatttgccccagaaaccaaagggaccatcttcaggctcacccatctctcct

SEQ ID NO: 95006 - DNA, 77 bp, Homo sapiens
ccagaaaccaaagggaccatcttcaggctcacccatctctccttgctcagtggcatgctgtcccagggtgggagctt

SEQ ID NO: 95007 - DNA, 76 bp, Homo sapiens
aaccaaagggaccatcttcaggctcacccatctctccttgctcagtggcatgctgtcccagggtgggagcttttaa

SEQ ID NO: 95008 - DNA, 79 bp, Homo sapiens
atcttcaggctcacccatctctccttgctcagtggcatgctgtcccagggtgggagcttttaaggacattgccaggaaa

SEQ ID NO: 95009 - DNA, 74 bp, Homo sapiens
acccatctctccttgctcagtggcatgctgtcccagggtgggagcttttaaggacattgccaggaaaaaataaa

SEQ ID NO: 95010 - DNA, 70 bp, Homo sapiens
agtggcatgctgtcccagggtgggagcttttaaggacattgccaggaaaaaataaaaggcccgagagatt

SEQ ID NO: 95011 - DNA, 69 bp, Homo sapiens
tgtcccagggtgggagcttttaaggacattgccaggaaaaaataaaaggcccgagagatttgtcttaga

SEQ ID NO: 95012 - DNA, 67 bp, Homo sapiens
attgccaggaaaaaataaaaggcccgagagatttgtcttagaggtacatactcaaactcccccgccc

SEQ ID NO: 95013 - DNA, 64 bp, Homo sapiens
aaaataaaaggcccgagagatttgtcttagaggtacatactcaaactcccccgcccccttcttt

SEQ ID NO: 95014 - DNA, 67 bp, Homo sapiens
atttgtcttagaggtacatactcaaactcccccgcccccttctttttgacataagagactaagattt

SEQ ID NO: 95015 - DNA, 67 bp, Homo sapiens
tacatactcaaactcccccgcccccttctttttgacataagagactaagattttacaccctccaaaa

SEQ ID NO: 95016 - DNA, 63 bp, Homo sapiens
aaactcccccgcccccttctttttgacataagagactaagattttacaccctccaaaagaaag

SEQ ID NO: 95017 - DNA, 67 bp, Homo sapiens
ccccttctttttgacataagagactaagattttacaccctccaaaagaaagtttcttttcacataca

SEQ ID NO: 95018 - DNA, 69 bp, Homo sapiens
tctttttgacataagagactaagattttacaccctccaaaagaaagtttcttttcacatacactttgga

SEQ ID NO: 95019 - DNA, 68 bp, Homo sapiens
gagactaagattttacaccctccaaaagaaagtttcttttcacatacactttggaaaataatcaaatc

SEQ ID NO: 95020 - DNA, 68 bp, Homo sapiens
gattttacaccctccaaaagaaagtttcttttcacatacactttggaaaataatcaaatcttatcttg

SEQ ID NO: 95021 - DNA, 68 bp, Homo sapiens
ccctccaaaagaaagtttcttttcacatacactttggaaaataatcaaatcttatcttgtttgtctct

SEQ ID NO: 95022 - DNA, 71 bp, Homo sapiens
gtttcttttcacatacactttggaaaataatcaaatcttatcttgtttgtctcttccaaagaaagctacca

SEQ ID NO: 95023 - DNA, 72 bp, Homo sapiens
ttcacatacactttggaaaataatcaaatcttatcttgtttgtctcttccaaagaaagctaccaccaaagaa

SEQ ID NO: 95024 - DNA, 70 bp, Homo sapiens
aataatcaaatcttatcttgtttgtctcttccaaagaaagctaccaccaaagaaacacaggggttacatc

SEQ ID NO: 95025 - DNA, 70 bp, Homo sapiens
tttgtctcttccaaagaaagctaccaccaaagaaacacaggggttacatcctacaggtcagcccaagccc

SEQ ID NO: 95026 - DNA, 69 bp, Homo sapiens
aaagaaagctaccaccaaagaaacacaggggttacatcctacaggtcagcccaagccctgccccaggga

SEQ ID NO: 95027 - DNA, 67 bp, Homo sapiens
accaaagaaacacaggggttacatcctacaggtcagcccaagccctgccccagggaggtggtccctt

SEQ ID NO: 95028 - DNA, 69 bp, Homo sapiens
gttacatcctacaggtcagcccaagccctgccccagggaggtggtccctttttacaaagacaaggagga

SEQ ID NO: 95029 - DNA, 69 bp, Homo sapiens
aagccctgccccagggaggtggtccctttttacaaagacaaggaggagcagagaagttccctgcagttc

SEQ ID NO: 95030 - DNA, 68 bp, Homo sapiens
cagggaggtggtccctttttacaaagacaaggaggagcagagaagttccctgcagttccaccccctcc

SEQ ID NO: 95031 - DNA, 69 bp, Homo sapiens
aggtggtccctttttacaaagacaaggaggagcagagaagttccctgcagttccaccccctcccactga

SEQ ID NO: 95032 - DNA, 70 bp, Homo sapiens
tttttacaaagacaaggaggagcagagaagttccctgcagttccaccccctcccactgaccacacaaaaa

SEQ ID NO: 95033 - DNA, 70 bp, Homo sapiens
ggaggagcagagaagttccctgcagttccaccccctcccactgaccacacaaaaaagcaaagaacacctt

SEQ ID NO: 95034 - DNA, 68 bp, Homo sapiens
agaagttccctgcagttccaccccctcccactgaccacacaaaaaagcaaagaacacctttatcaaaa

SEQ ID NO: 95035 - DNA, 73 bp, Homo sapiens
tgcagttccaccccctcccactgaccacacaaaaaagcaaagaacacctttatcaaaaactgctgtggacaca

SEQ ID NO: 95036 - DNA, 76 bp, Homo sapiens
actgaccacacaaaaaagcaaagaacacctttatcaaaaactgctgtggacacagctggccggccagtgaatgctg

SEQ ID NO: 95037 - DNA, 74 bp, Homo sapiens
aaaaaagcaaagaacacctttatcaaaaactgctgtggacacagctggccggccagtgaatgctggacggtcaa

SEQ ID NO: 95038 - DNA, 75 bp, Homo sapiens
acctttatcaaaaactgctgtggacacagctggccggccagtgaatgctggacggtcaaggcccaggctggggaa

SEQ ID NO: 95039 - DNA, 75 bp, Homo sapiens
aaaactgctgtggacacagctggccggccagtgaatgctggacggtcaaggcccaggctggggaaggggtacaga

SEQ ID NO: 95040 - DNA, 75 bp, Homo sapiens
tggacacagctggccggccagtgaatgctggacggtcaaggcccaggctggggaaggggtacagaatggttgtgg

SEQ ID NO: 95041 - DNA, 73 bp, Homo sapiens
tggccggccagtgaatgctggacggtcaaggcccaggctggggaaggggtacagaatggttgtgggcgaagcc

SEQ ID NO: 95042 - DNA, 72 bp, Homo sapiens
aatgctggacggtcaaggcccaggctggggaaggggtacagaatggttgtgggcgaagccccatgcaggtta

SEQ ID NO: 95043 - DNA, 71 bp, Homo sapiens
acggtcaaggcccaggctggggaaggggtacagaatggttgtgggcgaagccccatgcaggttaggtgtga

SEQ ID NO: 95044 - DNA, 72 bp, Homo sapiens
aaggggtacagaatggttgtgggcgaagccccatgcaggttaggtgtgaggatggggggcctctcttgtggc

SEQ ID NO: 95045 - DNA, 73 bp, Homo sapiens
agaatggttgtgggcgaagccccatgcaggttaggtgtgaggatggggggcctctcttgtggcctagggaaca

SEQ ID NO: 95046 - DNA, 74 bp, Homo sapiens
tgggcgaagccccatgcaggttaggtgtgaggatggggggcctctcttgtggcctagggaacatcgtaaggtca

SEQ ID NO: 95047 - DNA, 74 bp, Homo sapiens
atgcaggttaggtgtgaggatggggggcctctcttgtggcctagggaacatcgtaaggtcacactggtccagac

SEQ ID NO: 95048 - DNA, 75 bp, Homo sapiens
ttaggtgtgaggatggggggcctctcttgtggcctagggaacatcgtaaggtcacactggtccagactgcaaatg

SEQ ID NO: 95049 - DNA, 76 bp, Homo sapiens
aggatggggggcctctcttgtggcctagggaacatcgtaaggtcacactggtccagactgcaaatgtctggtgcca

SEQ ID NO: 95050 - DNA, 77 bp, Homo sapiens
cctctcttgtggcctagggaacatcgtaaggtcacactggtccagactgcaaatgtctggtgccagaggcccctgaa

SEQ ID NO: 95051 - DNA, 78 bp, Homo sapiens
tggcctagggaacatcgtaaggtcacactggtccagactgcaaatgtctggtgccagaggcccctgaaggaggttgca

SEQ ID NO: 95052 - DNA, 78 bp, Homo sapiens
aacatcgtaaggtcacactggtccagactgcaaatgtctggtgccagaggcccctgaaggaggttgcagggggcagca

SEQ ID NO: 95053 - DNA, 79 bp, Homo sapiens
agactgcaaatgtctggtgccagaggcccctgaaggaggttgcagggggcagcagagcagtgacccccaagagcctcaa

SEQ ID NO: 95054 - DNA, 76 bp, Homo sapiens
aatgtctggtgccagaggcccctgaaggaggttgcagggggcagcagagcagtgacccccaagagcctcaatcttt

SEQ ID NO: 95055 - DNA, 77 bp, Homo sapiens
cagaggcccctgaaggaggttgcagggggcagcagagcagtgacccccaagagcctcaatcttttccatgacgtaga

SEQ ID NO: 95056 - DNA, 80 bp, Homo sapiens
tgaaggaggttgcagggggcagcagagcagtgacccccaagagcctcaatcttttccatgacgtagaggagcagaacaca

SEQ ID NO: 95057 - DNA, 80 bp, Homo sapiens
aggttgcagggggcagcagagcagtgacccccaagagcctcaatcttttccatgacgtagaggagcagaacacacatctc

SEQ ID NO: 95058 - DNA, 79 bp, Homo sapiens
agcagagcagtgacccccaagagcctcaatcttttccatgacgtagaggagcagaacacacatctcctccactcctaag

SEQ ID NO: 95059 - DNA, 76 bp, Homo sapiens
agtgacccccaagagcctcaatcttttccatgacgtagaggagcagaacacacatctcctccactcctaaggagaa

SEQ ID NO: 95060 - DNA, 77 bp, Homo sapiens
cccaagagcctcaatcttttccatgacgtagaggagcagaacacacatctcctccactcctaaggagaaggagggca

SEQ ID NO: 95061 - DNA, 75 bp, Homo sapiens
aatcttttccatgacgtagaggagcagaacacacatctcctccactcctaaggagaaggagggcaggggagcctc

SEQ ID NO: 95062 - DNA, 75 bp, Homo sapiens
ccatgacgtagaggagcagaacacacatctcctccactcctaaggagaaggagggcaggggagcctcccactccc

SEQ ID NO: 95063 - DNA, 76 bp, Homo sapiens
agcagaacacacatctcctccactcctaaggagaaggagggcaggggagcctcccactccccagcacctgcacagt

SEQ ID NO: 95064 - DNA, 75 bp, Homo sapiens
acacacatctcctccactcctaaggagaaggagggcaggggagcctcccactccccagcacctgcacagttggct

SEQ ID NO: 95065 - DNA, 77 bp, Homo sapiens
tccactcctaaggagaaggagggcaggggagcctcccactccccagcacctgcacagttggcttgccaagagatcca

SEQ ID NO: 95066 - DNA, 77 bp, Homo sapiens
agaaggagggcaggggagcctcccactccccagcacctgcacagttggcttgccaagagatccacaaactcagaaca

SEQ ID NO: 95067 - DNA, 77 bp, Homo sapiens
agggcaggggagcctcccactccccagcacctgcacagttggcttgccaagagatccacaaactcagaacaaaagca

SEQ ID NO: 95068 - DNA, 79 bp, Homo sapiens
tcccactccccagcacctgcacagttggcttgccaagagatccacaaactcagaacaaaagcaggtggtctgggagcca

SEQ ID NO: 95069 - DNA, 79 bp, Homo sapiens
ccagcacctgcacagttggcttgccaagagatccacaaactcagaacaaaagcaggtggtctgggagccagaaatccaa

SEQ ID NO: 95070 - DNA, 76 bp, Homo sapiens
acagttggcttgccaagagatccacaaactcagaacaaaagcaggtggtctgggagccagaaatccaaggccttgc

SEQ ID NO: 95071 - DNA, 77 bp, Homo sapiens
tgccaagagatccacaaactcagaacaaaagcaggtggtctgggagccagaaatccaaggccttgcttgtgggtgta

SEQ ID NO: 95072 - DNA, 74 bp, Homo sapiens
agatccacaaactcagaacaaaagcaggtggtctgggagccagaaatccaaggccttgcttgtgggtgtacttc

SEQ ID NO: 95073 - DNA, 73 bp, Homo sapiens
aaactcagaacaaaagcaggtggtctgggagccagaaatccaaggccttgcttgtgggtgtacttctgcttgg

SEQ ID NO: 95074 - DNA, 71 bp, Homo sapiens
aaatccaaggccttgcttgtgggtgtacttctgcttgggcccttggctgtggctggttaggttgaaaagga

SEQ ID NO: 95075 - DNA, 71 bp, Homo sapiens
aaggccttgcttgtgggtgtacttctgcttgggcccttggctgtggctggttaggttgaaaaggaagcctg

SEQ ID NO: 95076 - DNA, 70 bp, Homo sapiens
ttgtgggtgtacttctgcttgggcccttggctgtggctggttaggttgaaaaggaagcctgggccttttg

SEQ ID NO: 95077 - DNA, 74 bp, Homo sapiens
tacttctgcttgggcccttggctgtggctggttaggttgaaaaggaagcctgggccttttggagcagcatctcc

SEQ ID NO: 95078 - DNA, 74 bp, Homo sapiens
ccttggctgtggctggttaggttgaaaaggaagcctgggccttttggagcagcatctcccacggcaacaggaga

SEQ ID NO: 95079 - DNA, 74 bp, Homo sapiens
tgtggctggttaggttgaaaaggaagcctgggccttttggagcagcatctcccacggcaacaggagacccctca

SEQ ID NO: 95080 - DNA, 74 bp, Homo sapiens
ttaggttgaaaaggaagcctgggccttttggagcagcatctcccacggcaacaggagacccctcagaaggtgca

SEQ ID NO: 95081 - DNA, 73 bp, Homo sapiens
aaaggaagcctgggccttttggagcagcatctcccacggcaacaggagacccctcagaaggtgcagagccccc

SEQ ID NO: 95082 - DNA, 75 bp, Homo sapiens
cttttggagcagcatctcccacggcaacaggagacccctcagaaggtgcagagccccccgtggaacacagggcca

SEQ ID NO: 95083 - DNA, 74 bp, Homo sapiens
agcatctcccacggcaacaggagacccctcagaaggtgcagagccccccgtggaacacagggccaccagtcttc

SEQ ID NO: 95084 - DNA, 72 bp, Homo sapiens
acggcaacaggagacccctcagaaggtgcagagccccccgtggaacacagggccaccagtcttctccttgga

SEQ ID NO: 95085 - DNA, 72 bp, Homo sapiens
aacaggagacccctcagaaggtgcagagccccccgtggaacacagggccaccagtcttctccttggagtcag

SEQ ID NO: 95086 - DNA, 75 bp, Homo sapiens
agaaggtgcagagccccccgtggaacacagggccaccagtcttctccttggagtcaggcagggtgccacctcaga

SEQ ID NO: 95087 - DNA, 78 bp, Homo sapiens
gtgcagagccccccgtggaacacagggccaccagtcttctccttggagtcaggcagggtgccacctcagagctcctga

SEQ ID NO: 95088 - DNA, 79 bp, Homo sapiens
tggaacacagggccaccagtcttctccttggagtcaggcagggtgccacctcagagctcctgagcccagttactgccat

SEQ ID NO: 95089 - DNA, 77 bp, Homo sapiens
ccagtcttctccttggagtcaggcagggtgccacctcagagctcctgagcccagttactgccattcacacaaaaggg

SEQ ID NO: 95090 - DNA, 80 bp, Homo sapiens
ttggagtcaggcagggtgccacctcagagctcctgagcccagttactgccattcacacaaaagggggcttggtcacagca

SEQ ID NO: 95091 - DNA, 75 bp, Homo sapiens
ctcctgagcccagttactgccattcacacaaaagggggcttggtcacagcagcctctggactccggcaggttccc

SEQ ID NO: 95092 - DNA, 77 bp, Homo sapiens
tactgccattcacacaaaagggggcttggtcacagcagcctctggactccggcaggttccccatcccattgagctaa

SEQ ID NO: 95093 - DNA, 73 bp, Homo sapiens
attcacacaaaagggggcttggtcacagcagcctctggactccggcaggttccccatcccattgagctaaaag

SEQ ID NO: 95094 - DNA, 76 bp, Homo sapiens
cacagcagcctctggactccggcaggttccccatcccattgagctaaaaggagcttaaatattccagtgccacctc

SEQ ID NO: 95095 - DNA, 74 bp, Homo sapiens
cccatcccattgagctaaaaggagcttaaatattccagtgccacctcgtatacaaatttatactgttcctgaga

SEQ ID NO: 95096 - DNA, 74 bp, Homo sapiens
attgagctaaaaggagcttaaatattccagtgccacctcgtatacaaatttatactgttcctgagaggcggaga

SEQ ID NO: 95097 - DNA, 78 bp, Homo sapiens
taaatattccagtgccacctcgtatacaaatttatactgttcctgagaggcggagaggagcagaggcagagagggaga

SEQ ID NO: 95098 - DNA, 74 bp, Homo sapiens
aactagtcagccctggctgttggagaacagtccttgggatactcaccagggtctccaccatgttggatttgttg

SEQ ID NO: 95099 - DNA, 74 bp, Homo sapiens
ccctggctgttggagaacagtccttgggatactcaccagggtctccaccatgttggatttgttgttacgcagtg

SEQ ID NO: 95100 - DNA, 74 bp, Homo sapiens
ttggagaacagtccttgggatactcaccagggtctccaccatgttggatttgttgttacgcagtgttttcacga

SEQ ID NO: 95101 - DNA, 74 bp, Homo sapiens
agtccttgggatactcaccagggtctccaccatgttggatttgttgttacgcagtgttttcacgatgtggaaca

SEQ ID NO: 95102 - DNA, 76 bp, Homo sapiens
tactcaccagggtctccaccatgttggatttgttgttacgcagtgttttcacgatgtggaacacgtcaatgatgtt

SEQ ID NO: 95103 - DNA, 77 bp, Homo sapiens
agggtctccaccatgttggatttgttgttacgcagtgttttcacgatgtggaacacgtcaatgatgttttgctgctg

SEQ ID NO: 95104 - DNA, 82 bp, Homo sapiens
accatgttggatttgttgttacgcagtgttttcacgatgtggaacacgtcaatgatgttttgctgctggatcatctcacaca

SEQ ID NO: 95105 - DNA, 86 bp, Homo sapiens
atttgttgttacgcagtgttttcacgatgtggaacacgtcaatgatgttttgctgctggatcatctcacacacactgcagatggca

SEQ ID NO: 95106 - DNA, 85 bp, Homo sapiens
agtgttttcacgatgtggaacacgtcaatgatgttttgctgctggatcatctcacacacactgcagatggcacagaaggttccac

SEQ ID NO: 95107 - DNA, 86 bp, Homo sapiens
tttcacgatgtggaacacgtcaatgatgttttgctgctggatcatctcacacacactgcagatggcacagaaggttccactacggc

SEQ ID NO: 95108 - DNA, 82 bp, Homo sapiens
aacacgtcaatgatgttttgctgctggatcatctcacacacactgcagatggcacagaaggttccactacggcctcccccat

SEQ ID NO: 95109 - DNA, 81 bp, Homo sapiens
aatgatgttttgctgctggatcatctcacacacactgcagatggcacagaaggttccactacggcctcccccatttctaaa

SEQ ID NO: 95110 - DNA, 82 bp, Homo sapiens
ctgctggatcatctcacacacactgcagatggcacagaaggttccactacggcctcccccatttctaaacacagagcaaaga

SEQ ID NO: 95111 - DNA, 80 bp, Homo sapiens
atcatctcacacacactgcagatggcacagaaggttccactacggcctcccccatttctaaacacagagcaaagaggtga

SEQ ID NO: 95112 - DNA, 77 bp, Homo sapiens
acactgcagatggcacagaaggttccactacggcctcccccatttctaaacacagagcaaagaggtgagccatgttc

SEQ ID NO: 95113 - DNA, 75 bp, Homo sapiens
tctatcacccaccaccctattgccctggtgacacctccctagtactcacaggcagtggaccacagtacgtccctc

SEQ ID NO: 95114 - DNA, 71 bp, Homo sapiens
accaccctattgccctggtgacacctccctagtactcacaggcagtggaccacagtacgtccctccctccc

SEQ ID NO: 95115 - DNA, 75 bp, Homo sapiens
attgccctggtgacacctccctagtactcacaggcagtggaccacagtacgtccctccctcccgtcatactgctc

SEQ ID NO: 95116 - DNA, 75 bp, Homo sapiens
acacctccctagtactcacaggcagtggaccacagtacgtccctccctcccgtcatactgctcctgccacttctc

SEQ ID NO: 95117 - DNA, 77 bp, Homo sapiens
tagtactcacaggcagtggaccacagtacgtccctccctcccgtcatactgctcctgccacttctccagtcgtcgga

SEQ ID NO: 95118 - DNA, 75 bp, Homo sapiens
agtggaccacagtacgtccctccctcccgtcatactgctcctgccacttctccagtcgtcggaccactttgagca

SEQ ID NO: 95119 - DNA, 76 bp, Homo sapiens
accacagtacgtccctccctcccgtcatactgctcctgccacttctccagtcgtcggaccactttgagcagagagc

SEQ ID NO: 95120 - DNA, 76 bp, Homo sapiens
gtccctccctcccgtcatactgctcctgccacttctccagtcgtcggaccactttgagcagagagcgcttggaggg

SEQ ID NO: 95121 - DNA, 77 bp, Homo sapiens
tcatactgctcctgccacttctccagtcgtcggaccactttgagcagagagcgcttggaggggggcgtgtcccggta

SEQ ID NO: 95122 - DNA, 75 bp, Homo sapiens
ctgccacttctccagtcgtcggaccactttgagcagagagcgcttggaggggggcgtgtcccggtaggcaggcca

SEQ ID NO: 95123 - DNA, 76 bp, Homo sapiens
tctccagtcgtcggaccactttgagcagagagcgcttggaggggggcgtgtcccggtaggcaggccagccaatgta

SEQ ID NO: 95124 - DNA, 75 bp, Homo sapiens
tcgtcggaccactttgagcagagagcgcttggaggggggcgtgtcccggtaggcaggccagccaatgtactggag

SEQ ID NO: 95125 - DNA, 77 bp, Homo sapiens
tttgagcagagagcgcttggaggggggcgtgtcccggtaggcaggccagccaatgtactggaggtgctggactatac

SEQ ID NO: 95126 - DNA, 74 bp, Homo sapiens
cgcttggaggggggcgtgtcccggtaggcaggccagccaatgtactggaggtgctggactatacgataaccatc

SEQ ID NO: 95127 - DNA, 77 bp, Homo sapiens
ggggcgtgtcccggtaggcaggccagccaatgtactggaggtgctggactatacgataaccatcctgtggctgagaa

SEQ ID NO: 95128 - DNA, 79 bp, Homo sapiens
gtgtcccggtaggcaggccagccaatgtactggaggtgctggactatacgataaccatcctgtggctgagaacagagag

SEQ ID NO: 95129 - DNA, 79 bp, Homo sapiens
aggccagccaatgtactggaggtgctggactatacgataaccatcctgtggctgagaacagagaggctgttagggctgt

SEQ ID NO: 95130 - DNA, 79 bp, Homo sapiens
aatgtactggaggtgctggactatacgataaccatcctgtggctgagaacagagaggctgttagggctgttctgctggg

SEQ ID NO: 95131 - DNA, 75 bp, Homo sapiens
tcttggggaggaggggctcagcaagcaatggcggccgtgtacttacccgggccatgttacagatgcggaatattc

SEQ ID NO: 95132 - DNA, 79 bp, Homo sapiens
gaggggctcagcaagcaatggcggccgtgtacttacccgggccatgttacagatgcggaatattctgtggatgatgtcc

SEQ ID NO: 95133 - DNA, 79 bp, Homo sapiens
agcaagcaatggcggccgtgtacttacccgggccatgttacagatgcggaatattctgtggatgatgtcctcgtcgatg

SEQ ID NO: 95134 - DNA, 78 bp, Homo sapiens
aatggcggccgtgtacttacccgggccatgttacagatgcggaatattctgtggatgatgtcctcgtcgatgtctgcg

SEQ ID NO: 95135 - DNA, 80 bp, Homo sapiens
tgtacttacccgggccatgttacagatgcggaatattctgtggatgatgtcctcgtcgatgtctgcggagacgaactcca

SEQ ID NO: 95136 - DNA, 80 bp, Homo sapiens
cccgggccatgttacagatgcggaatattctgtggatgatgtcctcgtcgatgtctgcggagacgaactccacctggatg

SEQ ID NO: 95137 - DNA, 82 bp, Homo sapiens
gttacagatgcggaatattctgtggatgatgtcctcgtcgatgtctgcggagacgaactccacctggatgggcccatagcac

SEQ ID NO: 95138 - DNA, 78 bp, Homo sapiens
atattctgtggatgatgtcctcgtcgatgtctgcggagacgaactccacctggatgggcccatagcacccggaggtct

SEQ ID NO: 95139 - DNA, 80 bp, Homo sapiens
tgtggatgatgtcctcgtcgatgtctgcggagacgaactccacctggatgggcccatagcacccggaggtcttctcaggc

SEQ ID NO: 95140 - DNA, 80 bp, Homo sapiens
tcgtcgatgtctgcggagacgaactccacctggatgggcccatagcacccggaggtcttctcaggccagtactgcataca

SEQ ID NO: 95141 - DNA, 78 bp, Homo sapiens
atgtctgcggagacgaactccacctggatgggcccatagcacccggaggtcttctcaggccagtactgcatacagaac

SEQ ID NO: 95142 - DNA, 76 bp, Homo sapiens
aactccacctggatgggcccatagcacccggaggtcttctcaggccagtactgcatacagaactgagataaggaaa

SEQ ID NO: 95143 - DNA, 79 bp, Homo sapiens
tggatgggcccatagcacccggaggtcttctcaggccagtactgcatacagaactgagataaggaaagaggtcacagaa

SEQ ID NO: 95144 - DNA, 78 bp, Homo sapiens
atagcacccggaggtcttctcaggccagtactgcatacagaactgagataaggaaagaggtcacagaaggagctcaaa

SEQ ID NO: 95145 - DNA, 80 bp, Homo sapiens
tagagcatggcccccctgacccacctagggcttggcttggcctcctcctacctgggcagtgtccatctcattcagcatca

SEQ ID NO: 95146 - DNA, 80 bp, Homo sapiens
ctgacccacctagggcttggcttggcctcctcctacctgggcagtgtccatctcattcagcatcaccacagaggagcagt

SEQ ID NO: 95147 - DNA, 82 bp, Homo sapiens
tagggcttggcttggcctcctcctacctgggcagtgtccatctcattcagcatcaccacagaggagcagttgtaatcgaaca

SEQ ID NO: 95148 - DNA, 82 bp, Homo sapiens
cttggcctcctcctacctgggcagtgtccatctcattcagcatcaccacagaggagcagttgtaatcgaacaccagcctcca

SEQ ID NO: 95149 - DNA, 81 bp, Homo sapiens
cctcctcctacctgggcagtgtccatctcattcagcatcaccacagaggagcagttgtaatcgaacaccagcctccagaag

SEQ ID NO: 95150 - DNA, 84 bp, Homo sapiens
tgggcagtgtccatctcattcagcatcaccacagaggagcagttgtaatcgaacaccagcctccagaagtctgccacggtgttg

SEQ ID NO: 95151 - DNA, 80 bp, Homo sapiens
atctcattcagcatcaccacagaggagcagttgtaatcgaacaccagcctccagaagtctgccacggtgttgggtagagg

SEQ ID NO: 95152 - DNA, 80 bp, Homo sapiens
ttcagcatcaccacagaggagcagttgtaatcgaacaccagcctccagaagtctgccacggtgttgggtagagggtgctg

SEQ ID NO: 95153 - DNA, 76 bp, Homo sapiens
acagaggagcagttgtaatcgaacaccagcctccagaagtctgccacggtgttgggtagagggtgctgggtgacca

SEQ ID NO: 95154 - DNA, 73 bp, Homo sapiens
agttgtaatcgaacaccagcctccagaagtctgccacggtgttgggtagagggtgctgggtgaccacgaaggc

SEQ ID NO: 95155 - DNA, 75 bp, Homo sapiens
aacaccagcctccagaagtctgccacggtgttgggtagagggtgctgggtgaccacgaaggcggcaggctgcttg

SEQ ID NO: 95156 - DNA, 78 bp, Homo sapiens
tccagaagtctgccacggtgttgggtagagggtgctgggtgaccacgaaggcggcaggctgcttgtggctctgacaaa

SEQ ID NO: 95157 - DNA, 79 bp, Homo sapiens
tctgccacggtgttgggtagagggtgctgggtgaccacgaaggcggcaggctgcttgtggctctgacaaaggaatgaca

SEQ ID NO: 95158 - DNA, 78 bp, Homo sapiens
tgggtagagggtgctgggtgaccacgaaggcggcaggctgcttgtggctctgacaaaggaatgacacaggcttcgtaa

SEQ ID NO: 95159 - DNA, 82 bp, Homo sapiens
atatttgccctagaatgccagctaggagctttctgcccgggctcggcttacatccatcagtgctgcgttgatgtaattgctg

SEQ ID NO: 95160 - DNA, 83 bp, Homo sapiens
tagaatgccagctaggagctttctgcccgggctcggcttacatccatcagtgctgcgttgatgtaattgctggattctccgtc

SEQ ID NO: 95161 - DNA, 82 bp, Homo sapiens
taggagctttctgcccgggctcggcttacatccatcagtgctgcgttgatgtaattgctggattctccgtccactgagataa

SEQ ID NO: 95162 - DNA, 80 bp, Homo sapiens
ttctgcccgggctcggcttacatccatcagtgctgcgttgatgtaattgctggattctccgtccactgagataaggaagg

SEQ ID NO: 95163 - DNA, 83 bp, Homo sapiens
tcggcttacatccatcagtgctgcgttgatgtaattgctggattctccgtccactgagataaggaagggcaggcagcggtcca

SEQ ID NO: 95164 - DNA, 84 bp, Homo sapiens
atccatcagtgctgcgttgatgtaattgctggattctccgtccactgagataaggaagggcaggcagcggtccagaggcagcac

SEQ ID NO: 95165 - DNA, 79 bp, Homo sapiens
cgttgatgtaattgctggattctccgtccactgagataaggaagggcaggcagcggtccagaggcagcacgtccatact

SEQ ID NO: 95166 - DNA, 79 bp, Homo sapiens
attgctggattctccgtccactgagataaggaagggcaggcagcggtccagaggcagcacgtccatacttcgattctta

SEQ ID NO: 95167 - DNA, 78 bp, Homo sapiens
attctccgtccactgagataaggaagggcaggcagcggtccagaggcagcacgtccatacttcgattcttatcatggt

SEQ ID NO: 95168 - DNA, 77 bp, Homo sapiens
gtccactgagataaggaagggcaggcagcggtccagaggcagcacgtccatacttcgattcttatcatggttccggg

SEQ ID NO: 95169 - DNA, 81 bp, Homo sapiens
gaagggcaggcagcggtccagaggcagcacgtccatacttcgattcttatcatggttccggggcaggagcccaatgctgca

SEQ ID NO: 95170 - DNA, 80 bp, Homo sapiens
aggcagcggtccagaggcagcacgtccatacttcgattcttatcatggttccggggcaggagcccaatgctgcagtcctc

SEQ ID NO: 95171 - DNA, 79 bp, Homo sapiens
agaggcagcacgtccatacttcgattcttatcatggttccggggcaggagcccaatgctgcagtcctcgggccgcacac

SEQ ID NO: 95172 - DNA, 76 bp, Homo sapiens
agcacgtccatacttcgattcttatcatggttccggggcaggagcccaatgctgcagtcctcgggccgcacacggg

SEQ ID NO: 95173 - DNA, 77 bp, Homo sapiens
tacttcgattcttatcatggttccggggcaggagcccaatgctgcagtcctcgggccgcacacggggtgtcacaatg

SEQ ID NO: 95174 - DNA, 77 bp, Homo sapiens
ttatcatggttccggggcaggagcccaatgctgcagtcctcgggccgcacacggggtgtcacaatgttgagggtctg

SEQ ID NO: 95175 - DNA, 76 bp, Homo sapiens
gggcaggagcccaatgctgcagtcctcgggccgcacacggggtgtcacaatgttgagggtctgtggggcacaaagg

SEQ ID NO: 95176 - DNA, 77 bp, Homo sapiens
ccaatgctgcagtcctcgggccgcacacggggtgtcacaatgttgagggtctgtggggcacaaaggtgaatagatag

SEQ ID NO: 95177 - DNA, 74 bp, Homo sapiens
agtcctcgggccgcacacggggtgtcacaatgttgagggtctgtggggcacaaaggtgaatagataggccctgc

SEQ ID NO: 95178 - DNA, 76 bp, Homo sapiens
taacaacccaaactgactaagatggtcaccgagcctgggatttgctcatacctgaaattcatctttgatttggctg

SEQ ID NO: 95179 - DNA, 77 bp, Homo sapiens
aactgactaagatggtcaccgagcctgggatttgctcatacctgaaattcatctttgatttggctggagtttgtctg

SEQ ID NO: 95180 - DNA, 76 bp, Homo sapiens
atggtcaccgagcctgggatttgctcatacctgaaattcatctttgatttggctggagtttgtctgggggtccagc

SEQ ID NO: 95181 - DNA, 79 bp, Homo sapiens
tgggatttgctcatacctgaaattcatctttgatttggctggagtttgtctgggggtccagcctgctgatattgtagta

SEQ ID NO: 95182 - DNA, 80 bp, Homo sapiens
tttgctcatacctgaaattcatctttgatttggctggagtttgtctgggggtccagcctgctgatattgtagtagagaga

SEQ ID NO: 95183 - DNA, 76 bp, Homo sapiens
aaattcatctttgatttggctggagtttgtctgggggtccagcctgctgatattgtagtagagagaacggaactca

SEQ ID NO: 95184 - DNA, 77 bp, Homo sapiens
atctttgatttggctggagtttgtctgggggtccagcctgctgatattgtagtagagagaacggaactcacacacag

SEQ ID NO: 95185 - DNA, 80 bp, Homo sapiens
tggagtttgtctgggggtccagcctgctgatattgtagtagagagaacggaactcacacacagggatggcagtgttgcca

SEQ ID NO: 95186 - DNA, 82 bp, Homo sapiens
ttgtctgggggtccagcctgctgatattgtagtagagagaacggaactcacacacagggatggcagtgttgccacagaggca

SEQ ID NO: 95187 - DNA, 84 bp, Homo sapiens
tccagcctgctgatattgtagtagagagaacggaactcacacacagggatggcagtgttgccacagaggcacgcttccaggatg

SEQ ID NO: 95188 - DNA, 84 bp, Homo sapiens
tattgtagtagagagaacggaactcacacacagggatggcagtgttgccacagaggcacgcttccaggatggcatcgtgcacaa

SEQ ID NO: 95189 - DNA, 84 bp, Homo sapiens
tagagagaacggaactcacacacagggatggcagtgttgccacagaggcacgcttccaggatggcatcgtgcacaaacacatat

SEQ ID NO: 95190 - DNA, 85 bp, Homo sapiens
aactcacacacagggatggcagtgttgccacagaggcacgcttccaggatggcatcgtgcacaaacacatattgctcctgcaaag

SEQ ID NO: 95191 - DNA, 86 bp, Homo sapiens
acacagggatggcagtgttgccacagaggcacgcttccaggatggcatcgtgcacaaacacatattgctcctgcaaagtcagaaga

SEQ ID NO: 95192 - DNA, 83 bp, Homo sapiens
agtgttgccacagaggcacgcttccaggatggcatcgtgcacaaacacatattgctcctgcaaagtcagaagagagggaatgg

SEQ ID NO: 95193 - DNA, 82 bp, Homo sapiens
acagaggcacgcttccaggatggcatcgtgcacaaacacatattgctcctgcaaagtcagaagagagggaatggggtgccag

SEQ ID NO: 95194 - DNA, 72 bp, Homo sapiens
tggtcagggctacaggtggccaactgtcttggccccctaggactcacctctgtctgtaccaggttgaccctt

SEQ ID NO: 95195 - DNA, 70 bp, Homo sapiens
tacaggtggccaactgtcttggccccctaggactcacctctgtctgtaccaggttgaccctttgggcccg

SEQ ID NO: 95196 - DNA, 71 bp, Homo sapiens
aactgtcttggccccctaggactcacctctgtctgtaccaggttgaccctttgggcccggagctcacgcac

SEQ ID NO: 95197 - DNA, 73 bp, Homo sapiens
ttggccccctaggactcacctctgtctgtaccaggttgaccctttgggcccggagctcacgcacgcagttgaa

SEQ ID NO: 95198 - DNA, 76 bp, Homo sapiens
taggactcacctctgtctgtaccaggttgaccctttgggcccggagctcacgcacgcagttgaagatgtccaccac

SEQ ID NO: 95199 - DNA, 75 bp, Homo sapiens
tctgtctgtaccaggttgaccctttgggcccggagctcacgcacgcagttgaagatgtccaccaccccttcattc

SEQ ID NO: 95200 - DNA, 75 bp, Homo sapiens
ggttgaccctttgggcccggagctcacgcacgcagttgaagatgtccaccaccccttcattctcggccatgtcaa

SEQ ID NO: 95201 - DNA, 80 bp, Homo sapiens
tttgggcccggagctcacgcacgcagttgaagatgtccaccaccccttcattctcggccatgtcaagcatggtgtcaatg

SEQ ID NO: 95202 - DNA, 82 bp, Homo sapiens
cccggagctcacgcacgcagttgaagatgtccaccaccccttcattctcggccatgtcaagcatggtgtcaatggcaatgaa

SEQ ID NO: 95203 - DNA, 83 bp, Homo sapiens
acgcacgcagttgaagatgtccaccaccccttcattctcggccatgtcaagcatggtgtcaatggcaatgaagcagccagtcc

SEQ ID NO: 95204 - DNA, 82 bp, Homo sapiens
ttgaagatgtccaccaccccttcattctcggccatgtcaagcatggtgtcaatggcaatgaagcagccagtccgcccagccc

SEQ ID NO: 95205 - DNA, 82 bp, Homo sapiens
accccttcattctcggccatgtcaagcatggtgtcaatggcaatgaagcagccagtccgcccagccccagcactggaagaga

SEQ ID NO: 95206 - DNA, 84 bp, Homo sapiens
ttcattctcggccatgtcaagcatggtgtcaatggcaatgaagcagccagtccgcccagccccagcactggaagagaggtatgg

SEQ ID NO: 95207 - DNA, 82 bp, Homo sapiens
atgtcaagcatggtgtcaatggcaatgaagcagccagtccgcccagccccagcactggaagagaggtatggtctgtgttaag

SEQ ID NO: 95208 - DNA, 81 bp, Homo sapiens
atggtgtcaatggcaatgaagcagccagtccgcccagccccagcactggaagagaggtatggtctgtgttaaggatcttca

SEQ ID NO: 95209 - DNA, 68 bp, Homo sapiens
ggcctcccaaggtgaaggacctttgacttacctgcagtggaccactatgggcccagcttccggggggt

SEQ ID NO: 95210 - DNA, 68 bp, Homo sapiens
aggtgaaggacctttgacttacctgcagtggaccactatgggcccagcttccggggggttgaggaact

SEQ ID NO: 95211 - DNA, 69 bp, Homo sapiens
aggacctttgacttacctgcagtggaccactatgggcccagcttccggggggttgaggaacttgacctg

SEQ ID NO: 95212 - DNA, 70 bp, Homo sapiens
acttacctgcagtggaccactatgggcccagcttccggggggttgaggaacttgacctggcggacgaagc

SEQ ID NO: 95213 - DNA, 69 bp, Homo sapiens
agtggaccactatgggcccagcttccggggggttgaggaacttgacctggcggacgaagcccagaaggc

SEQ ID NO: 95214 - DNA, 73 bp, Homo sapiens
tatgggcccagcttccggggggttgaggaacttgacctggcggacgaagcccagaaggccagtggcatagcag

SEQ ID NO: 95215 - DNA, 70 bp, Homo sapiens
ttccggggggttgaggaacttgacctggcggacgaagcccagaaggccagtggcatagcagggaacgccg

SEQ ID NO: 95216 - DNA, 76 bp, Homo sapiens
gttgaggaacttgacctggcggacgaagcccagaaggccagtggcatagcagggaacgccgtggtcaggccagctg

SEQ ID NO: 95217 - DNA, 77 bp, Homo sapiens
ttgacctggcggacgaagcccagaaggccagtggcatagcagggaacgccgtggtcaggccagctggtgaagtggaa

SEQ ID NO: 95218 - DNA, 77 bp, Homo sapiens
acgaagcccagaaggccagtggcatagcagggaacgccgtggtcaggccagctggtgaagtggaagaggcggagctc

SEQ ID NO: 95219 - DNA, 78 bp, Homo sapiens
aaggccagtggcatagcagggaacgccgtggtcaggccagctggtgaagtggaagaggcggagctcccggatctcatg

SEQ ID NO: 95220 - DNA, 77 bp, Homo sapiens
catagcagggaacgccgtggtcaggccagctggtgaagtggaagaggcggagctcccggatctcatggtagcctttc

SEQ ID NO: 95221 - DNA, 75 bp, Homo sapiens
aacgccgtggtcaggccagctggtgaagtggaagaggcggagctcccggatctcatggtagcctttctgaggaaa

SEQ ID NO: 95222 - DNA, 75 bp, Homo sapiens
cgtggtcaggccagctggtgaagtggaagaggcggagctcccggatctcatggtagcctttctgaggaaagaacg

SEQ ID NO: 95223 - DNA, 74 bp, Homo sapiens
tggtgaagtggaagaggcggagctcccggatctcatggtagcctttctgaggaaagaacgggcctctgttcttc

SEQ ID NO: 95224 - DNA, 73 bp, Homo sapiens
aagtggaagaggcggagctcccggatctcatggtagcctttctgaggaaagaacgggcctctgttcttccagc

SEQ ID NO: 95225 - DNA, 79 bp, Homo sapiens
tggctctcatggtggaccggctgcccacagcctccaagaagcttaccttctggactgtgaaggtgcgtatgacgtattc

SEQ ID NO: 95226 - DNA, 77 bp, Homo sapiens
atggtggaccggctgcccacagcctccaagaagcttaccttctggactgtgaaggtgcgtatgacgtattctgccag

SEQ ID NO: 95227 - DNA, 78 bp, Homo sapiens
ctgcccacagcctccaagaagcttaccttctggactgtgaaggtgcgtatgacgtattctgccaggggctctgtttca

SEQ ID NO: 95228 - DNA, 75 bp, Homo sapiens
cctccaagaagcttaccttctggactgtgaaggtgcgtatgacgtattctgccaggggctctgtttcaatcaggg

SEQ ID NO: 95229 - DNA, 75 bp, Homo sapiens
aagcttaccttctggactgtgaaggtgcgtatgacgtattctgccaggggctctgtttcaatcagggtgacttta

SEQ ID NO: 95230 - DNA, 77 bp, Homo sapiens
ttctggactgtgaaggtgcgtatgacgtattctgccaggggctctgtttcaatcagggtgactttaatgtctccgta

SEQ ID NO: 95231 - DNA, 76 bp, Homo sapiens
tgtgaaggtgcgtatgacgtattctgccaggggctctgtttcaatcagggtgactttaatgtctccgtagacctcc

SEQ ID NO: 95232 - DNA, 76 bp, Homo sapiens
cgtatgacgtattctgccaggggctctgtttcaatcagggtgactttaatgtctccgtagacctccgtgtcatctg

SEQ ID NO: 95233 - DNA, 79 bp, Homo sapiens
tgccaggggctctgtttcaatcagggtgactttaatgtctccgtagacctccgtgtcatctggccagtatcgcacacat

SEQ ID NO: 95234 - DNA, 79 bp, Homo sapiens
tctgtttcaatcagggtgactttaatgtctccgtagacctccgtgtcatctggccagtatcgcacacatttcacctgtg

SEQ ID NO: 95235 - DNA, 77 bp, Homo sapiens
aatcagggtgactttaatgtctccgtagacctccgtgtcatctggccagtatcgcacacatttcacctgtggccaag

SEQ ID NO: 95236 - DNA, 80 bp, Homo sapiens
actttaatgtctccgtagacctccgtgtcatctggccagtatcgcacacatttcacctgtggccaagtgagagacagaga

SEQ ID NO: 95237 - DNA, 82 bp, Homo sapiens
agagtgcatctccagcatcctctgcccaggcgagtgcaggagaggcttaccctgcccacttccaccaggtttgtgaccatga

SEQ ID NO: 95238 - DNA, 80 bp, Homo sapiens
agcatcctctgcccaggcgagtgcaggagaggcttaccctgcccacttccaccaggtttgtgaccatgacgatgctggcg

SEQ ID NO: 95239 - DNA, 79 bp, Homo sapiens
tctgcccaggcgagtgcaggagaggcttaccctgcccacttccaccaggtttgtgaccatgacgatgctggcggagttc

SEQ ID NO: 95240 - DNA, 80 bp, Homo sapiens
gtgcaggagaggcttaccctgcccacttccaccaggtttgtgaccatgacgatgctggcggagttctcctgccagatcat

SEQ ID NO: 95241 - DNA, 78 bp, Homo sapiens
aggcttaccctgcccacttccaccaggtttgtgaccatgacgatgctggcggagttctcctgccagatcattctccaa

SEQ ID NO: 95242 - DNA, 77 bp, Homo sapiens
gcccacttccaccaggtttgtgaccatgacgatgctggcggagttctcctgccagatcattctccaaaagtccttta

SEQ ID NO: 95243 - DNA, 78 bp, Homo sapiens
ttccaccaggtttgtgaccatgacgatgctggcggagttctcctgccagatcattctccaaaagtcctttacagtctc

SEQ ID NO: 95244 - DNA, 80 bp, Homo sapiens
tttgtgaccatgacgatgctggcggagttctcctgccagatcattctccaaaagtcctttacagtctcctgcatcggacc

SEQ ID NO: 95245 - DNA, 81 bp, Homo sapiens
atgacgatgctggcggagttctcctgccagatcattctccaaaagtcctttacagtctcctgcatcggacctgccaacaga

SEQ ID NO: 95246 - DNA, 79 bp, Homo sapiens
tggcggagttctcctgccagatcattctccaaaagtcctttacagtctcctgcatcggacctgccaacagagaagacag

SEQ ID NO: 95247 - DNA, 79 bp, Homo sapiens
ctgccagatcattctccaaaagtcctttacagtctcctgcatcggacctgccaacagagaagacagtgaggttagagaa

SEQ ID NO: 95248 - DNA, 78 bp, Homo sapiens
atcattctccaaaagtcctttacagtctcctgcatcggacctgccaacagagaagacagtgaggttagagaatgcaag

SEQ ID NO: 95249 - DNA, 72 bp, Homo sapiens
acaagccttgcagttaagagagccctttcccctgggacccctgaagcctctctgaggcactaggtggaggga

SEQ ID NO: 95250 - DNA, 70 bp, Homo sapiens
agttaagagagccctttcccctgggacccctgaagcctctctgaggcactaggtggagggagggcactta

SEQ ID NO: 95251 - DNA, 72 bp, Homo sapiens
ctttcccctgggacccctgaagcctctctgaggcactaggtggagggagggcacttaccttgagtcgcaatg

SEQ ID NO: 95252 - DNA, 75 bp, Homo sapiens
ggacccctgaagcctctctgaggcactaggtggagggagggcacttaccttgagtcgcaatgtagtgccgaggtc

SEQ ID NO: 95253 - DNA, 76 bp, Homo sapiens
aagcctctctgaggcactaggtggagggagggcacttaccttgagtcgcaatgtagtgccgaggtcgatggtatcc

SEQ ID NO: 95254 - DNA, 75 bp, Homo sapiens
aggcactaggtggagggagggcacttaccttgagtcgcaatgtagtgccgaggtcgatggtatccctggataaca

SEQ ID NO: 95255 - DNA, 74 bp, Homo sapiens
gtggagggagggcacttaccttgagtcgcaatgtagtgccgaggtcgatggtatccctggataacaggagaaaa

SEQ ID NO: 95256 - DNA, 77 bp, Homo sapiens
ggagggcacttaccttgagtcgcaatgtagtgccgaggtcgatggtatccctggataacaggagaaaagcactgtga

SEQ ID NO: 95257 - DNA, 79 bp, Homo sapiens
ttgagtcgcaatgtagtgccgaggtcgatggtatccctggataacaggagaaaagcactgtgaagagtctgttgtcaaa

SEQ ID NO: 95258 - DNA, 78 bp, Homo sapiens
aatgtagtgccgaggtcgatggtatccctggataacaggagaaaagcactgtgaagagtctgttgtcaaagcttgcaa

SEQ ID NO: 95259 - DNA, 78 bp, Homo sapiens
aggtcgatggtatccctggataacaggagaaaagcactgtgaagagtctgttgtcaaagcttgcaaacagcacaatat

SEQ ID NO: 95260 - DNA, 78 bp, Homo sapiens
atggtatccctggataacaggagaaaagcactgtgaagagtctgttgtcaaagcttgcaaacagcacaatattaataa

SEQ ID NO: 95261 - DNA, 76 bp, Homo sapiens
taaaccacagatcttgagcctgcaaaagccagccccagcccccagccccattaagacactcacgtcaatgtagttg

SEQ ID NO: 95262 - DNA, 78 bp, Homo sapiens
atcttgagcctgcaaaagccagccccagcccccagccccattaagacactcacgtcaatgtagttggcattgatgtag

SEQ ID NO: 95263 - DNA, 76 bp, Homo sapiens
aaaagccagccccagcccccagccccattaagacactcacgtcaatgtagttggcattgatgtagtcagagtgcgg

SEQ ID NO: 95264 - DNA, 81 bp, Homo sapiens
cagcccccagccccattaagacactcacgtcaatgtagttggcattgatgtagtcagagtgcgggtctccatccagcacca

SEQ ID NO: 95265 - DNA, 83 bp, Homo sapiens
agccccattaagacactcacgtcaatgtagttggcattgatgtagtcagagtgcgggtctccatccagcaccagcagcctcac

SEQ ID NO: 95266 - DNA, 82 bp, Homo sapiens
ttaagacactcacgtcaatgtagttggcattgatgtagtcagagtgcgggtctccatccagcaccagcagcctcacccggga

SEQ ID NO: 95267 - DNA, 85 bp, Homo sapiens
tcaatgtagttggcattgatgtagtcagagtgcgggtctccatccagcaccagcagcctcacccgggaatggtcgtctgcagaga

SEQ ID NO: 95268 - DNA, 85 bp, Homo sapiens
ttggcattgatgtagtcagagtgcgggtctccatccagcaccagcagcctcacccgggaatggtcgtctgcagagagagcagaaa

SEQ ID NO: 95269 - DNA, 82 bp, Homo sapiens
atgtagtcagagtgcgggtctccatccagcaccagcagcctcacccgggaatggtcgtctgcagagagagcagaaatcaagg

SEQ ID NO: 95270 - DNA, 82 bp, Homo sapiens
tgcgggtctccatccagcaccagcagcctcacccgggaatggtcgtctgcagagagagcagaaatcaaggggatggttgata

SEQ ID NO: 95271 - DNA, 79 bp, Homo sapiens
atccagcaccagcagcctcacccgggaatggtcgtctgcagagagagcagaaatcaaggggatggttgataagaggcct

SEQ ID NO: 95272 - DNA, 78 bp, Homo sapiens
tttcccctgcatcctcaacacctgaagcttaggagctcccagaagggcacctacaggatatgatgttcccatatcgat

SEQ ID NO: 95273 - DNA, 78 bp, Homo sapiens
atcctcaacacctgaagcttaggagctcccagaagggcacctacaggatatgatgttcccatatcgattcttattgcg

SEQ ID NO: 95274 - DNA, 76 bp, Homo sapiens
acctgaagcttaggagctcccagaagggcacctacaggatatgatgttcccatatcgattcttattgcggttttca

SEQ ID NO: 95275 - DNA, 75 bp, Homo sapiens
cttaggagctcccagaagggcacctacaggatatgatgttcccatatcgattcttattgcggttttcatcctcct

SEQ ID NO: 95276 - DNA, 76 bp, Homo sapiens
cccagaagggcacctacaggatatgatgttcccatatcgattcttattgcggttttcatcctccttggctgtgtcc

SEQ ID NO: 95277 - DNA, 77 bp, Homo sapiens
acctacaggatatgatgttcccatatcgattcttattgcggttttcatcctccttggctgtgtcccacgaagctgtc

SEQ ID NO: 95278 - DNA, 78 bp, Homo sapiens
atatgatgttcccatatcgattcttattgcggttttcatcctccttggctgtgtcccacgaagctgtctgcccctctg

SEQ ID NO: 95279 - DNA, 75 bp, Homo sapiens
atatcgattcttattgcggttttcatcctccttggctgtgtcccacgaagctgtctgcccctctggtaaggccta

SEQ ID NO: 95280 - DNA, 72 bp, Homo sapiens
ttcttattgcggttttcatcctccttggctgtgtcccacgaagctgtctgcccctctggtaaggcctaaaaa

SEQ ID NO: 95281 - DNA, 74 bp, Homo sapiens
ttttcatcctccttggctgtgtcccacgaagctgtctgcccctctggtaaggcctaaaaagcaaggacagagtg

SEQ ID NO: 95282 - DNA, 76 bp, Homo sapiens
tggctgtgtcccacgaagctgtctgcccctctggtaaggcctaaaaagcaaggacagagtggttagagtggcctga

SEQ ID NO: 95283 - DNA, 75 bp, Homo sapiens
gtgtcccacgaagctgtctgcccctctggtaaggcctaaaaagcaaggacagagtggttagagtggcctgagata

SEQ ID NO: 95284 - DNA, 70 bp, Homo sapiens
aaataagcctctgaaactatcaggaagtttccccacaggctggtctcttacctcgtattcctccttgaac

SEQ ID NO: 95285 - DNA, 68 bp, Homo sapiens
aaactatcaggaagtttccccacaggctggtctcttacctcgtattcctccttgaacccgtagccctg

SEQ ID NO: 95286 - DNA, 70 bp, Homo sapiens
aagtttccccacaggctggtctcttacctcgtattcctccttgaacccgtagccctggcctctcttcatc

SEQ ID NO: 95287 - DNA, 80 bp, Homo sapiens
acaggctggtctcttacctcgtattcctccttgaacccgtagccctggcctctcttcatctgcgtgatgtgctgcagcaa

SEQ ID NO: 95288 - DNA, 82 bp, Homo sapiens
tggtctcttacctcgtattcctccttgaacccgtagccctggcctctcttcatctgcgtgatgtgctgcagcaagtcagcca

SEQ ID NO: 95289 - DNA, 80 bp, Homo sapiens
cctcgtattcctccttgaacccgtagccctggcctctcttcatctgcgtgatgtgctgcagcaagtcagccacccggatg

SEQ ID NO: 95290 - DNA, 80 bp, Homo sapiens
ttgaacccgtagccctggcctctcttcatctgcgtgatgtgctgcagcaagtcagccacccggatggcgggttggaactg

SEQ ID NO: 95291 - DNA, 79 bp, Homo sapiens
tagccctggcctctcttcatctgcgtgatgtgctgcagcaagtcagccacccggatggcgggttggaactggtcccggg

SEQ ID NO: 95292 - DNA, 81 bp, Homo sapiens
tctcttcatctgcgtgatgtgctgcagcaagtcagccacccggatggcgggttggaactggtcccgggggtagctcatctc

SEQ ID NO: 95293 - DNA, 79 bp, Homo sapiens
atctgcgtgatgtgctgcagcaagtcagccacccggatggcgggttggaactggtcccgggggtagctcatctccacag

SEQ ID NO: 95294 - DNA, 77 bp, Homo sapiens
atgtgctgcagcaagtcagccacccggatggcgggttggaactggtcccgggggtagctcatctccacagggtcaca

SEQ ID NO: 95295 - DNA, 71 bp, Homo sapiens
aagtcagccacccggatggcgggttggaactggtcccgggggtagctcatctccacagggtcacaggtgcg

SEQ ID NO: 95296 - DNA, 73 bp, Homo sapiens
ggatggcgggttggaactggtcccgggggtagctcatctccacagggtcacaggtgcggtagggatgagtctg

SEQ ID NO: 95297 - DNA, 74 bp, Homo sapiens
gttggaactggtcccgggggtagctcatctccacagggtcacaggtgcggtagggatgagtctggatcgtgagg

SEQ ID NO: 95298 - DNA, 74 bp, Homo sapiens
actggtcccgggggtagctcatctccacagggtcacaggtgcggtagggatgagtctggatcgtgagggtgggc

SEQ ID NO: 95299 - DNA, 76 bp, Homo sapiens
gggtagctcatctccacagggtcacaggtgcggtagggatgagtctggatcgtgagggtgggctgggaaagctccc

SEQ ID NO: 95300 - DNA, 76 bp, Homo sapiens
atctccacagggtcacaggtgcggtagggatgagtctggatcgtgagggtgggctgggaaagctccccgcggctgc

SEQ ID NO: 95301 - DNA, 78 bp, Homo sapiens
tcacaggtgcggtagggatgagtctggatcgtgagggtgggctgggaaagctccccgcggctgccatctgcttcgaaa

SEQ ID NO: 95302 - DNA, 75 bp, Homo sapiens
gtagggatgagtctggatcgtgagggtgggctgggaaagctccccgcggctgccatctgcttcgaaaagaaggag

SEQ ID NO: 95303 - DNA, 80 bp, Homo sapiens
tctggatcgtgagggtgggctgggaaagctccccgcggctgccatctgcttcgaaaagaaggaggcagaacagatcatca

SEQ ID NO: 95304 - DNA, 73 bp, Homo sapiens
tgagctggaccacggatgtccccttcccctttgttggctctacttactgaatccgttgacgtcctgagaacta

SEQ ID NO: 95305 - DNA, 70 bp, Homo sapiens
accacggatgtccccttcccctttgttggctctacttactgaatccgttgacgtcctgagaactagaaga

SEQ ID NO: 95306 - DNA, 72 bp, Homo sapiens
cccttcccctttgttggctctacttactgaatccgttgacgtcctgagaactagaagagaagccttcatcat

SEQ ID NO: 95307 - DNA, 79 bp, Homo sapiens
ctttgttggctctacttactgaatccgttgacgtcctgagaactagaagagaagccttcatcattgcggctggcgctga

SEQ ID NO: 95308 - DNA, 79 bp, Homo sapiens
ctctacttactgaatccgttgacgtcctgagaactagaagagaagccttcatcattgcggctggcgctgagcttggtgg

SEQ ID NO: 95309 - DNA, 77 bp, Homo sapiens
aatccgttgacgtcctgagaactagaagagaagccttcatcattgcggctggcgctgagcttggtggtgggtttgtc

SEQ ID NO: 95310 - DNA, 79 bp, Homo sapiens
acgtcctgagaactagaagagaagccttcatcattgcggctggcgctgagcttggtggtgggtttgtcggcagaggcca

SEQ ID NO: 95311 - DNA, 78 bp, Homo sapiens
agaactagaagagaagccttcatcattgcggctggcgctgagcttggtggtgggtttgtcggcagaggccacaggccc

SEQ ID NO: 95312 - DNA, 79 bp, Homo sapiens
agaagccttcatcattgcggctggcgctgagcttggtggtgggtttgtcggcagaggccacaggccccatctccctctg

SEQ ID NO: 95313 - DNA, 79 bp, Homo sapiens
atcattgcggctggcgctgagcttggtggtgggtttgtcggcagaggccacaggccccatctccctctgggctccactc

SEQ ID NO: 95314 - DNA, 75 bp, Homo sapiens
cgctgagcttggtggtgggtttgtcggcagaggccacaggccccatctccctctgggctccactctgggtctcct

SEQ ID NO: 95315 - DNA, 75 bp, Homo sapiens
ttggtggtgggtttgtcggcagaggccacaggccccatctccctctgggctccactctgggtctccttctgcttc

SEQ ID NO: 95316 - DNA, 77 bp, Homo sapiens
gtttgtcggcagaggccacaggccccatctccctctgggctccactctgggtctccttctgcttcttggccagcttc

SEQ ID NO: 95317 - DNA, 75 bp, Homo sapiens
aggccacaggccccatctccctctgggctccactctgggtctccttctgcttcttggccagcttcctttgggaca

SEQ ID NO: 95318 - DNA, 77 bp, Homo sapiens
acaggccccatctccctctgggctccactctgggtctccttctgcttcttggccagcttcctttgggacatgtgcaa

SEQ ID NO: 95319 - DNA, 74 bp, Homo sapiens
tccctctgggctccactctgggtctccttctgcttcttggccagcttcctttgggacatgtgcaaggggaaaaa

SEQ ID NO: 95320 - DNA, 75 bp, Homo sapiens
cactctgggtctccttctgcttcttggccagcttcctttgggacatgtgcaaggggaaaaaaccacagtcagatg

SEQ ID NO: 95321 - DNA, 76 bp, Homo sapiens
acacttggttggtgcaggaaatgcatgctacaggttcccttacagggcacgaagcaaagttaacaccagctcgata

SEQ ID NO: 95322 - DNA, 77 bp, Homo sapiens
tggtgcaggaaatgcatgctacaggttcccttacagggcacgaagcaaagttaacaccagctcgatacttacaagta

SEQ ID NO: 95323 - DNA, 74 bp, Homo sapiens
aaatgcatgctacaggttcccttacagggcacgaagcaaagttaacaccagctcgatacttacaagtaatagga

SEQ ID NO: 95324 - DNA, 71 bp, Homo sapiens
tacaggttcccttacagggcacgaagcaaagttaacaccagctcgatacttacaagtaataggagtaggaa

SEQ ID NO: 95325 - DNA, 72 bp, Homo sapiens
cttacagggcacgaagcaaagttaacaccagctcgatacttacaagtaataggagtaggaataagcatttct

SEQ ID NO: 95326 - DNA, 75 bp, Homo sapiens
cacgaagcaaagttaacaccagctcgatacttacaagtaataggagtaggaataagcatttcttctatatattga

SEQ ID NO: 95327 - DNA, 74 bp, Homo sapiens
aaagttaacaccagctcgatacttacaagtaataggagtaggaataagcatttcttctatatattgatgggcag

SEQ ID NO: 95328 - DNA, 78 bp, Homo sapiens
agctcgatacttacaagtaataggagtaggaataagcatttcttctatatattgatgggcagtcagatgaaggaaatg

SEQ ID NO: 95329 - DNA, 76 bp, Homo sapiens
acttacaagtaataggagtaggaataagcatttcttctatatattgatgggcagtcagatgaaggaaatgtccaaa

SEQ ID NO: 95330 - DNA, 75 bp, Homo sapiens
aataggagtaggaataagcatttcttctatatattgatgggcagtcagatgaaggaaatgtccaaaatgggggaa

SEQ ID NO: 95331 - DNA, 73 bp, Homo sapiens
ggaataagcatttcttctatatattgatgggcagtcagatgaaggaaatgtccaaaatgggggaaaaagaaaa

SEQ ID NO: 95332 - DNA, 72 bp, Homo sapiens
tttcttctatatattgatgggcagtcagatgaaggaaatgtccaaaatgggggaaaaagaaaagacaaacaa

SEQ ID NO: 95333 - DNA, 85 bp, Homo sapiens
ttgaggtcacctcgggtcagcagagtcttgcaggcagcagcagagactcacctccttttgatggtgagcatcacgcccaggagaa

SEQ ID NO: 95334 - DNA, 90 bp, Homo sapiens
ctcgggtcagcagagtcttgcaggcagcagcagagactcacctccttttgatggtgagcatcacgcccaggagaatgatgatgaacatga

SEQ ID NO: 95335 - DNA, 91 bp, Homo sapiens
tcttgcaggcagcagcagagactcacctccttttgatggtgagcatcacgcccaggagaatgatgatgaacatgaggaggccagcgatcac

SEQ ID NO: 95336 - DNA, 89 bp, Homo sapiens
agcagcagagactcacctccttttgatggtgagcatcacgcccaggagaatgatgatgaacatgaggaggccagcgatcacgccagcca

SEQ ID NO: 95337 - DNA, 87 bp, Homo sapiens
agactcacctccttttgatggtgagcatcacgcccaggagaatgatgatgaacatgaggaggccagcgatcacgccagccatcttca

SEQ ID NO: 95338 - DNA, 87 bp, Homo sapiens
ttttgatggtgagcatcacgcccaggagaatgatgatgaacatgaggaggccagcgatcacgccagccatcttcacggtgttgtcca

SEQ ID NO: 95339 - DNA, 87 bp, Homo sapiens
atggtgagcatcacgcccaggagaatgatgatgaacatgaggaggccagcgatcacgccagccatcttcacggtgttgtccacctgc

SEQ ID NO: 95340 - DNA, 84 bp, Homo sapiens
acgcccaggagaatgatgatgaacatgaggaggccagcgatcacgccagccatcttcacggtgttgtccacctgcttctctggc

SEQ ID NO: 95341 - DNA, 86 bp, Homo sapiens
tgatgatgaacatgaggaggccagcgatcacgccagccatcttcacggtgttgtccacctgcttctctggctccacagtgttagaa

SEQ ID NO: 95342 - DNA, 82 bp, Homo sapiens
atgaacatgaggaggccagcgatcacgccagccatcttcacggtgttgtccacctgcttctctggctccacagtgttagaat

SEQ ID NO: 95343 - DNA, 80 bp, Homo sapiens
aggccagcgatcacgccagccatcttcacggtgttgtccacctgcttctctggctccacagtgttagaattctgggtgga

SEQ ID NO: 95344 - DNA, 79 bp, Homo sapiens
atcacgccagccatcttcacggtgttgtccacctgcttctctggctccacagtgttagaattctgggtggaggcaccta

SEQ ID NO: 95345 - DNA, 75 bp, Homo sapiens
atcttcacggtgttgtccacctgcttctctggctccacagtgttagaattctgggtggaggcacctaggaaggga

SEQ ID NO: 95346 - DNA, 72 bp, Homo sapiens
cggtgttgtccacctgcttctctggctccacagtgttagaattctgggtggaggcacctaggaagggaaagg

SEQ ID NO: 95347 - DNA, 76 bp, Homo sapiens
tgcttctctggctccacagtgttagaattctgggtggaggcacctaggaagggaaagggaaggatagcaatgttga

SEQ ID NO: 95348 - DNA, 73 bp, Homo sapiens
acctggcctggaggacccactgagtgtgggcaactctcccctcccacccgcccagggctctggtgatcacctg

SEQ ID NO: 95349 - DNA, 75 bp, Homo sapiens
ctggaggacccactgagtgtgggcaactctcccctcccacccgcccagggctctggtgatcacctgtggtgagga

SEQ ID NO: 95350 - DNA, 76 bp, Homo sapiens
actgagtgtgggcaactctcccctcccacccgcccagggctctggtgatcacctgtggtgaggaggcagagtggag

SEQ ID NO: 95351 - DNA, 71 bp, Homo sapiens
aactctcccctcccacccgcccagggctctggtgatcacctgtggtgaggaggcagagtggagtccccggg

SEQ ID NO: 95352 - DNA, 72 bp, Homo sapiens
cctcccacccgcccagggctctggtgatcacctgtggtgaggaggcagagtggagtccccggggtcacctgg

SEQ ID NO: 95353 - DNA, 79 bp, Homo sapiens
cagggctctggtgatcacctgtggtgaggaggcagagtggagtccccggggtcacctgggcgctgcccattggtgctga

SEQ ID NO: 95354 - DNA, 79 bp, Homo sapiens
tctggtgatcacctgtggtgaggaggcagagtggagtccccggggtcacctgggcgctgcccattggtgctgaccacaa

SEQ ID NO: 95355 - DNA, 75 bp, Homo sapiens
acctgtggtgaggaggcagagtggagtccccggggtcacctgggcgctgcccattggtgctgaccacaaggaagc

SEQ ID NO: 95356 - DNA, 74 bp, Homo sapiens
aggaggcagagtggagtccccggggtcacctgggcgctgcccattggtgctgaccacaaggaagccagtcccca

SEQ ID NO: 95357 - DNA, 78 bp, Homo sapiens
agtccccggggtcacctgggcgctgcccattggtgctgaccacaaggaagccagtccccaggcagcatgcagaagaga

SEQ ID NO: 95358 - DNA, 80 bp, Homo sapiens
gggtcacctgggcgctgcccattggtgctgaccacaaggaagccagtccccaggcagcatgcagaagagaaggagagaaa

SEQ ID NO: 95359 - DNA, 80 bp, Homo sapiens
taatctttctctgtgtggctagaaagaaatacttaaatggctgaagaacaggtgaagacagacaagcagatgccaacata

SEQ ID NO: 95360 - DNA, 78 bp, Homo sapiens
tgtgtggctagaaagaaatacttaaatggctgaagaacaggtgaagacagacaagcagatgccaacataccttttgta

SEQ ID NO: 95361 - DNA, 76 bp, Homo sapiens
aagaaatacttaaatggctgaagaacaggtgaagacagacaagcagatgccaacataccttttgtagccagacgaa

SEQ ID NO: 95362 - DNA, 78 bp, Homo sapiens
taaatggctgaagaacaggtgaagacagacaagcagatgccaacataccttttgtagccagacgaacacagttgattt

SEQ ID NO: 95363 - DNA, 76 bp, Homo sapiens
aagaacaggtgaagacagacaagcagatgccaacataccttttgtagccagacgaacacagttgattttggtctcc

SEQ ID NO: 95364 - DNA, 79 bp, Homo sapiens
tgaagacagacaagcagatgccaacataccttttgtagccagacgaacacagttgattttggtctcctgtgaacaacaa

SEQ ID NO: 95365 - DNA, 75 bp, Homo sapiens
agacaagcagatgccaacataccttttgtagccagacgaacacagttgattttggtctcctgtgaacaacaaaaa

SEQ ID NO: 95366 - DNA, 75 bp, Homo sapiens
caacataccttttgtagccagacgaacacagttgattttggtctcctgtgaacaacaaaaatgagatgccaatta

SEQ ID NO: 95367 - DNA, 74 bp, Homo sapiens
taccttttgtagccagacgaacacagttgattttggtctcctgtgaacaacaaaaatgagatgccaattaatta

SEQ ID NO: 95368 - DNA, 76 bp, Homo sapiens
agacgaacacagttgattttggtctcctgtgaacaacaaaaatgagatgccaattaattagctgtgagttatataa

SEQ ID NO: 95369 - DNA, 75 bp, Homo sapiens
acacagttgattttggtctcctgtgaacaacaaaaatgagatgccaattaattagctgtgagttatataaaattg

SEQ ID NO: 95370 - DNA, 76 bp, Homo sapiens
ttggtctcctgtgaacaacaaaaatgagatgccaattaattagctgtgagttatataaaattgttatataaagaca

SEQ ID NO: 95371 - DNA, 77 bp, Homo sapiens
aaaaatgcaaacaaggcaaggaatggcctccatgtggccatacttactccattggctttgctgagtgcctggaagta

SEQ ID NO: 95372 - DNA, 80 bp, Homo sapiens
caaggcaaggaatggcctccatgtggccatacttactccattggctttgctgagtgcctggaagtagatgctgtagcttt

SEQ ID NO: 95373 - DNA, 79 bp, Homo sapiens
aaggaatggcctccatgtggccatacttactccattggctttgctgagtgcctggaagtagatgctgtagcttttcagg

SEQ ID NO: 95374 - DNA, 80 bp, Homo sapiens
cctccatgtggccatacttactccattggctttgctgagtgcctggaagtagatgctgtagcttttcaggggagagagag

SEQ ID NO: 95375 - DNA, 77 bp, Homo sapiens
atacttactccattggctttgctgagtgcctggaagtagatgctgtagcttttcaggggagagagaggagggttcca

SEQ ID NO: 95376 - DNA, 78 bp, Homo sapiens
attggctttgctgagtgcctggaagtagatgctgtagcttttcaggggagagagaggagggttccagtagccattgta

SEQ ID NO: 95377 - DNA, 80 bp, Homo sapiens
tgagtgcctggaagtagatgctgtagcttttcaggggagagagaggagggttccagtagccattgtatgtcttattgtca

SEQ ID NO: 95378 - DNA, 77 bp, Homo sapiens
gaagtagatgctgtagcttttcaggggagagagaggagggttccagtagccattgtatgtcttattgtcacccactg

SEQ ID NO: 95379 - DNA, 76 bp, Homo sapiens
atgctgtagcttttcaggggagagagaggagggttccagtagccattgtatgtcttattgtcacccactgtaaatg

SEQ ID NO: 95380 - DNA, 75 bp, Homo sapiens
ttttcaggggagagagaggagggttccagtagccattgtatgtcttattgtcacccactgtaaatggctgggtga

SEQ ID NO: 95381 - DNA, 76 bp, Homo sapiens
agagagaggagggttccagtagccattgtatgtcttattgtcacccactgtaaatggctgggtgacaggcaggttg

SEQ ID NO: 95382 - DNA, 79 bp, Homo sapiens
gttccagtagccattgtatgtcttattgtcacccactgtaaatggctgggtgacaggcaggttggcaggcttcaactca

SEQ ID NO: 95383 - DNA, 80 bp, Homo sapiens
ccattgtatgtcttattgtcacccactgtaaatggctgggtgacaggcaggttggcaggcttcaactcagcagcaaagta

SEQ ID NO: 95384 - DNA, 81 bp, Homo sapiens
tatgtcttattgtcacccactgtaaatggctgggtgacaggcaggttggcaggcttcaactcagcagcaaagtagtgtaga

SEQ ID NO: 95385 - DNA, 79 bp, Homo sapiens
acccactgtaaatggctgggtgacaggcaggttggcaggcttcaactcagcagcaaagtagtgtagagaatcgaggctg

SEQ ID NO: 95386 - DNA, 82 bp, Homo sapiens
tgtaaatggctgggtgacaggcaggttggcaggcttcaactcagcagcaaagtagtgtagagaatcgaggctggaggcattc

SEQ ID NO: 95387 - DNA, 84 bp, Homo sapiens
tgacaggcaggttggcaggcttcaactcagcagcaaagtagtgtagagaatcgaggctggaggcattccgatagctcacgggca

SEQ ID NO: 95388 - DNA, 81 bp, Homo sapiens
ttcaactcagcagcaaagtagtgtagagaatcgaggctggaggcattccgatagctcacgggcaccgaaaagcactcaata

SEQ ID NO: 95389 - DNA, 81 bp, Homo sapiens
agcagcaaagtagtgtagagaatcgaggctggaggcattccgatagctcacgggcaccgaaaagcactcaataatgtcagc

SEQ ID NO: 95390 - DNA, 80 bp, Homo sapiens
agtagtgtagagaatcgaggctggaggcattccgatagctcacgggcaccgaaaagcactcaataatgtcagctgccctc

SEQ ID NO: 95391 - DNA, 80 bp, Homo sapiens
aatcgaggctggaggcattccgatagctcacgggcaccgaaaagcactcaataatgtcagctgccctccgtgacttctga

SEQ ID NO: 95392 - DNA, 79 bp, Homo sapiens
aggcattccgatagctcacgggcaccgaaaagcactcaataatgtcagctgccctccgtgacttctgaagtcgctcctc

SEQ ID NO: 95393 - DNA, 78 bp, Homo sapiens
atagctcacgggcaccgaaaagcactcaataatgtcagctgccctccgtgacttctgaagtcgctcctccttgacaac

SEQ ID NO: 95394 - DNA, 80 bp, Homo sapiens
gcaccgaaaagcactcaataatgtcagctgccctccgtgacttctgaagtcgctcctccttgacaaccagctgataaaca

SEQ ID NO: 95395 - DNA, 80 bp, Homo sapiens
aaagcactcaataatgtcagctgccctccgtgacttctgaagtcgctcctccttgacaaccagctgataaacactggaca

SEQ ID NO: 95396 - DNA, 78 bp, Homo sapiens
aataatgtcagctgccctccgtgacttctgaagtcgctcctccttgacaaccagctgataaacactggacaggaaaga

SEQ ID NO: 95397 - DNA, 78 bp, Homo sapiens
acttctgaagtcgctcctccttgacaaccagctgataaacactggacaggaaagaggagacacagatggttgagcaac

SEQ ID NO: 95398 - DNA, 75 bp, Homo sapiens
cacagagaagaaaaactgcagactccaagtgaagaaccatcctcacctgacaggagctccccgggactgagcggg

SEQ ID NO: 95399 - DNA, 76 bp, Homo sapiens
aaaaactgcagactccaagtgaagaaccatcctcacctgacaggagctccccgggactgagcgggtttcagcatca

SEQ ID NO: 95400 - DNA, 78 bp, Homo sapiens
agactccaagtgaagaaccatcctcacctgacaggagctccccgggactgagcgggtttcagcatcactgtgatggtc

SEQ ID NO: 95401 - DNA, 81 bp, Homo sapiens
tgaagaaccatcctcacctgacaggagctccccgggactgagcgggtttcagcatcactgtgatggtcgtgtctgtctcat

SEQ ID NO: 95402 - DNA, 81 bp, Homo sapiens
accatcctcacctgacaggagctccccgggactgagcgggtttcagcatcactgtgatggtcgtgtctgtctcattcaatg

SEQ ID NO: 95403 - DNA, 80 bp, Homo sapiens
acaggagctccccgggactgagcgggtttcagcatcactgtgatggtcgtgtctgtctcattcaatggggtgtctgtgtc

SEQ ID NO: 95404 - DNA, 82 bp, Homo sapiens
ccgggactgagcgggtttcagcatcactgtgatggtcgtgtctgtctcattcaatggggtgtctgtgtcgtactcaggcatg

SEQ ID NO: 95405 - DNA, 85 bp, Homo sapiens
actgagcgggtttcagcatcactgtgatggtcgtgtctgtctcattcaatggggtgtctgtgtcgtactcaggcatggatggagc

SEQ ID NO: 95406 - DNA, 64 bp, Homo sapiens
aagtgggggtgaaacaaccttttttcctttttcctttctagcagagatacctgaaattttggtg

SEQ ID NO: 95407 - DNA, 66 bp, Homo sapiens
aaacaaccttttttcctttttcctttctagcagagatacctgaaattttggtggcaatccgagtgg

SEQ ID NO: 95408 - DNA, 71 bp, Homo sapiens
tcctttttcctttctagcagagatacctgaaattttggtggcaatccgagtggtgacagggggcccaaagc

SEQ ID NO: 95409 - DNA, 70 bp, Homo sapiens
tttcctttctagcagagatacctgaaattttggtggcaatccgagtggtgacagggggcccaaagccctt

SEQ ID NO: 95410 - DNA, 74 bp, Homo sapiens
agatacctgaaattttggtggcaatccgagtggtgacagggggcccaaagccctttgctgtgctggccttgatg

SEQ ID NO: 95411 - DNA, 73 bp, Homo sapiens
aattttggtggcaatccgagtggtgacagggggcccaaagccctttgctgtgctggccttgatggtgaaggaa

SEQ ID NO: 95412 - DNA, 75 bp, Homo sapiens
tggtggcaatccgagtggtgacagggggcccaaagccctttgctgtgctggccttgatggtgaaggaataggtgg

SEQ ID NO: 95413 - DNA, 74 bp, Homo sapiens
tggtgacagggggcccaaagccctttgctgtgctggccttgatggtgaaggaataggtggtccctgggtacaga

SEQ ID NO: 95414 - DNA, 72 bp, Homo sapiens
gggcccaaagccctttgctgtgctggccttgatggtgaaggaataggtggtccctgggtacagacccacaaa

SEQ ID NO: 95415 - DNA, 72 bp, Homo sapiens
aaagccctttgctgtgctggccttgatggtgaaggaataggtggtccctgggtacagacccacaaagaggtg

SEQ ID NO: 95416 - DNA, 73 bp, Homo sapiens
tgtgctggccttgatggtgaaggaataggtggtccctgggtacagacccacaaagaggtggtgggtttcattc

SEQ ID NO: 95417 - DNA, 72 bp, Homo sapiens
tgatggtgaaggaataggtggtccctgggtacagacccacaaagaggtggtgggtttcattccggagcttga

SEQ ID NO: 95418 - DNA, 69 bp, Homo sapiens
gaataggtggtccctgggtacagacccacaaagaggtggtgggtttcattccggagcttgaacactttc

SEQ ID NO: 95419 - DNA, 67 bp, Homo sapiens
ggtggtccctgggtacagacccacaaagaggtggtgggtttcattccggagcttgaacactttcccc

SEQ ID NO: 95420 - DNA, 72 bp, Homo sapiens
tacagacccacaaagaggtggtgggtttcattccggagcttgaacactttccccctctggctcgagaggtca

SEQ ID NO: 95421 - DNA, 71 bp, Homo sapiens
acaaagaggtggtgggtttcattccggagcttgaacactttccccctctggctcgagaggtcagcacttgg

SEQ ID NO: 95422 - DNA, 75 bp, Homo sapiens
tgggtttcattccggagcttgaacactttccccctctggctcgagaggtcagcacttgggtccagcgagccgaca

SEQ ID NO: 95423 - DNA, 75 bp, Homo sapiens
attccggagcttgaacactttccccctctggctcgagaggtcagcacttgggtccagcgagccgacagccttgta

SEQ ID NO: 95424 - DNA, 76 bp, Homo sapiens
aacactttccccctctggctcgagaggtcagcacttgggtccagcgagccgacagccttgtagttgatctgtagga

SEQ ID NO: 95425 - DNA, 80 bp, Homo sapiens
ccctctggctcgagaggtcagcacttgggtccagcgagccgacagccttgtagttgatctgtaggacaagccagcaaaca

SEQ ID NO: 95426 - DNA, 80 bp, Homo sapiens
tggctcgagaggtcagcacttgggtccagcgagccgacagccttgtagttgatctgtaggacaagccagcaaacaaacaa

SEQ ID NO: 95427 - DNA, 78 bp, Homo sapiens
ttgaataaagctaagccaatggatgcagcacaagggacctccttacctcgtagagcgtgatgaccccattggtctcat

SEQ ID NO: 95428 - DNA, 78 bp, Homo sapiens
taaagctaagccaatggatgcagcacaagggacctccttacctcgtagagcgtgatgaccccattggtctcattggga

SEQ ID NO: 95429 - DNA, 76 bp, Homo sapiens
atggatgcagcacaagggacctccttacctcgtagagcgtgatgaccccattggtctcattgggaggtttccactg

SEQ ID NO: 95430 - DNA, 73 bp, Homo sapiens
acaagggacctccttacctcgtagagcgtgatgaccccattggtctcattgggaggtttccactggatgtaga

SEQ ID NO: 95431 - DNA, 76 bp, Homo sapiens
tccttacctcgtagagcgtgatgaccccattggtctcattgggaggtttccactggatgtagatcttctcctcaaa

SEQ ID NO: 95432 - DNA, 75 bp, Homo sapiens
cctcgtagagcgtgatgaccccattggtctcattgggaggtttccactggatgtagatcttctcctcaaagggcc

SEQ ID NO: 95433 - DNA, 72 bp, Homo sapiens
atgaccccattggtctcattgggaggtttccactggatgtagatcttctcctcaaagggccccccttggatg

SEQ ID NO: 95434 - DNA, 73 bp, Homo sapiens
attggtctcattgggaggtttccactggatgtagatcttctcctcaaagggccccccttggatggattctaga

SEQ ID NO: 95435 - DNA, 72 bp, Homo sapiens
attgggaggtttccactggatgtagatcttctcctcaaagggccccccttggatggattctagaggaacagc

SEQ ID NO: 95436 - DNA, 74 bp, Homo sapiens
tttccactggatgtagatcttctcctcaaagggccccccttggatggattctagaggaacagctcctggaacta

SEQ ID NO: 95437 - DNA, 74 bp, Homo sapiens
atgtagatcttctcctcaaagggccccccttggatggattctagaggaacagctcctggaactacagaatggaa

SEQ ID NO: 95438 - DNA, 71 bp, Homo sapiens
tcaaagggccccccttggatggattctagaggaacagctcctggaactacagaatggaaaagttatgaact

SEQ ID NO: 95439 - DNA, 78 bp, Homo sapiens
aatagattcaatatccccattcccatgtaagctctcctcccttgctcaccgtcttcctcagtctgcaccaccagctcc

SEQ ID NO: 95440 - DNA, 79 bp, Homo sapiens
atatccccattcccatgtaagctctcctcccttgctcaccgtcttcctcagtctgcaccaccagctcctcgctctccat

SEQ ID NO: 95441 - DNA, 78 bp, Homo sapiens
attcccatgtaagctctcctcccttgctcaccgtcttcctcagtctgcaccaccagctcctcgctctccattcggccc

SEQ ID NO: 95442 - DNA, 77 bp, Homo sapiens
tctcctcccttgctcaccgtcttcctcagtctgcaccaccagctcctcgctctccattcggccctcggggttagaca

SEQ ID NO: 95443 - DNA, 78 bp, Homo sapiens
cttgctcaccgtcttcctcagtctgcaccaccagctcctcgctctccattcggccctcggggttagacagcaagagtc

SEQ ID NO: 95444 - DNA, 80 bp, Homo sapiens
ttcctcagtctgcaccaccagctcctcgctctccattcggccctcggggttagacagcaagagtcgcagccggatggtca

SEQ ID NO: 95445 - DNA, 79 bp, Homo sapiens
agtctgcaccaccagctcctcgctctccattcggccctcggggttagacagcaagagtcgcagccggatggtcatgaag

SEQ ID NO: 95446 - DNA, 77 bp, Homo sapiens
accagctcctcgctctccattcggccctcggggttagacagcaagagtcgcagccggatggtcatgaaggggcgcag

SEQ ID NO: 95447 - DNA, 77 bp, Homo sapiens
tctccattcggccctcggggttagacagcaagagtcgcagccggatggtcatgaaggggcgcaggcctcgcagggtg

SEQ ID NO: 95448 - DNA, 76 bp, Homo sapiens
ttcggccctcggggttagacagcaagagtcgcagccggatggtcatgaaggggcgcaggcctcgcagggtgtagtg

SEQ ID NO: 95449 - DNA, 80 bp, Homo sapiens
gttagacagcaagagtcgcagccggatggtcatgaaggggcgcaggcctcgcagggtgtagtgggaggaggtctggatga

SEQ ID NO: 95450 - DNA, 77 bp, Homo sapiens
aagagtcgcagccggatggtcatgaaggggcgcaggcctcgcagggtgtagtgggaggaggtctggatgacctcctc

SEQ ID NO: 95451 - DNA, 75 bp, Homo sapiens
cggatggtcatgaaggggcgcaggcctcgcagggtgtagtgggaggaggtctggatgacctcctcggcctcgtac

SEQ ID NO: 95452 - DNA, 76 bp, Homo sapiens
atgaaggggcgcaggcctcgcagggtgtagtgggaggaggtctggatgacctcctcggcctcgtactgctgctggt

SEQ ID NO: 95453 - DNA, 78 bp, Homo sapiens
caggcctcgcagggtgtagtgggaggaggtctggatgacctcctcggcctcgtactgctgctggttgaacacatactg

SEQ ID NO: 95454 - DNA, 77 bp, Homo sapiens
agggtgtagtgggaggaggtctggatgacctcctcggcctcgtactgctgctggttgaacacatactggtactgcac

SEQ ID NO: 95455 - DNA, 78 bp, Homo sapiens
tgggaggaggtctggatgacctcctcggcctcgtactgctgctggttgaacacatactggtactgcacggtgaggttg

SEQ ID NO: 95456 - DNA, 79 bp, Homo sapiens
aggtctggatgacctcctcggcctcgtactgctgctggttgaacacatactggtactgcacggtgaggttgtagctatg

SEQ ID NO: 95457 - DNA, 79 bp, Homo sapiens
ctcctcggcctcgtactgctgctggttgaacacatactggtactgcacggtgaggttgtagctatggcagcgggtcacc

SEQ ID NO: 95458 - DNA, 80 bp, Homo sapiens
tcgtactgctgctggttgaacacatactggtactgcacggtgaggttgtagctatggcagcgggtcaccgcgtagccgaa

SEQ ID NO: 95459 - DNA, 76 bp, Homo sapiens
ctggttgaacacatactggtactgcacggtgaggttgtagctatggcagcgggtcaccgcgtagccgaagggctcc

SEQ ID NO: 95460 - DNA, 77 bp, Homo sapiens
aacacatactggtactgcacggtgaggttgtagctatggcagcgggtcaccgcgtagccgaagggctcccactgcag

SEQ ID NO: 95461 - DNA, 79 bp, Homo sapiens
ctggtactgcacggtgaggttgtagctatggcagcgggtcaccgcgtagccgaagggctcccactgcagggtcagctgc

SEQ ID NO: 95462 - DNA, 81 bp, Homo sapiens
tgaggttgtagctatggcagcgggtcaccgcgtagccgaagggctcccactgcagggtcagctgccgggctctgatgtcta

SEQ ID NO: 95463 - DNA, 80 bp, Homo sapiens
tagctatggcagcgggtcaccgcgtagccgaagggctcccactgcagggtcagctgccgggctctgatgtctacgatttc

SEQ ID NO: 95464 - DNA, 76 bp, Homo sapiens
gggtcaccgcgtagccgaagggctcccactgcagggtcagctgccgggctctgatgtctacgatttccacgttctg

SEQ ID NO: 95465 - DNA, 80 bp, Homo sapiens
ggctcccactgcagggtcagctgccgggctctgatgtctacgatttccacgttctgtgggccatgtaccggatctgcaaa

SEQ ID NO: 95466 - DNA, 81 bp, Homo sapiens
actgcagggtcagctgccgggctctgatgtctacgatttccacgttctgtgggccatgtaccggatctgcaaaacatgcag

SEQ ID NO: 95467 - DNA, 79 bp, Homo sapiens
tctgatgtctacgatttccacgttctgtgggccatgtaccggatctgcaaaacatgcaggcaagaaacaagggttctga

SEQ ID NO: 95468 - DNA, 65 bp, Homo sapiens
aaaaaaaaaatcttacctgcacacttggtcctggtggtgaggggaggccctggcggtcccgtacc

SEQ ID NO: 95469 - DNA, 67 bp, Homo sapiens
aaaaatcttacctgcacacttggtcctggtggtgaggggaggccctggcggtcccgtacccccctca

SEQ ID NO: 95470 - DNA, 68 bp, Homo sapiens
acacttggtcctggtggtgaggggaggccctggcggtcccgtacccccctcacctggtcgtgtgagga

SEQ ID NO: 95471 - DNA, 72 bp, Homo sapiens
ctggtggtgaggggaggccctggcggtcccgtacccccctcacctggtcgtgtgaggagcactcggatctca

SEQ ID NO: 95472 - DNA, 72 bp, Homo sapiens
aggggaggccctggcggtcccgtacccccctcacctggtcgtgtgaggagcactcggatctcatactcaaca

SEQ ID NO: 95473 - DNA, 74 bp, Homo sapiens
ctggcggtcccgtacccccctcacctggtcgtgtgaggagcactcggatctcatactcaacatcggggtccaga

SEQ ID NO: 95474 - DNA, 78 bp, Homo sapiens
cgtacccccctcacctggtcgtgtgaggagcactcggatctcatactcaacatcggggtccagatgccacagcttata

SEQ ID NO: 95475 - DNA, 82 bp, Homo sapiens
tcacctggtcgtgtgaggagcactcggatctcatactcaacatcggggtccagatgccacagcttatagttgggagagtcga

SEQ ID NO: 95476 - DNA, 82 bp, Homo sapiens
tgtgaggagcactcggatctcatactcaacatcggggtccagatgccacagcttatagttgggagagtcgactatgtgggtc

SEQ ID NO: 95477 - DNA, 80 bp, Homo sapiens
actcggatctcatactcaacatcggggtccagatgccacagcttatagttgggagagtcgactatgtgggtctctgccca

SEQ ID NO: 95478 - DNA, 80 bp, Homo sapiens
atctcatactcaacatcggggtccagatgccacagcttatagttgggagagtcgactatgtgggtctctgcccacgtgcc

SEQ ID NO: 95479 - DNA, 77 bp, Homo sapiens
aacatcggggtccagatgccacagcttatagttgggagagtcgactatgtgggtctctgcccacgtgcctgtggtgg

SEQ ID NO: 95480 - DNA, 80 bp, Homo sapiens
agatgccacagcttatagttgggagagtcgactatgtgggtctctgcccacgtgcctgtggtggtgcgatattccacttc

SEQ ID NO: 95481 - DNA, 78 bp, Homo sapiens
acagcttatagttgggagagtcgactatgtgggtctctgcccacgtgcctgtggtggtgcgatattccacttccttca

SEQ ID NO: 95482 - DNA, 79 bp, Homo sapiens
tagttgggagagtcgactatgtgggtctctgcccacgtgcctgtggtggtgcgatattccacttccttcaggatgatgg

SEQ ID NO: 95483 - DNA, 78 bp, Homo sapiens
agtcgactatgtgggtctctgcccacgtgcctgtggtggtgcgatattccacttccttcaggatgatggggccatccc

SEQ ID NO: 95484 - DNA, 81 bp, Homo sapiens
tctctgcccacgtgcctgtggtggtgcgatattccacttccttcaggatgatggggccatccccgatgatggagttggcat

SEQ ID NO: 95485 - DNA, 78 bp, Homo sapiens
acgtgcctgtggtggtgcgatattccacttccttcaggatgatggggccatccccgatgatggagttggcatttggct

SEQ ID NO: 95486 - DNA, 80 bp, Homo sapiens
gtggtgcgatattccacttccttcaggatgatggggccatccccgatgatggagttggcatttggcttgatccacaggta

SEQ ID NO: 95487 - DNA, 79 bp, Homo sapiens
atattccacttccttcaggatgatggggccatccccgatgatggagttggcatttggcttgatccacaggtatgtggcc

SEQ ID NO: 95488 - DNA, 78 bp, Homo sapiens
acttccttcaggatgatggggccatccccgatgatggagttggcatttggcttgatccacaggtatgtggcccccaca

SEQ ID NO: 95489 - DNA, 81 bp, Homo sapiens
atgatggggccatccccgatgatggagttggcatttggcttgatccacaggtatgtggcccccacagccagcagctctggg

SEQ ID NO: 95490 - DNA, 80 bp, Homo sapiens
atccccgatgatggagttggcatttggcttgatccacaggtatgtggcccccacagccagcagctctgggggagcaatgg

SEQ ID NO: 95491 - DNA, 81 bp, Homo sapiens
atgatggagttggcatttggcttgatccacaggtatgtggcccccacagccagcagctctgggggagcaatgggcgtggga

SEQ ID NO: 95492 - DNA, 79 bp, Homo sapiens
atttggcttgatccacaggtatgtggcccccacagccagcagctctgggggagcaatgggcgtgggaggctctgtaaga

SEQ ID NO: 95493 - DNA, 82 bp, Homo sapiens
ttgatccacaggtatgtggcccccacagccagcagctctgggggagcaatgggcgtgggaggctctgtaagacaagcaatca

SEQ ID NO: 95494 - DNA, 77 bp, Homo sapiens
aggtatgtggcccccacagccagcagctctgggggagcaatgggcgtgggaggctctgtaagacaagcaatcaaaaa

SEQ ID NO: 95495 - DNA, 79 bp, Homo sapiens
acagccagcagctctgggggagcaatgggcgtgggaggctctgtaagacaagcaatcaaaaaggactgtcagattcaaa

SEQ ID NO: 95496 - DNA, 80 bp, Homo sapiens
attaatgccaaccttccatggcagtagaggcgcaggctggaggcactcacctttcacgatcagctccgcgtagttggaca

SEQ ID NO: 95497 - DNA, 79 bp, Homo sapiens
aaccttccatggcagtagaggcgcaggctggaggcactcacctttcacgatcagctccgcgtagttggacacaccagac

SEQ ID NO: 95498 - DNA, 83 bp, Homo sapiens
tagaggcgcaggctggaggcactcacctttcacgatcagctccgcgtagttggacacaccagacccaccatcagagcggatca

SEQ ID NO: 95499 - DNA, 81 bp, Homo sapiens
actcacctttcacgatcagctccgcgtagttggacacaccagacccaccatcagagcggatcacacagcggtacttgctga

SEQ ID NO: 95500 - DNA, 81 bp, Homo sapiens
cctttcacgatcagctccgcgtagttggacacaccagacccaccatcagagcggatcacacagcggtacttgctgacgctc

SEQ ID NO: 95501 - DNA, 81 bp, Homo sapiens
agctccgcgtagttggacacaccagacccaccatcagagcggatcacacagcggtacttgctgacgctccgctgggcagtg

SEQ ID NO: 95502 - DNA, 85 bp, Homo sapiens
tagttggacacaccagacccaccatcagagcggatcacacagcggtacttgctgacgctccgctgggcagtgtctgccacactga

SEQ ID NO: 95503 - DNA, 86 bp, Homo sapiens
acaccagacccaccatcagagcggatcacacagcggtacttgctgacgctccgctgggcagtgtctgccacactgactgtggctga

SEQ ID NO: 95504 - DNA, 86 bp, Homo sapiens
atcagagcggatcacacagcggtacttgctgacgctccgctgggcagtgtctgccacactgactgtggctgagaagcgcctgtggt

SEQ ID NO: 95505 - DNA, 85 bp, Homo sapiens
atcacacagcggtacttgctgacgctccgctgggcagtgtctgccacactgactgtggctgagaagcgcctgtggttgaccacac

SEQ ID NO: 95506 - DNA, 83 bp, Homo sapiens
gtacttgctgacgctccgctgggcagtgtctgccacactgactgtggctgagaagcgcctgtggttgaccacacgggtgacca

SEQ ID NO: 95507 - DNA, 83 bp, Homo sapiens
ctgacgctccgctgggcagtgtctgccacactgactgtggctgagaagcgcctgtggttgaccacacgggtgaccatcagggc

SEQ ID NO: 95508 - DNA, 82 bp, Homo sapiens
tgggcagtgtctgccacactgactgtggctgagaagcgcctgtggttgaccacacgggtgaccatcagggccgtgtccctgc

SEQ ID NO: 95509 - DNA, 81 bp, Homo sapiens
tctgccacactgactgtggctgagaagcgcctgtggttgaccacacgggtgaccatcagggccgtgtccctgccattccat

SEQ ID NO: 95510 - DNA, 81 bp, Homo sapiens
actgtggctgagaagcgcctgtggttgaccacacgggtgaccatcagggccgtgtccctgccattccattgctgcagaaca

SEQ ID NO: 95511 - DNA, 80 bp, Homo sapiens
ctgagaagcgcctgtggttgaccacacgggtgaccatcagggccgtgtccctgccattccattgctgcagaacagaggaa

SEQ ID NO: 95512 - DNA, 78 bp, Homo sapiens
cgcctgtggttgaccacacgggtgaccatcagggccgtgtccctgccattccattgctgcagaacagaggaagagagg

SEQ ID NO: 95513 - DNA, 79 bp, Homo sapiens
acacgggtgaccatcagggccgtgtccctgccattccattgctgcagaacagaggaagagagggagaggaggaatcata

SEQ ID NO: 95514 - DNA, 83 bp, Homo sapiens
ctttctcatcctaacgagtctgagcagaggcttctctcatgcttacctggagccaaagcttgtcatgctgagaccacttccca

SEQ ID NO: 95515 - DNA, 83 bp, Homo sapiens
atcctaacgagtctgagcagaggcttctctcatgcttacctggagccaaagcttgtcatgctgagaccacttcccaccagcaa

SEQ ID NO: 95516 - DNA, 86 bp, Homo sapiens
agtctgagcagaggcttctctcatgcttacctggagccaaagcttgtcatgctgagaccacttcccaccagcaatgcactgaaatg

SEQ ID NO: 95517 - DNA, 85 bp, Homo sapiens
agaggcttctctcatgcttacctggagccaaagcttgtcatgctgagaccacttcccaccagcaatgcactgaaatgtggcattc

SEQ ID NO: 95518 - DNA, 85 bp, Homo sapiens
atgcttacctggagccaaagcttgtcatgctgagaccacttcccaccagcaatgcactgaaatgtggcattctgccccacattca

SEQ ID NO: 95519 - DNA, 82 bp, Homo sapiens
agccaaagcttgtcatgctgagaccacttcccaccagcaatgcactgaaatgtggcattctgccccacattcacctccacgt

SEQ ID NO: 95520 - DNA, 81 bp, Homo sapiens
aagcttgtcatgctgagaccacttcccaccagcaatgcactgaaatgtggcattctgccccacattcacctccacgttttg

SEQ ID NO: 95521 - DNA, 78 bp, Homo sapiens
agaccacttcccaccagcaatgcactgaaatgtggcattctgccccacattcacctccacgttttggagtcgcagaaa

SEQ ID NO: 95522 - DNA, 79 bp, Homo sapiens
ccaccagcaatgcactgaaatgtggcattctgccccacattcacctccacgttttggagtcgcagaaaatgaggtgctt

SEQ ID NO: 95523 - DNA, 77 bp, Homo sapiens
atgcactgaaatgtggcattctgccccacattcacctccacgttttggagtcgcagaaaatgaggtgcttttcctaa

SEQ ID NO: 95524 - DNA, 75 bp, Homo sapiens
aaatgtggcattctgccccacattcacctccacgttttggagtcgcagaaaatgaggtgcttttcctaagagaga

SEQ ID NO: 95525 - DNA, 72 bp, Homo sapiens
attctgccccacattcacctccacgttttggagtcgcagaaaatgaggtgcttttcctaagagagaaaccaa

SEQ ID NO: 95526 - DNA, 71 bp, Homo sapiens
acattcacctccacgttttggagtcgcagaaaatgaggtgcttttcctaagagagaaaccaaagaacacaa

SEQ ID NO: 95527 - DNA, 80 bp, Homo sapiens
tctatgctacccagtctggcatggatcaaggctgtgttgggaggaagggaaagacttactgcatggatgagcaaggaccc

SEQ ID NO: 95528 - DNA, 78 bp, Homo sapiens
tctggcatggatcaaggctgtgttgggaggaagggaaagacttactgcatggatgagcaaggacccggacctcgtcca

SEQ ID NO: 95529 - DNA, 74 bp, Homo sapiens
atggatcaaggctgtgttgggaggaagggaaagacttactgcatggatgagcaaggacccggacctcgtccacg

SEQ ID NO: 95530 - DNA, 75 bp, Homo sapiens
tgttgggaggaagggaaagacttactgcatggatgagcaaggacccggacctcgtccacggcgatgtagccagga

SEQ ID NO: 95531 - DNA, 75 bp, Homo sapiens
aagggaaagacttactgcatggatgagcaaggacccggacctcgtccacggcgatgtagccaggatgacccttca

SEQ ID NO: 95532 - DNA, 77 bp, Homo sapiens
aaagacttactgcatggatgagcaaggacccggacctcgtccacggcgatgtagccaggatgacccttcaatgagac

SEQ ID NO: 95533 - DNA, 78 bp, Homo sapiens
atggatgagcaaggacccggacctcgtccacggcgatgtagccaggatgacccttcaatgagacggattcaaatatca

SEQ ID NO: 95534 - DNA, 75 bp, Homo sapiens
aaggacccggacctcgtccacggcgatgtagccaggatgacccttcaatgagacggattcaaatatcacctgcaa

SEQ ID NO: 95535 - DNA, 77 bp, Homo sapiens
acctcgtccacggcgatgtagccaggatgacccttcaatgagacggattcaaatatcacctgcaacacacagggcgg

SEQ ID NO: 95536 - DNA, 81 bp, Homo sapiens
gcgatgtagccaggatgacccttcaatgagacggattcaaatatcacctgcaacacacagggcgggagtcaatttcacaga

SEQ ID NO: 95537 - DNA, 78 bp, Homo sapiens
gtagccaggatgacccttcaatgagacggattcaaatatcacctgcaacacacagggcgggagtcaatttcacagaaa

SEQ ID NO: 95538 - DNA, 74 bp, Homo sapiens
ttacaaattttcaaaaataaaaccatggtaaaatgccatacctgatagaaatgtggccagaaagtgctgatggc

SEQ ID NO: 95539 - DNA, 77 bp, Homo sapiens
aaaaataaaaccatggtaaaatgccatacctgatagaaatgtggccagaaagtgctgatggcgagctctgccttcac

SEQ ID NO: 95540 - DNA, 80 bp, Homo sapiens
aaccatggtaaaatgccatacctgatagaaatgtggccagaaagtgctgatggcgagctctgccttcacccagccctcag

SEQ ID NO: 95541 - DNA, 80 bp, Homo sapiens
aaatgccatacctgatagaaatgtggccagaaagtgctgatggcgagctctgccttcacccagccctcagtgacgacccc

SEQ ID NO: 95542 - DNA, 80 bp, Homo sapiens
atagaaatgtggccagaaagtgctgatggcgagctctgccttcacccagccctcagtgacgaccccggacacattccaca

SEQ ID NO: 95543 - DNA, 79 bp, Homo sapiens
atgtggccagaaagtgctgatggcgagctctgccttcacccagccctcagtgacgaccccggacacattccacacaggg

SEQ ID NO: 95544 - DNA, 75 bp, Homo sapiens
aaagtgctgatggcgagctctgccttcacccagccctcagtgacgaccccggacacattccacacagggttccct

SEQ ID NO: 95545 - DNA, 72 bp, Homo sapiens
agctctgccttcacccagccctcagtgacgaccccggacacattccacacagggttcccttgggggccacca

SEQ ID NO: 95546 - DNA, 70 bp, Homo sapiens
ttcacccagccctcagtgacgaccccggacacattccacacagggttcccttgggggccaccattcacct

SEQ ID NO: 95547 - DNA, 70 bp, Homo sapiens
agccctcagtgacgaccccggacacattccacacagggttcccttgggggccaccattcaccttcacgta

SEQ ID NO: 95548 - DNA, 68 bp, Homo sapiens
acgaccccggacacattccacacagggttcccttgggggccaccattcaccttcacgtagacgttcaa

SEQ ID NO: 95549 - DNA, 69 bp, Homo sapiens
acacattccacacagggttcccttgggggccaccattcaccttcacgtagacgttcaaggcccctgggc

SEQ ID NO: 95550 - DNA, 69 bp, Homo sapiens
acagggttcccttgggggccaccattcaccttcacgtagacgttcaaggcccctgggctggacctgtca

SEQ ID NO: 95551 - DNA, 72 bp, Homo sapiens
ttgggggccaccattcaccttcacgtagacgttcaaggcccctgggctggacctgtcacggctggagaagta

SEQ ID NO: 95552 - DNA, 72 bp, Homo sapiens
accattcaccttcacgtagacgttcaaggcccctgggctggacctgtcacggctggagaagtagtaatggaa

SEQ ID NO: 95553 - DNA, 74 bp, Homo sapiens
accttcacgtagacgttcaaggcccctgggctggacctgtcacggctggagaagtagtaatggaagtcgatgca

SEQ ID NO: 95554 - DNA, 76 bp, Homo sapiens
ttcaaggcccctgggctggacctgtcacggctggagaagtagtaatggaagtcgatgcagtgggtgtcattctcct

SEQ ID NO: 95555 - DNA, 78 bp, Homo sapiens
ctgggctggacctgtcacggctggagaagtagtaatggaagtcgatgcagtgggtgtcattctccttcagggttggca

SEQ ID NO: 95556 - DNA, 76 bp, Homo sapiens
acctgtcacggctggagaagtagtaatggaagtcgatgcagtgggtgtcattctccttcagggttggcaggagaag

SEQ ID NO: 95557 - DNA, 75 bp, Homo sapiens
ctggagaagtagtaatggaagtcgatgcagtgggtgtcattctccttcagggttggcaggagaaggtgggccttc

SEQ ID NO: 95558 - DNA, 75 bp, Homo sapiens
aagtagtaatggaagtcgatgcagtgggtgtcattctccttcagggttggcaggagaaggtgggccttctggcca

SEQ ID NO: 95559 - DNA, 77 bp, Homo sapiens
aagtcgatgcagtgggtgtcattctccttcagggttggcaggagaaggtgggccttctggccagaggctctcccaga

SEQ ID NO: 95560 - DNA, 79 bp, Homo sapiens
tgggtgtcattctccttcagggttggcaggagaaggtgggccttctggccagaggctctcccagagctgttcaccatca

SEQ ID NO: 95561 - DNA, 78 bp, Homo sapiens
attctccttcagggttggcaggagaaggtgggccttctggccagaggctctcccagagctgttcaccatcatgaaaga

SEQ ID NO: 95562 - DNA, 80 bp, Homo sapiens
ttcagggttggcaggagaaggtgggccttctggccagaggctctcccagagctgttcaccatcatgaaagatcctggaga

SEQ ID NO: 95563 - DNA, 79 bp, Homo sapiens
aggagaaggtgggccttctggccagaggctctcccagagctgttcaccatcatgaaagatcctggagacccacaaagca

SEQ ID NO: 95564 - DNA, 78 bp, Homo sapiens
taaaaactagccatccccattacagccccaaacatgatggatcacatacctgtgggcactgcctggtccagcattggt

SEQ ID NO: 95565 - DNA, 80 bp, Homo sapiens
tccccattacagccccaaacatgatggatcacatacctgtgggcactgcctggtccagcattggtttctcccatgtgtta

SEQ ID NO: 95566 - DNA, 81 bp, Homo sapiens
attacagccccaaacatgatggatcacatacctgtgggcactgcctggtccagcattggtttctcccatgtgttaatctgc

SEQ ID NO: 95567 - DNA, 81 bp, Homo sapiens
aaacatgatggatcacatacctgtgggcactgcctggtccagcattggtttctcccatgtgttaatctgctcccaggtgaa

SEQ ID NO: 95568 - DNA, 79 bp, Homo sapiens
ggatcacatacctgtgggcactgcctggtccagcattggtttctcccatgtgttaatctgctcccaggtgaacccattg

SEQ ID NO: 95569 - DNA, 77 bp, Homo sapiens
ctgtgggcactgcctggtccagcattggtttctcccatgtgttaatctgctcccaggtgaacccattggtccctaga

SEQ ID NO: 95570 - DNA, 76 bp, Homo sapiens
ctggtccagcattggtttctcccatgtgttaatctgctcccaggtgaacccattggtccctagagccacactataa

SEQ ID NO: 95571 - DNA, 73 bp, Homo sapiens
attggtttctcccatgtgttaatctgctcccaggtgaacccattggtccctagagccacactataaccacagt

SEQ ID NO: 95572 - DNA, 80 bp, Homo sapiens
ccatgtgttaatctgctcccaggtgaacccattggtccctagagccacactataaccacagttgctgtagtgctcatcaa

SEQ ID NO: 95573 - DNA, 78 bp, Homo sapiens
ttaatctgctcccaggtgaacccattggtccctagagccacactataaccacagttgctgtagtgctcatcaaaggaa

SEQ ID NO: 95574 - DNA, 77 bp, Homo sapiens
aggtgaacccattggtccctagagccacactataaccacagttgctgtagtgctcatcaaaggaacagccacctgta

SEQ ID NO: 95575 - DNA, 78 bp, Homo sapiens
attggtccctagagccacactataaccacagttgctgtagtgctcatcaaaggaacagccacctgtagacaaaagaga

SEQ ID NO: 95576 - DNA, 79 bp, Homo sapiens
tagagccacactataaccacagttgctgtagtgctcatcaaaggaacagccacctgtagacaaaagagatatgggtaaa

SEQ ID NO: 95577 - DNA, 77 bp, Homo sapiens
acactataaccacagttgctgtagtgctcatcaaaggaacagccacctgtagacaaaagagatatgggtaaatacat

SEQ ID NO: 95578 - DNA, 78 bp, Homo sapiens
agcccaggggagccgggcgggcgcactcacctgcggcgctctgagcccgggcgccgggcagtggcggcagctgcagcc

SEQ ID NO: 95579 - DNA, 83 bp, Homo sapiens
agccgggcgggcgcactcacctgcggcgctctgagcccgggcgccgggcagtggcggcagctgcagcctcaggagcaggctga

SEQ ID NO: 95580 - DNA, 84 bp, Homo sapiens
actcacctgcggcgctctgagcccgggcgccgggcagtggcggcagctgcagcctcaggagcaggctgagggcgagcgcggcga

SEQ ID NO: 95581 - DNA, 85 bp, Homo sapiens
ggcgctctgagcccgggcgccgggcagtggcggcagctgcagcctcaggagcaggctgagggcgagcgcggcgaggctcgccatc

SEQ ID NO: 95582 - DNA, 83 bp, Homo sapiens
tctgagcccgggcgccgggcagtggcggcagctgcagcctcaggagcaggctgagggcgagcgcggcgaggctcgccatccgg

SEQ ID NO: 95583 - DNA, 82 bp, Homo sapiens
ccgggcagtggcggcagctgcagcctcaggagcaggctgagggcgagcgcggcgaggctcgccatccgggcggcggcgggca

SEQ ID NO: 95584 - DNA, 84 bp, Homo sapiens
agtggcggcagctgcagcctcaggagcaggctgagggcgagcgcggcgaggctcgccatccgggcggcggcgggcagctcagcc

SEQ ID NO: 95585 - DNA, 78 bp, Homo sapiens
agcctcaggagcaggctgagggcgagcgcggcgaggctcgccatccgggcggcggcgggcagctcagccccttcccgc

SEQ ID NO: 95586 - DNA, 75 bp, Homo sapiens
aggagcaggctgagggcgagcgcggcgaggctcgccatccgggcggcggcgggcagctcagccccttcccgcggg

SEQ ID NO: 95587 - DNA, 72 bp, Homo sapiens
ctgagggcgagcgcggcgaggctcgccatccgggcggcggcgggcagctcagccccttcccgcgggggccgg

SEQ ID NO: 95588 - DNA, 69 bp, Homo sapiens
ggcgaggctcgccatccgggcggcggcgggcagctcagccccttcccgcgggggccggggccgggactg

SEQ ID NO: 95589 - DNA, 67 bp, Homo sapiens
ctcgccatccgggcggcggcgggcagctcagccccttcccgcgggggccggggccgggactggggcg

SEQ ID NO: 95590 - DNA, 65 bp, Homo sapiens
gggcggcggcgggcagctcagccccttcccgcgggggccggggccgggactggggcgggcgcggg

SEQ ID NO: 95591 - DNA, 66 bp, Homo sapiens
agctcagccccttcccgcgggggccggggccgggactggggcgggcgcggggtggccccgcatcgc

SEQ ID NO: 95592 - DNA, 64 bp, Homo sapiens
ccttcccgcgggggccggggccgggactggggcgggcgcggggtggccccgcatcgccggcgcg

SEQ ID NO: 95593 - DNA, 75 bp, Homo sapiens
cgggactggggcgggcgcggggtggccccgcatcgccggcgcggccgctggctgtgcgcgcggctggctccgctc

SEQ ID NO: 95594 - DNA, 76 bp, Homo sapiens
gcgggcgcggggtggccccgcatcgccggcgcggccgctggctgtgcgcgcggctggctccgctcgggctcccgga

SEQ ID NO: 95595 - DNA, 77 bp, Homo sapiens
ggtggccccgcatcgccggcgcggccgctggctgtgcgcgcggctggctccgctcgggctcccggagccggcgctcc

SEQ ID NO: 95596 - DNA, 79 bp, Homo sapiens
cgcatcgccggcgcggccgctggctgtgcgcgcggctggctccgctcgggctcccggagccggcgctcctgcgttccaa

SEQ ID NO: 95597 - DNA, 77 bp, Homo sapiens
ccggcgcggccgctggctgtgcgcgcggctggctccgctcgggctcccggagccggcgctcctgcgttccaagccga

SEQ ID NO: 95598 - DNA, 79 bp, Homo sapiens
gctgtgcgcgcggctggctccgctcgggctcccggagccggcgctcctgcgttccaagccgaggcgcggcgcgaactga

SEQ ID NO: 95599 - DNA, 74 bp, Homo sapiens
cggctggctccgctcgggctcccggagccggcgctcctgcgttccaagccgaggcgcggcgcgaactgaggcgg

SEQ ID NO: 95600 - DNA, 74 bp, Homo sapiens
ggctccgctcgggctcccggagccggcgctcctgcgttccaagccgaggcgcggcgcgaactgaggcgggaggc

SEQ ID NO: 95601 - DNA, 72 bp, Homo sapiens
gggctcccggagccggcgctcctgcgttccaagccgaggcgcggcgcgaactgaggcgggaggctgggcggg

SEQ ID NO: 95602 - DNA, 72 bp, Homo sapiens
agccggcgctcctgcgttccaagccgaggcgcggcgcgaactgaggcgggaggctgggcgggggcgggacgc

SEQ ID NO: 95603 - DNA, 69 bp, Homo sapiens
cctgcgttccaagccgaggcgcggcgcgaactgaggcgggaggctgggcgggggcgggacgcggggggc

SEQ ID NO: 95604 - DNA, 66 bp, Homo sapiens
aagccgaggcgcggcgcgaactgaggcgggaggctgggcgggggcgggacgcggggggcggggggc

SEQ ID NO: 95605 - DNA, 80 bp, Homo sapiens
cgtgccgctgcgcgctgacatcacgctccaggccccgccccaccggccgcccatatagcgaaagcctggcgcgcgcgcgc

SEQ ID NO: 95606 - DNA, 80 bp, Homo sapiens
tgacatcacgctccaggccccgccccaccggccgcccatatagcgaaagcctggcgcgcgcgcgcgccattgtgtggctg

SEQ ID NO: 95607 - DNA, 78 bp, Homo sapiens
tcacgctccaggccccgccccaccggccgcccatatagcgaaagcctggcgcgcgcgcgcgccattgtgtggctggac

SEQ ID NO: 95608 - DNA, 75 bp, Homo sapiens
cccgccccaccggccgcccatatagcgaaagcctggcgcgcgcgcgcgccattgtgtggctggactcggccgccc

SEQ ID NO: 95609 - DNA, 78 bp, Homo sapiens
accggccgcccatatagcgaaagcctggcgcgcgcgcgcgccattgtgtggctggactcggccgcccctgtggtgtga

SEQ ID NO: 95610 - DNA, 79 bp, Homo sapiens
atatagcgaaagcctggcgcgcgcgcgcgccattgtgtggctggactcggccgcccctgtggtgtgaggcgcgtgttcg

SEQ ID NO: 95611 - DNA, 77 bp, Homo sapiens
aaagcctggcgcgcgcgcgcgccattgtgtggctggactcggccgcccctgtggtgtgaggcgcgtgttcgggctct

SEQ ID NO: 95612 - DNA, 76 bp, Homo sapiens
cgcgcgccattgtgtggctggactcggccgcccctgtggtgtgaggcgcgtgttcgggctcttgccgtccccgcac

SEQ ID NO: 95613 - DNA, 74 bp, Homo sapiens
attgtgtggctggactcggccgcccctgtggtgtgaggcgcgtgttcgggctcttgccgtccccgcacccgcac

SEQ ID NO: 95614 - DNA, 72 bp, Homo sapiens
tggactcggccgcccctgtggtgtgaggcgcgtgttcgggctcttgccgtccccgcacccgcaccgcggtta

SEQ ID NO: 95615 - DNA, 71 bp, Homo sapiens
cccctgtggtgtgaggcgcgtgttcgggctcttgccgtccccgcacccgcaccgcggttactggcttgcgg

SEQ ID NO: 95616 - DNA, 72 bp, Homo sapiens
tgtgaggcgcgtgttcgggctcttgccgtccccgcacccgcaccgcggttactggcttgcggtccgccgttc

SEQ ID NO: 95617 - DNA, 70 bp, Homo sapiens
gtgttcgggctcttgccgtccccgcacccgcaccgcggttactggcttgcggtccgccgttcgacaacca

SEQ ID NO: 95618 - DNA, 69 bp, Homo sapiens
ctcttgccgtccccgcacccgcaccgcggttactggcttgcggtccgccgttcgacaaccagcccttgg

SEQ ID NO: 95619 - DNA, 67 bp, Homo sapiens
cgtccccgcacccgcaccgcggttactggcttgcggtccgccgttcgacaaccagcccttgggtccc

SEQ ID NO: 95620 - DNA, 67 bp, Homo sapiens
accgcggttactggcttgcggtccgccgttcgacaaccagcccttgggtccccgcccgccacggaca

SEQ ID NO: 95621 - DNA, 72 bp, Homo sapiens
tactggcttgcggtccgccgttcgacaaccagcccttgggtccccgcccgccacggacatgccgcgcgtcta

SEQ ID NO: 95622 - DNA, 72 bp, Homo sapiens
ttgcggtccgccgttcgacaaccagcccttgggtccccgcccgccacggacatgccgcgcgtctacatagga

SEQ ID NO: 95623 - DNA, 74 bp, Homo sapiens
gttcgacaaccagcccttgggtccccgcccgccacggacatgccgcgcgtctacataggacgcctgagctacaa

SEQ ID NO: 95624 - DNA, 72 bp, Homo sapiens
cccttgggtccccgcccgccacggacatgccgcgcgtctacataggacgcctgagctacaacgtccgggaga

SEQ ID NO: 95625 - DNA, 76 bp, Homo sapiens
cccgcccgccacggacatgccgcgcgtctacataggacgcctgagctacaacgtccgggagaaggacatccagcgc

SEQ ID NO: 95626 - DNA, 76 bp, Homo sapiens
acggacatgccgcgcgtctacataggacgcctgagctacaacgtccgggagaaggacatccagcgctttttcagtg

SEQ ID NO: 95627 - DNA, 76 bp, Homo sapiens
ccgcgcgtctacataggacgcctgagctacaacgtccgggagaaggacatccagcgctttttcagtggctatggcc

SEQ ID NO: 95628 - DNA, 77 bp, Homo sapiens
tctacataggacgcctgagctacaacgtccgggagaaggacatccagcgctttttcagtggctatggccgcctcctc

SEQ ID NO: 95629 - DNA, 76 bp, Homo sapiens
ctgagctacaacgtccgggagaaggacatccagcgctttttcagtggctatggccgcctcctcgaagtagacctca

SEQ ID NO: 95630 - DNA, 73 bp, Homo sapiens
tacaacgtccgggagaaggacatccagcgctttttcagtggctatggccgcctcctcgaagtagacctcaaaa

SEQ ID NO: 95631 - DNA, 73 bp, Homo sapiens
agaaggacatccagcgctttttcagtggctatggccgcctcctcgaagtagacctcaaaaatgggtgagtcgg

SEQ ID NO: 95632 - DNA, 73 bp, Homo sapiens
acatccagcgctttttcagtggctatggccgcctcctcgaagtagacctcaaaaatgggtgagtcgggcctgg

SEQ ID NO: 95633 - DNA, 71 bp, Homo sapiens
ctttttcagtggctatggccgcctcctcgaagtagacctcaaaaatgggtgagtcgggcctgggcgcccgc

SEQ ID NO: 95634 - DNA, 68 bp, Homo sapiens
tggctaacgactcccccgcggttgtccggccctcgcaccgcccctaggtacggcttcgtggagttcga

SEQ ID NO: 95635 - DNA, 66 bp, Homo sapiens
acgactcccccgcggttgtccggccctcgcaccgcccctaggtacggcttcgtggagttcgaggac

SEQ ID NO: 95636 - DNA, 69 bp, Homo sapiens
gttgtccggccctcgcaccgcccctaggtacggcttcgtggagttcgaggactcccgcgacgccgacga

SEQ ID NO: 95637 - DNA, 68 bp, Homo sapiens
ctcgcaccgcccctaggtacggcttcgtggagttcgaggactcccgcgacgccgacgacgccgtttac

SEQ ID NO: 95638 - DNA, 68 bp, Homo sapiens
ccctaggtacggcttcgtggagttcgaggactcccgcgacgccgacgacgccgtttacgagctgaacg

SEQ ID NO: 95639 - DNA, 70 bp, Homo sapiens
ggtacggcttcgtggagttcgaggactcccgcgacgccgacgacgccgtttacgagctgaacggcaagga

SEQ ID NO: 95640 - DNA, 74 bp, Homo sapiens
cgtggagttcgaggactcccgcgacgccgacgacgccgtttacgagctgaacggcaaggagctctgcggcgagc

SEQ ID NO: 95641 - DNA, 76 bp, Homo sapiens
aggactcccgcgacgccgacgacgccgtttacgagctgaacggcaaggagctctgcggcgagcgcgtgatcgtaga

SEQ ID NO: 95642 - DNA, 75 bp, Homo sapiens
acgccgacgacgccgtttacgagctgaacggcaaggagctctgcggcgagcgcgtgatcgtagagcacgcccggg

SEQ ID NO: 95643 - DNA, 75 bp, Homo sapiens
acgccgtttacgagctgaacggcaaggagctctgcggcgagcgcgtgatcgtagagcacgcccggggcccgcgtc

SEQ ID NO: 95644 - DNA, 79 bp, Homo sapiens
tacgagctgaacggcaaggagctctgcggcgagcgcgtgatcgtagagcacgcccggggcccgcgtcgcgatcgcgacg

SEQ ID NO: 95645 - DNA, 78 bp, Homo sapiens
aaggagctctgcggcgagcgcgtgatcgtagagcacgcccggggcccgcgtcgcgatcgcgacggctacagctacgga

SEQ ID NO: 95646 - DNA, 80 bp, Homo sapiens
tgcggcgagcgcgtgatcgtagagcacgcccggggcccgcgtcgcgatcgcgacggctacagctacggaagccgcagtga

SEQ ID NO: 95647 - DNA, 76 bp, Homo sapiens
cgtgatcgtagagcacgcccggggcccgcgtcgcgatcgcgacggctacagctacggaagccgcagtgagtcccac

SEQ ID NO: 95648 - DNA, 74 bp, Homo sapiens
tcgtagagcacgcccggggcccgcgtcgcgatcgcgacggctacagctacggaagccgcagtgagtcccacccc

SEQ ID NO: 95649 - DNA, 72 bp, Homo sapiens
cccggggcccgcgtcgcgatcgcgacggctacagctacggaagccgcagtgagtcccacccccgcgcgctcc

SEQ ID NO: 95650 - DNA, 74 bp, Homo sapiens
ccgcgtcgcgatcgcgacggctacagctacggaagccgcagtgagtcccacccccgcgcgctccgcgcccttgg

SEQ ID NO: 95651 - DNA, 72 bp, Homo sapiens
atgttgaattcaaactttttaacaagtccttgatgtttcaatttgaaagtgaccaatggggctgaggctgtg

SEQ ID NO: 95652 - DNA, 73 bp, Homo sapiens
ttcaaactttttaacaagtccttgatgtttcaatttgaaagtgaccaatggggctgaggctgtgtccactgag

SEQ ID NO: 95653 - DNA, 78 bp, Homo sapiens
ttaacaagtccttgatgtttcaatttgaaagtgaccaatggggctgaggctgtgtccactgaggctaagatgactgcc

SEQ ID NO: 95654 - DNA, 79 bp, Homo sapiens
cttgatgtttcaatttgaaagtgaccaatggggctgaggctgtgtccactgaggctaagatgactgcctttcctgattg

SEQ ID NO: 95655 - DNA, 77 bp, Homo sapiens
tttgaaagtgaccaatggggctgaggctgtgtccactgaggctaagatgactgcctttcctgattggccttggcttt

SEQ ID NO: 95656 - DNA, 81 bp, Homo sapiens
caatggggctgaggctgtgtccactgaggctaagatgactgcctttcctgattggccttggcttttccatacattgtgtga

SEQ ID NO: 95657 - DNA, 80 bp, Homo sapiens
tgaggctgtgtccactgaggctaagatgactgcctttcctgattggccttggcttttccatacattgtgtgacccttgcc

SEQ ID NO: 95658 - DNA, 80 bp, Homo sapiens
tgtgtccactgaggctaagatgactgcctttcctgattggccttggcttttccatacattgtgtgacccttgccctatga

SEQ ID NO: 95659 - DNA, 77 bp, Homo sapiens
taagatgactgcctttcctgattggccttggcttttccatacattgtgtgacccttgccctatgaccctttggctga

SEQ ID NO: 95660 - DNA, 74 bp, Homo sapiens
tgcctttcctgattggccttggcttttccatacattgtgtgacccttgccctatgaccctttggctgaccttac

SEQ ID NO: 95661 - DNA, 73 bp, Homo sapiens
tcctgattggccttggcttttccatacattgtgtgacccttgccctatgaccctttggctgaccttaccggaa

SEQ ID NO: 95662 - DNA, 76 bp, Homo sapiens
gcttttccatacattgtgtgacccttgccctatgaccctttggctgaccttaccggaagccatgacgacagcagcc

SEQ ID NO: 95663 - DNA, 76 bp, Homo sapiens
tacattgtgtgacccttgccctatgaccctttggctgaccttaccggaagccatgacgacagcagccttttgccat

SEQ ID NO: 95664 - DNA, 74 bp, Homo sapiens
acccttgccctatgaccctttggctgaccttaccggaagccatgacgacagcagccttttgccattagacgcag

SEQ ID NO: 95665 - DNA, 77 bp, Homo sapiens
cctatgaccctttggctgaccttaccggaagccatgacgacagcagccttttgccattagacgcagggtgatggtga

SEQ ID NO: 95666 - DNA, 77 bp, Homo sapiens
ctttggctgaccttaccggaagccatgacgacagcagccttttgccattagacgcagggtgatggtgaggattccaa

SEQ ID NO: 95667 - DNA, 76 bp, Homo sapiens
ttaccggaagccatgacgacagcagccttttgccattagacgcagggtgatggtgaggattccaagggttagacaa

SEQ ID NO: 95668 - DNA, 75 bp, Homo sapiens
catgacgacagcagccttttgccattagacgcagggtgatggtgaggattccaagggttagacaaaactggttaa

SEQ ID NO: 95669 - DNA, 74 bp, Homo sapiens
gcagccttttgccattagacgcagggtgatggtgaggattccaagggttagacaaaactggttaatctgaacta

SEQ ID NO: 95670 - DNA, 73 bp, Homo sapiens
ttttgccattagacgcagggtgatggtgaggattccaagggttagacaaaactggttaatctgaactaggtga

SEQ ID NO: 95671 - DNA, 70 bp, Homo sapiens
acgcagggtgatggtgaggattccaagggttagacaaaactggttaatctgaactaggtgactgttacct

SEQ ID NO: 95672 - DNA, 69 bp, Homo sapiens
atggtgaggattccaagggttagacaaaactggttaatctgaactaggtgactgttaccttgcgtgttt

SEQ ID NO: 95673 - DNA, 69 bp, Homo sapiens
attccaagggttagacaaaactggttaatctgaactaggtgactgttaccttgcgtgttttgtggccaa

SEQ ID NO: 95674 - DNA, 70 bp, Homo sapiens
ttagacaaaactggttaatctgaactaggtgactgttaccttgcgtgttttgtggccaaaccaccaccaa

SEQ ID NO: 95675 - DNA, 71 bp, Homo sapiens
actaggtgactgttaccttgcgtgttttgtggccaaaccaccaccaaaaacctcacactgtgatgtaagta

SEQ ID NO: 95676 - DNA, 71 bp, Homo sapiens
tgttaccttgcgtgttttgtggccaaaccaccaccaaaaacctcacactgtgatgtaagtacttagtgtaa

SEQ ID NO: 95677 - DNA, 69 bp, Homo sapiens
cgtgttttgtggccaaaccaccaccaaaaacctcacactgtgatgtaagtacttagtgtaaaactagta

SEQ ID NO: 95678 - DNA, 68 bp, Homo sapiens
tggccaaaccaccaccaaaaacctcacactgtgatgtaagtacttagtgtaaaactagtaaacatttt

SEQ ID NO: 95679 - DNA, 76 bp, Homo sapiens
tttttatcattacaaggcatctaattgttcccttcatgtgataaaggtggtggaggtggatacagcagtcggagaa

SEQ ID NO: 95680 - DNA, 80 bp, Homo sapiens
atcattacaaggcatctaattgttcccttcatgtgataaaggtggtggaggtggatacagcagtcggagaacatctggca

SEQ ID NO: 95681 - DNA, 78 bp, Homo sapiens
atctaattgttcccttcatgtgataaaggtggtggaggtggatacagcagtcggagaacatctggcagagacaaatac

SEQ ID NO: 95682 - DNA, 78 bp, Homo sapiens
tgttcccttcatgtgataaaggtggtggaggtggatacagcagtcggagaacatctggcagagacaaatacggaccac

SEQ ID NO: 95683 - DNA, 76 bp, Homo sapiens
ataaaggtggtggaggtggatacagcagtcggagaacatctggcagagacaaatacggaccacctgttcgtacaga

SEQ ID NO: 95684 - DNA, 78 bp, Homo sapiens
tggaggtggatacagcagtcggagaacatctggcagagacaaatacggaccacctgttcgtacagaatacaggcttat

SEQ ID NO: 95685 - DNA, 77 bp, Homo sapiens
atacagcagtcggagaacatctggcagagacaaatacggaccacctgttcgtacagaatacaggcttattgtagaaa

SEQ ID NO: 95686 - DNA, 75 bp, Homo sapiens
ggagaacatctggcagagacaaatacggaccacctgttcgtacagaatacaggcttattgtagaaaatctttcta

SEQ ID NO: 95687 - DNA, 73 bp, Homo sapiens
atctggcagagacaaatacggaccacctgttcgtacagaatacaggcttattgtagaaaatctttctagtcgg

SEQ ID NO: 95688 - DNA, 72 bp, Homo sapiens
aaatacggaccacctgttcgtacagaatacaggcttattgtagaaaatctttctagtcggtgcagttggcaa

SEQ ID NO: 95689 - DNA, 72 bp, Homo sapiens
accacctgttcgtacagaatacaggcttattgtagaaaatctttctagtcggtgcagttggcaagatttaaa

SEQ ID NO: 95690 - DNA, 72 bp, Homo sapiens
ttcgtacagaatacaggcttattgtagaaaatctttctagtcggtgcagttggcaagatttaaaggtatgtt

SEQ ID NO: 95691 - DNA, 72 bp, Homo sapiens
caggcttattgtagaaaatctttctagtcggtgcagttggcaagatttaaaggtatgttttgtaattcaaga

SEQ ID NO: 95692 - DNA, 73 bp, Homo sapiens
gtagaaaatctttctagtcggtgcagttggcaagatttaaaggtatgttttgtaattcaagatagaaatgata

SEQ ID NO: 95693 - DNA, 75 bp, Homo sapiens
atatagatgttttaagatttccgagtctgaccaatcttgtctttcaggattttatgcgacaagcaggtgaagtaa

SEQ ID NO: 95694 - DNA, 73 bp, Homo sapiens
atgttttaagatttccgagtctgaccaatcttgtctttcaggattttatgcgacaagcaggtgaagtaaccta

SEQ ID NO: 95695 - DNA, 77 bp, Homo sapiens
atttccgagtctgaccaatcttgtctttcaggattttatgcgacaagcaggtgaagtaacctatgcggatgcccaca

SEQ ID NO: 95696 - DNA, 75 bp, Homo sapiens
caatcttgtctttcaggattttatgcgacaagcaggtgaagtaacctatgcggatgcccacaaggaacgaacaaa

SEQ ID NO: 95697 - DNA, 75 bp, Homo sapiens
tttcaggattttatgcgacaagcaggtgaagtaacctatgcggatgcccacaaggaacgaacaaatgagggtgta

SEQ ID NO: 95698 - DNA, 74 bp, Homo sapiens
attttatgcgacaagcaggtgaagtaacctatgcggatgcccacaaggaacgaacaaatgagggtgtaattgag

SEQ ID NO: 95699 - DNA, 73 bp, Homo sapiens
aagcaggtgaagtaacctatgcggatgcccacaaggaacgaacaaatgagggtgtaattgagtttcgctccta

SEQ ID NO: 95700 - DNA, 75 bp, Homo sapiens
aagtaacctatgcggatgcccacaaggaacgaacaaatgagggtgtaattgagtttcgctcctactctgacatga

SEQ ID NO: 95701 - DNA, 78 bp, Homo sapiens
tatgcggatgcccacaaggaacgaacaaatgagggtgtaattgagtttcgctcctactctgacatgaagcgtgctttg

SEQ ID NO: 95702 - DNA, 74 bp, Homo sapiens
acaaggaacgaacaaatgagggtgtaattgagtttcgctcctactctgacatgaagcgtgctttggacaaactg

SEQ ID NO: 95703 - DNA, 78 bp, Homo sapiens
acaaatgagggtgtaattgagtttcgctcctactctgacatgaagcgtgctttggacaaactggatggcacagaaata

SEQ ID NO: 95704 - DNA, 78 bp, Homo sapiens
agggtgtaattgagtttcgctcctactctgacatgaagcgtgctttggacaaactggatggcacagaaataaatggca

SEQ ID NO: 95705 - DNA, 79 bp, Homo sapiens
attgagtttcgctcctactctgacatgaagcgtgctttggacaaactggatggcacagaaataaatggcagaaatatta

SEQ ID NO: 95706 - DNA, 78 bp, Homo sapiens
acatgaagcgtgctttggacaaactggatggcacagaaataaatggcagaaatattaggcttattgaagataagccac

SEQ ID NO: 95707 - DNA, 78 bp, Homo sapiens
tttggacaaactggatggcacagaaataaatggcagaaatattaggcttattgaagataagccacgcacaagccatag

SEQ ID NO: 95708 - DNA, 79 bp, Homo sapiens
aactggatggcacagaaataaatggcagaaatattaggcttattgaagataagccacgcacaagccataggcgatctta

SEQ ID NO: 95709 - DNA, 79 bp, Homo sapiens
acagaaataaatggcagaaatattaggcttattgaagataagccacgcacaagccataggcgatcttactctggaagca

SEQ ID NO: 95710 - DNA, 80 bp, Homo sapiens
ataaatggcagaaatattaggcttattgaagataagccacgcacaagccataggcgatcttactctggaagcagatccag

SEQ ID NO: 95711 - DNA, 77 bp, Homo sapiens
aatattaggcttattgaagataagccacgcacaagccataggcgatcttactctggaagcagatccaggtaacttgt

SEQ ID NO: 95712 - DNA, 79 bp, Homo sapiens
ttattgaagataagccacgcacaagccataggcgatcttactctggaagcagatccaggtaacttgttgaaggacactg

SEQ ID NO: 95713 - DNA, 77 bp, Homo sapiens
ataagccacgcacaagccataggcgatcttactctggaagcagatccaggtaacttgttgaaggacactgtgggaag

SEQ ID NO: 95714 - DNA, 71 bp, Homo sapiens
acggatgtatttaagttggattgggattaagacttcattgtttttctcctaataggtctcgatctagaaga

SEQ ID NO: 95715 - DNA, 71 bp, Homo sapiens
tatttaagttggattgggattaagacttcattgtttttctcctaataggtctcgatctagaagacggtcac

SEQ ID NO: 95716 - DNA, 71 bp, Homo sapiens
attgggattaagacttcattgtttttctcctaataggtctcgatctagaagacggtcacgaagtaggagtc

SEQ ID NO: 95717 - DNA, 75 bp, Homo sapiens
ttaagacttcattgtttttctcctaataggtctcgatctagaagacggtcacgaagtaggagtcgcaggagcagc

SEQ ID NO: 95718 - DNA, 77 bp, Homo sapiens
ttgtttttctcctaataggtctcgatctagaagacggtcacgaagtaggagtcgcaggagcagccgcagtagatctc

SEQ ID NO: 95719 - DNA, 79 bp, Homo sapiens
taataggtctcgatctagaagacggtcacgaagtaggagtcgcaggagcagccgcagtagatctcgaagtatctcaaaa

SEQ ID NO: 95720 - DNA, 80 bp, Homo sapiens
tctcgatctagaagacggtcacgaagtaggagtcgcaggagcagccgcagtagatctcgaagtatctcaaaaagtcgctc

SEQ ID NO: 95721 - DNA, 75 bp, Homo sapiens
cggtcacgaagtaggagtcgcaggagcagccgcagtagatctcgaagtatctcaaaaagtcgctcccggtaaata

SEQ ID NO: 95722 - DNA, 73 bp, Homo sapiens
aagtaggagtcgcaggagcagccgcagtagatctcgaagtatctcaaaaagtcgctcccggtaaataacgttg

SEQ ID NO: 95723 - DNA, 77 bp, Homo sapiens
caggagcagccgcagtagatctcgaagtatctcaaaaagtcgctcccggtaaataacgttgtgttgagtcactgtga

SEQ ID NO: 95724 - DNA, 74 bp, Homo sapiens
ccgcagtagatctcgaagtatctcaaaaagtcgctcccggtaaataacgttgtgttgagtcactgtgaatatta

SEQ ID NO: 95725 - DNA, 73 bp, Homo sapiens
tagatctcgaagtatctcaaaaagtcgctcccggtaaataacgttgtgttgagtcactgtgaatattaccgta

SEQ ID NO: 95726 - DNA, 74 bp, Homo sapiens
tatgtgtacattctcactaagtattgagaaaatcggtctttccttgtccagttccaggtcgcggagcaaaggtc

SEQ ID NO: 95727 - DNA, 71 bp, Homo sapiens
actaagtattgagaaaatcggtctttccttgtccagttccaggtcgcggagcaaaggtcgatcacgttctc

SEQ ID NO: 95728 - DNA, 73 bp, Homo sapiens
tattgagaaaatcggtctttccttgtccagttccaggtcgcggagcaaaggtcgatcacgttctcgatcaaaa

SEQ ID NO: 95729 - DNA, 72 bp, Homo sapiens
aatcggtctttccttgtccagttccaggtcgcggagcaaaggtcgatcacgttctcgatcaaaaggcaggaa

SEQ ID NO: 95730 - DNA, 77 bp, Homo sapiens
ttgtccagttccaggtcgcggagcaaaggtcgatcacgttctcgatcaaaaggcaggaaatctagatcaaagagcaa

SEQ ID NO: 95731 - DNA, 76 bp, Homo sapiens
gttccaggtcgcggagcaaaggtcgatcacgttctcgatcaaaaggcaggaaatctagatcaaagagcaaatctaa

SEQ ID NO: 95732 - DNA, 77 bp, Homo sapiens
agcaaaggtcgatcacgttctcgatcaaaaggcaggaaatctagatcaaagagcaaatctaagcccaagtctgatcg

SEQ ID NO: 95733 - DNA, 76 bp, Homo sapiens
atcacgttctcgatcaaaaggcaggaaatctagatcaaagagcaaatctaagcccaagtctgatcggggctcccat

SEQ ID NO: 95734 - DNA, 78 bp, Homo sapiens
ttctcgatcaaaaggcaggaaatctagatcaaagagcaaatctaagcccaagtctgatcggggctcccattcacattc

SEQ ID NO: 95735 - DNA, 80 bp, Homo sapiens
aaatctagatcaaagagcaaatctaagcccaagtctgatcggggctcccattcacattctcgaagcagatctaaggatga

SEQ ID NO: 95736 - DNA, 81 bp, Homo sapiens
atctaagcccaagtctgatcggggctcccattcacattctcgaagcagatctaaggatgagtatgagaaatctcgaagcag

SEQ ID NO: 95737 - DNA, 80 bp, Homo sapiens
aagtctgatcggggctcccattcacattctcgaagcagatctaaggatgagtatgagaaatctcgaagcaggtctcggtc

SEQ ID NO: 95738 - DNA, 78 bp, Homo sapiens
tcccattcacattctcgaagcagatctaaggatgagtatgagaaatctcgaagcaggtctcggtcccgatcccctaaa

SEQ ID NO: 95739 - DNA, 75 bp, Homo sapiens
acattctcgaagcagatctaaggatgagtatgagaaatctcgaagcaggtctcggtcccgatcccctaaagaaaa

SEQ ID NO: 95740 - DNA, 74 bp, Homo sapiens
cgaagcagatctaaggatgagtatgagaaatctcgaagcaggtctcggtcccgatcccctaaagaaaatggaaa

SEQ ID NO: 95741 - DNA, 72 bp, Homo sapiens
aggatgagtatgagaaatctcgaagcaggtctcggtcccgatcccctaaagaaaatggaaagggtgatataa

SEQ ID NO: 95742 - DNA, 71 bp, Homo sapiens
tatgagaaatctcgaagcaggtctcggtcccgatcccctaaagaaaatggaaagggtgatataaagtcaaa

SEQ ID NO: 95743 - DNA, 72 bp, Homo sapiens
tctcgaagcaggtctcggtcccgatcccctaaagaaaatggaaagggtgatataaagtcaaaatccagatca

SEQ ID NO: 95744 - DNA, 71 bp, Homo sapiens
tctcggtcccgatcccctaaagaaaatggaaagggtgatataaagtcaaaatccagatcaaggagccagtc

SEQ ID NO: 95745 - DNA, 69 bp, Homo sapiens
tcccctaaagaaaatggaaagggtgatataaagtcaaaatccagatcaaggagccagtcccgttccaat

SEQ ID NO: 95746 - DNA, 70 bp, Homo sapiens
aaaatggaaagggtgatataaagtcaaaatccagatcaaggagccagtcccgttccaattcgccgctacc

SEQ ID NO: 95747 - DNA, 72 bp, Homo sapiens
tataaagtcaaaatccagatcaaggagccagtcccgttccaattcgccgctacctgttccaccctcaaaggc

SEQ ID NO: 95748 - DNA, 67 bp, Homo sapiens
tcccgttccaattcgccgctacctgttccaccctcaaaggcccgttctgtgtcccctccaccaaaaa

SEQ ID NO: 95749 - DNA, 72 bp, Homo sapiens
ctcaaaggcccgttctgtgtcccctccaccaaaaagagctacttcaagatcccgttctagatctcgctcaaa

SEQ ID NO: 95750 - DNA, 74 bp, Homo sapiens
ccgttctgtgtcccctccaccaaaaagagctacttcaagatcccgttctagatctcgctcaaagtcaagatcaa

SEQ ID NO: 95751 - DNA, 76 bp, Homo sapiens
aaagagctacttcaagatcccgttctagatctcgctcaaagtcaagatcaaggtccaggtcgagttccagagatta

SEQ ID NO: 95752 - DNA, 74 bp, Homo sapiens
ccgttctagatctcgctcaaagtcaagatcaaggtccaggtcgagttccagagattaactcagaactccttgtt

SEQ ID NO: 95753 - DNA, 77 bp, Homo sapiens
atctcgctcaaagtcaagatcaaggtccaggtcgagttccagagattaactcagaactccttgtttgcacattatta

SEQ ID NO: 95754 - DNA, 75 bp, Homo sapiens
aaagtcaagatcaaggtccaggtcgagttccagagattaactcagaactccttgtttgcacattattatggaaca

SEQ ID NO: 95755 - DNA, 72 bp, Homo sapiens
aaggtccaggtcgagttccagagattaactcagaactccttgtttgcacattattatggaacactttcctac

SEQ ID NO: 95756 - DNA, 74 bp, Homo sapiens
gtcgagttccagagattaactcagaactccttgtttgcacattattatggaacactttcctacttaggcagtta

SEQ ID NO: 95757 - DNA, 73 bp, Homo sapiens
agattaactcagaactccttgtttgcacattattatggaacactttcctacttaggcagttactcttccatgt

SEQ ID NO: 95758 - DNA, 73 bp, Homo sapiens
aactcagaactccttgtttgcacattattatggaacactttcctacttaggcagttactcttccatgtttata

SEQ ID NO: 95759 - DNA, 73 bp, Homo sapiens
cttgtttgcacattattatggaacactttcctacttaggcagttactcttccatgtttatacttggcctcttc

SEQ ID NO: 95760 - DNA, 73 bp, Homo sapiens
attattatggaacactttcctacttaggcagttactcttccatgtttatacttggcctcttctgcaagaggaa

SEQ ID NO: 95761 - DNA, 73 bp, Homo sapiens
acactttcctacttaggcagttactcttccatgtttatacttggcctcttctgcaagaggaatctcttgaaaa

SEQ ID NO: 95762 - DNA, 76 bp, Homo sapiens
tacttaggcagttactcttccatgtttatacttggcctcttctgcaagaggaatctcttgaaaacaggggcacaca

SEQ ID NO: 95763 - DNA, 75 bp, Homo sapiens
ttactcttccatgtttatacttggcctcttctgcaagaggaatctcttgaaaacaggggcacacagaaatttgat
